United States Patent Application Publication US 2018/0305689 A1 - sequence listing, part 57

SEQ ID NO: 813870 - RNA, 19 nt, Artificial Sequence
  Description of Artificial Sequence: Synthetic oligonucleotide
  Sense strand starting at position 624 of SEQ ID NO: 587726
ucuggaaaugccuagccau

SEQ ID NO: 813871 - RNA, 19 nt, Artificial Sequence
  Description of Artificial Sequence: Synthetic oligonucleotide
  Antisense strand to SEQ ID NO: 813870
auggcuaggcauuuccaga

SEQ ID NO: 813872 - RNA, 19 nt, Artificial Sequence
  Description of Artificial Sequence: Synthetic oligonucleotide
  Sense strand starting at position 887 of SEQ ID NO: 587726
gcagguaguuaagugaaua

SEQ ID NO: 813873 - RNA, 19 nt, Artificial Sequence
  Description of Artificial Sequence: Synthetic oligonucleotide
  Antisense strand to SEQ ID NO: 813872
uauucacuuaacuaccugc

SEQ ID NO: 813874 - RNA, 19 nt, Artificial Sequence
  Description of Artificial Sequence: Synthetic oligonucleotide
  Sense strand starting at position 1029 of SEQ ID NO: 587726
ggcagagaugcucauuaga

SEQ ID NO: 813875 - RNA, 19 nt, Artificial Sequence
  Description of Artificial Sequence: Synthetic oligonucleotide
  Antisense strand to SEQ ID NO: 813874
ucuaaugagcaucucugcc

SEQ ID NO: 813876 - RNA, 19 nt, Artificial Sequence
  Description of Artificial Sequence: Synthetic oligonucleotide
  Sense strand starting at position 1031 of SEQ ID NO: 587726
cagagaugcucauuagagg

SEQ ID NO: 813877 - RNA, 19 nt, Artificial Sequence
  Description of Artificial Sequence: Synthetic oligonucleotide
  Antisense strand to SEQ ID NO: 813876
ccucuaaugagcaucucug

SEQ ID NO: 813878 - RNA, 19 nt, Artificial Sequence
  Description of Artificial Sequence: Synthetic oligonucleotide
  Sense strand starting at position 2532 of SEQ ID NO: 587726
ucgagaguagcuguugcuu

SEQ ID NO: 813879 - RNA, 19 nt, Artificial Sequence
  Description of Artificial Sequence: Synthetic oligonucleotide
  Antisense strand to SEQ ID NO: 813878
aagcaacagcuacucucga

SEQ ID NO: 813880 - RNA, 19 nt, Artificial Sequence
  Description of Artificial Sequence: Synthetic oligonucleotide
  Sense strand starting at position 2546 of SEQ ID NO: 587726
ugcuucguucguuugauac

SEQ ID NO: 813881 - RNA, 19 nt, Artificial Sequence
  Description of Artificial Sequence: Synthetic oligonucleotide
  Antisense strand to SEQ ID NO: 813880
guaucaaacgaacgaagca

SEQ ID NO: 813882 - RNA, 19 nt, Artificial Sequence
  Description of Artificial Sequence: Synthetic oligonucleotide
  Sense strand starting at position 2640 of SEQ ID NO: 587726
gcaagagggaguugugaug

SEQ ID NO: 813883 - RNA, 19 nt, Artificial Sequence
  Description of Artificial Sequence: Synthetic oligonucleotide
  Antisense strand to SEQ ID NO: 813882
caucacaacucccucuugc

SEQ ID NO: 813884 - RNA, 19 nt, Artificial Sequence
  Description of Artificial Sequence: Synthetic oligonucleotide
  Sense strand starting at position 2649 of SEQ ID NO: 587726
aguugugaugagggaauua

SEQ ID NO: 813885 - RNA, 19 nt, Artificial Sequence
  Description of Artificial Sequence: Synthetic oligonucleotide
  Antisense strand to SEQ ID NO: 813884
uaauucccucaucacaacu

SEQ ID NO: 813886 - RNA, 19 nt, Artificial Sequence
  Description of Artificial Sequence: Synthetic oligonucleotide
  Sense strand starting at position 2659 of SEQ ID NO: 587726
agggaauuaucucuguagc

SEQ ID NO: 813887 - RNA, 19 nt, Artificial Sequence
  Description of Artificial Sequence: Synthetic oligonucleotide
  Antisense strand to SEQ ID NO: 813886
gcuacagagauaauucccu

SEQ ID NO: 813888 - RNA, 19 nt, Artificial Sequence
  Description of Artificial Sequence: Synthetic oligonucleotide
  Sense strand starting at position 2662 of SEQ ID NO: 587726
gaauuaucucuguagcgua

SEQ ID NO: 813889 - RNA, 19 nt, Artificial Sequence
  Description of Artificial Sequence: Synthetic oligonucleotide
  Antisense strand to SEQ ID NO: 813888
uacgcuacagagauaauuc

SEQ ID NO: 813890 - RNA, 19 nt, Artificial Sequence
  Description of Artificial Sequence: Synthetic oligonucleotide
  Sense strand starting at position 2677 of SEQ ID NO: 587726
cguagaugugugcucacgu

SEQ ID NO: 813891 - RNA, 19 nt, Artificial Sequence
  Description of Artificial Sequence: Synthetic oligonucleotide
  Antisense strand to SEQ ID NO: 813890
acgugagcacacaucuacg

SEQ ID NO: 813892 - RNA, 19 nt, Artificial Sequence
  Description of Artificial Sequence: Synthetic oligonucleotide
  Sense strand starting at position 2684 of SEQ ID NO: 587726
gugugcucacguucucuga

SEQ ID NO: 813893 - RNA, 19 nt, Artificial Sequence
  Description of Artificial Sequence: Synthetic oligonucleotide
  Antisense strand to SEQ ID NO: 813892
ucagagaacgugagcacac

SEQ ID NO: 813894 - RNA, 19 nt, Artificial Sequence
  Description of Artificial Sequence: Synthetic oligonucleotide
  Sense strand starting at position 2810 of SEQ ID NO: 587726
ccauuucuguuccaugaga

SEQ ID NO: 813895 - RNA, 19 nt, Artificial Sequence
  Description of Artificial Sequence: Synthetic oligonucleotide
  Antisense strand to SEQ ID NO: 813894
ucucauggaacagaaaugg

SEQ ID NO: 813896 - RNA, 19 nt, Artificial Sequence
  Description of Artificial Sequence: Synthetic oligonucleotide
  Sense strand starting at position 2823 of SEQ ID NO: 587726
augagauuguuuccaccuc

SEQ ID NO: 813897 - RNA, 19 nt, Artificial Sequence
  Description of Artificial Sequence: Synthetic oligonucleotide
  Antisense strand to SEQ ID NO: 813896
gagguggaaacaaucucau

SEQ ID NO: 813898 - RNA, 19 nt, Artificial Sequence
  Description of Artificial Sequence: Synthetic oligonucleotide
  Sense strand starting at position 2829 of SEQ ID NO: 587726
uuguuuccaccucagauga

SEQ ID NO: 813899 - RNA, 19 nt, Artificial Sequence
  Description of Artificial Sequence: Synthetic oligonucleotide
  Antisense strand to SEQ ID NO: 813898
ucaucugagguggaaacaa

SEQ ID NO: 813900 - RNA, 19 nt, Artificial Sequence
  Description of Artificial Sequence: Synthetic oligonucleotide
  Sense strand starting at position 2891 of SEQ ID NO: 587726
gauaucuucgagggcucuu

SEQ ID NO: 813901 - RNA, 19 nt, Artificial Sequence
  Description of Artificial Sequence: Synthetic oligonucleotide
  Antisense strand to SEQ ID NO: 813900
aagagcccucgaagauauc

SEQ ID NO: 813902 - RNA, 19 nt, Artificial Sequence
  Description of Artificial Sequence: Synthetic oligonucleotide
  Sense strand starting at position 2938 of SEQ ID NO: 587726
augggauaguggcuucuga

SEQ ID NO: 813903 - RNA, 19 nt, Artificial Sequence
  Description of Artificial Sequence: Synthetic oligonucleotide
  Antisense strand to SEQ ID NO: 813902
ucagaagccacuaucccau

SEQ ID NO: 813904 - RNA, 19 nt, Artificial Sequence
  Description of Artificial Sequence: Synthetic oligonucleotide
  Sense strand starting at position 2975 of SEQ ID NO: 587726
cagauagagcauugcacuu

SEQ ID NO: 813905 - RNA, 19 nt, Artificial Sequence
  Description of Artificial Sequence: Synthetic oligonucleotide
  Antisense strand to SEQ ID NO: 813904
aagugcaaugcucuaucug

SEQ ID NO: 813906 - RNA, 19 nt, Artificial Sequence
  Description of Artificial Sequence: Synthetic oligonucleotide
  Sense strand starting at position 2990 of SEQ ID NO: 587726
acuuaucuucccuaguguu

SEQ ID NO: 813907 - RNA, 19 nt, Artificial Sequence
  Description of Artificial Sequence: Synthetic oligonucleotide
  Antisense strand to SEQ ID NO: 813906
aacacuagggaagauaagu

SEQ ID NO: 813908 - RNA, 19 nt, Artificial Sequence
  Description of Artificial Sequence: Synthetic oligonucleotide
  Sense strand starting at position 3011 of SEQ ID NO: 587726
ccaauaaguugacuuugau

SEQ ID NO: 813909 - RNA, 19 nt, Artificial Sequence
  Description of Artificial Sequence: Synthetic oligonucleotide
  Antisense strand to SEQ ID NO: 813908
aucaaagucaacuuauugg

SEQ ID NO: 813910 - RNA, 19 nt, Artificial Sequence
  Description of Artificial Sequence: Synthetic oligonucleotide
  Sense strand starting at position 3208 of SEQ ID NO: 587726
ccagguuacccauggaacu

SEQ ID NO: 813911 - RNA, 19 nt, Artificial Sequence
  Description of Artificial Sequence: Synthetic oligonucleotide
  Antisense strand to SEQ ID NO: 813910
aguuccauggguaaccugg

SEQ ID NO: 813912 - RNA, 19 nt, Artificial Sequence
  Description of Artificial Sequence: Synthetic oligonucleotide
  Sense strand starting at position 3209 of SEQ ID NO: 587726
cagguuacccauggaacuu

SEQ ID NO: 813913 - RNA, 19 nt, Artificial Sequence
  Description of Artificial Sequence: Synthetic oligonucleotide
  Antisense strand to SEQ ID NO: 813912
aaguuccauggguaaccug

SEQ ID NO: 813914 - RNA, 19 nt, Artificial Sequence
  Description of Artificial Sequence: Synthetic oligonucleotide
  Sense strand starting at position 3309 of SEQ ID NO: 587726
augggcuucccauaaauug

SEQ ID NO: 813915 - RNA, 19 nt, Artificial Sequence
  Description of Artificial Sequence: Synthetic oligonucleotide
  Antisense strand to SEQ ID NO: 813914
caauuuaugggaagcccau

SEQ ID NO: 813916 - RNA, 19 nt, Artificial Sequence
  Description of Artificial Sequence: Synthetic oligonucleotide
  Sense strand starting at position 3396 of SEQ ID NO: 587726
gaugguguagccuagugau

SEQ ID NO: 813917 - RNA, 19 nt, Artificial Sequence
  Description of Artificial Sequence: Synthetic oligonucleotide
  Antisense strand to SEQ ID NO: 813916
aucacuaggcuacaccauc

SEQ ID NO: 813918 - RNA, 19 nt, Artificial Sequence
  Description of Artificial Sequence: Synthetic oligonucleotide
  Sense strand starting at position 3402 of SEQ ID NO: 587726
guagccuagugauuaagag

SEQ ID NO: 813919 - RNA, 19 nt, Artificial Sequence
  Description of Artificial Sequence: Synthetic oligonucleotide
  Antisense strand to SEQ ID NO: 813918
cucuuaaucacuaggcuac

SEQ ID NO: 813920 - RNA, 19 nt, Artificial Sequence
  Description of Artificial Sequence: Synthetic oligonucleotide
  Sense strand starting at position 3403 of SEQ ID NO: 587726
uagccuagugauuaagagu

SEQ ID NO: 813921 - RNA, 19 nt, Artificial Sequence
  Description of Artificial Sequence: Synthetic oligonucleotide
  Antisense strand to SEQ ID NO: 813920
acucuuaaucacuaggcua

SEQ ID NO: 813922 - RNA, 19 nt, Artificial Sequence
  Description of Artificial Sequence: Synthetic oligonucleotide
  Sense strand starting at position 3531 of SEQ ID NO: 587726
aaguaauagcagggcugua

SEQ ID NO: 813923 - RNA, 19 nt, Artificial Sequence
  Description of Artificial Sequence: Synthetic oligonucleotide
  Antisense strand to SEQ ID NO: 813922
uacagcccugcuauuacuu

SEQ ID NO: 813924 - RNA, 19 nt, Artificial Sequence
  Description of Artificial Sequence: Synthetic oligonucleotide
  Sense strand starting at position 3544 of SEQ ID NO: 587726
gcuguauuaagagaguuga

SEQ ID NO: 813925 - RNA, 19 nt, Artificial Sequence
  Description of Artificial Sequence: Synthetic oligonucleotide
  Antisense strand to SEQ ID NO: 813924
ucaacucucuuaauacagc

SEQ ID NO: 813926 - RNA, 19 nt, Artificial Sequence
  Description of Artificial Sequence: Synthetic oligonucleotide
  Sense strand starting at position 3560 of SEQ ID NO: 587726
ugacauauauagcuugcua

SEQ ID NO: 813927 - RNA, 19 nt, Artificial Sequence
  Description of Artificial Sequence: Synthetic oligonucleotide
  Antisense strand to SEQ ID NO: 813926
uagcaagcuauauauguca

SEQ ID NO: 813928 - RNA, 19 nt, Artificial Sequence
  Description of Artificial Sequence: Synthetic oligonucleotide
  Sense strand starting at position 3562 of SEQ ID NO: 587726
acauauauagcuugcuaag

SEQ ID NO: 813929 - RNA, 19 nt, Artificial Sequence
  Description of Artificial Sequence: Synthetic oligonucleotide
  Antisense strand to SEQ ID NO: 813928
cuuagcaagcuauauaugu

SEQ ID NO: 813930 - RNA, 19 nt, Artificial Sequence
  Description of Artificial Sequence: Synthetic oligonucleotide
  Sense strand starting at position 3564 of SEQ ID NO: 587726
auauauagcuugcuaagaa

SEQ ID NO: 813931 - RNA, 19 nt, Artificial Sequence
  Description of Artificial Sequence: Synthetic oligonucleotide
  Antisense strand to SEQ ID NO: 813930
uucuuagcaagcuauauau

SEQ ID NO: 813932 - RNA, 19 nt, Artificial Sequence
  Description of Artificial Sequence: Synthetic oligonucleotide
  Sense strand starting at position 3603 of SEQ ID NO: 587726
auauaaguguuagcuauuc

SEQ ID NO: 813933 - RNA, 19 nt, Artificial Sequence
  Description of Artificial Sequence: Synthetic oligonucleotide
  Antisense strand to SEQ ID NO: 813932
gaauagcuaacacuuauau

SEQ ID NO: 813934 - RNA, 19 nt, Artificial Sequence
  Description of Artificial Sequence: Synthetic oligonucleotide
  Sense strand starting at position 3706 of SEQ ID NO: 587726
uucuauuguuagguacuaa

SEQ ID NO: 813935 - RNA, 19 nt, Artificial Sequence
  Description of Artificial Sequence: Synthetic oligonucleotide
  Antisense strand to SEQ ID NO: 813934
uuaguaccuaacaauagaa

SEQ ID NO: 813936 - RNA, 19 nt, Artificial Sequence
  Description of Artificial Sequence: Synthetic oligonucleotide
  Sense strand starting at position 3840 of SEQ ID NO: 587726
ugaagcugugaguggaauu

SEQ ID NO: 813937 - RNA, 19 nt, Artificial Sequence
  Description of Artificial Sequence: Synthetic oligonucleotide
  Antisense strand to SEQ ID NO: 813936
aauuccacucacagcuuca

SEQ ID NO: 813938 - RNA, 19 nt, Artificial Sequence
  Description of Artificial Sequence: Synthetic oligonucleotide
  Sense strand starting at position 3861 of SEQ ID NO: 587726
aagaguuucugcuuuauga

SEQ ID NO: 813939 - RNA, 19 nt, Artificial Sequence
  Description of Artificial Sequence: Synthetic oligonucleotide
  Antisense strand to SEQ ID NO: 813938
ucauaaagcagaaacucuu

SEQ ID NO: 813940 - RNA, 19 nt, Artificial Sequence
  Description of Artificial Sequence: Synthetic oligonucleotide
  Sense strand starting at position 17 of SEQ ID NO: 587727
uuccuccuuccacgugaaa

SEQ ID NO: 813941 - RNA, 19 nt, Artificial Sequence
  Description of Artificial Sequence: Synthetic oligonucleotide
  Antisense strand to SEQ ID NO: 813940
uuucacguggaaggaggaa

SEQ ID NO: 813942 - RNA, 19 nt, Artificial Sequence
  Description of Artificial Sequence: Synthetic oligonucleotide
  Sense strand starting at position 412 of SEQ ID NO: 587727
cgaacaaaguuuguuacuu

SEQ ID NO: 813943 - RNA, 19 nt, Artificial Sequence
  Description of Artificial Sequence: Synthetic oligonucleotide
  Antisense strand to SEQ ID NO: 813942
aaguaacaaacuuuguucg

SEQ ID NO: 813944 - RNA, 19 nt, Artificial Sequence
  Description of Artificial Sequence: Synthetic oligonucleotide
  Sense strand starting at position 786 of SEQ ID NO: 587727
acauguauuuaugguucua

SEQ ID NO: 813945 - RNA, 19 nt, Artificial Sequence
  Description of Artificial Sequence: Synthetic oligonucleotide
  Antisense strand to SEQ ID NO: 813944
uagaaccauaaauacaugu

SEQ ID NO: 813946 - RNA, 19 nt, Artificial Sequence
  Description of Artificial Sequence: Synthetic oligonucleotide
  Sense strand starting at position 866 of SEQ ID NO: 587727
aacaguaauguuugugaaa

SEQ ID NO: 813947 - RNA, 19 nt, Artificial Sequence
  Description of Artificial Sequence: Synthetic oligonucleotide
  Antisense strand to SEQ ID NO: 813946
uuucacaaacauuacuguu

SEQ ID NO: 813948 - RNA, 19 nt, Artificial Sequence
  Description of Artificial Sequence: Synthetic oligonucleotide
  Sense strand starting at position 901 of SEQ ID NO: 587727
gagaguaaguagucaaagu

SEQ ID NO: 813949 - RNA, 19 nt, Artificial Sequence
  Description of Artificial Sequence: Synthetic oligonucleotide
  Antisense strand to SEQ ID NO: 813948
acuuugacuacuuacucuc

SEQ ID NO: 813950 - RNA, 19 nt, Artificial Sequence
  Description of Artificial Sequence: Synthetic oligonucleotide
  Sense strand starting at position 902 of SEQ ID NO: 587727
agaguaaguagucaaaguu

SEQ ID NO: 813951 - RNA, 19 nt, Artificial Sequence
  Description of Artificial Sequence: Synthetic oligonucleotide
  Antisense strand to SEQ ID NO: 813950
aacuuugacuacuuacucu

SEQ ID NO: 813952 - RNA, 19 nt, Artificial Sequence
  Description of Artificial Sequence: Synthetic oligonucleotide
  Sense strand starting at position 1075 of SEQ ID NO: 587727
ggcagaguuggugaggaga

SEQ ID NO: 813953 - RNA, 19 nt, Artificial Sequence
  Description of Artificial Sequence: Synthetic oligonucleotide
  Antisense strand to SEQ ID NO: 813952
ucuccucaccaacucugcc

SEQ ID NO: 813954 - RNA, 19 nt, Artificial Sequence
  Description of Artificial Sequence: Synthetic oligonucleotide
  Sense strand starting at position 1077 of SEQ ID NO: 587727
cagaguuggugaggagaga

SEQ ID NO: 813955 - RNA, 19 nt, Artificial Sequence
  Description of Artificial Sequence: Synthetic oligonucleotide
  Antisense strand to SEQ ID NO: 813954
ucucuccucaccaacucug

SEQ ID NO: 813956 - RNA, 19 nt, Artificial Sequence
  Description of Artificial Sequence: Synthetic oligonucleotide
  Sense strand starting at position 1224 of SEQ ID NO: 587727
uggguccuaucacugacaa

SEQ ID NO: 813957 - RNA, 19 nt, Artificial Sequence
  Description of Artificial Sequence: Synthetic oligonucleotide
  Antisense strand to SEQ ID NO: 813956
uugucagugauaggaccca

SEQ ID NO: 813958 - RNA, 19 nt, Artificial Sequence
  Description of Artificial Sequence: Synthetic oligonucleotide
  Sense strand starting at position 1225 of SEQ ID NO: 587727
ggguccuaucacugacaaa

SEQ ID NO: 813959 - RNA, 19 nt, Artificial Sequence
  Description of Artificial Sequence: Synthetic oligonucleotide
  Antisense strand to SEQ ID NO: 813958
uuugucagugauaggaccc

SEQ ID NO: 813960 - RNA, 19 nt, Artificial Sequence
  Description of Artificial Sequence: Synthetic oligonucleotide
  Sense strand starting at position 1482 of SEQ ID NO: 587727
gaaggagucuguuucuaaa

SEQ ID NO: 813961 - RNA, 19 nt, Artificial Sequence
  Description of Artificial Sequence: Synthetic oligonucleotide
  Antisense strand to SEQ ID NO: 813960
uuuagaaacagacuccuuc

SEQ ID NO: 813962 - RNA, 19 nt, Artificial Sequence
  Description of Artificial Sequence: Synthetic oligonucleotide
  Sense strand starting at position 1484 of SEQ ID NO: 587727
aggagucuguuucuaaauc

SEQ ID NO: 813963 - RNA, 19 nt, Artificial Sequence
  Description of Artificial Sequence: Synthetic oligonucleotide
  Antisense strand to SEQ ID NO: 813962
gauuuagaaacagacuccu

SEQ ID NO: 813964 - RNA, 19 nt, Artificial Sequence
  Description of Artificial Sequence: Synthetic oligonucleotide
  Sense strand starting at position 1548 of SEQ ID NO: 587727
acguguucugccuucccau

SEQ ID NO: 813965 - RNA, 19 nt, Artificial Sequence
  Description of Artificial Sequence: Synthetic oligonucleotide
  Antisense strand to SEQ ID NO: 813964
augggaaggcagaacacgu

SEQ ID NO: 813966 - RNA, 19 nt, Artificial Sequence
  Description of Artificial Sequence: Synthetic oligonucleotide
  Sense strand starting at position 1549 of SEQ ID NO: 587727
cguguucugccuucccaua

SEQ ID NO: 813967 - RNA, 19 nt, Artificial Sequence
  Description of Artificial Sequence: Synthetic oligonucleotide
  Antisense strand to SEQ ID NO: 813966
uaugggaaggcagaacacg

SEQ ID NO: 813968 - RNA, 19 nt, Artificial Sequence
  Description of Artificial Sequence: Synthetic oligonucleotide
  Sense strand starting at position 1906 of SEQ ID NO: 587727
gauagagaccucugguuaa

SEQ ID NO: 813969 - RNA, 19 nt, Artificial Sequence
  Description of Artificial Sequence: Synthetic oligonucleotide
  Antisense strand to SEQ ID NO: 813968
uuaaccagaggucucuauc

SEQ ID NO: 813970 - RNA, 19 nt, Artificial Sequence
  Description of Artificial Sequence: Synthetic oligonucleotide
  Sense strand starting at position 1909 of SEQ ID NO: 587727
agagaccucugguuaagca

SEQ ID NO: 813971 - RNA, 19 nt, Artificial Sequence
  Description of Artificial Sequence: Synthetic oligonucleotide
  Antisense strand to SEQ ID NO: 813970
ugcuuaaccagaggucucu

SEQ ID NO: 813972 - RNA, 19 nt, Artificial Sequence
  Description of Artificial Sequence: Synthetic oligonucleotide
  Sense strand starting at position 2121 of SEQ ID NO: 587727
aguagaagugcuuauauaa

SEQ ID NO: 813973 - RNA, 19 nt, Artificial Sequence
  Description of Artificial Sequence: Synthetic oligonucleotide
  Antisense strand to SEQ ID NO: 813972
uuauauaagcacuucuacu

SEQ ID NO: 813974 - RNA, 19 nt, Artificial Sequence
  Description of Artificial Sequence: Synthetic oligonucleotide
  Sense strand starting at position 2530 of SEQ ID NO: 587727
aaauaaucguaucuggaga

SEQ ID NO: 813975 - RNA, 19 nt, Artificial Sequence
  Description of Artificial Sequence: Synthetic oligonucleotide
  Antisense strand to SEQ ID NO: 813974
ucuccagauacgauuauuu

SEQ ID NO: 813976 - RNA, 19 nt, Artificial Sequence
  Description of Artificial Sequence: Synthetic oligonucleotide
  Sense strand starting at position 2532 of SEQ ID NO: 587727
auaaucguaucuggagaag

SEQ ID NO: 813977 - RNA, 19 nt, Artificial Sequence
  Description of Artificial Sequence: Synthetic oligonucleotide
  Antisense strand to SEQ ID NO: 813976
cuucuccagauacgauuau

SEQ ID NO: 813978 - RNA, 19 nt, Artificial Sequence
  Description of Artificial Sequence: Synthetic oligonucleotide
  Sense strand starting at position 2924 of SEQ ID NO: 587727
ggaauaugagaucaucgcu

SEQ ID NO: 813979 - RNA, 19 nt, Artificial Sequence
  Description of Artificial Sequence: Synthetic oligonucleotide
  Antisense strand to SEQ ID NO: 813978
agcgaugaucucauauucc

SEQ ID NO: 813980 - RNA, 19 nt, Artificial Sequence
  Description of Artificial Sequence: Synthetic oligonucleotide
  Sense strand starting at position 2927 of SEQ ID NO: 587727
auaugagaucaucgcugua

SEQ ID NO: 813981 - RNA, 19 nt, Artificial Sequence
  Description of Artificial Sequence: Synthetic oligonucleotide
  Antisense strand to SEQ ID NO: 813980
uacagcgaugaucucauau

SEQ ID NO: 813982 - RNA, 19 nt, Artificial Sequence
  Description of Artificial Sequence: Synthetic oligonucleotide
  Sense strand starting at position 2930 of SEQ ID NO: 587727
ugagaucaucgcuguaaag

SEQ ID NO: 813983 - RNA, 19 nt, Artificial Sequence
  Description of Artificial Sequence: Synthetic oligonucleotide
  Antisense strand to SEQ ID NO: 813982
cuuuacagcgaugaucuca

SEQ ID NO: 813984 - RNA, 19 nt, Artificial Sequence
  Description of Artificial Sequence: Synthetic oligonucleotide
  Sense strand starting at position 2932 of SEQ ID NO: 587727
agaucaucgcuguaaagua

SEQ ID NO: 813985 - RNA, 19 nt, Artificial Sequence
  Description of Artificial Sequence: Synthetic oligonucleotide
  Antisense strand to SEQ ID NO: 813984
uacuuuacagcgaugaucu

SEQ ID NO: 813986 - RNA, 19 nt, Artificial Sequence
  Description of Artificial Sequence: Synthetic oligonucleotide
  Sense strand starting at position 2957 of SEQ ID NO: 587727
gcuagaccuuuagagaaac

SEQ ID NO: 813987 - RNA, 19 nt, Artificial Sequence
  Description of Artificial Sequence: Synthetic oligonucleotide
  Antisense strand to SEQ ID NO: 813986
guuucucuaaaggucuagc

SEQ ID NO: 813988 - RNA, 19 nt, Artificial Sequence
  Description of Artificial Sequence: Synthetic oligonucleotide
  Sense strand starting at position 2990 of SEQ ID NO: 587727
ucugcuuucuggcucaauu

SEQ ID NO: 813989 - RNA, 19 nt, Artificial Sequence
  Description of Artificial Sequence: Synthetic oligonucleotide
  Antisense strand to SEQ ID NO: 813988
aauugagccagaaagcaga

SEQ ID NO: 813990 - RNA, 19 nt, Artificial Sequence
  Description of Artificial Sequence: Synthetic oligonucleotide
  Sense strand starting at position 3078 of SEQ ID NO: 587727
aucauuagguucucugaag

SEQ ID NO: 813991 - RNA, 19 nt, Artificial Sequence
  Description of Artificial Sequence: Synthetic oligonucleotide
  Antisense strand to SEQ ID NO: 813990
cuucagagaaccuaaugau

SEQ ID NO: 813992 - RNA, 19 nt, Artificial Sequence
  Description of Artificial Sequence: Synthetic oligonucleotide
  Sense strand starting at position 3079 of SEQ ID NO: 587727
ucauuagguucucugaagu

SEQ ID NO: 813993 - RNA, 19 nt, Artificial Sequence
  Description of Artificial Sequence: Synthetic oligonucleotide
  Antisense strand to SEQ ID NO: 813992
acuucagagaaccuaauga

SEQ ID NO: 813994 - RNA, 19 nt, Artificial Sequence
  Description of Artificial Sequence: Synthetic oligonucleotide
  Sense strand starting at position 3154 of SEQ ID NO: 587727
guggacagagucuaauagu

SEQ ID NO: 813995 - RNA, 19 nt, Artificial Sequence
  Description of Artificial Sequence: Synthetic oligonucleotide
  Antisense strand to SEQ ID NO: 813994
acuauuagacucuguccac

SEQ ID NO: 813996 - RNA, 19 nt, Artificial Sequence
  Description of Artificial Sequence: Synthetic oligonucleotide
  Sense strand starting at position 3182 of SEQ ID NO: 587727
acaagaucauuaugagaau

SEQ ID NO: 813997 - RNA, 19 nt, Artificial Sequence
  Description of Artificial Sequence: Synthetic oligonucleotide
  Antisense strand to SEQ ID NO: 813996
auucucauaaugaucuugu

SEQ ID NO: 813998 - RNA, 19 nt, Artificial Sequence
  Description of Artificial Sequence: Synthetic oligonucleotide
  Sense strand starting at position 3211 of SEQ ID NO: 587727
agguuaagcccucaguaag

SEQ ID NO: 813999 - RNA, 19 nt, Artificial Sequence
  Description of Artificial Sequence: Synthetic oligonucleotide
  Antisense strand to SEQ ID NO: 813998
cuuacugagggcuuaaccu

SEQ ID NO: 814000 - RNA, 19 nt, Artificial Sequence
  Description of Artificial Sequence: Synthetic oligonucleotide
  Sense strand starting at position 3263 of SEQ ID NO: 587727
ugaauagucuaaguauucu

SEQ ID NO: 814001 - RNA, 19 nt, Artificial Sequence
  Description of Artificial Sequence: Synthetic oligonucleotide
  Antisense strand to SEQ ID NO: 814000
agaauacuuagacuauuca

SEQ ID NO: 814002 - RNA, 19 nt, Artificial Sequence
  Description of Artificial Sequence: Synthetic oligonucleotide
  Sense strand starting at position 3275 of SEQ ID NO: 587727
guauucucucacggaucca

SEQ ID NO: 814003 - RNA, 19 nt, Artificial Sequence
  Description of Artificial Sequence: Synthetic oligonucleotide
  Antisense strand to SEQ ID NO: 814002
uggauccgugagagaauac

SEQ ID NO: 814004 - RNA, 19 nt, Artificial Sequence
  Description of Artificial Sequence: Synthetic oligonucleotide
  Sense strand starting at position 3500 of SEQ ID NO: 587727
ggugucaacuccuuuagca

SEQ ID NO: 814005 - RNA, 19 nt, Artificial Sequence
  Description of Artificial Sequence: Synthetic oligonucleotide
  Antisense strand to SEQ ID NO: 814004
ugcuaaaggaguugacacc

SEQ ID NO: 814006 - RNA, 19 nt, Artificial Sequence
  Description of Artificial Sequence: Synthetic oligonucleotide
  Sense strand starting at position 3507 of SEQ ID NO: 587727
acuccuuuagcacagugau

SEQ ID NO: 814007 - RNA, 19 nt, Artificial Sequence
  Description of Artificial Sequence: Synthetic oligonucleotide
  Antisense strand to SEQ ID NO: 814006
aucacugugcuaaaggagu

SEQ ID NO: 814008 - RNA, 19 nt, Artificial Sequence
  Description of Artificial Sequence: Synthetic oligonucleotide
  Sense strand starting at position 3635 of SEQ ID NO: 587727
ucaugccaauccuuggaaa

SEQ ID NO: 814009 - RNA, 19 nt, Artificial Sequence
  Description of Artificial Sequence: Synthetic oligonucleotide
  Antisense strand to SEQ ID NO: 814008
uuuccaaggauuggcauga

SEQ ID NO: 814010 - RNA, 19 nt, Artificial Sequence
  Description of Artificial Sequence: Synthetic oligonucleotide
  Sense strand starting at position 3637 of SEQ ID NO: 587727
augccaauccuuggaaaua

SEQ ID NO: 814011 - RNA, 19 nt, Artificial Sequence
  Description of Artificial Sequence: Synthetic oligonucleotide
  Antisense strand to SEQ ID NO: 814010
uauuuccaaggauuggcau

SEQ ID NO: 814012 - RNA, 19 nt, Artificial Sequence
  Description of Artificial Sequence: Synthetic oligonucleotide
  Sense strand starting at position 3638 of SEQ ID NO: 587727
ugccaauccuuggaaauag

SEQ ID NO: 814013 - RNA, 19 nt, Artificial Sequence
  Description of Artificial Sequence: Synthetic oligonucleotide
  Antisense strand to SEQ ID NO: 814012
cuauuuccaaggauuggca

SEQ ID NO: 814014 - RNA, 19 nt, Artificial Sequence
  Description of Artificial Sequence: Synthetic oligonucleotide
  Sense strand starting at position 3687 of SEQ ID NO: 587727
gagacagcacagugacauu

SEQ ID NO: 814015 - RNA, 19 nt, Artificial Sequence
  Description of Artificial Sequence: Synthetic oligonucleotide
  Antisense strand to SEQ ID NO: 814014
aaugucacugugcugucuc

SEQ ID NO: 814016 - RNA, 19 nt, Artificial Sequence
  Description of Artificial Sequence: Synthetic oligonucleotide
  Sense strand starting at position 3713 of SEQ ID NO: 587727
accugaucuuggucaccaa

SEQ ID NO: 814017 - RNA, 19 nt, Artificial Sequence
  Description of Artificial Sequence: Synthetic oligonucleotide
  Antisense strand to SEQ ID NO: 814016
uuggugaccaagaucaggu

SEQ ID NO: 814018 - RNA, 19 nt, Artificial Sequence
  Description of Artificial Sequence: Synthetic oligonucleotide
  Sense strand starting at position 3716 of SEQ ID NO: 587727
ugaucuuggucaccaagaa

SEQ ID NO: 814019 - RNA, 19 nt, Artificial Sequence
  Description of Artificial Sequence: Synthetic oligonucleotide
  Antisense strand to SEQ ID NO: 814018
uucuuggugaccaagauca

SEQ ID NO: 814020 - RNA, 19 nt, Artificial Sequence
  Description of Artificial Sequence: Synthetic oligonucleotide
  Sense strand starting at position 65 of SEQ ID NO: 587728
uccucaauuccagguggaa

SEQ ID NO: 814021 - RNA, 19 nt, Artificial Sequence
  Description of Artificial Sequence: Synthetic oligonucleotide
  Antisense strand to SEQ ID NO: 814020
uuccaccuggaauugagga

SEQ ID NO: 814022 - RNA, 19 nt, Artificial Sequence
  Description of Artificial Sequence: Synthetic oligonucleotide
  Sense strand starting at position 450 of SEQ ID NO: 587728
guugaauuccagcaucacu

SEQ ID NO: 814023 - RNA, 19 nt, Artificial Sequence
  Description of Artificial Sequence: Synthetic oligonucleotide
  Antisense strand to SEQ ID NO: 814022
agugaugcuggaauucaac

SEQ ID NO: 814024 - RNA, 19 nt, Artificial Sequence
  Description of Artificial Sequence: Synthetic oligonucleotide
  Sense strand starting at position 630 of SEQ ID NO: 587728
accgaaaugucacuaacaa

SEQ ID NO: 814025 - RNA, 19 nt, Artificial Sequence
  Description of Artificial Sequence: Synthetic oligonucleotide
  Antisense strand to SEQ ID NO: 814024
uuguuagugacauuucggu

SEQ ID NO: 814026 - RNA, 19 nt, Artificial Sequence
  Description of Artificial Sequence: Synthetic oligonucleotide
  Sense strand starting at position 653 of SEQ ID NO: 587728
uuacauuauuugugggaaa

SEQ ID NO: 814027 - RNA, 19 nt, Artificial Sequence
  Description of Artificial Sequence: Synthetic oligonucleotide
  Antisense strand to SEQ ID NO: 814026
uuucccacaaauaauguaa

SEQ ID NO: 814028 - RNA, 19 nt, Artificial Sequence
  Description of Artificial Sequence: Synthetic oligonucleotide
  Sense strand starting at position 654 of SEQ ID NO: 587728
uacauuauuugugggaaag

SEQ ID NO: 814029 - RNA, 19 nt, Artificial Sequence
  Description of Artificial Sequence: Synthetic oligonucleotide
  Antisense strand to SEQ ID NO: 814028
cuuucccacaaauaaugua

SEQ ID NO: 814030 - RNA, 19 nt, Artificial Sequence
  Description of Artificial Sequence: Synthetic oligonucleotide
  Sense strand starting at position 656 of SEQ ID NO: 587728
cauuauuugugggaaagau

SEQ ID NO: 814031 - RNA, 19 nt, Artificial Sequence
  Description of Artificial Sequence: Synthetic oligonucleotide
  Antisense strand to SEQ ID NO: 814030
aucuuucccacaaauaaug

SEQ ID NO: 814032 - RNA, 19 nt, Artificial Sequence
  Description of Artificial Sequence: Synthetic oligonucleotide
  Sense strand starting at position 697 of SEQ ID NO: 587728
gggcccuuagcugggauau

SEQ ID NO: 814033 - RNA, 19 nt, Artificial Sequence
  Description of Artificial Sequence: Synthetic oligonucleotide
  Antisense strand to SEQ ID NO: 814032
auaucccagcuaagggccc

SEQ ID NO: 814034 - RNA, 19 nt, Artificial Sequence
  Description of Artificial Sequence: Synthetic oligonucleotide
  Sense strand starting at position 759 of SEQ ID NO: 587728
gagagaacccagugcuauc

SEQ ID NO: 814035 - RNA, 19 nt, Artificial Sequence
  Description of Artificial Sequence: Synthetic oligonucleotide
  Antisense strand to SEQ ID NO: 814034
gauagcacuggguucucuc

SEQ ID NO: 814036 - RNA, 19 nt, Artificial Sequence
  Description of Artificial Sequence: Synthetic oligonucleotide
  Sense strand starting at position 809 of SEQ ID NO: 587728
cccgaauucccaggguuaa

SEQ ID NO: 814037 - RNA, 19 nt, Artificial Sequence
  Description of Artificial Sequence: Synthetic oligonucleotide
  Antisense strand to SEQ ID NO: 814036
uuaacccugggaauucggg

SEQ ID NO: 814038 - RNA, 19 nt, Artificial Sequence
  Description of Artificial Sequence: Synthetic oligonucleotide
  Sense strand starting at position 810 of SEQ ID NO: 587728
ccgaauucccaggguuaaa

SEQ ID NO: 814039 - RNA, 19 nt, Artificial Sequence
  Description of Artificial Sequence: Synthetic oligonucleotide
  Antisense strand to SEQ ID NO: 814038
uuuaacccugggaauucgg

SEQ ID NO: 814040 - RNA, 19 nt, Artificial Sequence
  Description of Artificial Sequence: Synthetic oligonucleotide
  Sense strand starting at position 919 of SEQ ID NO: 587728
gucaguguuccaggaacag

SEQ ID NO: 814041 - RNA, 19 nt, Artificial Sequence
  Description of Artificial Sequence: Synthetic oligonucleotide
  Antisense strand to SEQ ID NO: 814040
cuguuccuggaacacugac

SEQ ID NO: 814042 - RNA, 19 nt, Artificial Sequence
  Description of Artificial Sequence: Synthetic oligonucleotide
  Sense strand starting at position 1029 of SEQ ID NO: 587728
ccgcguacuguugcggaaa

SEQ ID NO: 814043 - RNA, 19 nt, Artificial Sequence
  Description of Artificial Sequence: Synthetic oligonucleotide
  Antisense strand to SEQ ID NO: 814042
uuuccgcaacaguacgcgg

SEQ ID NO: 814044 - RNA, 19 nt, Artificial Sequence
  Description of Artificial Sequence: Synthetic oligonucleotide
  Sense strand starting at position 1042 of SEQ ID NO: 587728
cggaaacucugucucacaa

SEQ ID NO: 814045 - RNA, 19 nt, Artificial Sequence
  Description of Artificial Sequence: Synthetic oligonucleotide
  Antisense strand to SEQ ID NO: 814044
uugugagacagaguuuccg

SEQ ID NO: 814046 - RNA, 19 nt, Artificial Sequence
  Description of Artificial Sequence: Synthetic oligonucleotide
  Sense strand starting at position 2183 of SEQ ID NO: 587728
ggaucaaguuucuccgcau

SEQ ID NO: 814047 - RNA, 19 nt, Artificial Sequence
  Description of Artificial Sequence: Synthetic oligonucleotide
  Antisense strand to SEQ ID NO: 814046
augcggagaaacuugaucc

SEQ ID NO: 814048 - RNA, 19 nt, Artificial Sequence
  Description of Artificial Sequence: Synthetic oligonucleotide
  Sense strand starting at position 2184 of SEQ ID NO: 587728
gaucaaguuucuccgcaua

SEQ ID NO: 814049 - RNA, 19 nt, Artificial Sequence
  Description of Artificial Sequence: Synthetic oligonucleotide
  Antisense strand to SEQ ID NO: 814048
uaugcggagaaacuugauc

SEQ ID NO: 814050 - RNA, 19 nt, Artificial Sequence
  Description of Artificial Sequence: Synthetic oligonucleotide
  Sense strand starting at position 2186 of SEQ ID NO: 587728
ucaaguuucuccgcauaaa

SEQ ID NO: 814051 - RNA, 19 nt, Artificial Sequence
  Description of Artificial Sequence: Synthetic oligonucleotide
  Antisense strand to SEQ ID NO: 814050
uuuaugcggagaaacuuga

SEQ ID NO: 814052 - RNA, 19 nt, Artificial Sequence
  Description of Artificial Sequence: Synthetic oligonucleotide
  Sense strand starting at position 2187 of SEQ ID NO: 587728
caaguuucuccgcauaaag

SEQ ID NO: 814053 - RNA, 19 nt, Artificial Sequence
  Description of Artificial Sequence: Synthetic oligonucleotide
  Antisense strand to SEQ ID NO: 814052
cuuuaugcggagaaacuug

SEQ ID NO: 814054 - RNA, 19 nt, Artificial Sequence
  Description of Artificial Sequence: Synthetic oligonucleotide
  Sense strand starting at position 2197 of SEQ ID NO: 587728
cgcauaaagucacugaaau

SEQ ID NO: 814055 - RNA, 19 nt, Artificial Sequence
  Description of Artificial Sequence: Synthetic oligonucleotide
  Antisense strand to SEQ ID NO: 814054
auuucagugacuuuaugcg

SEQ ID NO: 814056 - RNA, 19 nt, Artificial Sequence
  Description of Artificial Sequence: Synthetic oligonucleotide
  Sense strand starting at position 2198 of SEQ ID NO: 587728
gcauaaagucacugaaauu

SEQ ID NO: 814057 - RNA, 19 nt, Artificial Sequence
  Description of Artificial Sequence: Synthetic oligonucleotide
  Antisense strand to SEQ ID NO: 814056
aauuucagugacuuuaugc

SEQ ID NO: 814058 - RNA, 19 nt, Artificial Sequence
  Description of Artificial Sequence: Synthetic oligonucleotide
  Sense strand starting at position 2209 of SEQ ID NO: 587728
cugaaauugcaccguggga

SEQ ID NO: 814059 - RNA, 19 nt, Artificial Sequence
  Description of Artificial Sequence: Synthetic oligonucleotide
  Antisense strand to SEQ ID NO: 814058
ucccacggugcaauuucag

SEQ ID NO: 814060 - RNA, 19 nt, Artificial Sequence
  Description of Artificial Sequence: Synthetic oligonucleotide
  Sense strand starting at position 2257 of SEQ ID NO: 587728
gggcguuuggaaggauaga

SEQ ID NO: 814061 - RNA, 19 nt, Artificial Sequence
  Description of Artificial Sequence: Synthetic oligonucleotide
  Antisense strand to SEQ ID NO: 814060
ucuauccuuccaaacgccc

SEQ ID NO: 814062 - RNA, 19 nt, Artificial Sequence
  Description of Artificial Sequence: Synthetic oligonucleotide
  Sense strand starting at position 2258 of SEQ ID NO: 587728
ggcguuuggaaggauagau

SEQ ID NO: 814063 - RNA, 19 nt, Artificial Sequence
  Description of Artificial Sequence: Synthetic oligonucleotide
  Antisense strand to SEQ ID NO: 814062
aucuauccuuccaaacgcc

SEQ ID NO: 814064 - RNA, 19 nt, Artificial Sequence
  Description of Artificial Sequence: Synthetic oligonucleotide
  Sense strand starting at position 2274 of SEQ ID NO: 587728
gauggacuggcuuagacuu

SEQ ID NO: 814065 - RNA, 19 nt, Artificial Sequence
  Description of Artificial Sequence: Synthetic oligonucleotide
  Antisense strand to SEQ ID NO: 814064
aagucuaagccaguccauc

SEQ ID NO: 814066 - RNA, 19 nt, Artificial Sequence
  Description of Artificial Sequence: Synthetic oligonucleotide
  Sense strand starting at position 2392 of SEQ ID NO: 587728
uccggaaugucgucauuua

SEQ ID NO: 814067 - RNA, 19 nt, Artificial Sequence
  Description of Artificial Sequence: Synthetic oligonucleotide
  Antisense strand to SEQ ID NO: 814066
uaaaugacgacauuccgga

SEQ ID NO: 814068 - RNA, 19 nt, Artificial Sequence
  Description of Artificial Sequence: Synthetic oligonucleotide
  Sense strand starting at position 2399 of SEQ ID NO: 587728
ugucgucauuuauugacca

SEQ ID NO: 814069 - RNA, 19 nt, Artificial Sequence
  Description of Artificial Sequence: Synthetic oligonucleotide
  Antisense strand to SEQ ID NO: 814068
uggucaauaaaugacgaca

SEQ ID NO: 814070 - RNA, 19 nt, Artificial Sequence
  Description of Artificial Sequence: Synthetic oligonucleotide
  Sense strand starting at position 2437 of SEQ ID NO: 587728
cuccgaguuccuuacugca

SEQ ID NO: 814071 - RNA, 19 nt, Artificial Sequence
  Description of Artificial Sequence: Synthetic oligonucleotide
  Antisense strand to SEQ ID NO: 814070
ugcaguaaggaacucggag

SEQ ID NO: 814072 - RNA, 19 nt, Artificial Sequence
  Description of Artificial Sequence: Synthetic oligonucleotide
  Sense strand starting at position 2477 of SEQ ID NO: 587728
cgcaguuuaggcgcucaau

SEQ ID NO: 814073 - RNA, 19 nt, Artificial Sequence
  Description of Artificial Sequence: Synthetic oligonucleotide
  Antisense strand to SEQ ID NO: 814072
auugagcgccuaaacugcg

SEQ ID NO: 814074 - RNA, 19 nt, Artificial Sequence
  Description of Artificial Sequence: Synthetic oligonucleotide
  Sense strand starting at position 2478 of SEQ ID NO: 587728
gcaguuuaggcgcucaauu

SEQ ID NO: 814075 - RNA, 19 nt, Artificial Sequence
  Description of Artificial Sequence: Synthetic oligonucleotide
  Antisense strand to SEQ ID NO: 814074
aauugagcgccuaaacugc

SEQ ID NO: 814076 - RNA, 19 nt, Artificial Sequence
  Description of Artificial Sequence: Synthetic oligonucleotide
  Sense strand starting at position 2480 of SEQ ID NO: 587728
aguuuaggcgcucaauuaa

SEQ ID NO: 814077 - RNA, 19 nt, Artificial Sequence
  Description of Artificial Sequence: Synthetic oligonucleotide
  Antisense strand to SEQ ID NO: 814076
uuaauugagcgccuaaacu

SEQ ID NO: 814078 - RNA, 19 nt, Artificial Sequence
  Description of Artificial Sequence: Synthetic oligonucleotide
  Sense strand starting at position 2571 of SEQ ID NO: 587728
guuagagacccuuggccaa

SEQ ID NO: 814079 - RNA, 19 nt, Artificial Sequence
  Description of Artificial Sequence: Synthetic oligonucleotide
  Antisense strand to SEQ ID NO: 814078
uuggccaagggucucuaac

SEQ ID NO: 814080 - RNA, 19 nt, Artificial Sequence
  Description of Artificial Sequence: Synthetic oligonucleotide
  Sense strand starting at position 2645 of SEQ ID NO: 587728
gggagaggauccguguuua

SEQ ID NO: 814081 - RNA, 19 nt, Artificial Sequence
  Description of Artificial Sequence: Synthetic oligonucleotide
  Antisense strand to SEQ ID NO: 814080
uaaacacggauccucuccc

SEQ ID NO: 814082 - RNA, 19 nt, Artificial Sequence
  Description of Artificial Sequence: Synthetic oligonucleotide
  Sense strand starting at position 2649 of SEQ ID NO: 587728
gaggauccguguuuaacca

SEQ ID NO: 814083 - RNA, 19 nt, Artificial Sequence
  Description of Artificial Sequence: Synthetic oligonucleotide
  Antisense strand to SEQ ID NO: 814082
ugguuaaacacggauccuc

SEQ ID NO: 814084 - RNA, 19 nt, Artificial Sequence
  Description of Artificial Sequence: Synthetic oligonucleotide
  Sense strand starting at position 2730 of SEQ ID NO: 587728
gguguuggaucagugagag

SEQ ID NO: 814085 - RNA, 19 nt, Artificial Sequence
  Description of Artificial Sequence: Synthetic oligonucleotide
  Antisense strand to SEQ ID NO: 814084
cucucacugauccaacacc

SEQ ID NO: 814086 - RNA, 19 nt, Artificial Sequence
  Description of Artificial Sequence: Synthetic oligonucleotide
  Sense strand starting at position 2884 of SEQ ID NO: 587728
gcugguacuguccauuaag

SEQ ID NO: 814087 - RNA, 19 nt, Artificial Sequence
  Description of Artificial Sequence: Synthetic oligonucleotide
  Antisense strand to SEQ ID NO: 814086
cuuaauggacaguaccagc

SEQ ID NO: 814088 - RNA, 19 nt, Artificial Sequence
  Description of Artificial Sequence: Synthetic oligonucleotide
  Sense strand starting at position 2887 of SEQ ID NO: 587728
gguacuguccauuaagaca

SEQ ID NO: 814089 - RNA, 19 nt, Artificial Sequence
  Description of Artificial Sequence: Synthetic oligonucleotide
  Antisense strand to SEQ ID NO: 814088
ugucuuaauggacaguacc

SEQ ID NO: 814090 - RNA, 19 nt, Artificial Sequence
  Description of Artificial Sequence: Synthetic oligonucleotide
  Sense strand starting at position 3041 of SEQ ID NO: 587728
ugaaauaguggacgaaauc

SEQ ID NO: 814091 - RNA, 19 nt, Artificial Sequence
  Description of Artificial Sequence: Synthetic oligonucleotide
  Antisense strand to SEQ ID NO: 814090
gauuucguccacuauuuca

SEQ ID NO: 814092 - RNA, 19 nt, Artificial Sequence
  Description of Artificial Sequence: Synthetic oligonucleotide
  Sense strand starting at position 3163 of SEQ ID NO: 587728
uauagcuaccaucgaugua

SEQ ID NO: 814093 - RNA, 19 nt, Artificial Sequence
  Description of Artificial Sequence: Synthetic oligonucleotide
  Antisense strand to SEQ ID NO: 814092
uacaucgaugguagcuaua

SEQ ID NO: 814094 - RNA, 19 nt, Artificial Sequence
  Description of Artificial Sequence: Synthetic oligonucleotide
  Sense strand starting at position 3196 of SEQ ID NO: 587728
gcaucuaugucuccuagac

SEQ ID NO: 814095 - RNA, 19 nt, Artificial Sequence
  Description of Artificial Sequence: Synthetic oligonucleotide
  Antisense strand to SEQ ID NO: 814094
gucuaggagacauagaugc

SEQ ID NO: 814096 - RNA, 19 nt, Artificial Sequence
  Description of Artificial Sequence: Synthetic oligonucleotide
  Sense strand starting at position 3358 of SEQ ID NO: 587728
ccauuauagucgcuagagg

SEQ ID NO: 814097 - RNA, 19 nt, Artificial Sequence
  Description of Artificial Sequence: Synthetic oligonucleotide
  Antisense strand to SEQ ID NO: 814096
ccucuagcgacuauaaugg

SEQ ID NO: 814098 - RNA, 19 nt, Artificial Sequence
  Description of Artificial Sequence: Synthetic oligonucleotide
  Sense strand starting at position 3808 of SEQ ID NO: 587728
ggaaacuugcuauagcuga

SEQ ID NO: 814099 - RNA, 19 nt, Artificial Sequence
  Description of Artificial Sequence: Synthetic oligonucleotide
  Antisense strand to SEQ ID NO: 814098
ucagcuauagcaaguuucc

SEQ ID NO: 814100 - RNA, 19 nt, Artificial Sequence
  Description of Artificial Sequence: Synthetic oligonucleotide
  Sense strand starting at position 100 of SEQ ID NO: 587729
aaaggaagauuaguagcau

SEQ ID NO: 814101 - RNA, 19 nt, Artificial Sequence
  Description of Artificial Sequence: Synthetic oligonucleotide
  Antisense strand to SEQ ID NO: 814100
augcuacuaaucuuccuuu

SEQ ID NO: 814102 - RNA, 19 nt, Artificial Sequence
  Description of Artificial Sequence: Synthetic oligonucleotide
  Sense strand starting at position 165 of SEQ ID NO: 587729
uuugaauaggcaugauuaa

SEQ ID NO: 814103 - RNA, 19 nt, Artificial Sequence
  Description of Artificial Sequence: Synthetic oligonucleotide
  Antisense strand to SEQ ID NO: 814102
uuaaucaugccuauucaaa

SEQ ID NO: 814104 - RNA, 19 nt, Artificial Sequence
  Description of Artificial Sequence: Synthetic oligonucleotide
  Sense strand starting at position 246 of SEQ ID NO: 587729
cagucugugugauuagaaa

SEQ ID NO: 814105 - RNA, 19 nt, Artificial Sequence
  Description of Artificial Sequence: Synthetic oligonucleotide
  Antisense strand to SEQ ID NO: 814104
uuucuaaucacacagacug

SEQ ID NO: 814106 - RNA, 19 nt, Artificial Sequence
  Description of Artificial Sequence: Synthetic oligonucleotide
  Sense strand starting at position 559 of SEQ ID NO: 587729
gggauuguuucuccuauug

SEQ ID NO: 814107 - RNA, 19 nt, Artificial Sequence
  Description of Artificial Sequence: Synthetic oligonucleotide
  Antisense strand to SEQ ID NO: 814106
caauaggagaaacaauccc

SEQ ID NO: 814108 - RNA, 19 nt, Artificial Sequence
  Description of Artificial Sequence: Synthetic oligonucleotide
  Sense strand starting at position 754 of SEQ ID NO: 587729
uccucaauuccagguggaa

SEQ ID NO: 814109 - RNA, 19 nt, Artificial Sequence
  Description of Artificial Sequence: Synthetic oligonucleotide
  Antisense strand to SEQ ID NO: 814108
uuccaccuggaauugagga

SEQ ID NO: 814110 - RNA, 19 nt, Artificial Sequence
  Description of Artificial Sequence: Synthetic oligonucleotide
  Sense strand starting at position 1139 of SEQ ID NO: 587729
guugaauuccagcaucacu

SEQ ID NO: 814111 - RNA, 19 nt, Artificial Sequence
  Description of Artificial Sequence: Synthetic oligonucleotide
  Antisense strand to SEQ ID NO: 814110
agugaugcuggaauucaac

SEQ ID NO: 814112 - RNA, 19 nt, Artificial Sequence
  Description of Artificial Sequence: Synthetic oligonucleotide
  Sense strand starting at position 1319 of SEQ ID NO: 587729
accgaaaugucacuaacaa

SEQ ID NO: 814113 - RNA, 19 nt, Artificial Sequence
  Description of Artificial Sequence: Synthetic oligonucleotide
  Antisense strand to SEQ ID NO: 814112
uuguuagugacauuucggu

SEQ ID NO: 814114 - RNA, 19 nt, Artificial Sequence
  Description of Artificial Sequence: Synthetic oligonucleotide
  Sense strand starting at position 1342 of SEQ ID NO: 587729
uuacauuauuugugggaaa

SEQ ID NO: 814115 - RNA, 19 nt, Artificial Sequence
  Description of Artificial Sequence: Synthetic oligonucleotide
  Antisense strand to SEQ ID NO: 814114
uuucccacaaauaauguaa

SEQ ID NO: 814116 - RNA, 19 nt, Artificial Sequence
  Description of Artificial Sequence: Synthetic oligonucleotide
  Sense strand starting at position 1343 of SEQ ID NO: 587729
uacauuauuugugggaaag

SEQ ID NO: 814117 - RNA, 19 nt, Artificial Sequence
  Description of Artificial Sequence: Synthetic oligonucleotide
  Antisense strand to SEQ ID NO: 814116
cuuucccacaaauaaugua

SEQ ID NO: 814118 - RNA, 19 nt, Artificial Sequence
  Description of Artificial Sequence: Synthetic oligonucleotide
  Sense strand starting at position 1345 of SEQ ID NO: 587729
cauuauuugugggaaagau

SEQ ID NO: 814119 - RNA, 19 nt, Artificial Sequence
  Description of Artificial Sequence: Synthetic oligonucleotide
  Antisense strand to SEQ ID NO: 814118
aucuuucccacaaauaaug

SEQ ID NO: 814120 - RNA, 19 nt, Artificial Sequence
  Description of Artificial Sequence: Synthetic oligonucleotide
  Sense strand starting at position 1386 of SEQ ID NO: 587729
gggcccuuagcugggauau

SEQ ID NO: 814121 - RNA, 19 nt, Artificial Sequence
  Description of Artificial Sequence: Synthetic oligonucleotide
  Antisense strand to SEQ ID NO: 814120
auaucccagcuaagggccc

SEQ ID NO: 814122 - RNA, 19 nt, Artificial Sequence
  Description of Artificial Sequence: Synthetic oligonucleotide
  Sense strand starting at position 1448 of SEQ ID NO: 587729
gagagaacccagugcuauc

SEQ ID NO: 814123 - RNA, 19 nt, Artificial Sequence
  Description of Artificial Sequence: Synthetic oligonucleotide
  Antisense strand to SEQ ID NO: 814122
gauagcacuggguucucuc

SEQ ID NO: 814124 - RNA, 19 nt, Artificial Sequence
  Description of Artificial Sequence: Synthetic oligonucleotide
  Sense strand starting at position 1498 of SEQ ID NO: 587729
cccgaauucccaggguuaa

SEQ ID NO: 814125 - RNA, 19 nt, Artificial Sequence
  Description of Artificial Sequence: Synthetic oligonucleotide
  Antisense strand to SEQ ID NO: 814124
uuaacccugggaauucggg

SEQ ID NO: 814126 - RNA, 19 nt, Artificial Sequence
  Description of Artificial Sequence: Synthetic oligonucleotide
  Sense strand starting at position 1499 of SEQ ID NO: 587729
ccgaauucccaggguuaaa

SEQ ID NO: 814127 - RNA, 19 nt, Artificial Sequence
  Description of Artificial Sequence: Synthetic oligonucleotide
  Antisense strand to SEQ ID NO: 814126
uuuaacccugggaauucgg

SEQ ID NO: 814128 - RNA, 19 nt, Artificial Sequence
  Description of Artificial Sequence: Synthetic oligonucleotide
  Sense strand starting at position 1608 of SEQ ID NO: 587729
gucaguguuccaggaacag

SEQ ID NO: 814129 - RNA, 19 nt, Artificial Sequence
  Description of Artificial Sequence: Synthetic oligonucleotide
  Antisense strand to SEQ ID NO: 814128
cuguuccuggaacacugac

SEQ ID NO: 814130 - RNA, 19 nt, Artificial Sequence
  Description of Artificial Sequence: Synthetic oligonucleotide
  Sense strand starting at position 1718 of SEQ ID NO: 587729
ccgcguacuguugcggaaa

SEQ ID NO: 814131 - RNA, 19 nt, Artificial Sequence
  Description of Artificial Sequence: Synthetic oligonucleotide
  Antisense strand to SEQ ID NO: 814130
uuuccgcaacaguacgcgg

SEQ ID NO: 814132 - RNA, 19 nt, Artificial Sequence
  Description of Artificial Sequence: Synthetic oligonucleotide
  Sense strand starting at position 1731 of SEQ ID NO: 587729
cggaaacucugucucacaa

SEQ ID NO: 814133 - RNA, 19 nt, Artificial Sequence
  Description of Artificial Sequence: Synthetic oligonucleotide
  Antisense strand to SEQ ID NO: 814132
uugugagacagaguuuccg

SEQ ID NO: 814134 - RNA, 19 nt, Artificial Sequence
  Description of Artificial Sequence: Synthetic oligonucleotide
  Sense strand starting at position 2875 of SEQ ID NO: 587729
ucaaguuucuccgcauaaa

SEQ ID NO: 814135 - RNA, 19 nt, Artificial Sequence
  Description of Artificial Sequence: Synthetic oligonucleotide
  Antisense strand to SEQ ID NO: 814134
uuuaugcggagaaacuuga

SEQ ID NO: 814136 - RNA, 19 nt, Artificial Sequence
  Description of Artificial Sequence: Synthetic oligonucleotide
  Sense strand starting at position 2876 of SEQ ID NO: 587729
caaguuucuccgcauaaag

SEQ ID NO: 814137 - RNA, 19 nt, Artificial Sequence
  Description of Artificial Sequence: Synthetic oligonucleotide
  Antisense strand to SEQ ID NO: 814136
cuuuaugcggagaaacuug

SEQ ID NO: 814138 - RNA, 19 nt, Artificial Sequence
  Description of Artificial Sequence: Synthetic oligonucleotide
  Sense strand starting at position 2886 of SEQ ID NO: 587729
cgcauaaagucacugaaau

SEQ ID NO: 814139 - RNA, 19 nt, Artificial Sequence
  Description of Artificial Sequence: Synthetic oligonucleotide
  Antisense strand to SEQ ID NO: 814138
auuucagugacuuuaugcg

SEQ ID NO: 814140 - RNA, 19 nt, Artificial Sequence
  Description of Artificial Sequence: Synthetic oligonucleotide
  Sense strand starting at position 2887 of SEQ ID NO: 587729
gcauaaagucacugaaauu

SEQ ID NO: 814141 - RNA, 19 nt, Artificial Sequence
  Description of Artificial Sequence: Synthetic oligonucleotide
  Antisense strand to SEQ ID NO: 814140
aauuucagugacuuuaugc

SEQ ID NO: 814142 - RNA, 19 nt, Artificial Sequence
  Description of Artificial Sequence: Synthetic oligonucleotide
  Sense strand starting at position 2898 of SEQ ID NO: 587729
cugaaauugcaccguggga

SEQ ID NO: 814143 - RNA, 19 nt, Artificial Sequence
  Description of Artificial Sequence: Synthetic oligonucleotide
  Antisense strand to SEQ ID NO: 814142
ucccacggugcaauuucag

SEQ ID NO: 814144 - RNA, 19 nt, Artificial Sequence
  Description of Artificial Sequence: Synthetic oligonucleotide
  Sense strand starting at position 2946 of SEQ ID NO: 587729
gggcguuuggaaggauaga

SEQ ID NO: 814145 - RNA, 19 nt, Artificial Sequence
  Description of Artificial Sequence: Synthetic oligonucleotide
  Antisense strand to SEQ ID NO: 814144
ucuauccuuccaaacgccc

SEQ ID NO: 814146 - RNA, 19 nt, Artificial Sequence
  Description of Artificial Sequence: Synthetic oligonucleotide
  Sense strand starting at position 2947 of SEQ ID NO: 587729
ggcguuuggaaggauagau

SEQ ID NO: 814147 - RNA, 19 nt, Artificial Sequence
  Description of Artificial Sequence: Synthetic oligonucleotide
  Antisense strand to SEQ ID NO: 814146
aucuauccuuccaaacgcc

SEQ ID NO: 814148 - RNA, 19 nt, Artificial Sequence
  Description of Artificial Sequence: Synthetic oligonucleotide
  Sense strand starting at position 2963 of SEQ ID NO: 587729
gauggacuggcuuagacuu

SEQ ID NO: 814149 - RNA, 19 nt, Artificial Sequence
  Description of Artificial Sequence: Synthetic oligonucleotide
  Antisense strand to SEQ ID NO: 814148
aagucuaagccaguccauc

SEQ ID NO: 814150 - RNA, 19 nt, Artificial Sequence
  Description of Artificial Sequence: Synthetic oligonucleotide
  Sense strand starting at position 3081 of SEQ ID NO: 587729
uccggaaugucgucauuua

SEQ ID NO: 814151 - RNA, 19 nt, Artificial Sequence
  Description of Artificial Sequence: Synthetic oligonucleotide
  Antisense strand to SEQ ID NO: 814150
uaaaugacgacauuccgga

SEQ ID NO: 814152 - RNA, 19 nt, Artificial Sequence
  Description of Artificial Sequence: Synthetic oligonucleotide
  Sense strand starting at position 3088 of SEQ ID NO: 587729
ugucgucauuuauugacca

SEQ ID NO: 814153 - RNA, 19 nt, Artificial Sequence
  Description of Artificial Sequence: Synthetic oligonucleotide
  Antisense strand to SEQ ID NO: 814152
uggucaauaaaugacgaca

SEQ ID NO: 814154 - RNA, 19 nt, Artificial Sequence
  Description of Artificial Sequence: Synthetic oligonucleotide
  Sense strand starting at position 3126 of SEQ ID NO: 587729
cuccgaguuccuuacugca

SEQ ID NO: 814155 - RNA, 19 nt, Artificial Sequence
  Description of Artificial Sequence: Synthetic oligonucleotide
  Antisense strand to SEQ ID NO: 814154
ugcaguaaggaacucggag

SEQ ID NO: 814156 - RNA, 19 nt, Artificial Sequence
  Description of Artificial Sequence: Synthetic oligonucleotide
  Sense strand starting at position 3166 of SEQ ID NO: 587729
cgcaguuuaggcgcucaau

SEQ ID NO: 814157 - RNA, 19 nt, Artificial Sequence
  Description of Artificial Sequence: Synthetic oligonucleotide
  Antisense strand to SEQ ID NO: 814156
auugagcgccuaaacugcg

SEQ ID NO: 814158 - RNA, 19 nt, Artificial Sequence
  Description of Artificial Sequence: Synthetic oligonucleotide
  Sense strand starting at position 3167 of SEQ ID NO: 587729
gcaguuuaggcgcucaauu

SEQ ID NO: 814159 - RNA, 19 nt, Artificial Sequence
  Description of Artificial Sequence: Synthetic oligonucleotide
  Antisense strand to SEQ ID NO: 814158
aauugagcgccuaaacugc

SEQ ID NO: 814160 - RNA, 19 nt, Artificial Sequence
  Description of Artificial Sequence: Synthetic oligonucleotide
  Sense strand starting at position 3169 of SEQ ID NO: 587729
aguuuaggcgcucaauuaa

SEQ ID NO: 814161 - RNA, 19 nt, Artificial Sequence
  Description of Artificial Sequence: Synthetic oligonucleotide
  Antisense strand to SEQ ID NO: 814160
uuaauugagcgccuaaacu

SEQ ID NO: 814162 - RNA, 19 nt, Artificial Sequence
  Description of Artificial Sequence: Synthetic oligonucleotide
  Sense strand starting at position 3260 of SEQ ID NO: 587729
guuagagacccuuggccaa

SEQ ID NO: 814163 - RNA, 19 nt, Artificial Sequence
  Description of Artificial Sequence: Synthetic oligonucleotide
  Antisense strand to SEQ ID NO: 814162
uuggccaagggucucuaac

SEQ ID NO: 814164 - RNA, 19 nt, Artificial Sequence
  Description of Artificial Sequence: Synthetic oligonucleotide
  Sense strand starting at position 3334 of SEQ ID NO: 587729
gggagaggauccguguuua

SEQ ID NO: 814165 - RNA, 19 nt, Artificial Sequence
  Description of Artificial Sequence: Synthetic oligonucleotide
  Antisense strand to SEQ ID NO: 814164
uaaacacggauccucuccc

SEQ ID NO: 814166 - RNA, 19 nt, Artificial Sequence
  Description of Artificial Sequence: Synthetic oligonucleotide
  Sense strand starting at position 3338 of SEQ ID NO: 587729
gaggauccguguuuaacca

SEQ ID NO: 814167 - RNA, 19 nt, Artificial Sequence
  Description of Artificial Sequence: Synthetic oligonucleotide
  Antisense strand to SEQ ID NO: 814166
ugguuaaacacggauccuc

SEQ ID NO: 814168 - RNA, 19 nt, Artificial Sequence
  Description of Artificial Sequence: Synthetic oligonucleotide
  Sense strand starting at position 3419 of SEQ ID NO: 587729
gguguuggaucagugagag

SEQ ID NO: 814169 - RNA, 19 nt, Artificial Sequence
  Description of Artificial Sequence: Synthetic oligonucleotide
  Antisense strand to SEQ ID NO: 814168
cucucacugauccaacacc

SEQ ID NO: 814170 - RNA, 19 nt, Artificial Sequence
  Description of Artificial Sequence: Synthetic oligonucleotide
  Sense strand starting at position 3573 of SEQ ID NO: 587729
gcugguacuguccauuaag

SEQ ID NO: 814171 - RNA, 19 nt, Artificial Sequence
  Description of Artificial Sequence: Synthetic oligonucleotide
  Antisense strand to SEQ ID NO: 814170
cuuaauggacaguaccagc

SEQ ID NO: 814172 - RNA, 19 nt, Artificial Sequence
  Description of Artificial Sequence: Synthetic oligonucleotide
  Sense strand starting at position 3576 of SEQ ID NO: 587729
gguacuguccauuaagaca

SEQ ID NO: 814173 - RNA, 19 nt, Artificial Sequence
  Description of Artificial Sequence: Synthetic oligonucleotide
  Antisense strand to SEQ ID NO: 814172
ugucuuaauggacaguacc

SEQ ID NO: 814174 - RNA, 19 nt, Artificial Sequence
  Description of Artificial Sequence: Synthetic oligonucleotide
  Sense strand starting at position 3730 of SEQ ID NO: 587729
ugaaauaguggacgaaauc

SEQ ID NO: 814175 - RNA, 19 nt, Artificial Sequence
  Description of Artificial Sequence: Synthetic oligonucleotide
  Antisense strand to SEQ ID NO: 814174
gauuucguccacuauuuca

SEQ ID NO: 814176 - RNA, 19 nt, Artificial Sequence
  Description of Artificial Sequence: Synthetic oligonucleotide
  Sense strand starting at position 3852 of SEQ ID NO: 587729
uauagcuaccaucgaugua

SEQ ID NO: 814177 - RNA, 19 nt, Artificial Sequence
  Description of Artificial Sequence: Synthetic oligonucleotide
  Antisense strand to SEQ ID NO: 814176
uacaucgaugguagcuaua

SEQ ID NO: 814178 - RNA, 19 nt, Artificial Sequence
  Description of Artificial Sequence: Synthetic oligonucleotide
  Sense strand starting at position 3885 of SEQ ID NO: 587729
gcaucuaugucuccuagac

SEQ ID NO: 814179 - RNA, 19 nt, Artificial Sequence
  Description of Artificial Sequence: Synthetic oligonucleotide
  Antisense strand to SEQ ID NO: 814178
gucuaggagacauagaugc

SEQ ID NO: 814180 - RNA, 19 nt, Artificial Sequence
  Description of Artificial Sequence: Synthetic oligonucleotide
  Sense strand starting at position 48 of SEQ ID NO: 587730
cggcaagaaucauuaugug

SEQ ID NO: 814181 - RNA, 19 nt, Artificial Sequence
  Description of Artificial Sequence: Synthetic oligonucleotide
  Antisense strand to SEQ ID NO: 814180
cacauaaugauucuugccg

SEQ ID NO: 814182 - RNA, 19 nt, Artificial Sequence
  Description of Artificial Sequence: Synthetic oligonucleotide
  Sense strand starting at position 217 of SEQ ID NO: 587730
agaaauaaauuagcuguga

SEQ ID NO: 814183 - RNA, 19 nt, Artificial Sequence
  Description of Artificial Sequence: Synthetic oligonucleotide
  Antisense strand to SEQ ID NO: 814182
ucacagcuaauuuauuucu

SEQ ID NO: 814184 - RNA, 19 nt, Artificial Sequence
  Description of Artificial Sequence: Synthetic oligonucleotide
  Sense strand starting at position 327 of SEQ ID NO: 587730
cagaucaucucguuuaaga

SEQ ID NO: 814185 - RNA, 19 nt, Artificial Sequence
  Description of Artificial Sequence: Synthetic oligonucleotide
  Antisense strand to SEQ ID NO: 814184
ucuuaaacgagaugaucug

SEQ ID NO: 814186 - RNA, 19 nt, Artificial Sequence
  Description of Artificial Sequence: Synthetic oligonucleotide
  Sense strand starting at position 329 of SEQ ID NO: 587730
gaucaucucguuuaagaca

SEQ ID NO: 814187 - RNA, 19 nt, Artificial Sequence
  Description of Artificial Sequence: Synthetic oligonucleotide
  Antisense strand to SEQ ID NO: 814186
ugucuuaaacgagaugauc

SEQ ID NO: 814188 - RNA, 19 nt, Artificial Sequence
  Description of Artificial Sequence: Synthetic oligonucleotide
  Sense strand starting at position 628 of SEQ ID NO: 587730
agucuacuagucuaguauu

SEQ ID NO: 814189 - RNA, 19 nt, Artificial Sequence
  Description of Artificial Sequence: Synthetic oligonucleotide
  Antisense strand to SEQ ID NO: 814188
aauacuagacuaguagacu

SEQ ID NO: 814190 - RNA, 19 nt, Artificial Sequence
  Description of Artificial Sequence: Synthetic oligonucleotide
  Sense strand starting at position 734 of SEQ ID NO: 587730
aucucuuucuggcucaaga

SEQ ID NO: 814191 - RNA, 19 nt, Artificial Sequence
  Description of Artificial Sequence: Synthetic oligonucleotide
  Antisense strand to SEQ ID NO: 814190
ucuugagccagaaagagau

SEQ ID NO: 814192 - RNA, 19 nt, Artificial Sequence
  Description of Artificial Sequence: Synthetic oligonucleotide
  Sense strand starting at position 744 of SEQ ID NO: 587730
ggcucaagaucacucaacu

SEQ ID NO: 814193 - RNA, 19 nt, Artificial Sequence
  Description of Artificial Sequence: Synthetic oligonucleotide
  Antisense strand to SEQ ID NO: 814192
aguugagugaucuugagcc

SEQ ID NO: 814194 - RNA, 19 nt, Artificial Sequence
  Description of Artificial Sequence: Synthetic oligonucleotide
  Sense strand starting at position 760 of SEQ ID NO: 587730
acuguaaucuuucuggaaa

SEQ ID NO: 814195 - RNA, 19 nt, Artificial Sequence
  Description of Artificial Sequence: Synthetic oligonucleotide
  Antisense strand to SEQ ID NO: 814194
uuuccagaaagauuacagu

SEQ ID NO: 814196 - RNA, 19 nt, Artificial Sequence
  Description of Artificial Sequence: Synthetic oligonucleotide
  Sense strand starting at position 898 of SEQ ID NO: 587730
uguugugagcgcccaagua

SEQ ID NO: 814197 - RNA, 19 nt, Artificial Sequence
  Description of Artificial Sequence: Synthetic oligonucleotide
  Antisense strand to SEQ ID NO: 814196
uacuugggcgcucacaaca

SEQ ID NO: 814198 - RNA, 19 nt, Artificial Sequence
  Description of Artificial Sequence: Synthetic oligonucleotide
  Sense strand starting at position 970 of SEQ ID NO: 587730
aguuuaacagaauguguua

SEQ ID NO: 814199 - RNA, 19 nt, Artificial Sequence
  Description of Artificial Sequence: Synthetic oligonucleotide
  Antisense strand to SEQ ID NO: 814198
uaacacauucuguuaaacu

SEQ ID NO: 814200 - RNA, 19 nt, Artificial Sequence
  Description of Artificial Sequence: Synthetic oligonucleotide
  Sense strand starting at position 1032 of SEQ ID NO: 587730
ucacuaaaugugggaaauu

SEQ ID NO: 814201 - RNA, 19 nt, Artificial Sequence
  Description of Artificial Sequence: Synthetic oligonucleotide
  Antisense strand to SEQ ID NO: 814200
aauuucccacauuuaguga

SEQ ID NO: 814202 - RNA, 19 nt, Artificial Sequence
  Description of Artificial Sequence: Synthetic oligonucleotide
  Sense strand starting at position 1033 of SEQ ID NO: 587730
cacuaaaugugggaaauuu

SEQ ID NO: 814203 - RNA, 19 nt, Artificial Sequence
  Description of Artificial Sequence: Synthetic oligonucleotide
  Antisense strand to SEQ ID NO: 814202
aaauuucccacauuuagug

SEQ ID NO: 814204 - RNA, 19 nt, Artificial Sequence
  Description of Artificial Sequence: Synthetic oligonucleotide
  Sense strand starting at position 1350 of SEQ ID NO: 587730
uauaaagccguuuauaaga

SEQ ID NO: 814205 - RNA, 19 nt, Artificial Sequence
  Description of Artificial Sequence: Synthetic oligonucleotide
  Antisense strand to SEQ ID NO: 814204
ucuuauaaacggcuuuaua

SEQ ID NO: 814206 - RNA, 19 nt, Artificial Sequence
  Description of Artificial Sequence: Synthetic oligonucleotide
  Sense strand starting at position 1357 of SEQ ID NO: 587730
ccguuuauaagagguaaau

SEQ ID NO: 814207 - RNA, 19 nt, Artificial Sequence
  Description of Artificial Sequence: Synthetic oligonucleotide
  Antisense strand to SEQ ID NO: 814206
auuuaccucuuauaaacgg

SEQ ID NO: 814208 - RNA, 19 nt, Artificial Sequence
  Description of Artificial Sequence: Synthetic oligonucleotide
  Sense strand starting at position 1423 of SEQ ID NO: 587730
uuaaguuacuacguggaau

SEQ ID NO: 814209 - RNA, 19 nt, Artificial Sequence
  Description of Artificial Sequence: Synthetic oligonucleotide
  Antisense strand to SEQ ID NO: 814208
auuccacguaguaacuuaa

SEQ ID NO: 814210 - RNA, 19 nt, Artificial Sequence
  Description of Artificial Sequence: Synthetic oligonucleotide
  Sense strand starting at position 1615 of SEQ ID NO: 587730
caauuacaaggucgugaaa

SEQ ID NO: 814211 - RNA, 19 nt, Artificial Sequence
  Description of Artificial Sequence: Synthetic oligonucleotide
  Antisense strand to SEQ ID NO: 814210
uuucacgaccuuguaauug

SEQ ID NO: 814212 - RNA, 19 nt, Artificial Sequence
  Description of Artificial Sequence: Synthetic oligonucleotide
  Sense strand starting at position 1731 of SEQ ID NO: 587730
acguaacuuucucugaaac

SEQ ID NO: 814213 - RNA, 19 nt, Artificial Sequence
  Description of Artificial Sequence: Synthetic oligonucleotide
  Antisense strand to SEQ ID NO: 814212
guuucagagaaaguuacgu

SEQ ID NO: 814214 - RNA, 19 nt, Artificial Sequence
  Description of Artificial Sequence: Synthetic oligonucleotide
  Sense strand starting at position 1732 of SEQ ID NO: 587730
cguaacuuucucugaaaca

SEQ ID NO: 814215 - RNA, 19 nt, Artificial Sequence
  Description of Artificial Sequence: Synthetic oligonucleotide
  Antisense strand to SEQ ID NO: 814214
uguuucagagaaaguuacg

SEQ ID NO: 814216 - RNA, 19 nt, Artificial Sequence
  Description of Artificial Sequence: Synthetic oligonucleotide
  Sense strand starting at position 2006 of SEQ ID NO: 587730
gaagaacucugucucugau

SEQ ID NO: 814217 - RNA, 19 nt, Artificial Sequence
  Description of Artificial Sequence: Synthetic oligonucleotide
  Antisense strand to SEQ ID NO: 814216
aucagagacagaguucuuc

SEQ ID NO: 814218 - RNA, 19 nt, Artificial Sequence
  Description of Artificial Sequence: Synthetic oligonucleotide
  Sense strand starting at position 2018 of SEQ ID NO: 587730
cucugauuggcaggagagu

SEQ ID NO: 814219 - RNA, 19 nt, Artificial Sequence
  Description of Artificial Sequence: Synthetic oligonucleotide
  Antisense strand to SEQ ID NO: 814218
acucuccugccaaucagag

SEQ ID NO: 814220 - RNA, 19 nt, Artificial Sequence
  Description of Artificial Sequence: Synthetic oligonucleotide
  Sense strand starting at position 2657 of SEQ ID NO: 587730
agugucucucuagagaguu

SEQ ID NO: 814221 - RNA, 19 nt, Artificial Sequence
  Description of Artificial Sequence: Synthetic oligonucleotide
  Antisense strand to SEQ ID NO: 814220
aacucucuagagagacacu

SEQ ID NO: 814222 - RNA, 19 nt, Artificial Sequence
  Description of Artificial Sequence: Synthetic oligonucleotide
  Sense strand starting at position 2681 of SEQ ID NO: 587730
uuaaguuugaaugauggca

SEQ ID NO: 814223 - RNA, 19 nt, Artificial Sequence
  Description of Artificial Sequence: Synthetic oligonucleotide
  Antisense strand to SEQ ID NO: 814222
ugccaucauucaaacuuaa

SEQ ID NO: 814224 - RNA, 19 nt, Artificial Sequence
  Description of Artificial Sequence: Synthetic oligonucleotide
  Sense strand starting at position 2720 of SEQ ID NO: 587730
cguaguaggguuuaagaac

SEQ ID NO: 814225 - RNA, 19 nt, Artificial Sequence
  Description of Artificial Sequence: Synthetic oligonucleotide
  Antisense strand to SEQ ID NO: 814224
guucuuaaacccuacuacg

SEQ ID NO: 814226 - RNA, 19 nt, Artificial Sequence
  Description of Artificial Sequence: Synthetic oligonucleotide
  Sense strand starting at position 2726 of SEQ ID NO: 587730
aggguuuaagaacgucuua

SEQ ID NO: 814227 - RNA, 19 nt, Artificial Sequence
  Description of Artificial Sequence: Synthetic oligonucleotide
  Antisense strand to SEQ ID NO: 814226
uaagacguucuuaaacccu

SEQ ID NO: 814228 - RNA, 19 nt, Artificial Sequence
  Description of Artificial Sequence: Synthetic oligonucleotide
  Sense strand starting at position 2794 of SEQ ID NO: 587730
cuacgaaagcucuauuaga

SEQ ID NO: 814229 - RNA, 19 nt, Artificial Sequence
  Description of Artificial Sequence: Synthetic oligonucleotide
  Antisense strand to SEQ ID NO: 814228
ucuaauagagcuuucguag

SEQ ID NO: 814230 - RNA, 19 nt, Artificial Sequence
  Description of Artificial Sequence: Synthetic oligonucleotide
  Sense strand starting at position 2805 of SEQ ID NO: 587730
cuauuagacauucgaggga

SEQ ID NO: 814231 - RNA, 19 nt, Artificial Sequence
  Description of Artificial Sequence: Synthetic oligonucleotide
  Antisense strand to SEQ ID NO: 814230
ucccucgaaugucuaauag

SEQ ID NO: 814232 - RNA, 19 nt, Artificial Sequence
  Description of Artificial Sequence: Synthetic oligonucleotide
  Sense strand starting at position 2992 of SEQ ID NO: 587730
auugauagaguauguaguu

SEQ ID NO: 814233 - RNA, 19 nt, Artificial Sequence
  Description of Artificial Sequence: Synthetic oligonucleotide
  Antisense strand to SEQ ID NO: 814232
aacuacauacucuaucaau

SEQ ID NO: 814234 - RNA, 19 nt, Artificial Sequence
  Description of Artificial Sequence: Synthetic oligonucleotide
  Sense strand starting at position 3104 of SEQ ID NO: 587730
cugcucuaaguguagaaca

SEQ ID NO: 814235 - RNA, 19 nt, Artificial Sequence
  Description of Artificial Sequence: Synthetic oligonucleotide
  Antisense strand to SEQ ID NO: 814234
uguucuacacuuagagcag

SEQ ID NO: 814236 - RNA, 19 nt, Artificial Sequence
  Description of Artificial Sequence: Synthetic oligonucleotide
  Sense strand starting at position 3106 of SEQ ID NO: 587730
gcucuaaguguagaacaug

SEQ ID NO: 814237 - RNA, 19 nt, Artificial Sequence
  Description of Artificial Sequence: Synthetic oligonucleotide
  Antisense strand to SEQ ID NO: 814236
cauguucuacacuuagagc

SEQ ID NO: 814238 - RNA, 19 nt, Artificial Sequence
  Description of Artificial Sequence: Synthetic oligonucleotide
  Sense strand starting at position 3233 of SEQ ID NO: 587730
cguggcuuccauuauauuu

SEQ ID NO: 814239 - RNA, 19 nt, Artificial Sequence
  Description of Artificial Sequence: Synthetic oligonucleotide
  Antisense strand to SEQ ID NO: 814238
aaauauaauggaagccacg

SEQ ID NO: 814240 - RNA, 19 nt, Artificial Sequence
  Description of Artificial Sequence: Synthetic oligonucleotide
  Sense strand starting at position 3256 of SEQ ID NO: 587730
ggauacugcuguucuagag

SEQ ID NO: 814241 - RNA, 19 nt, Artificial Sequence
  Description of Artificial Sequence: Synthetic oligonucleotide
  Antisense strand to SEQ ID NO: 814240
cucuagaacagcaguaucc

SEQ ID NO: 814242 - RNA, 19 nt, Artificial Sequence
  Description of Artificial Sequence: Synthetic oligonucleotide
  Sense strand starting at position 3260 of SEQ ID NO: 587730
acugcuguucuagagagua

SEQ ID NO: 814243 - RNA, 19 nt, Artificial Sequence
  Description of Artificial Sequence: Synthetic oligonucleotide
  Antisense strand to SEQ ID NO: 814242
uacucucuagaacagcagu

SEQ ID NO: 814244 - RNA, 19 nt, Artificial Sequence
  Description of Artificial Sequence: Synthetic oligonucleotide
  Sense strand starting at position 3262 of SEQ ID NO: 587730
ugcuguucuagagaguaaa

SEQ ID NO: 814245 - RNA, 19 nt, Artificial Sequence
  Description of Artificial Sequence: Synthetic oligonucleotide
  Antisense strand to SEQ ID NO: 814244
uuuacucucuagaacagca

SEQ ID NO: 814246 - RNA, 19 nt, Artificial Sequence
  Description of Artificial Sequence: Synthetic oligonucleotide
  Sense strand starting at position 3478 of SEQ ID NO: 587730
augucaugugaacaucaca

SEQ ID NO: 814247 - RNA, 19 nt, Artificial Sequence
  Description of Artificial Sequence: Synthetic oligonucleotide
  Antisense strand to SEQ ID NO: 814246
ugugauguucacaugacau

SEQ ID NO: 814248 - RNA, 19 nt, Artificial Sequence
  Description of Artificial Sequence: Synthetic oligonucleotide
  Sense strand starting at position 3627 of SEQ ID NO: 587730
auguuuaaccuguagauac

SEQ ID NO: 814249 - RNA, 19 nt, Artificial Sequence
  Description of Artificial Sequence: Synthetic oligonucleotide
  Antisense strand to SEQ ID NO: 814248
guaucuacagguuaaacau

SEQ ID NO: 814250 - RNA, 19 nt, Artificial Sequence
  Description of Artificial Sequence: Synthetic oligonucleotide
  Sense strand starting at position 3682 of SEQ ID NO: 587730
ugagguuccagggaagcuu

SEQ ID NO: 814251 - RNA, 19 nt, Artificial Sequence
  Description of Artificial Sequence: Synthetic oligonucleotide
  Antisense strand to SEQ ID NO: 814250
aagcuucccuggaaccuca

SEQ ID NO: 814252 - RNA, 19 nt, Artificial Sequence
  Description of Artificial Sequence: Synthetic oligonucleotide
  Sense strand starting at position 3690 of SEQ ID NO: 587730
cagggaagcuuuguuucca

SEQ ID NO: 814253 - RNA, 19 nt, Artificial Sequence
  Description of Artificial Sequence: Synthetic oligonucleotide
  Antisense strand to SEQ ID NO: 814252
uggaaacaaagcuucccug

SEQ ID NO: 814254 - RNA, 19 nt, Artificial Sequence
  Description of Artificial Sequence: Synthetic oligonucleotide
  Sense strand starting at position 3859 of SEQ ID NO: 587730
ggcagugaauaaguaaaua

SEQ ID NO: 814255 - RNA, 19 nt, Artificial Sequence
  Description of Artificial Sequence: Synthetic oligonucleotide
  Antisense strand to SEQ ID NO: 814254
uauuuacuuauucacugcc

SEQ ID NO: 814256 - RNA, 19 nt, Artificial Sequence
  Description of Artificial Sequence: Synthetic oligonucleotide
  Sense strand starting at position 3910 of SEQ ID NO: 587730
auguuuaccucuguaaaug

SEQ ID NO: 814257 - RNA, 19 nt, Artificial Sequence
  Description of Artificial Sequence: Synthetic oligonucleotide
  Antisense strand to SEQ ID NO: 814256
cauuuacagagguaaacau

SEQ ID NO: 814258 - RNA, 19 nt, Artificial Sequence
  Description of Artificial Sequence: Synthetic oligonucleotide
  Sense strand starting at position 3977 of SEQ ID NO: 587730
uguuaagagucuuuauuag

SEQ ID NO: 814259 - RNA, 19 nt, Artificial Sequence
  Description of Artificial Sequence: Synthetic oligonucleotide
  Antisense strand to SEQ ID NO: 814258
cuaauaaagacucuuaaca

SEQ ID NO: 814260 - RNA, 19 nt, Artificial Sequence
  Description of Artificial Sequence: Synthetic oligonucleotide
  Sense strand starting at position 4 of SEQ ID NO: 587731
acuguaaucuuucuggaaa

SEQ ID NO: 814261 - RNA, 19 nt, Artificial Sequence
  Description of Artificial Sequence: Synthetic oligonucleotide
  Antisense strand to SEQ ID NO: 814260
uuuccagaaagauuacagu

SEQ ID NO: 814262 - RNA, 19 nt, Artificial Sequence
  Description of Artificial Sequence: Synthetic oligonucleotide
  Sense strand starting at position 142 of SEQ ID NO: 587731
uguugugagcgcccaagua

SEQ ID NO: 814263 - RNA, 19 nt, Artificial Sequence
  Description of Artificial Sequence: Synthetic oligonucleotide
  Antisense strand to SEQ ID NO: 814262
uacuugggcgcucacaaca

SEQ ID NO: 814264 - RNA, 19 nt, Artificial Sequence
  Description of Artificial Sequence: Synthetic oligonucleotide
  Sense strand starting at position 214 of SEQ ID NO: 587731
aguuuaacagaauguguua

SEQ ID NO: 814265 - RNA, 19 nt, Artificial Sequence
  Description of Artificial Sequence: Synthetic oligonucleotide
  Antisense strand to SEQ ID NO: 814264
uaacacauucuguuaaacu

SEQ ID NO: 814266 - RNA, 19 nt, Artificial Sequence
  Description of Artificial Sequence: Synthetic oligonucleotide
  Sense strand starting at position 276 of SEQ ID NO: 587731
ucacuaaaugugggaaauu

SEQ ID NO: 814267 - RNA, 19 nt, Artificial Sequence
  Description of Artificial Sequence: Synthetic oligonucleotide
  Antisense strand to SEQ ID NO: 814266
aauuucccacauuuaguga

SEQ ID NO: 814268 - RNA, 19 nt, Artificial Sequence
  Description of Artificial Sequence: Synthetic oligonucleotide
  Sense strand starting at position 277 of SEQ ID NO: 587731
cacuaaaugugggaaauuu

SEQ ID NO: 814269 - RNA, 19 nt, Artificial Sequence
  Description of Artificial Sequence: Synthetic oligonucleotide
  Antisense strand to SEQ ID NO: 814268
aaauuucccacauuuagug

SEQ ID NO: 814270 - RNA, 19 nt, Artificial Sequence
  Description of Artificial Sequence: Synthetic oligonucleotide
  Sense strand starting at position 594 of SEQ ID NO: 587731
uauaaagccguuuauaaga

SEQ ID NO: 814271 - RNA, 19 nt, Artificial Sequence
  Description of Artificial Sequence: Synthetic oligonucleotide
  Antisense strand to SEQ ID NO: 814270
ucuuauaaacggcuuuaua

SEQ ID NO: 814272 - RNA, 19 nt, Artificial Sequence
  Description of Artificial Sequence: Synthetic oligonucleotide
  Sense strand starting at position 601 of SEQ ID NO: 587731
ccguuuauaagagguaaau

SEQ ID NO: 814273 - RNA, 19 nt, Artificial Sequence
  Description of Artificial Sequence: Synthetic oligonucleotide
  Antisense strand to SEQ ID NO: 814272
auuuaccucuuauaaacgg

SEQ ID NO: 814274 - RNA, 19 nt, Artificial Sequence
  Description of Artificial Sequence: Synthetic oligonucleotide
  Sense strand starting at position 667 of SEQ ID NO: 587731
uuaaguuacuacguggaau

SEQ ID NO: 814275 - RNA, 19 nt, Artificial Sequence
  Description of Artificial Sequence: Synthetic oligonucleotide
  Antisense strand to SEQ ID NO: 814274
auuccacguaguaacuuaa

SEQ ID NO: 814276 - RNA, 19 nt, Artificial Sequence
  Description of Artificial Sequence: Synthetic oligonucleotide
  Sense strand starting at position 859 of SEQ ID NO: 587731
caauuacaaggucgugaaa

SEQ ID NO: 814277 - RNA, 19 nt, Artificial Sequence
  Description of Artificial Sequence: Synthetic oligonucleotide
  Antisense strand to SEQ ID NO: 814276
uuucacgaccuuguaauug

SEQ ID NO: 814278 - RNA, 19 nt, Artificial Sequence
  Description of Artificial Sequence: Synthetic oligonucleotide
  Sense strand starting at position 944 of SEQ ID NO: 587731
accuuaggagucugcgaaa

SEQ ID NO: 814279 - RNA, 19 nt, Artificial Sequence
  Description of Artificial Sequence: Synthetic oligonucleotide
  Antisense strand to SEQ ID NO: 814278
uuucgcagacuccuaaggu

SEQ ID NO: 814280 - RNA, 19 nt, Artificial Sequence
  Description of Artificial Sequence: Synthetic oligonucleotide
  Sense strand starting at position 973 of SEQ ID NO: 587731
ccacguaacuuucucugaa

SEQ ID NO: 814281 - RNA, 19 nt, Artificial Sequence
  Description of Artificial Sequence: Synthetic oligonucleotide
  Antisense strand to SEQ ID NO: 814280
uucagagaaaguuacgugg

SEQ ID NO: 814282 - RNA, 19 nt, Artificial Sequence
  Description of Artificial Sequence: Synthetic oligonucleotide
  Sense strand starting at position 975 of SEQ ID NO: 587731
acguaacuuucucugaaac

SEQ ID NO: 814283 - RNA, 19 nt, Artificial Sequence
  Description of Artificial Sequence: Synthetic oligonucleotide
  Antisense strand to SEQ ID NO: 814282
guuucagagaaaguuacgu

SEQ ID NO: 814284 - RNA, 19 nt, Artificial Sequence
  Description of Artificial Sequence: Synthetic oligonucleotide
  Sense strand starting at position 976 of SEQ ID NO: 587731
cguaacuuucucugaaaca

SEQ ID NO: 814285 - RNA, 19 nt, Artificial Sequence
  Description of Artificial Sequence: Synthetic oligonucleotide
  Antisense strand to SEQ ID NO: 814284
uguuucagagaaaguuacg

SEQ ID NO: 814286 - RNA, 19 nt, Artificial Sequence
  Description of Artificial Sequence: Synthetic oligonucleotide
  Sense strand starting at position 1250 of SEQ ID NO: 587731
gaagaacucugucucugau

SEQ ID NO: 814287 - RNA, 19 nt, Artificial Sequence
  Description of Artificial Sequence: Synthetic oligonucleotide
  Antisense strand to SEQ ID NO: 814286
aucagagacagaguucuuc

SEQ ID NO: 814288 - RNA, 19 nt, Artificial Sequence
  Description of Artificial Sequence: Synthetic oligonucleotide
  Sense strand starting at position 1262 of SEQ ID NO: 587731
cucugauuggcaggagagu

SEQ ID NO: 814289 - RNA, 19 nt, Artificial Sequence
  Description of Artificial Sequence: Synthetic oligonucleotide
  Antisense strand to SEQ ID NO: 814288
acucuccugccaaucagag

SEQ ID NO: 814290 - RNA, 19 nt, Artificial Sequence
  Description of Artificial Sequence: Synthetic oligonucleotide
  Sense strand starting at position 1901 of SEQ ID NO: 587731
agugucucucuagagaguu

SEQ ID NO: 814291 - RNA, 19 nt, Artificial Sequence
  Description of Artificial Sequence: Synthetic oligonucleotide
  Antisense strand to SEQ ID NO: 814290
aacucucuagagagacacu

SEQ ID NO: 814292 - RNA, 19 nt, Artificial Sequence
  Description of Artificial Sequence: Synthetic oligonucleotide
  Sense strand starting at position 1914 of SEQ ID NO: 587731
agaguuagugcuuaaguuu

SEQ ID NO: 814293 - RNA, 19 nt, Artificial Sequence
  Description of Artificial Sequence: Synthetic oligonucleotide
  Antisense strand to SEQ ID NO: 814292
aaacuuaagcacuaacucu

SEQ ID NO: 814294 - RNA, 19 nt, Artificial Sequence
  Description of Artificial Sequence: Synthetic oligonucleotide
  Sense strand starting at position 1920 of SEQ ID NO: 587731
agugcuuaaguuugaauga

SEQ ID NO: 814295 - RNA, 19 nt, Artificial Sequence
  Description of Artificial Sequence: Synthetic oligonucleotide
  Antisense strand to SEQ ID NO: 814294
ucauucaaacuuaagcacu

SEQ ID NO: 814296 - RNA, 19 nt, Artificial Sequence
  Description of Artificial Sequence: Synthetic oligonucleotide
  Sense strand starting at position 1925 of SEQ ID NO: 587731
uuaaguuugaaugauggca

SEQ ID NO: 814297 - RNA, 19 nt, Artificial Sequence
  Description of Artificial Sequence: Synthetic oligonucleotide
  Antisense strand to SEQ ID NO: 814296
ugccaucauucaaacuuaa

SEQ ID NO: 814298 - RNA, 19 nt, Artificial Sequence
  Description of Artificial Sequence: Synthetic oligonucleotide
  Sense strand starting at position 1964 of SEQ ID NO: 587731
cguaguaggguuuaagaac

SEQ ID NO: 814299 - RNA, 19 nt, Artificial Sequence
  Description of Artificial Sequence: Synthetic oligonucleotide
  Antisense strand to SEQ ID NO: 814298
guucuuaaacccuacuacg

SEQ ID NO: 814300 - RNA, 19 nt, Artificial Sequence
  Description of Artificial Sequence: Synthetic oligonucleotide
  Sense strand starting at position 1970 of SEQ ID NO: 587731
aggguuuaagaacgucuua

SEQ ID NO: 814301 - RNA, 19 nt, Artificial Sequence
  Description of Artificial Sequence: Synthetic oligonucleotide
  Antisense strand to SEQ ID NO: 814300
uaagacguucuuaaacccu

SEQ ID NO: 814302 - RNA, 19 nt, Artificial Sequence
  Description of Artificial Sequence: Synthetic oligonucleotide
  Sense strand starting at position 2038 of SEQ ID NO: 587731
cuacgaaagcucuauuaga

SEQ ID NO: 814303 - RNA, 19 nt, Artificial Sequence
  Description of Artificial Sequence: Synthetic oligonucleotide
  Antisense strand to SEQ ID NO: 814302
ucuaauagagcuuucguag

SEQ ID NO: 814304 - RNA, 19 nt, Artificial Sequence
  Description of Artificial Sequence: Synthetic oligonucleotide
  Sense strand starting at position 2049 of SEQ ID NO: 587731
cuauuagacauucgaggga

SEQ ID NO: 814305 - RNA, 19 nt, Artificial Sequence
  Description of Artificial Sequence: Synthetic oligonucleotide
  Antisense strand to SEQ ID NO: 814304
ucccucgaaugucuaauag

SEQ ID NO: 814306 - RNA, 19 nt, Artificial Sequence
  Description of Artificial Sequence: Synthetic oligonucleotide
  Sense strand starting at position 2236 of SEQ ID NO: 587731
auugauagaguauguaguu

SEQ ID NO: 814307 - RNA, 19 nt, Artificial Sequence
  Description of Artificial Sequence: Synthetic oligonucleotide
  Antisense strand to SEQ ID NO: 814306
aacuacauacucuaucaau

SEQ ID NO: 814308 - RNA, 19 nt, Artificial Sequence
  Description of Artificial Sequence: Synthetic oligonucleotide
  Sense strand starting at position 2348 of SEQ ID NO: 587731
cugcucuaaguguagaaca

SEQ ID NO: 814309 - RNA, 19 nt, Artificial Sequence
  Description of Artificial Sequence: Synthetic oligonucleotide
  Antisense strand to SEQ ID NO: 814308
uguucuacacuuagagcag

SEQ ID NO: 814310 - RNA, 19 nt, Artificial Sequence
  Description of Artificial Sequence: Synthetic oligonucleotide
  Sense strand starting at position 2350 of SEQ ID NO: 587731
gcucuaaguguagaacaug

SEQ ID NO: 814311 - RNA, 19 nt, Artificial Sequence
  Description of Artificial Sequence: Synthetic oligonucleotide
  Antisense strand to SEQ ID NO: 814310
cauguucuacacuuagagc

SEQ ID NO: 814312 - RNA, 19 nt, Artificial Sequence
  Description of Artificial Sequence: Synthetic oligonucleotide
  Sense strand starting at position 2477 of SEQ ID NO: 587731
cguggcuuccauuauauuu

SEQ ID NO: 814313 - RNA, 19 nt, Artificial Sequence
  Description of Artificial Sequence: Synthetic oligonucleotide
  Antisense strand to SEQ ID NO: 814312
aaauauaauggaagccacg

SEQ ID NO: 814314 - RNA, 19 nt, Artificial Sequence
  Description of Artificial Sequence: Synthetic oligonucleotide
  Sense strand starting at position 2500 of SEQ ID NO: 587731
ggauacugcuguucuagag

SEQ ID NO: 814315 - RNA, 19 nt, Artificial Sequence
  Description of Artificial Sequence: Synthetic oligonucleotide
  Antisense strand to SEQ ID NO: 814314
cucuagaacagcaguaucc

SEQ ID NO: 814316 - RNA, 19 nt, Artificial Sequence
  Description of Artificial Sequence: Synthetic oligonucleotide
  Sense strand starting at position 2504 of SEQ ID NO: 587731
acugcuguucuagagagua

SEQ ID NO: 814317 - RNA, 19 nt, Artificial Sequence
  Description of Artificial Sequence: Synthetic oligonucleotide
  Antisense strand to SEQ ID NO: 814316
uacucucuagaacagcagu

SEQ ID NO: 814318 - RNA, 19 nt, Artificial Sequence
  Description of Artificial Sequence: Synthetic oligonucleotide
  Sense strand starting at position 2506 of SEQ ID NO: 587731
ugcuguucuagagaguaaa

SEQ ID NO: 814319 - RNA, 19 nt, Artificial Sequence
  Description of Artificial Sequence: Synthetic oligonucleotide
  Antisense strand to SEQ ID NO: 814318
uuuacucucuagaacagca

SEQ ID NO: 814320 - RNA, 19 nt, Artificial Sequence
  Description of Artificial Sequence: Synthetic oligonucleotide
  Sense strand starting at position 2718 of SEQ ID NO: 587731
auguaugucaugugaacau

SEQ ID NO: 814321 - RNA, 19 nt, Artificial Sequence
  Description of Artificial Sequence: Synthetic oligonucleotide
  Antisense strand to SEQ ID NO: 814320
auguucacaugacauacau

SEQ ID NO: 814322 - RNA, 19 nt, Artificial Sequence
  Description of Artificial Sequence: Synthetic oligonucleotide
  Sense strand starting at position 2722 of SEQ ID NO: 587731
augucaugugaacaucaca

SEQ ID NO: 814323 - RNA, 19 nt, Artificial Sequence
  Description of Artificial Sequence: Synthetic oligonucleotide
  Antisense strand to SEQ ID NO: 814322
ugugauguucacaugacau

SEQ ID NO: 814324 - RNA, 19 nt, Artificial Sequence
  Description of Artificial Sequence: Synthetic oligonucleotide
  Sense strand starting at position 2871 of SEQ ID NO: 587731
auguuuaaccuguagauac

SEQ ID NO: 814325 - RNA, 19 nt, Artificial Sequence
  Description of Artificial Sequence: Synthetic oligonucleotide
  Antisense strand to SEQ ID NO: 814324
guaucuacagguuaaacau

SEQ ID NO: 814326 - RNA, 19 nt, Artificial Sequence
  Description of Artificial Sequence: Synthetic oligonucleotide
  Sense strand starting at position 2926 of SEQ ID NO: 587731
ugagguuccagggaagcuu

SEQ ID NO: 814327 - RNA, 19 nt, Artificial Sequence
  Description of Artificial Sequence: Synthetic oligonucleotide
  Antisense strand to SEQ ID NO: 814326
aagcuucccuggaaccuca

SEQ ID NO: 814328 - RNA, 19 nt, Artificial Sequence
  Description of Artificial Sequence: Synthetic oligonucleotide
  Sense strand starting at position 2934 of SEQ ID NO: 587731
cagggaagcuuuguuucca

SEQ ID NO: 814329 - RNA, 19 nt, Artificial Sequence
  Description of Artificial Sequence: Synthetic oligonucleotide
  Antisense strand to SEQ ID NO: 814328
uggaaacaaagcuucccug

SEQ ID NO: 814330 - RNA, 19 nt, Artificial Sequence
  Description of Artificial Sequence: Synthetic oligonucleotide
  Sense strand starting at position 3103 of SEQ ID NO: 587731
ggcagugaauaaguaaaua

SEQ ID NO: 814331 - RNA, 19 nt, Artificial Sequence
  Description of Artificial Sequence: Synthetic oligonucleotide
  Antisense strand to SEQ ID NO: 814330
uauuuacuuauucacugcc

SEQ ID NO: 814332 - RNA, 19 nt, Artificial Sequence
  Description of Artificial Sequence: Synthetic oligonucleotide
  Sense strand starting at position 3154 of SEQ ID NO: 587731
auguuuaccucuguaaaug

SEQ ID NO: 814333 - RNA, 19 nt, Artificial Sequence
  Description of Artificial Sequence: Synthetic oligonucleotide
  Antisense strand to SEQ ID NO: 814332
cauuuacagagguaaacau

SEQ ID NO: 814334 - RNA, 19 nt, Artificial Sequence
  Description of Artificial Sequence: Synthetic oligonucleotide
  Sense strand starting at position 3221 of SEQ ID NO: 587731
uguuaagagucuuuauuag

SEQ ID NO: 814335 - RNA, 19 nt, Artificial Sequence
  Description of Artificial Sequence: Synthetic oligonucleotide
  Antisense strand to SEQ ID NO: 814334
cuaauaaagacucuuaaca

SEQ ID NO: 814336 - RNA, 19 nt, Artificial Sequence
  Description of Artificial Sequence: Synthetic oligonucleotide
  Sense strand starting at position 3658 of SEQ ID NO: 587731
ucagaaguccaacaugguu

SEQ ID NO: 814337 - RNA, 19 nt, Artificial Sequence
  Description of Artificial Sequence: Synthetic oligonucleotide
  Antisense strand to SEQ ID NO: 814336
aaccauguuggacuucuga

SEQ ID NO: 814338 - RNA, 19 nt, Artificial Sequence
  Description of Artificial Sequence: Synthetic oligonucleotide
  Sense strand starting at position 3712 of SEQ ID NO: 587731
uguuccuuucuagagaggu

SEQ ID NO: 814339 - RNA, 19 nt, Artificial Sequence
  Description of Artificial Sequence: Synthetic oligonucleotide
  Antisense strand to SEQ ID NO: 814338
accucucuagaaaggaaca

SEQ ID NO: 814340 - RNA, 19 nt, Artificial Sequence
  Description of Artificial Sequence: Synthetic oligonucleotide
  Sense strand starting at position 9 of SEQ ID NO: 587732
uguugagugccucauaaua

SEQ ID NO: 814341 - RNA, 19 nt, Artificial Sequence
  Description of Artificial Sequence: Synthetic oligonucleotide
  Antisense strand to SEQ ID NO: 814340
uauuaugaggcacucaaca

SEQ ID NO: 814342 - RNA, 19 nt, Artificial Sequence
  Description of Artificial Sequence: Synthetic oligonucleotide
  Sense strand starting at position 106 of SEQ ID NO: 587732
cuaauuccucuugggauua

SEQ ID NO: 814343 - RNA, 19 nt, Artificial Sequence
  Description of Artificial Sequence: Synthetic oligonucleotide
  Antisense strand to SEQ ID NO: 814342
uaaucccaagaggaauuag

SEQ ID NO: 814344 - RNA, 19 nt, Artificial Sequence
  Description of Artificial Sequence: Synthetic oligonucleotide
  Sense strand starting at position 316 of SEQ ID NO: 587732
guuguaaugcuagaacaaa

SEQ ID NO: 814345 - RNA, 19 nt, Artificial Sequence
  Description of Artificial Sequence: Synthetic oligonucleotide
  Antisense strand to SEQ ID NO: 814344
uuuguucuagcauuacaac

SEQ ID NO: 814346 - RNA, 19 nt, Artificial Sequence
  Description of Artificial Sequence: Synthetic oligonucleotide
  Sense strand starting at position 509 of SEQ ID NO: 587732
guaaauugauuguuaucag

SEQ ID NO: 814347 - RNA, 19 nt, Artificial Sequence
  Description of Artificial Sequence: Synthetic oligonucleotide
  Antisense strand to SEQ ID NO: 814346
cugauaacaaucaauuuac

SEQ ID NO: 814348 - RNA, 19 nt, Artificial Sequence
  Description of Artificial Sequence: Synthetic oligonucleotide
  Sense strand starting at position 551 of SEQ ID NO: 587732
gucuuucgguauuugagau

SEQ ID NO: 814349 - RNA, 19 nt, Artificial Sequence
  Description of Artificial Sequence: Synthetic oligonucleotide
  Antisense strand to SEQ ID NO: 814348
aucucaaauaccgaaagac

SEQ ID NO: 814350 - RNA, 19 nt, Artificial Sequence
  Description of Artificial Sequence: Synthetic oligonucleotide
  Sense strand starting at position 579 of SEQ ID NO: 587732
cuauguucccuacaguuua

SEQ ID NO: 814351 - RNA, 19 nt, Artificial Sequence
  Description of Artificial Sequence: Synthetic oligonucleotide
  Antisense strand to SEQ ID NO: 814350
uaaacuguagggaacauag

SEQ ID NO: 814352 - RNA, 19 nt, Artificial Sequence
  Description of Artificial Sequence: Synthetic oligonucleotide
  Sense strand starting at position 936 of SEQ ID NO: 587732
acguaaggcaguuacuuaa

SEQ ID NO: 814353 - RNA, 19 nt, Artificial Sequence
  Description of Artificial Sequence: Synthetic oligonucleotide
  Antisense strand to SEQ ID NO: 814352
uuaaguaacugccuuacgu

SEQ ID NO: 814354 - RNA, 19 nt, Artificial Sequence
  Description of Artificial Sequence: Synthetic oligonucleotide
  Sense strand starting at position 959 of SEQ ID NO: 587732
uuguguagaaaucgaauca

SEQ ID NO: 814355 - RNA, 19 nt, Artificial Sequence
  Description of Artificial Sequence: Synthetic oligonucleotide
  Antisense strand to SEQ ID NO: 814354
ugauucgauuucuacacaa

SEQ ID NO: 814356 - RNA, 19 nt, Artificial Sequence
  Description of Artificial Sequence: Synthetic oligonucleotide
  Sense strand starting at position 960 of SEQ ID NO: 587732
uguguagaaaucgaaucaa

SEQ ID NO: 814357 - RNA, 19 nt, Artificial Sequence
  Description of Artificial Sequence: Synthetic oligonucleotide
  Antisense strand to SEQ ID NO: 814356
uugauucgauuucuacaca

SEQ ID NO: 814358 - RNA, 19 nt, Artificial Sequence
  Description of Artificial Sequence: Synthetic oligonucleotide
  Sense strand starting at position 988 of SEQ ID NO: 587732
cugucugucacaggaagaa

SEQ ID NO: 814359 - RNA, 19 nt, Artificial Sequence
  Description of Artificial Sequence: Synthetic oligonucleotide
  Antisense strand to SEQ ID NO: 814358
uucuuccugugacagacag

SEQ ID NO: 814360 - RNA, 19 nt, Artificial Sequence
  Description of Artificial Sequence: Synthetic oligonucleotide
  Sense strand starting at position 1209 of SEQ ID NO: 587732
gacagucuacugggaguaa

SEQ ID NO: 814361 - RNA, 19 nt, Artificial Sequence
  Description of Artificial Sequence: Synthetic oligonucleotide
  Antisense strand to SEQ ID NO: 814360
uuacucccaguagacuguc

SEQ ID NO: 814362 - RNA, 19 nt, Artificial Sequence
  Description of Artificial Sequence: Synthetic oligonucleotide
  Sense strand starting at position 1379 of SEQ ID NO: 587732
auguaaagcaauggucaga

SEQ ID NO: 814363 - RNA, 19 nt, Artificial Sequence
  Description of Artificial Sequence: Synthetic oligonucleotide
  Antisense strand to SEQ ID NO: 814362
ucugaccauugcuuuacau

SEQ ID NO: 814364 - RNA, 19 nt, Artificial Sequence
  Description of Artificial Sequence: Synthetic oligonucleotide
  Sense strand starting at position 1495 of SEQ ID NO: 587732
uggagaagccuccagguuu

SEQ ID NO: 814365 - RNA, 19 nt, Artificial Sequence
  Description of Artificial Sequence: Synthetic oligonucleotide
  Antisense strand to SEQ ID NO: 814364
aaaccuggaggcuucucca

SEQ ID NO: 814366 - RNA, 19 nt, Artificial Sequence
  Description of Artificial Sequence: Synthetic oligonucleotide
  Sense strand starting at position 2220 of SEQ ID NO: 587732
aagggcauuguuuauuauu

SEQ ID NO: 814367 - RNA, 19 nt, Artificial Sequence
  Description of Artificial Sequence: Synthetic oligonucleotide
  Antisense strand to SEQ ID NO: 814366
aauaauaaacaaugcccuu

SEQ ID NO: 814368 - RNA, 19 nt, Artificial Sequence
  Description of Artificial Sequence: Synthetic oligonucleotide
  Sense strand starting at position 2347 of SEQ ID NO: 587732
agaauagagcaugguuacu

SEQ ID NO: 814369 - RNA, 19 nt, Artificial Sequence
  Description of Artificial Sequence: Synthetic oligonucleotide
  Antisense strand to SEQ ID NO: 814368
aguaaccaugcucuauucu

SEQ ID NO: 814370 - RNA, 19 nt, Artificial Sequence
  Description of Artificial Sequence: Synthetic oligonucleotide
  Sense strand starting at position 2392 of SEQ ID NO: 587732
aauggaugcuuugugauag

SEQ ID NO: 814371 - RNA, 19 nt, Artificial Sequence
  Description of Artificial Sequence: Synthetic oligonucleotide
  Antisense strand to SEQ ID NO: 814370
cuaucacaaagcauccauu

SEQ ID NO: 814372 - RNA, 19 nt, Artificial Sequence
  Description of Artificial Sequence: Synthetic oligonucleotide
  Sense strand starting at position 2408 of SEQ ID NO: 587732
uagacacuaggcuguaaau

SEQ ID NO: 814373 - RNA, 19 nt, Artificial Sequence
  Description of Artificial Sequence: Synthetic oligonucleotide
  Antisense strand to SEQ ID NO: 814372
auuuacagccuagugucua

SEQ ID NO: 814374 - RNA, 19 nt, Artificial Sequence
  Description of Artificial Sequence: Synthetic oligonucleotide
  Sense strand starting at position 2410 of SEQ ID NO: 587732
gacacuaggcuguaaauau

SEQ ID NO: 814375 - RNA, 19 nt, Artificial Sequence
  Description of Artificial Sequence: Synthetic oligonucleotide
  Antisense strand to SEQ ID NO: 814374
auauuuacagccuaguguc

SEQ ID NO: 814376 - RNA, 19 nt, Artificial Sequence
  Description of Artificial Sequence: Synthetic oligonucleotide
  Sense strand starting at position 2446 of SEQ ID NO: 587732
acuguacaacuguauuaca

SEQ ID NO: 814377 - RNA, 19 nt, Artificial Sequence
  Description of Artificial Sequence: Synthetic oligonucleotide
  Antisense strand to SEQ ID NO: 814376
uguaauacaguuguacagu

SEQ ID NO: 814378 - RNA, 19 nt, Artificial Sequence
  Description of Artificial Sequence: Synthetic oligonucleotide
  Sense strand starting at position 2477 of SEQ ID NO: 587732
uccagucuuggagaucuuu

SEQ ID NO: 814379 - RNA, 19 nt, Artificial Sequence
  Description of Artificial Sequence: Synthetic oligonucleotide
  Antisense strand to SEQ ID NO: 814378
aaagaucuccaagacugga

SEQ ID NO: 814380 - RNA, 19 nt, Artificial Sequence
  Description of Artificial Sequence: Synthetic oligonucleotide
  Sense strand starting at position 2955 of SEQ ID NO: 587732
uagacugagcauggugaua

SEQ ID NO: 814381 - RNA, 19 nt, Artificial Sequence
  Description of Artificial Sequence: Synthetic oligonucleotide
  Antisense strand to SEQ ID NO: 814380
uaucaccaugcucagucua

SEQ ID NO: 814382 - RNA, 19 nt, Artificial Sequence
  Description of Artificial Sequence: Synthetic oligonucleotide
  Sense strand starting at position 3093 of SEQ ID NO: 587732
cucuuuccauguuugagaa

SEQ ID NO: 814383 - RNA, 19 nt, Artificial Sequence
  Description of Artificial Sequence: Synthetic oligonucleotide
  Antisense strand to SEQ ID NO: 814382
uucucaaacauggaaagag

SEQ ID NO: 814384 - RNA, 19 nt, Artificial Sequence
  Description of Artificial Sequence: Synthetic oligonucleotide
  Sense strand starting at position 3094 of SEQ ID NO: 587732
ucuuuccauguuugagaaa

SEQ ID NO: 814385 - RNA, 19 nt, Artificial Sequence
  Description of Artificial Sequence: Synthetic oligonucleotide
  Antisense strand to SEQ ID NO: 814384
uuucucaaacauggaaaga

SEQ ID NO: 814386 - RNA, 19 nt, Artificial Sequence
  Description of Artificial Sequence: Synthetic oligonucleotide
  Sense strand starting at position 3106 of SEQ ID NO: 587732
ugagaaauuucucaucaug

SEQ ID NO: 814387 - RNA, 19 nt, Artificial Sequence
  Description of Artificial Sequence: Synthetic oligonucleotide
  Antisense strand to SEQ ID NO: 814386
caugaugagaaauuucuca

SEQ ID NO: 814388 - RNA, 19 nt, Artificial Sequence
  Description of Artificial Sequence: Synthetic oligonucleotide
  Sense strand starting at position 3201 of SEQ ID NO: 587732
uagaauuauguauggcuau

SEQ ID NO: 814389 - RNA, 19 nt, Artificial Sequence
  Description of Artificial Sequence: Synthetic oligonucleotide
  Antisense strand to SEQ ID NO: 814388
auagccauacauaauucua

SEQ ID NO: 814390 - RNA, 19 nt, Artificial Sequence
  Description of Artificial Sequence: Synthetic oligonucleotide
  Sense strand starting at position 3219 of SEQ ID NO: 587732
uuugauuugcuuuggcuga

SEQ ID NO: 814391 - RNA, 19 nt, Artificial Sequence
  Description of Artificial Sequence: Synthetic oligonucleotide
  Antisense strand to SEQ ID NO: 814390
ucagccaaagcaaaucaaa

SEQ ID NO: 814392 - RNA, 19 nt, Artificial Sequence
  Description of Artificial Sequence: Synthetic oligonucleotide
  Sense strand starting at position 3243 of SEQ ID NO: 587732
uguaauuagaagugagauu

SEQ ID NO: 814393 - RNA, 19 nt, Artificial Sequence
  Description of Artificial Sequence: Synthetic oligonucleotide
  Antisense strand to SEQ ID NO: 814392
aaucucacuucuaauuaca

SEQ ID NO: 814394 - RNA, 19 nt, Artificial Sequence
  Description of Artificial Sequence: Synthetic oligonucleotide
  Sense strand starting at position 3256 of SEQ ID NO: 587732
gagauuugucauggccagu

SEQ ID NO: 814395 - RNA, 19 nt, Artificial Sequence
  Description of Artificial Sequence: Synthetic oligonucleotide
  Antisense strand to SEQ ID NO: 814394
acuggccaugacaaaucuc

SEQ ID NO: 814396 - RNA, 19 nt, Artificial Sequence
  Description of Artificial Sequence: Synthetic oligonucleotide
  Sense strand starting at position 3411 of SEQ ID NO: 587732
uacuguguuguauaaggaa

SEQ ID NO: 814397 - RNA, 19 nt, Artificial Sequence
  Description of Artificial Sequence: Synthetic oligonucleotide
  Antisense strand to SEQ ID NO: 814396
uuccuuauacaacacagua

SEQ ID NO: 814398 - RNA, 19 nt, Artificial Sequence
  Description of Artificial Sequence: Synthetic oligonucleotide
  Sense strand starting at position 3527 of SEQ ID NO: 587732
augaaucuuggaugcagaa

SEQ ID NO: 814399 - RNA, 19 nt, Artificial Sequence
  Description of Artificial Sequence: Synthetic oligonucleotide
  Antisense strand to SEQ ID NO: 814398
uucugcauccaagauucau

SEQ ID NO: 814400 - RNA, 19 nt, Artificial Sequence
  Description of Artificial Sequence: Synthetic oligonucleotide
  Sense strand starting at position 3577 of SEQ ID NO: 587732
agaaacucauguuuccagu

SEQ ID NO: 814401 - RNA, 19 nt, Artificial Sequence
  Description of Artificial Sequence: Synthetic oligonucleotide
  Antisense strand to SEQ ID NO: 814400
acuggaaacaugaguuucu

SEQ ID NO: 814402 - RNA, 19 nt, Artificial Sequence
  Description of Artificial Sequence: Synthetic oligonucleotide
  Sense strand starting at position 3730 of SEQ ID NO: 587732
auggucagccuggaguuaa

SEQ ID NO: 814403 - RNA, 19 nt, Artificial Sequence
  Description of Artificial Sequence: Synthetic oligonucleotide
  Antisense strand to SEQ ID NO: 814402
uuaacuccaggcugaccau

SEQ ID NO: 814404 - RNA, 19 nt, Artificial Sequence
  Description of Artificial Sequence: Synthetic oligonucleotide
  Sense strand starting at position 3741 of SEQ ID NO: 587732
ggaguuaaaucuuucugaa

SEQ ID NO: 814405 - RNA, 19 nt, Artificial Sequence
  Description of Artificial Sequence: Synthetic oligonucleotide
  Antisense strand to SEQ ID NO: 814404
uucagaaagauuuaacucc

SEQ ID NO: 814406 - RNA, 19 nt, Artificial Sequence
  Description of Artificial Sequence: Synthetic oligonucleotide
  Sense strand starting at position 3751 of SEQ ID NO: 587732
cuuucugaacucuggcaga

SEQ ID NO: 814407 - RNA, 19 nt, Artificial Sequence
  Description of Artificial Sequence: Synthetic oligonucleotide
  Antisense strand to SEQ ID NO: 814406
ucugccagaguucagaaag

SEQ ID NO: 814408 - RNA, 19 nt, Artificial Sequence
  Description of Artificial Sequence: Synthetic oligonucleotide
  Sense strand starting at position 3785 of SEQ ID NO: 587732
caagcuagugacugagaaa

SEQ ID NO: 814409 - RNA, 19 nt, Artificial Sequence
  Description of Artificial Sequence: Synthetic oligonucleotide
  Antisense strand to SEQ ID NO: 814408
uuucucagucacuagcuug

SEQ ID NO: 814410 - RNA, 19 nt, Artificial Sequence
  Description of Artificial Sequence: Synthetic oligonucleotide
  Sense strand starting at position 3839 of SEQ ID NO: 587732
ugagguuauuugcaauuua

SEQ ID NO: 814411 - RNA, 19 nt, Artificial Sequence
  Description of Artificial Sequence: Synthetic oligonucleotide
  Antisense strand to SEQ ID NO: 814410
uaaauugcaaauaaccuca

SEQ ID NO: 814412 - RNA, 19 nt, Artificial Sequence
  Description of Artificial Sequence: Synthetic oligonucleotide
  Sense strand starting at position 3904 of SEQ ID NO: 587732
acuauuuguugagaaucca

SEQ ID NO: 814413 - RNA, 19 nt, Artificial Sequence
  Description of Artificial Sequence: Synthetic oligonucleotide
  Antisense strand to SEQ ID NO: 814412
uggauucucaacaaauagu

SEQ ID NO: 814414 - RNA, 19 nt, Artificial Sequence
  Description of Artificial Sequence: Synthetic oligonucleotide
  Sense strand starting at position 3926 of SEQ ID NO: 587732
uggaaagaugauuguucca

SEQ ID NO: 814415 - RNA, 19 nt, Artificial Sequence
  Description of Artificial Sequence: Synthetic oligonucleotide
  Antisense strand to SEQ ID NO: 814414
uggaacaaucaucuuucca

SEQ ID NO: 814416 - RNA, 19 nt, Artificial Sequence
  Description of Artificial Sequence: Synthetic oligonucleotide
  Sense strand starting at position 3928 of SEQ ID NO: 587732
gaaagaugauuguuccauu

SEQ ID NO: 814417 - RNA, 19 nt, Artificial Sequence
  Description of Artificial Sequence: Synthetic oligonucleotide
  Antisense strand to SEQ ID NO: 814416
aauggaacaaucaucuuuc

SEQ ID NO: 814418 - RNA, 19 nt, Artificial Sequence
  Description of Artificial Sequence: Synthetic oligonucleotide
  Sense strand starting at position 3960 of SEQ ID NO: 587732
gacaaugggucuuccaaua

SEQ ID NO: 814419 - RNA, 19 nt, Artificial Sequence
  Description of Artificial Sequence: Synthetic oligonucleotide
  Antisense strand to SEQ ID NO: 814418
uauuggaagacccauuguc

SEQ ID NO: 814420 - RNA, 19 nt, Artificial Sequence
  Description of Artificial Sequence: Synthetic oligonucleotide
  Sense strand starting at position 75 of SEQ ID NO: 587733
ucccuacgguucugggaaa

SEQ ID NO: 814421 - RNA, 19 nt, Artificial Sequence
  Description of Artificial Sequence: Synthetic oligonucleotide
  Antisense strand to SEQ ID NO: 814420
uuucccagaaccguaggga

SEQ ID NO: 814422 - RNA, 19 nt, Artificial Sequence
  Description of Artificial Sequence: Synthetic oligonucleotide
  Sense strand starting at position 245 of SEQ ID NO: 587733
cccacacuccuguguggau

SEQ ID NO: 814423 - RNA, 19 nt, Artificial Sequence
  Description of Artificial Sequence: Synthetic oligonucleotide
  Antisense strand to SEQ ID NO: 814422
auccacacaggaguguggg

SEQ ID NO: 814424 - RNA, 19 nt, Artificial Sequence
  Description of Artificial Sequence: Synthetic oligonucleotide
  Sense strand starting at position 721 of SEQ ID NO: 587733
auguguuugccucuggcca

SEQ ID NO: 814425 - RNA, 19 nt, Artificial Sequence
  Description of Artificial Sequence: Synthetic oligonucleotide
  Antisense strand to SEQ ID NO: 814424
uggccagaggcaaacacau

SEQ ID NO: 814426 - RNA, 19 nt, Artificial Sequence
  Description of Artificial Sequence: Synthetic oligonucleotide
  Sense strand starting at position 1002 of SEQ ID NO: 587733
ucacgugugccagaaagau

SEQ ID NO: 814427 - RNA, 19 nt, Artificial Sequence
  Description of Artificial Sequence: Synthetic oligonucleotide
  Antisense strand to SEQ ID NO: 814426
aucuuucuggcacacguga

SEQ ID NO: 814428 - RNA, 19 nt, Artificial Sequence
  Description of Artificial Sequence: Synthetic oligonucleotide
  Sense strand starting at position 1008 of SEQ ID NO: 587733
gugccagaaagauauguuu

SEQ ID NO: 814429 - RNA, 19 nt, Artificial Sequence
  Description of Artificial Sequence: Synthetic oligonucleotide
  Antisense strand to SEQ ID NO: 814428
aaacauaucuuucuggcac

SEQ ID NO: 814430 - RNA, 19 nt, Artificial Sequence
  Description of Artificial Sequence: Synthetic oligonucleotide
  Sense strand starting at position 1505 of SEQ ID NO: 587733
gagagaccucugcguggau

SEQ ID NO: 814431 - RNA, 19 nt, Artificial Sequence
  Description of Artificial Sequence: Synthetic oligonucleotide
  Antisense strand to SEQ ID NO: 814430
auccacgcagaggucucuc

SEQ ID NO: 814432 - RNA, 19 nt, Artificial Sequence
  Description of Artificial Sequence: Synthetic oligonucleotide
  Sense strand starting at position 1507 of SEQ ID NO: 587733
gagaccucugcguggauga

SEQ ID NO: 814433 - RNA, 19 nt, Artificial Sequence
  Description of Artificial Sequence: Synthetic oligonucleotide
  Antisense strand to SEQ ID NO: 814432
ucauccacgcagaggucuc

SEQ ID NO: 814434 - RNA, 19 nt, Artificial Sequence
  Description of Artificial Sequence: Synthetic oligonucleotide
  Sense strand starting at position 1672 of SEQ ID NO: 587733
agacgauguucccagcuga

SEQ ID NO: 814435 - RNA, 19 nt, Artificial Sequence
  Description of Artificial Sequence: Synthetic oligonucleotide
  Antisense strand to SEQ ID NO: 814434
ucagcugggaacaucgucu

SEQ ID NO: 814436 - RNA, 19 nt, Artificial Sequence
  Description of Artificial Sequence: Synthetic oligonucleotide
  Sense strand starting at position 1778 of SEQ ID NO: 587733
cgaaucugccuccaccaau

SEQ ID NO: 814437 - RNA, 19 nt, Artificial Sequence
  Description of Artificial Sequence: Synthetic oligonucleotide
  Antisense strand to SEQ ID NO: 814436
auugguggaggcagauucg

SEQ ID NO: 814438 - RNA, 19 nt, Artificial Sequence
  Description of Artificial Sequence: Synthetic oligonucleotide
  Sense strand starting at position 1811 of SEQ ID NO: 587733
cgcagcgucaggugauaau

SEQ ID NO: 814439 - RNA, 19 nt, Artificial Sequence
  Description of Artificial Sequence: Synthetic oligonucleotide
  Antisense strand to SEQ ID NO: 814438
auuaucaccugacgcugcg

SEQ ID NO: 814440 - RNA, 19 nt, Artificial Sequence
  Description of Artificial Sequence: Synthetic oligonucleotide
  Sense strand starting at position 1939 of SEQ ID NO: 587733
cccauucuuccaggacaag

SEQ ID NO: 814441 - RNA, 19 nt, Artificial Sequence
  Description of Artificial Sequence: Synthetic oligonucleotide
  Antisense strand to SEQ ID NO: 814440
cuuguccuggaagaauggg

SEQ ID NO: 814442 - RNA, 19 nt, Artificial Sequence
  Description of Artificial Sequence: Synthetic oligonucleotide
  Sense strand starting at position 1991 of SEQ ID NO: 587733
cuuggaaaucucugacuug

SEQ ID NO: 814443 - RNA, 19 nt, Artificial Sequence
  Description of Artificial Sequence: Synthetic oligonucleotide
  Antisense strand to SEQ ID NO: 814442
caagucagagauuuccaag

SEQ ID NO: 814444 - RNA, 19 nt, Artificial Sequence
  Description of Artificial Sequence: Synthetic oligonucleotide
  Sense strand starting at position 1992 of SEQ ID NO: 587733
uuggaaaucucugacuuga

SEQ ID NO: 814445 - RNA, 19 nt, Artificial Sequence
  Description of Artificial Sequence: Synthetic oligonucleotide
  Antisense strand to SEQ ID NO: 814444
ucaagucagagauuuccaa

SEQ ID NO: 814446 - RNA, 19 nt, Artificial Sequence
  Description of Artificial Sequence: Synthetic oligonucleotide
  Sense strand starting at position 2191 of SEQ ID NO: 587733
ggugaacugugguuccauu

SEQ ID NO: 814447 - RNA, 19 nt, Artificial Sequence
  Description of Artificial Sequence: Synthetic oligonucleotide
  Antisense strand to SEQ ID NO: 814446
aauggaaccacaguucacc

SEQ ID NO: 814448 - RNA, 19 nt, Artificial Sequence
  Description of Artificial Sequence: Synthetic oligonucleotide
  Sense strand starting at position 2447 of SEQ ID NO: 587733
gagagaauguaauucugcu

SEQ ID NO: 814449 - RNA, 19 nt, Artificial Sequence
  Description of Artificial Sequence: Synthetic oligonucleotide
  Antisense strand to SEQ ID NO: 814448
agcagaauuacauucucuc

SEQ ID NO: 814450 - RNA, 19 nt, Artificial Sequence
  Description of Artificial Sequence: Synthetic oligonucleotide
  Sense strand starting at position 2483 of SEQ ID NO: 587733
cuguucugccaucaagaag

SEQ ID NO: 814451 - RNA, 19 nt, Artificial Sequence
  Description of Artificial Sequence: Synthetic oligonucleotide
  Antisense strand to SEQ ID NO: 814450
cuucuugauggcagaacag

SEQ ID NO: 814452 - RNA, 19 nt, Artificial Sequence
  Description of Artificial Sequence: Synthetic oligonucleotide
  Sense strand starting at position 2595 of SEQ ID NO: 587733
ggcucacagucagauggau

SEQ ID NO: 814453 - RNA, 19 nt, Artificial Sequence
  Description of Artificial Sequence: Synthetic oligonucleotide
  Antisense strand to SEQ ID NO: 814452
auccaucugacugugagcc

SEQ ID NO: 814454 - RNA, 19 nt, Artificial Sequence
  Description of Artificial Sequence: Synthetic oligonucleotide
  Sense strand starting at position 2607 of SEQ ID NO: 587733
gauggaugugcugagaauc

SEQ ID NO: 814455 - RNA, 19 nt, Artificial Sequence
  Description of Artificial Sequence: Synthetic oligonucleotide
  Antisense strand to SEQ ID NO: 814454
gauucucagcacauccauc

SEQ ID NO: 814456 - RNA, 19 nt, Artificial Sequence
  Description of Artificial Sequence: Synthetic oligonucleotide
  Sense strand starting at position 2692 of SEQ ID NO: 587733
ugggaucacacagguuuau

SEQ ID NO: 814457 - RNA, 19 nt, Artificial Sequence
  Description of Artificial Sequence: Synthetic oligonucleotide
  Antisense strand to SEQ ID NO: 814456
auaaaccugugugauccca

SEQ ID NO: 814458 - RNA, 19 nt, Artificial Sequence
  Description of Artificial Sequence: Synthetic oligonucleotide
  Sense strand starting at position 2701 of SEQ ID NO: 587733
acagguuuauugucaucau

SEQ ID NO: 814459 - RNA, 19 nt, Artificial Sequence
  Description of Artificial Sequence: Synthetic oligonucleotide
  Antisense strand to SEQ ID NO: 814458
augaugacaauaaaccugu

SEQ ID NO: 814460 - RNA, 19 nt, Artificial Sequence
  Description of Artificial Sequence: Synthetic oligonucleotide
  Sense strand starting at position 2702 of SEQ ID NO: 587733
cagguuuauugucaucaug

SEQ ID NO: 814461 - RNA, 19 nt, Artificial Sequence
  Description of Artificial Sequence: Synthetic oligonucleotide
  Antisense strand to SEQ ID NO: 814460
caugaugacaauaaaccug

SEQ ID NO: 814462 - RNA, 19 nt, Artificial Sequence
  Description of Artificial Sequence: Synthetic oligonucleotide
  Sense strand starting at position 2704 of SEQ ID NO: 587733
gguuuauugucaucaugga

SEQ ID NO: 814463 - RNA, 19 nt, Artificial Sequence
  Description of Artificial Sequence: Synthetic oligonucleotide
  Antisense strand to SEQ ID NO: 814462
uccaugaugacaauaaacc

SEQ ID NO: 814464 - RNA, 19 nt, Artificial Sequence
  Description of Artificial Sequence: Synthetic oligonucleotide
  Sense strand starting at position 2705 of SEQ ID NO: 587733
guuuauugucaucauggaa

SEQ ID NO: 814465 - RNA, 19 nt, Artificial Sequence
  Description of Artificial Sequence: Synthetic oligonucleotide
  Antisense strand to SEQ ID NO: 814464
uuccaugaugacaauaaac

SEQ ID NO: 814466 - RNA, 19 nt, Artificial Sequence
  Description of Artificial Sequence: Synthetic oligonucleotide
  Sense strand starting at position 2708 of SEQ ID NO: 587733
uauugucaucauggaauga

SEQ ID NO: 814467 - RNA, 19 nt, Artificial Sequence
  Description of Artificial Sequence: Synthetic oligonucleotide
  Antisense strand to SEQ ID NO: 814466
ucauuccaugaugacaaua

SEQ ID NO: 814468 - RNA, 19 nt, Artificial Sequence
  Description of Artificial Sequence: Synthetic oligonucleotide
  Sense strand starting at position 2792 of SEQ ID NO: 587733
uguucuuguucccaucaua

SEQ ID NO: 814469 - RNA, 19 nt, Artificial Sequence
  Description of Artificial Sequence: Synthetic oligonucleotide
  Antisense strand to SEQ ID NO: 814468
uaugaugggaacaagaaca

SEQ ID NO: 814470 - RNA, 19 nt, Artificial Sequence
  Description of Artificial Sequence: Synthetic oligonucleotide
  Sense strand starting at position 2839 of SEQ ID NO: 587733
caguccucuacgggagaga

SEQ ID NO: 814471 - RNA, 19 nt, Artificial Sequence
  Description of Artificial Sequence: Synthetic oligonucleotide
  Antisense strand to SEQ ID NO: 814470
ucucucccguagaggacug

SEQ ID NO: 814472 - RNA, 19 nt, Artificial Sequence
  Description of Artificial Sequence: Synthetic oligonucleotide
  Sense strand starting at position 3084 of SEQ ID NO: 587733
gugagcugagccuaagaaa

SEQ ID NO: 814473 - RNA, 19 nt, Artificial Sequence
  Description of Artificial Sequence: Synthetic oligonucleotide
  Antisense strand to SEQ ID NO: 814472
uuucuuaggcucagcucac

SEQ ID NO: 814474 - RNA, 19 nt, Artificial Sequence
  Description of Artificial Sequence: Synthetic oligonucleotide
  Sense strand starting at position 3214 of SEQ ID NO: 587733
gccugaaacggcugugaga

SEQ ID NO: 814475 - RNA, 19 nt, Artificial Sequence
  Description of Artificial Sequence: Synthetic oligonucleotide
  Antisense strand to SEQ ID NO: 814474
ucucacagccguuucaggc

SEQ ID NO: 814476 - RNA, 19 nt, Artificial Sequence
  Description of Artificial Sequence: Synthetic oligonucleotide
  Sense strand starting at position 3326 of SEQ ID NO: 587733
uacguccugcuccgacaua

SEQ ID NO: 814477 - RNA, 19 nt, Artificial Sequence
  Description of Artificial Sequence: Synthetic oligonucleotide
  Antisense strand to SEQ ID NO: 814476
uaugucggagcaggacgua

SEQ ID NO: 814478 - RNA, 19 nt, Artificial Sequence
  Description of Artificial Sequence: Synthetic oligonucleotide
  Sense strand starting at position 3380 of SEQ ID NO: 587733
aacguaaccuccuggugau

SEQ ID NO: 814479 - RNA, 19 nt, Artificial Sequence
  Description of Artificial Sequence: Synthetic oligonucleotide
  Antisense strand to SEQ ID NO: 814478
aucaccaggagguuacguu

SEQ ID NO: 814480 - RNA, 19 nt, Artificial Sequence
  Description of Artificial Sequence: Synthetic oligonucleotide
  Sense strand starting at position 3443 of SEQ ID NO: 587733
cgcaguggcucacaagaau

SEQ ID NO: 814481 - RNA, 19 nt, Artificial Sequence
  Description of Artificial Sequence: Synthetic oligonucleotide
  Antisense strand to SEQ ID NO: 814480
auucuugugagccacugcg

SEQ ID NO: 814482 - RNA, 19 nt, Artificial Sequence
  Description of Artificial Sequence: Synthetic oligonucleotide
  Sense strand starting at position 3452 of SEQ ID NO: 587733
ucacaagaauccgaacacu

SEQ ID NO: 814483 - RNA, 19 nt, Artificial Sequence
  Description of Artificial Sequence: Synthetic oligonucleotide
  Antisense strand to SEQ ID NO: 814482
aguguucggauucuuguga

SEQ ID NO: 814484 - RNA, 19 nt, Artificial Sequence
  Description of Artificial Sequence: Synthetic oligonucleotide
  Sense strand starting at position 3698 of SEQ ID NO: 587733
gagugagauugugccucga

SEQ ID NO: 814485 - RNA, 19 nt, Artificial Sequence
  Description of Artificial Sequence: Synthetic oligonucleotide
  Antisense strand to SEQ ID NO: 814484
ucgaggcacaaucucacuc

SEQ ID NO: 814486 - RNA, 19 nt, Artificial Sequence
  Description of Artificial Sequence: Synthetic oligonucleotide
  Sense strand starting at position 3700 of SEQ ID NO: 587733
gugagauugugccucgaaa

SEQ ID NO: 814487 - RNA, 19 nt, Artificial Sequence
  Description of Artificial Sequence: Synthetic oligonucleotide
  Antisense strand to SEQ ID NO: 814486
uuucgaggcacaaucucac

SEQ ID NO: 814488 - RNA, 19 nt, Artificial Sequence
  Description of Artificial Sequence: Synthetic oligonucleotide
  Sense strand starting at position 3788 of SEQ ID NO: 587733
gcagguucucugugacuug

SEQ ID NO: 814489 - RNA, 19 nt, Artificial Sequence
  Description of Artificial Sequence: Synthetic oligonucleotide
  Antisense strand to SEQ ID NO: 814488
caagucacagagaaccugc

SEQ ID NO: 814490 - RNA, 19 nt, Artificial Sequence
  Description of Artificial Sequence: Synthetic oligonucleotide
  Sense strand starting at position 3856 of SEQ ID NO: 587733
ccaccuucucgggauguca

SEQ ID NO: 814491 - RNA, 19 nt, Artificial Sequence
  Description of Artificial Sequence: Synthetic oligonucleotide
  Antisense strand to SEQ ID NO: 814490
ugacaucccgagaaggugg

SEQ ID NO: 814492 - RNA, 19 nt, Artificial Sequence
  Description of Artificial Sequence: Synthetic oligonucleotide
  Sense strand starting at position 247 of SEQ ID NO: 587734
gacgcuggacuuuaaauca

SEQ ID NO: 814493 - RNA, 19 nt, Artificial Sequence
  Description of Artificial Sequence: Synthetic oligonucleotide
  Antisense strand to SEQ ID NO: 814492
ugauuuaaaguccagcguc

SEQ ID NO: 814494 - RNA, 19 nt, Artificial Sequence
  Description of Artificial Sequence: Synthetic oligonucleotide
  Sense strand starting at position 437 of SEQ ID NO: 587734
cacuguuaucuggacagca

SEQ ID NO: 814495 - RNA, 19 nt, Artificial Sequence
  Description of Artificial Sequence: Synthetic oligonucleotide
  Antisense strand to SEQ ID NO: 814494
ugcuguccagauaacagug

SEQ ID NO: 814496 - RNA, 19 nt, Artificial Sequence
  Description of Artificial Sequence: Synthetic oligonucleotide
  Sense strand starting at position 439 of SEQ ID NO: 587734
cuguuaucuggacagcaaa

SEQ ID NO: 814497 - RNA, 19 nt, Artificial Sequence
  Description of Artificial Sequence: Synthetic oligonucleotide
  Antisense strand to SEQ ID NO: 814496
uuugcuguccagauaacag

SEQ ID NO: 814498 - RNA, 19 nt, Artificial Sequence
  Description of Artificial Sequence: Synthetic oligonucleotide
  Sense strand starting at position 686 of SEQ ID NO: 587734
uuccaaaugugaucaguca

SEQ ID NO: 814499 - RNA, 19 nt, Artificial Sequence
  Description of Artificial Sequence: Synthetic oligonucleotide
  Antisense strand to SEQ ID NO: 814498
ugacugaucacauuuggaa

SEQ ID NO: 814500 - RNA, 19 nt, Artificial Sequence
  Description of Artificial Sequence: Synthetic oligonucleotide
  Sense strand starting at position 687 of SEQ ID NO: 587734
uccaaaugugaucagucaa

SEQ ID NO: 814501 - RNA, 19 nt, Artificial Sequence
  Description of Artificial Sequence: Synthetic oligonucleotide
  Antisense strand to SEQ ID NO: 814500
uugacugaucacauuugga

SEQ ID NO: 814502 - RNA, 19 nt, Artificial Sequence
  Description of Artificial Sequence: Synthetic oligonucleotide
  Sense strand starting at position 785 of SEQ ID NO: 587734
auagauucucucuaucugu

SEQ ID NO: 814503 - RNA, 19 nt, Artificial Sequence
  Description of Artificial Sequence: Synthetic oligonucleotide
  Antisense strand to SEQ ID NO: 814502
acagauagagagaaucuau

SEQ ID NO: 814504 - RNA, 19 nt, Artificial Sequence
  Description of Artificial Sequence: Synthetic oligonucleotide
  Sense strand starting at position 906 of SEQ ID NO: 587734
guccauauacccggacaua

SEQ ID NO: 814505 - RNA, 19 nt, Artificial Sequence
  Description of Artificial Sequence: Synthetic oligonucleotide
  Antisense strand to SEQ ID NO: 814504
uauguccggguauauggac

SEQ ID NO: 814506 - RNA, 19 nt, Artificial Sequence
  Description of Artificial Sequence: Synthetic oligonucleotide
  Sense strand starting at position 940 of SEQ ID NO: 587734
guuugagauucugcagaug

SEQ ID NO: 814507 - RNA, 19 nt, Artificial Sequence
  Description of Artificial Sequence: Synthetic oligonucleotide
  Antisense strand to SEQ ID NO: 814506
caucugcagaaucucaaac

SEQ ID NO: 814508 - RNA, 19 nt, Artificial Sequence
  Description of Artificial Sequence: Synthetic oligonucleotide
  Sense strand starting at position 943 of SEQ ID NO: 587734
ugagauucugcagauguac

SEQ ID NO: 814509 - RNA, 19 nt, Artificial Sequence
  Description of Artificial Sequence: Synthetic oligonucleotide
  Antisense strand to SEQ ID NO: 814508
guacaucugcagaaucuca

SEQ ID NO: 814510 - RNA, 19 nt, Artificial Sequence
  Description of Artificial Sequence: Synthetic oligonucleotide
  Sense strand starting at position 949 of SEQ ID NO: 587734
ucugcagauguacaauaua

SEQ ID NO: 814511 - RNA, 19 nt, Artificial Sequence
  Description of Artificial Sequence: Synthetic oligonucleotide
  Antisense strand to SEQ ID NO: 814510
uauauuguacaucugcaga

SEQ ID NO: 814512 - RNA, 19 nt, Artificial Sequence
  Description of Artificial Sequence: Synthetic oligonucleotide
  Sense strand starting at position 1327 of SEQ ID NO: 587734
ugcuuuaaagcagaaaggu

SEQ ID NO: 814513 - RNA, 19 nt, Artificial Sequence
  Description of Artificial Sequence: Synthetic oligonucleotide
  Antisense strand to SEQ ID NO: 814512
accuuucugcuuuaaagca

SEQ ID NO: 814514 - RNA, 19 nt, Artificial Sequence
  Description of Artificial Sequence: Synthetic oligonucleotide
  Sense strand starting at position 1374 of SEQ ID NO: 587734
gccagaggguaugaauuua

SEQ ID NO: 814515 - RNA, 19 nt, Artificial Sequence
  Description of Artificial Sequence: Synthetic oligonucleotide
  Antisense strand to SEQ ID NO: 814514
uaaauucauacccucuggc

SEQ ID NO: 814516 - RNA, 19 nt, Artificial Sequence
  Description of Artificial Sequence: Synthetic oligonucleotide
  Sense strand starting at position 1397 of SEQ ID NO: 587734
gacaucauuugggagcauu

SEQ ID NO: 814517 - RNA, 19 nt, Artificial Sequence
  Description of Artificial Sequence: Synthetic oligonucleotide
  Antisense strand to SEQ ID NO: 814516
aaugcucccaaaugauguc

SEQ ID NO: 814518 - RNA, 19 nt, Artificial Sequence
  Description of Artificial Sequence: Synthetic oligonucleotide
  Sense strand starting at position 1410 of SEQ ID NO: 587734
agcauugcuugauuugacu

SEQ ID NO: 814519 - RNA, 19 nt, Artificial Sequence
  Description of Artificial Sequence: Synthetic oligonucleotide
  Antisense strand to SEQ ID NO: 814518
agucaaaucaagcaaugcu

SEQ ID NO: 814520 - RNA, 19 nt, Artificial Sequence
  Description of Artificial Sequence: Synthetic oligonucleotide
  Sense strand starting at position 1702 of SEQ ID NO: 587734
aacagagaaugugcugaua

SEQ ID NO: 814521 - RNA, 19 nt, Artificial Sequence
  Description of Artificial Sequence: Synthetic oligonucleotide
  Antisense strand to SEQ ID NO: 814520
uaucagcacauucucuguu

SEQ ID NO: 814522 - RNA, 19 nt, Artificial Sequence
  Description of Artificial Sequence: Synthetic oligonucleotide
  Sense strand starting at position 1715 of SEQ ID NO: 587734
cugauaaugucugccagac

SEQ ID NO: 814523 - RNA, 19 nt, Artificial Sequence
  Description of Artificial Sequence: Synthetic oligonucleotide
  Antisense strand to SEQ ID NO: 814522
gucuggcagacauuaucag

SEQ ID NO: 814524 - RNA, 19 nt, Artificial Sequence
  Description of Artificial Sequence: Synthetic oligonucleotide
  Sense strand starting at position 2382 of SEQ ID NO: 587734
guaaaugacaugggagcua

SEQ ID NO: 814525 - RNA, 19 nt, Artificial Sequence
  Description of Artificial Sequence: Synthetic oligonucleotide
  Antisense strand to SEQ ID NO: 814524
uagcucccaugucauuuac

SEQ ID NO: 814526 - RNA, 19 nt, Artificial Sequence
  Description of Artificial Sequence: Synthetic oligonucleotide
  Sense strand starting at position 2483 of SEQ ID NO: 587734
caggcaaaucgguaguaac

SEQ ID NO: 814527 - RNA, 19 nt, Artificial Sequence
  Description of Artificial Sequence: Synthetic oligonucleotide
  Antisense strand to SEQ ID NO: 814526
guuacuaccgauuugccug

SEQ ID NO: 814528 - RNA, 19 nt, Artificial Sequence
  Description of Artificial Sequence: Synthetic oligonucleotide
  Sense strand starting at position 2525 of SEQ ID NO: 587734
gauaauagaugcucaagug

SEQ ID NO: 814529 - RNA, 19 nt, Artificial Sequence
  Description of Artificial Sequence: Synthetic oligonucleotide
  Antisense strand to SEQ ID NO: 814528
cacuugagcaucuauuauc

SEQ ID NO: 814530 - RNA, 19 nt, Artificial Sequence
  Description of Artificial Sequence: Synthetic oligonucleotide
  Sense strand starting at position 2545 of SEQ ID NO: 587734
cuguguucucugcuuccau

SEQ ID NO: 814531 - RNA, 19 nt, Artificial Sequence
  Description of Artificial Sequence: Synthetic oligonucleotide
  Antisense strand to SEQ ID NO: 814530
auggaagcagagaacacag

SEQ ID NO: 814532 - RNA, 19 nt, Artificial Sequence
  Description of Artificial Sequence: Synthetic oligonucleotide
  Sense strand starting at position 2566 of SEQ ID NO: 587734
ggcugcauuccugugcuuu

SEQ ID NO: 814533 - RNA, 19 nt, Artificial Sequence
  Description of Artificial Sequence: Synthetic oligonucleotide
  Antisense strand to SEQ ID NO: 814532
aaagcacaggaaugcagcc

SEQ ID NO: 814534 - RNA, 19 nt, Artificial Sequence
  Description of Artificial Sequence: Synthetic oligonucleotide
  Sense strand starting at position 2572 of SEQ ID NO: 587734
auuccugugcuuuauauau

SEQ ID NO: 814535 - RNA, 19 nt, Artificial Sequence
  Description of Artificial Sequence: Synthetic oligonucleotide
  Antisense strand to SEQ ID NO: 814534
auauauaaagcacaggaau

SEQ ID NO: 814536 - RNA, 19 nt, Artificial Sequence
  Description of Artificial Sequence: Synthetic oligonucleotide
  Sense strand starting at position 2694 of SEQ ID NO: 587734
agagaagcucauggcaaau

SEQ ID NO: 814537 - RNA, 19 nt, Artificial Sequence
  Description of Artificial Sequence: Synthetic oligonucleotide
  Antisense strand to SEQ ID NO: 814536
auuugccaugagcuucucu

SEQ ID NO: 814538 - RNA, 19 nt, Artificial Sequence
  Description of Artificial Sequence: Synthetic oligonucleotide
  Sense strand starting at position 2740 of SEQ ID NO: 587734
agguuuagagcauauaguu

SEQ ID NO: 814539 - RNA, 19 nt, Artificial Sequence
  Description of Artificial Sequence: Synthetic oligonucleotide
  Antisense strand to SEQ ID NO: 814538
aacuauaugcucuaaaccu

SEQ ID NO: 814540 - RNA, 19 nt, Artificial Sequence
  Description of Artificial Sequence: Synthetic oligonucleotide
  Sense strand starting at position 2795 of SEQ ID NO: 587734
aauguauuagagggcauaa

SEQ ID NO: 814541 - RNA, 19 nt, Artificial Sequence
  Description of Artificial Sequence: Synthetic oligonucleotide
  Antisense strand to SEQ ID NO: 814540
uuaugcccucuaauacauu

SEQ ID NO: 814542 - RNA, 19 nt, Artificial Sequence
  Description of Artificial Sequence: Synthetic oligonucleotide
  Sense strand starting at position 2898 of SEQ ID NO: 587734
gucuaugucaggcaaagca

SEQ ID NO: 814543 - RNA, 19 nt, Artificial Sequence
  Description of Artificial Sequence: Synthetic oligonucleotide
  Antisense strand to SEQ ID NO: 814542
ugcuuugccugacauagac

SEQ ID NO: 814544 - RNA, 19 nt, Artificial Sequence
  Description of Artificial Sequence: Synthetic oligonucleotide
  Sense strand starting at position 2930 of SEQ ID NO: 587734
gaacauuggugcucuauaa

SEQ ID NO: 814545 - RNA, 19 nt, Artificial Sequence
  Description of Artificial Sequence: Synthetic oligonucleotide
  Antisense strand to SEQ ID NO: 814544
uuauagagcaccaauguuc

SEQ ID NO: 814546 - RNA, 19 nt, Artificial Sequence
  Description of Artificial Sequence: Synthetic oligonucleotide
  Sense strand starting at position 2934 of SEQ ID NO: 587734
auuggugcucuauaaugaa

SEQ ID NO: 814547 - RNA, 19 nt, Artificial Sequence
  Description of Artificial Sequence: Synthetic oligonucleotide
  Antisense strand to SEQ ID NO: 814546
uucauuauagagcaccaau

SEQ ID NO: 814548 - RNA, 19 nt, Artificial Sequence
  Description of Artificial Sequence: Synthetic oligonucleotide
  Sense strand starting at position 3001 of SEQ ID NO: 587734
acuuacagucaguagcaau

SEQ ID NO: 814549 - RNA, 19 nt, Artificial Sequence
  Description of Artificial Sequence: Synthetic oligonucleotide
  Antisense strand to SEQ ID NO: 814548
auugcuacugacuguaagu

SEQ ID NO: 814550 - RNA, 19 nt, Artificial Sequence
  Description of Artificial Sequence: Synthetic oligonucleotide
  Sense strand starting at position 3150 of SEQ ID NO: 587734
cagaaaugauggucaugug

SEQ ID NO: 814551 - RNA, 19 nt, Artificial Sequence
  Description of Artificial Sequence: Synthetic oligonucleotide
  Antisense strand to SEQ ID NO: 814550
cacaugaccaucauuucug

SEQ ID NO: 814552 - RNA, 19 nt, Artificial Sequence
  Description of Artificial Sequence: Synthetic oligonucleotide
  Sense strand starting at position 3186 of SEQ ID NO: 587734
ccaaguuuccuaggauaua

SEQ ID NO: 814553 - RNA, 19 nt, Artificial Sequence
  Description of Artificial Sequence: Synthetic oligonucleotide
  Antisense strand to SEQ ID NO: 814552
uauauccuaggaaacuugg

SEQ ID NO: 814554 - RNA, 19 nt, Artificial Sequence
  Description of Artificial Sequence: Synthetic oligonucleotide
  Sense strand starting at position 3212 of SEQ ID NO: 587734
uuggaucacgaguaguaug

SEQ ID NO: 814555 - RNA, 19 nt, Artificial Sequence
  Description of Artificial Sequence: Synthetic oligonucleotide
  Antisense strand to SEQ ID NO: 814554
cauacuacucgugauccaa

SEQ ID NO: 814556 - RNA, 19 nt, Artificial Sequence
  Description of Artificial Sequence: Synthetic oligonucleotide
  Sense strand starting at position 3233 of SEQ ID NO: 587734
uggucaaaugcauacuguu

SEQ ID NO: 814557 - RNA, 19 nt, Artificial Sequence
  Description of Artificial Sequence: Synthetic oligonucleotide
  Antisense strand to SEQ ID NO: 814556
aacaguaugcauuugacca

SEQ ID NO: 814558 - RNA, 19 nt, Artificial Sequence
  Description of Artificial Sequence: Synthetic oligonucleotide
  Sense strand starting at position 3317 of SEQ ID NO: 587734
ucaucaaguucuuuaagag

SEQ ID NO: 814559 - RNA, 19 nt, Artificial Sequence
  Description of Artificial Sequence: Synthetic oligonucleotide
  Antisense strand to SEQ ID NO: 814558
cucuuaaagaacuugauga

SEQ ID NO: 814560 - RNA, 19 nt, Artificial Sequence
  Description of Artificial Sequence: Synthetic oligonucleotide
  Sense strand starting at position 3323 of SEQ ID NO: 587734
aguucuuuaagaggguagu

SEQ ID NO: 814561 - RNA, 19 nt, Artificial Sequence
  Description of Artificial Sequence: Synthetic oligonucleotide
  Antisense strand to SEQ ID NO: 814560
acuacccucuuaaagaacu

SEQ ID NO: 814562 - RNA, 19 nt, Artificial Sequence
  Description of Artificial Sequence: Synthetic oligonucleotide
  Sense strand starting at position 3478 of SEQ ID NO: 587734
agagccauagcugaaauau

SEQ ID NO: 814563 - RNA, 19 nt, Artificial Sequence
  Description of Artificial Sequence: Synthetic oligonucleotide
  Antisense strand to SEQ ID NO: 814562
auauuucagcuauggcucu

SEQ ID NO: 814564 - RNA, 19 nt, Artificial Sequence
  Description of Artificial Sequence: Synthetic oligonucleotide
  Sense strand starting at position 3560 of SEQ ID NO: 587734
ggaggugagcaaggauauu

SEQ ID NO: 814565 - RNA, 19 nt, Artificial Sequence
  Description of Artificial Sequence: Synthetic oligonucleotide
  Antisense strand to SEQ ID NO: 814564
aauauccuugcucaccucc

SEQ ID NO: 814566 - RNA, 19 nt, Artificial Sequence
  Description of Artificial Sequence: Synthetic oligonucleotide
  Sense strand starting at position 3774 of SEQ ID NO: 587734
gcucuaagaucuguggacu

SEQ ID NO: 814567 - RNA, 19 nt, Artificial Sequence
  Description of Artificial Sequence: Synthetic oligonucleotide
  Antisense strand to SEQ ID NO: 814566
aguccacagaucuuagagc

SEQ ID NO: 814568 - RNA, 19 nt, Artificial Sequence
  Description of Artificial Sequence: Synthetic oligonucleotide
  Sense strand starting at position 3775 of SEQ ID NO: 587734
cucuaagaucuguggacuu

SEQ ID NO: 814569 - RNA, 19 nt, Artificial Sequence
  Description of Artificial Sequence: Synthetic oligonucleotide
  Antisense strand to SEQ ID NO: 814568
aaguccacagaucuuagag

SEQ ID NO: 814570 - RNA, 19 nt, Artificial Sequence
  Description of Artificial Sequence: Synthetic oligonucleotide
  Sense strand starting at position 3927 of SEQ ID NO: 587734
ugaguucuugcuuagaacc

SEQ ID NO: 814571 - RNA, 19 nt, Artificial Sequence
  Description of Artificial Sequence: Synthetic oligonucleotide
  Antisense strand to SEQ ID NO: 814570
gguucuaagcaagaacuca

SEQ ID NO: 814572 - RNA, 19 nt, Artificial Sequence
  Description of Artificial Sequence: Synthetic oligonucleotide
  Sense strand starting at position 49 of SEQ ID NO: 587735
guaggaguauacucuuaua

SEQ ID NO: 814573 - RNA, 19 nt, Artificial Sequence
  Description of Artificial Sequence: Synthetic oligonucleotide
  Antisense strand to SEQ ID NO: 814572
uauaagaguauacuccuac

SEQ ID NO: 814574 - RNA, 19 nt, Artificial Sequence
  Description of Artificial Sequence: Synthetic oligonucleotide
  Sense strand starting at position 68 of SEQ ID NO: 587735
acauauaagugagccucaa

SEQ ID NO: 814575 - RNA, 19 nt, Artificial Sequence
  Description of Artificial Sequence: Synthetic oligonucleotide
  Antisense strand to SEQ ID NO: 814574
uugaggcucacuuauaugu

SEQ ID NO: 814576 - RNA, 19 nt, Artificial Sequence
  Description of Artificial Sequence: Synthetic oligonucleotide
  Sense strand starting at position 72 of SEQ ID NO: 587735
auaagugagccucaaucca

SEQ ID NO: 814577 - RNA, 19 nt, Artificial Sequence
  Description of Artificial Sequence: Synthetic oligonucleotide
  Antisense strand to SEQ ID NO: 814576
uggauugaggcucacuuau

SEQ ID NO: 814578 - RNA, 19 nt, Artificial Sequence
  Description of Artificial Sequence: Synthetic oligonucleotide
  Sense strand starting at position 186 of SEQ ID NO: 587735
ccguuuacuguccauaaau

SEQ ID NO: 814579 - RNA, 19 nt, Artificial Sequence
  Description of Artificial Sequence: Synthetic oligonucleotide
  Antisense strand to SEQ ID NO: 814578
auuuauggacaguaaacgg

SEQ ID NO: 814580 - RNA, 19 nt, Artificial Sequence
  Description of Artificial Sequence: Synthetic oligonucleotide
  Sense strand starting at position 188 of SEQ ID NO: 587735
guuuacuguccauaaauac

SEQ ID NO: 814581 - RNA, 19 nt, Artificial Sequence
  Description of Artificial Sequence: Synthetic oligonucleotide
  Antisense strand to SEQ ID NO: 814580
guauuuauggacaguaaac

SEQ ID NO: 814582 - RNA, 19 nt, Artificial Sequence
  Description of Artificial Sequence: Synthetic oligonucleotide
  Sense strand starting at position 421 of SEQ ID NO: 587735
ugacaaggauuugacaauu

SEQ ID NO: 814583 - RNA, 19 nt, Artificial Sequence
  Description of Artificial Sequence: Synthetic oligonucleotide
  Antisense strand to SEQ ID NO: 814582
aauugucaaauccuuguca

SEQ ID NO: 814584 - RNA, 19 nt, Artificial Sequence
  Description of Artificial Sequence: Synthetic oligonucleotide
  Sense strand starting at position 439 of SEQ ID NO: 587735
uuggaauaacguugggaag

SEQ ID NO: 814585 - RNA, 19 nt, Artificial Sequence
  Description of Artificial Sequence: Synthetic oligonucleotide
  Antisense strand to SEQ ID NO: 814584
cuucccaacguuauuccaa

SEQ ID NO: 814586 - RNA, 19 nt, Artificial Sequence
  Description of Artificial Sequence: Synthetic oligonucleotide
  Sense strand starting at position 440 of SEQ ID NO: 587735
uggaauaacguugggaaga

SEQ ID NO: 814587 - RNA, 19 nt, Artificial Sequence
  Description of Artificial Sequence: Synthetic oligonucleotide
  Antisense strand to SEQ ID NO: 814586
ucuucccaacguuauucca

SEQ ID NO: 814588 - RNA, 19 nt, Artificial Sequence
  Description of Artificial Sequence: Synthetic oligonucleotide
  Sense strand starting at position 1022 of SEQ ID NO: 587735
gagugcuaacagcacuuau

SEQ ID NO: 814589 - RNA, 19 nt, Artificial Sequence
  Description of Artificial Sequence: Synthetic oligonucleotide
  Antisense strand to SEQ ID NO: 814588
auaagugcuguuagcacuc

SEQ ID NO: 814590 - RNA, 19 nt, Artificial Sequence
  Description of Artificial Sequence: Synthetic oligonucleotide
  Sense strand starting at position 1419 of SEQ ID NO: 587735
caucuuggacaaugugauu

SEQ ID NO: 814591 - RNA, 19 nt, Artificial Sequence
  Description of Artificial Sequence: Synthetic oligonucleotide
  Antisense strand to SEQ ID NO: 814590
aaucacauuguccaagaug

SEQ ID NO: 814592 - RNA, 19 nt, Artificial Sequence
  Description of Artificial Sequence: Synthetic oligonucleotide
  Sense strand starting at position 1424 of SEQ ID NO: 587735
uggacaaugugauuacagu

SEQ ID NO: 814593 - RNA, 19 nt, Artificial Sequence
  Description of Artificial Sequence: Synthetic oligonucleotide
  Antisense strand to SEQ ID NO: 814592
acuguaaucacauugucca

SEQ ID NO: 814594 - RNA, 19 nt, Artificial Sequence
  Description of Artificial Sequence: Synthetic oligonucleotide
  Sense strand starting at position 2332 of SEQ ID NO: 587735
uguguaaagagcugaacuu

SEQ ID NO: 814595 - RNA, 19 nt, Artificial Sequence
  Description of Artificial Sequence: Synthetic oligonucleotide
  Antisense strand to SEQ ID NO: 814594
aaguucagcucuuuacaca

SEQ ID NO: 814596 - RNA, 19 nt, Artificial Sequence
  Description of Artificial Sequence: Synthetic oligonucleotide
  Sense strand starting at position 2333 of SEQ ID NO: 587735
guguaaagagcugaacuua

SEQ ID NO: 814597 - RNA, 19 nt, Artificial Sequence
  Description of Artificial Sequence: Synthetic oligonucleotide
  Antisense strand to SEQ ID NO: 814596
uaaguucagcucuuuacac

SEQ ID NO: 814598 - RNA, 19 nt, Artificial Sequence
  Description of Artificial Sequence: Synthetic oligonucleotide
  Sense strand starting at position 2350 of SEQ ID NO: 587735
uagggucauggauguugua

SEQ ID NO: 814599 - RNA, 19 nt, Artificial Sequence
  Description of Artificial Sequence: Synthetic oligonucleotide
  Antisense strand to SEQ ID NO: 814598
uacaacauccaugacccua

SEQ ID NO: 814600 - RNA, 19 nt, Artificial Sequence
  Description of Artificial Sequence: Synthetic oligonucleotide
  Sense strand starting at position 2357 of SEQ ID NO: 587735
auggauguuguauggacaa

SEQ ID NO: 814601 - RNA, 19 nt, Artificial Sequence
  Description of Artificial Sequence: Synthetic oligonucleotide
  Antisense strand to SEQ ID NO: 814600
uuguccauacaacauccau

SEQ ID NO: 814602 - RNA, 19 nt, Artificial Sequence
  Description of Artificial Sequence: Synthetic oligonucleotide
  Sense strand starting at position 2403 of SEQ ID NO: 587735
aggacuuugcauuguaaug

SEQ ID NO: 814603 - RNA, 19 nt, Artificial Sequence
  Description of Artificial Sequence: Synthetic oligonucleotide
  Antisense strand to SEQ ID NO: 814602
cauuacaaugcaaaguccu

SEQ ID NO: 814604 - RNA, 19 nt, Artificial Sequence
  Description of Artificial Sequence: Synthetic oligonucleotide
  Sense strand starting at position 2468 of SEQ ID NO: 587735
acaaauggaugauagauaa

SEQ ID NO: 814605 - RNA, 19 nt, Artificial Sequence
  Description of Artificial Sequence: Synthetic oligonucleotide
  Antisense strand to SEQ ID NO: 814604
uuaucuaucauccauuugu

SEQ ID NO: 814606 - RNA, 19 nt, Artificial Sequence
  Description of Artificial Sequence: Synthetic oligonucleotide
  Sense strand starting at position 2530 of SEQ ID NO: 587735
agaagauaggucugcuauc

SEQ ID NO: 814607 - RNA, 19 nt, Artificial Sequence
  Description of Artificial Sequence: Synthetic oligonucleotide
  Antisense strand to SEQ ID NO: 814606
gauagcagaccuaucuucu

SEQ ID NO: 814608 - RNA, 19 nt, Artificial Sequence
  Description of Artificial Sequence: Synthetic oligonucleotide
  Sense strand starting at position 2531 of SEQ ID NO: 587735
gaagauaggucugcuaucu

SEQ ID NO: 814609 - RNA, 19 nt, Artificial Sequence
  Description of Artificial Sequence: Synthetic oligonucleotide
  Antisense strand to SEQ ID NO: 814608
agauagcagaccuaucuuc

SEQ ID NO: 814610 - RNA, 19 nt, Artificial Sequence
  Description of Artificial Sequence: Synthetic oligonucleotide
  Sense strand starting at position 2539 of SEQ ID NO: 587735
gucugcuaucuaucgguuu

SEQ ID NO: 814611 - RNA, 19 nt, Artificial Sequence
  Description of Artificial Sequence: Synthetic oligonucleotide
  Antisense strand to SEQ ID NO: 814610
aaaccgauagauagcagac

SEQ ID NO: 814612 - RNA, 19 nt, Artificial Sequence
  Description of Artificial Sequence: Synthetic oligonucleotide
  Sense strand starting at position 2669 of SEQ ID NO: 587735
acuggaagguugccuuuau

SEQ ID NO: 814613 - RNA, 19 nt, Artificial Sequence
  Description of Artificial Sequence: Synthetic oligonucleotide
  Antisense strand to SEQ ID NO: 814612
auaaaggcaaccuuccagu

SEQ ID NO: 814614 - RNA, 19 nt, Artificial Sequence
  Description of Artificial Sequence: Synthetic oligonucleotide
  Sense strand starting at position 2673 of SEQ ID NO: 587735
gaagguugccuuuauuaua

SEQ ID NO: 814615 - RNA, 19 nt, Artificial Sequence
  Description of Artificial Sequence: Synthetic oligonucleotide
  Antisense strand to SEQ ID NO: 814614
uauaauaaaggcaaccuuc

SEQ ID NO: 814616 - RNA, 19 nt, Artificial Sequence
  Description of Artificial Sequence: Synthetic oligonucleotide
  Sense strand starting at position 2736 of SEQ ID NO: 587735
augguaaggcuccauagau

SEQ ID NO: 814617 - RNA, 19 nt, Artificial Sequence
  Description of Artificial Sequence: Synthetic oligonucleotide
  Antisense strand to SEQ ID NO: 814616
aucuauggagccuuaccau

SEQ ID NO: 814618 - RNA, 19 nt, Artificial Sequence
  Description of Artificial Sequence: Synthetic oligonucleotide
  Sense strand starting at position 2745 of SEQ ID NO: 587735
cuccauagauguuugcaaa

SEQ ID NO: 814619 - RNA, 19 nt, Artificial Sequence
  Description of Artificial Sequence: Synthetic oligonucleotide
  Antisense strand to SEQ ID NO: 814618
uuugcaaacaucuauggag

SEQ ID NO: 814620 - RNA, 19 nt, Artificial Sequence
  Description of Artificial Sequence: Synthetic oligonucleotide
  Sense strand starting at position 2851 of SEQ ID NO: 587735
gugagugacucuccaguaa

SEQ ID NO: 814621 - RNA, 19 nt, Artificial Sequence
  Description of Artificial Sequence: Synthetic oligonucleotide
  Antisense strand to SEQ ID NO: 814620
uuacuggagagucacucac

SEQ ID NO: 814622 - RNA, 19 nt, Artificial Sequence
  Description of Artificial Sequence: Synthetic oligonucleotide
  Sense strand starting at position 2855 of SEQ ID NO: 587735
gugacucuccaguaaacuu

SEQ ID NO: 814623 - RNA, 19 nt, Artificial Sequence
  Description of Artificial Sequence: Synthetic oligonucleotide
  Antisense strand to SEQ ID NO: 814622
aaguuuacuggagagucac

SEQ ID NO: 814624 - RNA, 19 nt, Artificial Sequence
  Description of Artificial Sequence: Synthetic oligonucleotide
  Sense strand starting at position 2957 of SEQ ID NO: 587735
aggacuagauucuuguuua

SEQ ID NO: 814625 - RNA, 19 nt, Artificial Sequence
  Description of Artificial Sequence: Synthetic oligonucleotide
  Antisense strand to SEQ ID NO: 814624
uaaacaagaaucuaguccu

SEQ ID NO: 814626 - RNA, 19 nt, Artificial Sequence
  Description of Artificial Sequence: Synthetic oligonucleotide
  Sense strand starting at position 3096 of SEQ ID NO: 587735
gaggcaagugaauggaauu

SEQ ID NO: 814627 - RNA, 19 nt, Artificial Sequence
  Description of Artificial Sequence: Synthetic oligonucleotide
  Antisense strand to SEQ ID NO: 814626
aauuccauucacuugccuc

SEQ ID NO: 814628 - RNA, 19 nt, Artificial Sequence
  Description of Artificial Sequence: Synthetic oligonucleotide
  Sense strand starting at position 3224 of SEQ ID NO: 587735
gaucuauuggauuaugcca

SEQ ID NO: 814629 - RNA, 19 nt, Artificial Sequence
  Description of Artificial Sequence: Synthetic oligonucleotide
  Antisense strand to SEQ ID NO: 814628
uggcauaauccaauagauc

SEQ ID NO: 814630 - RNA, 19 nt, Artificial Sequence
  Description of Artificial Sequence: Synthetic oligonucleotide
  Sense strand starting at position 3248 of SEQ ID NO: 587735
aguggaagguaguuauaua

SEQ ID NO: 814631 - RNA, 19 nt, Artificial Sequence
  Description of Artificial Sequence: Synthetic oligonucleotide
  Antisense strand to SEQ ID NO: 814630
uauauaacuaccuuccacu

SEQ ID NO: 814632 - RNA, 19 nt, Artificial Sequence
  Description of Artificial Sequence: Synthetic oligonucleotide
  Sense strand starting at position 3249 of SEQ ID NO: 587735
guggaagguaguuauauag

SEQ ID NO: 814633 - RNA, 19 nt, Artificial Sequence
  Description of Artificial Sequence: Synthetic oligonucleotide
  Antisense strand to SEQ ID NO: 814632
cuauauaacuaccuuccac

SEQ ID NO: 814634 - RNA, 19 nt, Artificial Sequence
  Description of Artificial Sequence: Synthetic oligonucleotide
  Sense strand starting at position 3278 of SEQ ID NO: 587735
acugaauuagucggaaauc

SEQ ID NO: 814635 - RNA, 19 nt, Artificial Sequence
  Description of Artificial Sequence: Synthetic oligonucleotide
  Antisense strand to SEQ ID NO: 814634
gauuuccgacuaauucagu

SEQ ID NO: 814636 - RNA, 19 nt, Artificial Sequence
  Description of Artificial Sequence: Synthetic oligonucleotide
  Sense strand starting at position 3351 of SEQ ID NO: 587735
ucucuaagauggucaagaa

SEQ ID NO: 814637 - RNA, 19 nt, Artificial Sequence
  Description of Artificial Sequence: Synthetic oligonucleotide
  Antisense strand to SEQ ID NO: 814636
uucuugaccaucuuagaga

SEQ ID NO: 814638 - RNA, 19 nt, Artificial Sequence
  Description of Artificial Sequence: Synthetic oligonucleotide
  Sense strand starting at position 3409 of SEQ ID NO: 587735
gugguaaaugguuaguuau

SEQ ID NO: 814639 - RNA, 19 nt, Artificial Sequence
  Description of Artificial Sequence: Synthetic oligonucleotide
  Antisense strand to SEQ ID NO: 814638
auaacuaaccauuuaccac

SEQ ID NO: 814640 - RNA, 19 nt, Artificial Sequence
  Description of Artificial Sequence: Synthetic oligonucleotide
  Sense strand starting at position 3429 of SEQ ID NO: 587735
guuggaucuucuguuacaa

SEQ ID NO: 814641 - RNA, 19 nt, Artificial Sequence
  Description of Artificial Sequence: Synthetic oligonucleotide
  Antisense strand to SEQ ID NO: 814640
uuguaacagaagauccaac

SEQ ID NO: 814642 - RNA, 19 nt, Artificial Sequence
  Description of Artificial Sequence: Synthetic oligonucleotide
  Sense strand starting at position 3515 of SEQ ID NO: 587735
uggugaaugcaggaugguu

SEQ ID NO: 814643 - RNA, 19 nt, Artificial Sequence
  Description of Artificial Sequence: Synthetic oligonucleotide
  Antisense strand to SEQ ID NO: 814642
aaccauccugcauucacca

SEQ ID NO: 814644 - RNA, 19 nt, Artificial Sequence
  Description of Artificial Sequence: Synthetic oligonucleotide
  Sense strand starting at position 3559 of SEQ ID NO: 587735
ucuauauggcuaugaaaua

SEQ ID NO: 814645 - RNA, 19 nt, Artificial Sequence
  Description of Artificial Sequence: Synthetic oligonucleotide
  Antisense strand to SEQ ID NO: 814644
uauuucauagccauauaga

SEQ ID NO: 814646 - RNA, 19 nt, Artificial Sequence
  Description of Artificial Sequence: Synthetic oligonucleotide
  Sense strand starting at position 3636 of SEQ ID NO: 587735
acagaaucuuguuuguauu

SEQ ID NO: 814647 - RNA, 19 nt, Artificial Sequence
  Description of Artificial Sequence: Synthetic oligonucleotide
  Antisense strand to SEQ ID NO: 814646
aauacaaacaagauucugu

SEQ ID NO: 814648 - RNA, 19 nt, Artificial Sequence
  Description of Artificial Sequence: Synthetic oligonucleotide
  Sense strand starting at position 3903 of SEQ ID NO: 587735
agcauaauagugugaccau

SEQ ID NO: 814649 - RNA, 19 nt, Artificial Sequence
  Description of Artificial Sequence: Synthetic oligonucleotide
  Antisense strand to SEQ ID NO: 814648
auggucacacuauuaugcu

SEQ ID NO: 814650 - RNA, 19 nt, Artificial Sequence
  Description of Artificial Sequence: Synthetic oligonucleotide
  Sense strand starting at position 3973 of SEQ ID NO: 587735
guccuagguagcuaugacu

SEQ ID NO: 814651 - RNA, 19 nt, Artificial Sequence
  Description of Artificial Sequence: Synthetic oligonucleotide
  Antisense strand to SEQ ID NO: 814650
agucauagcuaccuaggac

SEQ ID NO: 814652 - RNA, 19 nt, Artificial Sequence
  Description of Artificial Sequence: Synthetic oligonucleotide
  Sense strand starting at position 99 of SEQ ID NO: 587736
cugcuuugagccuacaaua

SEQ ID NO: 814653 - RNA, 19 nt, Artificial Sequence
  Description of Artificial Sequence: Synthetic oligonucleotide
  Antisense strand to SEQ ID NO: 814652
uauuguaggcucaaagcag

SEQ ID NO: 814654 - RNA, 19 nt, Artificial Sequence
  Description of Artificial Sequence: Synthetic oligonucleotide
  Sense strand starting at position 919 of SEQ ID NO: 587736
ggagaagccucuucuuaac

SEQ ID NO: 814655 - RNA, 19 nt, Artificial Sequence
  Description of Artificial Sequence: Synthetic oligonucleotide
  Antisense strand to SEQ ID NO: 814654
guuaagaagaggcuucucc

SEQ ID NO: 814656 - RNA, 19 nt, Artificial Sequence
  Description of Artificial Sequence: Synthetic oligonucleotide
  Sense strand starting at position 1408 of SEQ ID NO: 587736
ggauaugacucccuuucuu

SEQ ID NO: 814657 - RNA, 19 nt, Artificial Sequence
  Description of Artificial Sequence: Synthetic oligonucleotide
  Antisense strand to SEQ ID NO: 814656
aagaaagggagucauaucc

SEQ ID NO: 814658 - RNA, 19 nt, Artificial Sequence
  Description of Artificial Sequence: Synthetic oligonucleotide
  Sense strand starting at position 1418 of SEQ ID NO: 587736
cccuuucuugaaggcuaua

SEQ ID NO: 814659 - RNA, 19 nt, Artificial Sequence
  Description of Artificial Sequence: Synthetic oligonucleotide
  Antisense strand to SEQ ID NO: 814658
uauagccuucaagaaaggg

SEQ ID NO: 814660 - RNA, 19 nt, Artificial Sequence
  Description of Artificial Sequence: Synthetic oligonucleotide
  Sense strand starting at position 1508 of SEQ ID NO: 587736
ccaagcaaucaguaugcua

SEQ ID NO: 814661 - RNA, 19 nt, Artificial Sequence
  Description of Artificial Sequence: Synthetic oligonucleotide
  Antisense strand to SEQ ID NO: 814660
uagcauacugauugcuugg

SEQ ID NO: 814662 - RNA, 19 nt, Artificial Sequence
  Description of Artificial Sequence: Synthetic oligonucleotide
  Sense strand starting at position 1511 of SEQ ID NO: 587736
agcaaucaguaugcuaaca

SEQ ID NO: 814663 - RNA, 19 nt, Artificial Sequence
  Description of Artificial Sequence: Synthetic oligonucleotide
  Antisense strand to SEQ ID NO: 814662
uguuagcauacugauugcu

SEQ ID NO: 814664 - RNA, 19 nt, Artificial Sequence
  Description of Artificial Sequence: Synthetic oligonucleotide
  Sense strand starting at position 2327 of SEQ ID NO: 587736
agagcaagcuaucuaauug

SEQ ID NO: 814665 - RNA, 19 nt, Artificial Sequence
  Description of Artificial Sequence: Synthetic oligonucleotide
  Antisense strand to SEQ ID NO: 814664
caauuagauagcuugcucu

SEQ ID NO: 814666 - RNA, 19 nt, Artificial Sequence
  Description of Artificial Sequence: Synthetic oligonucleotide
  Sense strand starting at position 2417 of SEQ ID NO: 587736
cugggaguuaugugaaccu

SEQ ID NO: 814667 - RNA, 19 nt, Artificial Sequence
  Description of Artificial Sequence: Synthetic oligonucleotide
  Antisense strand to SEQ ID NO: 814666
agguucacauaacucccag

SEQ ID NO: 814668 - RNA, 19 nt, Artificial Sequence
  Description of Artificial Sequence: Synthetic oligonucleotide
  Sense strand starting at position 2424 of SEQ ID NO: 587736
uuaugugaaccucagcguu

SEQ ID NO: 814669 - RNA, 19 nt, Artificial Sequence
  Description of Artificial Sequence: Synthetic oligonucleotide
  Antisense strand to SEQ ID NO: 814668
aacgcugagguucacauaa

SEQ ID NO: 814670 - RNA, 19 nt, Artificial Sequence
  Description of Artificial Sequence: Synthetic oligonucleotide
  Sense strand starting at position 2426 of SEQ ID NO: 587736
augugaaccucagcguuaa

SEQ ID NO: 814671 - RNA, 19 nt, Artificial Sequence
  Description of Artificial Sequence: Synthetic oligonucleotide
  Antisense strand to SEQ ID NO: 814670
uuaacgcugagguucacau

SEQ ID NO: 814672 - RNA, 19 nt, Artificial Sequence
  Description of Artificial Sequence: Synthetic oligonucleotide
  Sense strand starting at position 2427 of SEQ ID NO: 587736
ugugaaccucagcguuaaa

SEQ ID NO: 814673 - RNA, 19 nt, Artificial Sequence
  Description of Artificial Sequence: Synthetic oligonucleotide
  Antisense strand to SEQ ID NO: 814672
uuuaacgcugagguucaca

SEQ ID NO: 814674 - RNA, 19 nt, Artificial Sequence
  Description of Artificial Sequence: Synthetic oligonucleotide
  Sense strand starting at position 2447 of SEQ ID NO: 587736
uguguuaggguuuggagau

SEQ ID NO: 814675 - RNA, 19 nt, Artificial Sequence
  Description of Artificial Sequence: Synthetic oligonucleotide
  Antisense strand to SEQ ID NO: 814674
aucuccaaacccuaacaca

SEQ ID NO: 814676 - RNA, 19 nt, Artificial Sequence
  Description of Artificial Sequence: Synthetic oligonucleotide
  Sense strand starting at position 2550 of SEQ ID NO: 587736
aguuaagaggauuagcgau

SEQ ID NO: 814677 - RNA, 19 nt, Artificial Sequence
  Description of Artificial Sequence: Synthetic oligonucleotide
  Antisense strand to SEQ ID NO: 814676
aucgcuaauccucuuaacu

SEQ ID NO: 814678 - RNA, 19 nt, Artificial Sequence
  Description of Artificial Sequence: Synthetic oligonucleotide
  Sense strand starting at position 2556 of SEQ ID NO: 587736
gaggauuagcgauacaggu

SEQ ID NO: 814679 - RNA, 19 nt, Artificial Sequence
  Description of Artificial Sequence: Synthetic oligonucleotide
  Antisense strand to SEQ ID NO: 814678
accuguaucgcuaauccuc

SEQ ID NO: 814680 - RNA, 19 nt, Artificial Sequence
  Description of Artificial Sequence: Synthetic oligonucleotide
  Sense strand starting at position 2562 of SEQ ID NO: 587736
uagcgauacagguggugaa

SEQ ID NO: 814681 - RNA, 19 nt, Artificial Sequence
  Description of Artificial Sequence: Synthetic oligonucleotide
  Antisense strand to SEQ ID NO: 814680
uucaccaccuguaucgcua

SEQ ID NO: 814682 - RNA, 19 nt, Artificial Sequence
  Description of Artificial Sequence: Synthetic oligonucleotide
  Sense strand starting at position 2563 of SEQ ID NO: 587736
agcgauacagguggugaaa

SEQ ID NO: 814683 - RNA, 19 nt, Artificial Sequence
  Description of Artificial Sequence: Synthetic oligonucleotide
  Antisense strand to SEQ ID NO: 814682
uuucaccaccuguaucgcu

SEQ ID NO: 814684 - RNA, 19 nt, Artificial Sequence
  Description of Artificial Sequence: Synthetic oligonucleotide
  Sense strand starting at position 2752 of SEQ ID NO: 587736
gaagacgacccucgauaaa

SEQ ID NO: 814685 - RNA, 19 nt, Artificial Sequence
  Description of Artificial Sequence: Synthetic oligonucleotide
  Antisense strand to SEQ ID NO: 814684
uuuaucgagggucgucuuc

SEQ ID NO: 814686 - RNA, 19 nt, Artificial Sequence
  Description of Artificial Sequence: Synthetic oligonucleotide
  Sense strand starting at position 2755 of SEQ ID NO: 587736
gacgacccucgauaaaugu

SEQ ID NO: 814687 - RNA, 19 nt, Artificial Sequence
  Description of Artificial Sequence: Synthetic oligonucleotide
  Antisense strand to SEQ ID NO: 814686
acauuuaucgagggucguc

SEQ ID NO: 814688 - RNA, 19 nt, Artificial Sequence
  Description of Artificial Sequence: Synthetic oligonucleotide
  Sense strand starting at position 2764 of SEQ ID NO: 587736
cgauaaauguugccuauuu

SEQ ID NO: 814689 - RNA, 19 nt, Artificial Sequence
  Description of Artificial Sequence: Synthetic oligonucleotide
  Antisense strand to SEQ ID NO: 814688
aaauaggcaacauuuaucg

SEQ ID NO: 814690 - RNA, 19 nt, Artificial Sequence
  Description of Artificial Sequence: Synthetic oligonucleotide
  Sense strand starting at position 2790 of SEQ ID NO: 587736
ugccuaaaucugugagcca

SEQ ID NO: 814691 - RNA, 19 nt, Artificial Sequence
  Description of Artificial Sequence: Synthetic oligonucleotide
  Antisense strand to SEQ ID NO: 814690
uggcucacagauuuaggca

SEQ ID NO: 814692 - RNA, 19 nt, Artificial Sequence
  Description of Artificial Sequence: Synthetic oligonucleotide
  Sense strand starting at position 2793 of SEQ ID NO: 587736
cuaaaucugugagccaaga

SEQ ID NO: 814693 - RNA, 19 nt, Artificial Sequence
  Description of Artificial Sequence: Synthetic oligonucleotide
  Antisense strand to SEQ ID NO: 814692
ucuuggcucacagauuuag

SEQ ID NO: 814694 - RNA, 19 nt, Artificial Sequence
  Description of Artificial Sequence: Synthetic oligonucleotide
  Sense strand starting at position 2811 of SEQ ID NO: 587736
aagagcuuucuaggaagca

SEQ ID NO: 814695 - RNA, 19 nt, Artificial Sequence
  Description of Artificial Sequence: Synthetic oligonucleotide
  Antisense strand to SEQ ID NO: 814694
ugcuuccuagaaagcucuu

SEQ ID NO: 814696 - RNA, 19 nt, Artificial Sequence
  Description of Artificial Sequence: Synthetic oligonucleotide
  Sense strand starting at position 2832 of SEQ ID NO: 587736
uuaaauuaucagugguuac

SEQ ID NO: 814697 - RNA, 19 nt, Artificial Sequence
  Description of Artificial Sequence: Synthetic oligonucleotide
  Antisense strand to SEQ ID NO: 814696
guaaccacugauaauuuaa

SEQ ID NO: 814698 - RNA, 19 nt, Artificial Sequence
  Description of Artificial Sequence: Synthetic oligonucleotide
  Sense strand starting at position 2948 of SEQ ID NO: 587736
uacagugugguugagguaa

SEQ ID NO: 814699 - RNA, 19 nt, Artificial Sequence
  Description of Artificial Sequence: Synthetic oligonucleotide
  Antisense strand to SEQ ID NO: 814698
uuaccucaaccacacugua

SEQ ID NO: 814700 - RNA, 19 nt, Artificial Sequence
  Description of Artificial Sequence: Synthetic oligonucleotide
  Sense strand starting at position 2984 of SEQ ID NO: 587736
gcggaugcuauagagacau

SEQ ID NO: 814701 - RNA, 19 nt, Artificial Sequence
  Description of Artificial Sequence: Synthetic oligonucleotide
  Antisense strand to SEQ ID NO: 814700
augucucuauagcauccgc

SEQ ID NO: 814702 - RNA, 19 nt, Artificial Sequence
  Description of Artificial Sequence: Synthetic oligonucleotide
  Sense strand starting at position 3005 of SEQ ID NO: 587736
aagggcucugcauggaaua

SEQ ID NO: 814703 - RNA, 19 nt, Artificial Sequence
  Description of Artificial Sequence: Synthetic oligonucleotide
  Antisense strand to SEQ ID NO: 814702
uauuccaugcagagcccuu

SEQ ID NO: 814704 - RNA, 19 nt, Artificial Sequence
  Description of Artificial Sequence: Synthetic oligonucleotide
  Sense strand starting at position 3109 of SEQ ID NO: 587736
auccuucccgaaugaggau

SEQ ID NO: 814705 - RNA, 19 nt, Artificial Sequence
  Description of Artificial Sequence: Synthetic oligonucleotide
  Antisense strand to SEQ ID NO: 814704
auccucauucgggaaggau

SEQ ID NO: 814706 - RNA, 19 nt, Artificial Sequence
  Description of Artificial Sequence: Synthetic oligonucleotide
  Sense strand starting at position 3207 of SEQ ID NO: 587736
guauuuguuuaccaugauc

SEQ ID NO: 814707 - RNA, 19 nt, Artificial Sequence
  Description of Artificial Sequence: Synthetic oligonucleotide
  Antisense strand to SEQ ID NO: 814706
gaucaugguaaacaaauac

SEQ ID NO: 814708 - RNA, 19 nt, Artificial Sequence
  Description of Artificial Sequence: Synthetic oligonucleotide
  Sense strand starting at position 3269 of SEQ ID NO: 587736
gcuguugcaauguuauguu

SEQ ID NO: 814709 - RNA, 19 nt, Artificial Sequence
  Description of Artificial Sequence: Synthetic oligonucleotide
  Antisense strand to SEQ ID NO: 814708
aacauaacauugcaacagc

SEQ ID NO: 814710 - RNA, 19 nt, Artificial Sequence
  Description of Artificial Sequence: Synthetic oligonucleotide
  Sense strand starting at position 3359 of SEQ ID NO: 587736
uuuguaacuuucgugaaga

SEQ ID NO: 814711 - RNA, 19 nt, Artificial Sequence
  Description of Artificial Sequence: Synthetic oligonucleotide
  Antisense strand to SEQ ID NO: 814710
ucuucacgaaaguuacaaa

SEQ ID NO: 814712 - RNA, 19 nt, Artificial Sequence
  Description of Artificial Sequence: Synthetic oligonucleotide
  Sense strand starting at position 3361 of SEQ ID NO: 587736
uguaacuuucgugaagauc

SEQ ID NO: 814713 - RNA, 19 nt, Artificial Sequence
  Description of Artificial Sequence: Synthetic oligonucleotide
  Antisense strand to SEQ ID NO: 814712
gaucuucacgaaaguuaca

SEQ ID NO: 814714 - RNA, 19 nt, Artificial Sequence
  Description of Artificial Sequence: Synthetic oligonucleotide
  Sense strand starting at position 3516 of SEQ ID NO: 587736
uccugaguaugucuucuau

SEQ ID NO: 814715 - RNA, 19 nt, Artificial Sequence
  Description of Artificial Sequence: Synthetic oligonucleotide
  Antisense strand to SEQ ID NO: 814714
auagaagacauacucagga

SEQ ID NO: 814716 - RNA, 19 nt, Artificial Sequence
  Description of Artificial Sequence: Synthetic oligonucleotide
  Sense strand starting at position 3518 of SEQ ID NO: 587736
cugaguaugucuucuauuu

SEQ ID NO: 814717 - RNA, 19 nt, Artificial Sequence
  Description of Artificial Sequence: Synthetic oligonucleotide
  Antisense strand to SEQ ID NO: 814716
aaauagaagacauacucag

SEQ ID NO: 814718 - RNA, 19 nt, Artificial Sequence
  Description of Artificial Sequence: Synthetic oligonucleotide
  Sense strand starting at position 3527 of SEQ ID NO: 587736
ucuucuauuugggaaccua

SEQ ID NO: 814719 - RNA, 19 nt, Artificial Sequence
  Description of Artificial Sequence: Synthetic oligonucleotide
  Antisense strand to SEQ ID NO: 814718
uagguucccaaauagaaga

SEQ ID NO: 814720 - RNA, 19 nt, Artificial Sequence
  Description of Artificial Sequence: Synthetic oligonucleotide
  Sense strand starting at position 3574 of SEQ ID NO: 587736
cacauuggguuuccuagau

SEQ ID NO: 814721 - RNA, 19 nt, Artificial Sequence
  Description of Artificial Sequence: Synthetic oligonucleotide
  Antisense strand to SEQ ID NO: 814720
aucuaggaaacccaaugug

SEQ ID NO: 814722 - RNA, 19 nt, Artificial Sequence
  Description of Artificial Sequence: Synthetic oligonucleotide
  Sense strand starting at position 3632 of SEQ ID NO: 587736
cguacaguauuucuagcua

SEQ ID NO: 814723 - RNA, 19 nt, Artificial Sequence
  Description of Artificial Sequence: Synthetic oligonucleotide
  Antisense strand to SEQ ID NO: 814722
uagcuagaaauacuguacg

SEQ ID NO: 814724 - RNA, 19 nt, Artificial Sequence
  Description of Artificial Sequence: Synthetic oligonucleotide
  Sense strand starting at position 3727 of SEQ ID NO: 587736
gguugaagcuuucugaaac

SEQ ID NO: 814725 - RNA, 19 nt, Artificial Sequence
  Description of Artificial Sequence: Synthetic oligonucleotide
  Antisense strand to SEQ ID NO: 814724
guuucagaaagcuucaacc

SEQ ID NO: 814726 - RNA, 19 nt, Artificial Sequence
  Description of Artificial Sequence: Synthetic oligonucleotide
  Sense strand starting at position 3735 of SEQ ID NO: 587736
cuuucugaaacguggacau

SEQ ID NO: 814727 - RNA, 19 nt, Artificial Sequence
  Description of Artificial Sequence: Synthetic oligonucleotide
  Antisense strand to SEQ ID NO: 814726
auguccacguuucagaaag

SEQ ID NO: 814728 - RNA, 19 nt, Artificial Sequence
  Description of Artificial Sequence: Synthetic oligonucleotide
  Sense strand starting at position 3739 of SEQ ID NO: 587736
cugaaacguggacaucuau

SEQ ID NO: 814729 - RNA, 19 nt, Artificial Sequence
  Description of Artificial Sequence: Synthetic oligonucleotide
  Antisense strand to SEQ ID NO: 814728
auagauguccacguuucag

SEQ ID NO: 814730 - RNA, 19 nt, Artificial Sequence
  Description of Artificial Sequence: Synthetic oligonucleotide
  Sense strand starting at position 3828 of SEQ ID NO: 587736
auuagccaucccuaggaua

SEQ ID NO: 814731 - RNA, 19 nt, Artificial Sequence
  Description of Artificial Sequence: Synthetic oligonucleotide
  Antisense strand to SEQ ID NO: 814730
uauccuagggauggcuaau

SEQ ID NO: 814732 - RNA, 19 nt, Artificial Sequence
  Description of Artificial Sequence: Synthetic oligonucleotide
  Sense strand starting at position 649 of SEQ ID NO: 587737
ggagaagccucuucuuaac

SEQ ID NO: 814733 - RNA, 19 nt, Artificial Sequence
  Description of Artificial Sequence: Synthetic oligonucleotide
  Antisense strand to SEQ ID NO: 814732
guuaagaagaggcuucucc

SEQ ID NO: 814734 - RNA, 19 nt, Artificial Sequence
  Description of Artificial Sequence: Synthetic oligonucleotide
  Sense strand starting at position 1138 of SEQ ID NO: 587737
ggauaugacucccuuucuu

SEQ ID NO: 814735 - RNA, 19 nt, Artificial Sequence
  Description of Artificial Sequence: Synthetic oligonucleotide
  Antisense strand to SEQ ID NO: 814734
aagaaagggagucauaucc

SEQ ID NO: 814736 - RNA, 19 nt, Artificial Sequence
  Description of Artificial Sequence: Synthetic oligonucleotide
  Sense strand starting at position 1148 of SEQ ID NO: 587737
cccuuucuugaaggcuaua

SEQ ID NO: 814737 - RNA, 19 nt, Artificial Sequence
  Description of Artificial Sequence: Synthetic oligonucleotide
  Antisense strand to SEQ ID NO: 814736
uauagccuucaagaaaggg

SEQ ID NO: 814738 - RNA, 19 nt, Artificial Sequence
  Description of Artificial Sequence: Synthetic oligonucleotide
  Sense strand starting at position 1238 of SEQ ID NO: 587737
ccaagcaaucaguaugcua

SEQ ID NO: 814739 - RNA, 19 nt, Artificial Sequence
  Description of Artificial Sequence: Synthetic oligonucleotide
  Antisense strand to SEQ ID NO: 814738
uagcauacugauugcuugg

SEQ ID NO: 814740 - RNA, 19 nt, Artificial Sequence
  Description of Artificial Sequence: Synthetic oligonucleotide
  Sense strand starting at position 1241 of SEQ ID NO: 587737
agcaaucaguaugcuaaca

SEQ ID NO: 814741 - RNA, 19 nt, Artificial Sequence
  Description of Artificial Sequence: Synthetic oligonucleotide
  Antisense strand to SEQ ID NO: 814740
uguuagcauacugauugcu

SEQ ID NO: 814742 - RNA, 19 nt, Artificial Sequence
  Description of Artificial Sequence: Synthetic oligonucleotide
  Sense strand starting at position 2057 of SEQ ID NO: 587737
agagcaagcuaucuaauug

SEQ ID NO: 814743 - RNA, 19 nt, Artificial Sequence
  Description of Artificial Sequence: Synthetic oligonucleotide
  Antisense strand to SEQ ID NO: 814742
caauuagauagcuugcucu

SEQ ID NO: 814744 - RNA, 19 nt, Artificial Sequence
  Description of Artificial Sequence: Synthetic oligonucleotide
  Sense strand starting at position 2147 of SEQ ID NO: 587737
cugggaguuaugugaaccu

SEQ ID NO: 814745 - RNA, 19 nt, Artificial Sequence
  Description of Artificial Sequence: Synthetic oligonucleotide
  Antisense strand to SEQ ID NO: 814744
agguucacauaacucccag

SEQ ID NO: 814746 - RNA, 19 nt, Artificial Sequence
  Description of Artificial Sequence: Synthetic oligonucleotide
  Sense strand starting at position 2154 of SEQ ID NO: 587737
uuaugugaaccucagcguu

SEQ ID NO: 814747 - RNA, 19 nt, Artificial Sequence
  Description of Artificial Sequence: Synthetic oligonucleotide
  Antisense strand to SEQ ID NO: 814746
aacgcugagguucacauaa

SEQ ID NO: 814748 - RNA, 19 nt, Artificial Sequence
  Description of Artificial Sequence: Synthetic oligonucleotide
  Sense strand starting at position 2156 of SEQ ID NO: 587737
augugaaccucagcguuaa

SEQ ID NO: 814749 - RNA, 19 nt, Artificial Sequence
  Description of Artificial Sequence: Synthetic oligonucleotide
  Antisense strand to SEQ ID NO: 814748
uuaacgcugagguucacau

SEQ ID NO: 814750 - RNA, 19 nt, Artificial Sequence
  Description of Artificial Sequence: Synthetic oligonucleotide
  Sense strand starting at position 2177 of SEQ ID NO: 587737
uguguuaggguuuggagau

SEQ ID NO: 814751 - RNA, 19 nt, Artificial Sequence
  Description of Artificial Sequence: Synthetic oligonucleotide
  Antisense strand to SEQ ID NO: 814750
aucuccaaacccuaacaca

SEQ ID NO: 814752 - RNA, 19 nt, Artificial Sequence
  Description of Artificial Sequence: Synthetic oligonucleotide
  Sense strand starting at position 2280 of SEQ ID NO: 587737
aguuaagaggauuagcgau

SEQ ID NO: 814753 - RNA, 19 nt, Artificial Sequence
  Description of Artificial Sequence: Synthetic oligonucleotide
  Antisense strand to SEQ ID NO: 814752
aucgcuaauccucuuaacu

SEQ ID NO: 814754 - RNA, 19 nt, Artificial Sequence
  Description of Artificial Sequence: Synthetic oligonucleotide
  Sense strand starting at position 2286 of SEQ ID NO: 587737
gaggauuagcgauacaggu

SEQ ID NO: 814755 - RNA, 19 nt, Artificial Sequence
  Description of Artificial Sequence: Synthetic oligonucleotide
  Antisense strand to SEQ ID NO: 814754
accuguaucgcuaauccuc

SEQ ID NO: 814756 - RNA, 19 nt, Artificial Sequence
  Description of Artificial Sequence: Synthetic oligonucleotide
  Sense strand starting at position 2292 of SEQ ID NO: 587737
uagcgauacagguggugaa

SEQ ID NO: 814757 - RNA, 19 nt, Artificial Sequence
  Description of Artificial Sequence: Synthetic oligonucleotide
  Antisense strand to SEQ ID NO: 814756
uucaccaccuguaucgcua

SEQ ID NO: 814758 - RNA, 19 nt, Artificial Sequence
  Description of Artificial Sequence: Synthetic oligonucleotide
  Sense strand starting at position 2293 of SEQ ID NO: 587737
agcgauacagguggugaaa

SEQ ID NO: 814759 - RNA, 19 nt, Artificial Sequence
  Description of Artificial Sequence: Synthetic oligonucleotide
  Antisense strand to SEQ ID NO: 814758
uuucaccaccuguaucgcu

SEQ ID NO: 814760 - RNA, 19 nt, Artificial Sequence
  Description of Artificial Sequence: Synthetic oligonucleotide
  Sense strand starting at position 2482 of SEQ ID NO: 587737
gaagacgacccucgauaaa

SEQ ID NO: 814761 - RNA, 19 nt, Artificial Sequence
  Description of Artificial Sequence: Synthetic oligonucleotide
  Antisense strand to SEQ ID NO: 814760
uuuaucgagggucgucuuc

SEQ ID NO: 814762 - RNA, 19 nt, Artificial Sequence
  Description of Artificial Sequence: Synthetic oligonucleotide
  Sense strand starting at position 2485 of SEQ ID NO: 587737
gacgacccucgauaaaugu

SEQ ID NO: 814763 - RNA, 19 nt, Artificial Sequence
  Description of Artificial Sequence: Synthetic oligonucleotide
  Antisense strand to SEQ ID NO: 814762
acauuuaucgagggucguc

SEQ ID NO: 814764 - RNA, 19 nt, Artificial Sequence
  Description of Artificial Sequence: Synthetic oligonucleotide
  Sense strand starting at position 2494 of SEQ ID NO: 587737
cgauaaauguugccuauuu

SEQ ID NO: 814765 - RNA, 19 nt, Artificial Sequence
  Description of Artificial Sequence: Synthetic oligonucleotide
  Antisense strand to SEQ ID NO: 814764
aaauaggcaacauuuaucg

SEQ ID NO: 814766 - RNA, 19 nt, Artificial Sequence
  Description of Artificial Sequence: Synthetic oligonucleotide
  Sense strand starting at position 2520 of SEQ ID NO: 587737
ugccuaaaucugugagcca

SEQ ID NO: 814767 - RNA, 19 nt, Artificial Sequence
  Description of Artificial Sequence: Synthetic oligonucleotide
  Antisense strand to SEQ ID NO: 814766
uggcucacagauuuaggca

SEQ ID NO: 814768 - RNA, 19 nt, Artificial Sequence
  Description of Artificial Sequence: Synthetic oligonucleotide
  Sense strand starting at position 2523 of SEQ ID NO: 587737
cuaaaucugugagccaaga

SEQ ID NO: 814769 - RNA, 19 nt, Artificial Sequence
  Description of Artificial Sequence: Synthetic oligonucleotide
  Antisense strand to SEQ ID NO: 814768
ucuuggcucacagauuuag

SEQ ID NO: 814770 - RNA, 19 nt, Artificial Sequence
  Description of Artificial Sequence: Synthetic oligonucleotide
  Sense strand starting at position 2541 of SEQ ID NO: 587737
aagagcuuucuaggaagca

SEQ ID NO: 814771 - RNA, 19 nt, Artificial Sequence
  Description of Artificial Sequence: Synthetic oligonucleotide
  Antisense strand to SEQ ID NO: 814770
ugcuuccuagaaagcucuu

SEQ ID NO: 814772 - RNA, 19 nt, Artificial Sequence
  Description of Artificial Sequence: Synthetic oligonucleotide
  Sense strand starting at position 2562 of SEQ ID NO: 587737
uuaaauuaucagugguuac

SEQ ID NO: 814773 - RNA, 19 nt, Artificial Sequence
  Description of Artificial Sequence: Synthetic oligonucleotide
  Antisense strand to SEQ ID NO: 814772
guaaccacugauaauuuaa

SEQ ID NO: 814774 - RNA, 19 nt, Artificial Sequence
  Description of Artificial Sequence: Synthetic oligonucleotide
  Sense strand starting at position 2678 of SEQ ID NO: 587737
uacagugugguugagguaa

SEQ ID NO: 814775 - RNA, 19 nt, Artificial Sequence
  Description of Artificial Sequence: Synthetic oligonucleotide
  Antisense strand to SEQ ID NO: 814774
uuaccucaaccacacugua

SEQ ID NO: 814776 - RNA, 19 nt, Artificial Sequence
  Description of Artificial Sequence: Synthetic oligonucleotide
  Sense strand starting at position 2714 of SEQ ID NO: 587737
gcggaugcuauagagacau

SEQ ID NO: 814777 - RNA, 19 nt, Artificial Sequence
  Description of Artificial Sequence: Synthetic oligonucleotide
  Antisense strand to SEQ ID NO: 814776
augucucuauagcauccgc

SEQ ID NO: 814778 - RNA, 19 nt, Artificial Sequence
  Description of Artificial Sequence: Synthetic oligonucleotide
  Sense strand starting at position 2735 of SEQ ID NO: 587737
aagggcucugcauggaaua

SEQ ID NO: 814779 - RNA, 19 nt, Artificial Sequence
  Description of Artificial Sequence: Synthetic oligonucleotide
  Antisense strand to SEQ ID NO: 814778
uauuccaugcagagcccuu

SEQ ID NO: 814780 - RNA, 19 nt, Artificial Sequence
  Description of Artificial Sequence: Synthetic oligonucleotide
  Sense strand starting at position 2839 of SEQ ID NO: 587737
auccuucccgaaugaggau

SEQ ID NO: 814781 - RNA, 19 nt, Artificial Sequence
  Description of Artificial Sequence: Synthetic oligonucleotide
  Antisense strand to SEQ ID NO: 814780
auccucauucgggaaggau

SEQ ID NO: 814782 - RNA, 19 nt, Artificial Sequence
  Description of Artificial Sequence: Synthetic oligonucleotide
  Sense strand starting at position 2999 of SEQ ID NO: 587737
gcuguugcaauguuauguu

SEQ ID NO: 814783 - RNA, 19 nt, Artificial Sequence
  Description of Artificial Sequence: Synthetic oligonucleotide
  Antisense strand to SEQ ID NO: 814782
aacauaacauugcaacagc

SEQ ID NO: 814784 - RNA, 19 nt, Artificial Sequence
  Description of Artificial Sequence: Synthetic oligonucleotide
  Sense strand starting at position 3089 of SEQ ID NO: 587737
uuuguaacuuucgugaaga

SEQ ID NO: 814785 - RNA, 19 nt, Artificial Sequence
  Description of Artificial Sequence: Synthetic oligonucleotide
  Antisense strand to SEQ ID NO: 814784
ucuucacgaaaguuacaaa

SEQ ID NO: 814786 - RNA, 19 nt, Artificial Sequence
  Description of Artificial Sequence: Synthetic oligonucleotide
  Sense strand starting at position 3091 of SEQ ID NO: 587737
uguaacuuucgugaagauc

SEQ ID NO: 814787 - RNA, 19 nt, Artificial Sequence
  Description of Artificial Sequence: Synthetic oligonucleotide
  Antisense strand to SEQ ID NO: 814786
gaucuucacgaaaguuaca

SEQ ID NO: 814788 - RNA, 19 nt, Artificial Sequence
  Description of Artificial Sequence: Synthetic oligonucleotide
  Sense strand starting at position 3246 of SEQ ID NO: 587737
uccugaguaugucuucuau

SEQ ID NO: 814789 - RNA, 19 nt, Artificial Sequence
  Description of Artificial Sequence: Synthetic oligonucleotide
  Antisense strand to SEQ ID NO: 814788
auagaagacauacucagga

SEQ ID NO: 814790 - RNA, 19 nt, Artificial Sequence
  Description of Artificial Sequence: Synthetic oligonucleotide
  Sense strand starting at position 3248 of SEQ ID NO: 587737
cugaguaugucuucuauuu

SEQ ID NO: 814791 - RNA, 19 nt, Artificial Sequence
  Description of Artificial Sequence: Synthetic oligonucleotide
  Antisense strand to SEQ ID NO: 814790
aaauagaagacauacucag

SEQ ID NO: 814792 - RNA, 19 nt, Artificial Sequence
  Description of Artificial Sequence: Synthetic oligonucleotide
  Sense strand starting at position 3257 of SEQ ID NO: 587737
ucuucuauuugggaaccua

SEQ ID NO: 814793 - RNA, 19 nt, Artificial Sequence
  Description of Artificial Sequence: Synthetic oligonucleotide
  Antisense strand to SEQ ID NO: 814792
uagguucccaaauagaaga

SEQ ID NO: 814794 - RNA, 19 nt, Artificial Sequence
  Description of Artificial Sequence: Synthetic oligonucleotide
  Sense strand starting at position 3304 of SEQ ID NO: 587737
cacauuggguuuccuagau

SEQ ID NO: 814795 - RNA, 19 nt, Artificial Sequence
  Description of Artificial Sequence: Synthetic oligonucleotide
  Antisense strand to SEQ ID NO: 814794
aucuaggaaacccaaugug

SEQ ID NO: 814796 - RNA, 19 nt, Artificial Sequence
  Description of Artificial Sequence: Synthetic oligonucleotide
  Sense strand starting at position 3362 of SEQ ID NO: 587737
cguacaguauuucuagcua

SEQ ID NO: 814797 - RNA, 19 nt, Artificial Sequence
  Description of Artificial Sequence: Synthetic oligonucleotide
  Antisense strand to SEQ ID NO: 814796
uagcuagaaauacuguacg

SEQ ID NO: 814798 - RNA, 19 nt, Artificial Sequence
  Description of Artificial Sequence: Synthetic oligonucleotide
  Sense strand starting at position 3457 of SEQ ID NO: 587737
gguugaagcuuucugaaac

SEQ ID NO: 814799 - RNA, 19 nt, Artificial Sequence
  Description of Artificial Sequence: Synthetic oligonucleotide
  Antisense strand to SEQ ID NO: 814798
guuucagaaagcuucaacc

SEQ ID NO: 814800 - RNA, 19 nt, Artificial Sequence
  Description of Artificial Sequence: Synthetic oligonucleotide
  Sense strand starting at position 3465 of SEQ ID NO: 587737
cuuucugaaacguggacau

SEQ ID NO: 814801 - RNA, 19 nt, Artificial Sequence
  Description of Artificial Sequence: Synthetic oligonucleotide
  Antisense strand to SEQ ID NO: 814800
auguccacguuucagaaag

SEQ ID NO: 814802 - RNA, 19 nt, Artificial Sequence
  Description of Artificial Sequence: Synthetic oligonucleotide
  Sense strand starting at position 3469 of SEQ ID NO: 587737
cugaaacguggacaucuau

SEQ ID NO: 814803 - RNA, 19 nt, Artificial Sequence
  Description of Artificial Sequence: Synthetic oligonucleotide
  Antisense strand to SEQ ID NO: 814802
auagauguccacguuucag

SEQ ID NO: 814804 - RNA, 19 nt, Artificial Sequence
  Description of Artificial Sequence: Synthetic oligonucleotide
  Sense strand starting at position 3558 of SEQ ID NO: 587737
auuagccaucccuaggaua

SEQ ID NO: 814805 - RNA, 19 nt, Artificial Sequence
  Description of Artificial Sequence: Synthetic oligonucleotide
  Antisense strand to SEQ ID NO: 814804
uauccuagggauggcuaau

SEQ ID NO: 814806 - RNA, 19 nt, Artificial Sequence
  Description of Artificial Sequence: Synthetic oligonucleotide
  Sense strand starting at position 3781 of SEQ ID NO: 587737
ugagauaaaucacagauuu

SEQ ID NO: 814807 - RNA, 19 nt, Artificial Sequence
  Description of Artificial Sequence: Synthetic oligonucleotide
  Antisense strand to SEQ ID NO: 814806
aaaucugugauuuaucuca

SEQ ID NO: 814808 - RNA, 19 nt, Artificial Sequence
  Description of Artificial Sequence: Synthetic oligonucleotide
  Sense strand starting at position 3937 of SEQ ID NO: 587737
ggcacuuggucaccauaaa

SEQ ID NO: 814809 - RNA, 19 nt, Artificial Sequence
  Description of Artificial Sequence: Synthetic oligonucleotide
  Antisense strand to SEQ ID NO: 814808
uuuauggugaccaagugcc

SEQ ID NO: 814810 - RNA, 19 nt, Artificial Sequence
  Description of Artificial Sequence: Synthetic oligonucleotide
  Sense strand starting at position 3938 of SEQ ID NO: 587737
gcacuuggucaccauaaau

SEQ ID NO: 814811 - RNA, 19 nt, Artificial Sequence
  Description of Artificial Sequence: Synthetic oligonucleotide
  Antisense strand to SEQ ID NO: 814810
auuuauggugaccaagugc

SEQ ID NO: 814812 - RNA, 19 nt, Artificial Sequence
  Description of Artificial Sequence: Synthetic oligonucleotide
  Sense strand starting at position 94 of SEQ ID NO: 587738
uugacagagucauuaacuu

SEQ ID NO: 814813 - RNA, 19 nt, Artificial Sequence
  Description of Artificial Sequence: Synthetic oligonucleotide
  Antisense strand to SEQ ID NO: 814812
aaguuaaugacucugucaa

SEQ ID NO: 814814 - RNA, 19 nt, Artificial Sequence
  Description of Artificial Sequence: Synthetic oligonucleotide
  Sense strand starting at position 246 of SEQ ID NO: 587738
cugcuaacugcagaucuau

SEQ ID NO: 814815 - RNA, 19 nt, Artificial Sequence
  Description of Artificial Sequence: Synthetic oligonucleotide
  Antisense strand to SEQ ID NO: 814814
auagaucugcaguuagcag

SEQ ID NO: 814816 - RNA, 19 nt, Artificial Sequence
  Description of Artificial Sequence: Synthetic oligonucleotide
  Sense strand starting at position 462 of SEQ ID NO: 587738
ugaugauagugaguucuua

SEQ ID NO: 814817 - RNA, 19 nt, Artificial Sequence
  Description of Artificial Sequence: Synthetic oligonucleotide
  Antisense strand to SEQ ID NO: 814816
uaagaacucacuaucauca

SEQ ID NO: 814818 - RNA, 19 nt, Artificial Sequence
  Description of Artificial Sequence: Synthetic oligonucleotide
  Sense strand starting at position 466 of SEQ ID NO: 587738
gauagugaguucuuaauau

SEQ ID NO: 814819 - RNA, 19 nt, Artificial Sequence
  Description of Artificial Sequence: Synthetic oligonucleotide
  Antisense strand to SEQ ID NO: 814818
auauuaagaacucacuauc

SEQ ID NO: 814820 - RNA, 19 nt, Artificial Sequence
  Description of Artificial Sequence: Synthetic oligonucleotide
  Sense strand starting at position 514 of SEQ ID NO: 587738
guuagcuuccuggagauac

SEQ ID NO: 814821 - RNA, 19 nt, Artificial Sequence
  Description of Artificial Sequence: Synthetic oligonucleotide
  Antisense strand to SEQ ID NO: 814820
guaucuccaggaagcuaac

SEQ ID NO: 814822 - RNA, 19 nt, Artificial Sequence
  Description of Artificial Sequence: Synthetic oligonucleotide
  Sense strand starting at position 516 of SEQ ID NO: 587738
uagcuuccuggagauacau

SEQ ID NO: 814823 - RNA, 19 nt, Artificial Sequence
  Description of Artificial Sequence: Synthetic oligonucleotide
  Antisense strand to SEQ ID NO: 814822
auguaucuccaggaagcua

SEQ ID NO: 814824 - RNA, 19 nt, Artificial Sequence
  Description of Artificial Sequence: Synthetic oligonucleotide
  Sense strand starting at position 555 of SEQ ID NO: 587738
uuuccaaaggcuuagguua

SEQ ID NO: 814825 - RNA, 19 nt, Artificial Sequence
  Description of Artificial Sequence: Synthetic oligonucleotide
  Antisense strand to SEQ ID NO: 814824
uaaccuaagccuuuggaaa

SEQ ID NO: 814826 - RNA, 19 nt, Artificial Sequence
  Description of Artificial Sequence: Synthetic oligonucleotide
  Sense strand starting at position 712 of SEQ ID NO: 587738
cuggaccaguugucagaaa

SEQ ID NO: 814827 - RNA, 19 nt, Artificial Sequence
  Description of Artificial Sequence: Synthetic oligonucleotide
  Antisense strand to SEQ ID NO: 814826
uuucugacaacugguccag

SEQ ID NO: 814828 - RNA, 19 nt, Artificial Sequence
  Description of Artificial Sequence: Synthetic oligonucleotide
  Sense strand starting at position 837 of SEQ ID NO: 587738
aguggauagagguguuuau

SEQ ID NO: 814829 - RNA, 19 nt, Artificial Sequence
  Description of Artificial Sequence: Synthetic oligonucleotide
  Antisense strand to SEQ ID NO: 814828
auaaacaccucuauccacu

SEQ ID NO: 814830 - RNA, 19 nt, Artificial Sequence
  Description of Artificial Sequence: Synthetic oligonucleotide
  Sense strand starting at position 859 of SEQ ID NO: 587738
cugcuuacacuguacagau

SEQ ID NO: 814831 - RNA, 19 nt, Artificial Sequence
  Description of Artificial Sequence: Synthetic oligonucleotide
  Antisense strand to SEQ ID NO: 814830
aucuguacaguguaagcag

SEQ ID NO: 814832 - RNA, 19 nt, Artificial Sequence
  Description of Artificial Sequence: Synthetic oligonucleotide
  Sense strand starting at position 879 of SEQ ID NO: 587738
uaguaauugcuggaauccu

SEQ ID NO: 814833 - RNA, 19 nt, Artificial Sequence
  Description of Artificial Sequence: Synthetic oligonucleotide
  Antisense strand to SEQ ID NO: 814832
aggauuccagcaauuacua

SEQ ID NO: 814834 - RNA, 19 nt, Artificial Sequence
  Description of Artificial Sequence: Synthetic oligonucleotide
  Sense strand starting at position 998 of SEQ ID NO: 587738
agggaauuaugauuggcuu

SEQ ID NO: 814835 - RNA, 19 nt, Artificial Sequence
  Description of Artificial Sequence: Synthetic oligonucleotide
  Antisense strand to SEQ ID NO: 814834
aagccaaucauaauucccu

SEQ ID NO: 814836 - RNA, 19 nt, Artificial Sequence
  Description of Artificial Sequence: Synthetic oligonucleotide
  Sense strand starting at position 999 of SEQ ID NO: 587738
gggaauuaugauuggcuug

SEQ ID NO: 814837 - RNA, 19 nt, Artificial Sequence
  Description of Artificial Sequence: Synthetic oligonucleotide
  Antisense strand to SEQ ID NO: 814836
caagccaaucauaauuccc

SEQ ID NO: 814838 - RNA, 19 nt, Artificial Sequence
  Description of Artificial Sequence: Synthetic oligonucleotide
  Sense strand starting at position 1000 of SEQ ID NO: 587738
ggaauuaugauuggcuugu

SEQ ID NO: 814839 - RNA, 19 nt, Artificial Sequence
  Description of Artificial Sequence: Synthetic oligonucleotide
  Antisense strand to SEQ ID NO: 814838
acaagccaaucauaauucc

SEQ ID NO: 814840 - RNA, 19 nt, Artificial Sequence
  Description of Artificial Sequence: Synthetic oligonucleotide
  Sense strand starting at position 1001 of SEQ ID NO: 587738
gaauuaugauuggcuuguu

SEQ ID NO: 814841 - RNA, 19 nt, Artificial Sequence
  Description of Artificial Sequence: Synthetic oligonucleotide
  Antisense strand to SEQ ID NO: 814840
aacaagccaaucauaauuc

SEQ ID NO: 814842 - RNA, 19 nt, Artificial Sequence
  Description of Artificial Sequence: Synthetic oligonucleotide
  Sense strand starting at position 1034 of SEQ ID NO: 587738
aaagguuuagaguggacuu

SEQ ID NO: 814843 - RNA, 19 nt, Artificial Sequence
  Description of Artificial Sequence: Synthetic oligonucleotide
  Antisense strand to SEQ ID NO: 814842
aaguccacucuaaaccuuu

SEQ ID NO: 814844 - RNA, 19 nt, Artificial Sequence
  Description of Artificial Sequence: Synthetic oligonucleotide
  Sense strand starting at position 1219 of SEQ ID NO: 587738
gcuggauccuaucuccaga

SEQ ID NO: 814845 - RNA, 19 nt, Artificial Sequence
  Description of Artificial Sequence: Synthetic oligonucleotide
  Antisense strand to SEQ ID NO: 814844
ucuggagauaggauccagc

SEQ ID NO: 814846 - RNA, 19 nt, Artificial Sequence
  Description of Artificial Sequence: Synthetic oligonucleotide
  Sense strand starting at position 1271 of SEQ ID NO: 587738
uccuguuaucuccacagac

SEQ ID NO: 814847 - RNA, 19 nt, Artificial Sequence
  Description of Artificial Sequence: Synthetic oligonucleotide
  Antisense strand to SEQ ID NO: 814846
gucuguggagauaacagga

SEQ ID NO: 814848 - RNA, 19 nt, Artificial Sequence
  Description of Artificial Sequence: Synthetic oligonucleotide
  Sense strand starting at position 1325 of SEQ ID NO: 587738
cccucuucuggguauuacu

SEQ ID NO: 814849 - RNA, 19 nt, Artificial Sequence
  Description of Artificial Sequence: Synthetic oligonucleotide
  Antisense strand to SEQ ID NO: 814848
aguaauacccagaagaggg

SEQ ID NO: 814850 - RNA, 19 nt, Artificial Sequence
  Description of Artificial Sequence: Synthetic oligonucleotide
  Sense strand starting at position 1568 of SEQ ID NO: 587738
agcagcauugaugaguuaa

SEQ ID NO: 814851 - RNA, 19 nt, Artificial Sequence
  Description of Artificial Sequence: Synthetic oligonucleotide
  Antisense strand to SEQ ID NO: 814850
uuaacucaucaaugcugcu

SEQ ID NO: 814852 - RNA, 19 nt, Artificial Sequence
  Description of Artificial Sequence: Synthetic oligonucleotide
  Sense strand starting at position 2144 of SEQ ID NO: 587738
gagccaguccgugauaauc

SEQ ID NO: 814853 - RNA, 19 nt, Artificial Sequence
  Description of Artificial Sequence: Synthetic oligonucleotide
  Antisense strand to SEQ ID NO: 814852
gauuaucacggacuggcuc

SEQ ID NO: 814854 - RNA, 19 nt, Artificial Sequence
  Description of Artificial Sequence: Synthetic oligonucleotide
  Sense strand starting at position 2245 of SEQ ID NO: 587738
aaucaauggucauugaggu

SEQ ID NO: 814855 - RNA, 19 nt, Artificial Sequence
  Description of Artificial Sequence: Synthetic oligonucleotide
  Antisense strand to SEQ ID NO: 814854
accucaaugaccauugauu

SEQ ID NO: 814856 - RNA, 19 nt, Artificial Sequence
  Description of Artificial Sequence: Synthetic oligonucleotide
  Sense strand starting at position 2526 of SEQ ID NO: 587738
cuguuucugggaugccaga

SEQ ID NO: 814857 - RNA, 19 nt, Artificial Sequence
  Description of Artificial Sequence: Synthetic oligonucleotide
  Antisense strand to SEQ ID NO: 814856
ucuggcaucccagaaacag

SEQ ID NO: 814858 - RNA, 19 nt, Artificial Sequence
  Description of Artificial Sequence: Synthetic oligonucleotide
  Sense strand starting at position 2551 of SEQ ID NO: 587738
acgaaugaaacgcaaguuu

SEQ ID NO: 814859 - RNA, 19 nt, Artificial Sequence
  Description of Artificial Sequence: Synthetic oligonucleotide
  Antisense strand to SEQ ID NO: 814858
aaacuugcguuucauucgu

SEQ ID NO: 814860 - RNA, 19 nt, Artificial Sequence
  Description of Artificial Sequence: Synthetic oligonucleotide
  Sense strand starting at position 2570 of SEQ ID NO: 587738
cucugaccucccuggagaa

SEQ ID NO: 814861 - RNA, 19 nt, Artificial Sequence
  Description of Artificial Sequence: Synthetic oligonucleotide
  Antisense strand to SEQ ID NO: 814860
uucuccagggaggucagag

SEQ ID NO: 814862 - RNA, 19 nt, Artificial Sequence
  Description of Artificial Sequence: Synthetic oligonucleotide
  Sense strand starting at position 2662 of SEQ ID NO: 587738
accucaggaucucuugauu

SEQ ID NO: 814863 - RNA, 19 nt, Artificial Sequence
  Description of Artificial Sequence: Synthetic oligonucleotide
  Antisense strand to SEQ ID NO: 814862
aaucaagagauccugaggu

SEQ ID NO: 814864 - RNA, 19 nt, Artificial Sequence
  Description of Artificial Sequence: Synthetic oligonucleotide
  Sense strand starting at position 3126 of SEQ ID NO: 587738
auuggauccugguuuguaa

SEQ ID NO: 814865 - RNA, 19 nt, Artificial Sequence
  Description of Artificial Sequence: Synthetic oligonucleotide
  Antisense strand to SEQ ID NO: 814864
uuacaaaccaggauccaau

SEQ ID NO: 814866 - RNA, 19 nt, Artificial Sequence
  Description of Artificial Sequence: Synthetic oligonucleotide
  Sense strand starting at position 3177 of SEQ ID NO: 587738
acguuugcagaacaaauua

SEQ ID NO: 814867 - RNA, 19 nt, Artificial Sequence
  Description of Artificial Sequence: Synthetic oligonucleotide
  Antisense strand to SEQ ID NO: 814866
uaauuuguucugcaaacgu

SEQ ID NO: 814868 - RNA, 19 nt, Artificial Sequence
  Description of Artificial Sequence: Synthetic oligonucleotide
  Sense strand starting at position 3259 of SEQ ID NO: 587738
agguauaauagugguauca

SEQ ID NO: 814869 - RNA, 19 nt, Artificial Sequence
  Description of Artificial Sequence: Synthetic oligonucleotide
  Antisense strand to SEQ ID NO: 814868
ugauaccacuauuauaccu

SEQ ID NO: 814870 - RNA, 19 nt, Artificial Sequence
  Description of Artificial Sequence: Synthetic oligonucleotide
  Sense strand starting at position 3271 of SEQ ID NO: 587738
gguaucauacuuuagucaa

SEQ ID NO: 814871 - RNA, 19 nt, Artificial Sequence
  Description of Artificial Sequence: Synthetic oligonucleotide
  Antisense strand to SEQ ID NO: 814870
uugacuaaaguaugauacc

SEQ ID NO: 814872 - RNA, 19 nt, Artificial Sequence
  Description of Artificial Sequence: Synthetic oligonucleotide
  Sense strand starting at position 3279 of SEQ ID NO: 587738
acuuuagucaaagaguguu

SEQ ID NO: 814873 - RNA, 19 nt, Artificial Sequence
  Description of Artificial Sequence: Synthetic oligonucleotide
  Antisense strand to SEQ ID NO: 814872
aacacucuuugacuaaagu

SEQ ID NO: 814874 - RNA, 19 nt, Artificial Sequence
  Description of Artificial Sequence: Synthetic oligonucleotide
  Sense strand starting at position 3305 of SEQ ID NO: 587738
gauggaauugcaugaugag

SEQ ID NO: 814875 - RNA, 19 nt, Artificial Sequence
  Description of Artificial Sequence: Synthetic oligonucleotide
  Antisense strand to SEQ ID NO: 814874
cucaucaugcaauuccauc

SEQ ID NO: 814876 - RNA, 19 nt, Artificial Sequence
  Description of Artificial Sequence: Synthetic oligonucleotide
  Sense strand starting at position 3423 of SEQ ID NO: 587738
uagguaugauccuuugcac

SEQ ID NO: 814877 - RNA, 19 nt, Artificial Sequence
  Description of Artificial Sequence: Synthetic oligonucleotide
  Antisense strand to SEQ ID NO: 814876
gugcaaaggaucauaccua

SEQ ID NO: 814878 - RNA, 19 nt, Artificial Sequence
  Description of Artificial Sequence: Synthetic oligonucleotide
  Sense strand starting at position 3547 of SEQ ID NO: 587738
cucuuucgggaagaaguau

SEQ ID NO: 814879 - RNA, 19 nt, Artificial Sequence
  Description of Artificial Sequence: Synthetic oligonucleotide
  Antisense strand to SEQ ID NO: 814878
auacuucuucccgaaagag

SEQ ID NO: 814880 - RNA, 19 nt, Artificial Sequence
  Description of Artificial Sequence: Synthetic oligonucleotide
  Sense strand starting at position 3570 of SEQ ID NO: 587738
cuuccaugacauggucaau

SEQ ID NO: 814881 - RNA, 19 nt, Artificial Sequence
  Description of Artificial Sequence: Synthetic oligonucleotide
  Antisense strand to SEQ ID NO: 814880
auugaccaugucauggaag

SEQ ID NO: 814882 - RNA, 19 nt, Artificial Sequence
  Description of Artificial Sequence: Synthetic oligonucleotide
  Sense strand starting at position 3594 of SEQ ID NO: 587738
cuuugaacucuuugugaaa

SEQ ID NO: 814883 - RNA, 19 nt, Artificial Sequence
  Description of Artificial Sequence: Synthetic oligonucleotide
  Antisense strand to SEQ ID NO: 814882
uuucacaaagaguucaaag

SEQ ID NO: 814884 - RNA, 19 nt, Artificial Sequence
  Description of Artificial Sequence: Synthetic oligonucleotide
  Sense strand starting at position 3777 of SEQ ID NO: 587738
gaggcaaacucucuaguuu

SEQ ID NO: 814885 - RNA, 19 nt, Artificial Sequence
  Description of Artificial Sequence: Synthetic oligonucleotide
  Antisense strand to SEQ ID NO: 814884
aaacuagagaguuugccuc

SEQ ID NO: 814886 - RNA, 19 nt, Artificial Sequence
  Description of Artificial Sequence: Synthetic oligonucleotide
  Sense strand starting at position 3778 of SEQ ID NO: 587738
aggcaaacucucuaguuua

SEQ ID NO: 814887 - RNA, 19 nt, Artificial Sequence
  Description of Artificial Sequence: Synthetic oligonucleotide
  Antisense strand to SEQ ID NO: 814886
uaaacuagagaguuugccu

SEQ ID NO: 814888 - RNA, 19 nt, Artificial Sequence
  Description of Artificial Sequence: Synthetic oligonucleotide
  Sense strand starting at position 3943 of SEQ ID NO: 587738
agagguugggaguaagguu

SEQ ID NO: 814889 - RNA, 19 nt, Artificial Sequence
  Description of Artificial Sequence: Synthetic oligonucleotide
  Antisense strand to SEQ ID NO: 814888
aaccuuacucccaaccucu

SEQ ID NO: 814890 - RNA, 19 nt, Artificial Sequence
  Description of Artificial Sequence: Synthetic oligonucleotide
  Sense strand starting at position 3983 of SEQ ID NO: 587738
ccagguaaauuugaaauua

SEQ ID NO: 814891 - RNA, 19 nt, Artificial Sequence
  Description of Artificial Sequence: Synthetic oligonucleotide
  Antisense strand to SEQ ID NO: 814890
uaauuucaaauuuaccugg

SEQ ID NO: 814892 - RNA, 19 nt, Artificial Sequence
  Description of Artificial Sequence: Synthetic oligonucleotide
  Sense strand starting at position 178 of SEQ ID NO: 587739
ucagacagucucuguaauu

SEQ ID NO: 814893 - RNA, 19 nt, Artificial Sequence
  Description of Artificial Sequence: Synthetic oligonucleotide
  Antisense strand to SEQ ID NO: 814892
aauuacagagacugucuga

SEQ ID NO: 814894 - RNA, 19 nt, Artificial Sequence
  Description of Artificial Sequence: Synthetic oligonucleotide
  Sense strand starting at position 894 of SEQ ID NO: 587739
auaagaaaucugugugagg

SEQ ID NO: 814895 - RNA, 19 nt, Artificial Sequence
  Description of Artificial Sequence: Synthetic oligonucleotide
  Antisense strand to SEQ ID NO: 814894
ccucacacagauuucuuau

SEQ ID NO: 814896 - RNA, 19 nt, Artificial Sequence
  Description of Artificial Sequence: Synthetic oligonucleotide
  Sense strand starting at position 896 of SEQ ID NO: 587739
aagaaaucugugugaggca

SEQ ID NO: 814897 - RNA, 19 nt, Artificial Sequence
  Description of Artificial Sequence: Synthetic oligonucleotide
  Antisense strand to SEQ ID NO: 814896
ugccucacacagauuucuu

SEQ ID NO: 814898 - RNA, 19 nt, Artificial Sequence
  Description of Artificial Sequence: Synthetic oligonucleotide
  Sense strand starting at position 965 of SEQ ID NO: 587739
auaagagcugacgagaguu

SEQ ID NO: 814899 - RNA, 19 nt, Artificial Sequence
  Description of Artificial Sequence: Synthetic oligonucleotide
  Antisense strand to SEQ ID NO: 814898
aacucucgucagcucuuau

SEQ ID NO: 814900 - RNA, 19 nt, Artificial Sequence
  Description of Artificial Sequence: Synthetic oligonucleotide
  Sense strand starting at position 977 of SEQ ID NO: 587739
gagaguuggucugugaaug

SEQ ID NO: 814901 - RNA, 19 nt, Artificial Sequence
  Description of Artificial Sequence: Synthetic oligonucleotide
  Antisense strand to SEQ ID NO: 814900
cauucacagaccaacucuc

SEQ ID NO: 814902 - RNA, 19 nt, Artificial Sequence
  Description of Artificial Sequence: Synthetic oligonucleotide
  Sense strand starting at position 1022 of SEQ ID NO: 587739
ugaaaugauugacagagaa

SEQ ID NO: 814903 - RNA, 19 nt, Artificial Sequence
  Description of Artificial Sequence: Synthetic oligonucleotide
  Antisense strand to SEQ ID NO: 814902
uucucugucaaucauuuca

SEQ ID NO: 814904 - RNA, 19 nt, Artificial Sequence
  Description of Artificial Sequence: Synthetic oligonucleotide
  Sense strand starting at position 1086 of SEQ ID NO: 587739
agcugaacuccaggagaua

SEQ ID NO: 814905 - RNA, 19 nt, Artificial Sequence
  Description of Artificial Sequence: Synthetic oligonucleotide
  Antisense strand to SEQ ID NO: 814904
uaucuccuggaguucagcu

SEQ ID NO: 814906 - RNA, 19 nt, Artificial Sequence
  Description of Artificial Sequence: Synthetic oligonucleotide
  Sense strand starting at position 1267 of SEQ ID NO: 587739
gggaccuacugcuccaaau

SEQ ID NO: 814907 - RNA, 19 nt, Artificial Sequence
  Description of Artificial Sequence: Synthetic oligonucleotide
  Antisense strand to SEQ ID NO: 814906
auuuggagcaguagguccc

SEQ ID NO: 814908 - RNA, 19 nt, Artificial Sequence
  Description of Artificial Sequence: Synthetic oligonucleotide
  Sense strand starting at position 1376 of SEQ ID NO: 587739
cgaaucuggcacugaaaug

SEQ ID NO: 814909 - RNA, 19 nt, Artificial Sequence
  Description of Artificial Sequence: Synthetic oligonucleotide
  Antisense strand to SEQ ID NO: 814908
cauuucagugccagauucg

SEQ ID NO: 814910 - RNA, 19 nt, Artificial Sequence
  Description of Artificial Sequence: Synthetic oligonucleotide
  Sense strand starting at position 1582 of SEQ ID NO: 587739
gcggaaagcuccacgcagu

SEQ ID NO: 814911 - RNA, 19 nt, Artificial Sequence
  Description of Artificial Sequence: Synthetic oligonucleotide
  Antisense strand to SEQ ID NO: 814910
acugcguggagcuuuccgc

SEQ ID NO: 814912 - RNA, 19 nt, Artificial Sequence
  Description of Artificial Sequence: Synthetic oligonucleotide
  Sense strand starting at position 2341 of SEQ ID NO: 587739
uacguaauagaacgggaau

SEQ ID NO: 814913 - RNA, 19 nt, Artificial Sequence
  Description of Artificial Sequence: Synthetic oligonucleotide
  Antisense strand to SEQ ID NO: 814912
auucccguucuauuacgua

SEQ ID NO: 814914 - RNA, 19 nt, Artificial Sequence
  Description of Artificial Sequence: Synthetic oligonucleotide
  Sense strand starting at position 2343 of SEQ ID NO: 587739
cguaauagaacgggaaucu

SEQ ID NO: 814915 - RNA, 19 nt, Artificial Sequence
  Description of Artificial Sequence: Synthetic oligonucleotide
  Antisense strand to SEQ ID NO: 814914
agauucccguucuauuacg

SEQ ID NO: 814916 - RNA, 19 nt, Artificial Sequence
  Description of Artificial Sequence: Synthetic oligonucleotide
  Sense strand starting at position 2522 of SEQ ID NO: 587739
ccacauaauugggcaaacu

SEQ ID NO: 814917 - RNA, 19 nt, Artificial Sequence
  Description of Artificial Sequence: Synthetic oligonucleotide
  Antisense strand to SEQ ID NO: 814916
aguuugcccaauuaugugg

SEQ ID NO: 814918 - RNA, 19 nt, Artificial Sequence
  Description of Artificial Sequence: Synthetic oligonucleotide
  Sense strand starting at position 2555 of SEQ ID NO: 587739
uguaacauuugggaaucaa

SEQ ID NO: 814919 - RNA, 19 nt, Artificial Sequence
  Description of Artificial Sequence: Synthetic oligonucleotide
  Antisense strand to SEQ ID NO: 814918
uugauucccaaauguuaca

SEQ ID NO: 814920 - RNA, 19 nt, Artificial Sequence
  Description of Artificial Sequence: Synthetic oligonucleotide
  Sense strand starting at position 2643 of SEQ ID NO: 587739
augaaauaagcauguauuc

SEQ ID NO: 814921 - RNA, 19 nt, Artificial Sequence
  Description of Artificial Sequence: Synthetic oligonucleotide
  Antisense strand to SEQ ID NO: 814920
gaauacaugcuuauuucau

SEQ ID NO: 814922 - RNA, 19 nt, Artificial Sequence
  Description of Artificial Sequence: Synthetic oligonucleotide
  Sense strand starting at position 2698 of SEQ ID NO: 587739
agcuguuaacaagacuguu

SEQ ID NO: 814923 - RNA, 19 nt, Artificial Sequence
  Description of Artificial Sequence: Synthetic oligonucleotide
  Antisense strand to SEQ ID NO: 814922
aacagucuuguuaacagcu

SEQ ID NO: 814924 - RNA, 19 nt, Artificial Sequence
  Description of Artificial Sequence: Synthetic oligonucleotide
  Sense strand starting at position 2762 of SEQ ID NO: 587739
agguuugaggguugaaugu

SEQ ID NO: 814925 - RNA, 19 nt, Artificial Sequence
  Description of Artificial Sequence: Synthetic oligonucleotide
  Antisense strand to SEQ ID NO: 814924
acauucaacccucaaaccu

SEQ ID NO: 814926 - RNA, 19 nt, Artificial Sequence
  Description of Artificial Sequence: Synthetic oligonucleotide
  Sense strand starting at position 2769 of SEQ ID NO: 587739
aggguugaauguuuaagga

SEQ ID NO: 814927 - RNA, 19 nt, Artificial Sequence
  Description of Artificial Sequence: Synthetic oligonucleotide
  Antisense strand to SEQ ID NO: 814926
uccuuaaacauucaacccu

SEQ ID NO: 814928 - RNA, 19 nt, Artificial Sequence
  Description of Artificial Sequence: Synthetic oligonucleotide
  Sense strand starting at position 2835 of SEQ ID NO: 587739
ccuagcuguugagucauuu

SEQ ID NO: 814929 - RNA, 19 nt, Artificial Sequence
  Description of Artificial Sequence: Synthetic oligonucleotide
  Antisense strand to SEQ ID NO: 814928
aaaugacucaacagcuagg

SEQ ID NO: 814930 - RNA, 19 nt, Artificial Sequence
  Description of Artificial Sequence: Synthetic oligonucleotide
  Sense strand starting at position 2925 of SEQ ID NO: 587739
ugaauugaccgucacuuga

SEQ ID NO: 814931 - RNA, 19 nt, Artificial Sequence
  Description of Artificial Sequence: Synthetic oligonucleotide
  Antisense strand to SEQ ID NO: 814930
ucaagugacggucaauuca

SEQ ID NO: 814932 - RNA, 19 nt, Artificial Sequence
  Description of Artificial Sequence: Synthetic oligonucleotide
  Sense strand starting at position 2927 of SEQ ID NO: 587739
aauugaccgucacuugaua

SEQ ID NO: 814933 - RNA, 19 nt, Artificial Sequence
  Description of Artificial Sequence: Synthetic oligonucleotide
  Antisense strand to SEQ ID NO: 814932
uaucaagugacggucaauu

SEQ ID NO: 814934 - RNA, 19 nt, Artificial Sequence
  Description of Artificial Sequence: Synthetic oligonucleotide
  Sense strand starting at position 2950 of SEQ ID NO: 587739
ccagcuuuacacuauggau

SEQ ID NO: 814935 - RNA, 19 nt, Artificial Sequence
  Description of Artificial Sequence: Synthetic oligonucleotide
  Antisense strand to SEQ ID NO: 814934
auccauaguguaaagcugg

SEQ ID NO: 814936 - RNA, 19 nt, Artificial Sequence
  Description of Artificial Sequence: Synthetic oligonucleotide
  Sense strand starting at position 3008 of SEQ ID NO: 587739
ggaagcaccuuugcuaaau

SEQ ID NO: 814937 - RNA, 19 nt, Artificial Sequence
  Description of Artificial Sequence: Synthetic oligonucleotide
  Antisense strand to SEQ ID NO: 814936
auuuagcaaaggugcuucc

SEQ ID NO: 814938 - RNA, 19 nt, Artificial Sequence
  Description of Artificial Sequence: Synthetic oligonucleotide
  Sense strand starting at position 3051 of SEQ ID NO: 587739
ucccaaaguuaggugauaa

SEQ ID NO: 814939 - RNA, 19 nt, Artificial Sequence
  Description of Artificial Sequence: Synthetic oligonucleotide
  Antisense strand to SEQ ID NO: 814938
uuaucaccuaacuuuggga

SEQ ID NO: 814940 - RNA, 19 nt, Artificial Sequence
  Description of Artificial Sequence: Synthetic oligonucleotide
  Sense strand starting at position 3099 of SEQ ID NO: 587739
guuagaauucuuggucaua

SEQ ID NO: 814941 - RNA, 19 nt, Artificial Sequence
  Description of Artificial Sequence: Synthetic oligonucleotide
  Antisense strand to SEQ ID NO: 814940
uaugaccaagaauucuaac

SEQ ID NO: 814942 - RNA, 19 nt, Artificial Sequence
  Description of Artificial Sequence: Synthetic oligonucleotide
  Sense strand starting at position 3100 of SEQ ID NO: 587739
uuagaauucuuggucauag

SEQ ID NO: 814943 - RNA, 19 nt, Artificial Sequence
  Description of Artificial Sequence: Synthetic oligonucleotide
  Antisense strand to SEQ ID NO: 814942
cuaugaccaagaauucuaa

SEQ ID NO: 814944 - RNA, 19 nt, Artificial Sequence
  Description of Artificial Sequence: Synthetic oligonucleotide
  Sense strand starting at position 3101 of SEQ ID NO: 587739
uagaauucuuggucauaga

SEQ ID NO: 814945 - RNA, 19 nt, Artificial Sequence
  Description of Artificial Sequence: Synthetic oligonucleotide
  Antisense strand to SEQ ID NO: 814944
ucuaugaccaagaauucua

SEQ ID NO: 814946 - RNA, 19 nt, Artificial Sequence
  Description of Artificial Sequence: Synthetic oligonucleotide
  Sense strand starting at position 3179 of SEQ ID NO: 587739
acauuagcccguuaauauu

SEQ ID NO: 814947 - RNA, 19 nt, Artificial Sequence
  Description of Artificial Sequence: Synthetic oligonucleotide
  Antisense strand to SEQ ID NO: 814946
aauauuaacgggcuaaugu

SEQ ID NO: 814948 - RNA, 19 nt, Artificial Sequence
  Description of Artificial Sequence: Synthetic oligonucleotide
  Sense strand starting at position 3187 of SEQ ID NO: 587739
ccguuaauauuaccauaga

SEQ ID NO: 814949 - RNA, 19 nt, Artificial Sequence
  Description of Artificial Sequence: Synthetic oligonucleotide
  Antisense strand to SEQ ID NO: 814948
ucuaugguaauauuaacgg

SEQ ID NO: 814950 - RNA, 19 nt, Artificial Sequence
  Description of Artificial Sequence: Synthetic oligonucleotide
  Sense strand starting at position 3209 of SEQ ID NO: 587739
ggagauucuuaaucuguau

SEQ ID NO: 814951 - RNA, 19 nt, Artificial Sequence
  Description of Artificial Sequence: Synthetic oligonucleotide
  Antisense strand to SEQ ID NO: 814950
auacagauuaagaaucucc

SEQ ID NO: 814952 - RNA, 19 nt, Artificial Sequence
  Description of Artificial Sequence: Synthetic oligonucleotide
  Sense strand starting at position 3371 of SEQ ID NO: 587739
uuaggaguaccugggacuu

SEQ ID NO: 814953 - RNA, 19 nt, Artificial Sequence
  Description of Artificial Sequence: Synthetic oligonucleotide
  Antisense strand to SEQ ID NO: 814952
aagucccagguacuccuaa

SEQ ID NO: 814954 - RNA, 19 nt, Artificial Sequence
  Description of Artificial Sequence: Synthetic oligonucleotide
  Sense strand starting at position 3381 of SEQ ID NO: 587739
cugggacuuuguuuccaau

SEQ ID NO: 814955 - RNA, 19 nt, Artificial Sequence
  Description of Artificial Sequence: Synthetic oligonucleotide
  Antisense strand to SEQ ID NO: 814954
auuggaaacaaagucccag

SEQ ID NO: 814956 - RNA, 19 nt, Artificial Sequence
  Description of Artificial Sequence: Synthetic oligonucleotide
  Sense strand starting at position 3383 of SEQ ID NO: 587739
gggacuuuguuuccaauag

SEQ ID NO: 814957 - RNA, 19 nt, Artificial Sequence
  Description of Artificial Sequence: Synthetic oligonucleotide
  Antisense strand to SEQ ID NO: 814956
cuauuggaaacaaaguccc

SEQ ID NO: 814958 - RNA, 19 nt, Artificial Sequence
  Description of Artificial Sequence: Synthetic oligonucleotide
  Sense strand starting at position 3443 of SEQ ID NO: 587739
cuaucacuacacugauguu

SEQ ID NO: 814959 - RNA, 19 nt, Artificial Sequence
  Description of Artificial Sequence: Synthetic oligonucleotide
  Antisense strand to SEQ ID NO: 814958
aacaucaguguagugauag

SEQ ID NO: 814960 - RNA, 19 nt, Artificial Sequence
  Description of Artificial Sequence: Synthetic oligonucleotide
  Sense strand starting at position 3598 of SEQ ID NO: 587739
uaagguaccuugguguaau

SEQ ID NO: 814961 - RNA, 19 nt, Artificial Sequence
  Description of Artificial Sequence: Synthetic oligonucleotide
  Antisense strand to SEQ ID NO: 814960
auuacaccaagguaccuua

SEQ ID NO: 814962 - RNA, 19 nt, Artificial Sequence
  Description of Artificial Sequence: Synthetic oligonucleotide
  Sense strand starting at position 3601 of SEQ ID NO: 587739
gguaccuugguguaauucu

SEQ ID NO: 814963 - RNA, 19 nt, Artificial Sequence
  Description of Artificial Sequence: Synthetic oligonucleotide
  Antisense strand to SEQ ID NO: 814962
agaauuacaccaagguacc

SEQ ID NO: 814964 - RNA, 19 nt, Artificial Sequence
  Description of Artificial Sequence: Synthetic oligonucleotide
  Sense strand starting at position 3956 of SEQ ID NO: 587739
ugaaccauaucauuggguu

SEQ ID NO: 814965 - RNA, 19 nt, Artificial Sequence
  Description of Artificial Sequence: Synthetic oligonucleotide
  Antisense strand to SEQ ID NO: 814964
aacccaaugauaugguuca

SEQ ID NO: 814966 - RNA, 19 nt, Artificial Sequence
  Description of Artificial Sequence: Synthetic oligonucleotide
  Sense strand starting at position 3957 of SEQ ID NO: 587739
gaaccauaucauuggguua

SEQ ID NO: 814967 - RNA, 19 nt, Artificial Sequence
  Description of Artificial Sequence: Synthetic oligonucleotide
  Antisense strand to SEQ ID NO: 814966
uaacccaaugauaugguuc

SEQ ID NO: 814968 - RNA, 19 nt, Artificial Sequence
  Description of Artificial Sequence: Synthetic oligonucleotide
  Sense strand starting at position 3960 of SEQ ID NO: 587739
ccauaucauuggguuacaa

SEQ ID NO: 814969 - RNA, 19 nt, Artificial Sequence
  Description of Artificial Sequence: Synthetic oligonucleotide
  Antisense strand to SEQ ID NO: 814968
uuguaacccaaugauaugg

SEQ ID NO: 814970 - RNA, 19 nt, Artificial Sequence
  Description of Artificial Sequence: Synthetic oligonucleotide
  Sense strand starting at position 3971 of SEQ ID NO: 587739
gguuacaaucaaugaaugu

SEQ ID NO: 814971 - RNA, 19 nt, Artificial Sequence
  Description of Artificial Sequence: Synthetic oligonucleotide
  Antisense strand to SEQ ID NO: 814970
acauucauugauuguaacc

SEQ ID NO: 814972 - RNA, 19 nt, Artificial Sequence
  Description of Artificial Sequence: Synthetic oligonucleotide
  Sense strand starting at position 120 of SEQ ID NO: 587740
agggaaggcucuuccauca

SEQ ID NO: 814973 - RNA, 19 nt, Artificial Sequence
  Description of Artificial Sequence: Synthetic oligonucleotide
  Antisense strand to SEQ ID NO: 814972
ugauggaagagccuucccu

SEQ ID NO: 814974 - RNA, 19 nt, Artificial Sequence
  Description of Artificial Sequence: Synthetic oligonucleotide
  Sense strand starting at position 167 of SEQ ID NO: 587740
guccucagacagugauucu

SEQ ID NO: 814975 - RNA, 19 nt, Artificial Sequence
  Description of Artificial Sequence: Synthetic oligonucleotide
  Antisense strand to SEQ ID NO: 814974
agaaucacugucugaggac

SEQ ID NO: 814976 - RNA, 19 nt, Artificial Sequence
  Description of Artificial Sequence: Synthetic oligonucleotide
  Sense strand starting at position 177 of SEQ ID NO: 587740
agugauucuguguagguga

SEQ ID NO: 814977 - RNA, 19 nt, Artificial Sequence
  Description of Artificial Sequence: Synthetic oligonucleotide
  Antisense strand to SEQ ID NO: 814976
ucaccuacacagaaucacu

SEQ ID NO: 814978 - RNA, 19 nt, Artificial Sequence
  Description of Artificial Sequence: Synthetic oligonucleotide
  Sense strand starting at position 182 of SEQ ID NO: 587740
uucuguguaggugaugaaa

SEQ ID NO: 814979 - RNA, 19 nt, Artificial Sequence
  Description of Artificial Sequence: Synthetic oligonucleotide
  Antisense strand to SEQ ID NO: 814978
uuucaucaccuacacagaa

SEQ ID NO: 814980 - RNA, 19 nt, Artificial Sequence
  Description of Artificial Sequence: Synthetic oligonucleotide
  Sense strand starting at position 211 of SEQ ID NO: 587740
aagagaagcugucccuuua

SEQ ID NO: 814981 - RNA, 19 nt, Artificial Sequence
  Description of Artificial Sequence: Synthetic oligonucleotide
  Antisense strand to SEQ ID NO: 814980
uaaagggacagcuucucuu

SEQ ID NO: 814982 - RNA, 19 nt, Artificial Sequence
  Description of Artificial Sequence: Synthetic oligonucleotide
  Sense strand starting at position 245 of SEQ ID NO: 587740
ucccauaucccacguggaa

SEQ ID NO: 814983 - RNA, 19 nt, Artificial Sequence
  Description of Artificial Sequence: Synthetic oligonucleotide
  Antisense strand to SEQ ID NO: 814982
uuccacgugggauauggga

SEQ ID NO: 814984 - RNA, 19 nt, Artificial Sequence
  Description of Artificial Sequence: Synthetic oligonucleotide
  Sense strand starting at position 347 of SEQ ID NO: 587740
agcuuaacauucuuuagga

SEQ ID NO: 814985 - RNA, 19 nt, Artificial Sequence
  Description of Artificial Sequence: Synthetic oligonucleotide
  Antisense strand to SEQ ID NO: 814984
uccuaaagaauguuaagcu

SEQ ID NO: 814986 - RNA, 19 nt, Artificial Sequence
  Description of Artificial Sequence: Synthetic oligonucleotide
  Sense strand starting at position 348 of SEQ ID NO: 587740
gcuuaacauucuuuaggaa

SEQ ID NO: 814987 - RNA, 19 nt, Artificial Sequence
  Description of Artificial Sequence: Synthetic oligonucleotide
  Antisense strand to SEQ ID NO: 814986
uuccuaaagaauguuaagc

SEQ ID NO: 814988 - RNA, 19 nt, Artificial Sequence
  Description of Artificial Sequence: Synthetic oligonucleotide
  Sense strand starting at position 537 of SEQ ID NO: 587740
gaagcauaaaugcgacgaa

SEQ ID NO: 814989 - RNA, 19 nt, Artificial Sequence
  Description of Artificial Sequence: Synthetic oligonucleotide
  Antisense strand to SEQ ID NO: 814988
uucgucgcauuuaugcuuc

SEQ ID NO: 814990 - RNA, 19 nt, Artificial Sequence
  Description of Artificial Sequence: Synthetic oligonucleotide
  Sense strand starting at position 561 of SEQ ID NO: 587740
aaucuaaagccggaaaggu

SEQ ID NO: 814991 - RNA, 19 nt, Artificial Sequence
  Description of Artificial Sequence: Synthetic oligonucleotide
  Antisense strand to SEQ ID NO: 814990
accuuuccggcuuuagauu

SEQ ID NO: 814992 - RNA, 19 nt, Artificial Sequence
  Description of Artificial Sequence: Synthetic oligonucleotide
  Sense strand starting at position 569 of SEQ ID NO: 587740
gccggaaagguucauucuu

SEQ ID NO: 814993 - RNA, 19 nt, Artificial Sequence
  Description of Artificial Sequence: Synthetic oligonucleotide
  Antisense strand to SEQ ID NO: 814992
aagaaugaaccuuuccggc

SEQ ID NO: 814994 - RNA, 19 nt, Artificial Sequence
  Description of Artificial Sequence: Synthetic oligonucleotide
  Sense strand starting at position 693 of SEQ ID NO: 587740
guguuuaucuuaucugaga

SEQ ID NO: 814995 - RNA, 19 nt, Artificial Sequence
  Description of Artificial Sequence: Synthetic oligonucleotide
  Antisense strand to SEQ ID NO: 814994
ucucagauaagauaaacac

SEQ ID NO: 814996 - RNA, 19 nt, Artificial Sequence
  Description of Artificial Sequence: Synthetic oligonucleotide
  Sense strand starting at position 694 of SEQ ID NO: 587740
uguuuaucuuaucugagau

SEQ ID NO: 814997 - RNA, 19 nt, Artificial Sequence
  Description of Artificial Sequence: Synthetic oligonucleotide
  Antisense strand to SEQ ID NO: 814996
aucucagauaagauaaaca

SEQ ID NO: 814998 - RNA, 19 nt, Artificial Sequence
  Description of Artificial Sequence: Synthetic oligonucleotide
  Sense strand starting at position 725 of SEQ ID NO: 587740
ccaauaaguuuagcaguuu

SEQ ID NO: 814999 - RNA, 19 nt, Artificial Sequence
  Description of Artificial Sequence: Synthetic oligonucleotide
  Antisense strand to SEQ ID NO: 814998
aaacugcuaaacuuauugg

SEQ ID NO: 815000 - RNA, 19 nt, Artificial Sequence
  Description of Artificial Sequence: Synthetic oligonucleotide
  Sense strand starting at position 807 of SEQ ID NO: 587740
auugucgguugaguuauaa

SEQ ID NO: 815001 - RNA, 19 nt, Artificial Sequence
  Description of Artificial Sequence: Synthetic oligonucleotide
  Antisense strand to SEQ ID NO: 815000
uuauaacucaaccgacaau

SEQ ID NO: 815002 - RNA, 19 nt, Artificial Sequence
  Description of Artificial Sequence: Synthetic oligonucleotide
  Sense strand starting at position 870 of SEQ ID NO: 587740
acuccuuggucccugcaaa

SEQ ID NO: 815003 - RNA, 19 nt, Artificial Sequence
  Description of Artificial Sequence: Synthetic oligonucleotide
  Antisense strand to SEQ ID NO: 815002
uuugcagggaccaaggagu

SEQ ID NO: 815004 - RNA, 19 nt, Artificial Sequence
  Description of Artificial Sequence: Synthetic oligonucleotide
  Sense strand starting at position 1000 of SEQ ID NO: 587740
gguuauaugccugaguucu

SEQ ID NO: 815005 - RNA, 19 nt, Artificial Sequence
  Description of Artificial Sequence: Synthetic oligonucleotide
  Antisense strand to SEQ ID NO: 815004
agaacucaggcauauaacc

SEQ ID NO: 815006 - RNA, 19 nt, Artificial Sequence
  Description of Artificial Sequence: Synthetic oligonucleotide
  Sense strand starting at position 1036 of SEQ ID NO: 587740
uuaugauacugacaacaag

SEQ ID NO: 815007 - RNA, 19 nt, Artificial Sequence
  Description of Artificial Sequence: Synthetic oligonucleotide
  Antisense strand to SEQ ID NO: 815006
cuuguugucaguaucauaa

SEQ ID NO: 815008 - RNA, 19 nt, Artificial Sequence
  Description of Artificial Sequence: Synthetic oligonucleotide
  Sense strand starting at position 1352 of SEQ ID NO: 587740
cggagaguuuacucucaaa

SEQ ID NO: 815009 - RNA, 19 nt, Artificial Sequence
  Description of Artificial Sequence: Synthetic oligonucleotide
  Antisense strand to SEQ ID NO: 815008
uuugagaguaaacucuccg

SEQ ID NO: 815010 - RNA, 19 nt, Artificial Sequence
  Description of Artificial Sequence: Synthetic oligonucleotide
  Sense strand starting at position 1682 of SEQ ID NO: 587740
cugagaguagcacaaacuu

SEQ ID NO: 815011 - RNA, 19 nt, Artificial Sequence
  Description of Artificial Sequence: Synthetic oligonucleotide
  Antisense strand to SEQ ID NO: 815010
aaguuugugcuacucucag

SEQ ID NO: 815012 - RNA, 19 nt, Artificial Sequence
  Description of Artificial Sequence: Synthetic oligonucleotide
  Sense strand starting at position 1764 of SEQ ID NO: 587740
ccugauauuucucccgcua

SEQ ID NO: 815013 - RNA, 19 nt, Artificial Sequence
  Description of Artificial Sequence: Synthetic oligonucleotide
  Antisense strand to SEQ ID NO: 815012
uagcgggagaaauaucagg

SEQ ID NO: 815014 - RNA, 19 nt, Artificial Sequence
  Description of Artificial Sequence: Synthetic oligonucleotide
  Sense strand starting at position 2445 of SEQ ID NO: 587740
uugggaugcgcgcuacuua

SEQ ID NO: 815015 - RNA, 19 nt, Artificial Sequence
  Description of Artificial Sequence: Synthetic oligonucleotide
  Antisense strand to SEQ ID NO: 815014
uaaguagcgcgcaucccaa

SEQ ID NO: 815016 - RNA, 19 nt, Artificial Sequence
  Description of Artificial Sequence: Synthetic oligonucleotide
  Sense strand starting at position 3118 of SEQ ID NO: 587740
gcaugaacguguucagaaa

SEQ ID NO: 815017 - RNA, 19 nt, Artificial Sequence
  Description of Artificial Sequence: Synthetic oligonucleotide
  Antisense strand to SEQ ID NO: 815016
uuucugaacacguucaugc

SEQ ID NO: 815018 - RNA, 19 nt, Artificial Sequence
  Description of Artificial Sequence: Synthetic oligonucleotide
  Sense strand starting at position 3206 of SEQ ID NO: 587740
ggaacugcuuuauuaagca

SEQ ID NO: 815019 - RNA, 19 nt, Artificial Sequence
  Description of Artificial Sequence: Synthetic oligonucleotide
  Antisense strand to SEQ ID NO: 815018
ugcuuaauaaagcaguucc

SEQ ID NO: 815020 - RNA, 19 nt, Artificial Sequence
  Description of Artificial Sequence: Synthetic oligonucleotide
  Sense strand starting at position 3317 of SEQ ID NO: 587740
gguuaugcucugcaaguag

SEQ ID NO: 815021 - RNA, 19 nt, Artificial Sequence
  Description of Artificial Sequence: Synthetic oligonucleotide
  Antisense strand to SEQ ID NO: 815020
cuacuugcagagcauaacc

SEQ ID NO: 815022 - RNA, 19 nt, Artificial Sequence
  Description of Artificial Sequence: Synthetic oligonucleotide
  Sense strand starting at position 3321 of SEQ ID NO: 587740
augcucugcaaguaguaga

SEQ ID NO: 815023 - RNA, 19 nt, Artificial Sequence
  Description of Artificial Sequence: Synthetic oligonucleotide
  Antisense strand to SEQ ID NO: 815022
ucuacuacuugcagagcau

SEQ ID NO: 815024 - RNA, 19 nt, Artificial Sequence
  Description of Artificial Sequence: Synthetic oligonucleotide
  Sense strand starting at position 3332 of SEQ ID NO: 587740
guaguagagccuuguaaca

SEQ ID NO: 815025 - RNA, 19 nt, Artificial Sequence
  Description of Artificial Sequence: Synthetic oligonucleotide
  Antisense strand to SEQ ID NO: 815024
uguuacaaggcucuacuac

SEQ ID NO: 815026 - RNA, 19 nt, Artificial Sequence
  Description of Artificial Sequence: Synthetic oligonucleotide
  Sense strand starting at position 3337 of SEQ ID NO: 587740
agagccuuguaacauuuau

SEQ ID NO: 815027 - RNA, 19 nt, Artificial Sequence
  Description of Artificial Sequence: Synthetic oligonucleotide
  Antisense strand to SEQ ID NO: 815026
auaaauguuacaaggcucu

SEQ ID NO: 815028 - RNA, 19 nt, Artificial Sequence
  Description of Artificial Sequence: Synthetic oligonucleotide
  Sense strand starting at position 3458 of SEQ ID NO: 587740
ccaguuaauacacgaggaa

SEQ ID NO: 815029 - RNA, 19 nt, Artificial Sequence
  Description of Artificial Sequence: Synthetic oligonucleotide
  Antisense strand to SEQ ID NO: 815028
uuccucguguauuaacugg

SEQ ID NO: 815030 - RNA, 19 nt, Artificial Sequence
  Description of Artificial Sequence: Synthetic oligonucleotide
  Sense strand starting at position 3594 of SEQ ID NO: 587740
augugauguuaccuaggua

SEQ ID NO: 815031 - RNA, 19 nt, Artificial Sequence
  Description of Artificial Sequence: Synthetic oligonucleotide
  Antisense strand to SEQ ID NO: 815030
uaccuagguaacaucacau

SEQ ID NO: 815032 - RNA, 19 nt, Artificial Sequence
  Description of Artificial Sequence: Synthetic oligonucleotide
  Sense strand starting at position 3595 of SEQ ID NO: 587740
ugugauguuaccuagguau

SEQ ID NO: 815033 - RNA, 19 nt, Artificial Sequence
  Description of Artificial Sequence: Synthetic oligonucleotide
  Antisense strand to SEQ ID NO: 815032
auaccuagguaacaucaca

SEQ ID NO: 815034 - RNA, 19 nt, Artificial Sequence
  Description of Artificial Sequence: Synthetic oligonucleotide
  Sense strand starting at position 3597 of SEQ ID NO: 587740
ugauguuaccuagguauua

SEQ ID NO: 815035 - RNA, 19 nt, Artificial Sequence
  Description of Artificial Sequence: Synthetic oligonucleotide
  Antisense strand to SEQ ID NO: 815034
uaauaccuagguaacauca

SEQ ID NO: 815036 - RNA, 19 nt, Artificial Sequence
  Description of Artificial Sequence: Synthetic oligonucleotide
  Sense strand starting at position 3598 of SEQ ID NO: 587740
gauguuaccuagguauuau

SEQ ID NO: 815037 - RNA, 19 nt, Artificial Sequence
  Description of Artificial Sequence: Synthetic oligonucleotide
  Antisense strand to SEQ ID NO: 815036
auaauaccuagguaacauc

SEQ ID NO: 815038 - RNA, 19 nt, Artificial Sequence
  Description of Artificial Sequence: Synthetic oligonucleotide
  Sense strand starting at position 3620 of SEQ ID NO: 587740
ugaagaauuucugacugac

SEQ ID NO: 815039 - RNA, 19 nt, Artificial Sequence
  Description of Artificial Sequence: Synthetic oligonucleotide
  Antisense strand to SEQ ID NO: 815038
gucagucagaaauucuuca

SEQ ID NO: 815040 - RNA, 19 nt, Artificial Sequence
  Description of Artificial Sequence: Synthetic oligonucleotide
  Sense strand starting at position 3698 of SEQ ID NO: 587740
uugucugauccuuguugag

SEQ ID NO: 815041 - RNA, 19 nt, Artificial Sequence
  Description of Artificial Sequence: Synthetic oligonucleotide
  Antisense strand to SEQ ID NO: 815040
cucaacaaggaucagacaa

SEQ ID NO: 815042 - RNA, 19 nt, Artificial Sequence
  Description of Artificial Sequence: Synthetic oligonucleotide
  Sense strand starting at position 3700 of SEQ ID NO: 587740
gucugauccuuguugagau

SEQ ID NO: 815043 - RNA, 19 nt, Artificial Sequence
  Description of Artificial Sequence: Synthetic oligonucleotide
  Antisense strand to SEQ ID NO: 815042
aucucaacaaggaucagac

SEQ ID NO: 815044 - RNA, 19 nt, Artificial Sequence
  Description of Artificial Sequence: Synthetic oligonucleotide
  Sense strand starting at position 3740 of SEQ ID NO: 587740
agaguucuguguucucaca

SEQ ID NO: 815045 - RNA, 19 nt, Artificial Sequence
  Description of Artificial Sequence: Synthetic oligonucleotide
  Antisense strand to SEQ ID NO: 815044
ugugagaacacagaacucu

SEQ ID NO: 815046 - RNA, 19 nt, Artificial Sequence
  Description of Artificial Sequence: Synthetic oligonucleotide
  Sense strand starting at position 3748 of SEQ ID NO: 587740
guguucucacaucauagga

SEQ ID NO: 815047 - RNA, 19 nt, Artificial Sequence
  Description of Artificial Sequence: Synthetic oligonucleotide
  Antisense strand to SEQ ID NO: 815046
uccuaugaugugagaacac

SEQ ID NO: 815048 - RNA, 19 nt, Artificial Sequence
  Description of Artificial Sequence: Synthetic oligonucleotide
  Sense strand starting at position 3758 of SEQ ID NO: 587740
aucauaggauagguguaaa

SEQ ID NO: 815049 - RNA, 19 nt, Artificial Sequence
  Description of Artificial Sequence: Synthetic oligonucleotide
  Antisense strand to SEQ ID NO: 815048
uuuacaccuauccuaugau

SEQ ID NO: 815050 - RNA, 19 nt, Artificial Sequence
  Description of Artificial Sequence: Synthetic oligonucleotide
  Sense strand starting at position 3855 of SEQ ID NO: 587740
gaggaagaagcuuguagau

SEQ ID NO: 815051 - RNA, 19 nt, Artificial Sequence
  Description of Artificial Sequence: Synthetic oligonucleotide
  Antisense strand to SEQ ID NO: 815050
aucuacaagcuucuuccuc

SEQ ID NO: 815052 - RNA, 19 nt, Artificial Sequence
  Description of Artificial Sequence: Synthetic oligonucleotide
  Sense strand starting at position 149 of SEQ ID NO: 587741
acauguguguucuuaacau

SEQ ID NO: 815053 - RNA, 19 nt, Artificial Sequence
  Description of Artificial Sequence: Synthetic oligonucleotide
  Antisense strand to SEQ ID NO: 815052
auguuaagaacacacaugu

SEQ ID NO: 815054 - RNA, 19 nt, Artificial Sequence
  Description of Artificial Sequence: Synthetic oligonucleotide
  Sense strand starting at position 243 of SEQ ID NO: 587741
uuuggaauccuuugaaauc

SEQ ID NO: 815055 - RNA, 19 nt, Artificial Sequence
  Description of Artificial Sequence: Synthetic oligonucleotide
  Antisense strand to SEQ ID NO: 815054
gauuucaaaggauuccaaa

SEQ ID NO: 815056 - RNA, 19 nt, Artificial Sequence
  Description of Artificial Sequence: Synthetic oligonucleotide
  Sense strand starting at position 380 of SEQ ID NO: 587741
gucccaggccugugaugaa

SEQ ID NO: 815057 - RNA, 19 nt, Artificial Sequence
  Description of Artificial Sequence: Synthetic oligonucleotide
  Antisense strand to SEQ ID NO: 815056
uucaucacaggccugggac

SEQ ID NO: 815058 - RNA, 19 nt, Artificial Sequence
  Description of Artificial Sequence: Synthetic oligonucleotide
  Sense strand starting at position 539 of SEQ ID NO: 587741
gcuuuaucauuugauccag

SEQ ID NO: 815059 - RNA, 19 nt, Artificial Sequence
  Description of Artificial Sequence: Synthetic oligonucleotide
  Antisense strand to SEQ ID NO: 815058
cuggaucaaaugauaaagc

SEQ ID NO: 815060 - RNA, 19 nt, Artificial Sequence
  Description of Artificial Sequence: Synthetic oligonucleotide
  Sense strand starting at position 565 of SEQ ID NO: 587741
aggcuugcaucuuugagaa

SEQ ID NO: 815061 - RNA, 19 nt, Artificial Sequence
  Description of Artificial Sequence: Synthetic oligonucleotide
  Antisense strand to SEQ ID NO: 815060
uucucaaagaugcaagccu

SEQ ID NO: 815062 - RNA, 19 nt, Artificial Sequence
  Description of Artificial Sequence: Synthetic oligonucleotide
  Sense strand starting at position 711 of SEQ ID NO: 587741
ccgucauggauugagucua

SEQ ID NO: 815063 - RNA, 19 nt, Artificial Sequence
  Description of Artificial Sequence: Synthetic oligonucleotide
  Antisense strand to SEQ ID NO: 815062
uagacucaauccaugacgg

SEQ ID NO: 815064 - RNA, 19 nt, Artificial Sequence
  Description of Artificial Sequence: Synthetic oligonucleotide
  Sense strand starting at position 948 of SEQ ID NO: 587741
gagcuugaguugucauuag

SEQ ID NO: 815065 - RNA, 19 nt, Artificial Sequence
  Description of Artificial Sequence: Synthetic oligonucleotide
  Antisense strand to SEQ ID NO: 815064
cuaaugacaacucaagcuc

SEQ ID NO: 815066 - RNA, 19 nt, Artificial Sequence
  Description of Artificial Sequence: Synthetic oligonucleotide
  Sense strand starting at position 952 of SEQ ID NO: 587741
uugaguugucauuaguuac

SEQ ID NO: 815067 - RNA, 19 nt, Artificial Sequence
  Description of Artificial Sequence: Synthetic oligonucleotide
  Antisense strand to SEQ ID NO: 815066
guaacuaaugacaacucaa

SEQ ID NO: 815068 - RNA, 19 nt, Artificial Sequence
  Description of Artificial Sequence: Synthetic oligonucleotide
  Sense strand starting at position 958 of SEQ ID NO: 587741
ugucauuaguuaccuggga

SEQ ID NO: 815069 - RNA, 19 nt, Artificial Sequence
  Description of Artificial Sequence: Synthetic oligonucleotide
  Antisense strand to SEQ ID NO: 815068
ucccagguaacuaaugaca

SEQ ID NO: 815070 - RNA, 19 nt, Artificial Sequence
  Description of Artificial Sequence: Synthetic oligonucleotide
  Sense strand starting at position 1082 of SEQ ID NO: 587741
ccugcagagugcuuuagga

SEQ ID NO: 815071 - RNA, 19 nt, Artificial Sequence
  Description of Artificial Sequence: Synthetic oligonucleotide
  Antisense strand to SEQ ID NO: 815070
uccuaaagcacucugcagg

SEQ ID NO: 815072 - RNA, 19 nt, Artificial Sequence
  Description of Artificial Sequence: Synthetic oligonucleotide
  Sense strand starting at position 1084 of SEQ ID NO: 587741
ugcagagugcuuuaggaau

SEQ ID NO: 815073 - RNA, 19 nt, Artificial Sequence
  Description of Artificial Sequence: Synthetic oligonucleotide
  Antisense strand to SEQ ID NO: 815072
auuccuaaagcacucugca

SEQ ID NO: 815074 - RNA, 19 nt, Artificial Sequence
  Description of Artificial Sequence: Synthetic oligonucleotide
  Sense strand starting at position 1315 of SEQ ID NO: 587741
agcaaauagugcucuggaa

SEQ ID NO: 815075 - RNA, 19 nt, Artificial Sequence
  Description of Artificial Sequence: Synthetic oligonucleotide
  Antisense strand to SEQ ID NO: 815074
uuccagagcacuauuugcu

SEQ ID NO: 815076 - RNA, 19 nt, Artificial Sequence
  Description of Artificial Sequence: Synthetic oligonucleotide
  Sense strand starting at position 1317 of SEQ ID NO: 587741
caaauagugcucuggaagu

SEQ ID NO: 815077 - RNA, 19 nt, Artificial Sequence
  Description of Artificial Sequence: Synthetic oligonucleotide
  Antisense strand to SEQ ID NO: 815076
acuuccagagcacuauuug

SEQ ID NO: 815078 - RNA, 19 nt, Artificial Sequence
  Description of Artificial Sequence: Synthetic oligonucleotide
  Sense strand starting at position 1319 of SEQ ID NO: 587741
aauagugcucuggaaguaa

SEQ ID NO: 815079 - RNA, 19 nt, Artificial Sequence
  Description of Artificial Sequence: Synthetic oligonucleotide
  Antisense strand to SEQ ID NO: 815078
uuacuuccagagcacuauu

SEQ ID NO: 815080 - RNA, 19 nt, Artificial Sequence
  Description of Artificial Sequence: Synthetic oligonucleotide
  Sense strand starting at position 1485 of SEQ ID NO: 587741
gagguacucccauaggcua

SEQ ID NO: 815081 - RNA, 19 nt, Artificial Sequence
  Description of Artificial Sequence: Synthetic oligonucleotide
  Antisense strand to SEQ ID NO: 815080
uagccuaugggaguaccuc

SEQ ID NO: 815082 - RNA, 19 nt, Artificial Sequence
  Description of Artificial Sequence: Synthetic oligonucleotide
  Sense strand starting at position 1691 of SEQ ID NO: 587741
ccucuaguugccugaauua

SEQ ID NO: 815083 - RNA, 19 nt, Artificial Sequence
  Description of Artificial Sequence: Synthetic oligonucleotide
  Antisense strand to SEQ ID NO: 815082
uaauucaggcaacuagagg

SEQ ID NO: 815084 - RNA, 19 nt, Artificial Sequence
  Description of Artificial Sequence: Synthetic oligonucleotide
  Sense strand starting at position 1863 of SEQ ID NO: 587741
ccuggacuccuguaggauc

SEQ ID NO: 815085 - RNA, 19 nt, Artificial Sequence
  Description of Artificial Sequence: Synthetic oligonucleotide
  Antisense strand to SEQ ID NO: 815084
gauccuacaggaguccagg

SEQ ID NO: 815086 - RNA, 19 nt, Artificial Sequence
  Description of Artificial Sequence: Synthetic oligonucleotide
  Sense strand starting at position 2039 of SEQ ID NO: 587741
gaggaaguucacgguggaa

SEQ ID NO: 815087 - RNA, 19 nt, Artificial Sequence
  Description of Artificial Sequence: Synthetic oligonucleotide
  Antisense strand to SEQ ID NO: 815086
uuccaccgugaacuuccuc

SEQ ID NO: 815088 - RNA, 19 nt, Artificial Sequence
  Description of Artificial Sequence: Synthetic oligonucleotide
  Sense strand starting at position 2140 of SEQ ID NO: 587741
augggaccuuaagaaucau

SEQ ID NO: 815089 - RNA, 19 nt, Artificial Sequence
  Description of Artificial Sequence: Synthetic oligonucleotide
  Antisense strand to SEQ ID NO: 815088
augauucuuaaggucccau

SEQ ID NO: 815090 - RNA, 19 nt, Artificial Sequence
  Description of Artificial Sequence: Synthetic oligonucleotide
  Sense strand starting at position 2208 of SEQ ID NO: 587741
cugugaugacaagaagugu

SEQ ID NO: 815091 - RNA, 19 nt, Artificial Sequence
  Description of Artificial Sequence: Synthetic oligonucleotide
  Antisense strand to SEQ ID NO: 815090
acacuucuugucaucacag

SEQ ID NO: 815092 - RNA, 19 nt, Artificial Sequence
  Description of Artificial Sequence: Synthetic oligonucleotide
  Sense strand starting at position 2264 of SEQ ID NO: 587741
gggugucuucuggaaucug

SEQ ID NO: 815093 - RNA, 19 nt, Artificial Sequence
  Description of Artificial Sequence: Synthetic oligonucleotide
  Antisense strand to SEQ ID NO: 815092
cagauuccagaagacaccc

SEQ ID NO: 815094 - RNA, 19 nt, Artificial Sequence
  Description of Artificial Sequence: Synthetic oligonucleotide
  Sense strand starting at position 2441 of SEQ ID NO: 587741
ggguuugcuccgguaggca

SEQ ID NO: 815095 - RNA, 19 nt, Artificial Sequence
  Description of Artificial Sequence: Synthetic oligonucleotide
  Antisense strand to SEQ ID NO: 815094
ugccuaccggagcaaaccc

SEQ ID NO: 815096 - RNA, 19 nt, Artificial Sequence
  Description of Artificial Sequence: Synthetic oligonucleotide
  Sense strand starting at position 2464 of SEQ ID NO: 587741
uggcccuguucuguaauuu

SEQ ID NO: 815097 - RNA, 19 nt, Artificial Sequence
  Description of Artificial Sequence: Synthetic oligonucleotide
  Antisense strand to SEQ ID NO: 815096
aaauuacagaacagggcca

SEQ ID NO: 815098 - RNA, 19 nt, Artificial Sequence
  Description of Artificial Sequence: Synthetic oligonucleotide
  Sense strand starting at position 2485 of SEQ ID NO: 587741
gggagaaucuuucucuucu

SEQ ID NO: 815099 - RNA, 19 nt, Artificial Sequence
  Description of Artificial Sequence: Synthetic oligonucleotide
  Antisense strand to SEQ ID NO: 815098
agaagagaaagauucuccc

SEQ ID NO: 815100 - RNA, 19 nt, Artificial Sequence
  Description of Artificial Sequence: Synthetic oligonucleotide
  Sense strand starting at position 2486 of SEQ ID NO: 587741
ggagaaucuuucucuucuu

SEQ ID NO: 815101 - RNA, 19 nt, Artificial Sequence
  Description of Artificial Sequence: Synthetic oligonucleotide
  Antisense strand to SEQ ID NO: 815100
aagaagagaaagauucucc

SEQ ID NO: 815102 - RNA, 19 nt, Artificial Sequence
  Description of Artificial Sequence: Synthetic oligonucleotide
  Sense strand starting at position 2494 of SEQ ID NO: 587741
uuucucuucuuuguaaagu

SEQ ID NO: 815103 - RNA, 19 nt, Artificial Sequence
  Description of Artificial Sequence: Synthetic oligonucleotide
  Antisense strand to SEQ ID NO: 815102
acuuuacaaagaagagaaa

SEQ ID NO: 815104 - RNA, 19 nt, Artificial Sequence
  Description of Artificial Sequence: Synthetic oligonucleotide
  Sense strand starting at position 2597 of SEQ ID NO: 587741
gggccaacaugccugaaau

SEQ ID NO: 815105 - RNA, 19 nt, Artificial Sequence
  Description of Artificial Sequence: Synthetic oligonucleotide
  Antisense strand to SEQ ID NO: 815104
auuucaggcauguuggccc

SEQ ID NO: 815106 - RNA, 19 nt, Artificial Sequence
  Description of Artificial Sequence: Synthetic oligonucleotide
  Sense strand starting at position 2598 of SEQ ID NO: 587741
ggccaacaugccugaaauu

SEQ ID NO: 815107 - RNA, 19 nt, Artificial Sequence
  Description of Artificial Sequence: Synthetic oligonucleotide
  Antisense strand to SEQ ID NO: 815106
aauuucaggcauguuggcc

SEQ ID NO: 815108 - RNA, 19 nt, Artificial Sequence
  Description of Artificial Sequence: Synthetic oligonucleotide
  Sense strand starting at position 2717 of SEQ ID NO: 587741
ucagaugacugagaaauaa

SEQ ID NO: 815109 - RNA, 19 nt, Artificial Sequence
  Description of Artificial Sequence: Synthetic oligonucleotide
  Antisense strand to SEQ ID NO: 815108
uuauuucucagucaucuga

SEQ ID NO: 815110 - RNA, 19 nt, Artificial Sequence
  Description of Artificial Sequence: Synthetic oligonucleotide
  Sense strand starting at position 2779 of SEQ ID NO: 587741
gugccaguaacugggauau

SEQ ID NO: 815111 - RNA, 19 nt, Artificial Sequence
  Description of Artificial Sequence: Synthetic oligonucleotide
  Antisense strand to SEQ ID NO: 815110
auaucccaguuacuggcac

SEQ ID NO: 815112 - RNA, 19 nt, Artificial Sequence
  Description of Artificial Sequence: Synthetic oligonucleotide
  Sense strand starting at position 2932 of SEQ ID NO: 587741
guucaugucuggcugagac

SEQ ID NO: 815113 - RNA, 19 nt, Artificial Sequence
  Description of Artificial Sequence: Synthetic oligonucleotide
  Antisense strand to SEQ ID NO: 815112
gucucagccagacaugaac

SEQ ID NO: 815114 - RNA, 19 nt, Artificial Sequence
  Description of Artificial Sequence: Synthetic oligonucleotide
  Sense strand starting at position 2998 of SEQ ID NO: 587741
ggaagagaaguuuggcaga

SEQ ID NO: 815115 - RNA, 19 nt, Artificial Sequence
  Description of Artificial Sequence: Synthetic oligonucleotide
  Antisense strand to SEQ ID NO: 815114
ucugccaaacuucucuucc

SEQ ID NO: 815116 - RNA, 19 nt, Artificial Sequence
  Description of Artificial Sequence: Synthetic oligonucleotide
  Sense strand starting at position 3018 of SEQ ID NO: 587741
gaaauugugggaugaccga

SEQ ID NO: 815117 - RNA, 19 nt, Artificial Sequence
  Description of Artificial Sequence: Synthetic oligonucleotide
  Antisense strand to SEQ ID NO: 815116
ucggucaucccacaauuuc

SEQ ID NO: 815118 - RNA, 19 nt, Artificial Sequence
  Description of Artificial Sequence: Synthetic oligonucleotide
  Sense strand starting at position 3188 of SEQ ID NO: 587741
ugcugauggucauuguaga

SEQ ID NO: 815119 - RNA, 19 nt, Artificial Sequence
  Description of Artificial Sequence: Synthetic oligonucleotide
  Antisense strand to SEQ ID NO: 815118
ucuacaaugaccaucagca

SEQ ID NO: 815120 - RNA, 19 nt, Artificial Sequence
  Description of Artificial Sequence: Synthetic oligonucleotide
  Sense strand starting at position 3189 of SEQ ID NO: 587741
gcugauggucauuguagaa

SEQ ID NO: 815121 - RNA, 19 nt, Artificial Sequence
  Description of Artificial Sequence: Synthetic oligonucleotide
  Antisense strand to SEQ ID NO: 815120
uucuacaaugaccaucagc

SEQ ID NO: 815122 - RNA, 19 nt, Artificial Sequence
  Description of Artificial Sequence: Synthetic oligonucleotide
  Sense strand starting at position 3305 of SEQ ID NO: 587741
ccugcaauguggucuaaga

SEQ ID NO: 815123 - RNA, 19 nt, Artificial Sequence
  Description of Artificial Sequence: Synthetic oligonucleotide
  Antisense strand to SEQ ID NO: 815122
ucuuagaccacauugcagg

SEQ ID NO: 815124 - RNA, 19 nt, Artificial Sequence
  Description of Artificial Sequence: Synthetic oligonucleotide
  Sense strand starting at position 3307 of SEQ ID NO: 587741
ugcaauguggucuaagaug

SEQ ID NO: 815125 - RNA, 19 nt, Artificial Sequence
  Description of Artificial Sequence: Synthetic oligonucleotide
  Antisense strand to SEQ ID NO: 815124
caucuuagaccacauugca

SEQ ID NO: 815126 - RNA, 19 nt, Artificial Sequence
  Description of Artificial Sequence: Synthetic oligonucleotide
  Sense strand starting at position 3898 of SEQ ID NO: 587741
gcugaaauauacccgaaug

SEQ ID NO: 815127 - RNA, 19 nt, Artificial Sequence
  Description of Artificial Sequence: Synthetic oligonucleotide
  Antisense strand to SEQ ID NO: 815126
cauucggguauauuucagc

SEQ ID NO: 815128 - RNA, 19 nt, Artificial Sequence
  Description of Artificial Sequence: Synthetic oligonucleotide
  Sense strand starting at position 3974 of SEQ ID NO: 587741
aauugagauugguuucccu

SEQ ID NO: 815129 - RNA, 19 nt, Artificial Sequence
  Description of Artificial Sequence: Synthetic oligonucleotide
  Antisense strand to SEQ ID NO: 815128
agggaaaccaaucucaauu

SEQ ID NO: 815130 - RNA, 19 nt, Artificial Sequence
  Description of Artificial Sequence: Synthetic oligonucleotide
  Sense strand starting at position 3982 of SEQ ID NO: 587741
uugguuucccucggacaga

SEQ ID NO: 815131 - RNA, 19 nt, Artificial Sequence
  Description of Artificial Sequence: Synthetic oligonucleotide
  Antisense strand to SEQ ID NO: 815130
ucuguccgagggaaaccaa

SEQ ID NO: 815132 - RNA, 19 nt, Artificial Sequence
  Description of Artificial Sequence: Synthetic oligonucleotide
  Sense strand starting at position 80 of SEQ ID NO: 587742
auacacugcuccuguacau

SEQ ID NO: 815133 - RNA, 19 nt, Artificial Sequence
  Description of Artificial Sequence: Synthetic oligonucleotide
  Antisense strand to SEQ ID NO: 815132
auguacaggagcaguguau

SEQ ID NO: 815134 - RNA, 19 nt, Artificial Sequence
  Description of Artificial Sequence: Synthetic oligonucleotide
  Sense strand starting at position 176 of SEQ ID NO: 587742
ggcacuggaccguguuaaa

SEQ ID NO: 815135 - RNA, 19 nt, Artificial Sequence
  Description of Artificial Sequence: Synthetic oligonucleotide
  Antisense strand to SEQ ID NO: 815134
uuuaacacgguccagugcc

SEQ ID NO: 815136 - RNA, 19 nt, Artificial Sequence
  Description of Artificial Sequence: Synthetic oligonucleotide
  Sense strand starting at position 424 of SEQ ID NO: 587742
gcaguuaccugcgaugcga

SEQ ID NO: 815137 - RNA, 19 nt, Artificial Sequence
  Description of Artificial Sequence: Synthetic oligonucleotide
  Antisense strand to SEQ ID NO: 815136
ucgcaucgcagguaacugc

SEQ ID NO: 815138 - RNA, 19 nt, Artificial Sequence
  Description of Artificial Sequence: Synthetic oligonucleotide
  Sense strand starting at position 566 of SEQ ID NO: 587742
cugcuuccauuggagacau

SEQ ID NO: 815139 - RNA, 19 nt, Artificial Sequence
  Description of Artificial Sequence: Synthetic oligonucleotide
  Antisense strand to SEQ ID NO: 815138
augucuccaauggaagcag

SEQ ID NO: 815140 - RNA, 19 nt, Artificial Sequence
  Description of Artificial Sequence: Synthetic oligonucleotide
  Sense strand starting at position 1324 of SEQ ID NO: 587742
ccucgaucuccgcagcgaa

SEQ ID NO: 815141 - RNA, 19 nt, Artificial Sequence
  Description of Artificial Sequence: Synthetic oligonucleotide
  Antisense strand to SEQ ID NO: 815140
uucgcugcggagaucgagg

SEQ ID NO: 815142 - RNA, 19 nt, Artificial Sequence
  Description of Artificial Sequence: Synthetic oligonucleotide
  Sense strand starting at position 1337 of SEQ ID NO: 587742
agcgaaggccuauaaauag

SEQ ID NO: 815143 - RNA, 19 nt, Artificial Sequence
  Description of Artificial Sequence: Synthetic oligonucleotide
  Antisense strand to SEQ ID NO: 815142
cuauuuauaggccuucgcu

SEQ ID NO: 815144 - RNA, 19 nt, Artificial Sequence
  Description of Artificial Sequence: Synthetic oligonucleotide
  Sense strand starting at position 2396 of SEQ ID NO: 587742
agaggucgcagucagaguu

SEQ ID NO: 815145 - RNA, 19 nt, Artificial Sequence
  Description of Artificial Sequence: Synthetic oligonucleotide
  Antisense strand to SEQ ID NO: 815144
aacucugacugcgaccucu

SEQ ID NO: 815146 - RNA, 19 nt, Artificial Sequence
  Description of Artificial Sequence: Synthetic oligonucleotide
  Sense strand starting at position 2795 of SEQ ID NO: 587742
gcacgugcucgcaggugau

SEQ ID NO: 815147 - RNA, 19 nt, Artificial Sequence
  Description of Artificial Sequence: Synthetic oligonucleotide
  Antisense strand to SEQ ID NO: 815146
aucaccugcgagcacgugc

SEQ ID NO: 815148 - RNA, 19 nt, Artificial Sequence
  Description of Artificial Sequence: Synthetic oligonucleotide
  Sense strand starting at position 2830 of SEQ ID NO: 587742
gccugggugucguggaaga

SEQ ID NO: 815149 - RNA, 19 nt, Artificial Sequence
  Description of Artificial Sequence: Synthetic oligonucleotide
  Antisense strand to SEQ ID NO: 815148
ucuuccacgacacccaggc

SEQ ID NO: 815150 - RNA, 19 nt, Artificial Sequence
  Description of Artificial Sequence: Synthetic oligonucleotide
  Sense strand starting at position 2831 of SEQ ID NO: 587742
ccugggugucguggaagau

SEQ ID NO: 815151 - RNA, 19 nt, Artificial Sequence
  Description of Artificial Sequence: Synthetic oligonucleotide
  Antisense strand to SEQ ID NO: 815150
aucuuccacgacacccagg

SEQ ID NO: 815152 - RNA, 19 nt, Artificial Sequence
  Description of Artificial Sequence: Synthetic oligonucleotide
  Sense strand starting at position 3432 of SEQ ID NO: 587742
ggaggaguccaggguuuga

SEQ ID NO: 815153 - RNA, 19 nt, Artificial Sequence
  Description of Artificial Sequence: Synthetic oligonucleotide
  Antisense strand to SEQ ID NO: 815152
ucaaacccuggacuccucc

SEQ ID NO: 815154 - RNA, 19 nt, Artificial Sequence
  Description of Artificial Sequence: Synthetic oligonucleotide
  Sense strand starting at position 3495 of SEQ ID NO: 587742
guaacaccuccgugaagca

SEQ ID NO: 815155 - RNA, 19 nt, Artificial Sequence
  Description of Artificial Sequence: Synthetic oligonucleotide
  Antisense strand to SEQ ID NO: 815154
ugcuucacggagguguuac

SEQ ID NO: 815156 - RNA, 19 nt, Artificial Sequence
  Description of Artificial Sequence: Synthetic oligonucleotide
  Sense strand starting at position 3675 of SEQ ID NO: 587742
cagaccucucagugcugaa

SEQ ID NO: 815157 - RNA, 19 nt, Artificial Sequence
  Description of Artificial Sequence: Synthetic oligonucleotide
  Antisense strand to SEQ ID NO: 815156
uucagcacugagaggucug

SEQ ID NO: 815158 - RNA, 19 nt, Artificial Sequence
  Description of Artificial Sequence: Synthetic oligonucleotide
  Sense strand starting at position 3678 of SEQ ID NO: 587742
accucucagugcugaaaga

SEQ ID NO: 815159 - RNA, 19 nt, Artificial Sequence
  Description of Artificial Sequence: Synthetic oligonucleotide
  Antisense strand to SEQ ID NO: 815158
ucuuucagcacugagaggu

SEQ ID NO: 815160 - RNA, 19 nt, Artificial Sequence
  Description of Artificial Sequence: Synthetic oligonucleotide
  Sense strand starting at position 3728 of SEQ ID NO: 587742
accugacagcccugggaaa

SEQ ID NO: 815161 - RNA, 19 nt, Artificial Sequence
  Description of Artificial Sequence: Synthetic oligonucleotide
  Antisense strand to SEQ ID NO: 815160
uuucccagggcugucaggu

SEQ ID NO: 815162 - RNA, 19 nt, Artificial Sequence
  Description of Artificial Sequence: Synthetic oligonucleotide
  Sense strand starting at position 3938 of SEQ ID NO: 587742
uagcguucuagauggaguu

SEQ ID NO: 815163 - RNA, 19 nt, Artificial Sequence
  Description of Artificial Sequence: Synthetic oligonucleotide
  Antisense strand to SEQ ID NO: 815162
aacuccaucuagaacgcua

SEQ ID NO: 815164 - RNA, 19 nt, Artificial Sequence
  Description of Artificial Sequence: Synthetic oligonucleotide
  Sense strand starting at position 221 of SEQ ID NO: 587743
gcaccaucacgugacaacu

SEQ ID NO: 815165 - RNA, 19 nt, Artificial Sequence
  Description of Artificial Sequence: Synthetic oligonucleotide
  Antisense strand to SEQ ID NO: 815164
aguugucacgugauggugc

SEQ ID NO: 815166 - RNA, 19 nt, Artificial Sequence
  Description of Artificial Sequence: Synthetic oligonucleotide
  Sense strand starting at position 407 of SEQ ID NO: 587743
cagggaucugucuggcuca

SEQ ID NO: 815167 - RNA, 19 nt, Artificial Sequence
  Description of Artificial Sequence: Synthetic oligonucleotide
  Antisense strand to SEQ ID NO: 815166
ugagccagacagaucccug

SEQ ID NO: 815168 - RNA, 19 nt, Artificial Sequence
  Description of Artificial Sequence: Synthetic oligonucleotide
  Sense strand starting at position 488 of SEQ ID NO: 587743
aggaaagccucagcacaau

SEQ ID NO: 815169 - RNA, 19 nt, Artificial Sequence
  Description of Artificial Sequence: Synthetic oligonucleotide
  Antisense strand to SEQ ID NO: 815168
auugugcugaggcuuuccu

SEQ ID NO: 815170 - RNA, 19 nt, Artificial Sequence
  Description of Artificial Sequence: Synthetic oligonucleotide
  Sense strand starting at position 704 of SEQ ID NO: 587743
gggugcucccucuaaggca

SEQ ID NO: 815171 - RNA, 19 nt, Artificial Sequence
  Description of Artificial Sequence: Synthetic oligonucleotide
  Antisense strand to SEQ ID NO: 815170
ugccuuagagggagcaccc

SEQ ID NO: 815172 - RNA, 19 nt, Artificial Sequence
  Description of Artificial Sequence: Synthetic oligonucleotide
  Sense strand starting at position 1043 of SEQ ID NO: 587743
gcuggagucugcucugauc

SEQ ID NO: 815173 - RNA, 19 nt, Artificial Sequence
  Description of Artificial Sequence: Synthetic oligonucleotide
  Antisense strand to SEQ ID NO: 815172
gaucagagcagacuccagc

SEQ ID NO: 815174 - RNA, 19 nt, Artificial Sequence
  Description of Artificial Sequence: Synthetic oligonucleotide
  Sense strand starting at position 1655 of SEQ ID NO: 587743
ccgcgcgaugcccuauuaa

SEQ ID NO: 815175 - RNA, 19 nt, Artificial Sequence
  Description of Artificial Sequence: Synthetic oligonucleotide
  Antisense strand to SEQ ID NO: 815174
uuaauagggcaucgcgcgg

SEQ ID NO: 815176 - RNA, 19 nt, Artificial Sequence
  Description of Artificial Sequence: Synthetic oligonucleotide
  Sense strand starting at position 1895 of SEQ ID NO: 587743
ccucguaggccuggaugaa

SEQ ID NO: 815177 - RNA, 19 nt, Artificial Sequence
  Description of Artificial Sequence: Synthetic oligonucleotide
  Antisense strand to SEQ ID NO: 815176
uucauccaggccuacgagg

SEQ ID NO: 815178 - RNA, 19 nt, Artificial Sequence
  Description of Artificial Sequence: Synthetic oligonucleotide
  Sense strand starting at position 2341 of SEQ ID NO: 587743
gcgugcagcugagaacuuu

SEQ ID NO: 815179 - RNA, 19 nt, Artificial Sequence
  Description of Artificial Sequence: Synthetic oligonucleotide
  Antisense strand to SEQ ID NO: 815178
aaaguucucagcugcacgc

SEQ ID NO: 815180 - RNA, 19 nt, Artificial Sequence
  Description of Artificial Sequence: Synthetic oligonucleotide
  Sense strand starting at position 2376 of SEQ ID NO: 587743
agacgacugagucgguaua

SEQ ID NO: 815181 - RNA, 19 nt, Artificial Sequence
  Description of Artificial Sequence: Synthetic oligonucleotide
  Antisense strand to SEQ ID NO: 815180
uauaccgacucagucgucu

SEQ ID NO: 815182 - RNA, 19 nt, Artificial Sequence
  Description of Artificial Sequence: Synthetic oligonucleotide
  Sense strand starting at position 2377 of SEQ ID NO: 587743
gacgacugagucgguauaa

SEQ ID NO: 815183 - RNA, 19 nt, Artificial Sequence
  Description of Artificial Sequence: Synthetic oligonucleotide
  Antisense strand to SEQ ID NO: 815182
uuauaccgacucagucguc

SEQ ID NO: 815184 - RNA, 19 nt, Artificial Sequence
  Description of Artificial Sequence: Synthetic oligonucleotide
  Sense strand starting at position 2378 of SEQ ID NO: 587743
acgacugagucgguauaaa

SEQ ID NO: 815185 - RNA, 19 nt, Artificial Sequence
  Description of Artificial Sequence: Synthetic oligonucleotide
  Antisense strand to SEQ ID NO: 815184
uuuauaccgacucagucgu

SEQ ID NO: 815186 - RNA, 19 nt, Artificial Sequence
  Description of Artificial Sequence: Synthetic oligonucleotide
  Sense strand starting at position 2601 of SEQ ID NO: 587743
ugccauauguccuguaacu

SEQ ID NO: 815187 - RNA, 19 nt, Artificial Sequence
  Description of Artificial Sequence: Synthetic oligonucleotide
  Antisense strand to SEQ ID NO: 815186
aguuacaggacauauggca

SEQ ID NO: 815188 - RNA, 19 nt, Artificial Sequence
  Description of Artificial Sequence: Synthetic oligonucleotide
  Sense strand starting at position 2635 of SEQ ID NO: 587743
aggaaucgguccuaaggaa

SEQ ID NO: 815189 - RNA, 19 nt, Artificial Sequence
  Description of Artificial Sequence: Synthetic oligonucleotide
  Antisense strand to SEQ ID NO: 815188
uuccuuaggaccgauuccu

SEQ ID NO: 815190 - RNA, 19 nt, Artificial Sequence
  Description of Artificial Sequence: Synthetic oligonucleotide
  Sense strand starting at position 2775 of SEQ ID NO: 587743
cuguaaaggugaugcugaa

SEQ ID NO: 815191 - RNA, 19 nt, Artificial Sequence
  Description of Artificial Sequence: Synthetic oligonucleotide
  Antisense strand to SEQ ID NO: 815190
uucagcaucaccuuuacag

SEQ ID NO: 815192 - RNA, 19 nt, Artificial Sequence
  Description of Artificial Sequence: Synthetic oligonucleotide
  Sense strand starting at position 2839 of SEQ ID NO: 587743
ggaagaaagugacuucuuu

SEQ ID NO: 815193 - RNA, 19 nt, Artificial Sequence
  Description of Artificial Sequence: Synthetic oligonucleotide
  Antisense strand to SEQ ID NO: 815192
aaagaagucacuuucuucc

SEQ ID NO: 815194 - RNA, 19 nt, Artificial Sequence
  Description of Artificial Sequence: Synthetic oligonucleotide
  Sense strand starting at position 2847 of SEQ ID NO: 587743
gugacuucuuucuuuaaag

SEQ ID NO: 815195 - RNA, 19 nt, Artificial Sequence
  Description of Artificial Sequence: Synthetic oligonucleotide
  Antisense strand to SEQ ID NO: 815194
cuuuaaagaaagaagucac

SEQ ID NO: 815196 - RNA, 19 nt, Artificial Sequence
  Description of Artificial Sequence: Synthetic oligonucleotide
  Sense strand starting at position 2865 of SEQ ID NO: 587743
guccgugugugcugugaaa

SEQ ID NO: 815197 - RNA, 19 nt, Artificial Sequence
  Description of Artificial Sequence: Synthetic oligonucleotide
  Antisense strand to SEQ ID NO: 815196
uuucacagcacacacggac

SEQ ID NO: 815198 - RNA, 19 nt, Artificial Sequence
  Description of Artificial Sequence: Synthetic oligonucleotide
  Sense strand starting at position 2886 of SEQ ID NO: 587743
cccugaaggucaugcagau

SEQ ID NO: 815199 - RNA, 19 nt, Artificial Sequence
  Description of Artificial Sequence: Synthetic oligonucleotide
  Antisense strand to SEQ ID NO: 815198
aucugcaugaccuucaggg

SEQ ID NO: 815200 - RNA, 19 nt, Artificial Sequence
  Description of Artificial Sequence: Synthetic oligonucleotide
  Sense strand starting at position 3296 of SEQ ID NO: 587743
auacacugcuccuguacau

SEQ ID NO: 815201 - RNA, 19 nt, Artificial Sequence
  Description of Artificial Sequence: Synthetic oligonucleotide
  Antisense strand to SEQ ID NO: 815200
auguacaggagcaguguau

SEQ ID NO: 815202 - RNA, 19 nt, Artificial Sequence
  Description of Artificial Sequence: Synthetic oligonucleotide
  Sense strand starting at position 3392 of SEQ ID NO: 587743
ggcacuggaccguguuaaa

SEQ ID NO: 815203 - RNA, 19 nt, Artificial Sequence
  Description of Artificial Sequence: Synthetic oligonucleotide
  Antisense strand to SEQ ID NO: 815202
uuuaacacgguccagugcc

SEQ ID NO: 815204 - RNA, 19 nt, Artificial Sequence
  Description of Artificial Sequence: Synthetic oligonucleotide
  Sense strand starting at position 3640 of SEQ ID NO: 587743
gcaguuaccugcgaugcga

SEQ ID NO: 815205 - RNA, 19 nt, Artificial Sequence
  Description of Artificial Sequence: Synthetic oligonucleotide
  Antisense strand to SEQ ID NO: 815204
ucgcaucgcagguaacugc

SEQ ID NO: 815206 - RNA, 19 nt, Artificial Sequence
  Description of Artificial Sequence: Synthetic oligonucleotide
  Sense strand starting at position 3782 of SEQ ID NO: 587743
cugcuuccauuggagacau

SEQ ID NO: 815207 - RNA, 19 nt, Artificial Sequence
  Description of Artificial Sequence: Synthetic oligonucleotide
  Antisense strand to SEQ ID NO: 815206
augucuccaauggaagcag

SEQ ID NO: 815208 - RNA, 19 nt, Artificial Sequence
  Description of Artificial Sequence: Synthetic oligonucleotide
  Sense strand starting at position 107 of SEQ ID NO: 587744
gggaacugauuauaaauag

SEQ ID NO: 815209 - RNA, 19 nt, Artificial Sequence
  Description of Artificial Sequence: Synthetic oligonucleotide
  Antisense strand to SEQ ID NO: 815208
cuauuuauaaucaguuccc

SEQ ID NO: 815210 - RNA, 19 nt, Artificial Sequence
  Description of Artificial Sequence: Synthetic oligonucleotide
  Sense strand starting at position 544 of SEQ ID NO: 587744
gguuguggcuuugggaaca

SEQ ID NO: 815211 - RNA, 19 nt, Artificial Sequence
  Description of Artificial Sequence: Synthetic oligonucleotide
  Antisense strand to SEQ ID NO: 815210
uguucccaaagccacaacc

SEQ ID NO: 815212 - RNA, 19 nt, Artificial Sequence
  Description of Artificial Sequence: Synthetic oligonucleotide
  Sense strand starting at position 678 of SEQ ID NO: 587744
gcaucuuccuggccugauu

SEQ ID NO: 815213 - RNA, 19 nt, Artificial Sequence
  Description of Artificial Sequence: Synthetic oligonucleotide
  Antisense strand to SEQ ID NO: 815212
aaucaggccaggaagaugc

SEQ ID NO: 815214 - RNA, 19 nt, Artificial Sequence
  Description of Artificial Sequence: Synthetic oligonucleotide
  Sense strand starting at position 796 of SEQ ID NO: 587744
ggaccuagguucucuccua

SEQ ID NO: 815215 - RNA, 19 nt, Artificial Sequence
  Description of Artificial Sequence: Synthetic oligonucleotide
  Antisense strand to SEQ ID NO: 815214
uaggagagaaccuaggucc

SEQ ID NO: 815216 - RNA, 19 nt, Artificial Sequence
  Description of Artificial Sequence: Synthetic oligonucleotide
  Sense strand starting at position 907 of SEQ ID NO: 587744
gguagcuuccuccagcaga

SEQ ID NO: 815217 - RNA, 19 nt, Artificial Sequence
  Description of Artificial Sequence: Synthetic oligonucleotide
  Antisense strand to SEQ ID NO: 815216
ucugcuggaggaagcuacc

SEQ ID NO: 815218 - RNA, 19 nt, Artificial Sequence
  Description of Artificial Sequence: Synthetic oligonucleotide
  Sense strand starting at position 910 of SEQ ID NO: 587744
agcuuccuccagcagagau

SEQ ID NO: 815219 - RNA, 19 nt, Artificial Sequence
  Description of Artificial Sequence: Synthetic oligonucleotide
  Antisense strand to SEQ ID NO: 815218
aucucugcuggaggaagcu

SEQ ID NO: 815220 - RNA, 19 nt, Artificial Sequence
  Description of Artificial Sequence: Synthetic oligonucleotide
  Sense strand starting at position 1013 of SEQ ID NO: 587744
gcagaauguuccuggccca

SEQ ID NO: 815221 - RNA, 19 nt, Artificial Sequence
  Description of Artificial Sequence: Synthetic oligonucleotide
  Antisense strand to SEQ ID NO: 815220
ugggccaggaacauucugc

SEQ ID NO: 815222 - RNA, 19 nt, Artificial Sequence
  Description of Artificial Sequence: Synthetic oligonucleotide
  Sense strand starting at position 2202 of SEQ ID NO: 587744
acgagccaugcuuagaaca

SEQ ID NO: 815223 - RNA, 19 nt, Artificial Sequence
  Description of Artificial Sequence: Synthetic oligonucleotide
  Antisense strand to SEQ ID NO: 815222
uguucuaagcauggcucgu

SEQ ID NO: 815224 - RNA, 19 nt, Artificial Sequence
  Description of Artificial Sequence: Synthetic oligonucleotide
  Sense strand starting at position 2457 of SEQ ID NO: 587744
guacacuggcuccaaagau

SEQ ID NO: 815225 - RNA, 19 nt, Artificial Sequence
  Description of Artificial Sequence: Synthetic oligonucleotide
  Antisense strand to SEQ ID NO: 815224
aucuuuggagccaguguac

SEQ ID NO: 815226 - RNA, 19 nt, Artificial Sequence
  Description of Artificial Sequence: Synthetic oligonucleotide
  Sense strand starting at position 2718 of SEQ ID NO: 587744
ggaguagcugugugucacu

SEQ ID NO: 815227 - RNA, 19 nt, Artificial Sequence
  Description of Artificial Sequence: Synthetic oligonucleotide
  Antisense strand to SEQ ID NO: 815226
agugacacacagcuacucc

SEQ ID NO: 815228 - RNA, 19 nt, Artificial Sequence
  Description of Artificial Sequence: Synthetic oligonucleotide
  Sense strand starting at position 3547 of SEQ ID NO: 587744
cugagcuguaucuggauaa

SEQ ID NO: 815229 - RNA, 19 nt, Artificial Sequence
  Description of Artificial Sequence: Synthetic oligonucleotide
  Antisense strand to SEQ ID NO: 815228
uuauccagauacagcucag

SEQ ID NO: 815230 - RNA, 19 nt, Artificial Sequence
  Description of Artificial Sequence: Synthetic oligonucleotide
  Sense strand starting at position 3548 of SEQ ID NO: 587744
ugagcuguaucuggauaaa

SEQ ID NO: 815231 - RNA, 19 nt, Artificial Sequence
  Description of Artificial Sequence: Synthetic oligonucleotide
  Antisense strand to SEQ ID NO: 815230
uuuauccagauacagcuca

SEQ ID NO: 815232 - RNA, 19 nt, Artificial Sequence
  Description of Artificial Sequence: Synthetic oligonucleotide
  Sense strand starting at position 3551 of SEQ ID NO: 587744
gcuguaucuggauaaaccu

SEQ ID NO: 815233 - RNA, 19 nt, Artificial Sequence
  Description of Artificial Sequence: Synthetic oligonucleotide
  Antisense strand to SEQ ID NO: 815232
agguuuauccagauacagc

SEQ ID NO: 815234 - RNA, 19 nt, Artificial Sequence
  Description of Artificial Sequence: Synthetic oligonucleotide
  Sense strand starting at position 3612 of SEQ ID NO: 587744
aagugaaagugacagauau

SEQ ID NO: 815235 - RNA, 19 nt, Artificial Sequence
  Description of Artificial Sequence: Synthetic oligonucleotide
  Antisense strand to SEQ ID NO: 815234
auaucugucacuuucacuu

SEQ ID NO: 815236 - RNA, 19 nt, Artificial Sequence
  Description of Artificial Sequence: Synthetic oligonucleotide
  Sense strand starting at position 3962 of SEQ ID NO: 587744
cugccugguccagaucaau

SEQ ID NO: 815237 - RNA, 19 nt, Artificial Sequence
  Description of Artificial Sequence: Synthetic oligonucleotide
  Antisense strand to SEQ ID NO: 815236
auugaucuggaccaggcag

SEQ ID NO: 815238 - RNA, 19 nt, Artificial Sequence
  Description of Artificial Sequence: Synthetic oligonucleotide
  Sense strand starting at position 51 of SEQ ID NO: 587745
ccaagcagucuuugucuca

SEQ ID NO: 815239 - RNA, 19 nt, Artificial Sequence
  Description of Artificial Sequence: Synthetic oligonucleotide
  Antisense strand to SEQ ID NO: 815238
ugagacaaagacugcuugg

SEQ ID NO: 815240 - RNA, 19 nt, Artificial Sequence
  Description of Artificial Sequence: Synthetic oligonucleotide
  Sense strand starting at position 71 of SEQ ID NO: 587745
gccuccugucgggagacau

SEQ ID NO: 815241 - RNA, 19 nt, Artificial Sequence
  Description of Artificial Sequence: Synthetic oligonucleotide
  Antisense strand to SEQ ID NO: 815240
augucucccgacaggaggc

SEQ ID NO: 815242 - RNA, 19 nt, Artificial Sequence
  Description of Artificial Sequence: Synthetic oligonucleotide
  Sense strand starting at position 280 of SEQ ID NO: 587745
gcagcugcgcccuaaacuu

SEQ ID NO: 815243 - RNA, 19 nt, Artificial Sequence
  Description of Artificial Sequence: Synthetic oligonucleotide
  Antisense strand to SEQ ID NO: 815242
aaguuuagggcgcagcugc

SEQ ID NO: 815244 - RNA, 19 nt, Artificial Sequence
  Description of Artificial Sequence: Synthetic oligonucleotide
  Sense strand starting at position 602 of SEQ ID NO: 587745
ggaagccucugggaugaca

SEQ ID NO: 815245 - RNA, 19 nt, Artificial Sequence
  Description of Artificial Sequence: Synthetic oligonucleotide
  Antisense strand to SEQ ID NO: 815244
ugucaucccagaggcuucc

SEQ ID NO: 815246 - RNA, 19 nt, Artificial Sequence
  Description of Artificial Sequence: Synthetic oligonucleotide
  Sense strand starting at position 643 of SEQ ID NO: 587745
ccugguucguaccgggaaa

SEQ ID NO: 815247 - RNA, 19 nt, Artificial Sequence
  Description of Artificial Sequence: Synthetic oligonucleotide
  Antisense strand to SEQ ID NO: 815246
uuucccgguacgaaccagg

SEQ ID NO: 815248 - RNA, 19 nt, Artificial Sequence
  Description of Artificial Sequence: Synthetic oligonucleotide
  Sense strand starting at position 1590 of SEQ ID NO: 587745
gggcgaugccuucauuggu

SEQ ID NO: 815249 - RNA, 19 nt, Artificial Sequence
  Description of Artificial Sequence: Synthetic oligonucleotide
  Antisense strand to SEQ ID NO: 815248
accaaugaaggcaucgccc

SEQ ID NO: 815250 - RNA, 19 nt, Artificial Sequence
  Description of Artificial Sequence: Synthetic oligonucleotide
  Sense strand starting at position 1596 of SEQ ID NO: 587745
ugccuucauuggugaggua

SEQ ID NO: 815251 - RNA, 19 nt, Artificial Sequence
  Description of Artificial Sequence: Synthetic oligonucleotide
  Antisense strand to SEQ ID NO: 815250
uaccucaccaaugaaggca

SEQ ID NO: 815252 - RNA, 19 nt, Artificial Sequence
  Description of Artificial Sequence: Synthetic oligonucleotide
  Sense strand starting at position 2214 of SEQ ID NO: 587745
cggcuccaacgucagaaau

SEQ ID NO: 815253 - RNA, 19 nt, Artificial Sequence
  Description of Artificial Sequence: Synthetic oligonucleotide
  Antisense strand to SEQ ID NO: 815252
auuucugacguuggagccg

SEQ ID NO: 815254 - RNA, 19 nt, Artificial Sequence
  Description of Artificial Sequence: Synthetic oligonucleotide
  Sense strand starting at position 2216 of SEQ ID NO: 587745
gcuccaacgucagaaauga

SEQ ID NO: 815255 - RNA, 19 nt, Artificial Sequence
  Description of Artificial Sequence: Synthetic oligonucleotide
  Antisense strand to SEQ ID NO: 815254
ucauuucugacguuggagc

SEQ ID NO: 815256 - RNA, 19 nt, Artificial Sequence
  Description of Artificial Sequence: Synthetic oligonucleotide
  Sense strand starting at position 2292 of SEQ ID NO: 587745
gcggauauagaccaagagu

SEQ ID NO: 815257 - RNA, 19 nt, Artificial Sequence
  Description of Artificial Sequence: Synthetic oligonucleotide
  Antisense strand to SEQ ID NO: 815256
acucuuggucuauauccgc

SEQ ID NO: 815258 - RNA, 19 nt, Artificial Sequence
  Description of Artificial Sequence: Synthetic oligonucleotide
  Sense strand starting at position 2764 of SEQ ID NO: 587745
gcuguuggaggccagagau

SEQ ID NO: 815259 - RNA, 19 nt, Artificial Sequence
  Description of Artificial Sequence: Synthetic oligonucleotide
  Antisense strand to SEQ ID NO: 815258
aucucuggccuccaacagc

SEQ ID NO: 815260 - RNA, 19 nt, Artificial Sequence
  Description of Artificial Sequence: Synthetic oligonucleotide
  Sense strand starting at position 2889 of SEQ ID NO: 587745
ggaagaaugccaggccaga

SEQ ID NO: 815261 - RNA, 19 nt, Artificial Sequence
  Description of Artificial Sequence: Synthetic oligonucleotide
  Antisense strand to SEQ ID NO: 815260
ucuggccuggcauucuucc

SEQ ID NO: 815262 - RNA, 19 nt, Artificial Sequence
  Description of Artificial Sequence: Synthetic oligonucleotide
  Sense strand starting at position 3151 of SEQ ID NO: 587745
gggaacugauuauaaauag

SEQ ID NO: 815263 - RNA, 19 nt, Artificial Sequence
  Description of Artificial Sequence: Synthetic oligonucleotide
  Antisense strand to SEQ ID NO: 815262
cuauuuauaaucaguuccc

SEQ ID NO: 815264 - RNA, 19 nt, Artificial Sequence
  Description of Artificial Sequence: Synthetic oligonucleotide
  Sense strand starting at position 3588 of SEQ ID NO: 587745
gguuguggcuuugggaaca

SEQ ID NO: 815265 - RNA, 19 nt, Artificial Sequence
  Description of Artificial Sequence: Synthetic oligonucleotide
  Antisense strand to SEQ ID NO: 815264
uguucccaaagccacaacc

SEQ ID NO: 815266 - RNA, 19 nt, Artificial Sequence
  Description of Artificial Sequence: Synthetic oligonucleotide
  Sense strand starting at position 3722 of SEQ ID NO: 587745
gcaucuuccuggccugauu

SEQ ID NO: 815267 - RNA, 19 nt, Artificial Sequence
  Description of Artificial Sequence: Synthetic oligonucleotide
  Antisense strand to SEQ ID NO: 815266
aaucaggccaggaagaugc

SEQ ID NO: 815268 - RNA, 19 nt, Artificial Sequence
  Description of Artificial Sequence: Synthetic oligonucleotide
  Sense strand starting at position 3840 of SEQ ID NO: 587745
ggaccuagguucucuccua

SEQ ID NO: 815269 - RNA, 19 nt, Artificial Sequence
  Description of Artificial Sequence: Synthetic oligonucleotide
  Antisense strand to SEQ ID NO: 815268
uaggagagaaccuaggucc

SEQ ID NO: 815270 - RNA, 19 nt, Artificial Sequence
  Description of Artificial Sequence: Synthetic oligonucleotide
  Sense strand starting at position 3951 of SEQ ID NO: 587745
gguagcuuccuccagcaga

SEQ ID NO: 815271 - RNA, 19 nt, Artificial Sequence
  Description of Artificial Sequence: Synthetic oligonucleotide
  Antisense strand to SEQ ID NO: 815270
ucugcuggaggaagcuacc

SEQ ID NO: 815272 - RNA, 19 nt, Artificial Sequence
  Description of Artificial Sequence: Synthetic oligonucleotide
  Sense strand starting at position 3954 of SEQ ID NO: 587745
agcuuccuccagcagagau

SEQ ID NO: 815273 - RNA, 19 nt, Artificial Sequence
  Description of Artificial Sequence: Synthetic oligonucleotide
  Antisense strand to SEQ ID NO: 815272
aucucugcuggaggaagcu

SEQ ID NO: 815274 - RNA, 19 nt, Artificial Sequence
  Description of Artificial Sequence: Synthetic oligonucleotide
  Sense strand starting at position 184 of SEQ ID NO: 587746
agaggcauccugugagcca

SEQ ID NO: 815275 - RNA, 19 nt, Artificial Sequence
  Description of Artificial Sequence: Synthetic oligonucleotide
  Antisense strand to SEQ ID NO: 815274
uggcucacaggaugccucu

SEQ ID NO: 815276 - RNA, 19 nt, Artificial Sequence
  Description of Artificial Sequence: Synthetic oligonucleotide
  Sense strand starting at position 476 of SEQ ID NO: 587746
uggccagaagcccauaauu

SEQ ID NO: 815277 - RNA, 19 nt, Artificial Sequence
  Description of Artificial Sequence: Synthetic oligonucleotide
  Antisense strand to SEQ ID NO: 815276
aauuaugggcuucuggcca

SEQ ID NO: 815278 - RNA, 19 nt, Artificial Sequence
  Description of Artificial Sequence: Synthetic oligonucleotide
  Sense strand starting at position 478 of SEQ ID NO: 587746
gccagaagcccauaauuga

SEQ ID NO: 815279 - RNA, 19 nt, Artificial Sequence
  Description of Artificial Sequence: Synthetic oligonucleotide
  Antisense strand to SEQ ID NO: 815278
ucaauuaugggcuucuggc

SEQ ID NO: 815280 - RNA, 19 nt, Artificial Sequence
  Description of Artificial Sequence: Synthetic oligonucleotide
  Sense strand starting at position 1430 of SEQ ID NO: 587746
caagguuaguuggccuuaa

SEQ ID NO: 815281 - RNA, 19 nt, Artificial Sequence
  Description of Artificial Sequence: Synthetic oligonucleotide
  Antisense strand to SEQ ID NO: 815280
uuaaggccaacuaaccuug

SEQ ID NO: 815282 - RNA, 19 nt, Artificial Sequence
  Description of Artificial Sequence: Synthetic oligonucleotide
  Sense strand starting at position 2252 of SEQ ID NO: 587746
guucuaauauaauagagca

SEQ ID NO: 815283 - RNA, 19 nt, Artificial Sequence
  Description of Artificial Sequence: Synthetic oligonucleotide
  Antisense strand to SEQ ID NO: 815282
ugcucuauuauauuagaac

SEQ ID NO: 815284 - RNA, 19 nt, Artificial Sequence
  Description of Artificial Sequence: Synthetic oligonucleotide
  Sense strand starting at position 2678 of SEQ ID NO: 587746
agcauauccuaugcagauc

SEQ ID NO: 815285 - RNA, 19 nt, Artificial Sequence
  Description of Artificial Sequence: Synthetic oligonucleotide
  Antisense strand to SEQ ID NO: 815284
gaucugcauaggauaugcu

SEQ ID NO: 815286 - RNA, 19 nt, Artificial Sequence
  Description of Artificial Sequence: Synthetic oligonucleotide
  Sense strand starting at position 3334 of SEQ ID NO: 587746
gacucaauggccuggguga

SEQ ID NO: 815287 - RNA, 19 nt, Artificial Sequence
  Description of Artificial Sequence: Synthetic oligonucleotide
  Antisense strand to SEQ ID NO: 815286
ucacccaggccauugaguc

SEQ ID NO: 815288 - RNA, 19 nt, Artificial Sequence
  Description of Artificial Sequence: Synthetic oligonucleotide
  Sense strand starting at position 963 of SEQ ID NO: 587747
agaggcauccugugagcca

SEQ ID NO: 815289 - RNA, 19 nt, Artificial Sequence
  Description of Artificial Sequence: Synthetic oligonucleotide
  Antisense strand to SEQ ID NO: 815288
uggcucacaggaugccucu

SEQ ID NO: 815290 - RNA, 19 nt, Artificial Sequence
  Description of Artificial Sequence: Synthetic oligonucleotide
  Sense strand starting at position 1255 of SEQ ID NO: 587747
uggccagaagcccauaauu

SEQ ID NO: 815291 - RNA, 19 nt, Artificial Sequence
  Description of Artificial Sequence: Synthetic oligonucleotide
  Antisense strand to SEQ ID NO: 815290
aauuaugggcuucuggcca

SEQ ID NO: 815292 - RNA, 19 nt, Artificial Sequence
  Description of Artificial Sequence: Synthetic oligonucleotide
  Sense strand starting at position 1257 of SEQ ID NO: 587747
gccagaagcccauaauuga

SEQ ID NO: 815293 - RNA, 19 nt, Artificial Sequence
  Description of Artificial Sequence: Synthetic oligonucleotide
  Antisense strand to SEQ ID NO: 815292
ucaauuaugggcuucuggc

SEQ ID NO: 815294 - RNA, 19 nt, Artificial Sequence
  Description of Artificial Sequence: Synthetic oligonucleotide
  Sense strand starting at position 2209 of SEQ ID NO: 587747
caagguuaguuggccuuaa

SEQ ID NO: 815295 - RNA, 19 nt, Artificial Sequence
  Description of Artificial Sequence: Synthetic oligonucleotide
  Antisense strand to SEQ ID NO: 815294
uuaaggccaacuaaccuug

SEQ ID NO: 815296 - RNA, 19 nt, Artificial Sequence
  Description of Artificial Sequence: Synthetic oligonucleotide
  Sense strand starting at position 3031 of SEQ ID NO: 587747
guucuaauauaauagagca

SEQ ID NO: 815297 - RNA, 19 nt, Artificial Sequence
  Description of Artificial Sequence: Synthetic oligonucleotide
  Antisense strand to SEQ ID NO: 815296
ugcucuauuauauuagaac

SEQ ID NO: 815298 - RNA, 19 nt, Artificial Sequence
  Description of Artificial Sequence: Synthetic oligonucleotide
  Sense strand starting at position 3457 of SEQ ID NO: 587747
agcauauccuaugcagauc

SEQ ID NO: 815299 - RNA, 19 nt, Artificial Sequence
  Description of Artificial Sequence: Synthetic oligonucleotide
  Antisense strand to SEQ ID NO: 815298
gaucugcauaggauaugcu

SEQ ID NO: 815300 - RNA, 19 nt, Artificial Sequence
  Description of Artificial Sequence: Synthetic oligonucleotide
  Sense strand starting at position 173 of SEQ ID NO: 587748
gccucaguucugggaagag

SEQ ID NO: 815301 - RNA, 19 nt, Artificial Sequence
  Description of Artificial Sequence: Synthetic oligonucleotide
  Antisense strand to SEQ ID NO: 815300
cucuucccagaacugaggc

SEQ ID NO: 815302 - RNA, 19 nt, Artificial Sequence
  Description of Artificial Sequence: Synthetic oligonucleotide
  Sense strand starting at position 384 of SEQ ID NO: 587748
cugagccuggcaugagauu

SEQ ID NO: 815303 - RNA, 19 nt, Artificial Sequence
  Description of Artificial Sequence: Synthetic oligonucleotide
  Antisense strand to SEQ ID NO: 815302
aaucucaugccaggcucag

SEQ ID NO: 815304 - RNA, 19 nt, Artificial Sequence
  Description of Artificial Sequence: Synthetic oligonucleotide
  Sense strand starting at position 505 of SEQ ID NO: 587748
ccuccagucuugugcccaa

SEQ ID NO: 815305 - RNA, 19 nt, Artificial Sequence
  Description of Artificial Sequence: Synthetic oligonucleotide
  Antisense strand to SEQ ID NO: 815304
uugggcacaagacuggagg

SEQ ID NO: 815306 - RNA, 19 nt, Artificial Sequence
  Description of Artificial Sequence: Synthetic oligonucleotide
  Sense strand starting at position 723 of SEQ ID NO: 587748
gugugagaucccggaacag

SEQ ID NO: 815307 - RNA, 19 nt, Artificial Sequence
  Description of Artificial Sequence: Synthetic oligonucleotide
  Antisense strand to SEQ ID NO: 815306
cuguuccgggaucucacac

SEQ ID NO: 815308 - RNA, 19 nt, Artificial Sequence
  Description of Artificial Sequence: Synthetic oligonucleotide
  Sense strand starting at position 2397 of SEQ ID NO: 587748
agaggcauccugugagcca

SEQ ID NO: 815309 - RNA, 19 nt, Artificial Sequence
  Description of Artificial Sequence: Synthetic oligonucleotide
  Antisense strand to SEQ ID NO: 815308
uggcucacaggaugccucu

SEQ ID NO: 815310 - RNA, 19 nt, Artificial Sequence
  Description of Artificial Sequence: Synthetic oligonucleotide
  Sense strand starting at position 2689 of SEQ ID NO: 587748
uggccagaagcccauaauu

SEQ ID NO: 815311 - RNA, 19 nt, Artificial Sequence
  Description of Artificial Sequence: Synthetic oligonucleotide
  Antisense strand to SEQ ID NO: 815310
aauuaugggcuucuggcca

SEQ ID NO: 815312 - RNA, 19 nt, Artificial Sequence
  Description of Artificial Sequence: Synthetic oligonucleotide
  Sense strand starting at position 2691 of SEQ ID NO: 587748
gccagaagcccauaauuga

SEQ ID NO: 815313 - RNA, 19 nt, Artificial Sequence
  Description of Artificial Sequence: Synthetic oligonucleotide
  Antisense strand to SEQ ID NO: 815312
ucaauuaugggcuucuggc

SEQ ID NO: 815314 - RNA, 19 nt, Artificial Sequence
  Description of Artificial Sequence: Synthetic oligonucleotide
  Sense strand starting at position 3643 of SEQ ID NO: 587748
caagguuaguuggccuuaa

SEQ ID NO: 815315 - RNA, 19 nt, Artificial Sequence
  Description of Artificial Sequence: Synthetic oligonucleotide
  Antisense strand to SEQ ID NO: 815314
uuaaggccaacuaaccuug

SEQ ID NO: 815316 - RNA, 19 nt, Artificial Sequence
  Description of Artificial Sequence: Synthetic oligonucleotide
  Sense strand starting at position 160 of SEQ ID NO: 587749
aggcgugagcuccugcuua

SEQ ID NO: 815317 - RNA, 19 nt, Artificial Sequence
  Description of Artificial Sequence: Synthetic oligonucleotide
  Antisense strand to SEQ ID NO: 815316
uaagcaggagcucacgccu

SEQ ID NO: 815318 - RNA, 19 nt, Artificial Sequence
  Description of Artificial Sequence: Synthetic oligonucleotide
  Sense strand starting at position 1530 of SEQ ID NO: 587749
cgcagaguuccucgcccuu

SEQ ID NO: 815319 - RNA, 19 nt, Artificial Sequence
  Description of Artificial Sequence: Synthetic oligonucleotide
  Antisense strand to SEQ ID NO: 815318
aagggcgaggaacucugcg

SEQ ID NO: 815320 - RNA, 19 nt, Artificial Sequence
  Description of Artificial Sequence: Synthetic oligonucleotide
  Sense strand starting at position 1853 of SEQ ID NO: 587749
ggagcuggugcugagacau

SEQ ID NO: 815321 - RNA, 19 nt, Artificial Sequence
  Description of Artificial Sequence: Synthetic oligonucleotide
  Antisense strand to SEQ ID NO: 815320
augucucagcaccagcucc

SEQ ID NO: 815322 - RNA, 19 nt, Artificial Sequence
  Description of Artificial Sequence: Synthetic oligonucleotide
  Sense strand starting at position 2896 of SEQ ID NO: 587749
gaagcagucucaugcugua

SEQ ID NO: 815323 - RNA, 19 nt, Artificial Sequence
  Description of Artificial Sequence: Synthetic oligonucleotide
  Antisense strand to SEQ ID NO: 815322
uacagcaugagacugcuuc

SEQ ID NO: 815324 - RNA, 19 nt, Artificial Sequence
  Description of Artificial Sequence: Synthetic oligonucleotide
  Sense strand starting at position 2899 of SEQ ID NO: 587749
gcagucucaugcuguaaag

SEQ ID NO: 815325 - RNA, 19 nt, Artificial Sequence
  Description of Artificial Sequence: Synthetic oligonucleotide
  Antisense strand to SEQ ID NO: 815324
cuuuacagcaugagacugc

SEQ ID NO: 815326 - RNA, 19 nt, Artificial Sequence
  Description of Artificial Sequence: Synthetic oligonucleotide
  Sense strand starting at position 3107 of SEQ ID NO: 587749
gccucaguucugggaagag

SEQ ID NO: 815327 - RNA, 19 nt, Artificial Sequence
  Description of Artificial Sequence: Synthetic oligonucleotide
  Antisense strand to SEQ ID NO: 815326
cucuucccagaacugaggc

SEQ ID NO: 815328 - RNA, 19 nt, Artificial Sequence
  Description of Artificial Sequence: Synthetic oligonucleotide
  Sense strand starting at position 3318 of SEQ ID NO: 587749
cugagccuggcaugagauu

SEQ ID NO: 815329 - RNA, 19 nt, Artificial Sequence
  Description of Artificial Sequence: Synthetic oligonucleotide
  Antisense strand to SEQ ID NO: 815328
aaucucaugccaggcucag

SEQ ID NO: 815330 - RNA, 19 nt, Artificial Sequence
  Description of Artificial Sequence: Synthetic oligonucleotide
  Sense strand starting at position 3439 of SEQ ID NO: 587749
ccuccagucuugugcccaa

SEQ ID NO: 815331 - RNA, 19 nt, Artificial Sequence
  Description of Artificial Sequence: Synthetic oligonucleotide
  Antisense strand to SEQ ID NO: 815330
uugggcacaagacuggagg

SEQ ID NO: 815332 - RNA, 19 nt, Artificial Sequence
  Description of Artificial Sequence: Synthetic oligonucleotide
  Sense strand starting at position 3657 of SEQ ID NO: 587749
gugugagaucccggaacag

SEQ ID NO: 815333 - RNA, 19 nt, Artificial Sequence
  Description of Artificial Sequence: Synthetic oligonucleotide
  Antisense strand to SEQ ID NO: 815332
cuguuccgggaucucacac

SEQ ID NO: 815334 - RNA, 19 nt, Artificial Sequence
  Description of Artificial Sequence: Synthetic oligonucleotide
  Sense strand starting at position 24 of SEQ ID NO: 587750
aggauacuuagguguaaag

SEQ ID NO: 815335 - RNA, 19 nt, Artificial Sequence
  Description of Artificial Sequence: Synthetic oligonucleotide
  Antisense strand to SEQ ID NO: 815334
cuuuacaccuaaguauccu

SEQ ID NO: 815336 - RNA, 19 nt, Artificial Sequence
  Description of Artificial Sequence: Synthetic oligonucleotide
  Sense strand starting at position 41 of SEQ ID NO: 587750
aggcaacauccggacuaau

SEQ ID NO: 815337 - RNA, 19 nt, Artificial Sequence
  Description of Artificial Sequence: Synthetic oligonucleotide
  Antisense strand to SEQ ID NO: 815336
auuaguccggauguugccu

SEQ ID NO: 815338 - RNA, 19 nt, Artificial Sequence
  Description of Artificial Sequence: Synthetic oligonucleotide
  Sense strand starting at position 66 of SEQ ID NO: 587750
cauguaccagcuuggagaa

SEQ ID NO: 815339 - RNA, 19 nt, Artificial Sequence
  Description of Artificial Sequence: Synthetic oligonucleotide
  Antisense strand to SEQ ID NO: 815338
uucuccaagcugguacaug

SEQ ID NO: 815340 - RNA, 19 nt, Artificial Sequence
  Description of Artificial Sequence: Synthetic oligonucleotide
  Sense strand starting at position 220 of SEQ ID NO: 587750
uugggcuggccauaaucua

SEQ ID NO: 815341 - RNA, 19 nt, Artificial Sequence
  Description of Artificial Sequence: Synthetic oligonucleotide
  Antisense strand to SEQ ID NO: 815340
uagauuauggccagcccaa

SEQ ID NO: 815342 - RNA, 19 nt, Artificial Sequence
  Description of Artificial Sequence: Synthetic oligonucleotide
  Sense strand starting at position 245 of SEQ ID NO: 587750
aagcuagaccucugauagu

SEQ ID NO: 815343 - RNA, 19 nt, Artificial Sequence
  Description of Artificial Sequence: Synthetic oligonucleotide
  Antisense strand to SEQ ID NO: 815342
acuaucagaggucuagcuu

SEQ ID NO: 815344 - RNA, 19 nt, Artificial Sequence
  Description of Artificial Sequence: Synthetic oligonucleotide
  Sense strand starting at position 300 of SEQ ID NO: 587750
gagggcuaaugucugagau

SEQ ID NO: 815345 - RNA, 19 nt, Artificial Sequence
  Description of Artificial Sequence: Synthetic oligonucleotide
  Antisense strand to SEQ ID NO: 815344
aucucagacauuagcccuc

SEQ ID NO: 815346 - RNA, 19 nt, Artificial Sequence
  Description of Artificial Sequence: Synthetic oligonucleotide
  Sense strand starting at position 301 of SEQ ID NO: 587750
agggcuaaugucugagaug

SEQ ID NO: 815347 - RNA, 19 nt, Artificial Sequence
  Description of Artificial Sequence: Synthetic oligonucleotide
  Antisense strand to SEQ ID NO: 815346
caucucagacauuagcccu

SEQ ID NO: 815348 - RNA, 19 nt, Artificial Sequence
  Description of Artificial Sequence: Synthetic oligonucleotide
  Sense strand starting at position 318 of SEQ ID NO: 587750
ugaugaugaugcuuucuaa

SEQ ID NO: 815349 - RNA, 19 nt, Artificial Sequence
  Description of Artificial Sequence: Synthetic oligonucleotide
  Antisense strand to SEQ ID NO: 815348
uuagaaagcaucaucauca

SEQ ID NO: 815350 - RNA, 19 nt, Artificial Sequence
  Description of Artificial Sequence: Synthetic oligonucleotide
  Sense strand starting at position 372 of SEQ ID NO: 587750
uuacaaguccuguaagcuc

SEQ ID NO: 815351 - RNA, 19 nt, Artificial Sequence
  Description of Artificial Sequence: Synthetic oligonucleotide
  Antisense strand to SEQ ID NO: 815350
gagcuuacaggacuuguaa

SEQ ID NO: 815352 - RNA, 19 nt, Artificial Sequence
  Description of Artificial Sequence: Synthetic oligonucleotide
  Sense strand starting at position 637 of SEQ ID NO: 587750
uagugcaaucuugggacuu

SEQ ID NO: 815353 - RNA, 19 nt, Artificial Sequence
  Description of Artificial Sequence: Synthetic oligonucleotide
  Antisense strand to SEQ ID NO: 815352
aagucccaagauugcacua

SEQ ID NO: 815354 - RNA, 19 nt, Artificial Sequence
  Description of Artificial Sequence: Synthetic oligonucleotide
  Sense strand starting at position 1053 of SEQ ID NO: 587750
gugaaaucgucuuuaggac

SEQ ID NO: 815355 - RNA, 19 nt, Artificial Sequence
  Description of Artificial Sequence: Synthetic oligonucleotide
  Antisense strand to SEQ ID NO: 815354
guccuaaagacgauuucac

SEQ ID NO: 815356 - RNA, 19 nt, Artificial Sequence
  Description of Artificial Sequence: Synthetic oligonucleotide
  Sense strand starting at position 1054 of SEQ ID NO: 587750
ugaaaucgucuuuaggacu

SEQ ID NO: 815357 - RNA, 19 nt, Artificial Sequence
  Description of Artificial Sequence: Synthetic oligonucleotide
  Antisense strand to SEQ ID NO: 815356
aguccuaaagacgauuuca

SEQ ID NO: 815358 - RNA, 19 nt, Artificial Sequence
  Description of Artificial Sequence: Synthetic oligonucleotide
  Sense strand starting at position 1270 of SEQ ID NO: 587750
ccugucauuuaauaaggua

SEQ ID NO: 815359 - RNA, 19 nt, Artificial Sequence
  Description of Artificial Sequence: Synthetic oligonucleotide
  Antisense strand to SEQ ID NO: 815358
uaccuuauuaaaugacagg

SEQ ID NO: 815360 - RNA, 19 nt, Artificial Sequence
  Description of Artificial Sequence: Synthetic oligonucleotide
  Sense strand starting at position 1426 of SEQ ID NO: 587750
agaaguuucgcugcugcaa

SEQ ID NO: 815361 - RNA, 19 nt, Artificial Sequence
  Description of Artificial Sequence: Synthetic oligonucleotide
  Antisense strand to SEQ ID NO: 815360
uugcagcagcgaaacuucu

SEQ ID NO: 815362 - RNA, 19 nt, Artificial Sequence
  Description of Artificial Sequence: Synthetic oligonucleotide
  Sense strand starting at position 1427 of SEQ ID NO: 587750
gaaguuucgcugcugcaaa

SEQ ID NO: 815363 - RNA, 19 nt, Artificial Sequence
  Description of Artificial Sequence: Synthetic oligonucleotide
  Antisense strand to SEQ ID NO: 815362
uuugcagcagcgaaacuuc

SEQ ID NO: 815364 - RNA, 19 nt, Artificial Sequence
  Description of Artificial Sequence: Synthetic oligonucleotide
  Sense strand starting at position 1988 of SEQ ID NO: 587750
uuacguuucgcauuaaagc

SEQ ID NO: 815365 - RNA, 19 nt, Artificial Sequence
  Description of Artificial Sequence: Synthetic oligonucleotide
  Antisense strand to SEQ ID NO: 815364
gcuuuaaugcgaaacguaa

SEQ ID NO: 815366 - RNA, 19 nt, Artificial Sequence
  Description of Artificial Sequence: Synthetic oligonucleotide
  Sense strand starting at position 2017 of SEQ ID NO: 587750
cccggaugugaguacaaug

SEQ ID NO: 815367 - RNA, 19 nt, Artificial Sequence
  Description of Artificial Sequence: Synthetic oligonucleotide
  Antisense strand to SEQ ID NO: 815366
cauuguacucacauccggg

SEQ ID NO: 815368 - RNA, 19 nt, Artificial Sequence
  Description of Artificial Sequence: Synthetic oligonucleotide
  Sense strand starting at position 2292 of SEQ ID NO: 587750
gcgcgagcucccucaagaa

SEQ ID NO: 815369 - RNA, 19 nt, Artificial Sequence
  Description of Artificial Sequence: Synthetic oligonucleotide
  Antisense strand to SEQ ID NO: 815368
uucuugagggagcucgcgc

SEQ ID NO: 815370 - RNA, 19 nt, Artificial Sequence
  Description of Artificial Sequence: Synthetic oligonucleotide
  Sense strand starting at position 2445 of SEQ ID NO: 587750
uccuaaaugugcccuaaga

SEQ ID NO: 815371 - RNA, 19 nt, Artificial Sequence
  Description of Artificial Sequence: Synthetic oligonucleotide
  Antisense strand to SEQ ID NO: 815370
ucuuagggcacauuuagga

SEQ ID NO: 815372 - RNA, 19 nt, Artificial Sequence
  Description of Artificial Sequence: Synthetic oligonucleotide
  Sense strand starting at position 2447 of SEQ ID NO: 587750
cuaaaugugcccuaagaga

SEQ ID NO: 815373 - RNA, 19 nt, Artificial Sequence
  Description of Artificial Sequence: Synthetic oligonucleotide
  Antisense strand to SEQ ID NO: 815372
ucucuuagggcacauuuag

SEQ ID NO: 815374 - RNA, 19 nt, Artificial Sequence
  Description of Artificial Sequence: Synthetic oligonucleotide
  Sense strand starting at position 2755 of SEQ ID NO: 587750
aacagacaagcauguguua

SEQ ID NO: 815375 - RNA, 19 nt, Artificial Sequence
  Description of Artificial Sequence: Synthetic oligonucleotide
  Antisense strand to SEQ ID NO: 815374
uaacacaugcuugucuguu

SEQ ID NO: 815376 - RNA, 19 nt, Artificial Sequence
  Description of Artificial Sequence: Synthetic oligonucleotide
  Sense strand starting at position 2758 of SEQ ID NO: 587750
agacaagcauguguuacua

SEQ ID NO: 815377 - RNA, 19 nt, Artificial Sequence
  Description of Artificial Sequence: Synthetic oligonucleotide
  Antisense strand to SEQ ID NO: 815376
uaguaacacaugcuugucu

SEQ ID NO: 815378 - RNA, 19 nt, Artificial Sequence
  Description of Artificial Sequence: Synthetic oligonucleotide
  Sense strand starting at position 2767 of SEQ ID NO: 587750
uguguuacuacguaaaccu

SEQ ID NO: 815379 - RNA, 19 nt, Artificial Sequence
  Description of Artificial Sequence: Synthetic oligonucleotide
  Antisense strand to SEQ ID NO: 815378
agguuuacguaguaacaca

SEQ ID NO: 815380 - RNA, 19 nt, Artificial Sequence
  Description of Artificial Sequence: Synthetic oligonucleotide
  Sense strand starting at position 2830 of SEQ ID NO: 587750
ugcgcuaucucauuugauc

SEQ ID NO: 815381 - RNA, 19 nt, Artificial Sequence
  Description of Artificial Sequence: Synthetic oligonucleotide
  Antisense strand to SEQ ID NO: 815380
gaucaaaugagauagcgca

SEQ ID NO: 815382 - RNA, 19 nt, Artificial Sequence
  Description of Artificial Sequence: Synthetic oligonucleotide
  Sense strand starting at position 2874 of SEQ ID NO: 587750
ccgguucacggugaggaaa

SEQ ID NO: 815383 - RNA, 19 nt, Artificial Sequence
  Description of Artificial Sequence: Synthetic oligonucleotide
  Antisense strand to SEQ ID NO: 815382
uuuccucaccgugaaccgg

SEQ ID NO: 815384 - RNA, 19 nt, Artificial Sequence
  Description of Artificial Sequence: Synthetic oligonucleotide
  Sense strand starting at position 2912 of SEQ ID NO: 587750
aguaauuugcccuggguac

SEQ ID NO: 815385 - RNA, 19 nt, Artificial Sequence
  Description of Artificial Sequence: Synthetic oligonucleotide
  Antisense strand to SEQ ID NO: 815384
guacccagggcaaauuacu

SEQ ID NO: 815386 - RNA, 19 nt, Artificial Sequence
  Description of Artificial Sequence: Synthetic oligonucleotide
  Sense strand starting at position 2924 of SEQ ID NO: 587750
uggguacccaguuaguaaa

SEQ ID NO: 815387 - RNA, 19 nt, Artificial Sequence
  Description of Artificial Sequence: Synthetic oligonucleotide
  Antisense strand to SEQ ID NO: 815386
uuuacuaacuggguaccca

SEQ ID NO: 815388 - RNA, 19 nt, Artificial Sequence
  Description of Artificial Sequence: Synthetic oligonucleotide
  Sense strand starting at position 2995 of SEQ ID NO: 587750
uugaauaugcaucaaguca

SEQ ID NO: 815389 - RNA, 19 nt, Artificial Sequence
  Description of Artificial Sequence: Synthetic oligonucleotide
  Antisense strand to SEQ ID NO: 815388
ugacuugaugcauauucaa

SEQ ID NO: 815390 - RNA, 19 nt, Artificial Sequence
  Description of Artificial Sequence: Synthetic oligonucleotide
  Sense strand starting at position 3160 of SEQ ID NO: 587750
ugagguucuccaggacaag

SEQ ID NO: 815391 - RNA, 19 nt, Artificial Sequence
  Description of Artificial Sequence: Synthetic oligonucleotide
  Antisense strand to SEQ ID NO: 815390
cuuguccuggagaaccuca

SEQ ID NO: 815392 - RNA, 19 nt, Artificial Sequence
  Description of Artificial Sequence: Synthetic oligonucleotide
  Sense strand starting at position 3439 of SEQ ID NO: 587750
aaagacuguuugcuuuaga

SEQ ID NO: 815393 - RNA, 19 nt, Artificial Sequence
  Description of Artificial Sequence: Synthetic oligonucleotide
  Antisense strand to SEQ ID NO: 815392
ucuaaagcaaacagucuuu

SEQ ID NO: 815394 - RNA, 19 nt, Artificial Sequence
  Description of Artificial Sequence: Synthetic oligonucleotide
  Sense strand starting at position 3440 of SEQ ID NO: 587750
aagacuguuugcuuuagag

SEQ ID NO: 815395 - RNA, 19 nt, Artificial Sequence
  Description of Artificial Sequence: Synthetic oligonucleotide
  Antisense strand to SEQ ID NO: 815394
cucuaaagcaaacagucuu

SEQ ID NO: 815396 - RNA, 19 nt, Artificial Sequence
  Description of Artificial Sequence: Synthetic oligonucleotide
  Sense strand starting at position 3442 of SEQ ID NO: 587750
gacuguuugcuuuagagca

SEQ ID NO: 815397 - RNA, 19 nt, Artificial Sequence
  Description of Artificial Sequence: Synthetic oligonucleotide
  Antisense strand to SEQ ID NO: 815396
ugcucuaaagcaaacaguc

SEQ ID NO: 815398 - RNA, 19 nt, Artificial Sequence
  Description of Artificial Sequence: Synthetic oligonucleotide
  Sense strand starting at position 3607 of SEQ ID NO: 587750
gccacucaucuguaaguuu

SEQ ID NO: 815399 - RNA, 19 nt, Artificial Sequence
  Description of Artificial Sequence: Synthetic oligonucleotide
  Antisense strand to SEQ ID NO: 815398
aaacuuacagaugaguggc

SEQ ID NO: 815400 - RNA, 19 nt, Artificial Sequence
  Description of Artificial Sequence: Synthetic oligonucleotide
  Sense strand starting at position 3649 of SEQ ID NO: 587750
gcaucuccucuggaagcaa

SEQ ID NO: 815401 - RNA, 19 nt, Artificial Sequence
  Description of Artificial Sequence: Synthetic oligonucleotide
  Antisense strand to SEQ ID NO: 815400
uugcuuccagaggagaugc

SEQ ID NO: 815402 - RNA, 19 nt, Artificial Sequence
  Description of Artificial Sequence: Synthetic oligonucleotide
  Sense strand starting at position 3735 of SEQ ID NO: 587750
cucaaugccucuguuagga

SEQ ID NO: 815403 - RNA, 19 nt, Artificial Sequence
  Description of Artificial Sequence: Synthetic oligonucleotide
  Antisense strand to SEQ ID NO: 815402
uccuaacagaggcauugag

SEQ ID NO: 815404 - RNA, 19 nt, Artificial Sequence
  Description of Artificial Sequence: Synthetic oligonucleotide
  Sense strand starting at position 3773 of SEQ ID NO: 587750
uugugaaguguugagauuc

SEQ ID NO: 815405 - RNA, 19 nt, Artificial Sequence
  Description of Artificial Sequence: Synthetic oligonucleotide
  Antisense strand to SEQ ID NO: 815404
gaaucucaacacuucacaa

SEQ ID NO: 815406 - RNA, 19 nt, Artificial Sequence
  Description of Artificial Sequence: Synthetic oligonucleotide
  Sense strand starting at position 3891 of SEQ ID NO: 587750
agcaaauccgacuggaacu

SEQ ID NO: 815407 - RNA, 19 nt, Artificial Sequence
  Description of Artificial Sequence: Synthetic oligonucleotide
  Antisense strand to SEQ ID NO: 815406
aguuccagucggauuugcu

SEQ ID NO: 815408 - RNA, 19 nt, Artificial Sequence
  Description of Artificial Sequence: Synthetic oligonucleotide
  Sense strand starting at position 3906 of SEQ ID NO: 587750
aacugaggguuuccagcau

SEQ ID NO: 815409 - RNA, 19 nt, Artificial Sequence
  Description of Artificial Sequence: Synthetic oligonucleotide
  Antisense strand to SEQ ID NO: 815408
augcuggaaacccucaguu

SEQ ID NO: 815410 - RNA, 19 nt, Artificial Sequence
  Description of Artificial Sequence: Synthetic oligonucleotide
  Sense strand starting at position 3913 of SEQ ID NO: 587750
gguuuccagcaugagcaau

SEQ ID NO: 815411 - RNA, 19 nt, Artificial Sequence
  Description of Artificial Sequence: Synthetic oligonucleotide
  Antisense strand to SEQ ID NO: 815410
auugcucaugcuggaaacc

SEQ ID NO: 815412 - RNA, 19 nt, Artificial Sequence
  Description of Artificial Sequence: Synthetic oligonucleotide
  Sense strand starting at position 3919 of SEQ ID NO: 587750
cagcaugagcaaugaggua

SEQ ID NO: 815413 - RNA, 19 nt, Artificial Sequence
  Description of Artificial Sequence: Synthetic oligonucleotide
  Antisense strand to SEQ ID NO: 815412
uaccucauugcucaugcug

SEQ ID NO: 815414 - RNA, 19 nt, Artificial Sequence
  Description of Artificial Sequence: Synthetic oligonucleotide
  Sense strand starting at position 46 of SEQ ID NO: 587751
uuuacuugacaaugaagca

SEQ ID NO: 815415 - RNA, 19 nt, Artificial Sequence
  Description of Artificial Sequence: Synthetic oligonucleotide
  Antisense strand to SEQ ID NO: 815414
ugcuucauugucaaguaaa

SEQ ID NO: 815416 - RNA, 19 nt, Artificial Sequence
  Description of Artificial Sequence: Synthetic oligonucleotide
  Sense strand starting at position 286 of SEQ ID NO: 587751
cagagacccugucuaggaa

SEQ ID NO: 815417 - RNA, 19 nt, Artificial Sequence
  Description of Artificial Sequence: Synthetic oligonucleotide
  Antisense strand to SEQ ID NO: 815416
uuccuagacagggucucug

SEQ ID NO: 815418 - RNA, 19 nt, Artificial Sequence
  Description of Artificial Sequence: Synthetic oligonucleotide
  Sense strand starting at position 423 of SEQ ID NO: 587751
ggcuuacuguauuuguguu

SEQ ID NO: 815419 - RNA, 19 nt, Artificial Sequence
  Description of Artificial Sequence: Synthetic oligonucleotide
  Antisense strand to SEQ ID NO: 815418
aacacaaauacaguaagcc

SEQ ID NO: 815420 - RNA, 19 nt, Artificial Sequence
  Description of Artificial Sequence: Synthetic oligonucleotide
  Sense strand starting at position 425 of SEQ ID NO: 587751
cuuacuguauuuguguuua

SEQ ID NO: 815421 - RNA, 19 nt, Artificial Sequence
  Description of Artificial Sequence: Synthetic oligonucleotide
  Antisense strand to SEQ ID NO: 815420
uaaacacaaauacaguaag

SEQ ID NO: 815422 - RNA, 19 nt, Artificial Sequence
  Description of Artificial Sequence: Synthetic oligonucleotide
  Sense strand starting at position 427 of SEQ ID NO: 587751
uacuguauuuguguuuaag

SEQ ID NO: 815423 - RNA, 19 nt, Artificial Sequence
  Description of Artificial Sequence: Synthetic oligonucleotide
  Antisense strand to SEQ ID NO: 815422
cuuaaacacaaauacagua

SEQ ID NO: 815424 - RNA, 19 nt, Artificial Sequence
  Description of Artificial Sequence: Synthetic oligonucleotide
  Sense strand starting at position 430 of SEQ ID NO: 587751
uguauuuguguuuaagagc

SEQ ID NO: 815425 - RNA, 19 nt, Artificial Sequence
  Description of Artificial Sequence: Synthetic oligonucleotide
  Antisense strand to SEQ ID NO: 815424
gcucuuaaacacaaauaca

SEQ ID NO: 815426 - RNA, 19 nt, Artificial Sequence
  Description of Artificial Sequence: Synthetic oligonucleotide
  Sense strand starting at position 513 of SEQ ID NO: 587751
uuuacugaggcugaauauu

SEQ ID NO: 815427 - RNA, 19 nt, Artificial Sequence
  Description of Artificial Sequence: Synthetic oligonucleotide
  Antisense strand to SEQ ID NO: 815426
aauauucagccucaguaaa

SEQ ID NO: 815428 - RNA, 19 nt, Artificial Sequence
  Description of Artificial Sequence: Synthetic oligonucleotide
  Sense strand starting at position 571 of SEQ ID NO: 587751
ggccgauuacgugugcuuu

SEQ ID NO: 815429 - RNA, 19 nt, Artificial Sequence
  Description of Artificial Sequence: Synthetic oligonucleotide
  Antisense strand to SEQ ID NO: 815428
aaagcacacguaaucggcc

SEQ ID NO: 815430 - RNA, 19 nt, Artificial Sequence
  Description of Artificial Sequence: Synthetic oligonucleotide
  Sense strand starting at position 574 of SEQ ID NO: 587751
cgauuacgugugcuuucca

SEQ ID NO: 815431 - RNA, 19 nt, Artificial Sequence
  Description of Artificial Sequence: Synthetic oligonucleotide
  Antisense strand to SEQ ID NO: 815430
uggaaagcacacguaaucg

SEQ ID NO: 815432 - RNA, 19 nt, Artificial Sequence
  Description of Artificial Sequence: Synthetic oligonucleotide
  Sense strand starting at position 666 of SEQ ID NO: 587751
acugaauuaacgugaagac

SEQ ID NO: 815433 - RNA, 19 nt, Artificial Sequence
  Description of Artificial Sequence: Synthetic oligonucleotide
  Antisense strand to SEQ ID NO: 815432
gucuucacguuaauucagu

SEQ ID NO: 815434 - RNA, 19 nt, Artificial Sequence
  Description of Artificial Sequence: Synthetic oligonucleotide
  Sense strand starting at position 829 of SEQ ID NO: 587751
cucaaaguuucugucuaaa

SEQ ID NO: 815435 - RNA, 19 nt, Artificial Sequence
  Description of Artificial Sequence: Synthetic oligonucleotide
  Antisense strand to SEQ ID NO: 815434
uuuagacagaaacuuugag

SEQ ID NO: 815436 - RNA, 19 nt, Artificial Sequence
  Description of Artificial Sequence: Synthetic oligonucleotide
  Sense strand starting at position 991 of SEQ ID NO: 587751
aaguuauugcuggaaugua

SEQ ID NO: 815437 - RNA, 19 nt, Artificial Sequence
  Description of Artificial Sequence: Synthetic oligonucleotide
  Antisense strand to SEQ ID NO: 815436
uacauuccagcaauaacuu

SEQ ID NO: 815438 - RNA, 19 nt, Artificial Sequence
  Description of Artificial Sequence: Synthetic oligonucleotide
  Sense strand starting at position 1248 of SEQ ID NO: 587751
gccagaaauuugucgcgac

SEQ ID NO: 815439 - RNA, 19 nt, Artificial Sequence
  Description of Artificial Sequence: Synthetic oligonucleotide
  Antisense strand to SEQ ID NO: 815438
gucgcgacaaauuucuggc

SEQ ID NO: 815440 - RNA, 19 nt, Artificial Sequence
  Description of Artificial Sequence: Synthetic oligonucleotide
  Sense strand starting at position 2225 of SEQ ID NO: 587751
gaaaguauugcucaacugu

SEQ ID NO: 815441 - RNA, 19 nt, Artificial Sequence
  Description of Artificial Sequence: Synthetic oligonucleotide
  Antisense strand to SEQ ID NO: 815440
acaguugagcaauacuuuc

SEQ ID NO: 815442 - RNA, 19 nt, Artificial Sequence
  Description of Artificial Sequence: Synthetic oligonucleotide
  Sense strand starting at position 2372 of SEQ ID NO: 587751
ggcauuugcugcucccauu

SEQ ID NO: 815443 - RNA, 19 nt, Artificial Sequence
  Description of Artificial Sequence: Synthetic oligonucleotide
  Antisense strand to SEQ ID NO: 815442
aaugggagcagcaaaugcc

SEQ ID NO: 815444 - RNA, 19 nt, Artificial Sequence
  Description of Artificial Sequence: Synthetic oligonucleotide
  Sense strand starting at position 2614 of SEQ ID NO: 587751
aagguuaaaugugcccuaa

SEQ ID NO: 815445 - RNA, 19 nt, Artificial Sequence
  Description of Artificial Sequence: Synthetic oligonucleotide
  Antisense strand to SEQ ID NO: 815444
uuagggcacauuuaaccuu

SEQ ID NO: 815446 - RNA, 19 nt, Artificial Sequence
  Description of Artificial Sequence: Synthetic oligonucleotide
  Sense strand starting at position 2618 of SEQ ID NO: 587751
uuaaaugugcccuaauuga

SEQ ID NO: 815447 - RNA, 19 nt, Artificial Sequence
  Description of Artificial Sequence: Synthetic oligonucleotide
  Antisense strand to SEQ ID NO: 815446
ucaauuagggcacauuuaa

SEQ ID NO: 815448 - RNA, 19 nt, Artificial Sequence
  Description of Artificial Sequence: Synthetic oligonucleotide
  Sense strand starting at position 2625 of SEQ ID NO: 587751
ugcccuaauugaucugaua

SEQ ID NO: 815449 - RNA, 19 nt, Artificial Sequence
  Description of Artificial Sequence: Synthetic oligonucleotide
  Antisense strand to SEQ ID NO: 815448
uaucagaucaauuagggca

SEQ ID NO: 815450 - RNA, 19 nt, Artificial Sequence
  Description of Artificial Sequence: Synthetic oligonucleotide
  Sense strand starting at position 2653 of SEQ ID NO: 587751
ucugauggguucguagaga

SEQ ID NO: 815451 - RNA, 19 nt, Artificial Sequence
  Description of Artificial Sequence: Synthetic oligonucleotide
  Antisense strand to SEQ ID NO: 815450
ucucuacgaacccaucaga

SEQ ID NO: 815452 - RNA, 19 nt, Artificial Sequence
  Description of Artificial Sequence: Synthetic oligonucleotide
  Sense strand starting at position 2658 of SEQ ID NO: 587751
uggguucguagagagguaa

SEQ ID NO: 815453 - RNA, 19 nt, Artificial Sequence
  Description of Artificial Sequence: Synthetic oligonucleotide
  Antisense strand to SEQ ID NO: 815452
uuaccucucuacgaaccca

SEQ ID NO: 815454 - RNA, 19 nt, Artificial Sequence
  Description of Artificial Sequence: Synthetic oligonucleotide
  Sense strand starting at position 2752 of SEQ ID NO: 587751
ugguguguaggaggaaauu

SEQ ID NO: 815455 - RNA, 19 nt, Artificial Sequence
  Description of Artificial Sequence: Synthetic oligonucleotide
  Antisense strand to SEQ ID NO: 815454
aauuuccuccuacacacca

SEQ ID NO: 815456 - RNA, 19 nt, Artificial Sequence
  Description of Artificial Sequence: Synthetic oligonucleotide
  Sense strand starting at position 2847 of SEQ ID NO: 587751
gaauuagagucacuaccag

SEQ ID NO: 815457 - RNA, 19 nt, Artificial Sequence
  Description of Artificial Sequence: Synthetic oligonucleotide
  Antisense strand to SEQ ID NO: 815456
cugguagugacucuaauuc

SEQ ID NO: 815458 - RNA, 19 nt, Artificial Sequence
  Description of Artificial Sequence: Synthetic oligonucleotide
  Sense strand starting at position 2980 of SEQ ID NO: 587751
aauagaguuugucucugaa

SEQ ID NO: 815459 - RNA, 19 nt, Artificial Sequence
  Description of Artificial Sequence: Synthetic oligonucleotide
  Antisense strand to SEQ ID NO: 815458
uucagagacaaacucuauu

SEQ ID NO: 815460 - RNA, 19 nt, Artificial Sequence
  Description of Artificial Sequence: Synthetic oligonucleotide
  Sense strand starting at position 2982 of SEQ ID NO: 587751
uagaguuugucucugaaac

SEQ ID NO: 815461 - RNA, 19 nt, Artificial Sequence
  Description of Artificial Sequence: Synthetic oligonucleotide
  Antisense strand to SEQ ID NO: 815460
guuucagagacaaacucua

SEQ ID NO: 815462 - RNA, 19 nt, Artificial Sequence
  Description of Artificial Sequence: Synthetic oligonucleotide
  Sense strand starting at position 2983 of SEQ ID NO: 587751
agaguuugucucugaaaca

SEQ ID NO: 815463 - RNA, 19 nt, Artificial Sequence
  Description of Artificial Sequence: Synthetic oligonucleotide
  Antisense strand to SEQ ID NO: 815462
uguuucagagacaaacucu

SEQ ID NO: 815464 - RNA, 19 nt, Artificial Sequence
  Description of Artificial Sequence: Synthetic oligonucleotide
  Sense strand starting at position 3098 of SEQ ID NO: 587751
ucguguguuagaguugucu

SEQ ID NO: 815465 - RNA, 19 nt, Artificial Sequence
  Description of Artificial Sequence: Synthetic oligonucleotide
  Antisense strand to SEQ ID NO: 815464
agacaacucuaacacacga

SEQ ID NO: 815466 - RNA, 19 nt, Artificial Sequence
  Description of Artificial Sequence: Synthetic oligonucleotide
  Sense strand starting at position 3106 of SEQ ID NO: 587751
uagaguugucucuagauga

SEQ ID NO: 815467 - RNA, 19 nt, Artificial Sequence
  Description of Artificial Sequence: Synthetic oligonucleotide
  Antisense strand to SEQ ID NO: 815466
ucaucuagagacaacucua

SEQ ID NO: 815468 - RNA, 19 nt, Artificial Sequence
  Description of Artificial Sequence: Synthetic oligonucleotide
  Sense strand starting at position 3113 of SEQ ID NO: 587751
gucucuagaugaguacaga

SEQ ID NO: 815469 - RNA, 19 nt, Artificial Sequence
  Description of Artificial Sequence: Synthetic oligonucleotide
  Antisense strand to SEQ ID NO: 815468
ucuguacucaucuagagac

SEQ ID NO: 815470 - RNA, 19 nt, Artificial Sequence
  Description of Artificial Sequence: Synthetic oligonucleotide
  Sense strand starting at position 3255 of SEQ ID NO: 587751
uaggaauugcuaugucuga

SEQ ID NO: 815471 - RNA, 19 nt, Artificial Sequence
  Description of Artificial Sequence: Synthetic oligonucleotide
  Antisense strand to SEQ ID NO: 815470
ucagacauagcaauuccua

SEQ ID NO: 815472 - RNA, 19 nt, Artificial Sequence
  Description of Artificial Sequence: Synthetic oligonucleotide
  Sense strand starting at position 3285 of SEQ ID NO: 587751
aggucaagccuagagcauu

SEQ ID NO: 815473 - RNA, 19 nt, Artificial Sequence
  Description of Artificial Sequence: Synthetic oligonucleotide
  Antisense strand to SEQ ID NO: 815472
aaugcucuaggcuugaccu

SEQ ID NO: 815474 - RNA, 19 nt, Artificial Sequence
  Description of Artificial Sequence: Synthetic oligonucleotide
  Sense strand starting at position 3291 of SEQ ID NO: 587751
agccuagagcauuaguuau

SEQ ID NO: 815475 - RNA, 19 nt, Artificial Sequence
  Description of Artificial Sequence: Synthetic oligonucleotide
  Antisense strand to SEQ ID NO: 815474
auaacuaaugcucuaggcu

SEQ ID NO: 815476 - RNA, 19 nt, Artificial Sequence
  Description of Artificial Sequence: Synthetic oligonucleotide
  Sense strand starting at position 3293 of SEQ ID NO: 587751
ccuagagcauuaguuauca

SEQ ID NO: 815477 - RNA, 19 nt, Artificial Sequence
  Description of Artificial Sequence: Synthetic oligonucleotide
  Antisense strand to SEQ ID NO: 815476
ugauaacuaaugcucuagg

SEQ ID NO: 815478 - RNA, 19 nt, Artificial Sequence
  Description of Artificial Sequence: Synthetic oligonucleotide
  Sense strand starting at position 3321 of SEQ ID NO: 587751
ggucacucacauuaguaaa

SEQ ID NO: 815479 - RNA, 19 nt, Artificial Sequence
  Description of Artificial Sequence: Synthetic oligonucleotide
  Antisense strand to SEQ ID NO: 815478
uuuacuaaugugagugacc

SEQ ID NO: 815480 - RNA, 19 nt, Artificial Sequence
  Description of Artificial Sequence: Synthetic oligonucleotide
  Sense strand starting at position 3365 of SEQ ID NO: 587751
guacuuauuuagcuuaagu

SEQ ID NO: 815481 - RNA, 19 nt, Artificial Sequence
  Description of Artificial Sequence: Synthetic oligonucleotide
  Antisense strand to SEQ ID NO: 815480
acuuaagcuaaauaaguac

SEQ ID NO: 815482 - RNA, 19 nt, Artificial Sequence
  Description of Artificial Sequence: Synthetic oligonucleotide
  Sense strand starting at position 3378 of SEQ ID NO: 587751
uuaaguaaagugcauagau

SEQ ID NO: 815483 - RNA, 19 nt, Artificial Sequence
  Description of Artificial Sequence: Synthetic oligonucleotide
  Antisense strand to SEQ ID NO: 815482
aucuaugcacuuuacuuaa

SEQ ID NO: 815484 - RNA, 19 nt, Artificial Sequence
  Description of Artificial Sequence: Synthetic oligonucleotide
  Sense strand starting at position 3413 of SEQ ID NO: 587751
guaaucaaacauuggcuuu

SEQ ID NO: 815485 - RNA, 19 nt, Artificial Sequence
  Description of Artificial Sequence: Synthetic oligonucleotide
  Antisense strand to SEQ ID NO: 815484
aaagccaauguuugauuac

SEQ ID NO: 815486 - RNA, 19 nt, Artificial Sequence
  Description of Artificial Sequence: Synthetic oligonucleotide
  Sense strand starting at position 3425 of SEQ ID NO: 587751
uggcuuugucucuaacaac

SEQ ID NO: 815487 - RNA, 19 nt, Artificial Sequence
  Description of Artificial Sequence: Synthetic oligonucleotide
  Antisense strand to SEQ ID NO: 815486
guuguuagagacaaagcca

SEQ ID NO: 815488 - RNA, 19 nt, Artificial Sequence
  Description of Artificial Sequence: Synthetic oligonucleotide
  Sense strand starting at position 3505 of SEQ ID NO: 587751
aucacagagucauuaugca

SEQ ID NO: 815489 - RNA, 19 nt, Artificial Sequence
  Description of Artificial Sequence: Synthetic oligonucleotide
  Antisense strand to SEQ ID NO: 815488
ugcauaaugacucugugau

SEQ ID NO: 815490 - RNA, 19 nt, Artificial Sequence
  Description of Artificial Sequence: Synthetic oligonucleotide
  Sense strand starting at position 3509 of SEQ ID NO: 587751
cagagucauuaugcagaug

SEQ ID NO: 815491 - RNA, 19 nt, Artificial Sequence
  Description of Artificial Sequence: Synthetic oligonucleotide
  Antisense strand to SEQ ID NO: 815490
caucugcauaaugacucug

SEQ ID NO: 815492 - RNA, 19 nt, Artificial Sequence
  Description of Artificial Sequence: Synthetic oligonucleotide
  Sense strand starting at position 3830 of SEQ ID NO: 587751
guauguuagguacauuaaa

SEQ ID NO: 815493 - RNA, 19 nt, Artificial Sequence
  Description of Artificial Sequence: Synthetic oligonucleotide
  Antisense strand to SEQ ID NO: 815492
uuuaauguaccuaacauac

SEQ ID NO: 815494 - RNA, 19 nt, Artificial Sequence
  Description of Artificial Sequence: Synthetic oligonucleotide
  Sense strand starting at position 64 of SEQ ID NO: 587752
aaguuuccagcugaaauag

SEQ ID NO: 815495 - RNA, 19 nt, Artificial Sequence
  Description of Artificial Sequence: Synthetic oligonucleotide
  Antisense strand to SEQ ID NO: 815494
cuauuucagcuggaaacuu

SEQ ID NO: 815496 - RNA, 19 nt, Artificial Sequence
  Description of Artificial Sequence: Synthetic oligonucleotide
  Sense strand starting at position 214 of SEQ ID NO: 587752
gagacuauagcauauacgu

SEQ ID NO: 815497 - RNA, 19 nt, Artificial Sequence
  Description of Artificial Sequence: Synthetic oligonucleotide
  Antisense strand to SEQ ID NO: 815496
acguauaugcuauagucuc

SEQ ID NO: 815498 - RNA, 19 nt, Artificial Sequence
  Description of Artificial Sequence: Synthetic oligonucleotide
  Sense strand starting at position 556 of SEQ ID NO: 587752
ggaagucucaaugguugaa

SEQ ID NO: 815499 - RNA, 19 nt, Artificial Sequence
  Description of Artificial Sequence: Synthetic oligonucleotide
  Antisense strand to SEQ ID NO: 815498
uucaaccauugagacuucc

SEQ ID NO: 815500 - RNA, 19 nt, Artificial Sequence
  Description of Artificial Sequence: Synthetic oligonucleotide
  Sense strand starting at position 558 of SEQ ID NO: 587752
aagucucaaugguugaaua

SEQ ID NO: 815501 - RNA, 19 nt, Artificial Sequence
  Description of Artificial Sequence: Synthetic oligonucleotide
  Antisense strand to SEQ ID NO: 815500
uauucaaccauugagacuu

SEQ ID NO: 815502 - RNA, 19 nt, Artificial Sequence
  Description of Artificial Sequence: Synthetic oligonucleotide
  Sense strand starting at position 559 of SEQ ID NO: 587752
agucucaaugguugaauaa

SEQ ID NO: 815503 - RNA, 19 nt, Artificial Sequence
  Description of Artificial Sequence: Synthetic oligonucleotide
  Antisense strand to SEQ ID NO: 815502
uuauucaaccauugagacu

SEQ ID NO: 815504 - RNA, 19 nt, Artificial Sequence
  Description of Artificial Sequence: Synthetic oligonucleotide
  Sense strand starting at position 560 of SEQ ID NO: 587752
gucucaaugguugaauaac

SEQ ID NO: 815505 - RNA, 19 nt, Artificial Sequence
  Description of Artificial Sequence: Synthetic oligonucleotide
  Antisense strand to SEQ ID NO: 815504
guuauucaaccauugagac

SEQ ID NO: 815506 - RNA, 19 nt, Artificial Sequence
  Description of Artificial Sequence: Synthetic oligonucleotide
  Sense strand starting at position 705 of SEQ ID NO: 587752
aggacaauguuucucaagu

SEQ ID NO: 815507 - RNA, 19 nt, Artificial Sequence
  Description of Artificial Sequence: Synthetic oligonucleotide
  Antisense strand to SEQ ID NO: 815506
acuugagaaacauuguccu

SEQ ID NO: 815508 - RNA, 19 nt, Artificial Sequence
  Description of Artificial Sequence: Synthetic oligonucleotide
  Sense strand starting at position 728 of SEQ ID NO: 587752
ucauaaucucugggucaga

SEQ ID NO: 815509 - RNA, 19 nt, Artificial Sequence
  Description of Artificial Sequence: Synthetic oligonucleotide
  Antisense strand to SEQ ID NO: 815508
ucugacccagagauuauga

SEQ ID NO: 815510 - RNA, 19 nt, Artificial Sequence
  Description of Artificial Sequence: Synthetic oligonucleotide
  Sense strand starting at position 738 of SEQ ID NO: 587752
ugggucagagccugagaau

SEQ ID NO: 815511 - RNA, 19 nt, Artificial Sequence
  Description of Artificial Sequence: Synthetic oligonucleotide
  Antisense strand to SEQ ID NO: 815510
auucucaggcucugaccca

SEQ ID NO: 815512 - RNA, 19 nt, Artificial Sequence
  Description of Artificial Sequence: Synthetic oligonucleotide
  Sense strand starting at position 739 of SEQ ID NO: 587752
gggucagagccugagaauu

SEQ ID NO: 815513 - RNA, 19 nt, Artificial Sequence
  Description of Artificial Sequence: Synthetic oligonucleotide
  Antisense strand to SEQ ID NO: 815512
aauucucaggcucugaccc

SEQ ID NO: 815514 - RNA, 19 nt, Artificial Sequence
  Description of Artificial Sequence: Synthetic oligonucleotide
  Sense strand starting at position 765 of SEQ ID NO: 587752
accaaaucccaagguguua

SEQ ID NO: 815515 - RNA, 19 nt, Artificial Sequence
  Description of Artificial Sequence: Synthetic oligonucleotide
  Antisense strand to SEQ ID NO: 815514
uaacaccuugggauuuggu

SEQ ID NO: 815516 - RNA, 19 nt, Artificial Sequence
  Description of Artificial Sequence: Synthetic oligonucleotide
  Sense strand starting at position 888 of SEQ ID NO: 587752
ccgaucucacaguaugaau

SEQ ID NO: 815517 - RNA, 19 nt, Artificial Sequence
  Description of Artificial Sequence: Synthetic oligonucleotide
  Antisense strand to SEQ ID NO: 815516
auucauacugugagaucgg

SEQ ID NO: 815518 - RNA, 19 nt, Artificial Sequence
  Description of Artificial Sequence: Synthetic oligonucleotide
  Sense strand starting at position 988 of SEQ ID NO: 587752
aggcuuucugaacaguuaa

SEQ ID NO: 815519 - RNA, 19 nt, Artificial Sequence
  Description of Artificial Sequence: Synthetic oligonucleotide
  Antisense strand to SEQ ID NO: 815518
uuaacuguucagaaagccu

SEQ ID NO: 815520 - RNA, 19 nt, Artificial Sequence
  Description of Artificial Sequence: Synthetic oligonucleotide
  Sense strand starting at position 1113 of SEQ ID NO: 587752
uguguuuauaucgauggga

SEQ ID NO: 815521 - RNA, 19 nt, Artificial Sequence
  Description of Artificial Sequence: Synthetic oligonucleotide
  Antisense strand to SEQ ID NO: 815520
ucccaucgauauaaacaca

SEQ ID NO: 815522 - RNA, 19 nt, Artificial Sequence
  Description of Artificial Sequence: Synthetic oligonucleotide
  Sense strand starting at position 1116 of SEQ ID NO: 587752
guuuauaucgaugggacau

SEQ ID NO: 815523 - RNA, 19 nt, Artificial Sequence
  Description of Artificial Sequence: Synthetic oligonucleotide
  Antisense strand to SEQ ID NO: 815522
augucccaucgauauaaac

SEQ ID NO: 815524 - RNA, 19 nt, Artificial Sequence
  Description of Artificial Sequence: Synthetic oligonucleotide
  Sense strand starting at position 1117 of SEQ ID NO: 587752
uuuauaucgaugggacaua

SEQ ID NO: 815525 - RNA, 19 nt, Artificial Sequence
  Description of Artificial Sequence: Synthetic oligonucleotide
  Antisense strand to SEQ ID NO: 815524
uaugucccaucgauauaaa

SEQ ID NO: 815526 - RNA, 19 nt, Artificial Sequence
  Description of Artificial Sequence: Synthetic oligonucleotide
  Sense strand starting at position 1229 of SEQ ID NO: 587752
cgaaauugaguuugaauuc

SEQ ID NO: 815527 - RNA, 19 nt, Artificial Sequence
  Description of Artificial Sequence: Synthetic oligonucleotide
  Antisense strand to SEQ ID NO: 815526
gaauucaaacucaauuucg

SEQ ID NO: 815528 - RNA, 19 nt, Artificial Sequence
  Description of Artificial Sequence: Synthetic oligonucleotide
  Sense strand starting at position 1278 of SEQ ID NO: 587752
guaacuucccuagacuaug

SEQ ID NO: 815529 - RNA, 19 nt, Artificial Sequence
  Description of Artificial Sequence: Synthetic oligonucleotide
  Antisense strand to SEQ ID NO: 815528
cauagucuagggaaguuac

SEQ ID NO: 815530 - RNA, 19 nt, Artificial Sequence
  Description of Artificial Sequence: Synthetic oligonucleotide
  Sense strand starting at position 1343 of SEQ ID NO: 587752
cuacaugauuguguaauaa

SEQ ID NO: 815531 - RNA, 19 nt, Artificial Sequence
  Description of Artificial Sequence: Synthetic oligonucleotide
  Antisense strand to SEQ ID NO: 815530
uuauuacacaaucauguag

SEQ ID NO: 815532 - RNA, 19 nt, Artificial Sequence
  Description of Artificial Sequence: Synthetic oligonucleotide
  Sense strand starting at position 1562 of SEQ ID NO: 587752
auucucuugguaugaaauu

SEQ ID NO: 815533 - RNA, 19 nt, Artificial Sequence
  Description of Artificial Sequence: Synthetic oligonucleotide
  Antisense strand to SEQ ID NO: 815532
aauuucauaccaagagaau

SEQ ID NO: 815534 - RNA, 19 nt, Artificial Sequence
  Description of Artificial Sequence: Synthetic oligonucleotide
  Sense strand starting at position 1574 of SEQ ID NO: 587752
ugaaauugcccuugaaauc

SEQ ID NO: 815535 - RNA, 19 nt, Artificial Sequence
  Description of Artificial Sequence: Synthetic oligonucleotide
  Antisense strand to SEQ ID NO: 815534
gauuucaagggcaauuuca

SEQ ID NO: 815536 - RNA, 19 nt, Artificial Sequence
  Description of Artificial Sequence: Synthetic oligonucleotide
  Sense strand starting at position 1594 of SEQ ID NO: 587752
gugggcauuccaugcauuu

SEQ ID NO: 815537 - RNA, 19 nt, Artificial Sequence
  Description of Artificial Sequence: Synthetic oligonucleotide
  Antisense strand to SEQ ID NO: 815536
aaaugcauggaaugcccac

SEQ ID NO: 815538 - RNA, 19 nt, Artificial Sequence
  Description of Artificial Sequence: Synthetic oligonucleotide
  Sense strand starting at position 1615 of SEQ ID NO: 587752
gcagcucucucauuuaagu

SEQ ID NO: 815539 - RNA, 19 nt, Artificial Sequence
  Description of Artificial Sequence: Synthetic oligonucleotide
  Antisense strand to SEQ ID NO: 815538
acuuaaaugagagagcugc

SEQ ID NO: 815540 - RNA, 19 nt, Artificial Sequence
  Description of Artificial Sequence: Synthetic oligonucleotide
  Sense strand starting at position 1911 of SEQ ID NO: 587752
gugagagcucaacacaguu

SEQ ID NO: 815541 - RNA, 19 nt, Artificial Sequence
  Description of Artificial Sequence: Synthetic oligonucleotide
  Antisense strand to SEQ ID NO: 815540
aacuguguugagcucucac

SEQ ID NO: 815542 - RNA, 19 nt, Artificial Sequence
  Description of Artificial Sequence: Synthetic oligonucleotide
  Sense strand starting at position 2246 of SEQ ID NO: 587752
ugugaucaugaaugaaugu

SEQ ID NO: 815543 - RNA, 19 nt, Artificial Sequence
  Description of Artificial Sequence: Synthetic oligonucleotide
  Antisense strand to SEQ ID NO: 815542
acauucauucaugaucaca

SEQ ID NO: 815544 - RNA, 19 nt, Artificial Sequence
  Description of Artificial Sequence: Synthetic oligonucleotide
  Sense strand starting at position 2378 of SEQ ID NO: 587752
aaauauguugugggagaga

SEQ ID NO: 815545 - RNA, 19 nt, Artificial Sequence
  Description of Artificial Sequence: Synthetic oligonucleotide
  Antisense strand to SEQ ID NO: 815544
ucucucccacaacauauuu

SEQ ID NO: 815546 - RNA, 19 nt, Artificial Sequence
  Description of Artificial Sequence: Synthetic oligonucleotide
  Sense strand starting at position 2555 of SEQ ID NO: 587752
auguucuuugagcacaaca

SEQ ID NO: 815547 - RNA, 19 nt, Artificial Sequence
  Description of Artificial Sequence: Synthetic oligonucleotide
  Antisense strand to SEQ ID NO: 815546
uguugugcucaaagaacau

SEQ ID NO: 815548 - RNA, 19 nt, Artificial Sequence
  Description of Artificial Sequence: Synthetic oligonucleotide
  Sense strand starting at position 2557 of SEQ ID NO: 587752
guucuuugagcacaacaaa

SEQ ID NO: 815549 - RNA, 19 nt, Artificial Sequence
  Description of Artificial Sequence: Synthetic oligonucleotide
  Antisense strand to SEQ ID NO: 815548
uuuguugugcucaaagaac

SEQ ID NO: 815550 - RNA, 19 nt, Artificial Sequence
  Description of Artificial Sequence: Synthetic oligonucleotide
  Sense strand starting at position 2747 of SEQ ID NO: 587752
cuuaauacgggugaucuca

SEQ ID NO: 815551 - RNA, 19 nt, Artificial Sequence
  Description of Artificial Sequence: Synthetic oligonucleotide
  Antisense strand to SEQ ID NO: 815550
ugagaucacccguauuaag

SEQ ID NO: 815552 - RNA, 19 nt, Artificial Sequence
  Description of Artificial Sequence: Synthetic oligonucleotide
  Sense strand starting at position 2917 of SEQ ID NO: 587752
gguucugaaccaugaucuu

SEQ ID NO: 815553 - RNA, 19 nt, Artificial Sequence
  Description of Artificial Sequence: Synthetic oligonucleotide
  Antisense strand to SEQ ID NO: 815552
aagaucaugguucagaacc

SEQ ID NO: 815554 - RNA, 19 nt, Artificial Sequence
  Description of Artificial Sequence: Synthetic oligonucleotide
  Sense strand starting at position 3253 of SEQ ID NO: 587752
cauuaauucuggcuggaga

SEQ ID NO: 815555 - RNA, 19 nt, Artificial Sequence
  Description of Artificial Sequence: Synthetic oligonucleotide
  Antisense strand to SEQ ID NO: 815554
ucuccagccagaauuaaug

SEQ ID NO: 815556 - RNA, 19 nt, Artificial Sequence
  Description of Artificial Sequence: Synthetic oligonucleotide
  Sense strand starting at position 3254 of SEQ ID NO: 587752
auuaauucuggcuggagac

SEQ ID NO: 815557 - RNA, 19 nt, Artificial Sequence
  Description of Artificial Sequence: Synthetic oligonucleotide
  Antisense strand to SEQ ID NO: 815556
gucuccagccagaauuaau

SEQ ID NO: 815558 - RNA, 19 nt, Artificial Sequence
  Description of Artificial Sequence: Synthetic oligonucleotide
  Sense strand starting at position 3255 of SEQ ID NO: 587752
uuaauucuggcuggagaca

SEQ ID NO: 815559 - RNA, 19 nt, Artificial Sequence
  Description of Artificial Sequence: Synthetic oligonucleotide
  Antisense strand to SEQ ID NO: 815558
ugucuccagccagaauuaa

SEQ ID NO: 815560 - RNA, 19 nt, Artificial Sequence
  Description of Artificial Sequence: Synthetic oligonucleotide
  Sense strand starting at position 3264 of SEQ ID NO: 587752
gcuggagacaacugauauu

SEQ ID NO: 815561 - RNA, 19 nt, Artificial Sequence
  Description of Artificial Sequence: Synthetic oligonucleotide
  Antisense strand to SEQ ID NO: 815560
aauaucaguugucuccagc

SEQ ID NO: 815562 - RNA, 19 nt, Artificial Sequence
  Description of Artificial Sequence: Synthetic oligonucleotide
  Sense strand starting at position 3356 of SEQ ID NO: 587752
cagguagaauuacuagcaa

SEQ ID NO: 815563 - RNA, 19 nt, Artificial Sequence
  Description of Artificial Sequence: Synthetic oligonucleotide
  Antisense strand to SEQ ID NO: 815562
uugcuaguaauucuaccug

SEQ ID NO: 815564 - RNA, 19 nt, Artificial Sequence
  Description of Artificial Sequence: Synthetic oligonucleotide
  Sense strand starting at position 3455 of SEQ ID NO: 587752
cgugaaaucauauacagug

SEQ ID NO: 815565 - RNA, 19 nt, Artificial Sequence
  Description of Artificial Sequence: Synthetic oligonucleotide
  Antisense strand to SEQ ID NO: 815564
cacuguauaugauuucacg

SEQ ID NO: 815566 - RNA, 19 nt, Artificial Sequence
  Description of Artificial Sequence: Synthetic oligonucleotide
  Sense strand starting at position 3600 of SEQ ID NO: 587752
guacauuguacugggauag

SEQ ID NO: 815567 - RNA, 19 nt, Artificial Sequence
  Description of Artificial Sequence: Synthetic oligonucleotide
  Antisense strand to SEQ ID NO: 815566
cuaucccaguacaauguac

SEQ ID NO: 815568 - RNA, 19 nt, Artificial Sequence
  Description of Artificial Sequence: Synthetic oligonucleotide
  Sense strand starting at position 3601 of SEQ ID NO: 587752
uacauuguacugggauaga

SEQ ID NO: 815569 - RNA, 19 nt, Artificial Sequence
  Description of Artificial Sequence: Synthetic oligonucleotide
  Antisense strand to SEQ ID NO: 815568
ucuaucccaguacaaugua

SEQ ID NO: 815570 - RNA, 19 nt, Artificial Sequence
  Description of Artificial Sequence: Synthetic oligonucleotide
  Sense strand starting at position 3646 of SEQ ID NO: 587752
uugauuaguggauauguua

SEQ ID NO: 815571 - RNA, 19 nt, Artificial Sequence
  Description of Artificial Sequence: Synthetic oligonucleotide
  Antisense strand to SEQ ID NO: 815570
uaacauauccacuaaucaa

SEQ ID NO: 815572 - RNA, 19 nt, Artificial Sequence
  Description of Artificial Sequence: Synthetic oligonucleotide
  Sense strand starting at position 3849 of SEQ ID NO: 587752
acaagaaagcugugugaau

SEQ ID NO: 815573 - RNA, 19 nt, Artificial Sequence
  Description of Artificial Sequence: Synthetic oligonucleotide
  Antisense strand to SEQ ID NO: 815572
auucacacagcuuucuugu

SEQ ID NO: 815574 - RNA, 19 nt, Artificial Sequence
  Description of Artificial Sequence: Synthetic oligonucleotide
  Sense strand starting at position 159 of SEQ ID NO: 587753
cuggaauugcuggaucauu

SEQ ID NO: 815575 - RNA, 19 nt, Artificial Sequence
  Description of Artificial Sequence: Synthetic oligonucleotide
  Antisense strand to SEQ ID NO: 815574
aaugauccagcaauuccag

SEQ ID NO: 815576 - RNA, 19 nt, Artificial Sequence
  Description of Artificial Sequence: Synthetic oligonucleotide
  Sense strand starting at position 222 of SEQ ID NO: 587753
ucuguuuccuaaccuggaa

SEQ ID NO: 815577 - RNA, 19 nt, Artificial Sequence
  Description of Artificial Sequence: Synthetic oligonucleotide
  Antisense strand to SEQ ID NO: 815576
uuccagguuaggaaacaga

SEQ ID NO: 815578 - RNA, 19 nt, Artificial Sequence
  Description of Artificial Sequence: Synthetic oligonucleotide
  Sense strand starting at position 234 of SEQ ID NO: 587753
ccuggaaagcagugcugau

SEQ ID NO: 815579 - RNA, 19 nt, Artificial Sequence
  Description of Artificial Sequence: Synthetic oligonucleotide
  Antisense strand to SEQ ID NO: 815578
aucagcacugcuuuccagg

SEQ ID NO: 815580 - RNA, 19 nt, Artificial Sequence
  Description of Artificial Sequence: Synthetic oligonucleotide
  Sense strand starting at position 278 of SEQ ID NO: 587753
gugaguaggaaaugaugua

SEQ ID NO: 815581 - RNA, 19 nt, Artificial Sequence
  Description of Artificial Sequence: Synthetic oligonucleotide
  Antisense strand to SEQ ID NO: 815580
uacaucauuuccuacucac

SEQ ID NO: 815582 - RNA, 19 nt, Artificial Sequence
  Description of Artificial Sequence: Synthetic oligonucleotide
  Sense strand starting at position 467 of SEQ ID NO: 587753
ucaaauugcgacugauugu

SEQ ID NO: 815583 - RNA, 19 nt, Artificial Sequence
  Description of Artificial Sequence: Synthetic oligonucleotide
  Antisense strand to SEQ ID NO: 815582
acaaucagucgcaauuuga

SEQ ID NO: 815584 - RNA, 19 nt, Artificial Sequence
  Description of Artificial Sequence: Synthetic oligonucleotide
  Sense strand starting at position 478 of SEQ ID NO: 587753
cugauuguccagcagaugu

SEQ ID NO: 815585 - RNA, 19 nt, Artificial Sequence
  Description of Artificial Sequence: Synthetic oligonucleotide
  Antisense strand to SEQ ID NO: 815584
acaucugcuggacaaucag

SEQ ID NO: 815586 - RNA, 19 nt, Artificial Sequence
  Description of Artificial Sequence: Synthetic oligonucleotide
  Sense strand starting at position 480 of SEQ ID NO: 587753
gauuguccagcagauguaa

SEQ ID NO: 815587 - RNA, 19 nt, Artificial Sequence
  Description of Artificial Sequence: Synthetic oligonucleotide
  Antisense strand to SEQ ID NO: 815586
uuacaucugcuggacaauc

SEQ ID NO: 815588 - RNA, 19 nt, Artificial Sequence
  Description of Artificial Sequence: Synthetic oligonucleotide
  Sense strand starting at position 556 of SEQ ID NO: 587753
uuaauccugggcugacaau

SEQ ID NO: 815589 - RNA, 19 nt, Artificial Sequence
  Description of Artificial Sequence: Synthetic oligonucleotide
  Antisense strand to SEQ ID NO: 815588
auugucagcccaggauuaa

SEQ ID NO: 815590 - RNA, 19 nt, Artificial Sequence
  Description of Artificial Sequence: Synthetic oligonucleotide
  Sense strand starting at position 575 of SEQ ID NO: 587753
gggacuggaucccugguua

SEQ ID NO: 815591 - RNA, 19 nt, Artificial Sequence
  Description of Artificial Sequence: Synthetic oligonucleotide
  Antisense strand to SEQ ID NO: 815590
uaaccagggauccaguccc

SEQ ID NO: 815592 - RNA, 19 nt, Artificial Sequence
  Description of Artificial Sequence: Synthetic oligonucleotide
  Sense strand starting at position 737 of SEQ ID NO: 587753
ggagcugucaucgcgcaga

SEQ ID NO: 815593 - RNA, 19 nt, Artificial Sequence
  Description of Artificial Sequence: Synthetic oligonucleotide
  Antisense strand to SEQ ID NO: 815592
ucugcgcgaugacagcucc

SEQ ID NO: 815594 - RNA, 19 nt, Artificial Sequence
  Description of Artificial Sequence: Synthetic oligonucleotide
  Sense strand starting at position 762 of SEQ ID NO: 587753
gacugauacgcggaaagga

SEQ ID NO: 815595 - RNA, 19 nt, Artificial Sequence
  Description of Artificial Sequence: Synthetic oligonucleotide
  Antisense strand to SEQ ID NO: 815594
uccuuuccgcguaucaguc

SEQ ID NO: 815596 - RNA, 19 nt, Artificial Sequence
  Description of Artificial Sequence: Synthetic oligonucleotide
  Sense strand starting at position 817 of SEQ ID NO: 587753
gaccguguuaggcacacaa

SEQ ID NO: 815597 - RNA, 19 nt, Artificial Sequence
  Description of Artificial Sequence: Synthetic oligonucleotide
  Antisense strand to SEQ ID NO: 815596
uugugugccuaacacgguc

SEQ ID NO: 815598 - RNA, 19 nt, Artificial Sequence
  Description of Artificial Sequence: Synthetic oligonucleotide
  Sense strand starting at position 819 of SEQ ID NO: 587753
ccguguuaggcacacaaau

SEQ ID NO: 815599 - RNA, 19 nt, Artificial Sequence
  Description of Artificial Sequence: Synthetic oligonucleotide
  Antisense strand to SEQ ID NO: 815598
auuugugugccuaacacgg

SEQ ID NO: 815600 - RNA, 19 nt, Artificial Sequence
  Description of Artificial Sequence: Synthetic oligonucleotide
  Sense strand starting at position 1304 of SEQ ID NO: 587753
gcuggaauucccgacugca

SEQ ID NO: 815601 - RNA, 19 nt, Artificial Sequence
  Description of Artificial Sequence: Synthetic oligonucleotide
  Antisense strand to SEQ ID NO: 815600
ugcagucgggaauuccagc

SEQ ID NO: 815602 - RNA, 19 nt, Artificial Sequence
  Description of Artificial Sequence: Synthetic oligonucleotide
  Sense strand starting at position 1395 of SEQ ID NO: 587753
cugaauuucuucccgccau

SEQ ID NO: 815603 - RNA, 19 nt, Artificial Sequence
  Description of Artificial Sequence: Synthetic oligonucleotide
  Antisense strand to SEQ ID NO: 815602
auggcgggaagaaauucag

SEQ ID NO: 815604 - RNA, 19 nt, Artificial Sequence
  Description of Artificial Sequence: Synthetic oligonucleotide
  Sense strand starting at position 3020 of SEQ ID NO: 587753
gcgguuccauucuucugaa

SEQ ID NO: 815605 - RNA, 19 nt, Artificial Sequence
  Description of Artificial Sequence: Synthetic oligonucleotide
  Antisense strand to SEQ ID NO: 815604
uucagaagaauggaaccgc

SEQ ID NO: 815606 - RNA, 19 nt, Artificial Sequence
  Description of Artificial Sequence: Synthetic oligonucleotide
  Sense strand starting at position 3021 of SEQ ID NO: 587753
cgguuccauucuucugaaa

SEQ ID NO: 815607 - RNA, 19 nt, Artificial Sequence
  Description of Artificial Sequence: Synthetic oligonucleotide
  Antisense strand to SEQ ID NO: 815606
uuucagaagaauggaaccg

SEQ ID NO: 815608 - RNA, 19 nt, Artificial Sequence
  Description of Artificial Sequence: Synthetic oligonucleotide
  Sense strand starting at position 3320 of SEQ ID NO: 587753
uguggagucacccgaggaa

SEQ ID NO: 815609 - RNA, 19 nt, Artificial Sequence
  Description of Artificial Sequence: Synthetic oligonucleotide
  Antisense strand to SEQ ID NO: 815608
uuccucgggugacuccaca

SEQ ID NO: 815610 - RNA, 19 nt, Artificial Sequence
  Description of Artificial Sequence: Synthetic oligonucleotide
  Sense strand starting at position 3368 of SEQ ID NO: 587753
ggaacaaaguuccaauaag

SEQ ID NO: 815611 - RNA, 19 nt, Artificial Sequence
  Description of Artificial Sequence: Synthetic oligonucleotide
  Antisense strand to SEQ ID NO: 815610
cuuauuggaacuuuguucc

SEQ ID NO: 815612 - RNA, 19 nt, Artificial Sequence
  Description of Artificial Sequence: Synthetic oligonucleotide
  Sense strand starting at position 3514 of SEQ ID NO: 587753
cucgaaauagacugucgaa

SEQ ID NO: 815613 - RNA, 19 nt, Artificial Sequence
  Description of Artificial Sequence: Synthetic oligonucleotide
  Antisense strand to SEQ ID NO: 815612
uucgacagucuauuucgag

SEQ ID NO: 815614 - RNA, 19 nt, Artificial Sequence
  Description of Artificial Sequence: Synthetic oligonucleotide
  Sense strand starting at position 3575 of SEQ ID NO: 587753
ggccaauuuggucacgcuu

SEQ ID NO: 815615 - RNA, 19 nt, Artificial Sequence
  Description of Artificial Sequence: Synthetic oligonucleotide
  Antisense strand to SEQ ID NO: 815614
aagcgugaccaaauuggcc

SEQ ID NO: 815616 - RNA, 19 nt, Artificial Sequence
  Description of Artificial Sequence: Synthetic oligonucleotide
  Sense strand starting at position 3607 of SEQ ID NO: 587753
guuugucacuuucugacaa

SEQ ID NO: 815617 - RNA, 19 nt, Artificial Sequence
  Description of Artificial Sequence: Synthetic oligonucleotide
  Antisense strand to SEQ ID NO: 815616
uugucagaaagugacaaac

SEQ ID NO: 815618 - RNA, 19 nt, Artificial Sequence
  Description of Artificial Sequence: Synthetic oligonucleotide
  Sense strand starting at position 3624 of SEQ ID NO: 587753
aaauaugaacagugagcau

SEQ ID NO: 815619 - RNA, 19 nt, Artificial Sequence
  Description of Artificial Sequence: Synthetic oligonucleotide
  Antisense strand to SEQ ID NO: 815618
augcucacuguucauauuu

SEQ ID NO: 815620 - RNA, 19 nt, Artificial Sequence
  Description of Artificial Sequence: Synthetic oligonucleotide
  Sense strand starting at position 3672 of SEQ ID NO: 587753
auucuuucuuuaucugagu

SEQ ID NO: 815621 - RNA, 19 nt, Artificial Sequence
  Description of Artificial Sequence: Synthetic oligonucleotide
  Antisense strand to SEQ ID NO: 815620
acucagauaaagaaagaau

SEQ ID NO: 815622 - RNA, 19 nt, Artificial Sequence
  Description of Artificial Sequence: Synthetic oligonucleotide
  Sense strand starting at position 3678 of SEQ ID NO: 587753
ucuuuaucugagugauccu

SEQ ID NO: 815623 - RNA, 19 nt, Artificial Sequence
  Description of Artificial Sequence: Synthetic oligonucleotide
  Antisense strand to SEQ ID NO: 815622
aggaucacucagauaaaga

SEQ ID NO: 815624 - RNA, 19 nt, Artificial Sequence
  Description of Artificial Sequence: Synthetic oligonucleotide
  Sense strand starting at position 3681 of SEQ ID NO: 587753
uuaucugagugauccuuac

SEQ ID NO: 815625 - RNA, 19 nt, Artificial Sequence
  Description of Artificial Sequence: Synthetic oligonucleotide
  Antisense strand to SEQ ID NO: 815624
guaaggaucacucagauaa

SEQ ID NO: 815626 - RNA, 19 nt, Artificial Sequence
  Description of Artificial Sequence: Synthetic oligonucleotide
  Sense strand starting at position 3685 of SEQ ID NO: 587753
cugagugauccuuacacua

SEQ ID NO: 815627 - RNA, 19 nt, Artificial Sequence
  Description of Artificial Sequence: Synthetic oligonucleotide
  Antisense strand to SEQ ID NO: 815626
uaguguaaggaucacucag

SEQ ID NO: 815628 - RNA, 19 nt, Artificial Sequence
  Description of Artificial Sequence: Synthetic oligonucleotide
  Sense strand starting at position 3690 of SEQ ID NO: 587753
ugauccuuacacuagugua

SEQ ID NO: 815629 - RNA, 19 nt, Artificial Sequence
  Description of Artificial Sequence: Synthetic oligonucleotide
  Antisense strand to SEQ ID NO: 815628
uacacuaguguaaggauca

SEQ ID NO: 815630 - RNA, 19 nt, Artificial Sequence
  Description of Artificial Sequence: Synthetic oligonucleotide
  Sense strand starting at position 3822 of SEQ ID NO: 587753
augauuguugauugaauac

SEQ ID NO: 815631 - RNA, 19 nt, Artificial Sequence
  Description of Artificial Sequence: Synthetic oligonucleotide
  Antisense strand to SEQ ID NO: 815630
guauucaaucaacaaucau

SEQ ID NO: 815632 - RNA, 19 nt, Artificial Sequence
  Description of Artificial Sequence: Synthetic oligonucleotide
  Sense strand starting at position 3868 of SEQ ID NO: 587753
gagggaagguuaguuauag

SEQ ID NO: 815633 - RNA, 19 nt, Artificial Sequence
  Description of Artificial Sequence: Synthetic oligonucleotide
  Antisense strand to SEQ ID NO: 815632
cuauaacuaaccuucccuc

SEQ ID NO: 815634 - RNA, 19 nt, Artificial Sequence
  Description of Artificial Sequence: Synthetic oligonucleotide
  Sense strand starting at position 3872 of SEQ ID NO: 587753
gaagguuaguuauagaaag

SEQ ID NO: 815635 - RNA, 19 nt, Artificial Sequence
  Description of Artificial Sequence: Synthetic oligonucleotide
  Antisense strand to SEQ ID NO: 815634
cuuucuauaacuaaccuuc

SEQ ID NO: 815636 - RNA, 19 nt, Artificial Sequence
  Description of Artificial Sequence: Synthetic oligonucleotide
  Sense strand starting at position 3874 of SEQ ID NO: 587753
agguuaguuauagaaagug

SEQ ID NO: 815637 - RNA, 19 nt, Artificial Sequence
  Description of Artificial Sequence: Synthetic oligonucleotide
  Antisense strand to SEQ ID NO: 815636
cacuuucuauaacuaaccu

SEQ ID NO: 815638 - RNA, 19 nt, Artificial Sequence
  Description of Artificial Sequence: Synthetic oligonucleotide
  Sense strand starting at position 3879 of SEQ ID NO: 587753
aguuauagaaagugcaaga

SEQ ID NO: 815639 - RNA, 19 nt, Artificial Sequence
  Description of Artificial Sequence: Synthetic oligonucleotide
  Antisense strand to SEQ ID NO: 815638
ucuugcacuuucuauaacu

SEQ ID NO: 815640 - RNA, 19 nt, Artificial Sequence
  Description of Artificial Sequence: Synthetic oligonucleotide
  Sense strand starting at position 3892 of SEQ ID NO: 587753
gcaagagguuucuucuucu

SEQ ID NO: 815641 - RNA, 19 nt, Artificial Sequence
  Description of Artificial Sequence: Synthetic oligonucleotide
  Antisense strand to SEQ ID NO: 815640
agaagaagaaaccucuugc

SEQ ID NO: 815642 - RNA, 19 nt, Artificial Sequence
  Description of Artificial Sequence: Synthetic oligonucleotide
  Sense strand starting at position 3896 of SEQ ID NO: 587753
gagguuucuucuucucaga

SEQ ID NO: 815643 - RNA, 19 nt, Artificial Sequence
  Description of Artificial Sequence: Synthetic oligonucleotide
  Antisense strand to SEQ ID NO: 815642
ucugagaagaagaaaccuc

SEQ ID NO: 815644 - RNA, 19 nt, Artificial Sequence
  Description of Artificial Sequence: Synthetic oligonucleotide
  Sense strand starting at position 3925 of SEQ ID NO: 587753
aguaguugggaguggucua

SEQ ID NO: 815645 - RNA, 19 nt, Artificial Sequence
  Description of Artificial Sequence: Synthetic oligonucleotide
  Antisense strand to SEQ ID NO: 815644
uagaccacucccaacuacu

SEQ ID NO: 815646 - RNA, 19 nt, Artificial Sequence
  Description of Artificial Sequence: Synthetic oligonucleotide
  Sense strand starting at position 3926 of SEQ ID NO: 587753
guaguugggaguggucuau

SEQ ID NO: 815647 - RNA, 19 nt, Artificial Sequence
  Description of Artificial Sequence: Synthetic oligonucleotide
  Antisense strand to SEQ ID NO: 815646
auagaccacucccaacuac

SEQ ID NO: 815648 - RNA, 19 nt, Artificial Sequence
  Description of Artificial Sequence: Synthetic oligonucleotide
  Sense strand starting at position 3930 of SEQ ID NO: 587753
uugggaguggucuauacau

SEQ ID NO: 815649 - RNA, 19 nt, Artificial Sequence
  Description of Artificial Sequence: Synthetic oligonucleotide
  Antisense strand to SEQ ID NO: 815648
auguauagaccacucccaa

SEQ ID NO: 815650 - RNA, 19 nt, Artificial Sequence
  Description of Artificial Sequence: Synthetic oligonucleotide
  Sense strand starting at position 3932 of SEQ ID NO: 587753
gggaguggucuauacauau

SEQ ID NO: 815651 - RNA, 19 nt, Artificial Sequence
  Description of Artificial Sequence: Synthetic oligonucleotide
  Antisense strand to SEQ ID NO: 815650
auauguauagaccacuccc

SEQ ID NO: 815652 - RNA, 19 nt, Artificial Sequence
  Description of Artificial Sequence: Synthetic oligonucleotide
  Sense strand starting at position 3976 of SEQ ID NO: 587753
acauuuguguacuuacagu

SEQ ID NO: 815653 - RNA, 19 nt, Artificial Sequence
  Description of Artificial Sequence: Synthetic oligonucleotide
  Antisense strand to SEQ ID NO: 815652
acuguaaguacacaaaugu

SEQ ID NO: 815654 - RNA, 19 nt, Artificial Sequence
  Description of Artificial Sequence: Synthetic oligonucleotide
  Sense strand starting at position 60 of SEQ ID NO: 587754
gcaaguuucuuagcuauuu

SEQ ID NO: 815655 - RNA, 19 nt, Artificial Sequence
  Description of Artificial Sequence: Synthetic oligonucleotide
  Antisense strand to SEQ ID NO: 815654
aaauagcuaagaaacuugc

SEQ ID NO: 815656 - RNA, 19 nt, Artificial Sequence
  Description of Artificial Sequence: Synthetic oligonucleotide
  Sense strand starting at position 92 of SEQ ID NO: 587754
ggacucugcagaugaucau

SEQ ID NO: 815657 - RNA, 19 nt, Artificial Sequence
  Description of Artificial Sequence: Synthetic oligonucleotide
  Antisense strand to SEQ ID NO: 815656
augaucaucugcagagucc

SEQ ID NO: 815658 - RNA, 19 nt, Artificial Sequence
  Description of Artificial Sequence: Synthetic oligonucleotide
  Sense strand starting at position 95 of SEQ ID NO: 587754
cucugcagaugaucauauu

SEQ ID NO: 815659 - RNA, 19 nt, Artificial Sequence
  Description of Artificial Sequence: Synthetic oligonucleotide
  Antisense strand to SEQ ID NO: 815658
aauaugaucaucugcagag

SEQ ID NO: 815660 - RNA, 19 nt, Artificial Sequence
  Description of Artificial Sequence: Synthetic oligonucleotide
  Sense strand starting at position 131 of SEQ ID NO: 587754
gcacauagccuugaugguu

SEQ ID NO: 815661 - RNA, 19 nt, Artificial Sequence
  Description of Artificial Sequence: Synthetic oligonucleotide
  Antisense strand to SEQ ID NO: 815660
aaccaucaaggcuaugugc

SEQ ID NO: 815662 - RNA, 19 nt, Artificial Sequence
  Description of Artificial Sequence: Synthetic oligonucleotide
  Sense strand starting at position 148 of SEQ ID NO: 587754
uugggaguuuccuaaauuu

SEQ ID NO: 815663 - RNA, 19 nt, Artificial Sequence
  Description of Artificial Sequence: Synthetic oligonucleotide
  Antisense strand to SEQ ID NO: 815662
aaauuuaggaaacucccaa

SEQ ID NO: 815664 - RNA, 19 nt, Artificial Sequence
  Description of Artificial Sequence: Synthetic oligonucleotide
  Sense strand starting at position 254 of SEQ ID NO: 587754
caggcaaucaguuagggua

SEQ ID NO: 815665 - RNA, 19 nt, Artificial Sequence
  Description of Artificial Sequence: Synthetic oligonucleotide
  Antisense strand to SEQ ID NO: 815664
uacccuaacugauugccug

SEQ ID NO: 815666 - RNA, 19 nt, Artificial Sequence
  Description of Artificial Sequence: Synthetic oligonucleotide
  Sense strand starting at position 284 of SEQ ID NO: 587754
uuaugagacauguggacuu

SEQ ID NO: 815667 - RNA, 19 nt, Artificial Sequence
  Description of Artificial Sequence: Synthetic oligonucleotide
  Antisense strand to SEQ ID NO: 815666
aaguccacaugucucauaa

SEQ ID NO: 815668 - RNA, 19 nt, Artificial Sequence
  Description of Artificial Sequence: Synthetic oligonucleotide
  Sense strand starting at position 445 of SEQ ID NO: 587754
uuuaguccauauucuagua

SEQ ID NO: 815669 - RNA, 19 nt, Artificial Sequence
  Description of Artificial Sequence: Synthetic oligonucleotide
  Antisense strand to SEQ ID NO: 815668
uacuagaauauggacuaaa

SEQ ID NO: 815670 - RNA, 19 nt, Artificial Sequence
  Description of Artificial Sequence: Synthetic oligonucleotide
  Sense strand starting at position 506 of SEQ ID NO: 587754
uaaugauaccguugaccac

SEQ ID NO: 815671 - RNA, 19 nt, Artificial Sequence
  Description of Artificial Sequence: Synthetic oligonucleotide
  Antisense strand to SEQ ID NO: 815670
guggucaacgguaucauua

SEQ ID NO: 815672 - RNA, 19 nt, Artificial Sequence
  Description of Artificial Sequence: Synthetic oligonucleotide
  Sense strand starting at position 560 of SEQ ID NO: 587754
ggacaaauggcuuguggaa

SEQ ID NO: 815673 - RNA, 19 nt, Artificial Sequence
  Description of Artificial Sequence: Synthetic oligonucleotide
  Antisense strand to SEQ ID NO: 815672
uuccacaagccauuugucc

SEQ ID NO: 815674 - RNA, 19 nt, Artificial Sequence
  Description of Artificial Sequence: Synthetic oligonucleotide
  Sense strand starting at position 616 of SEQ ID NO: 587754
ggaacucuuuguccaggua

SEQ ID NO: 815675 - RNA, 19 nt, Artificial Sequence
  Description of Artificial Sequence: Synthetic oligonucleotide
  Antisense strand to SEQ ID NO: 815674
uaccuggacaaagaguucc

SEQ ID NO: 815676 - RNA, 19 nt, Artificial Sequence
  Description of Artificial Sequence: Synthetic oligonucleotide
  Sense strand starting at position 617 of SEQ ID NO: 587754
gaacucuuuguccagguaa

SEQ ID NO: 815677 - RNA, 19 nt, Artificial Sequence
  Description of Artificial Sequence: Synthetic oligonucleotide
  Antisense strand to SEQ ID NO: 815676
uuaccuggacaaagaguuc

SEQ ID NO: 815678 - RNA, 19 nt, Artificial Sequence
  Description of Artificial Sequence: Synthetic oligonucleotide
  Sense strand starting at position 644 of SEQ ID NO: 587754
acuuuaauguuuccaugga

SEQ ID NO: 815679 - RNA, 19 nt, Artificial Sequence
  Description of Artificial Sequence: Synthetic oligonucleotide
  Antisense strand to SEQ ID NO: 815678
uccauggaaacauuaaagu

SEQ ID NO: 815680 - RNA, 19 nt, Artificial Sequence
  Description of Artificial Sequence: Synthetic oligonucleotide
  Sense strand starting at position 648 of SEQ ID NO: 587754
uaauguuuccauggagcca

SEQ ID NO: 815681 - RNA, 19 nt, Artificial Sequence
  Description of Artificial Sequence: Synthetic oligonucleotide
  Antisense strand to SEQ ID NO: 815680
uggcuccauggaaacauua

SEQ ID NO: 815682 - RNA, 19 nt, Artificial Sequence
  Description of Artificial Sequence: Synthetic oligonucleotide
  Sense strand starting at position 706 of SEQ ID NO: 587754
gccgucuuugaagaugaaa

SEQ ID NO: 815683 - RNA, 19 nt, Artificial Sequence
  Description of Artificial Sequence: Synthetic oligonucleotide
  Antisense strand to SEQ ID NO: 815682
uuucaucuucaaagacggc

SEQ ID NO: 815684 - RNA, 19 nt, Artificial Sequence
  Description of Artificial Sequence: Synthetic oligonucleotide
  Sense strand starting at position 708 of SEQ ID NO: 587754
cgucuuugaagaugaaaua

SEQ ID NO: 815685 - RNA, 19 nt, Artificial Sequence
  Description of Artificial Sequence: Synthetic oligonucleotide
  Antisense strand to SEQ ID NO: 815684
uauuucaucuucaaagacg

SEQ ID NO: 815686 - RNA, 19 nt, Artificial Sequence
  Description of Artificial Sequence: Synthetic oligonucleotide
  Sense strand starting at position 744 of SEQ ID NO: 587754
guaauuggacucugcuaau

SEQ ID NO: 815687 - RNA, 19 nt, Artificial Sequence
  Description of Artificial Sequence: Synthetic oligonucleotide
  Antisense strand to SEQ ID NO: 815686
auuagcagaguccaauuac

SEQ ID NO: 815688 - RNA, 19 nt, Artificial Sequence
  Description of Artificial Sequence: Synthetic oligonucleotide
  Sense strand starting at position 754 of SEQ ID NO: 587754
ucugcuaauggcuaagagu

SEQ ID NO: 815689 - RNA, 19 nt, Artificial Sequence
  Description of Artificial Sequence: Synthetic oligonucleotide
  Antisense strand to SEQ ID NO: 815688
acucuuagccauuagcaga

SEQ ID NO: 815690 - RNA, 19 nt, Artificial Sequence
  Description of Artificial Sequence: Synthetic oligonucleotide
  Sense strand starting at position 779 of SEQ ID NO: 587754
cacucuugguguuuagaga

SEQ ID NO: 815691 - RNA, 19 nt, Artificial Sequence
  Description of Artificial Sequence: Synthetic oligonucleotide
  Antisense strand to SEQ ID NO: 815690
ucucuaaacaccaagagug

SEQ ID NO: 815692 - RNA, 19 nt, Artificial Sequence
  Description of Artificial Sequence: Synthetic oligonucleotide
  Sense strand starting at position 903 of SEQ ID NO: 587754
aggaauuaguuaucuuaac

SEQ ID NO: 815693 - RNA, 19 nt, Artificial Sequence
  Description of Artificial Sequence: Synthetic oligonucleotide
  Antisense strand to SEQ ID NO: 815692
guuaagauaacuaauuccu

SEQ ID NO: 815694 - RNA, 19 nt, Artificial Sequence
  Description of Artificial Sequence: Synthetic oligonucleotide
  Sense strand starting at position 904 of SEQ ID NO: 587754
ggaauuaguuaucuuaaca

SEQ ID NO: 815695 - RNA, 19 nt, Artificial Sequence
  Description of Artificial Sequence: Synthetic oligonucleotide
  Antisense strand to SEQ ID NO: 815694
uguuaagauaacuaauucc

SEQ ID NO: 815696 - RNA, 19 nt, Artificial Sequence
  Description of Artificial Sequence: Synthetic oligonucleotide
  Sense strand starting at position 1064 of SEQ ID NO: 587754
gggagaugaaugugcuucu

SEQ ID NO: 815697 - RNA, 19 nt, Artificial Sequence
  Description of Artificial Sequence: Synthetic oligonucleotide
  Antisense strand to SEQ ID NO: 815696
agaagcacauucaucuccc

SEQ ID NO: 815698 - RNA, 19 nt, Artificial Sequence
  Description of Artificial Sequence: Synthetic oligonucleotide
  Sense strand starting at position 1065 of SEQ ID NO: 587754
ggagaugaaugugcuucua

SEQ ID NO: 815699 - RNA, 19 nt, Artificial Sequence
  Description of Artificial Sequence: Synthetic oligonucleotide
  Antisense strand to SEQ ID NO: 815698
uagaagcacauucaucucc

SEQ ID NO: 815700 - RNA, 19 nt, Artificial Sequence
  Description of Artificial Sequence: Synthetic oligonucleotide
  Sense strand starting at position 1710 of SEQ ID NO: 587754
ugaagcaucuaaguuauca

SEQ ID NO: 815701 - RNA, 19 nt, Artificial Sequence
  Description of Artificial Sequence: Synthetic oligonucleotide
  Antisense strand to SEQ ID NO: 815700
ugauaacuuagaugcuuca

SEQ ID NO: 815702 - RNA, 19 nt, Artificial Sequence
  Description of Artificial Sequence: Synthetic oligonucleotide
  Sense strand starting at position 1714 of SEQ ID NO: 587754
gcaucuaaguuaucaagua

SEQ ID NO: 815703 - RNA, 19 nt, Artificial Sequence
  Description of Artificial Sequence: Synthetic oligonucleotide
  Antisense strand to SEQ ID NO: 815702
uacuugauaacuuagaugc

SEQ ID NO: 815704 - RNA, 19 nt, Artificial Sequence
  Description of Artificial Sequence: Synthetic oligonucleotide
  Sense strand starting at position 2017 of SEQ ID NO: 587754
ggaggucacauggguuaaa

SEQ ID NO: 815705 - RNA, 19 nt, Artificial Sequence
  Description of Artificial Sequence: Synthetic oligonucleotide
  Antisense strand to SEQ ID NO: 815704
uuuaacccaugugaccucc

SEQ ID NO: 815706 - RNA, 19 nt, Artificial Sequence
  Description of Artificial Sequence: Synthetic oligonucleotide
  Sense strand starting at position 2046 of SEQ ID NO: 587754
augugaaaguauguaguca

SEQ ID NO: 815707 - RNA, 19 nt, Artificial Sequence
  Description of Artificial Sequence: Synthetic oligonucleotide
  Antisense strand to SEQ ID NO: 815706
ugacuacauacuuucacau

SEQ ID NO: 815708 - RNA, 19 nt, Artificial Sequence
  Description of Artificial Sequence: Synthetic oligonucleotide
  Sense strand starting at position 2047 of SEQ ID NO: 587754
ugugaaaguauguagucaa

SEQ ID NO: 815709 - RNA, 19 nt, Artificial Sequence
  Description of Artificial Sequence: Synthetic oligonucleotide
  Antisense strand to SEQ ID NO: 815708
uugacuacauacuuucaca

SEQ ID NO: 815710 - RNA, 19 nt, Artificial Sequence
  Description of Artificial Sequence: Synthetic oligonucleotide
  Sense strand starting at position 2050 of SEQ ID NO: 587754
gaaaguauguagucaaauc

SEQ ID NO: 815711 - RNA, 19 nt, Artificial Sequence
  Description of Artificial Sequence: Synthetic oligonucleotide
  Antisense strand to SEQ ID NO: 815710
gauuugacuacauacuuuc

SEQ ID NO: 815712 - RNA, 19 nt, Artificial Sequence
  Description of Artificial Sequence: Synthetic oligonucleotide
  Sense strand starting at position 2059 of SEQ ID NO: 587754
uagucaaaucugcagguuu

SEQ ID NO: 815713 - RNA, 19 nt, Artificial Sequence
  Description of Artificial Sequence: Synthetic oligonucleotide
  Antisense strand to SEQ ID NO: 815712
aaaccugcagauuugacua

SEQ ID NO: 815714 - RNA, 19 nt, Artificial Sequence
  Description of Artificial Sequence: Synthetic oligonucleotide
  Sense strand starting at position 2145 of SEQ ID NO: 587754
ucacuaucuguguaucauu

SEQ ID NO: 815715 - RNA, 19 nt, Artificial Sequence
  Description of Artificial Sequence: Synthetic oligonucleotide
  Antisense strand to SEQ ID NO: 815714
aaugauacacagauaguga

SEQ ID NO: 815716 - RNA, 19 nt, Artificial Sequence
  Description of Artificial Sequence: Synthetic oligonucleotide
  Sense strand starting at position 2420 of SEQ ID NO: 587754
cugauugggucuccuggaa

SEQ ID NO: 815717 - RNA, 19 nt, Artificial Sequence
  Description of Artificial Sequence: Synthetic oligonucleotide
  Antisense strand to SEQ ID NO: 815716
uuccaggagacccaaucag

SEQ ID NO: 815718 - RNA, 19 nt, Artificial Sequence
  Description of Artificial Sequence: Synthetic oligonucleotide
  Sense strand starting at position 2563 of SEQ ID NO: 587754
ggcagagcuccucaucaua

SEQ ID NO: 815719 - RNA, 19 nt, Artificial Sequence
  Description of Artificial Sequence: Synthetic oligonucleotide
  Antisense strand to SEQ ID NO: 815718
uaugaugaggagcucugcc

SEQ ID NO: 815720 - RNA, 19 nt, Artificial Sequence
  Description of Artificial Sequence: Synthetic oligonucleotide
  Sense strand starting at position 3375 of SEQ ID NO: 587754
guaggagacugacuuaagu

SEQ ID NO: 815721 - RNA, 19 nt, Artificial Sequence
  Description of Artificial Sequence: Synthetic oligonucleotide
  Antisense strand to SEQ ID NO: 815720
acuuaagucagucuccuac

SEQ ID NO: 815722 - RNA, 19 nt, Artificial Sequence
  Description of Artificial Sequence: Synthetic oligonucleotide
  Sense strand starting at position 3423 of SEQ ID NO: 587754
caacuuucuguuuggaaug

SEQ ID NO: 815723 - RNA, 19 nt, Artificial Sequence
  Description of Artificial Sequence: Synthetic oligonucleotide
  Antisense strand to SEQ ID NO: 815722
cauuccaaacagaaaguug

SEQ ID NO: 815724 - RNA, 19 nt, Artificial Sequence
  Description of Artificial Sequence: Synthetic oligonucleotide
  Sense strand starting at position 3499 of SEQ ID NO: 587754
augggagucaugggcuaga

SEQ ID NO: 815725 - RNA, 19 nt, Artificial Sequence
  Description of Artificial Sequence: Synthetic oligonucleotide
  Antisense strand to SEQ ID NO: 815724
ucuagcccaugacucccau

SEQ ID NO: 815726 - RNA, 19 nt, Artificial Sequence
  Description of Artificial Sequence: Synthetic oligonucleotide
  Sense strand starting at position 3629 of SEQ ID NO: 587754
acuuuagauguuuguuacu

SEQ ID NO: 815727 - RNA, 19 nt, Artificial Sequence
  Description of Artificial Sequence: Synthetic oligonucleotide
  Antisense strand to SEQ ID NO: 815726
aguaacaaacaucuaaagu

SEQ ID NO: 815728 - RNA, 19 nt, Artificial Sequence
  Description of Artificial Sequence: Synthetic oligonucleotide
  Sense strand starting at position 3631 of SEQ ID NO: 587754
uuuagauguuuguuacuag

SEQ ID NO: 815729 - RNA, 19 nt, Artificial Sequence
  Description of Artificial Sequence: Synthetic oligonucleotide
  Antisense strand to SEQ ID NO: 815728
cuaguaacaaacaucuaaa

SEQ ID NO: 815730 - RNA, 19 nt, Artificial Sequence
  Description of Artificial Sequence: Synthetic oligonucleotide
  Sense strand starting at position 3640 of SEQ ID NO: 587754
uuguuacuagcaggugaau

SEQ ID NO: 815731 - RNA, 19 nt, Artificial Sequence
  Description of Artificial Sequence: Synthetic oligonucleotide
  Antisense strand to SEQ ID NO: 815730
auucaccugcuaguaacaa

SEQ ID NO: 815732 - RNA, 19 nt, Artificial Sequence
  Description of Artificial Sequence: Synthetic oligonucleotide
  Sense strand starting at position 3922 of SEQ ID NO: 587754
gcaggauacucuuccugaa

SEQ ID NO: 815733 - RNA, 19 nt, Artificial Sequence
  Description of Artificial Sequence: Synthetic oligonucleotide
  Antisense strand to SEQ ID NO: 815732
uucaggaagaguauccugc

SEQ ID NO: 815734 - RNA, 19 nt, Artificial Sequence
  Description of Artificial Sequence: Synthetic oligonucleotide
  Sense strand starting at position 21 of SEQ ID NO: 587755
ugggauaauaggugugaaa

SEQ ID NO: 815735 - RNA, 19 nt, Artificial Sequence
  Description of Artificial Sequence: Synthetic oligonucleotide
  Antisense strand to SEQ ID NO: 815734
uuucacaccuauuauccca

SEQ ID NO: 815736 - RNA, 19 nt, Artificial Sequence
  Description of Artificial Sequence: Synthetic oligonucleotide
  Sense strand starting at position 23 of SEQ ID NO: 587755
ggauaauaggugugaaagc

SEQ ID NO: 815737 - RNA, 19 nt, Artificial Sequence
  Description of Artificial Sequence: Synthetic oligonucleotide
  Antisense strand to SEQ ID NO: 815736
gcuuucacaccuauuaucc

SEQ ID NO: 815738 - RNA, 19 nt, Artificial Sequence
  Description of Artificial Sequence: Synthetic oligonucleotide
  Sense strand starting at position 136 of SEQ ID NO: 587755
acgguaacuaccugauuga

SEQ ID NO: 815739 - RNA, 19 nt, Artificial Sequence
  Description of Artificial Sequence: Synthetic oligonucleotide
  Antisense strand to SEQ ID NO: 815738
ucaaucagguaguuaccgu

SEQ ID NO: 815740 - RNA, 19 nt, Artificial Sequence
  Description of Artificial Sequence: Synthetic oligonucleotide
  Sense strand starting at position 137 of SEQ ID NO: 587755
cgguaacuaccugauugau

SEQ ID NO: 815741 - RNA, 19 nt, Artificial Sequence
  Description of Artificial Sequence: Synthetic oligonucleotide
  Antisense strand to SEQ ID NO: 815740
aucaaucagguaguuaccg

SEQ ID NO: 815742 - RNA, 19 nt, Artificial Sequence
  Description of Artificial Sequence: Synthetic oligonucleotide
  Sense strand starting at position 139 of SEQ ID NO: 587755
guaacuaccugauugauug

SEQ ID NO: 815743 - RNA, 19 nt, Artificial Sequence
  Description of Artificial Sequence: Synthetic oligonucleotide
  Antisense strand to SEQ ID NO: 815742
caaucaaucagguaguuac

SEQ ID NO: 815744 - RNA, 19 nt, Artificial Sequence
  Description of Artificial Sequence: Synthetic oligonucleotide
  Sense strand starting at position 206 of SEQ ID NO: 587755
cagguuugagccuaauccu

SEQ ID NO: 815745 - RNA, 19 nt, Artificial Sequence
  Description of Artificial Sequence: Synthetic oligonucleotide
  Antisense strand to SEQ ID NO: 815744
aggauuaggcucaaaccug

SEQ ID NO: 815746 - RNA, 19 nt, Artificial Sequence
  Description of Artificial Sequence: Synthetic oligonucleotide
  Sense strand starting at position 248 of SEQ ID NO: 587755
ugcaaacucgccugcauuu

SEQ ID NO: 815747 - RNA, 19 nt, Artificial Sequence
  Description of Artificial Sequence: Synthetic oligonucleotide
  Antisense strand to SEQ ID NO: 815746
aaaugcaggcgaguuugca

SEQ ID NO: 815748 - RNA, 19 nt, Artificial Sequence
  Description of Artificial Sequence: Synthetic oligonucleotide
  Sense strand starting at position 265 of SEQ ID NO: 587755
uuuacaaauccguaaguac

SEQ ID NO: 815749 - RNA, 19 nt, Artificial Sequence
  Description of Artificial Sequence: Synthetic oligonucleotide
  Antisense strand to SEQ ID NO: 815748
guacuuacggauuuguaaa

SEQ ID NO: 815750 - RNA, 19 nt, Artificial Sequence
  Description of Artificial Sequence: Synthetic oligonucleotide
  Sense strand starting at position 502 of SEQ ID NO: 587755
guaacauagccucagugua

SEQ ID NO: 815751 - RNA, 19 nt, Artificial Sequence
  Description of Artificial Sequence: Synthetic oligonucleotide
  Antisense strand to SEQ ID NO: 815750
uacacugaggcuauguuac

SEQ ID NO: 815752 - RNA, 19 nt, Artificial Sequence
  Description of Artificial Sequence: Synthetic oligonucleotide
  Sense strand starting at position 606 of SEQ ID NO: 587755
agcaguauuugcuuuggga

SEQ ID NO: 815753 - RNA, 19 nt, Artificial Sequence
  Description of Artificial Sequence: Synthetic oligonucleotide
  Antisense strand to SEQ ID NO: 815752
ucccaaagcaaauacugcu

SEQ ID NO: 815754 - RNA, 19 nt, Artificial Sequence
  Description of Artificial Sequence: Synthetic oligonucleotide
  Sense strand starting at position 729 of SEQ ID NO: 587755
cgaacaauguuauugguua

SEQ ID NO: 815755 - RNA, 19 nt, Artificial Sequence
  Description of Artificial Sequence: Synthetic oligonucleotide
  Antisense strand to SEQ ID NO: 815754
uaaccaauaacauuguucg

SEQ ID NO: 815756 - RNA, 19 nt, Artificial Sequence
  Description of Artificial Sequence: Synthetic oligonucleotide
  Sense strand starting at position 893 of SEQ ID NO: 587755
ccauguucagagcgagauu

SEQ ID NO: 815757 - RNA, 19 nt, Artificial Sequence
  Description of Artificial Sequence: Synthetic oligonucleotide
  Antisense strand to SEQ ID NO: 815756
aaucucgcucugaacaugg

SEQ ID NO: 815758 - RNA, 19 nt, Artificial Sequence
  Description of Artificial Sequence: Synthetic oligonucleotide
  Sense strand starting at position 998 of SEQ ID NO: 587755
cugagagagccucgagagu

SEQ ID NO: 815759 - RNA, 19 nt, Artificial Sequence
  Description of Artificial Sequence: Synthetic oligonucleotide
  Antisense strand to SEQ ID NO: 815758
acucucgaggcucucucag

SEQ ID NO: 815760 - RNA, 19 nt, Artificial Sequence
  Description of Artificial Sequence: Synthetic oligonucleotide
  Sense strand starting at position 1026 of SEQ ID NO: 587755
gugacuaugaacggaguau

SEQ ID NO: 815761 - RNA, 19 nt, Artificial Sequence
  Description of Artificial Sequence: Synthetic oligonucleotide
  Antisense strand to SEQ ID NO: 815760
auacuccguucauagucac

SEQ ID NO: 815762 - RNA, 19 nt, Artificial Sequence
  Description of Artificial Sequence: Synthetic oligonucleotide
  Sense strand starting at position 1150 of SEQ ID NO: 587755
aggucacgcccguagaaau

SEQ ID NO: 815763 - RNA, 19 nt, Artificial Sequence
  Description of Artificial Sequence: Synthetic oligonucleotide
  Antisense strand to SEQ ID NO: 815762
auuucuacgggcgugaccu

SEQ ID NO: 815764 - RNA, 19 nt, Artificial Sequence
  Description of Artificial Sequence: Synthetic oligonucleotide
  Sense strand starting at position 1163 of SEQ ID NO: 587755
agaaaugcucucuggaauu

SEQ ID NO: 815765 - RNA, 19 nt, Artificial Sequence
  Description of Artificial Sequence: Synthetic oligonucleotide
  Antisense strand to SEQ ID NO: 815764
aauuccagagagcauuucu

SEQ ID NO: 815766 - RNA, 19 nt, Artificial Sequence
  Description of Artificial Sequence: Synthetic oligonucleotide
  Sense strand starting at position 1206 of SEQ ID NO: 587755
uguguauacaggugaagca

SEQ ID NO: 815767 - RNA, 19 nt, Artificial Sequence
  Description of Artificial Sequence: Synthetic oligonucleotide
  Antisense strand to SEQ ID NO: 815766
ugcuucaccuguauacaca

SEQ ID NO: 815768 - RNA, 19 nt, Artificial Sequence
  Description of Artificial Sequence: Synthetic oligonucleotide
  Sense strand starting at position 1289 of SEQ ID NO: 587755
gggcucccuccggauuaaa

SEQ ID NO: 815769 - RNA, 19 nt, Artificial Sequence
  Description of Artificial Sequence: Synthetic oligonucleotide
  Antisense strand to SEQ ID NO: 815768
uuuaauccggagggagccc

SEQ ID NO: 815770 - RNA, 19 nt, Artificial Sequence
  Description of Artificial Sequence: Synthetic oligonucleotide
  Sense strand starting at position 2023 of SEQ ID NO: 587755
ccaucagaccugugacauc

SEQ ID NO: 815771 - RNA, 19 nt, Artificial Sequence
  Description of Artificial Sequence: Synthetic oligonucleotide
  Antisense strand to SEQ ID NO: 815770
gaugucacaggucugaugg

SEQ ID NO: 815772 - RNA, 19 nt, Artificial Sequence
  Description of Artificial Sequence: Synthetic oligonucleotide
  Sense strand starting at position 2211 of SEQ ID NO: 587755
ccuggagucuccuugagca

SEQ ID NO: 815773 - RNA, 19 nt, Artificial Sequence
  Description of Artificial Sequence: Synthetic oligonucleotide
  Antisense strand to SEQ ID NO: 815772
ugcucaaggagacuccagg

SEQ ID NO: 815774 - RNA, 19 nt, Artificial Sequence
  Description of Artificial Sequence: Synthetic oligonucleotide
  Sense strand starting at position 2236 of SEQ ID NO: 587755
uugccugaggagugaagaa

SEQ ID NO: 815775 - RNA, 19 nt, Artificial Sequence
  Description of Artificial Sequence: Synthetic oligonucleotide
  Antisense strand to SEQ ID NO: 815774
uucuucacuccucaggcaa

SEQ ID NO: 815776 - RNA, 19 nt, Artificial Sequence
  Description of Artificial Sequence: Synthetic oligonucleotide
  Sense strand starting at position 2462 of SEQ ID NO: 587755
cucagauggaagugucuga

SEQ ID NO: 815777 - RNA, 19 nt, Artificial Sequence
  Description of Artificial Sequence: Synthetic oligonucleotide
  Antisense strand to SEQ ID NO: 815776
ucagacacuuccaucugag

SEQ ID NO: 815778 - RNA, 19 nt, Artificial Sequence
  Description of Artificial Sequence: Synthetic oligonucleotide
  Sense strand starting at position 2466 of SEQ ID NO: 587755
gauggaagugucugaaauu

SEQ ID NO: 815779 - RNA, 19 nt, Artificial Sequence
  Description of Artificial Sequence: Synthetic oligonucleotide
  Antisense strand to SEQ ID NO: 815778
aauuucagacacuuccauc

SEQ ID NO: 815780 - RNA, 19 nt, Artificial Sequence
  Description of Artificial Sequence: Synthetic oligonucleotide
  Sense strand starting at position 2477 of SEQ ID NO: 587755
cugaaauucggcuguacag

SEQ ID NO: 815781 - RNA, 19 nt, Artificial Sequence
  Description of Artificial Sequence: Synthetic oligonucleotide
  Antisense strand to SEQ ID NO: 815780
cuguacagccgaauuucag

SEQ ID NO: 815782 - RNA, 19 nt, Artificial Sequence
  Description of Artificial Sequence: Synthetic oligonucleotide
  Sense strand starting at position 2504 of SEQ ID NO: 587755
aggcacaucucuuugugaa

SEQ ID NO: 815783 - RNA, 19 nt, Artificial Sequence
  Description of Artificial Sequence: Synthetic oligonucleotide
  Antisense strand to SEQ ID NO: 815782
uucacaaagagaugugccu

SEQ ID NO: 815784 - RNA, 19 nt, Artificial Sequence
  Description of Artificial Sequence: Synthetic oligonucleotide
  Sense strand starting at position 2505 of SEQ ID NO: 587755
ggcacaucucuuugugaac

SEQ ID NO: 815785 - RNA, 19 nt, Artificial Sequence
  Description of Artificial Sequence: Synthetic oligonucleotide
  Antisense strand to SEQ ID NO: 815784
guucacaaagagaugugcc

SEQ ID NO: 815786 - RNA, 19 nt, Artificial Sequence
  Description of Artificial Sequence: Synthetic oligonucleotide
  Sense strand starting at position 2549 of SEQ ID NO: 587755
gucuaauacugcccaggau

SEQ ID NO: 815787 - RNA, 19 nt, Artificial Sequence
  Description of Artificial Sequence: Synthetic oligonucleotide
  Antisense strand to SEQ ID NO: 815786
auccugggcaguauuagac

SEQ ID NO: 815788 - RNA, 19 nt, Artificial Sequence
  Description of Artificial Sequence: Synthetic oligonucleotide
  Sense strand starting at position 2584 of SEQ ID NO: 587755
aggagauucuguuugaauc

SEQ ID NO: 815789 - RNA, 19 nt, Artificial Sequence
  Description of Artificial Sequence: Synthetic oligonucleotide
  Antisense strand to SEQ ID NO: 815788
gauucaaacagaaucuccu

SEQ ID NO: 815790 - RNA, 19 nt, Artificial Sequence
  Description of Artificial Sequence: Synthetic oligonucleotide
  Sense strand starting at position 2585 of SEQ ID NO: 587755
ggagauucuguuugaaucu

SEQ ID NO: 815791 - RNA, 19 nt, Artificial Sequence
  Description of Artificial Sequence: Synthetic oligonucleotide
  Antisense strand to SEQ ID NO: 815790
agauucaaacagaaucucc

SEQ ID NO: 815792 - RNA, 19 nt, Artificial Sequence
  Description of Artificial Sequence: Synthetic oligonucleotide
  Sense strand starting at position 2609 of SEQ ID NO: 587755
acacgaggcccuuaaugaa

SEQ ID NO: 815793 - RNA, 19 nt, Artificial Sequence
  Description of Artificial Sequence: Synthetic oligonucleotide
  Antisense strand to SEQ ID NO: 815792
uucauuaagggccucgugu

SEQ ID NO: 815794 - RNA, 19 nt, Artificial Sequence
  Description of Artificial Sequence: Synthetic oligonucleotide
  Sense strand starting at position 2688 of SEQ ID NO: 587755
guagaaaucccauaucagu

SEQ ID NO: 815795 - RNA, 19 nt, Artificial Sequence
  Description of Artificial Sequence: Synthetic oligonucleotide
  Antisense strand to SEQ ID NO: 815794
acugauaugggauuucuac

SEQ ID NO: 815796 - RNA, 19 nt, Artificial Sequence
  Description of Artificial Sequence: Synthetic oligonucleotide
  Sense strand starting at position 2778 of SEQ ID NO: 587755
ucagaagcucuggaagcuu

SEQ ID NO: 815797 - RNA, 19 nt, Artificial Sequence
  Description of Artificial Sequence: Synthetic oligonucleotide
  Antisense strand to SEQ ID NO: 815796
aagcuuccagagcuucuga

SEQ ID NO: 815798 - RNA, 19 nt, Artificial Sequence
  Description of Artificial Sequence: Synthetic oligonucleotide
  Sense strand starting at position 2921 of SEQ ID NO: 587755
uccuuaccuuaggugaauu

SEQ ID NO: 815799 - RNA, 19 nt, Artificial Sequence
  Description of Artificial Sequence: Synthetic oligonucleotide
  Antisense strand to SEQ ID NO: 815798
aauucaccuaagguaagga

SEQ ID NO: 815800 - RNA, 19 nt, Artificial Sequence
  Description of Artificial Sequence: Synthetic oligonucleotide
  Sense strand starting at position 2986 of SEQ ID NO: 587755
ccagaaucccaggguuuga

SEQ ID NO: 815801 - RNA, 19 nt, Artificial Sequence
  Description of Artificial Sequence: Synthetic oligonucleotide
  Antisense strand to SEQ ID NO: 815800
ucaaacccugggauucugg

SEQ ID NO: 815802 - RNA, 19 nt, Artificial Sequence
  Description of Artificial Sequence: Synthetic oligonucleotide
  Sense strand starting at position 2996 of SEQ ID NO: 587755
aggguuugaaccuauguca

SEQ ID NO: 815803 - RNA, 19 nt, Artificial Sequence
  Description of Artificial Sequence: Synthetic oligonucleotide
  Antisense strand to SEQ ID NO: 815802
ugacauagguucaaacccu

SEQ ID NO: 815804 - RNA, 19 nt, Artificial Sequence
  Description of Artificial Sequence: Synthetic oligonucleotide
  Sense strand starting at position 3094 of SEQ ID NO: 587755
ggaagcaucugcccugacu

SEQ ID NO: 815805 - RNA, 19 nt, Artificial Sequence
  Description of Artificial Sequence: Synthetic oligonucleotide
  Antisense strand to SEQ ID NO: 815804
agucagggcagaugcuucc

SEQ ID NO: 815806 - RNA, 19 nt, Artificial Sequence
  Description of Artificial Sequence: Synthetic oligonucleotide
  Sense strand starting at position 3157 of SEQ ID NO: 587755
gauuuagacugaggugaug

SEQ ID NO: 815807 - RNA, 19 nt, Artificial Sequence
  Description of Artificial Sequence: Synthetic oligonucleotide
  Antisense strand to SEQ ID NO: 815806
caucaccucagucuaaauc

SEQ ID NO: 815808 - RNA, 19 nt, Artificial Sequence
  Description of Artificial Sequence: Synthetic oligonucleotide
  Sense strand starting at position 3544 of SEQ ID NO: 587755
ugauguggcagauauugca

SEQ ID NO: 815809 - RNA, 19 nt, Artificial Sequence
  Description of Artificial Sequence: Synthetic oligonucleotide
  Antisense strand to SEQ ID NO: 815808
ugcaauaucugccacauca

SEQ ID NO: 815810 - RNA, 19 nt, Artificial Sequence
  Description of Artificial Sequence: Synthetic oligonucleotide
  Sense strand starting at position 3671 of SEQ ID NO: 587755
aaggguugccaaugagcau

SEQ ID NO: 815811 - RNA, 19 nt, Artificial Sequence
  Description of Artificial Sequence: Synthetic oligonucleotide
  Antisense strand to SEQ ID NO: 815810
augcucauuggcaacccuu

SEQ ID NO: 815812 - RNA, 19 nt, Artificial Sequence
  Description of Artificial Sequence: Synthetic oligonucleotide
  Sense strand starting at position 3672 of SEQ ID NO: 587755
aggguugccaaugagcauu

SEQ ID NO: 815813 - RNA, 19 nt, Artificial Sequence
  Description of Artificial Sequence: Synthetic oligonucleotide
  Antisense strand to SEQ ID NO: 815812
aaugcucauuggcaacccu

SEQ ID NO: 815814 - RNA, 19 nt, Artificial Sequence
  Description of Artificial Sequence: Synthetic oligonucleotide
  Sense strand starting at position 50 of SEQ ID NO: 587756
cgcacauacccugaaggua

SEQ ID NO: 815815 - RNA, 19 nt, Artificial Sequence
  Description of Artificial Sequence: Synthetic oligonucleotide
  Antisense strand to SEQ ID NO: 815814
uaccuucaggguaugugcg

SEQ ID NO: 815816 - RNA, 19 nt, Artificial Sequence
  Description of Artificial Sequence: Synthetic oligonucleotide
  Sense strand starting at position 58 of SEQ ID NO: 587756
cccugaagguaaucuuaua

SEQ ID NO: 815817 - RNA, 19 nt, Artificial Sequence
  Description of Artificial Sequence: Synthetic oligonucleotide
  Antisense strand to SEQ ID NO: 815816
uauaagauuaccuucaggg

SEQ ID NO: 815818 - RNA, 19 nt, Artificial Sequence
  Description of Artificial Sequence: Synthetic oligonucleotide
  Sense strand starting at position 141 of SEQ ID NO: 587756
ugagaucggauguggaauu

SEQ ID NO: 815819 - RNA, 19 nt, Artificial Sequence
  Description of Artificial Sequence: Synthetic oligonucleotide
  Antisense strand to SEQ ID NO: 815818
aauuccacauccgaucuca

SEQ ID NO: 815820 - RNA, 19 nt, Artificial Sequence
  Description of Artificial Sequence: Synthetic oligonucleotide
  Sense strand starting at position 171 of SEQ ID NO: 587756
ucaucaugucggcaaucau

SEQ ID NO: 815821 - RNA, 19 nt, Artificial Sequence
  Description of Artificial Sequence: Synthetic oligonucleotide
  Antisense strand to SEQ ID NO: 815820
augauugccgacaugauga

SEQ ID NO: 815822 - RNA, 19 nt, Artificial Sequence
  Description of Artificial Sequence: Synthetic oligonucleotide
  Sense strand starting at position 410 of SEQ ID NO: 587756
gggacuucuugaguaaaug

SEQ ID NO: 815823 - RNA, 19 nt, Artificial Sequence
  Description of Artificial Sequence: Synthetic oligonucleotide
  Antisense strand to SEQ ID NO: 815822
cauuuacucaagaaguccc

SEQ ID NO: 815824 - RNA, 19 nt, Artificial Sequence
  Description of Artificial Sequence: Synthetic oligonucleotide
  Sense strand starting at position 418 of SEQ ID NO: 587756
uugaguaaaugauuaggua

SEQ ID NO: 815825 - RNA, 19 nt, Artificial Sequence
  Description of Artificial Sequence: Synthetic oligonucleotide
  Antisense strand to SEQ ID NO: 815824
uaccuaaucauuuacucaa

SEQ ID NO: 815826 - RNA, 19 nt, Artificial Sequence
  Description of Artificial Sequence: Synthetic oligonucleotide
  Sense strand starting at position 597 of SEQ ID NO: 587756
gaggcugaugccuggaauc

SEQ ID NO: 815827 - RNA, 19 nt, Artificial Sequence
  Description of Artificial Sequence: Synthetic oligonucleotide
  Antisense strand to SEQ ID NO: 815826
gauuccaggcaucagccuc

SEQ ID NO: 815828 - RNA, 19 nt, Artificial Sequence
  Description of Artificial Sequence: Synthetic oligonucleotide
  Sense strand starting at position 640 of SEQ ID NO: 587756
uguggaccauuugaguuua

SEQ ID NO: 815829 - RNA, 19 nt, Artificial Sequence
  Description of Artificial Sequence: Synthetic oligonucleotide
  Antisense strand to SEQ ID NO: 815828
uaaacucaaaugguccaca

SEQ ID NO: 815830 - RNA, 19 nt, Artificial Sequence
  Description of Artificial Sequence: Synthetic oligonucleotide
  Sense strand starting at position 1046 of SEQ ID NO: 587756
augugauuccuugaaccac

SEQ ID NO: 815831 - RNA, 19 nt, Artificial Sequence
  Description of Artificial Sequence: Synthetic oligonucleotide
  Antisense strand to SEQ ID NO: 815830
gugguucaaggaaucacau

SEQ ID NO: 815832 - RNA, 19 nt, Artificial Sequence
  Description of Artificial Sequence: Synthetic oligonucleotide
  Sense strand starting at position 1190 of SEQ ID NO: 587756
uugggaacuuaucugaacu

SEQ ID NO: 815833 - RNA, 19 nt, Artificial Sequence
  Description of Artificial Sequence: Synthetic oligonucleotide
  Antisense strand to SEQ ID NO: 815832
aguucagauaaguucccaa

SEQ ID NO: 815834 - RNA, 19 nt, Artificial Sequence
  Description of Artificial Sequence: Synthetic oligonucleotide
  Sense strand starting at position 1339 of SEQ ID NO: 587756
caggguaucccagaacgua

SEQ ID NO: 815835 - RNA, 19 nt, Artificial Sequence
  Description of Artificial Sequence: Synthetic oligonucleotide
  Antisense strand to SEQ ID NO: 815834
uacguucugggauacccug

SEQ ID NO: 815836 - RNA, 19 nt, Artificial Sequence
  Description of Artificial Sequence: Synthetic oligonucleotide
  Sense strand starting at position 1352 of SEQ ID NO: 587756
aacguaugcuacccgagaa

SEQ ID NO: 815837 - RNA, 19 nt, Artificial Sequence
  Description of Artificial Sequence: Synthetic oligonucleotide
  Antisense strand to SEQ ID NO: 815836
uucucggguagcauacguu

SEQ ID NO: 815838 - RNA, 19 nt, Artificial Sequence
  Description of Artificial Sequence: Synthetic oligonucleotide
  Sense strand starting at position 1439 of SEQ ID NO: 587756
cgaguucugaaaggcaaca

SEQ ID NO: 815839 - RNA, 19 nt, Artificial Sequence
  Description of Artificial Sequence: Synthetic oligonucleotide
  Antisense strand to SEQ ID NO: 815838
uguugccuuucagaacucg

SEQ ID NO: 815840 - RNA, 19 nt, Artificial Sequence
  Description of Artificial Sequence: Synthetic oligonucleotide
  Sense strand starting at position 1518 of SEQ ID NO: 587756
uauggcagccucuaagaga

SEQ ID NO: 815841 - RNA, 19 nt, Artificial Sequence
  Description of Artificial Sequence: Synthetic oligonucleotide
  Antisense strand to SEQ ID NO: 815840
ucucuuagaggcugccaua

SEQ ID NO: 815842 - RNA, 19 nt, Artificial Sequence
  Description of Artificial Sequence: Synthetic oligonucleotide
  Sense strand starting at position 2156 of SEQ ID NO: 587756
augggaagaccuggaguuu

SEQ ID NO: 815843 - RNA, 19 nt, Artificial Sequence
  Description of Artificial Sequence: Synthetic oligonucleotide
  Antisense strand to SEQ ID NO: 815842
aaacuccaggucuucccau

SEQ ID NO: 815844 - RNA, 19 nt, Artificial Sequence
  Description of Artificial Sequence: Synthetic oligonucleotide
  Sense strand starting at position 2203 of SEQ ID NO: 587756
aguguuuaucuggaauccu

SEQ ID NO: 815845 - RNA, 19 nt, Artificial Sequence
  Description of Artificial Sequence: Synthetic oligonucleotide
  Antisense strand to SEQ ID NO: 815844
aggauuccagauaaacacu

SEQ ID NO: 815846 - RNA, 19 nt, Artificial Sequence
  Description of Artificial Sequence: Synthetic oligonucleotide
  Sense strand starting at position 2212 of SEQ ID NO: 587756
cuggaauccuuucccuaga

SEQ ID NO: 815847 - RNA, 19 nt, Artificial Sequence
  Description of Artificial Sequence: Synthetic oligonucleotide
  Antisense strand to SEQ ID NO: 815846
ucuagggaaaggauuccag

SEQ ID NO: 815848 - RNA, 19 nt, Artificial Sequence
  Description of Artificial Sequence: Synthetic oligonucleotide
  Sense strand starting at position 2213 of SEQ ID NO: 587756
uggaauccuuucccuagaa

SEQ ID NO: 815849 - RNA, 19 nt, Artificial Sequence
  Description of Artificial Sequence: Synthetic oligonucleotide
  Antisense strand to SEQ ID NO: 815848
uucuagggaaaggauucca

SEQ ID NO: 815850 - RNA, 19 nt, Artificial Sequence
  Description of Artificial Sequence: Synthetic oligonucleotide
  Sense strand starting at position 2214 of SEQ ID NO: 587756
ggaauccuuucccuagaag

SEQ ID NO: 815851 - RNA, 19 nt, Artificial Sequence
  Description of Artificial Sequence: Synthetic oligonucleotide
  Antisense strand to SEQ ID NO: 815850
cuucuagggaaaggauucc

SEQ ID NO: 815852 - RNA, 19 nt, Artificial Sequence
  Description of Artificial Sequence: Synthetic oligonucleotide
  Sense strand starting at position 2498 of SEQ ID NO: 587756
ccugccaaccagugucaaa

SEQ ID NO: 815853 - RNA, 19 nt, Artificial Sequence
  Description of Artificial Sequence: Synthetic oligonucleotide
  Antisense strand to SEQ ID NO: 815852
uuugacacugguuggcagg

SEQ ID NO: 815854 - RNA, 19 nt, Artificial Sequence
  Description of Artificial Sequence: Synthetic oligonucleotide
  Sense strand starting at position 2655 of SEQ ID NO: 587756
uuuacagucugcuugagaa

SEQ ID NO: 815855 - RNA, 19 nt, Artificial Sequence
  Description of Artificial Sequence: Synthetic oligonucleotide
  Antisense strand to SEQ ID NO: 815854
uucucaagcagacuguaaa

SEQ ID NO: 815856 - RNA, 19 nt, Artificial Sequence
  Description of Artificial Sequence: Synthetic oligonucleotide
  Sense strand starting at position 2657 of SEQ ID NO: 587756
uacagucugcuugagaaau

SEQ ID NO: 815857 - RNA, 19 nt, Artificial Sequence
  Description of Artificial Sequence: Synthetic oligonucleotide
  Antisense strand to SEQ ID NO: 815856
auuucucaagcagacugua

SEQ ID NO: 815858 - RNA, 19 nt, Artificial Sequence
  Description of Artificial Sequence: Synthetic oligonucleotide
  Sense strand starting at position 2680 of SEQ ID NO: 587756
augucacaucagcaauagu

SEQ ID NO: 815859 - RNA, 19 nt, Artificial Sequence
  Description of Artificial Sequence: Synthetic oligonucleotide
  Antisense strand to SEQ ID NO: 815858
acuauugcugaugugacau

SEQ ID NO: 815860 - RNA, 19 nt, Artificial Sequence
  Description of Artificial Sequence: Synthetic oligonucleotide
  Sense strand starting at position 2734 of SEQ ID NO: 587756
acugcaauuccaggcaauu

SEQ ID NO: 815861 - RNA, 19 nt, Artificial Sequence
  Description of Artificial Sequence: Synthetic oligonucleotide
  Antisense strand to SEQ ID NO: 815860
aauugccuggaauugcagu

SEQ ID NO: 815862 - RNA, 19 nt, Artificial Sequence
  Description of Artificial Sequence: Synthetic oligonucleotide
  Sense strand starting at position 2797 of SEQ ID NO: 587756
aguugcuguagagaaaucu

SEQ ID NO: 815863 - RNA, 19 nt, Artificial Sequence
  Description of Artificial Sequence: Synthetic oligonucleotide
  Antisense strand to SEQ ID NO: 815862
agauuucucuacagcaacu

SEQ ID NO: 815864 - RNA, 19 nt, Artificial Sequence
  Description of Artificial Sequence: Synthetic oligonucleotide
  Sense strand starting at position 2889 of SEQ ID NO: 587756
guacacuucuagucuucua

SEQ ID NO: 815865 - RNA, 19 nt, Artificial Sequence
  Description of Artificial Sequence: Synthetic oligonucleotide
  Antisense strand to SEQ ID NO: 815864
uagaagacuagaaguguac

SEQ ID NO: 815866 - RNA, 19 nt, Artificial Sequence
  Description of Artificial Sequence: Synthetic oligonucleotide
  Sense strand starting at position 2986 of SEQ ID NO: 587756
guuuccuuacaauaucagu

SEQ ID NO: 815867 - RNA, 19 nt, Artificial Sequence
  Description of Artificial Sequence: Synthetic oligonucleotide
  Antisense strand to SEQ ID NO: 815866
acugauauuguaaggaaac

SEQ ID NO: 815868 - RNA, 19 nt, Artificial Sequence
  Description of Artificial Sequence: Synthetic oligonucleotide
  Sense strand starting at position 2991 of SEQ ID NO: 587756
cuuacaauaucaguguaua

SEQ ID NO: 815869 - RNA, 19 nt, Artificial Sequence
  Description of Artificial Sequence: Synthetic oligonucleotide
  Antisense strand to SEQ ID NO: 815868
uauacacugauauuguaag

SEQ ID NO: 815870 - RNA, 19 nt, Artificial Sequence
  Description of Artificial Sequence: Synthetic oligonucleotide
  Sense strand starting at position 2994 of SEQ ID NO: 587756
acaauaucaguguauaucu

SEQ ID NO: 815871 - RNA, 19 nt, Artificial Sequence
  Description of Artificial Sequence: Synthetic oligonucleotide
  Antisense strand to SEQ ID NO: 815870
agauauacacugauauugu

SEQ ID NO: 815872 - RNA, 19 nt, Artificial Sequence
  Description of Artificial Sequence: Synthetic oligonucleotide
  Sense strand starting at position 2999 of SEQ ID NO: 587756
aucaguguauaucuuaagu

SEQ ID NO: 815873 - RNA, 19 nt, Artificial Sequence
  Description of Artificial Sequence: Synthetic oligonucleotide
  Antisense strand to SEQ ID NO: 815872
acuuaagauauacacugau

SEQ ID NO: 815874 - RNA, 19 nt, Artificial Sequence
  Description of Artificial Sequence: Synthetic oligonucleotide
  Sense strand starting at position 3012 of SEQ ID NO: 587756
uuaaguuaugcuuauugga

SEQ ID NO: 815875 - RNA, 19 nt, Artificial Sequence
  Description of Artificial Sequence: Synthetic oligonucleotide
  Antisense strand to SEQ ID NO: 815874
uccaauaagcauaacuuaa

SEQ ID NO: 815876 - RNA, 19 nt, Artificial Sequence
  Description of Artificial Sequence: Synthetic oligonucleotide
  Sense strand starting at position 3014 of SEQ ID NO: 587756
aaguuaugcuuauuggaaa

SEQ ID NO: 815877 - RNA, 19 nt, Artificial Sequence
  Description of Artificial Sequence: Synthetic oligonucleotide
  Antisense strand to SEQ ID NO: 815876
uuuccaauaagcauaacuu

SEQ ID NO: 815878 - RNA, 19 nt, Artificial Sequence
  Description of Artificial Sequence: Synthetic oligonucleotide
  Sense strand starting at position 3028 of SEQ ID NO: 587756
ggaaaucuguaauucuucu

SEQ ID NO: 815879 - RNA, 19 nt, Artificial Sequence
  Description of Artificial Sequence: Synthetic oligonucleotide
  Antisense strand to SEQ ID NO: 815878
agaagaauuacagauuucc

SEQ ID NO: 815880 - RNA, 19 nt, Artificial Sequence
  Description of Artificial Sequence: Synthetic oligonucleotide
  Sense strand starting at position 3103 of SEQ ID NO: 587756
acuaaucugguagaucuuu

SEQ ID NO: 815881 - RNA, 19 nt, Artificial Sequence
  Description of Artificial Sequence: Synthetic oligonucleotide
  Antisense strand to SEQ ID NO: 815880
aaagaucuaccagauuagu

SEQ ID NO: 815882 - RNA, 19 nt, Artificial Sequence
  Description of Artificial Sequence: Synthetic oligonucleotide
  Sense strand starting at position 3244 of SEQ ID NO: 587756
cuaucugauuaguuaagcu

SEQ ID NO: 815883 - RNA, 19 nt, Artificial Sequence
  Description of Artificial Sequence: Synthetic oligonucleotide
  Antisense strand to SEQ ID NO: 815882
agcuuaacuaaucagauag

SEQ ID NO: 815884 - RNA, 19 nt, Artificial Sequence
  Description of Artificial Sequence: Synthetic oligonucleotide
  Sense strand starting at position 3310 of SEQ ID NO: 587756
auauaugacuuguccuagu

SEQ ID NO: 815885 - RNA, 19 nt, Artificial Sequence
  Description of Artificial Sequence: Synthetic oligonucleotide
  Antisense strand to SEQ ID NO: 815884
acuaggacaagucauauau

SEQ ID NO: 815886 - RNA, 19 nt, Artificial Sequence
  Description of Artificial Sequence: Synthetic oligonucleotide
  Sense strand starting at position 3357 of SEQ ID NO: 587756
aucucuauuccaggugaua

SEQ ID NO: 815887 - RNA, 19 nt, Artificial Sequence
  Description of Artificial Sequence: Synthetic oligonucleotide
  Antisense strand to SEQ ID NO: 815886
uaucaccuggaauagagau

SEQ ID NO: 815888 - RNA, 19 nt, Artificial Sequence
  Description of Artificial Sequence: Synthetic oligonucleotide
  Sense strand starting at position 3445 of SEQ ID NO: 587756
guuacaaauguagggaauu

SEQ ID NO: 815889 - RNA, 19 nt, Artificial Sequence
  Description of Artificial Sequence: Synthetic oligonucleotide
  Antisense strand to SEQ ID NO: 815888
aauucccuacauuuguaac

SEQ ID NO: 815890 - RNA, 19 nt, Artificial Sequence
  Description of Artificial Sequence: Synthetic oligonucleotide
  Sense strand starting at position 3722 of SEQ ID NO: 587756
cccgccuuggccuauuaaa

SEQ ID NO: 815891 - RNA, 19 nt, Artificial Sequence
  Description of Artificial Sequence: Synthetic oligonucleotide
  Antisense strand to SEQ ID NO: 815890
uuuaauaggccaaggcggg

SEQ ID NO: 815892 - RNA, 19 nt, Artificial Sequence
  Description of Artificial Sequence: Synthetic oligonucleotide
  Sense strand starting at position 3730 of SEQ ID NO: 587756
ggccuauuaaagugcuaga

SEQ ID NO: 815893 - RNA, 19 nt, Artificial Sequence
  Description of Artificial Sequence: Synthetic oligonucleotide
  Antisense strand to SEQ ID NO: 815892
ucuagcacuuuaauaggcc

SEQ ID NO: 815894 - RNA, 19 nt, Artificial Sequence
  Description of Artificial Sequence: Synthetic oligonucleotide
  Sense strand starting at position 37 of SEQ ID NO: 587757
ggccuacucucaguauuug

SEQ ID NO: 815895 - RNA, 19 nt, Artificial Sequence
  Description of Artificial Sequence: Synthetic oligonucleotide
  Antisense strand to SEQ ID NO: 815894
caaauacugagaguaggcc

SEQ ID NO: 815896 - RNA, 19 nt, Artificial Sequence
  Description of Artificial Sequence: Synthetic oligonucleotide
  Sense strand starting at position 103 of SEQ ID NO: 587757
uuguauuucuccucgugaa

SEQ ID NO: 815897 - RNA, 19 nt, Artificial Sequence
  Description of Artificial Sequence: Synthetic oligonucleotide
  Antisense strand to SEQ ID NO: 815896
uucacgaggagaaauacaa

SEQ ID NO: 815898 - RNA, 19 nt, Artificial Sequence
  Description of Artificial Sequence: Synthetic oligonucleotide
  Sense strand starting at position 104 of SEQ ID NO: 587757
uguauuucuccucgugaac

SEQ ID NO: 815899 - RNA, 19 nt, Artificial Sequence
  Description of Artificial Sequence: Synthetic oligonucleotide
  Antisense strand to SEQ ID NO: 815898
guucacgaggagaaauaca

SEQ ID NO: 815900 - RNA, 19 nt, Artificial Sequence
  Description of Artificial Sequence: Synthetic oligonucleotide
  Sense strand starting at position 124 of SEQ ID NO: 587757
uuagcuuguccauaaacug

SEQ ID NO: 815901 - RNA, 19 nt, Artificial Sequence
  Description of Artificial Sequence: Synthetic oligonucleotide
  Antisense strand to SEQ ID NO: 815900
caguuuauggacaagcuaa

SEQ ID NO: 815902 - RNA, 19 nt, Artificial Sequence
  Description of Artificial Sequence: Synthetic oligonucleotide
  Sense strand starting at position 376 of SEQ ID NO: 587757
guauguauaguaggauaua

SEQ ID NO: 815903 - RNA, 19 nt, Artificial Sequence
  Description of Artificial Sequence: Synthetic oligonucleotide
  Antisense strand to SEQ ID NO: 815902
uauauccuacuauacauac

SEQ ID NO: 815904 - RNA, 19 nt, Artificial Sequence
  Description of Artificial Sequence: Synthetic oligonucleotide
  Sense strand starting at position 388 of SEQ ID NO: 587757
ggauauacggucuagguuu

SEQ ID NO: 815905 - RNA, 19 nt, Artificial Sequence
  Description of Artificial Sequence: Synthetic oligonucleotide
  Antisense strand to SEQ ID NO: 815904
aaaccuagaccguauaucc

SEQ ID NO: 815906 - RNA, 19 nt, Artificial Sequence
  Description of Artificial Sequence: Synthetic oligonucleotide
  Sense strand starting at position 400 of SEQ ID NO: 587757
uagguuucuguaggaauga

SEQ ID NO: 815907 - RNA, 19 nt, Artificial Sequence
  Description of Artificial Sequence: Synthetic oligonucleotide
  Antisense strand to SEQ ID NO: 815906
ucauuccuacagaaaccua

SEQ ID NO: 815908 - RNA, 19 nt, Artificial Sequence
  Description of Artificial Sequence: Synthetic oligonucleotide
  Sense strand starting at position 416 of SEQ ID NO: 587757
ugaugaaauugcuuaagga

SEQ ID NO: 815909 - RNA, 19 nt, Artificial Sequence
  Description of Artificial Sequence: Synthetic oligonucleotide
  Antisense strand to SEQ ID NO: 815908
uccuuaagcaauuucauca

SEQ ID NO: 815910 - RNA, 19 nt, Artificial Sequence
  Description of Artificial Sequence: Synthetic oligonucleotide
  Sense strand starting at position 544 of SEQ ID NO: 587757
uaugcauugguccaugaaa

SEQ ID NO: 815911 - RNA, 19 nt, Artificial Sequence
  Description of Artificial Sequence: Synthetic oligonucleotide
  Antisense strand to SEQ ID NO: 815910
uuucauggaccaaugcaua

SEQ ID NO: 815912 - RNA, 19 nt, Artificial Sequence
  Description of Artificial Sequence: Synthetic oligonucleotide
  Sense strand starting at position 1044 of SEQ ID NO: 587757
gucuacugaccucaacgau

SEQ ID NO: 815913 - RNA, 19 nt, Artificial Sequence
  Description of Artificial Sequence: Synthetic oligonucleotide
  Antisense strand to SEQ ID NO: 815912
aucguugaggucaguagac

SEQ ID NO: 815914 - RNA, 19 nt, Artificial Sequence
  Description of Artificial Sequence: Synthetic oligonucleotide
  Sense strand starting at position 1081 of SEQ ID NO: 587757
aguguucuacuuuauaacu

SEQ ID NO: 815915 - RNA, 19 nt, Artificial Sequence
  Description of Artificial Sequence: Synthetic oligonucleotide
  Antisense strand to SEQ ID NO: 815914
aguuauaaaguagaacacu

SEQ ID NO: 815916 - RNA, 19 nt, Artificial Sequence
  Description of Artificial Sequence: Synthetic oligonucleotide
  Sense strand starting at position 1551 of SEQ ID NO: 587757
auguuaauuuccgcaggau

SEQ ID NO: 815917 - RNA, 19 nt, Artificial Sequence
  Description of Artificial Sequence: Synthetic oligonucleotide
  Antisense strand to SEQ ID NO: 815916
auccugcggaaauuaacau

SEQ ID NO: 815918 - RNA, 19 nt, Artificial Sequence
  Description of Artificial Sequence: Synthetic oligonucleotide
  Sense strand starting at position 1592 of SEQ ID NO: 587757
gggauacagaucugacugu

SEQ ID NO: 815919 - RNA, 19 nt, Artificial Sequence
  Description of Artificial Sequence: Synthetic oligonucleotide
  Antisense strand to SEQ ID NO: 815918
acagucagaucuguauccc

SEQ ID NO: 815920 - RNA, 19 nt, Artificial Sequence
  Description of Artificial Sequence: Synthetic oligonucleotide
  Sense strand starting at position 1596 of SEQ ID NO: 587757
uacagaucugacuguaaag

SEQ ID NO: 815921 - RNA, 19 nt, Artificial Sequence
  Description of Artificial Sequence: Synthetic oligonucleotide
  Antisense strand to SEQ ID NO: 815920
cuuuacagucagaucugua

SEQ ID NO: 815922 - RNA, 19 nt, Artificial Sequence
  Description of Artificial Sequence: Synthetic oligonucleotide
  Sense strand starting at position 1598 of SEQ ID NO: 587757
cagaucugacuguaaagcu

SEQ ID NO: 815923 - RNA, 19 nt, Artificial Sequence
  Description of Artificial Sequence: Synthetic oligonucleotide
  Antisense strand to SEQ ID NO: 815922
agcuuuacagucagaucug

SEQ ID NO: 815924 - RNA, 19 nt, Artificial Sequence
  Description of Artificial Sequence: Synthetic oligonucleotide
  Sense strand starting at position 1887 of SEQ ID NO: 587757
ccgccaauucgcuuaccua

SEQ ID NO: 815925 - RNA, 19 nt, Artificial Sequence
  Description of Artificial Sequence: Synthetic oligonucleotide
  Antisense strand to SEQ ID NO: 815924
uagguaagcgaauuggcgg

SEQ ID NO: 815926 - RNA, 19 nt, Artificial Sequence
  Description of Artificial Sequence: Synthetic oligonucleotide
  Sense strand starting at position 2209 of SEQ ID NO: 587757
aauguagugguacaaagua

SEQ ID NO: 815927 - RNA, 19 nt, Artificial Sequence
  Description of Artificial Sequence: Synthetic oligonucleotide
  Antisense strand to SEQ ID NO: 815926
uacuuuguaccacuacauu

SEQ ID NO: 815928 - RNA, 19 nt, Artificial Sequence
  Description of Artificial Sequence: Synthetic oligonucleotide
  Sense strand starting at position 2267 of SEQ ID NO: 587757
agaugacaguguccgagaa

SEQ ID NO: 815929 - RNA, 19 nt, Artificial Sequence
  Description of Artificial Sequence: Synthetic oligonucleotide
  Antisense strand to SEQ ID NO: 815928
uucucggacacugucaucu

SEQ ID NO: 815930 - RNA, 19 nt, Artificial Sequence
  Description of Artificial Sequence: Synthetic oligonucleotide
  Sense strand starting at position 2271 of SEQ ID NO: 587757
gacaguguccgagaaguac

SEQ ID NO: 815931 - RNA, 19 nt, Artificial Sequence
  Description of Artificial Sequence: Synthetic oligonucleotide
  Antisense strand to SEQ ID NO: 815930
guacuucucggacacuguc

SEQ ID NO: 815932 - RNA, 19 nt, Artificial Sequence
  Description of Artificial Sequence: Synthetic oligonucleotide
  Sense strand starting at position 2486 of SEQ ID NO: 587757
ucgcccaauccguuuacuu

SEQ ID NO: 815933 - RNA, 19 nt, Artificial Sequence
  Description of Artificial Sequence: Synthetic oligonucleotide
  Antisense strand to SEQ ID NO: 815932
aaguaaacggauugggcga

SEQ ID NO: 815934 - RNA, 19 nt, Artificial Sequence
  Description of Artificial Sequence: Synthetic oligonucleotide
  Sense strand starting at position 2519 of SEQ ID NO: 587757
guuagugugacgguagcua

SEQ ID NO: 815935 - RNA, 19 nt, Artificial Sequence
  Description of Artificial Sequence: Synthetic oligonucleotide
  Antisense strand to SEQ ID NO: 815934
uagcuaccgucacacuaac

SEQ ID NO: 815936 - RNA, 19 nt, Artificial Sequence
  Description of Artificial Sequence: Synthetic oligonucleotide
  Sense strand starting at position 2573 of SEQ ID NO: 587757
guagcuuucgcugucuacu

SEQ ID NO: 815937 - RNA, 19 nt, Artificial Sequence
  Description of Artificial Sequence: Synthetic oligonucleotide
  Antisense strand to SEQ ID NO: 815936
aguagacagcgaaagcuac

SEQ ID NO: 815938 - RNA, 19 nt, Artificial Sequence
  Description of Artificial Sequence: Synthetic oligonucleotide
  Sense strand starting at position 2686 of SEQ ID NO: 587757
uggaucaguuggguucaga

SEQ ID NO: 815939 - RNA, 19 nt, Artificial Sequence
  Description of Artificial Sequence: Synthetic oligonucleotide
  Antisense strand to SEQ ID NO: 815938
ucugaacccaacugaucca

SEQ ID NO: 815940 - RNA, 19 nt, Artificial Sequence
  Description of Artificial Sequence: Synthetic oligonucleotide
  Sense strand starting at position 2743 of SEQ ID NO: 587757
uacuuaguagggugaagaa

SEQ ID NO: 815941 - RNA, 19 nt, Artificial Sequence
  Description of Artificial Sequence: Synthetic oligonucleotide
  Antisense strand to SEQ ID NO: 815940
uucuucacccuacuaagua

SEQ ID NO: 815942 - RNA, 19 nt, Artificial Sequence
  Description of Artificial Sequence: Synthetic oligonucleotide
  Sense strand starting at position 2913 of SEQ ID NO: 587757
aucugagaacuuugagcuu

SEQ ID NO: 815943 - RNA, 19 nt, Artificial Sequence
  Description of Artificial Sequence: Synthetic oligonucleotide
  Antisense strand to SEQ ID NO: 815942
aagcucaaaguucucagau

SEQ ID NO: 815944 - RNA, 19 nt, Artificial Sequence
  Description of Artificial Sequence: Synthetic oligonucleotide
  Sense strand starting at position 2978 of SEQ ID NO: 587757
agaccagcuugagagauuu

SEQ ID NO: 815945 - RNA, 19 nt, Artificial Sequence
  Description of Artificial Sequence: Synthetic oligonucleotide
  Antisense strand to SEQ ID NO: 815944
aaaucucucaagcuggucu

SEQ ID NO: 815946 - RNA, 19 nt, Artificial Sequence
  Description of Artificial Sequence: Synthetic oligonucleotide
  Sense strand starting at position 3000 of SEQ ID NO: 587757
uugaucuuuccaggaagau

SEQ ID NO: 815947 - RNA, 19 nt, Artificial Sequence
  Description of Artificial Sequence: Synthetic oligonucleotide
  Antisense strand to SEQ ID NO: 815946
aucuuccuggaaagaucaa

SEQ ID NO: 815948 - RNA, 19 nt, Artificial Sequence
  Description of Artificial Sequence: Synthetic oligonucleotide
  Sense strand starting at position 3009 of SEQ ID NO: 587757
ccaggaagaugccauuuaa

SEQ ID NO: 815949 - RNA, 19 nt, Artificial Sequence
  Description of Artificial Sequence: Synthetic oligonucleotide
  Antisense strand to SEQ ID NO: 815948
uuaaauggcaucuuccugg

SEQ ID NO: 815950 - RNA, 19 nt, Artificial Sequence
  Description of Artificial Sequence: Synthetic oligonucleotide
  Sense strand starting at position 3168 of SEQ ID NO: 587757
uaggcuucccuguaagaac

SEQ ID NO: 815951 - RNA, 19 nt, Artificial Sequence
  Description of Artificial Sequence: Synthetic oligonucleotide
  Antisense strand to SEQ ID NO: 815950
guucuuacagggaagccua

SEQ ID NO: 815952 - RNA, 19 nt, Artificial Sequence
  Description of Artificial Sequence: Synthetic oligonucleotide
  Sense strand starting at position 3204 of SEQ ID NO: 587757
guuauccuaagcgaaagau

SEQ ID NO: 815953 - RNA, 19 nt, Artificial Sequence
  Description of Artificial Sequence: Synthetic oligonucleotide
  Antisense strand to SEQ ID NO: 815952
aucuuucgcuuaggauaac

SEQ ID NO: 815954 - RNA, 19 nt, Artificial Sequence
  Description of Artificial Sequence: Synthetic oligonucleotide
  Sense strand starting at position 3300 of SEQ ID NO: 587757
auaauucucgugcagaaca

SEQ ID NO: 815955 - RNA, 19 nt, Artificial Sequence
  Description of Artificial Sequence: Synthetic oligonucleotide
  Antisense strand to SEQ ID NO: 815954
uguucugcacgagaauuau

SEQ ID NO: 815956 - RNA, 19 nt, Artificial Sequence
  Description of Artificial Sequence: Synthetic oligonucleotide
  Sense strand starting at position 3313 of SEQ ID NO: 587757
agaacaauuuauggagauc

SEQ ID NO: 815957 - RNA, 19 nt, Artificial Sequence
  Description of Artificial Sequence: Synthetic oligonucleotide
  Antisense strand to SEQ ID NO: 815956
gaucuccauaaauuguucu

SEQ ID NO: 815958 - RNA, 19 nt, Artificial Sequence
  Description of Artificial Sequence: Synthetic oligonucleotide
  Sense strand starting at position 3476 of SEQ ID NO: 587757
ucaacagagacugguaguu

SEQ ID NO: 815959 - RNA, 19 nt, Artificial Sequence
  Description of Artificial Sequence: Synthetic oligonucleotide
  Antisense strand to SEQ ID NO: 815958
aacuaccagucucuguuga

SEQ ID NO: 815960 - RNA, 19 nt, Artificial Sequence
  Description of Artificial Sequence: Synthetic oligonucleotide
  Sense strand starting at position 3495 of SEQ ID NO: 587757
cuaggaucacuugggaguu

SEQ ID NO: 815961 - RNA, 19 nt, Artificial Sequence
  Description of Artificial Sequence: Synthetic oligonucleotide
  Antisense strand to SEQ ID NO: 815960
aacucccaagugauccuag

SEQ ID NO: 815962 - RNA, 19 nt, Artificial Sequence
  Description of Artificial Sequence: Synthetic oligonucleotide
  Sense strand starting at position 3651 of SEQ ID NO: 587757
cuuuauuaagaagguuaug

SEQ ID NO: 815963 - RNA, 19 nt, Artificial Sequence
  Description of Artificial Sequence: Synthetic oligonucleotide
  Antisense strand to SEQ ID NO: 815962
cauaaccuucuuaauaaag

SEQ ID NO: 815964 - RNA, 19 nt, Artificial Sequence
  Description of Artificial Sequence: Synthetic oligonucleotide
  Sense strand starting at position 3739 of SEQ ID NO: 587757
auauccagauagcuugaau

SEQ ID NO: 815965 - RNA, 19 nt, Artificial Sequence
  Description of Artificial Sequence: Synthetic oligonucleotide
  Antisense strand to SEQ ID NO: 815964
auucaagcuaucuggauau

SEQ ID NO: 815966 - RNA, 19 nt, Artificial Sequence
  Description of Artificial Sequence: Synthetic oligonucleotide
  Sense strand starting at position 3742 of SEQ ID NO: 587757
uccagauagcuugaauauc

SEQ ID NO: 815967 - RNA, 19 nt, Artificial Sequence
  Description of Artificial Sequence: Synthetic oligonucleotide
  Antisense strand to SEQ ID NO: 815966
gauauucaagcuaucugga

SEQ ID NO: 815968 - RNA, 19 nt, Artificial Sequence
  Description of Artificial Sequence: Synthetic oligonucleotide
  Sense strand starting at position 3753 of SEQ ID NO: 587757
ugaauaucaugguaauuug

SEQ ID NO: 815969 - RNA, 19 nt, Artificial Sequence
  Description of Artificial Sequence: Synthetic oligonucleotide
  Antisense strand to SEQ ID NO: 815968
caaauuaccaugauauuca

SEQ ID NO: 815970 - RNA, 19 nt, Artificial Sequence
  Description of Artificial Sequence: Synthetic oligonucleotide
  Sense strand starting at position 3761 of SEQ ID NO: 587757
augguaauuugggaaaucu

SEQ ID NO: 815971 - RNA, 19 nt, Artificial Sequence
  Description of Artificial Sequence: Synthetic oligonucleotide
  Antisense strand to SEQ ID NO: 815970
agauuucccaaauuaccau

SEQ ID NO: 815972 - RNA, 19 nt, Artificial Sequence
  Description of Artificial Sequence: Synthetic oligonucleotide
  Sense strand starting at position 3790 of SEQ ID NO: 587757
uuuauuggauggucccaaa

SEQ ID NO: 815973 - RNA, 19 nt, Artificial Sequence
  Description of Artificial Sequence: Synthetic oligonucleotide
  Antisense strand to SEQ ID NO: 815972
uuugggaccauccaauaaa

SEQ ID NO: 815974 - RNA, 19 nt, Artificial Sequence
  Description of Artificial Sequence: Synthetic oligonucleotide
  Sense strand starting at position 67 of SEQ ID NO: 587758
ugugguagcaguggaguua

SEQ ID NO: 815975 - RNA, 19 nt, Artificial Sequence
  Description of Artificial Sequence: Synthetic oligonucleotide
  Antisense strand to SEQ ID NO: 815974
uaacuccacugcuaccaca

SEQ ID NO: 815976 - RNA, 19 nt, Artificial Sequence
  Description of Artificial Sequence: Synthetic oligonucleotide
  Sense strand starting at position 130 of SEQ ID NO: 587758
agguucugccucugaaaga

SEQ ID NO: 815977 - RNA, 19 nt, Artificial Sequence
  Description of Artificial Sequence: Synthetic oligonucleotide
  Antisense strand to SEQ ID NO: 815976
ucuuucagaggcagaaccu

SEQ ID NO: 815978 - RNA, 19 nt, Artificial Sequence
  Description of Artificial Sequence: Synthetic oligonucleotide
  Sense strand starting at position 175 of SEQ ID NO: 587758
aggaauuucucuggucuca

SEQ ID NO: 815979 - RNA, 19 nt, Artificial Sequence
  Description of Artificial Sequence: Synthetic oligonucleotide
  Antisense strand to SEQ ID NO: 815978
ugagaccagagaaauuccu

SEQ ID NO: 815980 - RNA, 19 nt, Artificial Sequence
  Description of Artificial Sequence: Synthetic oligonucleotide
  Sense strand starting at position 272 of SEQ ID NO: 587758
ggccauagaucugccaaca

SEQ ID NO: 815981 - RNA, 19 nt, Artificial Sequence
  Description of Artificial Sequence: Synthetic oligonucleotide
  Antisense strand to SEQ ID NO: 815980
uguuggcagaucuauggcc

SEQ ID NO: 815982 - RNA, 19 nt, Artificial Sequence
  Description of Artificial Sequence: Synthetic oligonucleotide
  Sense strand starting at position 946 of SEQ ID NO: 587758
cggcgagacuuccucucaa

SEQ ID NO: 815983 - RNA, 19 nt, Artificial Sequence
  Description of Artificial Sequence: Synthetic oligonucleotide
  Antisense strand to SEQ ID NO: 815982
uugagaggaagucucgccg

SEQ ID NO: 815984 - RNA, 19 nt, Artificial Sequence
  Description of Artificial Sequence: Synthetic oligonucleotide
  Sense strand starting at position 1036 of SEQ ID NO: 587758
ucuugacauccacagucau

SEQ ID NO: 815985 - RNA, 19 nt, Artificial Sequence
  Description of Artificial Sequence: Synthetic oligonucleotide
  Antisense strand to SEQ ID NO: 815984
augacuguggaugucaaga

SEQ ID NO: 815986 - RNA, 19 nt, Artificial Sequence
  Description of Artificial Sequence: Synthetic oligonucleotide
  Sense strand starting at position 1152 of SEQ ID NO: 587758
ccucuaagacugcgaaguu

SEQ ID NO: 815987 - RNA, 19 nt, Artificial Sequence
  Description of Artificial Sequence: Synthetic oligonucleotide
  Antisense strand to SEQ ID NO: 815986
aacuucgcagucuuagagg

SEQ ID NO: 815988 - RNA, 19 nt, Artificial Sequence
  Description of Artificial Sequence: Synthetic oligonucleotide
  Sense strand starting at position 1317 of SEQ ID NO: 587758
uguacucaguaccuagauu

SEQ ID NO: 815989 - RNA, 19 nt, Artificial Sequence
  Description of Artificial Sequence: Synthetic oligonucleotide
  Antisense strand to SEQ ID NO: 815988
aaucuagguacugaguaca

SEQ ID NO: 815990 - RNA, 19 nt, Artificial Sequence
  Description of Artificial Sequence: Synthetic oligonucleotide
  Sense strand starting at position 1325 of SEQ ID NO: 587758
guaccuagauuugaaggua

SEQ ID NO: 815991 - RNA, 19 nt, Artificial Sequence
  Description of Artificial Sequence: Synthetic oligonucleotide
  Antisense strand to SEQ ID NO: 815990
uaccuucaaaucuagguac

SEQ ID NO: 815992 - RNA, 19 nt, Artificial Sequence
  Description of Artificial Sequence: Synthetic oligonucleotide
  Sense strand starting at position 1457 of SEQ ID NO: 587758
guaguugaguuucuuuaga

SEQ ID NO: 815993 - RNA, 19 nt, Artificial Sequence
  Description of Artificial Sequence: Synthetic oligonucleotide
  Antisense strand to SEQ ID NO: 815992
ucuaaagaaacucaacuac

SEQ ID NO: 815994 - RNA, 19 nt, Artificial Sequence
  Description of Artificial Sequence: Synthetic oligonucleotide
  Sense strand starting at position 1652 of SEQ ID NO: 587758
cgacauguugccugggaga

SEQ ID NO: 815995 - RNA, 19 nt, Artificial Sequence
  Description of Artificial Sequence: Synthetic oligonucleotide
  Antisense strand to SEQ ID NO: 815994
ucucccaggcaacaugucg

SEQ ID NO: 815996 - RNA, 19 nt, Artificial Sequence
  Description of Artificial Sequence: Synthetic oligonucleotide
  Sense strand starting at position 1654 of SEQ ID NO: 587758
acauguugccugggagaga

SEQ ID NO: 815997 - RNA, 19 nt, Artificial Sequence
  Description of Artificial Sequence: Synthetic oligonucleotide
  Antisense strand to SEQ ID NO: 815996
ucucucccaggcaacaugu

SEQ ID NO: 815998 - RNA, 19 nt, Artificial Sequence
  Description of Artificial Sequence: Synthetic oligonucleotide
  Sense strand starting at position 2034 of SEQ ID NO: 587758
gggacugggccacaguauu

SEQ ID NO: 815999 - RNA, 19 nt, Artificial Sequence
  Description of Artificial Sequence: Synthetic oligonucleotide
  Antisense strand to SEQ ID NO: 815998
aauacuguggcccaguccc

SEQ ID NO: 816000 - RNA, 19 nt, Artificial Sequence
  Description of Artificial Sequence: Synthetic oligonucleotide
  Sense strand starting at position 2142 of SEQ ID NO: 587758
aggugacuggucugggcua

SEQ ID NO: 816001 - RNA, 19 nt, Artificial Sequence
  Description of Artificial Sequence: Synthetic oligonucleotide
  Antisense strand to SEQ ID NO: 816000
uagcccagaccagucaccu

SEQ ID NO: 816002 - RNA, 19 nt, Artificial Sequence
  Description of Artificial Sequence: Synthetic oligonucleotide
  Sense strand starting at position 2336 of SEQ ID NO: 587758
gagagugagaccuggacuu

SEQ ID NO: 816003 - RNA, 19 nt, Artificial Sequence
  Description of Artificial Sequence: Synthetic oligonucleotide
  Antisense strand to SEQ ID NO: 816002
aaguccaggucucacucuc

SEQ ID NO: 816004 - RNA, 19 nt, Artificial Sequence
  Description of Artificial Sequence: Synthetic oligonucleotide
  Sense strand starting at position 2393 of SEQ ID NO: 587758
gcggguucuccauggugac

SEQ ID NO: 816005 - RNA, 19 nt, Artificial Sequence
  Description of Artificial Sequence: Synthetic oligonucleotide
  Antisense strand to SEQ ID NO: 816004
gucaccauggagaacccgc

SEQ ID NO: 816006 - RNA, 19 nt, Artificial Sequence
  Description of Artificial Sequence: Synthetic oligonucleotide
  Sense strand starting at position 2408 of SEQ ID NO: 587758
ugaccuuggaguggucauu

SEQ ID NO: 816007 - RNA, 19 nt, Artificial Sequence
  Description of Artificial Sequence: Synthetic oligonucleotide
  Antisense strand to SEQ ID NO: 816006
aaugaccacuccaagguca

SEQ ID NO: 816008 - RNA, 19 nt, Artificial Sequence
  Description of Artificial Sequence: Synthetic oligonucleotide
  Sense strand starting at position 2550 of SEQ ID NO: 587758
acccgcuucugaucacgaa

SEQ ID NO: 816009 - RNA, 19 nt, Artificial Sequence
  Description of Artificial Sequence: Synthetic oligonucleotide
  Antisense strand to SEQ ID NO: 816008
uucgugaucagaagcgggu

SEQ ID NO: 816010 - RNA, 19 nt, Artificial Sequence
  Description of Artificial Sequence: Synthetic oligonucleotide
  Sense strand starting at position 2628 of SEQ ID NO: 587758
ugcucuacugcuggaggaa

SEQ ID NO: 816011 - RNA, 19 nt, Artificial Sequence
  Description of Artificial Sequence: Synthetic oligonucleotide
  Antisense strand to SEQ ID NO: 816010
uuccuccagcaguagagca

SEQ ID NO: 816012 - RNA, 19 nt, Artificial Sequence
  Description of Artificial Sequence: Synthetic oligonucleotide
  Sense strand starting at position 2629 of SEQ ID NO: 587758
gcucuacugcuggaggaau

SEQ ID NO: 816013 - RNA, 19 nt, Artificial Sequence
  Description of Artificial Sequence: Synthetic oligonucleotide
  Antisense strand to SEQ ID NO: 816012
auuccuccagcaguagagc

SEQ ID NO: 816014 - RNA, 19 nt, Artificial Sequence
  Description of Artificial Sequence: Synthetic oligonucleotide
  Sense strand starting at position 2664 of SEQ ID NO: 587758
gacuccagcguuugugauu

SEQ ID NO: 816015 - RNA, 19 nt, Artificial Sequence
  Description of Artificial Sequence: Synthetic oligonucleotide
  Antisense strand to SEQ ID NO: 816014
aaucacaaacgcuggaguc

SEQ ID NO: 816016 - RNA, 19 nt, Artificial Sequence
  Description of Artificial Sequence: Synthetic oligonucleotide
  Sense strand starting at position 2669 of SEQ ID NO: 587758
cagcguuugugauuuaaca

SEQ ID NO: 816017 - RNA, 19 nt, Artificial Sequence
  Description of Artificial Sequence: Synthetic oligonucleotide
  Antisense strand to SEQ ID NO: 816016
uguuaaaucacaaacgcug

SEQ ID NO: 816018 - RNA, 19 nt, Artificial Sequence
  Description of Artificial Sequence: Synthetic oligonucleotide
  Sense strand starting at position 2770 of SEQ ID NO: 587758
ggaaaucauuucuaccaga

SEQ ID NO: 816019 - RNA, 19 nt, Artificial Sequence
  Description of Artificial Sequence: Synthetic oligonucleotide
  Antisense strand to SEQ ID NO: 816018
ucugguagaaaugauuucc

SEQ ID NO: 816020 - RNA, 19 nt, Artificial Sequence
  Description of Artificial Sequence: Synthetic oligonucleotide
  Sense strand starting at position 2785 of SEQ ID NO: 587758
cagaaugccacguagagua

SEQ ID NO: 816021 - RNA, 19 nt, Artificial Sequence
  Description of Artificial Sequence: Synthetic oligonucleotide
  Antisense strand to SEQ ID NO: 816020
uacucuacguggcauucug

SEQ ID NO: 816022 - RNA, 19 nt, Artificial Sequence
  Description of Artificial Sequence: Synthetic oligonucleotide
  Sense strand starting at position 2818 of SEQ ID NO: 587758
uuuguaauguaucuaguag

SEQ ID NO: 816023 - RNA, 19 nt, Artificial Sequence
  Description of Artificial Sequence: Synthetic oligonucleotide
  Antisense strand to SEQ ID NO: 816022
cuacuagauacauuacaaa

SEQ ID NO: 816024 - RNA, 19 nt, Artificial Sequence
  Description of Artificial Sequence: Synthetic oligonucleotide
  Sense strand starting at position 2819 of SEQ ID NO: 587758
uuguaauguaucuaguagu

SEQ ID NO: 816025 - RNA, 19 nt, Artificial Sequence
  Description of Artificial Sequence: Synthetic oligonucleotide
  Antisense strand to SEQ ID NO: 816024
acuacuagauacauuacaa

SEQ ID NO: 816026 - RNA, 19 nt, Artificial Sequence
  Description of Artificial Sequence: Synthetic oligonucleotide
  Sense strand starting at position 3237 of SEQ ID NO: 587758
uaacauuucucuguugcga

SEQ ID NO: 816027 - RNA, 19 nt, Artificial Sequence
  Description of Artificial Sequence: Synthetic oligonucleotide
  Antisense strand to SEQ ID NO: 816026
ucgcaacagagaaauguua

SEQ ID NO: 816028 - RNA, 19 nt, Artificial Sequence
  Description of Artificial Sequence: Synthetic oligonucleotide
  Sense strand starting at position 3256 of SEQ ID NO: 587758
caucaaagacugcguaguu

SEQ ID NO: 816029 - RNA, 19 nt, Artificial Sequence
  Description of Artificial Sequence: Synthetic oligonucleotide
  Antisense strand to SEQ ID NO: 816028
aacuacgcagucuuugaug

SEQ ID NO: 816030 - RNA, 19 nt, Artificial Sequence
  Description of Artificial Sequence: Synthetic oligonucleotide
  Sense strand starting at position 3283 of SEQ ID NO: 587758
gcuguaucaugauuuaagu

SEQ ID NO: 816031 - RNA, 19 nt, Artificial Sequence
  Description of Artificial Sequence: Synthetic oligonucleotide
  Antisense strand to SEQ ID NO: 816030
acuuaaaucaugauacagc

SEQ ID NO: 816032 - RNA, 19 nt, Artificial Sequence
  Description of Artificial Sequence: Synthetic oligonucleotide
  Sense strand starting at position 3300 of SEQ ID NO: 587758
guauuucccugauuguuuc

SEQ ID NO: 816033 - RNA, 19 nt, Artificial Sequence
  Description of Artificial Sequence: Synthetic oligonucleotide
  Antisense strand to SEQ ID NO: 816032
gaaacaaucagggaaauac

SEQ ID NO: 816034 - RNA, 19 nt, Artificial Sequence
  Description of Artificial Sequence: Synthetic oligonucleotide
  Sense strand starting at position 3347 of SEQ ID NO: 587758
gugaaugucugguacauuu

SEQ ID NO: 816035 - RNA, 19 nt, Artificial Sequence
  Description of Artificial Sequence: Synthetic oligonucleotide
  Antisense strand to SEQ ID NO: 816034
aaauguaccagacauucac

SEQ ID NO: 816036 - RNA, 19 nt, Artificial Sequence
  Description of Artificial Sequence: Synthetic oligonucleotide
  Sense strand starting at position 3408 of SEQ ID NO: 587758
uggauuauauucccgggau

SEQ ID NO: 816037 - RNA, 19 nt, Artificial Sequence
  Description of Artificial Sequence: Synthetic oligonucleotide
  Antisense strand to SEQ ID NO: 816036
aucccgggaauauaaucca

SEQ ID NO: 816038 - RNA, 19 nt, Artificial Sequence
  Description of Artificial Sequence: Synthetic oligonucleotide
  Sense strand starting at position 3410 of SEQ ID NO: 587758
gauuauauucccgggauag

SEQ ID NO: 816039 - RNA, 19 nt, Artificial Sequence
  Description of Artificial Sequence: Synthetic oligonucleotide
  Antisense strand to SEQ ID NO: 816038
cuaucccgggaauauaauc

SEQ ID NO: 816040 - RNA, 19 nt, Artificial Sequence
  Description of Artificial Sequence: Synthetic oligonucleotide
  Sense strand starting at position 3411 of SEQ ID NO: 587758
auuauauucccgggauaga

SEQ ID NO: 816041 - RNA, 19 nt, Artificial Sequence
  Description of Artificial Sequence: Synthetic oligonucleotide
  Antisense strand to SEQ ID NO: 816040
ucuaucccgggaauauaau

SEQ ID NO: 816042 - RNA, 19 nt, Artificial Sequence
  Description of Artificial Sequence: Synthetic oligonucleotide
  Sense strand starting at position 3538 of SEQ ID NO: 587758
gggaggaucgcuugaaagg

SEQ ID NO: 816043 - RNA, 19 nt, Artificial Sequence
  Description of Artificial Sequence: Synthetic oligonucleotide
  Antisense strand to SEQ ID NO: 816042
ccuuucaagcgauccuccc

SEQ ID NO: 816044 - RNA, 19 nt, Artificial Sequence
  Description of Artificial Sequence: Synthetic oligonucleotide
  Sense strand starting at position 3681 of SEQ ID NO: 587758
guucauguagagugguaag

SEQ ID NO: 816045 - RNA, 19 nt, Artificial Sequence
  Description of Artificial Sequence: Synthetic oligonucleotide
  Antisense strand to SEQ ID NO: 816044
cuuaccacucuacaugaac

SEQ ID NO: 816046 - RNA, 19 nt, Artificial Sequence
  Description of Artificial Sequence: Synthetic oligonucleotide
  Sense strand starting at position 3763 of SEQ ID NO: 587758
ccagaauauugacauuggu

SEQ ID NO: 816047 - RNA, 19 nt, Artificial Sequence
  Description of Artificial Sequence: Synthetic oligonucleotide
  Antisense strand to SEQ ID NO: 816046
accaaugucaauauucugg

SEQ ID NO: 816048 - RNA, 19 nt, Artificial Sequence
  Description of Artificial Sequence: Synthetic oligonucleotide
  Sense strand starting at position 3771 of SEQ ID NO: 587758
uugacauugguacaguuaa

SEQ ID NO: 816049 - RNA, 19 nt, Artificial Sequence
  Description of Artificial Sequence: Synthetic oligonucleotide
  Antisense strand to SEQ ID NO: 816048
uuaacuguaccaaugucaa

SEQ ID NO: 816050 - RNA, 19 nt, Artificial Sequence
  Description of Artificial Sequence: Synthetic oligonucleotide
  Sense strand starting at position 3938 of SEQ ID NO: 587758
guaugugacuucuugggau

SEQ ID NO: 816051 - RNA, 19 nt, Artificial Sequence
  Description of Artificial Sequence: Synthetic oligonucleotide
  Antisense strand to SEQ ID NO: 816050
aucccaagaagucacauac

SEQ ID NO: 816052 - RNA, 19 nt, Artificial Sequence
  Description of Artificial Sequence: Synthetic oligonucleotide
  Sense strand starting at position 3940 of SEQ ID NO: 587758
augugacuucuugggauug

SEQ ID NO: 816053 - RNA, 19 nt, Artificial Sequence
  Description of Artificial Sequence: Synthetic oligonucleotide
  Antisense strand to SEQ ID NO: 816052
caaucccaagaagucacau

SEQ ID NO: 816054 - RNA, 19 nt, Artificial Sequence
  Description of Artificial Sequence: Synthetic oligonucleotide
  Sense strand starting at position 26 of SEQ ID NO: 587759
augcauuucuugcugaauc

SEQ ID NO: 816055 - RNA, 19 nt, Artificial Sequence
  Description of Artificial Sequence: Synthetic oligonucleotide
  Antisense strand to SEQ ID NO: 816054
gauucagcaagaaaugcau

SEQ ID NO: 816056 - RNA, 19 nt, Artificial Sequence
  Description of Artificial Sequence: Synthetic oligonucleotide
  Sense strand starting at position 201 of SEQ ID NO: 587759
acaccaauucugugaagug

SEQ ID NO: 816057 - RNA, 19 nt, Artificial Sequence
  Description of Artificial Sequence: Synthetic oligonucleotide
  Antisense strand to SEQ ID NO: 816056
cacuucacagaauuggugu

SEQ ID NO: 816058 - RNA, 19 nt, Artificial Sequence
  Description of Artificial Sequence: Synthetic oligonucleotide
  Sense strand starting at position 208 of SEQ ID NO: 587759
uucugugaaguggauguaa

SEQ ID NO: 816059 - RNA, 19 nt, Artificial Sequence
  Description of Artificial Sequence: Synthetic oligonucleotide
  Antisense strand to SEQ ID NO: 816058
uuacauccacuucacagaa

SEQ ID NO: 816060 - RNA, 19 nt, Artificial Sequence
  Description of Artificial Sequence: Synthetic oligonucleotide
  Sense strand starting at position 210 of SEQ ID NO: 587759
cugugaaguggauguaauu

SEQ ID NO: 816061 - RNA, 19 nt, Artificial Sequence
  Description of Artificial Sequence: Synthetic oligonucleotide
  Antisense strand to SEQ ID NO: 816060
aauuacauccacuucacag

SEQ ID NO: 816062 - RNA, 19 nt, Artificial Sequence
  Description of Artificial Sequence: Synthetic oligonucleotide
  Sense strand starting at position 257 of SEQ ID NO: 587759
aacugagucagaggugaag

SEQ ID NO: 816063 - RNA, 19 nt, Artificial Sequence
  Description of Artificial Sequence: Synthetic oligonucleotide
  Antisense strand to SEQ ID NO: 816062
cuucaccucugacucaguu

SEQ ID NO: 816064 - RNA, 19 nt, Artificial Sequence
  Description of Artificial Sequence: Synthetic oligonucleotide
  Sense strand starting at position 259 of SEQ ID NO: 587759
cugagucagaggugaagua

SEQ ID NO: 816065 - RNA, 19 nt, Artificial Sequence
  Description of Artificial Sequence: Synthetic oligonucleotide
  Antisense strand to SEQ ID NO: 816064
uacuucaccucugacucag

SEQ ID NO: 816066 - RNA, 19 nt, Artificial Sequence
  Description of Artificial Sequence: Synthetic oligonucleotide
  Sense strand starting at position 272 of SEQ ID NO: 587759
gaaguaauauaucuaaggu

SEQ ID NO: 816067 - RNA, 19 nt, Artificial Sequence
  Description of Artificial Sequence: Synthetic oligonucleotide
  Antisense strand to SEQ ID NO: 816066
accuuagauauauuacuuc

SEQ ID NO: 816068 - RNA, 19 nt, Artificial Sequence
  Description of Artificial Sequence: Synthetic oligonucleotide
  Sense strand starting at position 282 of SEQ ID NO: 587759
aucuaaggucacugaacua

SEQ ID NO: 816069 - RNA, 19 nt, Artificial Sequence
  Description of Artificial Sequence: Synthetic oligonucleotide
  Antisense strand to SEQ ID NO: 816068
uaguucagugaccuuagau

SEQ ID NO: 816070 - RNA, 19 nt, Artificial Sequence
  Description of Artificial Sequence: Synthetic oligonucleotide
  Sense strand starting at position 429 of SEQ ID NO: 587759
cgguuucuuaaagaagacu

SEQ ID NO: 816071 - RNA, 19 nt, Artificial Sequence
  Description of Artificial Sequence: Synthetic oligonucleotide
  Antisense strand to SEQ ID NO: 816070
agucuucuuuaagaaaccg

SEQ ID NO: 816072 - RNA, 19 nt, Artificial Sequence
  Description of Artificial Sequence: Synthetic oligonucleotide
  Sense strand starting at position 541 of SEQ ID NO: 587759
gaacuuucguguccagaag

SEQ ID NO: 816073 - RNA, 19 nt, Artificial Sequence
  Description of Artificial Sequence: Synthetic oligonucleotide
  Antisense strand to SEQ ID NO: 816072
cuucuggacacgaaaguuc

SEQ ID NO: 816074 - RNA, 19 nt, Artificial Sequence
  Description of Artificial Sequence: Synthetic oligonucleotide
  Sense strand starting at position 542 of SEQ ID NO: 587759
aacuuucguguccagaagu

SEQ ID NO: 816075 - RNA, 19 nt, Artificial Sequence
  Description of Artificial Sequence: Synthetic oligonucleotide
  Antisense strand to SEQ ID NO: 816074
acuucuggacacgaaaguu

SEQ ID NO: 816076 - RNA, 19 nt, Artificial Sequence
  Description of Artificial Sequence: Synthetic oligonucleotide
  Sense strand starting at position 628 of SEQ ID NO: 587759
gcagguugggcagaagaaa

SEQ ID NO: 816077 - RNA, 19 nt, Artificial Sequence
  Description of Artificial Sequence: Synthetic oligonucleotide
  Antisense strand to SEQ ID NO: 816076
uuucuucugcccaaccugc

SEQ ID NO: 816078 - RNA, 19 nt, Artificial Sequence
  Description of Artificial Sequence: Synthetic oligonucleotide
  Sense strand starting at position 680 of SEQ ID NO: 587759
cacugauaggaaggcuuau

SEQ ID NO: 816079 - RNA, 19 nt, Artificial Sequence
  Description of Artificial Sequence: Synthetic oligonucleotide
  Antisense strand to SEQ ID NO: 816078
auaagccuuccuaucagug

SEQ ID NO: 816080 - RNA, 19 nt, Artificial Sequence
  Description of Artificial Sequence: Synthetic oligonucleotide
  Sense strand starting at position 820 of SEQ ID NO: 587759
agaguaaugucauccaaua

SEQ ID NO: 816081 - RNA, 19 nt, Artificial Sequence
  Description of Artificial Sequence: Synthetic oligonucleotide
  Antisense strand to SEQ ID NO: 816080
uauuggaugacauuacucu

SEQ ID NO: 816082 - RNA, 19 nt, Artificial Sequence
  Description of Artificial Sequence: Synthetic oligonucleotide
  Sense strand starting at position 832 of SEQ ID NO: 587759
uccaauacaguuuagagua

SEQ ID NO: 816083 - RNA, 19 nt, Artificial Sequence
  Description of Artificial Sequence: Synthetic oligonucleotide
  Antisense strand to SEQ ID NO: 816082
uacucuaaacuguauugga

SEQ ID NO: 816084 - RNA, 19 nt, Artificial Sequence
  Description of Artificial Sequence: Synthetic oligonucleotide
  Sense strand starting at position 853 of SEQ ID NO: 587759
auuccauugcgccaauaaa

SEQ ID NO: 816085 - RNA, 19 nt, Artificial Sequence
  Description of Artificial Sequence: Synthetic oligonucleotide
  Antisense strand to SEQ ID NO: 816084
uuuauuggcgcaauggaau

SEQ ID NO: 816086 - RNA, 19 nt, Artificial Sequence
  Description of Artificial Sequence: Synthetic oligonucleotide
  Sense strand starting at position 1040 of SEQ ID NO: 587759
aaugaucucgugcagaaua

SEQ ID NO: 816087 - RNA, 19 nt, Artificial Sequence
  Description of Artificial Sequence: Synthetic oligonucleotide
  Antisense strand to SEQ ID NO: 816086
uauucugcacgagaucauu

SEQ ID NO: 816088 - RNA, 19 nt, Artificial Sequence
  Description of Artificial Sequence: Synthetic oligonucleotide
  Sense strand starting at position 1042 of SEQ ID NO: 587759
ugaucucgugcagaauaaa

SEQ ID NO: 816089 - RNA, 19 nt, Artificial Sequence
  Description of Artificial Sequence: Synthetic oligonucleotide
  Antisense strand to SEQ ID NO: 816088
uuuauucugcacgagauca

SEQ ID NO: 816090 - RNA, 19 nt, Artificial Sequence
  Description of Artificial Sequence: Synthetic oligonucleotide
  Sense strand starting at position 1327 of SEQ ID NO: 587759
ccuguaaucccaggagcca

SEQ ID NO: 816091 - RNA, 19 nt, Artificial Sequence
  Description of Artificial Sequence: Synthetic oligonucleotide
  Antisense strand to SEQ ID NO: 816090
uggcuccugggauuacagg

SEQ ID NO: 816092 - RNA, 19 nt, Artificial Sequence
  Description of Artificial Sequence: Synthetic oligonucleotide
  Sense strand starting at position 2341 of SEQ ID NO: 587759
gacccagaugccugaaguu

SEQ ID NO: 816093 - RNA, 19 nt, Artificial Sequence
  Description of Artificial Sequence: Synthetic oligonucleotide
  Antisense strand to SEQ ID NO: 816092
aacuucaggcaucuggguc

SEQ ID NO: 816094 - RNA, 19 nt, Artificial Sequence
  Description of Artificial Sequence: Synthetic oligonucleotide
  Sense strand starting at position 2613 of SEQ ID NO: 587759
uguguacaucggaagcguu

SEQ ID NO: 816095 - RNA, 19 nt, Artificial Sequence
  Description of Artificial Sequence: Synthetic oligonucleotide
  Antisense strand to SEQ ID NO: 816094
aacgcuuccgauguacaca

SEQ ID NO: 816096 - RNA, 19 nt, Artificial Sequence
  Description of Artificial Sequence: Synthetic oligonucleotide
  Sense strand starting at position 2614 of SEQ ID NO: 587759
guguacaucggaagcguua

SEQ ID NO: 816097 - RNA, 19 nt, Artificial Sequence
  Description of Artificial Sequence: Synthetic oligonucleotide
  Antisense strand to SEQ ID NO: 816096
uaacgcuuccgauguacac

SEQ ID NO: 816098 - RNA, 19 nt, Artificial Sequence
  Description of Artificial Sequence: Synthetic oligonucleotide
  Sense strand starting at position 2654 of SEQ ID NO: 587759
ugcgaaaguccagaaucaa

SEQ ID NO: 816099 - RNA, 19 nt, Artificial Sequence
  Description of Artificial Sequence: Synthetic oligonucleotide
  Antisense strand to SEQ ID NO: 816098
uugauucuggacuuucgca

SEQ ID NO: 816100 - RNA, 19 nt, Artificial Sequence
  Description of Artificial Sequence: Synthetic oligonucleotide
  Sense strand starting at position 2678 of SEQ ID NO: 587759
uaacaugguguggguuaaa

SEQ ID NO: 816101 - RNA, 19 nt, Artificial Sequence
  Description of Artificial Sequence: Synthetic oligonucleotide
  Antisense strand to SEQ ID NO: 816100
uuuaacccacaccauguua

SEQ ID NO: 816102 - RNA, 19 nt, Artificial Sequence
  Description of Artificial Sequence: Synthetic oligonucleotide
  Sense strand starting at position 2708 of SEQ ID NO: 587759
gguacuagcuauccaaaca

SEQ ID NO: 816103 - RNA, 19 nt, Artificial Sequence
  Description of Artificial Sequence: Synthetic oligonucleotide
  Antisense strand to SEQ ID NO: 816102
uguuuggauagcuaguacc

SEQ ID NO: 816104 - RNA, 19 nt, Artificial Sequence
  Description of Artificial Sequence: Synthetic oligonucleotide
  Sense strand starting at position 2738 of SEQ ID NO: 587759
aacagaaacguuugccuau

SEQ ID NO: 816105 - RNA, 19 nt, Artificial Sequence
  Description of Artificial Sequence: Synthetic oligonucleotide
  Antisense strand to SEQ ID NO: 816104
auaggcaaacguuucuguu

SEQ ID NO: 816106 - RNA, 19 nt, Artificial Sequence
  Description of Artificial Sequence: Synthetic oligonucleotide
  Sense strand starting at position 2750 of SEQ ID NO: 587759
ugccuaucacauggacaaa

SEQ ID NO: 816107 - RNA, 19 nt, Artificial Sequence
  Description of Artificial Sequence: Synthetic oligonucleotide
  Antisense strand to SEQ ID NO: 816106
uuuguccaugugauaggca

SEQ ID NO: 816108 - RNA, 19 nt, Artificial Sequence
  Description of Artificial Sequence: Synthetic oligonucleotide
  Sense strand starting at position 2761 of SEQ ID NO: 587759
uggacaaacagcgguaaua

SEQ ID NO: 816109 - RNA, 19 nt, Artificial Sequence
  Description of Artificial Sequence: Synthetic oligonucleotide
  Antisense strand to SEQ ID NO: 816108
uauuaccgcuguuugucca

SEQ ID NO: 816110 - RNA, 19 nt, Artificial Sequence
  Description of Artificial Sequence: Synthetic oligonucleotide
  Sense strand starting at position 2791 of SEQ ID NO: 587759
uacaguagagucugaaagu

SEQ ID NO: 816111 - RNA, 19 nt, Artificial Sequence
  Description of Artificial Sequence: Synthetic oligonucleotide
  Antisense strand to SEQ ID NO: 816110
acuuucagacucuacugua

SEQ ID NO: 816112 - RNA, 19 nt, Artificial Sequence
  Description of Artificial Sequence: Synthetic oligonucleotide
  Sense strand starting at position 2800 of SEQ ID NO: 587759
gucugaaaguuuccucaca

SEQ ID NO: 816113 - RNA, 19 nt, Artificial Sequence
  Description of Artificial Sequence: Synthetic oligonucleotide
  Antisense strand to SEQ ID NO: 816112
ugugaggaaacuuucagac

SEQ ID NO: 816114 - RNA, 19 nt, Artificial Sequence
  Description of Artificial Sequence: Synthetic oligonucleotide
  Sense strand starting at position 2818 of SEQ ID NO: 587759
acauacaagugaguguaaa

SEQ ID NO: 816115 - RNA, 19 nt, Artificial Sequence
  Description of Artificial Sequence: Synthetic oligonucleotide
  Antisense strand to SEQ ID NO: 816114
uuuacacucacuuguaugu

SEQ ID NO: 816116 - RNA, 19 nt, Artificial Sequence
  Description of Artificial Sequence: Synthetic oligonucleotide
  Sense strand starting at position 2819 of SEQ ID NO: 587759
cauacaagugaguguaaau

SEQ ID NO: 816117 - RNA, 19 nt, Artificial Sequence
  Description of Artificial Sequence: Synthetic oligonucleotide
  Antisense strand to SEQ ID NO: 816116
auuuacacucacuuguaug

SEQ ID NO: 816118 - RNA, 19 nt, Artificial Sequence
  Description of Artificial Sequence: Synthetic oligonucleotide
  Sense strand starting at position 2826 of SEQ ID NO: 587759
gugaguguaaauuggaauu

SEQ ID NO: 816119 - RNA, 19 nt, Artificial Sequence
  Description of Artificial Sequence: Synthetic oligonucleotide
  Antisense strand to SEQ ID NO: 816118
aauuccaauuuacacucac

SEQ ID NO: 816120 - RNA, 19 nt, Artificial Sequence
  Description of Artificial Sequence: Synthetic oligonucleotide
  Sense strand starting at position 3183 of SEQ ID NO: 587759
auaauaugucugcaagaug

SEQ ID NO: 816121 - RNA, 19 nt, Artificial Sequence
  Description of Artificial Sequence: Synthetic oligonucleotide
  Antisense strand to SEQ ID NO: 816120
caucuugcagacauauuau

SEQ ID NO: 816122 - RNA, 19 nt, Artificial Sequence
  Description of Artificial Sequence: Synthetic oligonucleotide
  Sense strand starting at position 3186 of SEQ ID NO: 587759
auaugucugcaagauguau

SEQ ID NO: 816123 - RNA, 19 nt, Artificial Sequence
  Description of Artificial Sequence: Synthetic oligonucleotide
  Antisense strand to SEQ ID NO: 816122
auacaucuugcagacauau

SEQ ID NO: 816124 - RNA, 19 nt, Artificial Sequence
  Description of Artificial Sequence: Synthetic oligonucleotide
  Sense strand starting at position 3194 of SEQ ID NO: 587759
gcaagauguaugcacaaga

SEQ ID NO: 816125 - RNA, 19 nt, Artificial Sequence
  Description of Artificial Sequence: Synthetic oligonucleotide
  Antisense strand to SEQ ID NO: 816124
ucuugugcauacaucuugc

SEQ ID NO: 816126 - RNA, 19 nt, Artificial Sequence
  Description of Artificial Sequence: Synthetic oligonucleotide
  Sense strand starting at position 3210 of SEQ ID NO: 587759
agagaucuugcugaagcau

SEQ ID NO: 816127 - RNA, 19 nt, Artificial Sequence
  Description of Artificial Sequence: Synthetic oligonucleotide
  Antisense strand to SEQ ID NO: 816126
augcuucagcaagaucucu

SEQ ID NO: 816128 - RNA, 19 nt, Artificial Sequence
  Description of Artificial Sequence: Synthetic oligonucleotide
  Sense strand starting at position 3344 of SEQ ID NO: 587759
acaguuucagugugagaag

SEQ ID NO: 816129 - RNA, 19 nt, Artificial Sequence
  Description of Artificial Sequence: Synthetic oligonucleotide
  Antisense strand to SEQ ID NO: 816128
cuucucacacugaaacugu

SEQ ID NO: 816130 - RNA, 19 nt, Artificial Sequence
  Description of Artificial Sequence: Synthetic oligonucleotide
  Sense strand starting at position 3364 of SEQ ID NO: 587759
ugguaaaguccuggagaug

SEQ ID NO: 816131 - RNA, 19 nt, Artificial Sequence
  Description of Artificial Sequence: Synthetic oligonucleotide
  Antisense strand to SEQ ID NO: 816130
caucuccaggacuuuacca

SEQ ID NO: 816132 - RNA, 19 nt, Artificial Sequence
  Description of Artificial Sequence: Synthetic oligonucleotide
  Sense strand starting at position 3889 of SEQ ID NO: 587759
ggagaaacccucugauucu

SEQ ID NO: 816133 - RNA, 19 nt, Artificial Sequence
  Description of Artificial Sequence: Synthetic oligonucleotide
  Antisense strand to SEQ ID NO: 816132
agaaucagaggguuucucc

SEQ ID NO: 816134 - RNA, 19 nt, Artificial Sequence
  Description of Artificial Sequence: Synthetic oligonucleotide
  Sense strand starting at position 36 of SEQ ID NO: 587760
uugaaucauuuguaaugcu

SEQ ID NO: 816135 - RNA, 19 nt, Artificial Sequence
  Description of Artificial Sequence: Synthetic oligonucleotide
  Antisense strand to SEQ ID NO: 816134
agcauuacaaaugauucaa

SEQ ID NO: 816136 - RNA, 19 nt, Artificial Sequence
  Description of Artificial Sequence: Synthetic oligonucleotide
  Sense strand starting at position 158 of SEQ ID NO: 587760
cuacuaugugcccaauagu

SEQ ID NO: 816137 - RNA, 19 nt, Artificial Sequence
  Description of Artificial Sequence: Synthetic oligonucleotide
  Antisense strand to SEQ ID NO: 816136
acuauugggcacauaguag

SEQ ID NO: 816138 - RNA, 19 nt, Artificial Sequence
  Description of Artificial Sequence: Synthetic oligonucleotide
  Sense strand starting at position 181 of SEQ ID NO: 587760
ggcuguguauaauuccaaa

SEQ ID NO: 816139 - RNA, 19 nt, Artificial Sequence
  Description of Artificial Sequence: Synthetic oligonucleotide
  Antisense strand to SEQ ID NO: 816138
uuuggaauuauacacagcc

SEQ ID NO: 816140 - RNA, 19 nt, Artificial Sequence
  Description of Artificial Sequence: Synthetic oligonucleotide
  Sense strand starting at position 214 of SEQ ID NO: 587760
uugucaucuuaggcagcau

SEQ ID NO: 816141 - RNA, 19 nt, Artificial Sequence
  Description of Artificial Sequence: Synthetic oligonucleotide
  Antisense strand to SEQ ID NO: 816140
augcugccuaagaugacaa

SEQ ID NO: 816142 - RNA, 19 nt, Artificial Sequence
  Description of Artificial Sequence: Synthetic oligonucleotide
  Sense strand starting at position 251 of SEQ ID NO: 587760
ggcacuauucuacaugacu

SEQ ID NO: 816143 - RNA, 19 nt, Artificial Sequence
  Description of Artificial Sequence: Synthetic oligonucleotide
  Antisense strand to SEQ ID NO: 816142
agucauguagaauagugcc

SEQ ID NO: 816144 - RNA, 19 nt, Artificial Sequence
  Description of Artificial Sequence: Synthetic oligonucleotide
  Sense strand starting at position 290 of SEQ ID NO: 587760
cucuguggucacuaguauu

SEQ ID NO: 816145 - RNA, 19 nt, Artificial Sequence
  Description of Artificial Sequence: Synthetic oligonucleotide
  Antisense strand to SEQ ID NO: 816144
aauacuagugaccacagag

SEQ ID NO: 816146 - RNA, 19 nt, Artificial Sequence
  Description of Artificial Sequence: Synthetic oligonucleotide
  Sense strand starting at position 365 of SEQ ID NO: 587760
ggcuacuaagcuugugauu

SEQ ID NO: 816147 - RNA, 19 nt, Artificial Sequence
  Description of Artificial Sequence: Synthetic oligonucleotide
  Antisense strand to SEQ ID NO: 816146
aaucacaagcuuaguagcc

SEQ ID NO: 816148 - RNA, 19 nt, Artificial Sequence
  Description of Artificial Sequence: Synthetic oligonucleotide
  Sense strand starting at position 406 of SEQ ID NO: 587760
gucugacucuauccacuau

SEQ ID NO: 816149 - RNA, 19 nt, Artificial Sequence
  Description of Artificial Sequence: Synthetic oligonucleotide
  Antisense strand to SEQ ID NO: 816148
auaguggauagagucagac

SEQ ID NO: 816150 - RNA, 19 nt, Artificial Sequence
  Description of Artificial Sequence: Synthetic oligonucleotide
  Sense strand starting at position 515 of SEQ ID NO: 587760
uaaauuaugcgguacagca

SEQ ID NO: 816151 - RNA, 19 nt, Artificial Sequence
  Description of Artificial Sequence: Synthetic oligonucleotide
  Antisense strand to SEQ ID NO: 816150
ugcuguaccgcauaauuua

SEQ ID NO: 816152 - RNA, 19 nt, Artificial Sequence
  Description of Artificial Sequence: Synthetic oligonucleotide
  Sense strand starting at position 714 of SEQ ID NO: 587760
gcuggugugcacuuguaau

SEQ ID NO: 816153 - RNA, 19 nt, Artificial Sequence
  Description of Artificial Sequence: Synthetic oligonucleotide
  Antisense strand to SEQ ID NO: 816152
auuacaagugcacaccagc

SEQ ID NO: 816154 - RNA, 19 nt, Artificial Sequence
  Description of Artificial Sequence: Synthetic oligonucleotide
  Sense strand starting at position 991 of SEQ ID NO: 587760
aggaauccacagugugaau

SEQ ID NO: 816155 - RNA, 19 nt, Artificial Sequence
  Description of Artificial Sequence: Synthetic oligonucleotide
  Antisense strand to SEQ ID NO: 816154
auucacacuguggauuccu

SEQ ID NO: 816156 - RNA, 19 nt, Artificial Sequence
  Description of Artificial Sequence: Synthetic oligonucleotide
  Sense strand starting at position 1033 of SEQ ID NO: 587760
gggaguagaugacaaugaa

SEQ ID NO: 816157 - RNA, 19 nt, Artificial Sequence
  Description of Artificial Sequence: Synthetic oligonucleotide
  Antisense strand to SEQ ID NO: 816156
uucauugucaucuacuccc

SEQ ID NO: 816158 - RNA, 19 nt, Artificial Sequence
  Description of Artificial Sequence: Synthetic oligonucleotide
  Sense strand starting at position 1072 of SEQ ID NO: 587760
gccagacugaaaggucuuu

SEQ ID NO: 816159 - RNA, 19 nt, Artificial Sequence
  Description of Artificial Sequence: Synthetic oligonucleotide
  Antisense strand to SEQ ID NO: 816158
aaagaccuuucagucuggc

SEQ ID NO: 816160 - RNA, 19 nt, Artificial Sequence
  Description of Artificial Sequence: Synthetic oligonucleotide
  Sense strand starting at position 1123 of SEQ ID NO: 587760
gaagguuccugagccggaa

SEQ ID NO: 816161 - RNA, 19 nt, Artificial Sequence
  Description of Artificial Sequence: Synthetic oligonucleotide
  Antisense strand to SEQ ID NO: 816160
uuccggcucaggaaccuuc

SEQ ID NO: 816162 - RNA, 19 nt, Artificial Sequence
  Description of Artificial Sequence: Synthetic oligonucleotide
  Sense strand starting at position 1203 of SEQ ID NO: 587760
cuuguauuaucuuuaggaa

SEQ ID NO: 816163 - RNA, 19 nt, Artificial Sequence
  Description of Artificial Sequence: Synthetic oligonucleotide
  Antisense strand to SEQ ID NO: 816162
uuccuaaagauaauacaag

SEQ ID NO: 816164 - RNA, 19 nt, Artificial Sequence
  Description of Artificial Sequence: Synthetic oligonucleotide
  Sense strand starting at position 1282 of SEQ ID NO: 587760
agcagagugccuuacacaa

SEQ ID NO: 816165 - RNA, 19 nt, Artificial Sequence
  Description of Artificial Sequence: Synthetic oligonucleotide
  Antisense strand to SEQ ID NO: 816164
uuguguaaggcacucugcu

SEQ ID NO: 816166 - RNA, 19 nt, Artificial Sequence
  Description of Artificial Sequence: Synthetic oligonucleotide
  Sense strand starting at position 1343 of SEQ ID NO: 587760
aacgaagcguacuuacaau

SEQ ID NO: 816167 - RNA, 19 nt, Artificial Sequence
  Description of Artificial Sequence: Synthetic oligonucleotide
  Antisense strand to SEQ ID NO: 816166
auuguaaguacgcuucguu

SEQ ID NO: 816168 - RNA, 19 nt, Artificial Sequence
  Description of Artificial Sequence: Synthetic oligonucleotide
  Sense strand starting at position 1349 of SEQ ID NO: 587760
gcguacuuacaaugcaaau

SEQ ID NO: 816169 - RNA, 19 nt, Artificial Sequence
  Description of Artificial Sequence: Synthetic oligonucleotide
  Antisense strand to SEQ ID NO: 816168
auuugcauuguaaguacgc

SEQ ID NO: 816170 - RNA, 19 nt, Artificial Sequence
  Description of Artificial Sequence: Synthetic oligonucleotide
  Sense strand starting at position 1361 of SEQ ID NO: 587760
ugcaaauauuaacaggaua

SEQ ID NO: 816171 - RNA, 19 nt, Artificial Sequence
  Description of Artificial Sequence: Synthetic oligonucleotide
  Antisense strand to SEQ ID NO: 816170
uauccuguuaauauuugca

SEQ ID NO: 816172 - RNA, 19 nt, Artificial Sequence
  Description of Artificial Sequence: Synthetic oligonucleotide
  Sense strand starting at position 1416 of SEQ ID NO: 587760
gcagaauacuuacaaggga

SEQ ID NO: 816173 - RNA, 19 nt, Artificial Sequence
  Description of Artificial Sequence: Synthetic oligonucleotide
  Antisense strand to SEQ ID NO: 816172
ucccuuguaaguauucugc

SEQ ID NO: 816174 - RNA, 19 nt, Artificial Sequence
  Description of Artificial Sequence: Synthetic oligonucleotide
  Sense strand starting at position 2118 of SEQ ID NO: 587760
uggucaguccaguaagaag

SEQ ID NO: 816175 - RNA, 19 nt, Artificial Sequence
  Description of Artificial Sequence: Synthetic oligonucleotide
  Antisense strand to SEQ ID NO: 816174
cuucuuacuggacugacca

SEQ ID NO: 816176 - RNA, 19 nt, Artificial Sequence
  Description of Artificial Sequence: Synthetic oligonucleotide
  Sense strand starting at position 2197 of SEQ ID NO: 587760
caugucguccuugaucaga

SEQ ID NO: 816177 - RNA, 19 nt, Artificial Sequence
  Description of Artificial Sequence: Synthetic oligonucleotide
  Antisense strand to SEQ ID NO: 816176
ucugaucaaggacgacaug

SEQ ID NO: 816178 - RNA, 19 nt, Artificial Sequence
  Description of Artificial Sequence: Synthetic oligonucleotide
  Sense strand starting at position 2199 of SEQ ID NO: 587760
ugucguccuugaucagaag

SEQ ID NO: 816179 - RNA, 19 nt, Artificial Sequence
  Description of Artificial Sequence: Synthetic oligonucleotide
  Antisense strand to SEQ ID NO: 816178
cuucugaucaaggacgaca

SEQ ID NO: 816180 - RNA, 19 nt, Artificial Sequence
  Description of Artificial Sequence: Synthetic oligonucleotide
  Sense strand starting at position 2205 of SEQ ID NO: 587760
ccuugaucagaagggugau

SEQ ID NO: 816181 - RNA, 19 nt, Artificial Sequence
  Description of Artificial Sequence: Synthetic oligonucleotide
  Antisense strand to SEQ ID NO: 816180
aucacccuucugaucaagg

SEQ ID NO: 816182 - RNA, 19 nt, Artificial Sequence
  Description of Artificial Sequence: Synthetic oligonucleotide
  Sense strand starting at position 2218 of SEQ ID NO: 587760
ggugaucagcaccgcgaaa

SEQ ID NO: 816183 - RNA, 19 nt, Artificial Sequence
  Description of Artificial Sequence: Synthetic oligonucleotide
  Antisense strand to SEQ ID NO: 816182
uuucgcggugcugaucacc

SEQ ID NO: 816184 - RNA, 19 nt, Artificial Sequence
  Description of Artificial Sequence: Synthetic oligonucleotide
  Sense strand starting at position 2362 of SEQ ID NO: 587760
gaaauugagccuggaaagu

SEQ ID NO: 816185 - RNA, 19 nt, Artificial Sequence
  Description of Artificial Sequence: Synthetic oligonucleotide
  Antisense strand to SEQ ID NO: 816184
acuuuccaggcucaauuuc

SEQ ID NO: 816186 - RNA, 19 nt, Artificial Sequence
  Description of Artificial Sequence: Synthetic oligonucleotide
  Sense strand starting at position 2924 of SEQ ID NO: 587760
aaccuacugcugugagaaa

SEQ ID NO: 816187 - RNA, 19 nt, Artificial Sequence
  Description of Artificial Sequence: Synthetic oligonucleotide
  Antisense strand to SEQ ID NO: 816186
uuucucacagcaguagguu

SEQ ID NO: 816188 - RNA, 19 nt, Artificial Sequence
  Description of Artificial Sequence: Synthetic oligonucleotide
  Sense strand starting at position 3092 of SEQ ID NO: 587760
uuaggaagguuccuuguga

SEQ ID NO: 816189 - RNA, 19 nt, Artificial Sequence
  Description of Artificial Sequence: Synthetic oligonucleotide
  Antisense strand to SEQ ID NO: 816188
ucacaaggaaccuuccuaa

SEQ ID NO: 816190 - RNA, 19 nt, Artificial Sequence
  Description of Artificial Sequence: Synthetic oligonucleotide
  Sense strand starting at position 3093 of SEQ ID NO: 587760
uaggaagguuccuugugag

SEQ ID NO: 816191 - RNA, 19 nt, Artificial Sequence
  Description of Artificial Sequence: Synthetic oligonucleotide
  Antisense strand to SEQ ID NO: 816190
cucacaaggaaccuuccua

SEQ ID NO: 816192 - RNA, 19 nt, Artificial Sequence
  Description of Artificial Sequence: Synthetic oligonucleotide
  Sense strand starting at position 3100 of SEQ ID NO: 587760
guuccuugugagagguagu

SEQ ID NO: 816193 - RNA, 19 nt, Artificial Sequence
  Description of Artificial Sequence: Synthetic oligonucleotide
  Antisense strand to SEQ ID NO: 816192
acuaccucucacaaggaac

SEQ ID NO: 816194 - RNA, 19 nt, Artificial Sequence
  Description of Artificial Sequence: Synthetic oligonucleotide
  Sense strand starting at position 3200 of SEQ ID NO: 587760
acaggaagucauugaguga

SEQ ID NO: 816195 - RNA, 19 nt, Artificial Sequence
  Description of Artificial Sequence: Synthetic oligonucleotide
  Antisense strand to SEQ ID NO: 816194
ucacucaaugacuuccugu

SEQ ID NO: 816196 - RNA, 19 nt, Artificial Sequence
  Description of Artificial Sequence: Synthetic oligonucleotide
  Sense strand starting at position 3244 of SEQ ID NO: 587760
gagggaauggcuugaguga

SEQ ID NO: 816197 - RNA, 19 nt, Artificial Sequence
  Description of Artificial Sequence: Synthetic oligonucleotide
  Antisense strand to SEQ ID NO: 816196
ucacucaagccauucccuc

SEQ ID NO: 816198 - RNA, 19 nt, Artificial Sequence
  Description of Artificial Sequence: Synthetic oligonucleotide
  Sense strand starting at position 3272 of SEQ ID NO: 587760
gguagaagaaugcauggua

SEQ ID NO: 816199 - RNA, 19 nt, Artificial Sequence
  Description of Artificial Sequence: Synthetic oligonucleotide
  Antisense strand to SEQ ID NO: 816198
uaccaugcauucuucuacc

SEQ ID NO: 816200 - RNA, 19 nt, Artificial Sequence
  Description of Artificial Sequence: Synthetic oligonucleotide
  Sense strand starting at position 3277 of SEQ ID NO: 587760
aagaaugcaugguauaaag

SEQ ID NO: 816201 - RNA, 19 nt, Artificial Sequence
  Description of Artificial Sequence: Synthetic oligonucleotide
  Antisense strand to SEQ ID NO: 816200
cuuuauaccaugcauucuu

SEQ ID NO: 816202 - RNA, 19 nt, Artificial Sequence
  Description of Artificial Sequence: Synthetic oligonucleotide
  Sense strand starting at position 3346 of SEQ ID NO: 587760
uuuguuuguuugccaaauc

SEQ ID NO: 816203 - RNA, 19 nt, Artificial Sequence
  Description of Artificial Sequence: Synthetic oligonucleotide
  Antisense strand to SEQ ID NO: 816202
gauuuggcaaacaaacaaa

SEQ ID NO: 816204 - RNA, 19 nt, Artificial Sequence
  Description of Artificial Sequence: Synthetic oligonucleotide
  Sense strand starting at position 3541 of SEQ ID NO: 587760
agauauugcaguuggcuca

SEQ ID NO: 816205 - RNA, 19 nt, Artificial Sequence
  Description of Artificial Sequence: Synthetic oligonucleotide
  Antisense strand to SEQ ID NO: 816204
ugagccaacugcaauaucu

SEQ ID NO: 816206 - RNA, 19 nt, Artificial Sequence
  Description of Artificial Sequence: Synthetic oligonucleotide
  Sense strand starting at position 3580 of SEQ ID NO: 587760
cuuuguuaagagugauguu

SEQ ID NO: 816207 - RNA, 19 nt, Artificial Sequence
  Description of Artificial Sequence: Synthetic oligonucleotide
  Antisense strand to SEQ ID NO: 816206
aacaucacucuuaacaaag

SEQ ID NO: 816208 - RNA, 19 nt, Artificial Sequence
  Description of Artificial Sequence: Synthetic oligonucleotide
  Sense strand starting at position 3581 of SEQ ID NO: 587760
uuuguuaagagugauguuu

SEQ ID NO: 816209 - RNA, 19 nt, Artificial Sequence
  Description of Artificial Sequence: Synthetic oligonucleotide
  Antisense strand to SEQ ID NO: 816208
aaacaucacucuuaacaaa

SEQ ID NO: 816210 - RNA, 19 nt, Artificial Sequence
  Description of Artificial Sequence: Synthetic oligonucleotide
  Sense strand starting at position 3589 of SEQ ID NO: 587760
gagugauguuucuuuagcc

SEQ ID NO: 816211 - RNA, 19 nt, Artificial Sequence
  Description of Artificial Sequence: Synthetic oligonucleotide
  Antisense strand to SEQ ID NO: 816210
ggcuaaagaaacaucacuc

SEQ ID NO: 816212 - RNA, 19 nt, Artificial Sequence
  Description of Artificial Sequence: Synthetic oligonucleotide
  Sense strand starting at position 3847 of SEQ ID NO: 587760
gaugcuuacucagcagcau

SEQ ID NO: 816213 - RNA, 19 nt, Artificial Sequence
  Description of Artificial Sequence: Synthetic oligonucleotide
  Antisense strand to SEQ ID NO: 816212
augcugcugaguaagcauc

SEQ ID NO: 816214 - RNA, 19 nt, Artificial Sequence
  Description of Artificial Sequence: Synthetic oligonucleotide
  Sense strand starting at position 97 of SEQ ID NO: 587761
auaagcuaggcauaguuau

SEQ ID NO: 816215 - RNA, 19 nt, Artificial Sequence
  Description of Artificial Sequence: Synthetic oligonucleotide
  Antisense strand to SEQ ID NO: 816214
auaacuaugccuagcuuau

SEQ ID NO: 816216 - RNA, 19 nt, Artificial Sequence
  Description of Artificial Sequence: Synthetic oligonucleotide
  Sense strand starting at position 187 of SEQ ID NO: 587761
gugagugagccuugaucac

SEQ ID NO: 816217 - RNA, 19 nt, Artificial Sequence
  Description of Artificial Sequence: Synthetic oligonucleotide
  Antisense strand to SEQ ID NO: 816216
gugaucaaggcucacucac

SEQ ID NO: 816218 - RNA, 19 nt, Artificial Sequence
  Description of Artificial Sequence: Synthetic oligonucleotide
  Sense strand starting at position 191 of SEQ ID NO: 587761
gugagccuugaucacauua

SEQ ID NO: 816219 - RNA, 19 nt, Artificial Sequence
  Description of Artificial Sequence: Synthetic oligonucleotide
  Antisense strand to SEQ ID NO: 816218
uaaugugaucaaggcucac

SEQ ID NO: 816220 - RNA, 19 nt, Artificial Sequence
  Description of Artificial Sequence: Synthetic oligonucleotide
  Sense strand starting at position 432 of SEQ ID NO: 587761
ugguguuaguuaguuccca

SEQ ID NO: 816221 - RNA, 19 nt, Artificial Sequence
  Description of Artificial Sequence: Synthetic oligonucleotide
  Antisense strand to SEQ ID NO: 816220
ugggaacuaacuaacacca

SEQ ID NO: 816222 - RNA, 19 nt, Artificial Sequence
  Description of Artificial Sequence: Synthetic oligonucleotide
  Sense strand starting at position 451 of SEQ ID NO: 587761
guuugagaaccugggaacu

SEQ ID NO: 816223 - RNA, 19 nt, Artificial Sequence
  Description of Artificial Sequence: Synthetic oligonucleotide
  Antisense strand to SEQ ID NO: 816222
aguucccagguucucaaac

SEQ ID NO: 816224 - RNA, 19 nt, Artificial Sequence
  Description of Artificial Sequence: Synthetic oligonucleotide
  Sense strand starting at position 453 of SEQ ID NO: 587761
uugagaaccugggaacuaa

SEQ ID NO: 816225 - RNA, 19 nt, Artificial Sequence
  Description of Artificial Sequence: Synthetic oligonucleotide
  Antisense strand to SEQ ID NO: 816224
uuaguucccagguucucaa

SEQ ID NO: 816226 - RNA, 19 nt, Artificial Sequence
  Description of Artificial Sequence: Synthetic oligonucleotide
  Sense strand starting at position 542 of SEQ ID NO: 587761
gaauaaagguaccuuguuu

SEQ ID NO: 816227 - RNA, 19 nt, Artificial Sequence
  Description of Artificial Sequence: Synthetic oligonucleotide
  Antisense strand to SEQ ID NO: 816226
aaacaagguaccuuuauuc

SEQ ID NO: 816228 - RNA, 19 nt, Artificial Sequence
  Description of Artificial Sequence: Synthetic oligonucleotide
  Sense strand starting at position 583 of SEQ ID NO: 587761
uugaaucauuuguaaugcu

SEQ ID NO: 816229 - RNA, 19 nt, Artificial Sequence
  Description of Artificial Sequence: Synthetic oligonucleotide
  Antisense strand to SEQ ID NO: 816228
agcauuacaaaugauucaa

SEQ ID NO: 816230 - RNA, 19 nt, Artificial Sequence
  Description of Artificial Sequence: Synthetic oligonucleotide
  Sense strand starting at position 705 of SEQ ID NO: 587761
cuacuaugugcccaauagu

SEQ ID NO: 816231 - RNA, 19 nt, Artificial Sequence
  Description of Artificial Sequence: Synthetic oligonucleotide
  Antisense strand to SEQ ID NO: 816230
acuauugggcacauaguag

SEQ ID NO: 816232 - RNA, 19 nt, Artificial Sequence
  Description of Artificial Sequence: Synthetic oligonucleotide
  Sense strand starting at position 728 of SEQ ID NO: 587761
ggcuguguauaauuccaaa

SEQ ID NO: 816233 - RNA, 19 nt, Artificial Sequence
  Description of Artificial Sequence: Synthetic oligonucleotide
  Antisense strand to SEQ ID NO: 816232
uuuggaauuauacacagcc

SEQ ID NO: 816234 - RNA, 19 nt, Artificial Sequence
  Description of Artificial Sequence: Synthetic oligonucleotide
  Sense strand starting at position 761 of SEQ ID NO: 587761
uugucaucuuaggcagcau

SEQ ID NO: 816235 - RNA, 19 nt, Artificial Sequence
  Description of Artificial Sequence: Synthetic oligonucleotide
  Antisense strand to SEQ ID NO: 816234
augcugccuaagaugacaa

SEQ ID NO: 816236 - RNA, 19 nt, Artificial Sequence
  Description of Artificial Sequence: Synthetic oligonucleotide
  Sense strand starting at position 798 of SEQ ID NO: 587761
ggcacuauucuacaugacu

SEQ ID NO: 816237 - RNA, 19 nt, Artificial Sequence
  Description of Artificial Sequence: Synthetic oligonucleotide
  Antisense strand to SEQ ID NO: 816236
agucauguagaauagugcc

SEQ ID NO: 816238 - RNA, 19 nt, Artificial Sequence
  Description of Artificial Sequence: Synthetic oligonucleotide
  Sense strand starting at position 837 of SEQ ID NO: 587761
cucuguggucacuaguauu

SEQ ID NO: 816239 - RNA, 19 nt, Artificial Sequence
  Description of Artificial Sequence: Synthetic oligonucleotide
  Antisense strand to SEQ ID NO: 816238
aauacuagugaccacagag

SEQ ID NO: 816240 - RNA, 19 nt, Artificial Sequence
  Description of Artificial Sequence: Synthetic oligonucleotide
  Sense strand starting at position 912 of SEQ ID NO: 587761
ggcuacuaagcuugugauu

SEQ ID NO: 816241 - RNA, 19 nt, Artificial Sequence
  Description of Artificial Sequence: Synthetic oligonucleotide
  Antisense strand to SEQ ID NO: 816240
aaucacaagcuuaguagcc

SEQ ID NO: 816242 - RNA, 19 nt, Artificial Sequence
  Description of Artificial Sequence: Synthetic oligonucleotide
  Sense strand starting at position 953 of SEQ ID NO: 587761
gucugacucuauccacuau

SEQ ID NO: 816243 - RNA, 19 nt, Artificial Sequence
  Description of Artificial Sequence: Synthetic oligonucleotide
  Antisense strand to SEQ ID NO: 816242
auaguggauagagucagac

SEQ ID NO: 816244 - RNA, 19 nt, Artificial Sequence
  Description of Artificial Sequence: Synthetic oligonucleotide
  Sense strand starting at position 1062 of SEQ ID NO: 587761
uaaauuaugcgguacagca

SEQ ID NO: 816245 - RNA, 19 nt, Artificial Sequence
  Description of Artificial Sequence: Synthetic oligonucleotide
  Antisense strand to SEQ ID NO: 816244
ugcuguaccgcauaauuua

SEQ ID NO: 816246 - RNA, 19 nt, Artificial Sequence
  Description of Artificial Sequence: Synthetic oligonucleotide
  Sense strand starting at position 1261 of SEQ ID NO: 587761
gcuggugugcacuuguaau

SEQ ID NO: 816247 - RNA, 19 nt, Artificial Sequence
  Description of Artificial Sequence: Synthetic oligonucleotide
  Antisense strand to SEQ ID NO: 816246
auuacaagugcacaccagc

SEQ ID NO: 816248 - RNA, 19 nt, Artificial Sequence
  Description of Artificial Sequence: Synthetic oligonucleotide
  Sense strand starting at position 1538 of SEQ ID NO: 587761
aggaauccacagugugaau

SEQ ID NO: 816249 - RNA, 19 nt, Artificial Sequence
  Description of Artificial Sequence: Synthetic oligonucleotide
  Antisense strand to SEQ ID NO: 816248
auucacacuguggauuccu

SEQ ID NO: 816250 - RNA, 19 nt, Artificial Sequence
  Description of Artificial Sequence: Synthetic oligonucleotide
  Sense strand starting at position 1580 of SEQ ID NO: 587761
gggaguagaugacaaugaa

SEQ ID NO: 816251 - RNA, 19 nt, Artificial Sequence
  Description of Artificial Sequence: Synthetic oligonucleotide
  Antisense strand to SEQ ID NO: 816250
uucauugucaucuacuccc

SEQ ID NO: 816252 - RNA, 19 nt, Artificial Sequence
  Description of Artificial Sequence: Synthetic oligonucleotide
  Sense strand starting at position 1619 of SEQ ID NO: 587761
gccagacugaaaggucuuu

SEQ ID NO: 816253 - RNA, 19 nt, Artificial Sequence
  Description of Artificial Sequence: Synthetic oligonucleotide
  Antisense strand to SEQ ID NO: 816252
aaagaccuuucagucuggc

SEQ ID NO: 816254 - RNA, 19 nt, Artificial Sequence
  Description of Artificial Sequence: Synthetic oligonucleotide
  Sense strand starting at position 1670 of SEQ ID NO: 587761
gaagguuccugagccggaa

SEQ ID NO: 816255 - RNA, 19 nt, Artificial Sequence
  Description of Artificial Sequence: Synthetic oligonucleotide
  Antisense strand to SEQ ID NO: 816254
uuccggcucaggaaccuuc

SEQ ID NO: 816256 - RNA, 19 nt, Artificial Sequence
  Description of Artificial Sequence: Synthetic oligonucleotide
  Sense strand starting at position 1750 of SEQ ID NO: 587761
cuuguauuaucuuuaggaa

SEQ ID NO: 816257 - RNA, 19 nt, Artificial Sequence
  Description of Artificial Sequence: Synthetic oligonucleotide
  Antisense strand to SEQ ID NO: 816256
uuccuaaagauaauacaag

SEQ ID NO: 816258 - RNA, 19 nt, Artificial Sequence
  Description of Artificial Sequence: Synthetic oligonucleotide
  Sense strand starting at position 1829 of SEQ ID NO: 587761
agcagagugccuuacacaa

SEQ ID NO: 816259 - RNA, 19 nt, Artificial Sequence
  Description of Artificial Sequence: Synthetic oligonucleotide
  Antisense strand to SEQ ID NO: 816258
uuguguaaggcacucugcu

SEQ ID NO: 816260 - RNA, 19 nt, Artificial Sequence
  Description of Artificial Sequence: Synthetic oligonucleotide
  Sense strand starting at position 1890 of SEQ ID NO: 587761
aacgaagcguacuuacaau

SEQ ID NO: 816261 - RNA, 19 nt, Artificial Sequence
  Description of Artificial Sequence: Synthetic oligonucleotide
  Antisense strand to SEQ ID NO: 816260
auuguaaguacgcuucguu

SEQ ID NO: 816262 - RNA, 19 nt, Artificial Sequence
  Description of Artificial Sequence: Synthetic oligonucleotide
  Sense strand starting at position 1896 of SEQ ID NO: 587761
gcguacuuacaaugcaaau

SEQ ID NO: 816263 - RNA, 19 nt, Artificial Sequence
  Description of Artificial Sequence: Synthetic oligonucleotide
  Antisense strand to SEQ ID NO: 816262
auuugcauuguaaguacgc

SEQ ID NO: 816264 - RNA, 19 nt, Artificial Sequence
  Description of Artificial Sequence: Synthetic oligonucleotide
  Sense strand starting at position 1908 of SEQ ID NO: 587761
ugcaaauauuaacaggaua

SEQ ID NO: 816265 - RNA, 19 nt, Artificial Sequence
  Description of Artificial Sequence: Synthetic oligonucleotide
  Antisense strand to SEQ ID NO: 816264
uauccuguuaauauuugca

SEQ ID NO: 816266 - RNA, 19 nt, Artificial Sequence
  Description of Artificial Sequence: Synthetic oligonucleotide
  Sense strand starting at position 1963 of SEQ ID NO: 587761
gcagaauacuuacaaggga

SEQ ID NO: 816267 - RNA, 19 nt, Artificial Sequence
  Description of Artificial Sequence: Synthetic oligonucleotide
  Antisense strand to SEQ ID NO: 816266
ucccuuguaaguauucugc

SEQ ID NO: 816268 - RNA, 19 nt, Artificial Sequence
  Description of Artificial Sequence: Synthetic oligonucleotide
  Sense strand starting at position 2665 of SEQ ID NO: 587761
uggucaguccaguaagaag

SEQ ID NO: 816269 - RNA, 19 nt, Artificial Sequence
  Description of Artificial Sequence: Synthetic oligonucleotide
  Antisense strand to SEQ ID NO: 816268
cuucuuacuggacugacca

SEQ ID NO: 816270 - RNA, 19 nt, Artificial Sequence
  Description of Artificial Sequence: Synthetic oligonucleotide
  Sense strand starting at position 2744 of SEQ ID NO: 587761
caugucguccuugaucaga

SEQ ID NO: 816271 - RNA, 19 nt, Artificial Sequence
  Description of Artificial Sequence: Synthetic oligonucleotide
  Antisense strand to SEQ ID NO: 816270
ucugaucaaggacgacaug

SEQ ID NO: 816272 - RNA, 19 nt, Artificial Sequence
  Description of Artificial Sequence: Synthetic oligonucleotide
  Sense strand starting at position 2746 of SEQ ID NO: 587761
ugucguccuugaucagaag

SEQ ID NO: 816273 - RNA, 19 nt, Artificial Sequence
  Description of Artificial Sequence: Synthetic oligonucleotide
  Antisense strand to SEQ ID NO: 816272
cuucugaucaaggacgaca

SEQ ID NO: 816274 - RNA, 19 nt, Artificial Sequence
  Description of Artificial Sequence: Synthetic oligonucleotide
  Sense strand starting at position 2752 of SEQ ID NO: 587761
ccuugaucagaagggugau

SEQ ID NO: 816275 - RNA, 19 nt, Artificial Sequence
  Description of Artificial Sequence: Synthetic oligonucleotide
  Antisense strand to SEQ ID NO: 816274
aucacccuucugaucaagg

SEQ ID NO: 816276 - RNA, 19 nt, Artificial Sequence
  Description of Artificial Sequence: Synthetic oligonucleotide
  Sense strand starting at position 2909 of SEQ ID NO: 587761
gaaauugagccuggaaagu

SEQ ID NO: 816277 - RNA, 19 nt, Artificial Sequence
  Description of Artificial Sequence: Synthetic oligonucleotide
  Antisense strand to SEQ ID NO: 816276
acuuuccaggcucaauuuc

SEQ ID NO: 816278 - RNA, 19 nt, Artificial Sequence
  Description of Artificial Sequence: Synthetic oligonucleotide
  Sense strand starting at position 3471 of SEQ ID NO: 587761
aaccuacugcugugagaaa

SEQ ID NO: 816279 - RNA, 19 nt, Artificial Sequence
  Description of Artificial Sequence: Synthetic oligonucleotide
  Antisense strand to SEQ ID NO: 816278
uuucucacagcaguagguu

SEQ ID NO: 816280 - RNA, 19 nt, Artificial Sequence
  Description of Artificial Sequence: Synthetic oligonucleotide
  Sense strand starting at position 3639 of SEQ ID NO: 587761
uuaggaagguuccuuguga

SEQ ID NO: 816281 - RNA, 19 nt, Artificial Sequence
  Description of Artificial Sequence: Synthetic oligonucleotide
  Antisense strand to SEQ ID NO: 816280
ucacaaggaaccuuccuaa

SEQ ID NO: 816282 - RNA, 19 nt, Artificial Sequence
  Description of Artificial Sequence: Synthetic oligonucleotide
  Sense strand starting at position 3640 of SEQ ID NO: 587761
uaggaagguuccuugugag

SEQ ID NO: 816283 - RNA, 19 nt, Artificial Sequence
  Description of Artificial Sequence: Synthetic oligonucleotide
  Antisense strand to SEQ ID NO: 816282
cucacaaggaaccuuccua

SEQ ID NO: 816284 - RNA, 19 nt, Artificial Sequence
  Description of Artificial Sequence: Synthetic oligonucleotide
  Sense strand starting at position 3647 of SEQ ID NO: 587761
guuccuugugagagguagu

SEQ ID NO: 816285 - RNA, 19 nt, Artificial Sequence
  Description of Artificial Sequence: Synthetic oligonucleotide
  Antisense strand to SEQ ID NO: 816284
acuaccucucacaaggaac

SEQ ID NO: 816286 - RNA, 19 nt, Artificial Sequence
  Description of Artificial Sequence: Synthetic oligonucleotide
  Sense strand starting at position 3747 of SEQ ID NO: 587761
acaggaagucauugaguga

SEQ ID NO: 816287 - RNA, 19 nt, Artificial Sequence
  Description of Artificial Sequence: Synthetic oligonucleotide
  Antisense strand to SEQ ID NO: 816286
ucacucaaugacuuccugu

SEQ ID NO: 816288 - RNA, 19 nt, Artificial Sequence
  Description of Artificial Sequence: Synthetic oligonucleotide
  Sense strand starting at position 3791 of SEQ ID NO: 587761
gagggaauggcuugaguga

SEQ ID NO: 816289 - RNA, 19 nt, Artificial Sequence
  Description of Artificial Sequence: Synthetic oligonucleotide
  Antisense strand to SEQ ID NO: 816288
ucacucaagccauucccuc

SEQ ID NO: 816290 - RNA, 19 nt, Artificial Sequence
  Description of Artificial Sequence: Synthetic oligonucleotide
  Sense strand starting at position 3819 of SEQ ID NO: 587761
gguagaagaaugcauggua

SEQ ID NO: 816291 - RNA, 19 nt, Artificial Sequence
  Description of Artificial Sequence: Synthetic oligonucleotide
  Antisense strand to SEQ ID NO: 816290
uaccaugcauucuucuacc

SEQ ID NO: 816292 - RNA, 19 nt, Artificial Sequence
  Description of Artificial Sequence: Synthetic oligonucleotide
  Sense strand starting at position 3824 of SEQ ID NO: 587761
aagaaugcaugguauaaag

SEQ ID NO: 816293 - RNA, 19 nt, Artificial Sequence
  Description of Artificial Sequence: Synthetic oligonucleotide
  Antisense strand to SEQ ID NO: 816292
cuuuauaccaugcauucuu

SEQ ID NO: 816294 - RNA, 19 nt, Artificial Sequence
  Description of Artificial Sequence: Synthetic oligonucleotide
  Sense strand starting at position 17 of SEQ ID NO: 587762
augucaacuuaucucugua

SEQ ID NO: 816295 - RNA, 19 nt, Artificial Sequence
  Description of Artificial Sequence: Synthetic oligonucleotide
  Antisense strand to SEQ ID NO: 816294
uacagagauaaguugacau

SEQ ID NO: 816296 - RNA, 19 nt, Artificial Sequence
  Description of Artificial Sequence: Synthetic oligonucleotide
  Sense strand starting at position 416 of SEQ ID NO: 587762
ggaacacuauguucuccua

SEQ ID NO: 816297 - RNA, 19 nt, Artificial Sequence
  Description of Artificial Sequence: Synthetic oligonucleotide
  Antisense strand to SEQ ID NO: 816296
uaggagaacauaguguucc

SEQ ID NO: 816298 - RNA, 19 nt, Artificial Sequence
  Description of Artificial Sequence: Synthetic oligonucleotide
  Sense strand starting at position 419 of SEQ ID NO: 587762
acacuauguucuccuaugu

SEQ ID NO: 816299 - RNA, 19 nt, Artificial Sequence
  Description of Artificial Sequence: Synthetic oligonucleotide
  Antisense strand to SEQ ID NO: 816298
acauaggagaacauagugu

SEQ ID NO: 816300 - RNA, 19 nt, Artificial Sequence
  Description of Artificial Sequence: Synthetic oligonucleotide
  Sense strand starting at position 424 of SEQ ID NO: 587762
auguucuccuaugugcaua

SEQ ID NO: 816301 - RNA, 19 nt, Artificial Sequence
  Description of Artificial Sequence: Synthetic oligonucleotide
  Antisense strand to SEQ ID NO: 816300
uaugcacauaggagaacau

SEQ ID NO: 816302 - RNA, 19 nt, Artificial Sequence
  Description of Artificial Sequence: Synthetic oligonucleotide
  Sense strand starting at position 429 of SEQ ID NO: 587762
cuccuaugugcauagguca

SEQ ID NO: 816303 - RNA, 19 nt, Artificial Sequence
  Description of Artificial Sequence: Synthetic oligonucleotide
  Antisense strand to SEQ ID NO: 816302
ugaccuaugcacauaggag

SEQ ID NO: 816304 - RNA, 19 nt, Artificial Sequence
  Description of Artificial Sequence: Synthetic oligonucleotide
  Sense strand starting at position 437 of SEQ ID NO: 587762
ugcauaggucauugguaga

SEQ ID NO: 816305 - RNA, 19 nt, Artificial Sequence
  Description of Artificial Sequence: Synthetic oligonucleotide
  Antisense strand to SEQ ID NO: 816304
ucuaccaaugaccuaugca

SEQ ID NO: 816306 - RNA, 19 nt, Artificial Sequence
  Description of Artificial Sequence: Synthetic oligonucleotide
  Sense strand starting at position 444 of SEQ ID NO: 587762
gucauugguagacaugcaa

SEQ ID NO: 816307 - RNA, 19 nt, Artificial Sequence
  Description of Artificial Sequence: Synthetic oligonucleotide
  Antisense strand to SEQ ID NO: 816306
uugcaugucuaccaaugac

SEQ ID NO: 816308 - RNA, 19 nt, Artificial Sequence
  Description of Artificial Sequence: Synthetic oligonucleotide
  Sense strand starting at position 502 of SEQ ID NO: 587762
uuaguugucuucuuguuga

SEQ ID NO: 816309 - RNA, 19 nt, Artificial Sequence
  Description of Artificial Sequence: Synthetic oligonucleotide
  Antisense strand to SEQ ID NO: 816308
ucaacaagaagacaacuaa

SEQ ID NO: 816310 - RNA, 19 nt, Artificial Sequence
  Description of Artificial Sequence: Synthetic oligonucleotide
  Sense strand starting at position 505 of SEQ ID NO: 587762
guugucuucuuguugauuu

SEQ ID NO: 816311 - RNA, 19 nt, Artificial Sequence
  Description of Artificial Sequence: Synthetic oligonucleotide
  Antisense strand to SEQ ID NO: 816310
aaaucaacaagaagacaac

SEQ ID NO: 816312 - RNA, 19 nt, Artificial Sequence
  Description of Artificial Sequence: Synthetic oligonucleotide
  Sense strand starting at position 512 of SEQ ID NO: 587762
ucuuguugauuugaaagaa

SEQ ID NO: 816313 - RNA, 19 nt, Artificial Sequence
  Description of Artificial Sequence: Synthetic oligonucleotide
  Antisense strand to SEQ ID NO: 816312
uucuuucaaaucaacaaga

SEQ ID NO: 816314 - RNA, 19 nt, Artificial Sequence
  Description of Artificial Sequence: Synthetic oligonucleotide
  Sense strand starting at position 653 of SEQ ID NO: 587762
guucuuaggucucugugaa

SEQ ID NO: 816315 - RNA, 19 nt, Artificial Sequence
  Description of Artificial Sequence: Synthetic oligonucleotide
  Antisense strand to SEQ ID NO: 816314
uucacagagaccuaagaac

SEQ ID NO: 816316 - RNA, 19 nt, Artificial Sequence
  Description of Artificial Sequence: Synthetic oligonucleotide
  Sense strand starting at position 654 of SEQ ID NO: 587762
uucuuaggucucugugaac

SEQ ID NO: 816317 - RNA, 19 nt, Artificial Sequence
  Description of Artificial Sequence: Synthetic oligonucleotide
  Antisense strand to SEQ ID NO: 816316
guucacagagaccuaagaa

SEQ ID NO: 816318 - RNA, 19 nt, Artificial Sequence
  Description of Artificial Sequence: Synthetic oligonucleotide
  Sense strand starting at position 1296 of SEQ ID NO: 587762
gggacuuaguucucauuau

SEQ ID NO: 816319 - RNA, 19 nt, Artificial Sequence
  Description of Artificial Sequence: Synthetic oligonucleotide
  Antisense strand to SEQ ID NO: 816318
auaaugagaacuaaguccc

SEQ ID NO: 816320 - RNA, 19 nt, Artificial Sequence
  Description of Artificial Sequence: Synthetic oligonucleotide
  Sense strand starting at position 1415 of SEQ ID NO: 587762
ucucuuaaguguuccauaa

SEQ ID NO: 816321 - RNA, 19 nt, Artificial Sequence
  Description of Artificial Sequence: Synthetic oligonucleotide
  Antisense strand to SEQ ID NO: 816320
uuauggaacacuuaagaga

SEQ ID NO: 816322 - RNA, 19 nt, Artificial Sequence
  Description of Artificial Sequence: Synthetic oligonucleotide
  Sense strand starting at position 1423 of SEQ ID NO: 587762
guguuccauaagggaaauu

SEQ ID NO: 816323 - RNA, 19 nt, Artificial Sequence
  Description of Artificial Sequence: Synthetic oligonucleotide
  Antisense strand to SEQ ID NO: 816322
aauuucccuuauggaacac

SEQ ID NO: 816324 - RNA, 19 nt, Artificial Sequence
  Description of Artificial Sequence: Synthetic oligonucleotide
  Sense strand starting at position 1432 of SEQ ID NO: 587762
aagggaaauuauuauggga

SEQ ID NO: 816325 - RNA, 19 nt, Artificial Sequence
  Description of Artificial Sequence: Synthetic oligonucleotide
  Antisense strand to SEQ ID NO: 816324
ucccauaauaauuucccuu

SEQ ID NO: 816326 - RNA, 19 nt, Artificial Sequence
  Description of Artificial Sequence: Synthetic oligonucleotide
  Sense strand starting at position 1434 of SEQ ID NO: 587762
gggaaauuauuaugggauu

SEQ ID NO: 816327 - RNA, 19 nt, Artificial Sequence
  Description of Artificial Sequence: Synthetic oligonucleotide
  Antisense strand to SEQ ID NO: 816326
aaucccauaauaauuuccc

SEQ ID NO: 816328 - RNA, 19 nt, Artificial Sequence
  Description of Artificial Sequence: Synthetic oligonucleotide
  Sense strand starting at position 1435 of SEQ ID NO: 587762
ggaaauuauuaugggauug

SEQ ID NO: 816329 - RNA, 19 nt, Artificial Sequence
  Description of Artificial Sequence: Synthetic oligonucleotide
  Antisense strand to SEQ ID NO: 816328
caaucccauaauaauuucc

SEQ ID NO: 816330 - RNA, 19 nt, Artificial Sequence
  Description of Artificial Sequence: Synthetic oligonucleotide
  Sense strand starting at position 1437 of SEQ ID NO: 587762
aaauuauuaugggauugga

SEQ ID NO: 816331 - RNA, 19 nt, Artificial Sequence
  Description of Artificial Sequence: Synthetic oligonucleotide
  Antisense strand to SEQ ID NO: 816330
uccaaucccauaauaauuu

SEQ ID NO: 816332 - RNA, 19 nt, Artificial Sequence
  Description of Artificial Sequence: Synthetic oligonucleotide
  Sense strand starting at position 1985 of SEQ ID NO: 587762
agcagauggugucugucaa

SEQ ID NO: 816333 - RNA, 19 nt, Artificial Sequence
  Description of Artificial Sequence: Synthetic oligonucleotide
  Antisense strand to SEQ ID NO: 816332
uugacagacaccaucugcu

SEQ ID NO: 816334 - RNA, 19 nt, Artificial Sequence
  Description of Artificial Sequence: Synthetic oligonucleotide
  Sense strand starting at position 1986 of SEQ ID NO: 587762
gcagauggugucugucaac

SEQ ID NO: 816335 - RNA, 19 nt, Artificial Sequence
  Description of Artificial Sequence: Synthetic oligonucleotide
  Antisense strand to SEQ ID NO: 816334
guugacagacaccaucugc

SEQ ID NO: 816336 - RNA, 19 nt, Artificial Sequence
  Description of Artificial Sequence: Synthetic oligonucleotide
  Sense strand starting at position 1991 of SEQ ID NO: 587762
uggugucugucaacgaguu

SEQ ID NO: 816337 - RNA, 19 nt, Artificial Sequence
  Description of Artificial Sequence: Synthetic oligonucleotide
  Antisense strand to SEQ ID NO: 816336
aacucguugacagacacca

SEQ ID NO: 816338 - RNA, 19 nt, Artificial Sequence
  Description of Artificial Sequence: Synthetic oligonucleotide
  Sense strand starting at position 2450 of SEQ ID NO: 587762
agugacagccuguguuacu

SEQ ID NO: 816339 - RNA, 19 nt, Artificial Sequence
  Description of Artificial Sequence: Synthetic oligonucleotide
  Antisense strand to SEQ ID NO: 816338
aguaacacaggcugucacu

SEQ ID NO: 816340 - RNA, 19 nt, Artificial Sequence
  Description of Artificial Sequence: Synthetic oligonucleotide
  Sense strand starting at position 2479 of SEQ ID NO: 587762
gugggaguuggccaagcuu

SEQ ID NO: 816341 - RNA, 19 nt, Artificial Sequence
  Description of Artificial Sequence: Synthetic oligonucleotide
  Antisense strand to SEQ ID NO: 816340
aagcuuggccaacucccac

SEQ ID NO: 816342 - RNA, 19 nt, Artificial Sequence
  Description of Artificial Sequence: Synthetic oligonucleotide
  Sense strand starting at position 2871 of SEQ ID NO: 587762
gggauuuggucccaauaau

SEQ ID NO: 816343 - RNA, 19 nt, Artificial Sequence
  Description of Artificial Sequence: Synthetic oligonucleotide
  Antisense strand to SEQ ID NO: 816342
auuauugggaccaaauccc

SEQ ID NO: 816344 - RNA, 19 nt, Artificial Sequence
  Description of Artificial Sequence: Synthetic oligonucleotide
  Sense strand starting at position 2909 of SEQ ID NO: 587762
agaggcuuccuaugcuaca

SEQ ID NO: 816345 - RNA, 19 nt, Artificial Sequence
  Description of Artificial Sequence: Synthetic oligonucleotide
  Antisense strand to SEQ ID NO: 816344
uguagcauaggaagccucu

SEQ ID NO: 816346 - RNA, 19 nt, Artificial Sequence
  Description of Artificial Sequence: Synthetic oligonucleotide
  Sense strand starting at position 3155 of SEQ ID NO: 587762
gcaugcaugaggcaucaau

SEQ ID NO: 816347 - RNA, 19 nt, Artificial Sequence
  Description of Artificial Sequence: Synthetic oligonucleotide
  Antisense strand to SEQ ID NO: 816346
auugaugccucaugcaugc

SEQ ID NO: 816348 - RNA, 19 nt, Artificial Sequence
  Description of Artificial Sequence: Synthetic oligonucleotide
  Sense strand starting at position 3322 of SEQ ID NO: 587762
cccugaaugcaugguauua

SEQ ID NO: 816349 - RNA, 19 nt, Artificial Sequence
  Description of Artificial Sequence: Synthetic oligonucleotide
  Antisense strand to SEQ ID NO: 816348
uaauaccaugcauucaggg

SEQ ID NO: 816350 - RNA, 19 nt, Artificial Sequence
  Description of Artificial Sequence: Synthetic oligonucleotide
  Sense strand starting at position 3343 of SEQ ID NO: 587762
ugacauaagccagaugcau

SEQ ID NO: 816351 - RNA, 19 nt, Artificial Sequence
  Description of Artificial Sequence: Synthetic oligonucleotide
  Antisense strand to SEQ ID NO: 816350
augcaucuggcuuauguca

SEQ ID NO: 816352 - RNA, 19 nt, Artificial Sequence
  Description of Artificial Sequence: Synthetic oligonucleotide
  Sense strand starting at position 3401 of SEQ ID NO: 587762
ucaaacuuaugggaguaga

SEQ ID NO: 816353 - RNA, 19 nt, Artificial Sequence
  Description of Artificial Sequence: Synthetic oligonucleotide
  Antisense strand to SEQ ID NO: 816352
ucuacucccauaaguuuga

SEQ ID NO: 816354 - RNA, 19 nt, Artificial Sequence
  Description of Artificial Sequence: Synthetic oligonucleotide
  Sense strand starting at position 3514 of SEQ ID NO: 587762
guuuaagagcucuauugca

SEQ ID NO: 816355 - RNA, 19 nt, Artificial Sequence
  Description of Artificial Sequence: Synthetic oligonucleotide
  Antisense strand to SEQ ID NO: 816354
ugcaauagagcucuuaaac

SEQ ID NO: 816356 - RNA, 19 nt, Artificial Sequence
  Description of Artificial Sequence: Synthetic oligonucleotide
  Sense strand starting at position 3548 of SEQ ID NO: 587762
agguaauagcaauguauca

SEQ ID NO: 816357 - RNA, 19 nt, Artificial Sequence
  Description of Artificial Sequence: Synthetic oligonucleotide
  Antisense strand to SEQ ID NO: 816356
ugauacauugcuauuaccu

SEQ ID NO: 816358 - RNA, 19 nt, Artificial Sequence
  Description of Artificial Sequence: Synthetic oligonucleotide
  Sense strand starting at position 3794 of SEQ ID NO: 587762
cauggaccuggcugugauu

SEQ ID NO: 816359 - RNA, 19 nt, Artificial Sequence
  Description of Artificial Sequence: Synthetic oligonucleotide
  Antisense strand to SEQ ID NO: 816358
aaucacagccagguccaug

SEQ ID NO: 816360 - RNA, 19 nt, Artificial Sequence
  Description of Artificial Sequence: Synthetic oligonucleotide
  Sense strand starting at position 3796 of SEQ ID NO: 587762
uggaccuggcugugauuga

SEQ ID NO: 816361 - RNA, 19 nt, Artificial Sequence
  Description of Artificial Sequence: Synthetic oligonucleotide
  Antisense strand to SEQ ID NO: 816360
ucaaucacagccaggucca

SEQ ID NO: 816362 - RNA, 19 nt, Artificial Sequence
  Description of Artificial Sequence: Synthetic oligonucleotide
  Sense strand starting at position 3800 of SEQ ID NO: 587762
ccuggcugugauugaucau

SEQ ID NO: 816363 - RNA, 19 nt, Artificial Sequence
  Description of Artificial Sequence: Synthetic oligonucleotide
  Antisense strand to SEQ ID NO: 816362
augaucaaucacagccagg

SEQ ID NO: 816364 - RNA, 19 nt, Artificial Sequence
  Description of Artificial Sequence: Synthetic oligonucleotide
  Sense strand starting at position 3801 of SEQ ID NO: 587762
cuggcugugauugaucaua

SEQ ID NO: 816365 - RNA, 19 nt, Artificial Sequence
  Description of Artificial Sequence: Synthetic oligonucleotide
  Antisense strand to SEQ ID NO: 816364
uaugaucaaucacagccag

SEQ ID NO: 816366 - RNA, 19 nt, Artificial Sequence
  Description of Artificial Sequence: Synthetic oligonucleotide
  Sense strand starting at position 3803 of SEQ ID NO: 587762
ggcugugauugaucauagu

SEQ ID NO: 816367 - RNA, 19 nt, Artificial Sequence
  Description of Artificial Sequence: Synthetic oligonucleotide
  Antisense strand to SEQ ID NO: 816366
acuaugaucaaucacagcc

SEQ ID NO: 816368 - RNA, 19 nt, Artificial Sequence
  Description of Artificial Sequence: Synthetic oligonucleotide
  Sense strand starting at position 3809 of SEQ ID NO: 587762
gauugaucauaguaacaag

SEQ ID NO: 816369 - RNA, 19 nt, Artificial Sequence
  Description of Artificial Sequence: Synthetic oligonucleotide
  Antisense strand to SEQ ID NO: 816368
cuuguuacuaugaucaauc

SEQ ID NO: 816370 - RNA, 19 nt, Artificial Sequence
  Description of Artificial Sequence: Synthetic oligonucleotide
  Sense strand starting at position 3877 of SEQ ID NO: 587762
gucgguuucacuggguaga

SEQ ID NO: 816371 - RNA, 19 nt, Artificial Sequence
  Description of Artificial Sequence: Synthetic oligonucleotide
  Antisense strand to SEQ ID NO: 816370
ucuacccagugaaaccgac

SEQ ID NO: 816372 - RNA, 19 nt, Artificial Sequence
  Description of Artificial Sequence: Synthetic oligonucleotide
  Sense strand starting at position 3879 of SEQ ID NO: 587762
cgguuucacuggguagaga

SEQ ID NO: 816373 - RNA, 19 nt, Artificial Sequence
  Description of Artificial Sequence: Synthetic oligonucleotide
  Antisense strand to SEQ ID NO: 816372
ucucuacccagugaaaccg

SEQ ID NO: 816374 - RNA, 19 nt, Artificial Sequence
  Description of Artificial Sequence: Synthetic oligonucleotide
  Sense strand starting at position 2002 of SEQ ID NO: 587763
gaauaauguguccauugug

SEQ ID NO: 816375 - RNA, 19 nt, Artificial Sequence
  Description of Artificial Sequence: Synthetic oligonucleotide
  Antisense strand to SEQ ID NO: 816374
cacaauggacacauuauuc

SEQ ID NO: 816376 - RNA, 19 nt, Artificial Sequence
  Description of Artificial Sequence: Synthetic oligonucleotide
  Sense strand starting at position 2042 of SEQ ID NO: 587763
caguguaggcaccaugauu

SEQ ID NO: 816377 - RNA, 19 nt, Artificial Sequence
  Description of Artificial Sequence: Synthetic oligonucleotide
  Antisense strand to SEQ ID NO: 816376
aaucauggugccuacacug

SEQ ID NO: 816378 - RNA, 19 nt, Artificial Sequence
  Description of Artificial Sequence: Synthetic oligonucleotide
  Sense strand starting at position 2249 of SEQ ID NO: 587763
aauucuuuauaguugguga

SEQ ID NO: 816379 - RNA, 19 nt, Artificial Sequence
  Description of Artificial Sequence: Synthetic oligonucleotide
  Antisense strand to SEQ ID NO: 816378
ucaccaacuauaaagaauu

SEQ ID NO: 816380 - RNA, 19 nt, Artificial Sequence
  Description of Artificial Sequence: Synthetic oligonucleotide
  Sense strand starting at position 2251 of SEQ ID NO: 587763
uucuuuauaguuggugaca

SEQ ID NO: 816381 - RNA, 19 nt, Artificial Sequence
  Description of Artificial Sequence: Synthetic oligonucleotide
  Antisense strand to SEQ ID NO: 816380
ugucaccaacuauaaagaa

SEQ ID NO: 816382 - RNA, 19 nt, Artificial Sequence
  Description of Artificial Sequence: Synthetic oligonucleotide
  Sense strand starting at position 2252 of SEQ ID NO: 587763
ucuuuauaguuggugacaa

SEQ ID NO: 816383 - RNA, 19 nt, Artificial Sequence
  Description of Artificial Sequence: Synthetic oligonucleotide
  Antisense strand to SEQ ID NO: 816382
uugucaccaacuauaaaga

SEQ ID NO: 816384 - RNA, 19 nt, Artificial Sequence
  Description of Artificial Sequence: Synthetic oligonucleotide
  Sense strand starting at position 2254 of SEQ ID NO: 587763
uuuauaguuggugacaagu

SEQ ID NO: 816385 - RNA, 19 nt, Artificial Sequence
  Description of Artificial Sequence: Synthetic oligonucleotide
  Antisense strand to SEQ ID NO: 816384
acuugucaccaacuauaaa

SEQ ID NO: 816386 - RNA, 19 nt, Artificial Sequence
  Description of Artificial Sequence: Synthetic oligonucleotide
  Sense strand starting at position 2264 of SEQ ID NO: 587763
gugacaagugugcuguagu

SEQ ID NO: 816387 - RNA, 19 nt, Artificial Sequence
  Description of Artificial Sequence: Synthetic oligonucleotide
  Antisense strand to SEQ ID NO: 816386
acuacagcacacuugucac

SEQ ID NO: 816388 - RNA, 19 nt, Artificial Sequence
  Description of Artificial Sequence: Synthetic oligonucleotide
  Sense strand starting at position 2353 of SEQ ID NO: 587763
acuggauggguguauuagu

SEQ ID NO: 816389 - RNA, 19 nt, Artificial Sequence
  Description of Artificial Sequence: Synthetic oligonucleotide
  Antisense strand to SEQ ID NO: 816388
acuaauacacccauccagu

SEQ ID NO: 816390 - RNA, 19 nt, Artificial Sequence
  Description of Artificial Sequence: Synthetic oligonucleotide
  Sense strand starting at position 2382 of SEQ ID NO: 587763
uguguaauagaucaccuca

SEQ ID NO: 816391 - RNA, 19 nt, Artificial Sequence
  Description of Artificial Sequence: Synthetic oligonucleotide
  Antisense strand to SEQ ID NO: 816390
ugaggugaucuauuacaca

SEQ ID NO: 816392 - RNA, 19 nt, Artificial Sequence
  Description of Artificial Sequence: Synthetic oligonucleotide
  Sense strand starting at position 2500 of SEQ ID NO: 587763
ugagguuguggucaagaug

SEQ ID NO: 816393 - RNA, 19 nt, Artificial Sequence
  Description of Artificial Sequence: Synthetic oligonucleotide
  Antisense strand to SEQ ID NO: 816392
caucuugaccacaaccuca

SEQ ID NO: 816394 - RNA, 19 nt, Artificial Sequence
  Description of Artificial Sequence: Synthetic oligonucleotide
  Sense strand starting at position 2503 of SEQ ID NO: 587763
gguuguggucaagaugaga

SEQ ID NO: 816395 - RNA, 19 nt, Artificial Sequence
  Description of Artificial Sequence: Synthetic oligonucleotide
  Antisense strand to SEQ ID NO: 816394
ucucaucuugaccacaacc

SEQ ID NO: 816396 - RNA, 19 nt, Artificial Sequence
  Description of Artificial Sequence: Synthetic oligonucleotide
  Sense strand starting at position 2766 of SEQ ID NO: 587763
augaccuagucucugaaau

SEQ ID NO: 816397 - RNA, 19 nt, Artificial Sequence
  Description of Artificial Sequence: Synthetic oligonucleotide
  Antisense strand to SEQ ID NO: 816396
auuucagagacuaggucau

SEQ ID NO: 816398 - RNA, 19 nt, Artificial Sequence
  Description of Artificial Sequence: Synthetic oligonucleotide
  Sense strand starting at position 2767 of SEQ ID NO: 587763
ugaccuagucucugaaauc

SEQ ID NO: 816399 - RNA, 19 nt, Artificial Sequence
  Description of Artificial Sequence: Synthetic oligonucleotide
  Antisense strand to SEQ ID NO: 816398
gauuucagagacuagguca

SEQ ID NO: 816400 - RNA, 19 nt, Artificial Sequence
  Description of Artificial Sequence: Synthetic oligonucleotide
  Sense strand starting at position 2831 of SEQ ID NO: 587763
cauucuguaggaggguaau

SEQ ID NO: 816401 - RNA, 19 nt, Artificial Sequence
  Description of Artificial Sequence: Synthetic oligonucleotide
  Antisense strand to SEQ ID NO: 816400
auuacccuccuacagaaug

SEQ ID NO: 816402 - RNA, 19 nt, Artificial Sequence
  Description of Artificial Sequence: Synthetic oligonucleotide
  Sense strand starting at position 2879 of SEQ ID NO: 587763
caaauaauuggugggcaua

SEQ ID NO: 816403 - RNA, 19 nt, Artificial Sequence
  Description of Artificial Sequence: Synthetic oligonucleotide
  Antisense strand to SEQ ID NO: 816402
uaugcccaccaauuauuug

SEQ ID NO: 816404 - RNA, 19 nt, Artificial Sequence
  Description of Artificial Sequence: Synthetic oligonucleotide
  Sense strand starting at position 2880 of SEQ ID NO: 587763
aaauaauuggugggcauau

SEQ ID NO: 816405 - RNA, 19 nt, Artificial Sequence
  Description of Artificial Sequence: Synthetic oligonucleotide
  Antisense strand to SEQ ID NO: 816404
auaugcccaccaauuauuu

SEQ ID NO: 816406 - RNA, 19 nt, Artificial Sequence
  Description of Artificial Sequence: Synthetic oligonucleotide
  Sense strand starting at position 2881 of SEQ ID NO: 587763
aauaauuggugggcauauu

SEQ ID NO: 816407 - RNA, 19 nt, Artificial Sequence
  Description of Artificial Sequence: Synthetic oligonucleotide
  Antisense strand to SEQ ID NO: 816406
aauaugcccaccaauuauu

SEQ ID NO: 816408 - RNA, 19 nt, Artificial Sequence
  Description of Artificial Sequence: Synthetic oligonucleotide
  Sense strand starting at position 2949 of SEQ ID NO: 587763
ucaaauauuggauguccau

SEQ ID NO: 816409 - RNA, 19 nt, Artificial Sequence
  Description of Artificial Sequence: Synthetic oligonucleotide
  Antisense strand to SEQ ID NO: 816408
auggacauccaauauuuga

SEQ ID NO: 816410 - RNA, 19 nt, Artificial Sequence
  Description of Artificial Sequence: Synthetic oligonucleotide
  Sense strand starting at position 3010 of SEQ ID NO: 587763
acaggcaaauguuuaaaca

SEQ ID NO: 816411 - RNA, 19 nt, Artificial Sequence
  Description of Artificial Sequence: Synthetic oligonucleotide
  Antisense strand to SEQ ID NO: 816410
uguuuaaacauuugccugu

SEQ ID NO: 816412 - RNA, 19 nt, Artificial Sequence
  Description of Artificial Sequence: Synthetic oligonucleotide
  Sense strand starting at position 3113 of SEQ ID NO: 587763
auggguugcagguaauaaa

SEQ ID NO: 816413 - RNA, 19 nt, Artificial Sequence
  Description of Artificial Sequence: Synthetic oligonucleotide
  Antisense strand to SEQ ID NO: 816412
uuuauuaccugcaacccau

SEQ ID NO: 816414 - RNA, 19 nt, Artificial Sequence
  Description of Artificial Sequence: Synthetic oligonucleotide
  Sense strand starting at position 3141 of SEQ ID NO: 587763
caaugucuggcacaaggua

SEQ ID NO: 816415 - RNA, 19 nt, Artificial Sequence
  Description of Artificial Sequence: Synthetic oligonucleotide
  Antisense strand to SEQ ID NO: 816414
uaccuugugccagacauug

SEQ ID NO: 816416 - RNA, 19 nt, Artificial Sequence
  Description of Artificial Sequence: Synthetic oligonucleotide
  Sense strand starting at position 3227 of SEQ ID NO: 587763
caaauaugugucugaguca

SEQ ID NO: 816417 - RNA, 19 nt, Artificial Sequence
  Description of Artificial Sequence: Synthetic oligonucleotide
  Antisense strand to SEQ ID NO: 816416
ugacucagacacauauuug

SEQ ID NO: 816418 - RNA, 19 nt, Artificial Sequence
  Description of Artificial Sequence: Synthetic oligonucleotide
  Sense strand starting at position 3230 of SEQ ID NO: 587763
auaugugucugagucagaa

SEQ ID NO: 816419 - RNA, 19 nt, Artificial Sequence
  Description of Artificial Sequence: Synthetic oligonucleotide
  Antisense strand to SEQ ID NO: 816418
uucugacucagacacauau

SEQ ID NO: 816420 - RNA, 19 nt, Artificial Sequence
  Description of Artificial Sequence: Synthetic oligonucleotide
  Sense strand starting at position 3232 of SEQ ID NO: 587763
augugucugagucagaaca

SEQ ID NO: 816421 - RNA, 19 nt, Artificial Sequence
  Description of Artificial Sequence: Synthetic oligonucleotide
  Antisense strand to SEQ ID NO: 816420
uguucugacucagacacau

SEQ ID NO: 816422 - RNA, 19 nt, Artificial Sequence
  Description of Artificial Sequence: Synthetic oligonucleotide
  Sense strand starting at position 3337 of SEQ ID NO: 587763
aucuuuacuucuguaguaa

SEQ ID NO: 816423 - RNA, 19 nt, Artificial Sequence
  Description of Artificial Sequence: Synthetic oligonucleotide
  Antisense strand to SEQ ID NO: 816422
uuacuacagaaguaaagau

SEQ ID NO: 816424 - RNA, 19 nt, Artificial Sequence
  Description of Artificial Sequence: Synthetic oligonucleotide
  Sense strand starting at position 3338 of SEQ ID NO: 587763
ucuuuacuucuguaguaag

SEQ ID NO: 816425 - RNA, 19 nt, Artificial Sequence
  Description of Artificial Sequence: Synthetic oligonucleotide
  Antisense strand to SEQ ID NO: 816424
cuuacuacagaaguaaaga

SEQ ID NO: 816426 - RNA, 19 nt, Artificial Sequence
  Description of Artificial Sequence: Synthetic oligonucleotide
  Sense strand starting at position 3348 of SEQ ID NO: 587763
uguaguaaggaauauaguu

SEQ ID NO: 816427 - RNA, 19 nt, Artificial Sequence
  Description of Artificial Sequence: Synthetic oligonucleotide
  Antisense strand to SEQ ID NO: 816426
aacuauauuccuuacuaca

SEQ ID NO: 816428 - RNA, 19 nt, Artificial Sequence
  Description of Artificial Sequence: Synthetic oligonucleotide
  Sense strand starting at position 3468 of SEQ ID NO: 587763
ucuugaguguuuccaauaa

SEQ ID NO: 816429 - RNA, 19 nt, Artificial Sequence
  Description of Artificial Sequence: Synthetic oligonucleotide
  Antisense strand to SEQ ID NO: 816428
uuauuggaaacacucaaga

SEQ ID NO: 816430 - RNA, 19 nt, Artificial Sequence
  Description of Artificial Sequence: Synthetic oligonucleotide
  Sense strand starting at position 3545 of SEQ ID NO: 587763
ccuuucucaggguaauaac

SEQ ID NO: 816431 - RNA, 19 nt, Artificial Sequence
  Description of Artificial Sequence: Synthetic oligonucleotide
  Antisense strand to SEQ ID NO: 816430
guuauuacccugagaaagg

SEQ ID NO: 816432 - RNA, 19 nt, Artificial Sequence
  Description of Artificial Sequence: Synthetic oligonucleotide
  Sense strand starting at position 3555 of SEQ ID NO: 587763
gguaauaacuuucugcuca

SEQ ID NO: 816433 - RNA, 19 nt, Artificial Sequence
  Description of Artificial Sequence: Synthetic oligonucleotide
  Antisense strand to SEQ ID NO: 816432
ugagcagaaaguuauuacc

SEQ ID NO: 816434 - RNA, 19 nt, Artificial Sequence
  Description of Artificial Sequence: Synthetic oligonucleotide
  Sense strand starting at position 3578 of SEQ ID NO: 587763
uguugugagguuuaaguca

SEQ ID NO: 816435 - RNA, 19 nt, Artificial Sequence
  Description of Artificial Sequence: Synthetic oligonucleotide
  Antisense strand to SEQ ID NO: 816434
ugacuuaaaccucacaaca

SEQ ID NO: 816436 - RNA, 19 nt, Artificial Sequence
  Description of Artificial Sequence: Synthetic oligonucleotide
  Sense strand starting at position 3583 of SEQ ID NO: 587763
ugagguuuaagucaaguaa

SEQ ID NO: 816437 - RNA, 19 nt, Artificial Sequence
  Description of Artificial Sequence: Synthetic oligonucleotide
  Antisense strand to SEQ ID NO: 816436
uuacuugacuuaaaccuca

SEQ ID NO: 816438 - RNA, 19 nt, Artificial Sequence
  Description of Artificial Sequence: Synthetic oligonucleotide
  Sense strand starting at position 3587 of SEQ ID NO: 587763
guuuaagucaaguaagaug

SEQ ID NO: 816439 - RNA, 19 nt, Artificial Sequence
  Description of Artificial Sequence: Synthetic oligonucleotide
  Antisense strand to SEQ ID NO: 816438
caucuuacuugacuuaaac

SEQ ID NO: 816440 - RNA, 19 nt, Artificial Sequence
  Description of Artificial Sequence: Synthetic oligonucleotide
  Sense strand starting at position 3594 of SEQ ID NO: 587763
ucaaguaagauguguguaa

SEQ ID NO: 816441 - RNA, 19 nt, Artificial Sequence
  Description of Artificial Sequence: Synthetic oligonucleotide
  Antisense strand to SEQ ID NO: 816440
uuacacacaucuuacuuga

SEQ ID NO: 816442 - RNA, 19 nt, Artificial Sequence
  Description of Artificial Sequence: Synthetic oligonucleotide
  Sense strand starting at position 3595 of SEQ ID NO: 587763
caaguaagauguguguaau

SEQ ID NO: 816443 - RNA, 19 nt, Artificial Sequence
  Description of Artificial Sequence: Synthetic oligonucleotide
  Antisense strand to SEQ ID NO: 816442
auuacacacaucuuacuug

SEQ ID NO: 816444 - RNA, 19 nt, Artificial Sequence
  Description of Artificial Sequence: Synthetic oligonucleotide
  Sense strand starting at position 3596 of SEQ ID NO: 587763
aaguaagauguguguaauu

SEQ ID NO: 816445 - RNA, 19 nt, Artificial Sequence
  Description of Artificial Sequence: Synthetic oligonucleotide
  Antisense strand to SEQ ID NO: 816444
aauuacacacaucuuacuu

SEQ ID NO: 816446 - RNA, 19 nt, Artificial Sequence
  Description of Artificial Sequence: Synthetic oligonucleotide
  Sense strand starting at position 3620 of SEQ ID NO: 587763
augaaacaguagcuauuau

SEQ ID NO: 816447 - RNA, 19 nt, Artificial Sequence
  Description of Artificial Sequence: Synthetic oligonucleotide
  Antisense strand to SEQ ID NO: 816446
auaauagcuacuguuucau

SEQ ID NO: 816448 - RNA, 19 nt, Artificial Sequence
  Description of Artificial Sequence: Synthetic oligonucleotide
  Sense strand starting at position 3779 of SEQ ID NO: 587763
aaauguguuugaccaguua

SEQ ID NO: 816449 - RNA, 19 nt, Artificial Sequence
  Description of Artificial Sequence: Synthetic oligonucleotide
  Antisense strand to SEQ ID NO: 816448
uaacuggucaaacacauuu

SEQ ID NO: 816450 - RNA, 19 nt, Artificial Sequence
  Description of Artificial Sequence: Synthetic oligonucleotide
  Sense strand starting at position 3787 of SEQ ID NO: 587763
uugaccaguuacuuagauu

SEQ ID NO: 816451 - RNA, 19 nt, Artificial Sequence
  Description of Artificial Sequence: Synthetic oligonucleotide
  Antisense strand to SEQ ID NO: 816450
aaucuaaguaacuggucaa

SEQ ID NO: 816452 - RNA, 19 nt, Artificial Sequence
  Description of Artificial Sequence: Synthetic oligonucleotide
  Sense strand starting at position 3870 of SEQ ID NO: 587763
gguuaauagguuggccuaa

SEQ ID NO: 816453 - RNA, 19 nt, Artificial Sequence
  Description of Artificial Sequence: Synthetic oligonucleotide
  Antisense strand to SEQ ID NO: 816452
uuaggccaaccuauuaacc

SEQ ID NO: 816454 - RNA, 19 nt, Artificial Sequence
  Description of Artificial Sequence: Synthetic oligonucleotide
  Sense strand starting at position 163 of SEQ ID NO: 587764
gggcguggccuggaagaaa

SEQ ID NO: 816455 - RNA, 19 nt, Artificial Sequence
  Description of Artificial Sequence: Synthetic oligonucleotide
  Antisense strand to SEQ ID NO: 816454
uuucuuccaggccacgccc

SEQ ID NO: 816456 - RNA, 19 nt, Artificial Sequence
  Description of Artificial Sequence: Synthetic oligonucleotide
  Sense strand starting at position 187 of SEQ ID NO: 587764
augguuggaacguaaauca

SEQ ID NO: 816457 - RNA, 19 nt, Artificial Sequence
  Description of Artificial Sequence: Synthetic oligonucleotide
  Antisense strand to SEQ ID NO: 816456
ugauuuacguuccaaccau

SEQ ID NO: 816458 - RNA, 19 nt, Artificial Sequence
  Description of Artificial Sequence: Synthetic oligonucleotide
  Sense strand starting at position 226 of SEQ ID NO: 587764
ucaguuguagcagacauua

SEQ ID NO: 816459 - RNA, 19 nt, Artificial Sequence
  Description of Artificial Sequence: Synthetic oligonucleotide
  Antisense strand to SEQ ID NO: 816458
uaaugucugcuacaacuga

SEQ ID NO: 816460 - RNA, 19 nt, Artificial Sequence
  Description of Artificial Sequence: Synthetic oligonucleotide
  Sense strand starting at position 231 of SEQ ID NO: 587764
uguagcagacauuaauaau

SEQ ID NO: 816461 - RNA, 19 nt, Artificial Sequence
  Description of Artificial Sequence: Synthetic oligonucleotide
  Antisense strand to SEQ ID NO: 816460
auuauuaaugucugcuaca

SEQ ID NO: 816462 - RNA, 19 nt, Artificial Sequence
  Description of Artificial Sequence: Synthetic oligonucleotide
  Sense strand starting at position 252 of SEQ ID NO: 587764
uguuaacuauuggucaaau

SEQ ID NO: 816463 - RNA, 19 nt, Artificial Sequence
  Description of Artificial Sequence: Synthetic oligonucleotide
  Antisense strand to SEQ ID NO: 816462
auuugaccaauaguuaaca

SEQ ID NO: 816464 - RNA, 19 nt, Artificial Sequence
  Description of Artificial Sequence: Synthetic oligonucleotide
  Sense strand starting at position 253 of SEQ ID NO: 587764
guuaacuauuggucaaaua

SEQ ID NO: 816465 - RNA, 19 nt, Artificial Sequence
  Description of Artificial Sequence: Synthetic oligonucleotide
  Antisense strand to SEQ ID NO: 816464
uauuugaccaauaguuaac

SEQ ID NO: 816466 - RNA, 19 nt, Artificial Sequence
  Description of Artificial Sequence: Synthetic oligonucleotide
  Sense strand starting at position 289 of SEQ ID NO: 587764
agguaacuggcuuaguaua

SEQ ID NO: 816467 - RNA, 19 nt, Artificial Sequence
  Description of Artificial Sequence: Synthetic oligonucleotide
  Antisense strand to SEQ ID NO: 816466
uauacuaagccaguuaccu

SEQ ID NO: 816468 - RNA, 19 nt, Artificial Sequence
  Description of Artificial Sequence: Synthetic oligonucleotide
  Sense strand starting at position 300 of SEQ ID NO: 587764
uuaguauagucaccacacu

SEQ ID NO: 816469 - RNA, 19 nt, Artificial Sequence
  Description of Artificial Sequence: Synthetic oligonucleotide
  Antisense strand to SEQ ID NO: 816468
aguguggugacuauacuaa

SEQ ID NO: 816470 - RNA, 19 nt, Artificial Sequence
  Description of Artificial Sequence: Synthetic oligonucleotide
  Sense strand starting at position 529 of SEQ ID NO: 587764
ggaguaagcguugaaugac

SEQ ID NO: 816471 - RNA, 19 nt, Artificial Sequence
  Description of Artificial Sequence: Synthetic oligonucleotide
  Antisense strand to SEQ ID NO: 816470
gucauucaacgcuuacucc

SEQ ID NO: 816472 - RNA, 19 nt, Artificial Sequence
  Description of Artificial Sequence: Synthetic oligonucleotide
  Sense strand starting at position 746 of SEQ ID NO: 587764
aagcaaagccauuaguuga

SEQ ID NO: 816473 - RNA, 19 nt, Artificial Sequence
  Description of Artificial Sequence: Synthetic oligonucleotide
  Antisense strand to SEQ ID NO: 816472
ucaacuaauggcuuugcuu

SEQ ID NO: 816474 - RNA, 19 nt, Artificial Sequence
  Description of Artificial Sequence: Synthetic oligonucleotide
  Sense strand starting at position 760 of SEQ ID NO: 587764
guugaaaggaucugucuag

SEQ ID NO: 816475 - RNA, 19 nt, Artificial Sequence
  Description of Artificial Sequence: Synthetic oligonucleotide
  Antisense strand to SEQ ID NO: 816474
cuagacagauccuuucaac

SEQ ID NO: 816476 - RNA, 19 nt, Artificial Sequence
  Description of Artificial Sequence: Synthetic oligonucleotide
  Sense strand starting at position 778 of SEQ ID NO: 587764
ggaggaaagguauggucau

SEQ ID NO: 816477 - RNA, 19 nt, Artificial Sequence
  Description of Artificial Sequence: Synthetic oligonucleotide
  Antisense strand to SEQ ID NO: 816476
augaccauaccuuuccucc

SEQ ID NO: 816478 - RNA, 19 nt, Artificial Sequence
  Description of Artificial Sequence: Synthetic oligonucleotide
  Sense strand starting at position 821 of SEQ ID NO: 587764
cuguuucugagauggauag

SEQ ID NO: 816479 - RNA, 19 nt, Artificial Sequence
  Description of Artificial Sequence: Synthetic oligonucleotide
  Antisense strand to SEQ ID NO: 816478
cuauccaucucagaaacag

SEQ ID NO: 816480 - RNA, 19 nt, Artificial Sequence
  Description of Artificial Sequence: Synthetic oligonucleotide
  Sense strand starting at position 822 of SEQ ID NO: 587764
uguuucugagauggauaga

SEQ ID NO: 816481 - RNA, 19 nt, Artificial Sequence
  Description of Artificial Sequence: Synthetic oligonucleotide
  Antisense strand to SEQ ID NO: 816480
ucuauccaucucagaaaca

SEQ ID NO: 816482 - RNA, 19 nt, Artificial Sequence
  Description of Artificial Sequence: Synthetic oligonucleotide
  Sense strand starting at position 866 of SEQ ID NO: 587764
uaauuaggguccucaguga

SEQ ID NO: 816483 - RNA, 19 nt, Artificial Sequence
  Description of Artificial Sequence: Synthetic oligonucleotide
  Antisense strand to SEQ ID NO: 816482
ucacugaggacccuaauua

SEQ ID NO: 816484 - RNA, 19 nt, Artificial Sequence
  Description of Artificial Sequence: Synthetic oligonucleotide
  Sense strand starting at position 1035 of SEQ ID NO: 587764
uuccuuuaggaaugcagaa

SEQ ID NO: 816485 - RNA, 19 nt, Artificial Sequence
  Description of Artificial Sequence: Synthetic oligonucleotide
  Antisense strand to SEQ ID NO: 816484
uucugcauuccuaaaggaa

SEQ ID NO: 816486 - RNA, 19 nt, Artificial Sequence
  Description of Artificial Sequence: Synthetic oligonucleotide
  Sense strand starting at position 1179 of SEQ ID NO: 587764
gucugccuucuugagaaau

SEQ ID NO: 816487 - RNA, 19 nt, Artificial Sequence
  Description of Artificial Sequence: Synthetic oligonucleotide
  Antisense strand to SEQ ID NO: 816486
auuucucaagaaggcagac

SEQ ID NO: 816488 - RNA, 19 nt, Artificial Sequence
  Description of Artificial Sequence: Synthetic oligonucleotide
  Sense strand starting at position 1241 of SEQ ID NO: 587764
ccugaaucagaaugucaga

SEQ ID NO: 816489 - RNA, 19 nt, Artificial Sequence
  Description of Artificial Sequence: Synthetic oligonucleotide
  Antisense strand to SEQ ID NO: 816488
ucugacauucugauucagg

SEQ ID NO: 816490 - RNA, 19 nt, Artificial Sequence
  Description of Artificial Sequence: Synthetic oligonucleotide
  Sense strand starting at position 1323 of SEQ ID NO: 587764
gcaggacucacuggagcua

SEQ ID NO: 816491 - RNA, 19 nt, Artificial Sequence
  Description of Artificial Sequence: Synthetic oligonucleotide
  Antisense strand to SEQ ID NO: 816490
uagcuccagugaguccugc

SEQ ID NO: 816492 - RNA, 19 nt, Artificial Sequence
  Description of Artificial Sequence: Synthetic oligonucleotide
  Sense strand starting at position 1731 of SEQ ID NO: 587764
cuggaugagucucuggaac

SEQ ID NO: 816493 - RNA, 19 nt, Artificial Sequence
  Description of Artificial Sequence: Synthetic oligonucleotide
  Antisense strand to SEQ ID NO: 816492
guuccagagacucauccag

SEQ ID NO: 816494 - RNA, 19 nt, Artificial Sequence
  Description of Artificial Sequence: Synthetic oligonucleotide
  Sense strand starting at position 2529 of SEQ ID NO: 587764
ucugaaaucaguggaaugu

SEQ ID NO: 816495 - RNA, 19 nt, Artificial Sequence
  Description of Artificial Sequence: Synthetic oligonucleotide
  Antisense strand to SEQ ID NO: 816494
acauuccacugauuucaga

SEQ ID NO: 816496 - RNA, 19 nt, Artificial Sequence
  Description of Artificial Sequence: Synthetic oligonucleotide
  Sense strand starting at position 2533 of SEQ ID NO: 587764
aaaucaguggaaugucauu

SEQ ID NO: 816497 - RNA, 19 nt, Artificial Sequence
  Description of Artificial Sequence: Synthetic oligonucleotide
  Antisense strand to SEQ ID NO: 816496
aaugacauuccacugauuu

SEQ ID NO: 816498 - RNA, 19 nt, Artificial Sequence
  Description of Artificial Sequence: Synthetic oligonucleotide
  Sense strand starting at position 2562 of SEQ ID NO: 587764
ccaaauuaauccucacgga

SEQ ID NO: 816499 - RNA, 19 nt, Artificial Sequence
  Description of Artificial Sequence: Synthetic oligonucleotide
  Antisense strand to SEQ ID NO: 816498
uccgugaggauuaauuugg

SEQ ID NO: 816500 - RNA, 19 nt, Artificial Sequence
  Description of Artificial Sequence: Synthetic oligonucleotide
  Sense strand starting at position 2626 of SEQ ID NO: 587764
ggcaacaucucaguaaaua

SEQ ID NO: 816501 - RNA, 19 nt, Artificial Sequence
  Description of Artificial Sequence: Synthetic oligonucleotide
  Antisense strand to SEQ ID NO: 816500
uauuuacugagauguugcc

SEQ ID NO: 816502 - RNA, 19 nt, Artificial Sequence
  Description of Artificial Sequence: Synthetic oligonucleotide
  Sense strand starting at position 2869 of SEQ ID NO: 587764
acaguaaugcccuagugga

SEQ ID NO: 816503 - RNA, 19 nt, Artificial Sequence
  Description of Artificial Sequence: Synthetic oligonucleotide
  Antisense strand to SEQ ID NO: 816502
uccacuagggcauuacugu

SEQ ID NO: 816504 - RNA, 19 nt, Artificial Sequence
  Description of Artificial Sequence: Synthetic oligonucleotide
  Sense strand starting at position 2907 of SEQ ID NO: 587764
acacuaaucccuuaguguc

SEQ ID NO: 816505 - RNA, 19 nt, Artificial Sequence
  Description of Artificial Sequence: Synthetic oligonucleotide
  Antisense strand to SEQ ID NO: 816504
gacacuaagggauuagugu

SEQ ID NO: 816506 - RNA, 19 nt, Artificial Sequence
  Description of Artificial Sequence: Synthetic oligonucleotide
  Sense strand starting at position 2909 of SEQ ID NO: 587764
acuaaucccuuagugucaa

SEQ ID NO: 816507 - RNA, 19 nt, Artificial Sequence
  Description of Artificial Sequence: Synthetic oligonucleotide
  Antisense strand to SEQ ID NO: 816506
uugacacuaagggauuagu

SEQ ID NO: 816508 - RNA, 19 nt, Artificial Sequence
  Description of Artificial Sequence: Synthetic oligonucleotide
  Sense strand starting at position 2981 of SEQ ID NO: 587764
gaugcuuuguuauuaaaga

SEQ ID NO: 816509 - RNA, 19 nt, Artificial Sequence
  Description of Artificial Sequence: Synthetic oligonucleotide
  Antisense strand to SEQ ID NO: 816508
ucuuuaauaacaaagcauc

SEQ ID NO: 816510 - RNA, 19 nt, Artificial Sequence
  Description of Artificial Sequence: Synthetic oligonucleotide
  Sense strand starting at position 3226 of SEQ ID NO: 587764
aaaugauauuagccaguug

SEQ ID NO: 816511 - RNA, 19 nt, Artificial Sequence
  Description of Artificial Sequence: Synthetic oligonucleotide
  Antisense strand to SEQ ID NO: 816510
caacuggcuaauaucauuu

SEQ ID NO: 816512 - RNA, 19 nt, Artificial Sequence
  Description of Artificial Sequence: Synthetic oligonucleotide
  Sense strand starting at position 3255 of SEQ ID NO: 587764
uuagcaucuugauuauuag

SEQ ID NO: 816513 - RNA, 19 nt, Artificial Sequence
  Description of Artificial Sequence: Synthetic oligonucleotide
  Antisense strand to SEQ ID NO: 816512
cuaauaaucaagaugcuaa

SEQ ID NO: 816514 - RNA, 19 nt, Artificial Sequence
  Description of Artificial Sequence: Synthetic oligonucleotide
  Sense strand starting at position 3273 of SEQ ID NO: 587764
guggcaauauaauuaucuu

SEQ ID NO: 816515 - RNA, 19 nt, Artificial Sequence
  Description of Artificial Sequence: Synthetic oligonucleotide
  Antisense strand to SEQ ID NO: 816514
aagauaauuauauugccac

SEQ ID NO: 816516 - RNA, 19 nt, Artificial Sequence
  Description of Artificial Sequence: Synthetic oligonucleotide
  Sense strand starting at position 3291 of SEQ ID NO: 587764
uaacauagggcauguaaca

SEQ ID NO: 816517 - RNA, 19 nt, Artificial Sequence
  Description of Artificial Sequence: Synthetic oligonucleotide
  Antisense strand to SEQ ID NO: 816516
uguuacaugcccuauguua

SEQ ID NO: 816518 - RNA, 19 nt, Artificial Sequence
  Description of Artificial Sequence: Synthetic oligonucleotide
  Sense strand starting at position 3298 of SEQ ID NO: 587764
gggcauguaacaggacaaa

SEQ ID NO: 816519 - RNA, 19 nt, Artificial Sequence
  Description of Artificial Sequence: Synthetic oligonucleotide
  Antisense strand to SEQ ID NO: 816518
uuuguccuguuacaugccc

SEQ ID NO: 816520 - RNA, 19 nt, Artificial Sequence
  Description of Artificial Sequence: Synthetic oligonucleotide
  Sense strand starting at position 3391 of SEQ ID NO: 587764
ccuuauauaggucaucuga

SEQ ID NO: 816521 - RNA, 19 nt, Artificial Sequence
  Description of Artificial Sequence: Synthetic oligonucleotide
  Antisense strand to SEQ ID NO: 816520
ucagaugaccuauauaagg

SEQ ID NO: 816522 - RNA, 19 nt, Artificial Sequence
  Description of Artificial Sequence: Synthetic oligonucleotide
  Sense strand starting at position 3393 of SEQ ID NO: 587764
uuauauaggucaucugaca

SEQ ID NO: 816523 - RNA, 19 nt, Artificial Sequence
  Description of Artificial Sequence: Synthetic oligonucleotide
  Antisense strand to SEQ ID NO: 816522
ugucagaugaccuauauaa

SEQ ID NO: 816524 - RNA, 19 nt, Artificial Sequence
  Description of Artificial Sequence: Synthetic oligonucleotide
  Sense strand starting at position 3481 of SEQ ID NO: 587764
gugcuuucucacuaacuag

SEQ ID NO: 816525 - RNA, 19 nt, Artificial Sequence
  Description of Artificial Sequence: Synthetic oligonucleotide
  Antisense strand to SEQ ID NO: 816524
cuaguuagugagaaagcac

SEQ ID NO: 816526 - RNA, 19 nt, Artificial Sequence
  Description of Artificial Sequence: Synthetic oligonucleotide
  Sense strand starting at position 3505 of SEQ ID NO: 587764
gcaguaaugccacauaaga

SEQ ID NO: 816527 - RNA, 19 nt, Artificial Sequence
  Description of Artificial Sequence: Synthetic oligonucleotide
  Antisense strand to SEQ ID NO: 816526
ucuuauguggcauuacugc

SEQ ID NO: 816528 - RNA, 19 nt, Artificial Sequence
  Description of Artificial Sequence: Synthetic oligonucleotide
  Sense strand starting at position 3887 of SEQ ID NO: 587764
ugguaucucaugcaggagu

SEQ ID NO: 816529 - RNA, 19 nt, Artificial Sequence
  Description of Artificial Sequence: Synthetic oligonucleotide
  Antisense strand to SEQ ID NO: 816528
acuccugcaugagauacca

SEQ ID NO: 816530 - RNA, 19 nt, Artificial Sequence
  Description of Artificial Sequence: Synthetic oligonucleotide
  Sense strand starting at position 3900 of SEQ ID NO: 587764
aggagucucuuccucaaau

SEQ ID NO: 816531 - RNA, 19 nt, Artificial Sequence
  Description of Artificial Sequence: Synthetic oligonucleotide
  Antisense strand to SEQ ID NO: 816530
auuugaggaagagacuccu

SEQ ID NO: 816532 - RNA, 19 nt, Artificial Sequence
  Description of Artificial Sequence: Synthetic oligonucleotide
  Sense strand starting at position 3901 of SEQ ID NO: 587764
ggagucucuuccucaaaug

SEQ ID NO: 816533 - RNA, 19 nt, Artificial Sequence
  Description of Artificial Sequence: Synthetic oligonucleotide
  Antisense strand to SEQ ID NO: 816532
cauuugaggaagagacucc

SEQ ID NO: 816534 - RNA, 19 nt, Artificial Sequence
  Description of Artificial Sequence: Synthetic oligonucleotide
  Sense strand starting at position 305 of SEQ ID NO: 587765
uucggcucuucccugacaa

SEQ ID NO: 816535 - RNA, 19 nt, Artificial Sequence
  Description of Artificial Sequence: Synthetic oligonucleotide
  Antisense strand to SEQ ID NO: 816534
uugucagggaagagccgaa

SEQ ID NO: 816536 - RNA, 19 nt, Artificial Sequence
  Description of Artificial Sequence: Synthetic oligonucleotide
  Sense strand starting at position 463 of SEQ ID NO: 587765
caggguucucccugacggu

SEQ ID NO: 816537 - RNA, 19 nt, Artificial Sequence
  Description of Artificial Sequence: Synthetic oligonucleotide
  Antisense strand to SEQ ID NO: 816536
accgucagggagaacccug

SEQ ID NO: 816538 - RNA, 19 nt, Artificial Sequence
  Description of Artificial Sequence: Synthetic oligonucleotide
  Sense strand starting at position 578 of SEQ ID NO: 587765
ggcuccuguccacauggaa

SEQ ID NO: 816539 - RNA, 19 nt, Artificial Sequence
  Description of Artificial Sequence: Synthetic oligonucleotide
  Antisense strand to SEQ ID NO: 816538
uuccauguggacaggagcc

SEQ ID NO: 816540 - RNA, 19 nt, Artificial Sequence
  Description of Artificial Sequence: Synthetic oligonucleotide
  Sense strand starting at position 2080 of SEQ ID NO: 587765
gucagugcaucaguacuaa

SEQ ID NO: 816541 - RNA, 19 nt, Artificial Sequence
  Description of Artificial Sequence: Synthetic oligonucleotide
  Antisense strand to SEQ ID NO: 816540
uuaguacugaugcacugac

SEQ ID NO: 816542 - RNA, 19 nt, Artificial Sequence
  Description of Artificial Sequence: Synthetic oligonucleotide
  Sense strand starting at position 2606 of SEQ ID NO: 587765
agggugaggucucguggaa

SEQ ID NO: 816543 - RNA, 19 nt, Artificial Sequence
  Description of Artificial Sequence: Synthetic oligonucleotide
  Antisense strand to SEQ ID NO: 816542
uuccacgagaccucacccu

SEQ ID NO: 816544 - RNA, 19 nt, Artificial Sequence
  Description of Artificial Sequence: Synthetic oligonucleotide
  Sense strand starting at position 2608 of SEQ ID NO: 587765
ggugaggucucguggaaca

SEQ ID NO: 816545 - RNA, 19 nt, Artificial Sequence
  Description of Artificial Sequence: Synthetic oligonucleotide
  Antisense strand to SEQ ID NO: 816544
uguuccacgagaccucacc

SEQ ID NO: 816546 - RNA, 19 nt, Artificial Sequence
  Description of Artificial Sequence: Synthetic oligonucleotide
  Sense strand starting at position 3307 of SEQ ID NO: 587765
cuccgugcucugcagaaga

SEQ ID NO: 816547 - RNA, 19 nt, Artificial Sequence
  Description of Artificial Sequence: Synthetic oligonucleotide
  Antisense strand to SEQ ID NO: 816546
ucuucugcagagcacggag

SEQ ID NO: 816548 - RNA, 19 nt, Artificial Sequence
  Description of Artificial Sequence: Synthetic oligonucleotide
  Sense strand starting at position 3402 of SEQ ID NO: 587765
gacuucuacccagguguuu

SEQ ID NO: 816549 - RNA, 19 nt, Artificial Sequence
  Description of Artificial Sequence: Synthetic oligonucleotide
  Antisense strand to SEQ ID NO: 816548
aaacaccuggguagaaguc

SEQ ID NO: 816550 - RNA, 19 nt, Artificial Sequence
  Description of Artificial Sequence: Synthetic oligonucleotide
  Sense strand starting at position 3627 of SEQ ID NO: 587765
gcuuucugccugccaagua

SEQ ID NO: 816551 - RNA, 19 nt, Artificial Sequence
  Description of Artificial Sequence: Synthetic oligonucleotide
  Antisense strand to SEQ ID NO: 816550
uacuuggcaggcagaaagc

SEQ ID NO: 816552 - RNA, 19 nt, Artificial Sequence
  Description of Artificial Sequence: Synthetic oligonucleotide
  Sense strand starting at position 3817 of SEQ ID NO: 587765
gagccagucuugcaggcau

SEQ ID NO: 816553 - RNA, 19 nt, Artificial Sequence
  Description of Artificial Sequence: Synthetic oligonucleotide
  Antisense strand to SEQ ID NO: 816552
augccugcaagacuggcuc

SEQ ID NO: 816554 - RNA, 19 nt, Artificial Sequence
  Description of Artificial Sequence: Synthetic oligonucleotide
  Sense strand starting at position 3952 of SEQ ID NO: 587765
aggagauccucaccuuucu

SEQ ID NO: 816555 - RNA, 19 nt, Artificial Sequence
  Description of Artificial Sequence: Synthetic oligonucleotide
  Antisense strand to SEQ ID NO: 816554
agaaaggugaggaucuccu

SEQ ID NO: 816556 - RNA, 19 nt, Artificial Sequence
  Description of Artificial Sequence: Synthetic oligonucleotide
  Sense strand starting at position 3963 of SEQ ID NO: 587765
accuuucugucauuagcau

SEQ ID NO: 816557 - RNA, 19 nt, Artificial Sequence
  Description of Artificial Sequence: Synthetic oligonucleotide
  Antisense strand to SEQ ID NO: 816556
augcuaaugacagaaaggu

SEQ ID NO: 816558 - RNA, 19 nt, Artificial Sequence
  Description of Artificial Sequence: Synthetic oligonucleotide
  Sense strand starting at position 157 of SEQ ID NO: 587766
caucuuggagacugacauu

SEQ ID NO: 816559 - RNA, 19 nt, Artificial Sequence
  Description of Artificial Sequence: Synthetic oligonucleotide
  Antisense strand to SEQ ID NO: 816558
aaugucagucuccaagaug

SEQ ID NO: 816560 - RNA, 19 nt, Artificial Sequence
  Description of Artificial Sequence: Synthetic oligonucleotide
  Sense strand starting at position 167 of SEQ ID NO: 587766
acugacauuugugaauaca

SEQ ID NO: 816561 - RNA, 19 nt, Artificial Sequence
  Description of Artificial Sequence: Synthetic oligonucleotide
  Antisense strand to SEQ ID NO: 816560
uguauucacaaaugucagu

SEQ ID NO: 816562 - RNA, 19 nt, Artificial Sequence
  Description of Artificial Sequence: Synthetic oligonucleotide
  Sense strand starting at position 187 of SEQ ID NO: 587766
uugcauauucuaggaaaga

SEQ ID NO: 816563 - RNA, 19 nt, Artificial Sequence
  Description of Artificial Sequence: Synthetic oligonucleotide
  Antisense strand to SEQ ID NO: 816562
ucuuuccuagaauaugcaa

SEQ ID NO: 816564 - RNA, 19 nt, Artificial Sequence
  Description of Artificial Sequence: Synthetic oligonucleotide
  Sense strand starting at position 529 of SEQ ID NO: 587766
agaccaaagcucuaauugu

SEQ ID NO: 816565 - RNA, 19 nt, Artificial Sequence
  Description of Artificial Sequence: Synthetic oligonucleotide
  Antisense strand to SEQ ID NO: 816564
acaauuagagcuuuggucu

SEQ ID NO: 816566 - RNA, 19 nt, Artificial Sequence
  Description of Artificial Sequence: Synthetic oligonucleotide
  Sense strand starting at position 2132 of SEQ ID NO: 587766
gugggucgccguuucauca

SEQ ID NO: 816567 - RNA, 19 nt, Artificial Sequence
  Description of Artificial Sequence: Synthetic oligonucleotide
  Antisense strand to SEQ ID NO: 816566
ugaugaaacggcgacccac

SEQ ID NO: 816568 - RNA, 19 nt, Artificial Sequence
  Description of Artificial Sequence: Synthetic oligonucleotide
  Sense strand starting at position 2192 of SEQ ID NO: 587766
gggcgucccguuagaauga

SEQ ID NO: 816569 - RNA, 19 nt, Artificial Sequence
  Description of Artificial Sequence: Synthetic oligonucleotide
  Antisense strand to SEQ ID NO: 816568
ucauucuaacgggacgccc

SEQ ID NO: 816570 - RNA, 19 nt, Artificial Sequence
  Description of Artificial Sequence: Synthetic oligonucleotide
  Sense strand starting at position 2201 of SEQ ID NO: 587766
guuagaaugacagggcuuu

SEQ ID NO: 816571 - RNA, 19 nt, Artificial Sequence
  Description of Artificial Sequence: Synthetic oligonucleotide
  Antisense strand to SEQ ID NO: 816570
aaagcccugucauucuaac

SEQ ID NO: 816572 - RNA, 19 nt, Artificial Sequence
  Description of Artificial Sequence: Synthetic oligonucleotide
  Sense strand starting at position 2253 of SEQ ID NO: 587766
ccagauauggaggguuuca

SEQ ID NO: 816573 - RNA, 19 nt, Artificial Sequence
  Description of Artificial Sequence: Synthetic oligonucleotide
  Antisense strand to SEQ ID NO: 816572
ugaaacccuccauaucugg

SEQ ID NO: 816574 - RNA, 19 nt, Artificial Sequence
  Description of Artificial Sequence: Synthetic oligonucleotide
  Sense strand starting at position 2299 of SEQ ID NO: 587766
ccugacuugaaucgguuau

SEQ ID NO: 816575 - RNA, 19 nt, Artificial Sequence
  Description of Artificial Sequence: Synthetic oligonucleotide
  Antisense strand to SEQ ID NO: 816574
auaaccgauucaagucagg

SEQ ID NO: 816576 - RNA, 19 nt, Artificial Sequence
  Description of Artificial Sequence: Synthetic oligonucleotide
  Sense strand starting at position 2300 of SEQ ID NO: 587766
cugacuugaaucgguuaua

SEQ ID NO: 816577 - RNA, 19 nt, Artificial Sequence
  Description of Artificial Sequence: Synthetic oligonucleotide
  Antisense strand to SEQ ID NO: 816576
uauaaccgauucaagucag

SEQ ID NO: 816578 - RNA, 19 nt, Artificial Sequence
  Description of Artificial Sequence: Synthetic oligonucleotide
  Sense strand starting at position 2301 of SEQ ID NO: 587766
ugacuugaaucgguuauaa

SEQ ID NO: 816579 - RNA, 19 nt, Artificial Sequence
  Description of Artificial Sequence: Synthetic oligonucleotide
  Antisense strand to SEQ ID NO: 816578
uuauaaccgauucaaguca

SEQ ID NO: 816580 - RNA, 19 nt, Artificial Sequence
  Description of Artificial Sequence: Synthetic oligonucleotide
  Sense strand starting at position 2303 of SEQ ID NO: 587766
acuugaaucgguuauaauc

SEQ ID NO: 816581 - RNA, 19 nt, Artificial Sequence
  Description of Artificial Sequence: Synthetic oligonucleotide
  Antisense strand to SEQ ID NO: 816580
gauuauaaccgauucaagu

SEQ ID NO: 816582 - RNA, 19 nt, Artificial Sequence
  Description of Artificial Sequence: Synthetic oligonucleotide
  Sense strand starting at position 2312 of SEQ ID NO: 587766
gguuauaaucgcuaucuaa

SEQ ID NO: 816583 - RNA, 19 nt, Artificial Sequence
  Description of Artificial Sequence: Synthetic oligonucleotide
  Antisense strand to SEQ ID NO: 816582
uuagauagcgauuauaacc

SEQ ID NO: 816584 - RNA, 19 nt, Artificial Sequence
  Description of Artificial Sequence: Synthetic oligonucleotide
  Sense strand starting at position 2344 of SEQ ID NO: 587766
ccgcgaugcauauuaugca

SEQ ID NO: 816585 - RNA, 19 nt, Artificial Sequence
  Description of Artificial Sequence: Synthetic oligonucleotide
  Antisense strand to SEQ ID NO: 816584
ugcauaauaugcaucgcgg

SEQ ID NO: 816586 - RNA, 19 nt, Artificial Sequence
  Description of Artificial Sequence: Synthetic oligonucleotide
  Sense strand starting at position 2410 of SEQ ID NO: 587766
ccuuaaagaguuugaauca

SEQ ID NO: 816587 - RNA, 19 nt, Artificial Sequence
  Description of Artificial Sequence: Synthetic oligonucleotide
  Antisense strand to SEQ ID NO: 816586
ugauucaaacucuuuaagg

SEQ ID NO: 816588 - RNA, 19 nt, Artificial Sequence
  Description of Artificial Sequence: Synthetic oligonucleotide
  Sense strand starting at position 2419 of SEQ ID NO: 587766
guuugaaucagaggcucuu

SEQ ID NO: 816589 - RNA, 19 nt, Artificial Sequence
  Description of Artificial Sequence: Synthetic oligonucleotide
  Antisense strand to SEQ ID NO: 816588
aagagccucugauucaaac

SEQ ID NO: 816590 - RNA, 19 nt, Artificial Sequence
  Description of Artificial Sequence: Synthetic oligonucleotide
  Sense strand starting at position 2508 of SEQ ID NO: 587766
uuuaaugaccaguagaguu

SEQ ID NO: 816591 - RNA, 19 nt, Artificial Sequence
  Description of Artificial Sequence: Synthetic oligonucleotide
  Antisense strand to SEQ ID NO: 816590
aacucuacuggucauuaaa

SEQ ID NO: 816592 - RNA, 19 nt, Artificial Sequence
  Description of Artificial Sequence: Synthetic oligonucleotide
  Sense strand starting at position 2674 of SEQ ID NO: 587766
gaaggauguaauggccagu

SEQ ID NO: 816593 - RNA, 19 nt, Artificial Sequence
  Description of Artificial Sequence: Synthetic oligonucleotide
  Antisense strand to SEQ ID NO: 816592
acuggccauuacauccuuc

SEQ ID NO: 816594 - RNA, 19 nt, Artificial Sequence
  Description of Artificial Sequence: Synthetic oligonucleotide
  Sense strand starting at position 2677 of SEQ ID NO: 587766
ggauguaauggccagucuu

SEQ ID NO: 816595 - RNA, 19 nt, Artificial Sequence
  Description of Artificial Sequence: Synthetic oligonucleotide
  Antisense strand to SEQ ID NO: 816594
aagacuggccauuacaucc

SEQ ID NO: 816596 - RNA, 19 nt, Artificial Sequence
  Description of Artificial Sequence: Synthetic oligonucleotide
  Sense strand starting at position 2690 of SEQ ID NO: 587766
agucuuucccauuggauau

SEQ ID NO: 816597 - RNA, 19 nt, Artificial Sequence
  Description of Artificial Sequence: Synthetic oligonucleotide
  Antisense strand to SEQ ID NO: 816596
auauccaaugggaaagacu

SEQ ID NO: 816598 - RNA, 19 nt, Artificial Sequence
  Description of Artificial Sequence: Synthetic oligonucleotide
  Sense strand starting at position 2752 of SEQ ID NO: 587766
gaguuucuacuguaaggga

SEQ ID NO: 816599 - RNA, 19 nt, Artificial Sequence
  Description of Artificial Sequence: Synthetic oligonucleotide
  Antisense strand to SEQ ID NO: 816598
ucccuuacaguagaaacuc

SEQ ID NO: 816600 - RNA, 19 nt, Artificial Sequence
  Description of Artificial Sequence: Synthetic oligonucleotide
  Sense strand starting at position 2811 of SEQ ID NO: 587766
aacagugaucggugacaau

SEQ ID NO: 816601 - RNA, 19 nt, Artificial Sequence
  Description of Artificial Sequence: Synthetic oligonucleotide
  Antisense strand to SEQ ID NO: 816600
auugucaccgaucacuguu

SEQ ID NO: 816602 - RNA, 19 nt, Artificial Sequence
  Description of Artificial Sequence: Synthetic oligonucleotide
  Sense strand starting at position 2820 of SEQ ID NO: 587766
cggugacaauaauccaaua

SEQ ID NO: 816603 - RNA, 19 nt, Artificial Sequence
  Description of Artificial Sequence: Synthetic oligonucleotide
  Antisense strand to SEQ ID NO: 816602
uauuggauuauugucaccg

SEQ ID NO: 816604 - RNA, 19 nt, Artificial Sequence
  Description of Artificial Sequence: Synthetic oligonucleotide
  Sense strand starting at position 2841 of SEQ ID NO: 587766
agccuuuagcucuauagag

SEQ ID NO: 816605 - RNA, 19 nt, Artificial Sequence
  Description of Artificial Sequence: Synthetic oligonucleotide
  Antisense strand to SEQ ID NO: 816604
cucuauagagcuaaaggcu

SEQ ID NO: 816606 - RNA, 19 nt, Artificial Sequence
  Description of Artificial Sequence: Synthetic oligonucleotide
  Sense strand starting at position 2843 of SEQ ID NO: 587766
ccuuuagcucuauagagag

SEQ ID NO: 816607 - RNA, 19 nt, Artificial Sequence
  Description of Artificial Sequence: Synthetic oligonucleotide
  Antisense strand to SEQ ID NO: 816606
cucucuauagagcuaaagg

SEQ ID NO: 816608 - RNA, 19 nt, Artificial Sequence
  Description of Artificial Sequence: Synthetic oligonucleotide
  Sense strand starting at position 2874 of SEQ ID NO: 587766
gaguccuggugucugaaga

SEQ ID NO: 816609 - RNA, 19 nt, Artificial Sequence
  Description of Artificial Sequence: Synthetic oligonucleotide
  Antisense strand to SEQ ID NO: 816608
ucuucagacaccaggacuc

SEQ ID NO: 816610 - RNA, 19 nt, Artificial Sequence
  Description of Artificial Sequence: Synthetic oligonucleotide
  Sense strand starting at position 2875 of SEQ ID NO: 587766
aguccuggugucugaagaa

SEQ ID NO: 816611 - RNA, 19 nt, Artificial Sequence
  Description of Artificial Sequence: Synthetic oligonucleotide
  Antisense strand to SEQ ID NO: 816610
uucuucagacaccaggacu

SEQ ID NO: 816612 - RNA, 19 nt, Artificial Sequence
  Description of Artificial Sequence: Synthetic oligonucleotide
  Sense strand starting at position 2882 of SEQ ID NO: 587766
gugucugaagaaugaucau

SEQ ID NO: 816613 - RNA, 19 nt, Artificial Sequence
  Description of Artificial Sequence: Synthetic oligonucleotide
  Antisense strand to SEQ ID NO: 816612
augaucauucuucagacac

SEQ ID NO: 816614 - RNA, 19 nt, Artificial Sequence
  Description of Artificial Sequence: Synthetic oligonucleotide
  Sense strand starting at position 2918 of SEQ ID NO: 587766
uucugaugggcagaucuga

SEQ ID NO: 816615 - RNA, 19 nt, Artificial Sequence
  Description of Artificial Sequence: Synthetic oligonucleotide
  Antisense strand to SEQ ID NO: 816614
ucagaucugcccaucagaa

SEQ ID NO: 816616 - RNA, 19 nt, Artificial Sequence
  Description of Artificial Sequence: Synthetic oligonucleotide
  Sense strand starting at position 2975 of SEQ ID NO: 587766
uggcaaauagcguuucugu

SEQ ID NO: 816617 - RNA, 19 nt, Artificial Sequence
  Description of Artificial Sequence: Synthetic oligonucleotide
  Antisense strand to SEQ ID NO: 816616
acagaaacgcuauuugcca

SEQ ID NO: 816618 - RNA, 19 nt, Artificial Sequence
  Description of Artificial Sequence: Synthetic oligonucleotide
  Sense strand starting at position 3022 of SEQ ID NO: 587766
cucucuuguuaggugauga

SEQ ID NO: 816619 - RNA, 19 nt, Artificial Sequence
  Description of Artificial Sequence: Synthetic oligonucleotide
  Antisense strand to SEQ ID NO: 816618
ucaucaccuaacaagagag

SEQ ID NO: 816620 - RNA, 19 nt, Artificial Sequence
  Description of Artificial Sequence: Synthetic oligonucleotide
  Sense strand starting at position 3032 of SEQ ID NO: 587766
aggugaugaguagguugaa

SEQ ID NO: 816621 - RNA, 19 nt, Artificial Sequence
  Description of Artificial Sequence: Synthetic oligonucleotide
  Antisense strand to SEQ ID NO: 816620
uucaaccuacucaucaccu

SEQ ID NO: 816622 - RNA, 19 nt, Artificial Sequence
  Description of Artificial Sequence: Synthetic oligonucleotide
  Sense strand starting at position 3035 of SEQ ID NO: 587766
ugaugaguagguugaagau

SEQ ID NO: 816623 - RNA, 19 nt, Artificial Sequence
  Description of Artificial Sequence: Synthetic oligonucleotide
  Antisense strand to SEQ ID NO: 816622
aucuucaaccuacucauca

SEQ ID NO: 816624 - RNA, 19 nt, Artificial Sequence
  Description of Artificial Sequence: Synthetic oligonucleotide
  Sense strand starting at position 3061 of SEQ ID NO: 587766
ccaaguacuggcuaaguuu

SEQ ID NO: 816625 - RNA, 19 nt, Artificial Sequence
  Description of Artificial Sequence: Synthetic oligonucleotide
  Antisense strand to SEQ ID NO: 816624
aaacuuagccaguacuugg

SEQ ID NO: 816626 - RNA, 19 nt, Artificial Sequence
  Description of Artificial Sequence: Synthetic oligonucleotide
  Sense strand starting at position 3246 of SEQ ID NO: 587766
cuaggaaaccauggucaau

SEQ ID NO: 816627 - RNA, 19 nt, Artificial Sequence
  Description of Artificial Sequence: Synthetic oligonucleotide
  Antisense strand to SEQ ID NO: 816626
auugaccaugguuuccuag

SEQ ID NO: 816628 - RNA, 19 nt, Artificial Sequence
  Description of Artificial Sequence: Synthetic oligonucleotide
  Sense strand starting at position 3351 of SEQ ID NO: 587766
gagggugucaucuaugagu

SEQ ID NO: 816629 - RNA, 19 nt, Artificial Sequence
  Description of Artificial Sequence: Synthetic oligonucleotide
  Antisense strand to SEQ ID NO: 816628
acucauagaugacacccuc

SEQ ID NO: 816630 - RNA, 19 nt, Artificial Sequence
  Description of Artificial Sequence: Synthetic oligonucleotide
  Sense strand starting at position 3356 of SEQ ID NO: 587766
ugucaucuaugaguuugaa

SEQ ID NO: 816631 - RNA, 19 nt, Artificial Sequence
  Description of Artificial Sequence: Synthetic oligonucleotide
  Antisense strand to SEQ ID NO: 816630
uucaaacucauagaugaca

SEQ ID NO: 816632 - RNA, 19 nt, Artificial Sequence
  Description of Artificial Sequence: Synthetic oligonucleotide
  Sense strand starting at position 3383 of SEQ ID NO: 587766
agucuuugccaucaggaua

SEQ ID NO: 816633 - RNA, 19 nt, Artificial Sequence
  Description of Artificial Sequence: Synthetic oligonucleotide
  Antisense strand to SEQ ID NO: 816632
uauccugauggcaaagacu

SEQ ID NO: 816634 - RNA, 19 nt, Artificial Sequence
  Description of Artificial Sequence: Synthetic oligonucleotide
  Sense strand starting at position 3394 of SEQ ID NO: 587766
ucaggauagagcugagaug

SEQ ID NO: 816635 - RNA, 19 nt, Artificial Sequence
  Description of Artificial Sequence: Synthetic oligonucleotide
  Antisense strand to SEQ ID NO: 816634
caucucagcucuauccuga

SEQ ID NO: 816636 - RNA, 19 nt, Artificial Sequence
  Description of Artificial Sequence: Synthetic oligonucleotide
  Sense strand starting at position 3687 of SEQ ID NO: 587766
aguggcuaagcauaguaaa

SEQ ID NO: 816637 - RNA, 19 nt, Artificial Sequence
  Description of Artificial Sequence: Synthetic oligonucleotide
  Antisense strand to SEQ ID NO: 816636
uuuacuaugcuuagccacu

SEQ ID NO: 816638 - RNA, 19 nt, Artificial Sequence
  Description of Artificial Sequence: Synthetic oligonucleotide
  Sense strand starting at position 120 of SEQ ID NO: 587767
guaucagggccacgacauu

SEQ ID NO: 816639 - RNA, 19 nt, Artificial Sequence
  Description of Artificial Sequence: Synthetic oligonucleotide
  Antisense strand to SEQ ID NO: 816638
aaugucguggcccugauac

SEQ ID NO: 816640 - RNA, 19 nt, Artificial Sequence
  Description of Artificial Sequence: Synthetic oligonucleotide
  Sense strand starting at position 1089 of SEQ ID NO: 587767
caucuuggagacugacauu

SEQ ID NO: 816641 - RNA, 19 nt, Artificial Sequence
  Description of Artificial Sequence: Synthetic oligonucleotide
  Antisense strand to SEQ ID NO: 816640
aaugucagucuccaagaug

SEQ ID NO: 816642 - RNA, 19 nt, Artificial Sequence
  Description of Artificial Sequence: Synthetic oligonucleotide
  Sense strand starting at position 1098 of SEQ ID NO: 587767
gacugacauuugugaauac

SEQ ID NO: 816643 - RNA, 19 nt, Artificial Sequence
  Description of Artificial Sequence: Synthetic oligonucleotide
  Antisense strand to SEQ ID NO: 816642
guauucacaaaugucaguc

SEQ ID NO: 816644 - RNA, 19 nt, Artificial Sequence
  Description of Artificial Sequence: Synthetic oligonucleotide
  Sense strand starting at position 1099 of SEQ ID NO: 587767
acugacauuugugaauaca

SEQ ID NO: 816645 - RNA, 19 nt, Artificial Sequence
  Description of Artificial Sequence: Synthetic oligonucleotide
  Antisense strand to SEQ ID NO: 816644
uguauucacaaaugucagu

SEQ ID NO: 816646 - RNA, 19 nt, Artificial Sequence
  Description of Artificial Sequence: Synthetic oligonucleotide
  Sense strand starting at position 1119 of SEQ ID NO: 587767
uugcauauucuaggaaaga

SEQ ID NO: 816647 - RNA, 19 nt, Artificial Sequence
  Description of Artificial Sequence: Synthetic oligonucleotide
  Antisense strand to SEQ ID NO: 816646
ucuuuccuagaauaugcaa

SEQ ID NO: 816648 - RNA, 19 nt, Artificial Sequence
  Description of Artificial Sequence: Synthetic oligonucleotide
  Sense strand starting at position 1461 of SEQ ID NO: 587767
agaccaaagcucuaauugu

SEQ ID NO: 816649 - RNA, 19 nt, Artificial Sequence
  Description of Artificial Sequence: Synthetic oligonucleotide
  Antisense strand to SEQ ID NO: 816648
acaauuagagcuuuggucu

SEQ ID NO: 816650 - RNA, 19 nt, Artificial Sequence
  Description of Artificial Sequence: Synthetic oligonucleotide
  Sense strand starting at position 1967 of SEQ ID NO: 587767
gcuggguucccggagaugu

SEQ ID NO: 816651 - RNA, 19 nt, Artificial Sequence
  Description of Artificial Sequence: Synthetic oligonucleotide
  Antisense strand to SEQ ID NO: 816650
acaucuccgggaacccagc

SEQ ID NO: 816652 - RNA, 19 nt, Artificial Sequence
  Description of Artificial Sequence: Synthetic oligonucleotide
  Sense strand starting at position 2297 of SEQ ID NO: 587767
cugggaacuugugcuaguu

SEQ ID NO: 816653 - RNA, 19 nt, Artificial Sequence
  Description of Artificial Sequence: Synthetic oligonucleotide
  Antisense strand to SEQ ID NO: 816652
aacuagcacaaguucccag

SEQ ID NO: 816654 - RNA, 19 nt, Artificial Sequence
  Description of Artificial Sequence: Synthetic oligonucleotide
  Sense strand starting at position 2636 of SEQ ID NO: 587767
ccggguucagcucauaagu

SEQ ID NO: 816655 - RNA, 19 nt, Artificial Sequence
  Description of Artificial Sequence: Synthetic oligonucleotide
  Antisense strand to SEQ ID NO: 816654
acuuaugagcugaacccgg

SEQ ID NO: 816656 - RNA, 19 nt, Artificial Sequence
  Description of Artificial Sequence: Synthetic oligonucleotide
  Sense strand starting at position 3064 of SEQ ID NO: 587767
gugggucgccguuucauca

SEQ ID NO: 816657 - RNA, 19 nt, Artificial Sequence
  Description of Artificial Sequence: Synthetic oligonucleotide
  Antisense strand to SEQ ID NO: 816656
ugaugaaacggcgacccac

SEQ ID NO: 816658 - RNA, 19 nt, Artificial Sequence
  Description of Artificial Sequence: Synthetic oligonucleotide
  Sense strand starting at position 3124 of SEQ ID NO: 587767
gggcgucccguuagaauga

SEQ ID NO: 816659 - RNA, 19 nt, Artificial Sequence
  Description of Artificial Sequence: Synthetic oligonucleotide
  Antisense strand to SEQ ID NO: 816658
ucauucuaacgggacgccc

SEQ ID NO: 816660 - RNA, 19 nt, Artificial Sequence
  Description of Artificial Sequence: Synthetic oligonucleotide
  Sense strand starting at position 3133 of SEQ ID NO: 587767
guuagaaugacagggcuuu

SEQ ID NO: 816661 - RNA, 19 nt, Artificial Sequence
  Description of Artificial Sequence: Synthetic oligonucleotide
  Antisense strand to SEQ ID NO: 816660
aaagcccugucauucuaac

SEQ ID NO: 816662 - RNA, 19 nt, Artificial Sequence
  Description of Artificial Sequence: Synthetic oligonucleotide
  Sense strand starting at position 3185 of SEQ ID NO: 587767
ccagauauggaggguuuca

SEQ ID NO: 816663 - RNA, 19 nt, Artificial Sequence
  Description of Artificial Sequence: Synthetic oligonucleotide
  Antisense strand to SEQ ID NO: 816662
ugaaacccuccauaucugg

SEQ ID NO: 816664 - RNA, 19 nt, Artificial Sequence
  Description of Artificial Sequence: Synthetic oligonucleotide
  Sense strand starting at position 3231 of SEQ ID NO: 587767
ccugacuugaaucgguuau

SEQ ID NO: 816665 - RNA, 19 nt, Artificial Sequence
  Description of Artificial Sequence: Synthetic oligonucleotide
  Antisense strand to SEQ ID NO: 816664
auaaccgauucaagucagg

SEQ ID NO: 816666 - RNA, 19 nt, Artificial Sequence
  Description of Artificial Sequence: Synthetic oligonucleotide
  Sense strand starting at position 3232 of SEQ ID NO: 587767
cugacuugaaucgguuaua

SEQ ID NO: 816667 - RNA, 19 nt, Artificial Sequence
  Description of Artificial Sequence: Synthetic oligonucleotide
  Antisense strand to SEQ ID NO: 816666
uauaaccgauucaagucag

SEQ ID NO: 816668 - RNA, 19 nt, Artificial Sequence
  Description of Artificial Sequence: Synthetic oligonucleotide
  Sense strand starting at position 3233 of SEQ ID NO: 587767
ugacuugaaucgguuauaa

SEQ ID NO: 816669 - RNA, 19 nt, Artificial Sequence
  Description of Artificial Sequence: Synthetic oligonucleotide
  Antisense strand to SEQ ID NO: 816668
uuauaaccgauucaaguca

SEQ ID NO: 816670 - RNA, 19 nt, Artificial Sequence
  Description of Artificial Sequence: Synthetic oligonucleotide
  Sense strand starting at position 3235 of SEQ ID NO: 587767
acuugaaucgguuauaauc

SEQ ID NO: 816671 - RNA, 19 nt, Artificial Sequence
  Description of Artificial Sequence: Synthetic oligonucleotide
  Antisense strand to SEQ ID NO: 816670
gauuauaaccgauucaagu

SEQ ID NO: 816672 - RNA, 19 nt, Artificial Sequence
  Description of Artificial Sequence: Synthetic oligonucleotide
  Sense strand starting at position 3244 of SEQ ID NO: 587767
gguuauaaucgcuaucuaa

SEQ ID NO: 816673 - RNA, 19 nt, Artificial Sequence
  Description of Artificial Sequence: Synthetic oligonucleotide
  Antisense strand to SEQ ID NO: 816672
uuagauagcgauuauaacc

SEQ ID NO: 816674 - RNA, 19 nt, Artificial Sequence
  Description of Artificial Sequence: Synthetic oligonucleotide
  Sense strand starting at position 3276 of SEQ ID NO: 587767
ccgcgaugcauauuaugca

SEQ ID NO: 816675 - RNA, 19 nt, Artificial Sequence
  Description of Artificial Sequence: Synthetic oligonucleotide
  Antisense strand to SEQ ID NO: 816674
ugcauaauaugcaucgcgg

SEQ ID NO: 816676 - RNA, 19 nt, Artificial Sequence
  Description of Artificial Sequence: Synthetic oligonucleotide
  Sense strand starting at position 3342 of SEQ ID NO: 587767
ccuuaaagaguuugaauca

SEQ ID NO: 816677 - RNA, 19 nt, Artificial Sequence
  Description of Artificial Sequence: Synthetic oligonucleotide
  Antisense strand to SEQ ID NO: 816676
ugauucaaacucuuuaagg

SEQ ID NO: 816678 - RNA, 19 nt, Artificial Sequence
  Description of Artificial Sequence: Synthetic oligonucleotide
  Sense strand starting at position 3351 of SEQ ID NO: 587767
guuugaaucagaggcucuu

SEQ ID NO: 816679 - RNA, 19 nt, Artificial Sequence
  Description of Artificial Sequence: Synthetic oligonucleotide
  Antisense strand to SEQ ID NO: 816678
aagagccucugauucaaac

SEQ ID NO: 816680 - RNA, 19 nt, Artificial Sequence
  Description of Artificial Sequence: Synthetic oligonucleotide
  Sense strand starting at position 3440 of SEQ ID NO: 587767
uuuaaugaccaguagaguu

SEQ ID NO: 816681 - RNA, 19 nt, Artificial Sequence
  Description of Artificial Sequence: Synthetic oligonucleotide
  Antisense strand to SEQ ID NO: 816680
aacucuacuggucauuaaa

SEQ ID NO: 816682 - RNA, 19 nt, Artificial Sequence
  Description of Artificial Sequence: Synthetic oligonucleotide
  Sense strand starting at position 3606 of SEQ ID NO: 587767
gaaggauguaauggccagu

SEQ ID NO: 816683 - RNA, 19 nt, Artificial Sequence
  Description of Artificial Sequence: Synthetic oligonucleotide
  Antisense strand to SEQ ID NO: 816682
acuggccauuacauccuuc

SEQ ID NO: 816684 - RNA, 19 nt, Artificial Sequence
  Description of Artificial Sequence: Synthetic oligonucleotide
  Sense strand starting at position 3609 of SEQ ID NO: 587767
ggauguaauggccagucuu

SEQ ID NO: 816685 - RNA, 19 nt, Artificial Sequence
  Description of Artificial Sequence: Synthetic oligonucleotide
  Antisense strand to SEQ ID NO: 816684
aagacuggccauuacaucc

SEQ ID NO: 816686 - RNA, 19 nt, Artificial Sequence
  Description of Artificial Sequence: Synthetic oligonucleotide
  Sense strand starting at position 3622 of SEQ ID NO: 587767
agucuuucccauuggauau

SEQ ID NO: 816687 - RNA, 19 nt, Artificial Sequence
  Description of Artificial Sequence: Synthetic oligonucleotide
  Antisense strand to SEQ ID NO: 816686
auauccaaugggaaagacu

SEQ ID NO: 816688 - RNA, 19 nt, Artificial Sequence
  Description of Artificial Sequence: Synthetic oligonucleotide
  Sense strand starting at position 3684 of SEQ ID NO: 587767
gaguuucuacuguaaggga

SEQ ID NO: 816689 - RNA, 19 nt, Artificial Sequence
  Description of Artificial Sequence: Synthetic oligonucleotide
  Antisense strand to SEQ ID NO: 816688
ucccuuacaguagaaacuc

SEQ ID NO: 816690 - RNA, 19 nt, Artificial Sequence
  Description of Artificial Sequence: Synthetic oligonucleotide
  Sense strand starting at position 3743 of SEQ ID NO: 587767
aacagugaucggugacaau

SEQ ID NO: 816691 - RNA, 19 nt, Artificial Sequence
  Description of Artificial Sequence: Synthetic oligonucleotide
  Antisense strand to SEQ ID NO: 816690
auugucaccgaucacuguu

SEQ ID NO: 816692 - RNA, 19 nt, Artificial Sequence
  Description of Artificial Sequence: Synthetic oligonucleotide
  Sense strand starting at position 3752 of SEQ ID NO: 587767
cggugacaauaauccaaua

SEQ ID NO: 816693 - RNA, 19 nt, Artificial Sequence
  Description of Artificial Sequence: Synthetic oligonucleotide
  Antisense strand to SEQ ID NO: 816692
uauuggauuauugucaccg

SEQ ID NO: 816694 - RNA, 19 nt, Artificial Sequence
  Description of Artificial Sequence: Synthetic oligonucleotide
  Sense strand starting at position 3773 of SEQ ID NO: 587767
agccuuuagcucuauagag

SEQ ID NO: 816695 - RNA, 19 nt, Artificial Sequence
  Description of Artificial Sequence: Synthetic oligonucleotide
  Antisense strand to SEQ ID NO: 816694
cucuauagagcuaaaggcu

SEQ ID NO: 816696 - RNA, 19 nt, Artificial Sequence
  Description of Artificial Sequence: Synthetic oligonucleotide
  Sense strand starting at position 3775 of SEQ ID NO: 587767
ccuuuagcucuauagagag

SEQ ID NO: 816697 - RNA, 19 nt, Artificial Sequence
  Description of Artificial Sequence: Synthetic oligonucleotide
  Antisense strand to SEQ ID NO: 816696
cucucuauagagcuaaagg

SEQ ID NO: 816698 - RNA, 19 nt, Artificial Sequence
  Description of Artificial Sequence: Synthetic oligonucleotide
  Sense strand starting at position 3801 of SEQ ID NO: 587767
ggagggaguccuggugucu

SEQ ID NO: 816699 - RNA, 19 nt, Artificial Sequence
  Description of Artificial Sequence: Synthetic oligonucleotide
  Antisense strand to SEQ ID NO: 816698
agacaccaggacucccucc

SEQ ID NO: 816700 - RNA, 19 nt, Artificial Sequence
  Description of Artificial Sequence: Synthetic oligonucleotide
  Sense strand starting at position 3806 of SEQ ID NO: 587767
gaguccuggugucugaaga

SEQ ID NO: 816701 - RNA, 19 nt, Artificial Sequence
  Description of Artificial Sequence: Synthetic oligonucleotide
  Antisense strand to SEQ ID NO: 816700
ucuucagacaccaggacuc

SEQ ID NO: 816702 - RNA, 19 nt, Artificial Sequence
  Description of Artificial Sequence: Synthetic oligonucleotide
  Sense strand starting at position 3807 of SEQ ID NO: 587767
aguccuggugucugaagaa

SEQ ID NO: 816703 - RNA, 19 nt, Artificial Sequence
  Description of Artificial Sequence: Synthetic oligonucleotide
  Antisense strand to SEQ ID NO: 816702
uucuucagacaccaggacu

SEQ ID NO: 816704 - RNA, 19 nt, Artificial Sequence
  Description of Artificial Sequence: Synthetic oligonucleotide
  Sense strand starting at position 3814 of SEQ ID NO: 587767
gugucugaagaaugaucau

SEQ ID NO: 816705 - RNA, 19 nt, Artificial Sequence
  Description of Artificial Sequence: Synthetic oligonucleotide
  Antisense strand to SEQ ID NO: 816704
augaucauucuucagacac

SEQ ID NO: 816706 - RNA, 19 nt, Artificial Sequence
  Description of Artificial Sequence: Synthetic oligonucleotide
  Sense strand starting at position 3850 of SEQ ID NO: 587767
uucugaugggcagaucuga

SEQ ID NO: 816707 - RNA, 19 nt, Artificial Sequence
  Description of Artificial Sequence: Synthetic oligonucleotide
  Antisense strand to SEQ ID NO: 816706
ucagaucugcccaucagaa

SEQ ID NO: 816708 - RNA, 19 nt, Artificial Sequence
  Description of Artificial Sequence: Synthetic oligonucleotide
  Sense strand starting at position 3881 of SEQ ID NO: 587767
ugugaagucagcuauuggu

SEQ ID NO: 816709 - RNA, 19 nt, Artificial Sequence
  Description of Artificial Sequence: Synthetic oligonucleotide
  Antisense strand to SEQ ID NO: 816708
accaauagcugacuucaca

SEQ ID NO: 816710 - RNA, 19 nt, Artificial Sequence
  Description of Artificial Sequence: Synthetic oligonucleotide
  Sense strand starting at position 3907 of SEQ ID NO: 587767
uggcaaauagcguuucugu

SEQ ID NO: 816711 - RNA, 19 nt, Artificial Sequence
  Description of Artificial Sequence: Synthetic oligonucleotide
  Antisense strand to SEQ ID NO: 816710
acagaaacgcuauuugcca

SEQ ID NO: 816712 - RNA, 19 nt, Artificial Sequence
  Description of Artificial Sequence: Synthetic oligonucleotide
  Sense strand starting at position 3954 of SEQ ID NO: 587767
cucucuuguuaggugauga

SEQ ID NO: 816713 - RNA, 19 nt, Artificial Sequence
  Description of Artificial Sequence: Synthetic oligonucleotide
  Antisense strand to SEQ ID NO: 816712
ucaucaccuaacaagagag

SEQ ID NO: 816714 - RNA, 19 nt, Artificial Sequence
  Description of Artificial Sequence: Synthetic oligonucleotide
  Sense strand starting at position 3964 of SEQ ID NO: 587767
aggugaugaguagguugaa

SEQ ID NO: 816715 - RNA, 19 nt, Artificial Sequence
  Description of Artificial Sequence: Synthetic oligonucleotide
  Antisense strand to SEQ ID NO: 816714
uucaaccuacucaucaccu

SEQ ID NO: 816716 - RNA, 19 nt, Artificial Sequence
  Description of Artificial Sequence: Synthetic oligonucleotide
  Sense strand starting at position 3967 of SEQ ID NO: 587767
ugaugaguagguugaagau

SEQ ID NO: 816717 - RNA, 19 nt, Artificial Sequence
  Description of Artificial Sequence: Synthetic oligonucleotide
  Antisense strand to SEQ ID NO: 816716
aucuucaaccuacucauca

SEQ ID NO: 816718 - RNA, 19 nt, Artificial Sequence
  Description of Artificial Sequence: Synthetic oligonucleotide
  Sense strand starting at position 409 of SEQ ID NO: 587768
gugcgauuucggcacacug

SEQ ID NO: 816719 - RNA, 19 nt, Artificial Sequence
  Description of Artificial Sequence: Synthetic oligonucleotide
  Antisense strand to SEQ ID NO: 816718
cagugugccgaaaucgcac

SEQ ID NO: 816720 - RNA, 19 nt, Artificial Sequence
  Description of Artificial Sequence: Synthetic oligonucleotide
  Sense strand starting at position 738 of SEQ ID NO: 587768
auggauuccgucuauagau

SEQ ID NO: 816721 - RNA, 19 nt, Artificial Sequence
  Description of Artificial Sequence: Synthetic oligonucleotide
  Antisense strand to SEQ ID NO: 816720
aucuauagacggaauccau

SEQ ID NO: 816722 - RNA, 19 nt, Artificial Sequence
  Description of Artificial Sequence: Synthetic oligonucleotide
  Sense strand starting at position 834 of SEQ ID NO: 587768
uuguauguaagugaaguau

SEQ ID NO: 816723 - RNA, 19 nt, Artificial Sequence
  Description of Artificial Sequence: Synthetic oligonucleotide
  Antisense strand to SEQ ID NO: 816722
auacuucacuuacauacaa

SEQ ID NO: 816724 - RNA, 19 nt, Artificial Sequence
  Description of Artificial Sequence: Synthetic oligonucleotide
  Sense strand starting at position 990 of SEQ ID NO: 587768
auuguagcaguccauaaga

SEQ ID NO: 816725 - RNA, 19 nt, Artificial Sequence
  Description of Artificial Sequence: Synthetic oligonucleotide
  Antisense strand to SEQ ID NO: 816724
ucuuauggacugcuacaau

SEQ ID NO: 816726 - RNA, 19 nt, Artificial Sequence
  Description of Artificial Sequence: Synthetic oligonucleotide
  Sense strand starting at position 992 of SEQ ID NO: 587768
uguagcaguccauaagaaa

SEQ ID NO: 816727 - RNA, 19 nt, Artificial Sequence
  Description of Artificial Sequence: Synthetic oligonucleotide
  Antisense strand to SEQ ID NO: 816726
uuucuuauggacugcuaca

SEQ ID NO: 816728 - RNA, 19 nt, Artificial Sequence
  Description of Artificial Sequence: Synthetic oligonucleotide
  Sense strand starting at position 1210 of SEQ ID NO: 587768
aagagauuguguucuaaag

SEQ ID NO: 816729 - RNA, 19 nt, Artificial Sequence
  Description of Artificial Sequence: Synthetic oligonucleotide
  Antisense strand to SEQ ID NO: 816728
cuuuagaacacaaucucuu

SEQ ID NO: 816730 - RNA, 19 nt, Artificial Sequence
  Description of Artificial Sequence: Synthetic oligonucleotide
  Sense strand starting at position 1219 of SEQ ID NO: 587768
uguucuaaaguuugagaaa

SEQ ID NO: 816731 - RNA, 19 nt, Artificial Sequence
  Description of Artificial Sequence: Synthetic oligonucleotide
  Antisense strand to SEQ ID NO: 816730
uuucucaaacuuuagaaca

SEQ ID NO: 816732 - RNA, 19 nt, Artificial Sequence
  Description of Artificial Sequence: Synthetic oligonucleotide
  Sense strand starting at position 1284 of SEQ ID NO: 587768
ggacuccucuuacuagauc

SEQ ID NO: 816733 - RNA, 19 nt, Artificial Sequence
  Description of Artificial Sequence: Synthetic oligonucleotide
  Antisense strand to SEQ ID NO: 816732
gaucuaguaagaggagucc

SEQ ID NO: 816734 - RNA, 19 nt, Artificial Sequence
  Description of Artificial Sequence: Synthetic oligonucleotide
  Sense strand starting at position 1459 of SEQ ID NO: 587768
guuucuuacauggguggaa

SEQ ID NO: 816735 - RNA, 19 nt, Artificial Sequence
  Description of Artificial Sequence: Synthetic oligonucleotide
  Antisense strand to SEQ ID NO: 816734
uuccacccauguaagaaac

SEQ ID NO: 816736 - RNA, 19 nt, Artificial Sequence
  Description of Artificial Sequence: Synthetic oligonucleotide
  Sense strand starting at position 1460 of SEQ ID NO: 587768
uuucuuacauggguggaau

SEQ ID NO: 816737 - RNA, 19 nt, Artificial Sequence
  Description of Artificial Sequence: Synthetic oligonucleotide
  Antisense strand to SEQ ID NO: 816736
auuccacccauguaagaaa

SEQ ID NO: 816738 - RNA, 19 nt, Artificial Sequence
  Description of Artificial Sequence: Synthetic oligonucleotide
  Sense strand starting at position 1796 of SEQ ID NO: 587768
cuggaaauucuguaugucu

SEQ ID NO: 816739 - RNA, 19 nt, Artificial Sequence
  Description of Artificial Sequence: Synthetic oligonucleotide
  Antisense strand to SEQ ID NO: 816738
agacauacagaauuuccag

SEQ ID NO: 816740 - RNA, 19 nt, Artificial Sequence
  Description of Artificial Sequence: Synthetic oligonucleotide
  Sense strand starting at position 1798 of SEQ ID NO: 587768
ggaaauucuguaugucuaa

SEQ ID NO: 816741 - RNA, 19 nt, Artificial Sequence
  Description of Artificial Sequence: Synthetic oligonucleotide
  Antisense strand to SEQ ID NO: 816740
uuagacauacagaauuucc

SEQ ID NO: 816742 - RNA, 19 nt, Artificial Sequence
  Description of Artificial Sequence: Synthetic oligonucleotide
  Sense strand starting at position 1843 of SEQ ID NO: 587768
aacaaaugucccggaaagu

SEQ ID NO: 816743 - RNA, 19 nt, Artificial Sequence
  Description of Artificial Sequence: Synthetic oligonucleotide
  Antisense strand to SEQ ID NO: 816742
acuuuccgggacauuuguu

SEQ ID NO: 816744 - RNA, 19 nt, Artificial Sequence
  Description of Artificial Sequence: Synthetic oligonucleotide
  Sense strand starting at position 1844 of SEQ ID NO: 587768
acaaaugucccggaaaguc

SEQ ID NO: 816745 - RNA, 19 nt, Artificial Sequence
  Description of Artificial Sequence: Synthetic oligonucleotide
  Antisense strand to SEQ ID NO: 816744
gacuuuccgggacauuugu

SEQ ID NO: 816746 - RNA, 19 nt, Artificial Sequence
  Description of Artificial Sequence: Synthetic oligonucleotide
  Sense strand starting at position 1877 of SEQ ID NO: 587768
guuugagaaacaugguucu

SEQ ID NO: 816747 - RNA, 19 nt, Artificial Sequence
  Description of Artificial Sequence: Synthetic oligonucleotide
  Antisense strand to SEQ ID NO: 816746
agaaccauguuucucaaac

SEQ ID NO: 816748 - RNA, 19 nt, Artificial Sequence
  Description of Artificial Sequence: Synthetic oligonucleotide
  Sense strand starting at position 1947 of SEQ ID NO: 587768
gggacaguccgguagcuaa

SEQ ID NO: 816749 - RNA, 19 nt, Artificial Sequence
  Description of Artificial Sequence: Synthetic oligonucleotide
  Antisense strand to SEQ ID NO: 816748
uuagcuaccggacuguccc

SEQ ID NO: 816750 - RNA, 19 nt, Artificial Sequence
  Description of Artificial Sequence: Synthetic oligonucleotide
  Sense strand starting at position 2291 of SEQ ID NO: 587768
cggcuuugaccguuucagu

SEQ ID NO: 816751 - RNA, 19 nt, Artificial Sequence
  Description of Artificial Sequence: Synthetic oligonucleotide
  Antisense strand to SEQ ID NO: 816750
acugaaacggucaaagccg

SEQ ID NO: 816752 - RNA, 19 nt, Artificial Sequence
  Description of Artificial Sequence: Synthetic oligonucleotide
  Sense strand starting at position 2399 of SEQ ID NO: 587768
accucaaauuccuuagggu

SEQ ID NO: 816753 - RNA, 19 nt, Artificial Sequence
  Description of Artificial Sequence: Synthetic oligonucleotide
  Antisense strand to SEQ ID NO: 816752
acccuaaggaauuugaggu

SEQ ID NO: 816754 - RNA, 19 nt, Artificial Sequence
  Description of Artificial Sequence: Synthetic oligonucleotide
  Sense strand starting at position 2405 of SEQ ID NO: 587768
aauuccuuagggugacauu

SEQ ID NO: 816755 - RNA, 19 nt, Artificial Sequence
  Description of Artificial Sequence: Synthetic oligonucleotide
  Antisense strand to SEQ ID NO: 816754
aaugucacccuaaggaauu

SEQ ID NO: 816756 - RNA, 19 nt, Artificial Sequence
  Description of Artificial Sequence: Synthetic oligonucleotide
  Sense strand starting at position 2604 of SEQ ID NO: 587768
uuuaaagacucaguuugga

SEQ ID NO: 816757 - RNA, 19 nt, Artificial Sequence
  Description of Artificial Sequence: Synthetic oligonucleotide
  Antisense strand to SEQ ID NO: 816756
uccaaacugagucuuuaaa

SEQ ID NO: 816758 - RNA, 19 nt, Artificial Sequence
  Description of Artificial Sequence: Synthetic oligonucleotide
  Sense strand starting at position 2607 of SEQ ID NO: 587768
aaagacucaguuuggaauu

SEQ ID NO: 816759 - RNA, 19 nt, Artificial Sequence
  Description of Artificial Sequence: Synthetic oligonucleotide
  Antisense strand to SEQ ID NO: 816758
aauuccaaacugagucuuu

SEQ ID NO: 816760 - RNA, 19 nt, Artificial Sequence
  Description of Artificial Sequence: Synthetic oligonucleotide
  Sense strand starting at position 2618 of SEQ ID NO: 587768
uuggaauuagugcaaccuu

SEQ ID NO: 816761 - RNA, 19 nt, Artificial Sequence
  Description of Artificial Sequence: Synthetic oligonucleotide
  Antisense strand to SEQ ID NO: 816760
aagguugcacuaauuccaa

SEQ ID NO: 816762 - RNA, 19 nt, Artificial Sequence
  Description of Artificial Sequence: Synthetic oligonucleotide
  Sense strand starting at position 2758 of SEQ ID NO: 587768
ccauaucuccaaugaggug

SEQ ID NO: 816763 - RNA, 19 nt, Artificial Sequence
  Description of Artificial Sequence: Synthetic oligonucleotide
  Antisense strand to SEQ ID NO: 816762
caccucauuggagauaugg

SEQ ID NO: 816764 - RNA, 19 nt, Artificial Sequence
  Description of Artificial Sequence: Synthetic oligonucleotide
  Sense strand starting at position 2763 of SEQ ID NO: 587768
ucuccaaugaggugguaaa

SEQ ID NO: 816765 - RNA, 19 nt, Artificial Sequence
  Description of Artificial Sequence: Synthetic oligonucleotide
  Antisense strand to SEQ ID NO: 816764
uuuaccaccucauuggaga

SEQ ID NO: 816766 - RNA, 19 nt, Artificial Sequence
  Description of Artificial Sequence: Synthetic oligonucleotide
  Sense strand starting at position 2764 of SEQ ID NO: 587768
cuccaaugaggugguaaau

SEQ ID NO: 816767 - RNA, 19 nt, Artificial Sequence
  Description of Artificial Sequence: Synthetic oligonucleotide
  Antisense strand to SEQ ID NO: 816766
auuuaccaccucauuggag

SEQ ID NO: 816768 - RNA, 19 nt, Artificial Sequence
  Description of Artificial Sequence: Synthetic oligonucleotide
  Sense strand starting at position 2813 of SEQ ID NO: 587768
ucgcuauuuccaggaccua

SEQ ID NO: 816769 - RNA, 19 nt, Artificial Sequence
  Description of Artificial Sequence: Synthetic oligonucleotide
  Antisense strand to SEQ ID NO: 816768
uagguccuggaaauagcga

SEQ ID NO: 816770 - RNA, 19 nt, Artificial Sequence
  Description of Artificial Sequence: Synthetic oligonucleotide
  Sense strand starting at position 2852 of SEQ ID NO: 587768
auaguuacuccauaaaugu

SEQ ID NO: 816771 - RNA, 19 nt, Artificial Sequence
  Description of Artificial Sequence: Synthetic oligonucleotide
  Antisense strand to SEQ ID NO: 816770
acauuuauggaguaacuau

SEQ ID NO: 816772 - RNA, 19 nt, Artificial Sequence
  Description of Artificial Sequence: Synthetic oligonucleotide
  Sense strand starting at position 2967 of SEQ ID NO: 587768
gugagcagucuggauguaa

SEQ ID NO: 816773 - RNA, 19 nt, Artificial Sequence
  Description of Artificial Sequence: Synthetic oligonucleotide
  Antisense strand to SEQ ID NO: 816772
uuacauccagacugcucac

SEQ ID NO: 816774 - RNA, 19 nt, Artificial Sequence
  Description of Artificial Sequence: Synthetic oligonucleotide
  Sense strand starting at position 3022 of SEQ ID NO: 587768
ugugauucugguggagaaa

SEQ ID NO: 816775 - RNA, 19 nt, Artificial Sequence
  Description of Artificial Sequence: Synthetic oligonucleotide
  Antisense strand to SEQ ID NO: 816774
uuucuccaccagaaucaca

SEQ ID NO: 816776 - RNA, 19 nt, Artificial Sequence
  Description of Artificial Sequence: Synthetic oligonucleotide
  Sense strand starting at position 3071 of SEQ ID NO: 587768
cgugucagagcagaagauu

SEQ ID NO: 816777 - RNA, 19 nt, Artificial Sequence
  Description of Artificial Sequence: Synthetic oligonucleotide
  Antisense strand to SEQ ID NO: 816776
aaucuucugcucugacacg

SEQ ID NO: 816778 - RNA, 19 nt, Artificial Sequence
  Description of Artificial Sequence: Synthetic oligonucleotide
  Sense strand starting at position 3077 of SEQ ID NO: 587768
agagcagaagauuguuaga

SEQ ID NO: 816779 - RNA, 19 nt, Artificial Sequence
  Description of Artificial Sequence: Synthetic oligonucleotide
  Antisense strand to SEQ ID NO: 816778
ucuaacaaucuucugcucu

SEQ ID NO: 816780 - RNA, 19 nt, Artificial Sequence
  Description of Artificial Sequence: Synthetic oligonucleotide
  Sense strand starting at position 3107 of SEQ ID NO: 587768
cuuagagcucaugagggua

SEQ ID NO: 816781 - RNA, 19 nt, Artificial Sequence
  Description of Artificial Sequence: Synthetic oligonucleotide
  Antisense strand to SEQ ID NO: 816780
uacccucaugagcucuaag

SEQ ID NO: 816782 - RNA, 19 nt, Artificial Sequence
  Description of Artificial Sequence: Synthetic oligonucleotide
  Sense strand starting at position 3115 of SEQ ID NO: 587768
ucaugaggguaauccaaau

SEQ ID NO: 816783 - RNA, 19 nt, Artificial Sequence
  Description of Artificial Sequence: Synthetic oligonucleotide
  Antisense strand to SEQ ID NO: 816782
auuuggauuacccucauga

SEQ ID NO: 816784 - RNA, 19 nt, Artificial Sequence
  Description of Artificial Sequence: Synthetic oligonucleotide
  Sense strand starting at position 3150 of SEQ ID NO: 587768
aggaaauucccagggcuca

SEQ ID NO: 816785 - RNA, 19 nt, Artificial Sequence
  Description of Artificial Sequence: Synthetic oligonucleotide
  Antisense strand to SEQ ID NO: 816784
ugagcccugggaauuuccu

SEQ ID NO: 816786 - RNA, 19 nt, Artificial Sequence
  Description of Artificial Sequence: Synthetic oligonucleotide
  Sense strand starting at position 3151 of SEQ ID NO: 587768
ggaaauucccagggcucaa

SEQ ID NO: 816787 - RNA, 19 nt, Artificial Sequence
  Description of Artificial Sequence: Synthetic oligonucleotide
  Antisense strand to SEQ ID NO: 816786
uugagcccugggaauuucc

SEQ ID NO: 816788 - RNA, 19 nt, Artificial Sequence
  Description of Artificial Sequence: Synthetic oligonucleotide
  Sense strand starting at position 3283 of SEQ ID NO: 587768
aagaguauccuaggaaggu

SEQ ID NO: 816789 - RNA, 19 nt, Artificial Sequence
  Description of Artificial Sequence: Synthetic oligonucleotide
  Antisense strand to SEQ ID NO: 816788
accuuccuaggauacucuu

SEQ ID NO: 816790 - RNA, 19 nt, Artificial Sequence
  Description of Artificial Sequence: Synthetic oligonucleotide
  Sense strand starting at position 3500 of SEQ ID NO: 587768
agauguuagcuaugauaaa

SEQ ID NO: 816791 - RNA, 19 nt, Artificial Sequence
  Description of Artificial Sequence: Synthetic oligonucleotide
  Antisense strand to SEQ ID NO: 816790
uuuaucauagcuaacaucu

SEQ ID NO: 816792 - RNA, 19 nt, Artificial Sequence
  Description of Artificial Sequence: Synthetic oligonucleotide
  Sense strand starting at position 3571 of SEQ ID NO: 587768
augaguuugguuuacauac

SEQ ID NO: 816793 - RNA, 19 nt, Artificial Sequence
  Description of Artificial Sequence: Synthetic oligonucleotide
  Antisense strand to SEQ ID NO: 816792
guauguaaaccaaacucau

SEQ ID NO: 816794 - RNA, 19 nt, Artificial Sequence
  Description of Artificial Sequence: Synthetic oligonucleotide
  Sense strand starting at position 3591 of SEQ ID NO: 587768
uuaagugugaggugagaaa

SEQ ID NO: 816795 - RNA, 19 nt, Artificial Sequence
  Description of Artificial Sequence: Synthetic oligonucleotide
  Antisense strand to SEQ ID NO: 816794
uuucucaccucacacuuaa

SEQ ID NO: 816796 - RNA, 19 nt, Artificial Sequence
  Description of Artificial Sequence: Synthetic oligonucleotide
  Sense strand starting at position 3712 of SEQ ID NO: 587768
ugccaacuaguuuggauaa

SEQ ID NO: 816797 - RNA, 19 nt, Artificial Sequence
  Description of Artificial Sequence: Synthetic oligonucleotide
  Antisense strand to SEQ ID NO: 816796
uuauccaaacuaguuggca

SEQ ID NO: 816798 - RNA, 19 nt, Artificial Sequence
  Description of Artificial Sequence: Synthetic oligonucleotide
  Sense strand starting at position 218 of SEQ ID NO: 587769
uuuaguccaccuuguaaag

SEQ ID NO: 816799 - RNA, 19 nt, Artificial Sequence
  Description of Artificial Sequence: Synthetic oligonucleotide
  Antisense strand to SEQ ID NO: 816798
cuuuacaagguggacuaaa

SEQ ID NO: 816800 - RNA, 19 nt, Artificial Sequence
  Description of Artificial Sequence: Synthetic oligonucleotide
  Sense strand starting at position 227 of SEQ ID NO: 587769
ccuuguaaaggaugaaugu

SEQ ID NO: 816801 - RNA, 19 nt, Artificial Sequence
  Description of Artificial Sequence: Synthetic oligonucleotide
  Antisense strand to SEQ ID NO: 816800
acauucauccuuuacaagg

SEQ ID NO: 816802 - RNA, 19 nt, Artificial Sequence
  Description of Artificial Sequence: Synthetic oligonucleotide
  Sense strand starting at position 359 of SEQ ID NO: 587769
acugaucacccgcauguuu

SEQ ID NO: 816803 - RNA, 19 nt, Artificial Sequence
  Description of Artificial Sequence: Synthetic oligonucleotide
  Antisense strand to SEQ ID NO: 816802
aaacaugcgggugaucagu

SEQ ID NO: 816804 - RNA, 19 nt, Artificial Sequence
  Description of Artificial Sequence: Synthetic oligonucleotide
  Sense strand starting at position 570 of SEQ ID NO: 587769
aucuguuuccaccaaaguc

SEQ ID NO: 816805 - RNA, 19 nt, Artificial Sequence
  Description of Artificial Sequence: Synthetic oligonucleotide
  Antisense strand to SEQ ID NO: 816804
gacuuugguggaaacagau

SEQ ID NO: 816806 - RNA, 19 nt, Artificial Sequence
  Description of Artificial Sequence: Synthetic oligonucleotide
  Sense strand starting at position 959 of SEQ ID NO: 587769
cccggcuugaguuagugau

SEQ ID NO: 816807 - RNA, 19 nt, Artificial Sequence
  Description of Artificial Sequence: Synthetic oligonucleotide
  Antisense strand to SEQ ID NO: 816806
aucacuaacucaagccggg

SEQ ID NO: 816808 - RNA, 19 nt, Artificial Sequence
  Description of Artificial Sequence: Synthetic oligonucleotide
  Sense strand starting at position 961 of SEQ ID NO: 587769
cggcuugaguuagugauuu

SEQ ID NO: 816809 - RNA, 19 nt, Artificial Sequence
  Description of Artificial Sequence: Synthetic oligonucleotide
  Antisense strand to SEQ ID NO: 816808
aaaucacuaacucaagccg

SEQ ID NO: 816810 - RNA, 19 nt, Artificial Sequence
  Description of Artificial Sequence: Synthetic oligonucleotide
  Sense strand starting at position 1113 of SEQ ID NO: 587769
gcuaguccacucgggaaau

SEQ ID NO: 816811 - RNA, 19 nt, Artificial Sequence
  Description of Artificial Sequence: Synthetic oligonucleotide
  Antisense strand to SEQ ID NO: 816810
auuucccgaguggacuagc

SEQ ID NO: 816812 - RNA, 19 nt, Artificial Sequence
  Description of Artificial Sequence: Synthetic oligonucleotide
  Sense strand starting at position 2023 of SEQ ID NO: 587769
gggcauuuccgccgggaaa

SEQ ID NO: 816813 - RNA, 19 nt, Artificial Sequence
  Description of Artificial Sequence: Synthetic oligonucleotide
  Antisense strand to SEQ ID NO: 816812
uuucccggcggaaaugccc

SEQ ID NO: 816814 - RNA, 19 nt, Artificial Sequence
  Description of Artificial Sequence: Synthetic oligonucleotide
  Sense strand starting at position 2189 of SEQ ID NO: 587769
auauccugaucucugggaa

SEQ ID NO: 816815 - RNA, 19 nt, Artificial Sequence
  Description of Artificial Sequence: Synthetic oligonucleotide
  Antisense strand to SEQ ID NO: 816814
uucccagagaucaggauau

SEQ ID NO: 816816 - RNA, 19 nt, Artificial Sequence
  Description of Artificial Sequence: Synthetic oligonucleotide
  Sense strand starting at position 2192 of SEQ ID NO: 587769
uccugaucucugggaacuu

SEQ ID NO: 816817 - RNA, 19 nt, Artificial Sequence
  Description of Artificial Sequence: Synthetic oligonucleotide
  Antisense strand to SEQ ID NO: 816816
aaguucccagagaucagga

SEQ ID NO: 816818 - RNA, 19 nt, Artificial Sequence
  Description of Artificial Sequence: Synthetic oligonucleotide
  Sense strand starting at position 2204 of SEQ ID NO: 587769
ggaacuuuguccucacuuu

SEQ ID NO: 816819 - RNA, 19 nt, Artificial Sequence
  Description of Artificial Sequence: Synthetic oligonucleotide
  Antisense strand to SEQ ID NO: 816818
aaagugaggacaaaguucc

SEQ ID NO: 816820 - RNA, 19 nt, Artificial Sequence
  Description of Artificial Sequence: Synthetic oligonucleotide
  Sense strand starting at position 2385 of SEQ ID NO: 587769
ccucccuuucgacauuaga

SEQ ID NO: 816821 - RNA, 19 nt, Artificial Sequence
  Description of Artificial Sequence: Synthetic oligonucleotide
  Antisense strand to SEQ ID NO: 816820
ucuaaugucgaaagggagg

SEQ ID NO: 816822 - RNA, 19 nt, Artificial Sequence
  Description of Artificial Sequence: Synthetic oligonucleotide
  Sense strand starting at position 2405 of SEQ ID NO: 587769
aagugaaaugauuguucug

SEQ ID NO: 816823 - RNA, 19 nt, Artificial Sequence
  Description of Artificial Sequence: Synthetic oligonucleotide
  Antisense strand to SEQ ID NO: 816822
cagaacaaucauuucacuu

SEQ ID NO: 816824 - RNA, 19 nt, Artificial Sequence
  Description of Artificial Sequence: Synthetic oligonucleotide
  Sense strand starting at position 2407 of SEQ ID NO: 587769
gugaaaugauuguucugua

SEQ ID NO: 816825 - RNA, 19 nt, Artificial Sequence
  Description of Artificial Sequence: Synthetic oligonucleotide
  Antisense strand to SEQ ID NO: 816824
uacagaacaaucauuucac

SEQ ID NO: 816826 - RNA, 19 nt, Artificial Sequence
  Description of Artificial Sequence: Synthetic oligonucleotide
  Sense strand starting at position 2408 of SEQ ID NO: 587769
ugaaaugauuguucuguag

SEQ ID NO: 816827 - RNA, 19 nt, Artificial Sequence
  Description of Artificial Sequence: Synthetic oligonucleotide
  Antisense strand to SEQ ID NO: 816826
cuacagaacaaucauuuca

SEQ ID NO: 816828 - RNA, 19 nt, Artificial Sequence
  Description of Artificial Sequence: Synthetic oligonucleotide
  Sense strand starting at position 2411 of SEQ ID NO: 587769
aaugauuguucuguaggau

SEQ ID NO: 816829 - RNA, 19 nt, Artificial Sequence
  Description of Artificial Sequence: Synthetic oligonucleotide
  Antisense strand to SEQ ID NO: 816828
auccuacagaacaaucauu

SEQ ID NO: 816830 - RNA, 19 nt, Artificial Sequence
  Description of Artificial Sequence: Synthetic oligonucleotide
  Sense strand starting at position 2412 of SEQ ID NO: 587769
augauuguucuguaggaua

SEQ ID NO: 816831 - RNA, 19 nt, Artificial Sequence
  Description of Artificial Sequence: Synthetic oligonucleotide
  Antisense strand to SEQ ID NO: 816830
uauccuacagaacaaucau

SEQ ID NO: 816832 - RNA, 19 nt, Artificial Sequence
  Description of Artificial Sequence: Synthetic oligonucleotide
  Sense strand starting at position 2414 of SEQ ID NO: 587769
gauuguucuguaggauaau

SEQ ID NO: 816833 - RNA, 19 nt, Artificial Sequence
  Description of Artificial Sequence: Synthetic oligonucleotide
  Antisense strand to SEQ ID NO: 816832
auuauccuacagaacaauc

SEQ ID NO: 816834 - RNA, 19 nt, Artificial Sequence
  Description of Artificial Sequence: Synthetic oligonucleotide
  Sense strand starting at position 2451 of SEQ ID NO: 587769
cagagcucuuggcuauauu

SEQ ID NO: 816835 - RNA, 19 nt, Artificial Sequence
  Description of Artificial Sequence: Synthetic oligonucleotide
  Antisense strand to SEQ ID NO: 816834
aauauagccaagagcucug

SEQ ID NO: 816836 - RNA, 19 nt, Artificial Sequence
  Description of Artificial Sequence: Synthetic oligonucleotide
  Sense strand starting at position 2594 of SEQ ID NO: 587769
aaucuugaguucccugaag

SEQ ID NO: 816837 - RNA, 19 nt, Artificial Sequence
  Description of Artificial Sequence: Synthetic oligonucleotide
  Antisense strand to SEQ ID NO: 816836
cuucagggaacucaagauu

SEQ ID NO: 816838 - RNA, 19 nt, Artificial Sequence
  Description of Artificial Sequence: Synthetic oligonucleotide
  Sense strand starting at position 2637 of SEQ ID NO: 587769
ucaauaagucaaugagcaa

SEQ ID NO: 816839 - RNA, 19 nt, Artificial Sequence
  Description of Artificial Sequence: Synthetic oligonucleotide
  Antisense strand to SEQ ID NO: 816838
uugcucauugacuuauuga

SEQ ID NO: 816840 - RNA, 19 nt, Artificial Sequence
  Description of Artificial Sequence: Synthetic oligonucleotide
  Sense strand starting at position 2670 of SEQ ID NO: 587769
agguaauaauagcuuaaga

SEQ ID NO: 816841 - RNA, 19 nt, Artificial Sequence
  Description of Artificial Sequence: Synthetic oligonucleotide
  Antisense strand to SEQ ID NO: 816840
ucuuaagcuauuauuaccu

SEQ ID NO: 816842 - RNA, 19 nt, Artificial Sequence
  Description of Artificial Sequence: Synthetic oligonucleotide
  Sense strand starting at position 2746 of SEQ ID NO: 587769
gacauaugucccugaguug

SEQ ID NO: 816843 - RNA, 19 nt, Artificial Sequence
  Description of Artificial Sequence: Synthetic oligonucleotide
  Antisense strand to SEQ ID NO: 816842
caacucagggacauauguc

SEQ ID NO: 816844 - RNA, 19 nt, Artificial Sequence
  Description of Artificial Sequence: Synthetic oligonucleotide
  Sense strand starting at position 3522 of SEQ ID NO: 587769
gcugccagauaccuugaau

SEQ ID NO: 816845 - RNA, 19 nt, Artificial Sequence
  Description of Artificial Sequence: Synthetic oligonucleotide
  Antisense strand to SEQ ID NO: 816844
auucaagguaucuggcagc

SEQ ID NO: 816846 - RNA, 19 nt, Artificial Sequence
  Description of Artificial Sequence: Synthetic oligonucleotide
  Sense strand starting at position 3525 of SEQ ID NO: 587769
gccagauaccuugaauagc

SEQ ID NO: 816847 - RNA, 19 nt, Artificial Sequence
  Description of Artificial Sequence: Synthetic oligonucleotide
  Antisense strand to SEQ ID NO: 816846
gcuauucaagguaucuggc

SEQ ID NO: 816848 - RNA, 19 nt, Artificial Sequence
  Description of Artificial Sequence: Synthetic oligonucleotide
  Sense strand starting at position 3536 of SEQ ID NO: 587769
ugaauagcaugugcuaaau

SEQ ID NO: 816849 - RNA, 19 nt, Artificial Sequence
  Description of Artificial Sequence: Synthetic oligonucleotide
  Antisense strand to SEQ ID NO: 816848
auuuagcacaugcuauuca

SEQ ID NO: 816850 - RNA, 19 nt, Artificial Sequence
  Description of Artificial Sequence: Synthetic oligonucleotide
  Sense strand starting at position 3545 of SEQ ID NO: 587769
ugugcuaaaugaucauacu

SEQ ID NO: 816851 - RNA, 19 nt, Artificial Sequence
  Description of Artificial Sequence: Synthetic oligonucleotide
  Antisense strand to SEQ ID NO: 816850
aguaugaucauuuagcaca

SEQ ID NO: 816852 - RNA, 19 nt, Artificial Sequence
  Description of Artificial Sequence: Synthetic oligonucleotide
  Sense strand starting at position 3553 of SEQ ID NO: 587769
augaucauacugugucuau

SEQ ID NO: 816853 - RNA, 19 nt, Artificial Sequence
  Description of Artificial Sequence: Synthetic oligonucleotide
  Antisense strand to SEQ ID NO: 816852
auagacacaguaugaucau

SEQ ID NO: 816854 - RNA, 19 nt, Artificial Sequence
  Description of Artificial Sequence: Synthetic oligonucleotide
  Sense strand starting at position 3554 of SEQ ID NO: 587769
ugaucauacugugucuauu

SEQ ID NO: 816855 - RNA, 19 nt, Artificial Sequence
  Description of Artificial Sequence: Synthetic oligonucleotide
  Antisense strand to SEQ ID NO: 816854
aauagacacaguaugauca

SEQ ID NO: 816856 - RNA, 19 nt, Artificial Sequence
  Description of Artificial Sequence: Synthetic oligonucleotide
  Sense strand starting at position 3556 of SEQ ID NO: 587769
aucauacugugucuauuaa

SEQ ID NO: 816857 - RNA, 19 nt, Artificial Sequence
  Description of Artificial Sequence: Synthetic oligonucleotide
  Antisense strand to SEQ ID NO: 816856
uuaauagacacaguaugau

SEQ ID NO: 816858 - RNA, 19 nt, Artificial Sequence
  Description of Artificial Sequence: Synthetic oligonucleotide
  Sense strand starting at position 3557 of SEQ ID NO: 587769
ucauacugugucuauuaaa

SEQ ID NO: 816859 - RNA, 19 nt, Artificial Sequence
  Description of Artificial Sequence: Synthetic oligonucleotide
  Antisense strand to SEQ ID NO: 816858
uuuaauagacacaguauga

SEQ ID NO: 816860 - RNA, 19 nt, Artificial Sequence
  Description of Artificial Sequence: Synthetic oligonucleotide
  Sense strand starting at position 3564 of SEQ ID NO: 587769
gugucuauuaaagguacau

SEQ ID NO: 816861 - RNA, 19 nt, Artificial Sequence
  Description of Artificial Sequence: Synthetic oligonucleotide
  Antisense strand to SEQ ID NO: 816860
auguaccuuuaauagacac

SEQ ID NO: 816862 - RNA, 19 nt, Artificial Sequence
  Description of Artificial Sequence: Synthetic oligonucleotide
  Sense strand starting at position 3609 of SEQ ID NO: 587769
gguaacauccuguaucaga

SEQ ID NO: 816863 - RNA, 19 nt, Artificial Sequence
  Description of Artificial Sequence: Synthetic oligonucleotide
  Antisense strand to SEQ ID NO: 816862
ucugauacaggauguuacc

SEQ ID NO: 816864 - RNA, 19 nt, Artificial Sequence
  Description of Artificial Sequence: Synthetic oligonucleotide
  Sense strand starting at position 3727 of SEQ ID NO: 587769
aggccuaccuuugugaaga

SEQ ID NO: 816865 - RNA, 19 nt, Artificial Sequence
  Description of Artificial Sequence: Synthetic oligonucleotide
  Antisense strand to SEQ ID NO: 816864
ucuucacaaagguaggccu

SEQ ID NO: 816866 - RNA, 19 nt, Artificial Sequence
  Description of Artificial Sequence: Synthetic oligonucleotide
  Sense strand starting at position 3735 of SEQ ID NO: 587769
cuuugugaagauuaaguuu

SEQ ID NO: 816867 - RNA, 19 nt, Artificial Sequence
  Description of Artificial Sequence: Synthetic oligonucleotide
  Antisense strand to SEQ ID NO: 816866
aaacuuaaucuucacaaag

SEQ ID NO: 816868 - RNA, 19 nt, Artificial Sequence
  Description of Artificial Sequence: Synthetic oligonucleotide
  Sense strand starting at position 3767 of SEQ ID NO: 587769
ccaauaguacgguauggga

SEQ ID NO: 816869 - RNA, 19 nt, Artificial Sequence
  Description of Artificial Sequence: Synthetic oligonucleotide
  Antisense strand to SEQ ID NO: 816868
ucccauaccguacuauugg

SEQ ID NO: 816870 - RNA, 19 nt, Artificial Sequence
  Description of Artificial Sequence: Synthetic oligonucleotide
  Sense strand starting at position 3885 of SEQ ID NO: 587769
gcuugaaguugccuggaga

SEQ ID NO: 816871 - RNA, 19 nt, Artificial Sequence
  Description of Artificial Sequence: Synthetic oligonucleotide
  Antisense strand to SEQ ID NO: 816870
ucuccaggcaacuucaagc

SEQ ID NO: 816872 - RNA, 19 nt, Artificial Sequence
  Description of Artificial Sequence: Synthetic oligonucleotide
  Sense strand starting at position 3886 of SEQ ID NO: 587769
cuugaaguugccuggagaa

SEQ ID NO: 816873 - RNA, 19 nt, Artificial Sequence
  Description of Artificial Sequence: Synthetic oligonucleotide
  Antisense strand to SEQ ID NO: 816872
uucuccaggcaacuucaag

SEQ ID NO: 816874 - RNA, 19 nt, Artificial Sequence
  Description of Artificial Sequence: Synthetic oligonucleotide
  Sense strand starting at position 3933 of SEQ ID NO: 587769
gugcgugugccaguagaca

SEQ ID NO: 816875 - RNA, 19 nt, Artificial Sequence
  Description of Artificial Sequence: Synthetic oligonucleotide
  Antisense strand to SEQ ID NO: 816874
ugucuacuggcacacgcac

SEQ ID NO: 816876 - RNA, 19 nt, Artificial Sequence
  Description of Artificial Sequence: Synthetic oligonucleotide
  Sense strand starting at position 3942 of SEQ ID NO: 587769
ccaguagacaaaugaguga

SEQ ID NO: 816877 - RNA, 19 nt, Artificial Sequence
  Description of Artificial Sequence: Synthetic oligonucleotide
  Antisense strand to SEQ ID NO: 816876
ucacucauuugucuacugg

SEQ ID NO: 816878 - RNA, 19 nt, Artificial Sequence
  Description of Artificial Sequence: Synthetic oligonucleotide
  Sense strand starting at position 87 of SEQ ID NO: 587770
ucauaacuuggugaguauu

SEQ ID NO: 816879 - RNA, 19 nt, Artificial Sequence
  Description of Artificial Sequence: Synthetic oligonucleotide
  Antisense strand to SEQ ID NO: 816878
aauacucaccaaguuauga

SEQ ID NO: 816880 - RNA, 19 nt, Artificial Sequence
  Description of Artificial Sequence: Synthetic oligonucleotide
  Sense strand starting at position 90 of SEQ ID NO: 587770
uaacuuggugaguauuaca

SEQ ID NO: 816881 - RNA, 19 nt, Artificial Sequence
  Description of Artificial Sequence: Synthetic oligonucleotide
  Antisense strand to SEQ ID NO: 816880
uguaauacucaccaaguua

SEQ ID NO: 816882 - RNA, 19 nt, Artificial Sequence
  Description of Artificial Sequence: Synthetic oligonucleotide
  Sense strand starting at position 127 of SEQ ID NO: 587770
gauccaauacuggaguguu

SEQ ID NO: 816883 - RNA, 19 nt, Artificial Sequence
  Description of Artificial Sequence: Synthetic oligonucleotide
  Antisense strand to SEQ ID NO: 816882
aacacuccaguauuggauc

SEQ ID NO: 816884 - RNA, 19 nt, Artificial Sequence
  Description of Artificial Sequence: Synthetic oligonucleotide
  Sense strand starting at position 130 of SEQ ID NO: 587770
ccaauacuggaguguuuac

SEQ ID NO: 816885 - RNA, 19 nt, Artificial Sequence
  Description of Artificial Sequence: Synthetic oligonucleotide
  Antisense strand to SEQ ID NO: 816884
guaaacacuccaguauugg

SEQ ID NO: 816886 - RNA, 19 nt, Artificial Sequence
  Description of Artificial Sequence: Synthetic oligonucleotide
  Sense strand starting at position 156 of SEQ ID NO: 587770
cagguaauguaguuacaac

SEQ ID NO: 816887 - RNA, 19 nt, Artificial Sequence
  Description of Artificial Sequence: Synthetic oligonucleotide
  Antisense strand to SEQ ID NO: 816886
guuguaacuacauuaccug

SEQ ID NO: 816888 - RNA, 19 nt, Artificial Sequence
  Description of Artificial Sequence: Synthetic oligonucleotide
  Sense strand starting at position 167 of SEQ ID NO: 587770
guuacaacaugaguaauac

SEQ ID NO: 816889 - RNA, 19 nt, Artificial Sequence
  Description of Artificial Sequence: Synthetic oligonucleotide
  Antisense strand to SEQ ID NO: 816888
guauuacucauguuguaac

SEQ ID NO: 816890 - RNA, 19 nt, Artificial Sequence
  Description of Artificial Sequence: Synthetic oligonucleotide
  Sense strand starting at position 206 of SEQ ID NO: 587770
aggacuuacuucucugaac

SEQ ID NO: 816891 - RNA, 19 nt, Artificial Sequence
  Description of Artificial Sequence: Synthetic oligonucleotide
  Antisense strand to SEQ ID NO: 816890
guucagagaaguaaguccu

SEQ ID NO: 816892 - RNA, 19 nt, Artificial Sequence
  Description of Artificial Sequence: Synthetic oligonucleotide
  Sense strand starting at position 207 of SEQ ID NO: 587770
ggacuuacuucucugaaca

SEQ ID NO: 816893 - RNA, 19 nt, Artificial Sequence
  Description of Artificial Sequence: Synthetic oligonucleotide
  Antisense strand to SEQ ID NO: 816892
uguucagagaaguaagucc

SEQ ID NO: 816894 - RNA, 19 nt, Artificial Sequence
  Description of Artificial Sequence: Synthetic oligonucleotide
  Sense strand starting at position 264 of SEQ ID NO: 587770
acacuaugugcaugaccau

SEQ ID NO: 816895 - RNA, 19 nt, Artificial Sequence
  Description of Artificial Sequence: Synthetic oligonucleotide
  Antisense strand to SEQ ID NO: 816894
auggucaugcacauagugu

SEQ ID NO: 816896 - RNA, 19 nt, Artificial Sequence
  Description of Artificial Sequence: Synthetic oligonucleotide
  Sense strand starting at position 301 of SEQ ID NO: 587770
ucugguuucucaucuaaga

SEQ ID NO: 816897 - RNA, 19 nt, Artificial Sequence
  Description of Artificial Sequence: Synthetic oligonucleotide
  Antisense strand to SEQ ID NO: 816896
ucuuagaugagaaaccaga

SEQ ID NO: 816898 - RNA, 19 nt, Artificial Sequence
  Description of Artificial Sequence: Synthetic oligonucleotide
  Sense strand starting at position 391 of SEQ ID NO: 587770
guuggcuugccauaggauu

SEQ ID NO: 816899 - RNA, 19 nt, Artificial Sequence
  Description of Artificial Sequence: Synthetic oligonucleotide
  Antisense strand to SEQ ID NO: 816898
aauccuauggcaagccaac

SEQ ID NO: 816900 - RNA, 19 nt, Artificial Sequence
  Description of Artificial Sequence: Synthetic oligonucleotide
  Sense strand starting at position 518 of SEQ ID NO: 587770
acagacaggucagaaauau

SEQ ID NO: 816901 - RNA, 19 nt, Artificial Sequence
  Description of Artificial Sequence: Synthetic oligonucleotide
  Antisense strand to SEQ ID NO: 816900
auauuucugaccugucugu

SEQ ID NO: 816902 - RNA, 19 nt, Artificial Sequence
  Description of Artificial Sequence: Synthetic oligonucleotide
  Sense strand starting at position 707 of SEQ ID NO: 587770
ugcaacaacuuuguggaaa

SEQ ID NO: 816903 - RNA, 19 nt, Artificial Sequence
  Description of Artificial Sequence: Synthetic oligonucleotide
  Antisense strand to SEQ ID NO: 816902
uuuccacaaaguuguugca

SEQ ID NO: 816904 - RNA, 19 nt, Artificial Sequence
  Description of Artificial Sequence: Synthetic oligonucleotide
  Sense strand starting at position 857 of SEQ ID NO: 587770
aguuucuaccugcacaaga

SEQ ID NO: 816905 - RNA, 19 nt, Artificial Sequence
  Description of Artificial Sequence: Synthetic oligonucleotide
  Antisense strand to SEQ ID NO: 816904
ucuugugcagguagaaacu

SEQ ID NO: 816906 - RNA, 19 nt, Artificial Sequence
  Description of Artificial Sequence: Synthetic oligonucleotide
  Sense strand starting at position 892 of SEQ ID NO: 587770
agacaagcgauauaugcau

SEQ ID NO: 816907 - RNA, 19 nt, Artificial Sequence
  Description of Artificial Sequence: Synthetic oligonucleotide
  Antisense strand to SEQ ID NO: 816906
augcauauaucgcuugucu

SEQ ID NO: 816908 - RNA, 19 nt, Artificial Sequence
  Description of Artificial Sequence: Synthetic oligonucleotide
  Sense strand starting at position 898 of SEQ ID NO: 587770
gcgauauaugcauagcauu

SEQ ID NO: 816909 - RNA, 19 nt, Artificial Sequence
  Description of Artificial Sequence: Synthetic oligonucleotide
  Antisense strand to SEQ ID NO: 816908
aaugcuaugcauauaucgc

SEQ ID NO: 816910 - RNA, 19 nt, Artificial Sequence
  Description of Artificial Sequence: Synthetic oligonucleotide
  Sense strand starting at position 958 of SEQ ID NO: 587770
ugaauaaucugagcuauca

SEQ ID NO: 816911 - RNA, 19 nt, Artificial Sequence
  Description of Artificial Sequence: Synthetic oligonucleotide
  Antisense strand to SEQ ID NO: 816910
ugauagcucagauuauuca

SEQ ID NO: 816912 - RNA, 19 nt, Artificial Sequence
  Description of Artificial Sequence: Synthetic oligonucleotide
  Sense strand starting at position 1060 of SEQ ID NO: 587770
caaagaugccguuaagaau

SEQ ID NO: 816913 - RNA, 19 nt, Artificial Sequence
  Description of Artificial Sequence: Synthetic oligonucleotide
  Antisense strand to SEQ ID NO: 816912
auucuuaacggcaucuuug

SEQ ID NO: 816914 - RNA, 19 nt, Artificial Sequence
  Description of Artificial Sequence: Synthetic oligonucleotide
  Sense strand starting at position 1069 of SEQ ID NO: 587770
cguuaagaauguuucugag

SEQ ID NO: 816915 - RNA, 19 nt, Artificial Sequence
  Description of Artificial Sequence: Synthetic oligonucleotide
  Antisense strand to SEQ ID NO: 816914
cucagaaacauucuuaacg

SEQ ID NO: 816916 - RNA, 19 nt, Artificial Sequence
  Description of Artificial Sequence: Synthetic oligonucleotide
  Sense strand starting at position 1075 of SEQ ID NO: 587770
gaauguuucugagccaaau

SEQ ID NO: 816917 - RNA, 19 nt, Artificial Sequence
  Description of Artificial Sequence: Synthetic oligonucleotide
  Antisense strand to SEQ ID NO: 816916
auuuggcucagaaacauuc

SEQ ID NO: 816918 - RNA, 19 nt, Artificial Sequence
  Description of Artificial Sequence: Synthetic oligonucleotide
  Sense strand starting at position 1612 of SEQ ID NO: 587770
caaagaugguauccauggu

SEQ ID NO: 816919 - RNA, 19 nt, Artificial Sequence
  Description of Artificial Sequence: Synthetic oligonucleotide
  Antisense strand to SEQ ID NO: 816918
accauggauaccaucuuug

SEQ ID NO: 816920 - RNA, 19 nt, Artificial Sequence
  Description of Artificial Sequence: Synthetic oligonucleotide
  Sense strand starting at position 1625 of SEQ ID NO: 587770
caugguuggcaugauacua

SEQ ID NO: 816921 - RNA, 19 nt, Artificial Sequence
  Description of Artificial Sequence: Synthetic oligonucleotide
  Antisense strand to SEQ ID NO: 816920
uaguaucaugccaaccaug

SEQ ID NO: 816922 - RNA, 19 nt, Artificial Sequence
  Description of Artificial Sequence: Synthetic oligonucleotide
  Sense strand starting at position 1648 of SEQ ID NO: 587770
ccuaguucugcccacacau

SEQ ID NO: 816923 - RNA, 19 nt, Artificial Sequence
  Description of Artificial Sequence: Synthetic oligonucleotide
  Antisense strand to SEQ ID NO: 816922
augugugggcagaacuagg

SEQ ID NO: 816924 - RNA, 19 nt, Artificial Sequence
  Description of Artificial Sequence: Synthetic oligonucleotide
  Sense strand starting at position 1716 of SEQ ID NO: 587770
uugguacugcauuagaaag

SEQ ID NO: 816925 - RNA, 19 nt, Artificial Sequence
  Description of Artificial Sequence: Synthetic oligonucleotide
  Antisense strand to SEQ ID NO: 816924
cuuucuaaugcaguaccaa

SEQ ID NO: 816926 - RNA, 19 nt, Artificial Sequence
  Description of Artificial Sequence: Synthetic oligonucleotide
  Sense strand starting at position 1742 of SEQ ID NO: 587770
agauuccagguacgaaaua

SEQ ID NO: 816927 - RNA, 19 nt, Artificial Sequence
  Description of Artificial Sequence: Synthetic oligonucleotide
  Antisense strand to SEQ ID NO: 816926
uauuucguaccuggaaucu

SEQ ID NO: 816928 - RNA, 19 nt, Artificial Sequence
  Description of Artificial Sequence: Synthetic oligonucleotide
  Sense strand starting at position 1771 of SEQ ID NO: 587770
cauguucuguggucauuaa

SEQ ID NO: 816929 - RNA, 19 nt, Artificial Sequence
  Description of Artificial Sequence: Synthetic oligonucleotide
  Antisense strand to SEQ ID NO: 816928
uuaaugaccacagaacaug

SEQ ID NO: 816930 - RNA, 19 nt, Artificial Sequence
  Description of Artificial Sequence: Synthetic oligonucleotide
  Sense strand starting at position 1772 of SEQ ID NO: 587770
auguucuguggucauuaaa

SEQ ID NO: 816931 - RNA, 19 nt, Artificial Sequence
  Description of Artificial Sequence: Synthetic oligonucleotide
  Antisense strand to SEQ ID NO: 816930
uuuaaugaccacagaacau

SEQ ID NO: 816932 - RNA, 19 nt, Artificial Sequence
  Description of Artificial Sequence: Synthetic oligonucleotide
  Sense strand starting at position 1775 of SEQ ID NO: 587770
uucuguggucauuaaacau

SEQ ID NO: 816933 - RNA, 19 nt, Artificial Sequence
  Description of Artificial Sequence: Synthetic oligonucleotide
  Antisense strand to SEQ ID NO: 816932
auguuuaaugaccacagaa

SEQ ID NO: 816934 - RNA, 19 nt, Artificial Sequence
  Description of Artificial Sequence: Synthetic oligonucleotide
  Sense strand starting at position 1922 of SEQ ID NO: 587770
agguuaaacuaccaugaaa

SEQ ID NO: 816935 - RNA, 19 nt, Artificial Sequence
  Description of Artificial Sequence: Synthetic oligonucleotide
  Antisense strand to SEQ ID NO: 816934
uuucaugguaguuuaaccu

SEQ ID NO: 816936 - RNA, 19 nt, Artificial Sequence
  Description of Artificial Sequence: Synthetic oligonucleotide
  Sense strand starting at position 2065 of SEQ ID NO: 587770
gcaaaucacuggcuccaga

SEQ ID NO: 816937 - RNA, 19 nt, Artificial Sequence
  Description of Artificial Sequence: Synthetic oligonucleotide
  Antisense strand to SEQ ID NO: 816936
ucuggagccagugauuugc

SEQ ID NO: 816938 - RNA, 19 nt, Artificial Sequence
  Description of Artificial Sequence: Synthetic oligonucleotide
  Sense strand starting at position 2113 of SEQ ID NO: 587770
ugcuaaagagacugucaaa

SEQ ID NO: 816939 - RNA, 19 nt, Artificial Sequence
  Description of Artificial Sequence: Synthetic oligonucleotide
  Antisense strand to SEQ ID NO: 816938
uuugacagucucuuuagca

SEQ ID NO: 816940 - RNA, 19 nt, Artificial Sequence
  Description of Artificial Sequence: Synthetic oligonucleotide
  Sense strand starting at position 2116 of SEQ ID NO: 587770
uaaagagacugucaaagga

SEQ ID NO: 816941 - RNA, 19 nt, Artificial Sequence
  Description of Artificial Sequence: Synthetic oligonucleotide
  Antisense strand to SEQ ID NO: 816940
uccuuugacagucucuuua

SEQ ID NO: 816942 - RNA, 19 nt, Artificial Sequence
  Description of Artificial Sequence: Synthetic oligonucleotide
  Sense strand starting at position 2199 of SEQ ID NO: 587770
gcuaaugucaucucgugca

SEQ ID NO: 816943 - RNA, 19 nt, Artificial Sequence
  Description of Artificial Sequence: Synthetic oligonucleotide
  Antisense strand to SEQ ID NO: 816942
ugcacgagaugacauuagc

SEQ ID NO: 816944 - RNA, 19 nt, Artificial Sequence
  Description of Artificial Sequence: Synthetic oligonucleotide
  Sense strand starting at position 2283 of SEQ ID NO: 587770
aagucaauccgacauguua

SEQ ID NO: 816945 - RNA, 19 nt, Artificial Sequence
  Description of Artificial Sequence: Synthetic oligonucleotide
  Antisense strand to SEQ ID NO: 816944
uaacaugucggauugacuu

SEQ ID NO: 816946 - RNA, 19 nt, Artificial Sequence
  Description of Artificial Sequence: Synthetic oligonucleotide
  Sense strand starting at position 2352 of SEQ ID NO: 587770
uggucucaucucggaaugu

SEQ ID NO: 816947 - RNA, 19 nt, Artificial Sequence
  Description of Artificial Sequence: Synthetic oligonucleotide
  Antisense strand to SEQ ID NO: 816946
acauuccgagaugagacca

SEQ ID NO: 816948 - RNA, 19 nt, Artificial Sequence
  Description of Artificial Sequence: Synthetic oligonucleotide
  Sense strand starting at position 2361 of SEQ ID NO: 587770
cucggaauguuucuauuuc

SEQ ID NO: 816949 - RNA, 19 nt, Artificial Sequence
  Description of Artificial Sequence: Synthetic oligonucleotide
  Antisense strand to SEQ ID NO: 816948
gaaauagaaacauuccgag

SEQ ID NO: 816950 - RNA, 19 nt, Artificial Sequence
  Description of Artificial Sequence: Synthetic oligonucleotide
  Sense strand starting at position 2387 of SEQ ID NO: 587770
aguacugaggucgaaauga

SEQ ID NO: 816951 - RNA, 19 nt, Artificial Sequence
  Description of Artificial Sequence: Synthetic oligonucleotide
  Antisense strand to SEQ ID NO: 816950
ucauuucgaccucaguacu

SEQ ID NO: 816952 - RNA, 19 nt, Artificial Sequence
  Description of Artificial Sequence: Synthetic oligonucleotide
  Sense strand starting at position 2657 of SEQ ID NO: 587770
cucugaacuccgcaacuau

SEQ ID NO: 816953 - RNA, 19 nt, Artificial Sequence
  Description of Artificial Sequence: Synthetic oligonucleotide
  Antisense strand to SEQ ID NO: 816952
auaguugcggaguucagag

SEQ ID NO: 816954 - RNA, 19 nt, Artificial Sequence
  Description of Artificial Sequence: Synthetic oligonucleotide
  Sense strand starting at position 2820 of SEQ ID NO: 587770
aacgaaaugguucgaaaca

SEQ ID NO: 816955 - RNA, 19 nt, Artificial Sequence
  Description of Artificial Sequence: Synthetic oligonucleotide
  Antisense strand to SEQ ID NO: 816954
uguuucgaaccauuucguu

SEQ ID NO: 816956 - RNA, 19 nt, Artificial Sequence
  Description of Artificial Sequence: Synthetic oligonucleotide
  Sense strand starting at position 3976 of SEQ ID NO: 587770
ggcuuaggaguccaguuua

SEQ ID NO: 816957 - RNA, 19 nt, Artificial Sequence
  Description of Artificial Sequence: Synthetic oligonucleotide
  Antisense strand to SEQ ID NO: 816956
uaaacuggacuccuaagcc

SEQ ID NO: 816958 - RNA, 19 nt, Artificial Sequence
  Description of Artificial Sequence: Synthetic oligonucleotide
  Sense strand starting at position 17 of SEQ ID NO: 587771
agauuccagguacgaaaua

SEQ ID NO: 816959 - RNA, 19 nt, Artificial Sequence
  Description of Artificial Sequence: Synthetic oligonucleotide
  Antisense strand to SEQ ID NO: 816958
uauuucguaccuggaaucu

SEQ ID NO: 816960 - RNA, 19 nt, Artificial Sequence
  Description of Artificial Sequence: Synthetic oligonucleotide
  Sense strand starting at position 47 of SEQ ID NO: 587771
auguucuguggucauuaaa

SEQ ID NO: 816961 - RNA, 19 nt, Artificial Sequence
  Description of Artificial Sequence: Synthetic oligonucleotide
  Antisense strand to SEQ ID NO: 816960
uuuaaugaccacagaacau

SEQ ID NO: 816962 - RNA, 19 nt, Artificial Sequence
  Description of Artificial Sequence: Synthetic oligonucleotide
  Sense strand starting at position 50 of SEQ ID NO: 587771
uucuguggucauuaaacau

SEQ ID NO: 816963 - RNA, 19 nt, Artificial Sequence
  Description of Artificial Sequence: Synthetic oligonucleotide
  Antisense strand to SEQ ID NO: 816962
auguuuaaugaccacagaa

SEQ ID NO: 816964 - RNA, 19 nt, Artificial Sequence
  Description of Artificial Sequence: Synthetic oligonucleotide
  Sense strand starting at position 340 of SEQ ID NO: 587771
gcaaaucacuggcuccaga

SEQ ID NO: 816965 - RNA, 19 nt, Artificial Sequence
  Description of Artificial Sequence: Synthetic oligonucleotide
  Antisense strand to SEQ ID NO: 816964
ucuggagccagugauuugc

SEQ ID NO: 816966 - RNA, 19 nt, Artificial Sequence
  Description of Artificial Sequence: Synthetic oligonucleotide
  Sense strand starting at position 388 of SEQ ID NO: 587771
ugcuaaagagacugucaaa

SEQ ID NO: 816967 - RNA, 19 nt, Artificial Sequence
  Description of Artificial Sequence: Synthetic oligonucleotide
  Antisense strand to SEQ ID NO: 816966
uuugacagucucuuuagca

SEQ ID NO: 816968 - RNA, 19 nt, Artificial Sequence
  Description of Artificial Sequence: Synthetic oligonucleotide
  Sense strand starting at position 391 of SEQ ID NO: 587771
uaaagagacugucaaagga

SEQ ID NO: 816969 - RNA, 19 nt, Artificial Sequence
  Description of Artificial Sequence: Synthetic oligonucleotide
  Antisense strand to SEQ ID NO: 816968
uccuuugacagucucuuua

SEQ ID NO: 816970 - RNA, 19 nt, Artificial Sequence
  Description of Artificial Sequence: Synthetic oligonucleotide
  Sense strand starting at position 474 of SEQ ID NO: 587771
gcuaaugucaucucgugca

SEQ ID NO: 816971 - RNA, 19 nt, Artificial Sequence
  Description of Artificial Sequence: Synthetic oligonucleotide
  Antisense strand to SEQ ID NO: 816970
ugcacgagaugacauuagc

SEQ ID NO: 816972 - RNA, 19 nt, Artificial Sequence
  Description of Artificial Sequence: Synthetic oligonucleotide
  Sense strand starting at position 558 of SEQ ID NO: 587771
aagucaauccgacauguua

SEQ ID NO: 816973 - RNA, 19 nt, Artificial Sequence
  Description of Artificial Sequence: Synthetic oligonucleotide
  Antisense strand to SEQ ID NO: 816972
uaacaugucggauugacuu

SEQ ID NO: 816974 - RNA, 19 nt, Artificial Sequence
  Description of Artificial Sequence: Synthetic oligonucleotide
  Sense strand starting at position 636 of SEQ ID NO: 587771
cucggaauguuucuauuuc

SEQ ID NO: 816975 - RNA, 19 nt, Artificial Sequence
  Description of Artificial Sequence: Synthetic oligonucleotide
  Antisense strand to SEQ ID NO: 816974
gaaauagaaacauuccgag

SEQ ID NO: 816976 - RNA, 19 nt, Artificial Sequence
  Description of Artificial Sequence: Synthetic oligonucleotide
  Sense strand starting at position 662 of SEQ ID NO: 587771
aguacugaggucgaaauga

SEQ ID NO: 816977 - RNA, 19 nt, Artificial Sequence
  Description of Artificial Sequence: Synthetic oligonucleotide
  Antisense strand to SEQ ID NO: 816976
ucauuucgaccucaguacu

SEQ ID NO: 816978 - RNA, 19 nt, Artificial Sequence
  Description of Artificial Sequence: Synthetic oligonucleotide
  Sense strand starting at position 932 of SEQ ID NO: 587771
cucugaacuccgcaacuau

SEQ ID NO: 816979 - RNA, 19 nt, Artificial Sequence
  Description of Artificial Sequence: Synthetic oligonucleotide
  Antisense strand to SEQ ID NO: 816978
auaguugcggaguucagag

SEQ ID NO: 816980 - RNA, 19 nt, Artificial Sequence
  Description of Artificial Sequence: Synthetic oligonucleotide
  Sense strand starting at position 1095 of SEQ ID NO: 587771
aacgaaaugguucgaaaca

SEQ ID NO: 816981 - RNA, 19 nt, Artificial Sequence
  Description of Artificial Sequence: Synthetic oligonucleotide
  Antisense strand to SEQ ID NO: 816980
uguuucgaaccauuucguu

SEQ ID NO: 816982 - RNA, 19 nt, Artificial Sequence
  Description of Artificial Sequence: Synthetic oligonucleotide
  Sense strand starting at position 2251 of SEQ ID NO: 587771
ggcuuaggaguccaguuua

SEQ ID NO: 816983 - RNA, 19 nt, Artificial Sequence
  Description of Artificial Sequence: Synthetic oligonucleotide
  Antisense strand to SEQ ID NO: 816982
uaaacuggacuccuaagcc

SEQ ID NO: 816984 - RNA, 19 nt, Artificial Sequence
  Description of Artificial Sequence: Synthetic oligonucleotide
  Sense strand starting at position 2295 of SEQ ID NO: 587771
gguccuaugucuucuagga

SEQ ID NO: 816985 - RNA, 19 nt, Artificial Sequence
  Description of Artificial Sequence: Synthetic oligonucleotide
  Antisense strand to SEQ ID NO: 816984
uccuagaagacauaggacc

SEQ ID NO: 816986 - RNA, 19 nt, Artificial Sequence
  Description of Artificial Sequence: Synthetic oligonucleotide
  Sense strand starting at position 2299 of SEQ ID NO: 587771
cuaugucuucuaggaauac

SEQ ID NO: 816987 - RNA, 19 nt, Artificial Sequence
  Description of Artificial Sequence: Synthetic oligonucleotide
  Antisense strand to SEQ ID NO: 816986
guauuccuagaagacauag

SEQ ID NO: 816988 - RNA, 19 nt, Artificial Sequence
  Description of Artificial Sequence: Synthetic oligonucleotide
  Sense strand starting at position 2647 of SEQ ID NO: 587771
aggaaauugucacuuugga

SEQ ID NO: 816989 - RNA, 19 nt, Artificial Sequence
  Description of Artificial Sequence: Synthetic oligonucleotide
  Antisense strand to SEQ ID NO: 816988
uccaaagugacaauuuccu

SEQ ID NO: 816990 - RNA, 19 nt, Artificial Sequence
  Description of Artificial Sequence: Synthetic oligonucleotide
  Sense strand starting at position 2759 of SEQ ID NO: 587771
ugguucuaucugggugaau

SEQ ID NO: 816991 - RNA, 19 nt, Artificial Sequence
  Description of Artificial Sequence: Synthetic oligonucleotide
  Antisense strand to SEQ ID NO: 816990
auucacccagauagaacca

SEQ ID NO: 816992 - RNA, 19 nt, Artificial Sequence
  Description of Artificial Sequence: Synthetic oligonucleotide
  Sense strand starting at position 2760 of SEQ ID NO: 587771
gguucuaucugggugaauu

SEQ ID NO: 816993 - RNA, 19 nt, Artificial Sequence
  Description of Artificial Sequence: Synthetic oligonucleotide
  Antisense strand to SEQ ID NO: 816992
aauucacccagauagaacc

SEQ ID NO: 816994 - RNA, 19 nt, Artificial Sequence
  Description of Artificial Sequence: Synthetic oligonucleotide
  Sense strand starting at position 2761 of SEQ ID NO: 587771
guucuaucugggugaauua

SEQ ID NO: 816995 - RNA, 19 nt, Artificial Sequence
  Description of Artificial Sequence: Synthetic oligonucleotide
  Antisense strand to SEQ ID NO: 816994
uaauucacccagauagaac

SEQ ID NO: 816996 - RNA, 19 nt, Artificial Sequence
  Description of Artificial Sequence: Synthetic oligonucleotide
  Sense strand starting at position 2838 of SEQ ID NO: 587771
aagagugauuucuaagaga

SEQ ID NO: 816997 - RNA, 19 nt, Artificial Sequence
  Description of Artificial Sequence: Synthetic oligonucleotide
  Antisense strand to SEQ ID NO: 816996
ucucuuagaaaucacucuu

SEQ ID NO: 816998 - RNA, 19 nt, Artificial Sequence
  Description of Artificial Sequence: Synthetic oligonucleotide
  Sense strand starting at position 2841 of SEQ ID NO: 587771
agugauuucuaagagaaac

SEQ ID NO: 816999 - RNA, 19 nt, Artificial Sequence
  Description of Artificial Sequence: Synthetic oligonucleotide
  Antisense strand to SEQ ID NO: 816998
guuucucuuagaaaucacu

SEQ ID NO: 817000 - RNA, 19 nt, Artificial Sequence
  Description of Artificial Sequence: Synthetic oligonucleotide
  Sense strand starting at position 2852 of SEQ ID NO: 587771
agagaaaccugaguuugug

SEQ ID NO: 817001 - RNA, 19 nt, Artificial Sequence
  Description of Artificial Sequence: Synthetic oligonucleotide
  Antisense strand to SEQ ID NO: 817000
cacaaacucagguuucucu

SEQ ID NO: 817002 - RNA, 19 nt, Artificial Sequence
  Description of Artificial Sequence: Synthetic oligonucleotide
  Sense strand starting at position 2856 of SEQ ID NO: 587771
aaaccugaguuugugauga

SEQ ID NO: 817003 - RNA, 19 nt, Artificial Sequence
  Description of Artificial Sequence: Synthetic oligonucleotide
  Antisense strand to SEQ ID NO: 817002
ucaucacaaacucagguuu

SEQ ID NO: 817004 - RNA, 19 nt, Artificial Sequence
  Description of Artificial Sequence: Synthetic oligonucleotide
  Sense strand starting at position 3285 of SEQ ID NO: 587771
ugccuaauaugauuccaag

SEQ ID NO: 817005 - RNA, 19 nt, Artificial Sequence
  Description of Artificial Sequence: Synthetic oligonucleotide
  Antisense strand to SEQ ID NO: 817004
cuuggaaucauauuaggca

SEQ ID NO: 817006 - RNA, 19 nt, Artificial Sequence
  Description of Artificial Sequence: Synthetic oligonucleotide
  Sense strand starting at position 3380 of SEQ ID NO: 587771
aaauguuagcugccguuau

SEQ ID NO: 817007 - RNA, 19 nt, Artificial Sequence
  Description of Artificial Sequence: Synthetic oligonucleotide
  Antisense strand to SEQ ID NO: 817006
auaacggcagcuaacauuu

SEQ ID NO: 817008 - RNA, 19 nt, Artificial Sequence
  Description of Artificial Sequence: Synthetic oligonucleotide
  Sense strand starting at position 3382 of SEQ ID NO: 587771
auguuagcugccguuauua

SEQ ID NO: 817009 - RNA, 19 nt, Artificial Sequence
  Description of Artificial Sequence: Synthetic oligonucleotide
  Antisense strand to SEQ ID NO: 817008
uaauaacggcagcuaacau

SEQ ID NO: 817010 - RNA, 19 nt, Artificial Sequence
  Description of Artificial Sequence: Synthetic oligonucleotide
  Sense strand starting at position 3412 of SEQ ID NO: 587771
uugaaagcaucgucaguaa

SEQ ID NO: 817011 - RNA, 19 nt, Artificial Sequence
  Description of Artificial Sequence: Synthetic oligonucleotide
  Antisense strand to SEQ ID NO: 817010
uuacugacgaugcuuucaa

SEQ ID NO: 817012 - RNA, 19 nt, Artificial Sequence
  Description of Artificial Sequence: Synthetic oligonucleotide
  Sense strand starting at position 3416 of SEQ ID NO: 587771
aagcaucgucaguaagguu

SEQ ID NO: 817013 - RNA, 19 nt, Artificial Sequence
  Description of Artificial Sequence: Synthetic oligonucleotide
  Antisense strand to SEQ ID NO: 817012
aaccuuacugacgaugcuu

SEQ ID NO: 817014 - RNA, 19 nt, Artificial Sequence
  Description of Artificial Sequence: Synthetic oligonucleotide
  Sense strand starting at position 3489 of SEQ ID NO: 587771
augugcacuucuguugaaa

SEQ ID NO: 817015 - RNA, 19 nt, Artificial Sequence
  Description of Artificial Sequence: Synthetic oligonucleotide
  Antisense strand to SEQ ID NO: 817014
uuucaacagaagugcacau

SEQ ID NO: 817016 - RNA, 19 nt, Artificial Sequence
  Description of Artificial Sequence: Synthetic oligonucleotide
  Sense strand starting at position 3492 of SEQ ID NO: 587771
ugcacuucuguugaaagau

SEQ ID NO: 817017 - RNA, 19 nt, Artificial Sequence
  Description of Artificial Sequence: Synthetic oligonucleotide
  Antisense strand to SEQ ID NO: 817016
aucuuucaacagaagugca

SEQ ID NO: 817018 - RNA, 19 nt, Artificial Sequence
  Description of Artificial Sequence: Synthetic oligonucleotide
  Sense strand starting at position 3501 of SEQ ID NO: 587771
guugaaagaugcucuaaug

SEQ ID NO: 817019 - RNA, 19 nt, Artificial Sequence
  Description of Artificial Sequence: Synthetic oligonucleotide
  Antisense strand to SEQ ID NO: 817018
cauuagagcaucuuucaac

SEQ ID NO: 817020 - RNA, 19 nt, Artificial Sequence
  Description of Artificial Sequence: Synthetic oligonucleotide
  Sense strand starting at position 3567 of SEQ ID NO: 587771
acgauacuccuaggagaua

SEQ ID NO: 817021 - RNA, 19 nt, Artificial Sequence
  Description of Artificial Sequence: Synthetic oligonucleotide
  Antisense strand to SEQ ID NO: 817020
uaucuccuaggaguaucgu

SEQ ID NO: 817022 - RNA, 19 nt, Artificial Sequence
  Description of Artificial Sequence: Synthetic oligonucleotide
  Sense strand starting at position 3579 of SEQ ID NO: 587771
ggagauagauaugcacauu

SEQ ID NO: 817023 - RNA, 19 nt, Artificial Sequence
  Description of Artificial Sequence: Synthetic oligonucleotide
  Antisense strand to SEQ ID NO: 817022
aaugugcauaucuaucucc

SEQ ID NO: 817024 - RNA, 19 nt, Artificial Sequence
  Description of Artificial Sequence: Synthetic oligonucleotide
  Sense strand starting at position 3643 of SEQ ID NO: 587771
ggcugaauggagugauaaa

SEQ ID NO: 817025 - RNA, 19 nt, Artificial Sequence
  Description of Artificial Sequence: Synthetic oligonucleotide
  Antisense strand to SEQ ID NO: 817024
uuuaucacuccauucagcc

SEQ ID NO: 817026 - RNA, 19 nt, Artificial Sequence
  Description of Artificial Sequence: Synthetic oligonucleotide
  Sense strand starting at position 3656 of SEQ ID NO: 587771
gauaaaggcguuuggaaac

SEQ ID NO: 817027 - RNA, 19 nt, Artificial Sequence
  Description of Artificial Sequence: Synthetic oligonucleotide
  Antisense strand to SEQ ID NO: 817026
guuuccaaacgccuuuauc

SEQ ID NO: 817028 - RNA, 19 nt, Artificial Sequence
  Description of Artificial Sequence: Synthetic oligonucleotide
  Sense strand starting at position 3750 of SEQ ID NO: 587771
acaguugaacuguaaugca

SEQ ID NO: 817029 - RNA, 19 nt, Artificial Sequence
  Description of Artificial Sequence: Synthetic oligonucleotide
  Antisense strand to SEQ ID NO: 817028
ugcauuacaguucaacugu

SEQ ID NO: 817030 - RNA, 19 nt, Artificial Sequence
  Description of Artificial Sequence: Synthetic oligonucleotide
  Sense strand starting at position 3798 of SEQ ID NO: 587771
gcaccacugcaugaucauu

SEQ ID NO: 817031 - RNA, 19 nt, Artificial Sequence
  Description of Artificial Sequence: Synthetic oligonucleotide
  Antisense strand to SEQ ID NO: 817030
aaugaucaugcaguggugc

SEQ ID NO: 817032 - RNA, 19 nt, Artificial Sequence
  Description of Artificial Sequence: Synthetic oligonucleotide
  Sense strand starting at position 3820 of SEQ ID NO: 587771
cuguuucugcaugaauauu

SEQ ID NO: 817033 - RNA, 19 nt, Artificial Sequence
  Description of Artificial Sequence: Synthetic oligonucleotide
  Antisense strand to SEQ ID NO: 817032
aauauucaugcagaaacag

SEQ ID NO: 817034 - RNA, 19 nt, Artificial Sequence
  Description of Artificial Sequence: Synthetic oligonucleotide
  Sense strand starting at position 3828 of SEQ ID NO: 587771
gcaugaauauuucccacgu

SEQ ID NO: 817035 - RNA, 19 nt, Artificial Sequence
  Description of Artificial Sequence: Synthetic oligonucleotide
  Antisense strand to SEQ ID NO: 817034
acgugggaaauauucaugc

SEQ ID NO: 817036 - RNA, 19 nt, Artificial Sequence
  Description of Artificial Sequence: Synthetic oligonucleotide
  Sense strand starting at position 3841 of SEQ ID NO: 587771
ccacguuaccaaugaauua

SEQ ID NO: 817037 - RNA, 19 nt, Artificial Sequence
  Description of Artificial Sequence: Synthetic oligonucleotide
  Antisense strand to SEQ ID NO: 817036
uaauucauugguaacgugg

SEQ ID NO: 817038 - RNA, 19 nt, Artificial Sequence
  Description of Artificial Sequence: Synthetic oligonucleotide
  Sense strand starting at position 62 of SEQ ID NO: 587772
acugaacugguauagcauu

SEQ ID NO: 817039 - RNA, 19 nt, Artificial Sequence
  Description of Artificial Sequence: Synthetic oligonucleotide
  Antisense strand to SEQ ID NO: 817038
aaugcuauaccaguucagu

SEQ ID NO: 817040 - RNA, 19 nt, Artificial Sequence
  Description of Artificial Sequence: Synthetic oligonucleotide
  Sense strand starting at position 199 of SEQ ID NO: 587772
agguuauguuaaguacacu

SEQ ID NO: 817041 - RNA, 19 nt, Artificial Sequence
  Description of Artificial Sequence: Synthetic oligonucleotide
  Antisense strand to SEQ ID NO: 817040
aguguacuuaacauaaccu

SEQ ID NO: 817042 - RNA, 19 nt, Artificial Sequence
  Description of Artificial Sequence: Synthetic oligonucleotide
  Sense strand starting at position 222 of SEQ ID NO: 587772
aucuuaagagagggcuaua

SEQ ID NO: 817043 - RNA, 19 nt, Artificial Sequence
  Description of Artificial Sequence: Synthetic oligonucleotide
  Antisense strand to SEQ ID NO: 817042
uauagcccucucuuaagau

SEQ ID NO: 817044 - RNA, 19 nt, Artificial Sequence
  Description of Artificial Sequence: Synthetic oligonucleotide
  Sense strand starting at position 232 of SEQ ID NO: 587772
agggcuauauacuucuuau

SEQ ID NO: 817045 - RNA, 19 nt, Artificial Sequence
  Description of Artificial Sequence: Synthetic oligonucleotide
  Antisense strand to SEQ ID NO: 817044
auaagaaguauauagcccu

SEQ ID NO: 817046 - RNA, 19 nt, Artificial Sequence
  Description of Artificial Sequence: Synthetic oligonucleotide
  Sense strand starting at position 235 of SEQ ID NO: 587772
gcuauauacuucuuauagg

SEQ ID NO: 817047 - RNA, 19 nt, Artificial Sequence
  Description of Artificial Sequence: Synthetic oligonucleotide
  Antisense strand to SEQ ID NO: 817046
ccuauaagaaguauauagc

SEQ ID NO: 817048 - RNA, 19 nt, Artificial Sequence
  Description of Artificial Sequence: Synthetic oligonucleotide
  Sense strand starting at position 311 of SEQ ID NO: 587772
gggauaaugucaguuagau

SEQ ID NO: 817049 - RNA, 19 nt, Artificial Sequence
  Description of Artificial Sequence: Synthetic oligonucleotide
  Antisense strand to SEQ ID NO: 817048
aucuaacugacauuauccc

SEQ ID NO: 817050 - RNA, 19 nt, Artificial Sequence
  Description of Artificial Sequence: Synthetic oligonucleotide
  Sense strand starting at position 525 of SEQ ID NO: 587772
auguauucccgucacuagu

SEQ ID NO: 817051 - RNA, 19 nt, Artificial Sequence
  Description of Artificial Sequence: Synthetic oligonucleotide
  Antisense strand to SEQ ID NO: 817050
acuagugacgggaauacau

SEQ ID NO: 817052 - RNA, 19 nt, Artificial Sequence
  Description of Artificial Sequence: Synthetic oligonucleotide
  Sense strand starting at position 693 of SEQ ID NO: 587772
accgauuguuaaucucaga

SEQ ID NO: 817053 - RNA, 19 nt, Artificial Sequence
  Description of Artificial Sequence: Synthetic oligonucleotide
  Antisense strand to SEQ ID NO: 817052
ucugagauuaacaaucggu

SEQ ID NO: 817054 - RNA, 19 nt, Artificial Sequence
  Description of Artificial Sequence: Synthetic oligonucleotide
  Sense strand starting at position 715 of SEQ ID NO: 587772
aaggguugugccuaagacu

SEQ ID NO: 817055 - RNA, 19 nt, Artificial Sequence
  Description of Artificial Sequence: Synthetic oligonucleotide
  Antisense strand to SEQ ID NO: 817054
agucuuaggcacaacccuu

SEQ ID NO: 817056 - RNA, 19 nt, Artificial Sequence
  Description of Artificial Sequence: Synthetic oligonucleotide
  Sense strand starting at position 728 of SEQ ID NO: 587772
aagacuuacggcugaauaa

SEQ ID NO: 817057 - RNA, 19 nt, Artificial Sequence
  Description of Artificial Sequence: Synthetic oligonucleotide
  Antisense strand to SEQ ID NO: 817056
uuauucagccguaagucuu

SEQ ID NO: 817058 - RNA, 19 nt, Artificial Sequence
  Description of Artificial Sequence: Synthetic oligonucleotide
  Sense strand starting at position 752 of SEQ ID NO: 587772
gcacauaaauuagugguua

SEQ ID NO: 817059 - RNA, 19 nt, Artificial Sequence
  Description of Artificial Sequence: Synthetic oligonucleotide
  Antisense strand to SEQ ID NO: 817058
uaaccacuaauuuaugugc

SEQ ID NO: 817060 - RNA, 19 nt, Artificial Sequence
  Description of Artificial Sequence: Synthetic oligonucleotide
  Sense strand starting at position 757 of SEQ ID NO: 587772
uaaauuagugguuaugugu

SEQ ID NO: 817061 - RNA, 19 nt, Artificial Sequence
  Description of Artificial Sequence: Synthetic oligonucleotide
  Antisense strand to SEQ ID NO: 817060
acacauaaccacuaauuua

SEQ ID NO: 817062 - RNA, 19 nt, Artificial Sequence
  Description of Artificial Sequence: Synthetic oligonucleotide
  Sense strand starting at position 763 of SEQ ID NO: 587772
agugguuauguguaaucca

SEQ ID NO: 817063 - RNA, 19 nt, Artificial Sequence
  Description of Artificial Sequence: Synthetic oligonucleotide
  Antisense strand to SEQ ID NO: 817062
uggauuacacauaaccacu

SEQ ID NO: 817064 - RNA, 19 nt, Artificial Sequence
  Description of Artificial Sequence: Synthetic oligonucleotide
  Sense strand starting at position 766 of SEQ ID NO: 587772
gguuauguguaauccaucu

SEQ ID NO: 817065 - RNA, 19 nt, Artificial Sequence
  Description of Artificial Sequence: Synthetic oligonucleotide
  Antisense strand to SEQ ID NO: 817064
agauggauuacacauaacc

SEQ ID NO: 817066 - RNA, 19 nt, Artificial Sequence
  Description of Artificial Sequence: Synthetic oligonucleotide
  Sense strand starting at position 773 of SEQ ID NO: 587772
uguaauccaucuucuuagu

SEQ ID NO: 817067 - RNA, 19 nt, Artificial Sequence
  Description of Artificial Sequence: Synthetic oligonucleotide
  Antisense strand to SEQ ID NO: 817066
acuaagaagauggauuaca

SEQ ID NO: 817068 - RNA, 19 nt, Artificial Sequence
  Description of Artificial Sequence: Synthetic oligonucleotide
  Sense strand starting at position 966 of SEQ ID NO: 587772
ucaagagcuccguaaacuu

SEQ ID NO: 817069 - RNA, 19 nt, Artificial Sequence
  Description of Artificial Sequence: Synthetic oligonucleotide
  Antisense strand to SEQ ID NO: 817068
aaguuuacggagcucuuga

SEQ ID NO: 817070 - RNA, 19 nt, Artificial Sequence
  Description of Artificial Sequence: Synthetic oligonucleotide
  Sense strand starting at position 1002 of SEQ ID NO: 587772
auggauuuaucugacuugu

SEQ ID NO: 817071 - RNA, 19 nt, Artificial Sequence
  Description of Artificial Sequence: Synthetic oligonucleotide
  Antisense strand to SEQ ID NO: 817070
acaagucagauaaauccau

SEQ ID NO: 817072 - RNA, 19 nt, Artificial Sequence
  Description of Artificial Sequence: Synthetic oligonucleotide
  Sense strand starting at position 1023 of SEQ ID NO: 587772
auacuaaguuuauuccagu

SEQ ID NO: 817073 - RNA, 19 nt, Artificial Sequence
  Description of Artificial Sequence: Synthetic oligonucleotide
  Antisense strand to SEQ ID NO: 817072
acuggaauaaacuuaguau

SEQ ID NO: 817074 - RNA, 19 nt, Artificial Sequence
  Description of Artificial Sequence: Synthetic oligonucleotide
  Sense strand starting at position 1029 of SEQ ID NO: 587772
aguuuauuccaguaauagc

SEQ ID NO: 817075 - RNA, 19 nt, Artificial Sequence
  Description of Artificial Sequence: Synthetic oligonucleotide
  Antisense strand to SEQ ID NO: 817074
gcuauuacuggaauaaacu

SEQ ID NO: 817076 - RNA, 19 nt, Artificial Sequence
  Description of Artificial Sequence: Synthetic oligonucleotide
  Sense strand starting at position 1038 of SEQ ID NO: 587772
caguaauagcagugacuug

SEQ ID NO: 817077 - RNA, 19 nt, Artificial Sequence
  Description of Artificial Sequence: Synthetic oligonucleotide
  Antisense strand to SEQ ID NO: 817076
caagucacugcuauuacug

SEQ ID NO: 817078 - RNA, 19 nt, Artificial Sequence
  Description of Artificial Sequence: Synthetic oligonucleotide
  Sense strand starting at position 1043 of SEQ ID NO: 587772
auagcagugacuugcaaug

SEQ ID NO: 817079 - RNA, 19 nt, Artificial Sequence
  Description of Artificial Sequence: Synthetic oligonucleotide
  Antisense strand to SEQ ID NO: 817078
cauugcaagucacugcuau

SEQ ID NO: 817080 - RNA, 19 nt, Artificial Sequence
  Description of Artificial Sequence: Synthetic oligonucleotide
  Sense strand starting at position 1048 of SEQ ID NO: 587772
agugacuugcaaugaucua

SEQ ID NO: 817081 - RNA, 19 nt, Artificial Sequence
  Description of Artificial Sequence: Synthetic oligonucleotide
  Antisense strand to SEQ ID NO: 817080
uagaucauugcaagucacu

SEQ ID NO: 817082 - RNA, 19 nt, Artificial Sequence
  Description of Artificial Sequence: Synthetic oligonucleotide
  Sense strand starting at position 1117 of SEQ ID NO: 587772
ggcggacgucaagaaagau

SEQ ID NO: 817083 - RNA, 19 nt, Artificial Sequence
  Description of Artificial Sequence: Synthetic oligonucleotide
  Antisense strand to SEQ ID NO: 817082
aucuuucuugacguccgcc

SEQ ID NO: 817084 - RNA, 19 nt, Artificial Sequence
  Description of Artificial Sequence: Synthetic oligonucleotide
  Sense strand starting at position 2450 of SEQ ID NO: 587772
caguuaguacaaugagaag

SEQ ID NO: 817085 - RNA, 19 nt, Artificial Sequence
  Description of Artificial Sequence: Synthetic oligonucleotide
  Antisense strand to SEQ ID NO: 817084
cuucucauuguacuaacug

SEQ ID NO: 817086 - RNA, 19 nt, Artificial Sequence
  Description of Artificial Sequence: Synthetic oligonucleotide
  Sense strand starting at position 2469 of SEQ ID NO: 587772
gacauucguguccauccua

SEQ ID NO: 817087 - RNA, 19 nt, Artificial Sequence
  Description of Artificial Sequence: Synthetic oligonucleotide
  Antisense strand to SEQ ID NO: 817086
uaggauggacacgaauguc

SEQ ID NO: 817088 - RNA, 19 nt, Artificial Sequence
  Description of Artificial Sequence: Synthetic oligonucleotide
  Sense strand starting at position 2740 of SEQ ID NO: 587772
augggcaaguccguagaaa

SEQ ID NO: 817089 - RNA, 19 nt, Artificial Sequence
  Description of Artificial Sequence: Synthetic oligonucleotide
  Antisense strand to SEQ ID NO: 817088
uuucuacggacuugcccau

SEQ ID NO: 817090 - RNA, 19 nt, Artificial Sequence
  Description of Artificial Sequence: Synthetic oligonucleotide
  Sense strand starting at position 2842 of SEQ ID NO: 587772
acuguccucucacugagua

SEQ ID NO: 817091 - RNA, 19 nt, Artificial Sequence
  Description of Artificial Sequence: Synthetic oligonucleotide
  Antisense strand to SEQ ID NO: 817090
uacucagugagaggacagu

SEQ ID NO: 817092 - RNA, 19 nt, Artificial Sequence
  Description of Artificial Sequence: Synthetic oligonucleotide
  Sense strand starting at position 2843 of SEQ ID NO: 587772
cuguccucucacugaguaa

SEQ ID NO: 817093 - RNA, 19 nt, Artificial Sequence
  Description of Artificial Sequence: Synthetic oligonucleotide
  Antisense strand to SEQ ID NO: 817092
uuacucagugagaggacag

SEQ ID NO: 817094 - RNA, 19 nt, Artificial Sequence
  Description of Artificial Sequence: Synthetic oligonucleotide
  Sense strand starting at position 2968 of SEQ ID NO: 587772
accgcagugaccgauaagu

SEQ ID NO: 817095 - RNA, 19 nt, Artificial Sequence
  Description of Artificial Sequence: Synthetic oligonucleotide
  Antisense strand to SEQ ID NO: 817094
acuuaucggucacugcggu

SEQ ID NO: 817096 - RNA, 19 nt, Artificial Sequence
  Description of Artificial Sequence: Synthetic oligonucleotide
  Sense strand starting at position 2970 of SEQ ID NO: 587772
cgcagugaccgauaaguag

SEQ ID NO: 817097 - RNA, 19 nt, Artificial Sequence
  Description of Artificial Sequence: Synthetic oligonucleotide
  Antisense strand to SEQ ID NO: 817096
cuacuuaucggucacugcg

SEQ ID NO: 817098 - RNA, 19 nt, Artificial Sequence
  Description of Artificial Sequence: Synthetic oligonucleotide
  Sense strand starting at position 2984 of SEQ ID NO: 587772
aguaguuguagcuauguaa

SEQ ID NO: 817099 - RNA, 19 nt, Artificial Sequence
  Description of Artificial Sequence: Synthetic oligonucleotide
  Antisense strand to SEQ ID NO: 817098
uuacauagcuacaacuacu

SEQ ID NO: 817100 - RNA, 19 nt, Artificial Sequence
  Description of Artificial Sequence: Synthetic oligonucleotide
  Sense strand starting at position 3117 of SEQ ID NO: 587772
agauuauaggauuaagcgu

SEQ ID NO: 817101 - RNA, 19 nt, Artificial Sequence
  Description of Artificial Sequence: Synthetic oligonucleotide
  Antisense strand to SEQ ID NO: 817100
acgcuuaauccuauaaucu

SEQ ID NO: 817102 - RNA, 19 nt, Artificial Sequence
  Description of Artificial Sequence: Synthetic oligonucleotide
  Sense strand starting at position 3123 of SEQ ID NO: 587772
uaggauuaagcguaaaucu

SEQ ID NO: 817103 - RNA, 19 nt, Artificial Sequence
  Description of Artificial Sequence: Synthetic oligonucleotide
  Antisense strand to SEQ ID NO: 817102
agauuuacgcuuaauccua

SEQ ID NO: 817104 - RNA, 19 nt, Artificial Sequence
  Description of Artificial Sequence: Synthetic oligonucleotide
  Sense strand starting at position 3131 of SEQ ID NO: 587772
agcguaaaucuccaauaau

SEQ ID NO: 817105 - RNA, 19 nt, Artificial Sequence
  Description of Artificial Sequence: Synthetic oligonucleotide
  Antisense strand to SEQ ID NO: 817104
auuauuggagauuuacgcu

SEQ ID NO: 817106 - RNA, 19 nt, Artificial Sequence
  Description of Artificial Sequence: Synthetic oligonucleotide
  Sense strand starting at position 3152 of SEQ ID NO: 587772
ggauuuauguauaggcggu

SEQ ID NO: 817107 - RNA, 19 nt, Artificial Sequence
  Description of Artificial Sequence: Synthetic oligonucleotide
  Antisense strand to SEQ ID NO: 817106
accgccuauacauaaaucc

SEQ ID NO: 817108 - RNA, 19 nt, Artificial Sequence
  Description of Artificial Sequence: Synthetic oligonucleotide
  Sense strand starting at position 3196 of SEQ ID NO: 587772
ccugaauuaucccuuggaa

SEQ ID NO: 817109 - RNA, 19 nt, Artificial Sequence
  Description of Artificial Sequence: Synthetic oligonucleotide
  Antisense strand to SEQ ID NO: 817108
uuccaagggauaauucagg

SEQ ID NO: 817110 - RNA, 19 nt, Artificial Sequence
  Description of Artificial Sequence: Synthetic oligonucleotide
  Sense strand starting at position 3198 of SEQ ID NO: 587772
ugaauuaucccuuggaauu

SEQ ID NO: 817111 - RNA, 19 nt, Artificial Sequence
  Description of Artificial Sequence: Synthetic oligonucleotide
  Antisense strand to SEQ ID NO: 817110
aauuccaagggauaauuca

SEQ ID NO: 817112 - RNA, 19 nt, Artificial Sequence
  Description of Artificial Sequence: Synthetic oligonucleotide
  Sense strand starting at position 3220 of SEQ ID NO: 587772
accauagcucuuugauggu

SEQ ID NO: 817113 - RNA, 19 nt, Artificial Sequence
  Description of Artificial Sequence: Synthetic oligonucleotide
  Antisense strand to SEQ ID NO: 817112
accaucaaagagcuauggu

SEQ ID NO: 817114 - RNA, 19 nt, Artificial Sequence
  Description of Artificial Sequence: Synthetic oligonucleotide
  Sense strand starting at position 3261 of SEQ ID NO: 587772
uuaggagccgacuagaauu

SEQ ID NO: 817115 - RNA, 19 nt, Artificial Sequence
  Description of Artificial Sequence: Synthetic oligonucleotide
  Antisense strand to SEQ ID NO: 817114
aauucuagucggcuccuaa

SEQ ID NO: 817116 - RNA, 19 nt, Artificial Sequence
  Description of Artificial Sequence: Synthetic oligonucleotide
  Sense strand starting at position 3363 of SEQ ID NO: 587772
accagaacuccacgccuau

SEQ ID NO: 817117 - RNA, 19 nt, Artificial Sequence
  Description of Artificial Sequence: Synthetic oligonucleotide
  Antisense strand to SEQ ID NO: 817116
auaggcguggaguucuggu

SEQ ID NO: 817118 - RNA, 19 nt, Artificial Sequence
  Description of Artificial Sequence: Synthetic oligonucleotide
  Sense strand starting at position 10 of SEQ ID NO: 587773
cugggugagcaagguaaua

SEQ ID NO: 817119 - RNA, 19 nt, Artificial Sequence
  Description of Artificial Sequence: Synthetic oligonucleotide
  Antisense strand to SEQ ID NO: 817118
uauuaccuugcucacccag

SEQ ID NO: 817120 - RNA, 19 nt, Artificial Sequence
  Description of Artificial Sequence: Synthetic oligonucleotide
  Sense strand starting at position 116 of SEQ ID NO: 587773
ucucguugucgccaccaau

SEQ ID NO: 817121 - RNA, 19 nt, Artificial Sequence
  Description of Artificial Sequence: Synthetic oligonucleotide
  Antisense strand to SEQ ID NO: 817120
auugguggcgacaacgaga

SEQ ID NO: 817122 - RNA, 19 nt, Artificial Sequence
  Description of Artificial Sequence: Synthetic oligonucleotide
  Sense strand starting at position 119 of SEQ ID NO: 587773
cguugucgccaccaaugau

SEQ ID NO: 817123 - RNA, 19 nt, Artificial Sequence
  Description of Artificial Sequence: Synthetic oligonucleotide
  Antisense strand to SEQ ID NO: 817122
aucauugguggcgacaacg

SEQ ID NO: 817124 - RNA, 19 nt, Artificial Sequence
  Description of Artificial Sequence: Synthetic oligonucleotide
  Sense strand starting at position 373 of SEQ ID NO: 587773
cggaaagguuggaagucuu

SEQ ID NO: 817125 - RNA, 19 nt, Artificial Sequence
  Description of Artificial Sequence: Synthetic oligonucleotide
  Antisense strand to SEQ ID NO: 817124
aagacuuccaaccuuuccg

SEQ ID NO: 817126 - RNA, 19 nt, Artificial Sequence
  Description of Artificial Sequence: Synthetic oligonucleotide
  Sense strand starting at position 413 of SEQ ID NO: 587773
uucuguaguguccauagga

SEQ ID NO: 817127 - RNA, 19 nt, Artificial Sequence
  Description of Artificial Sequence: Synthetic oligonucleotide
  Antisense strand to SEQ ID NO: 817126
uccuauggacacuacagaa

SEQ ID NO: 817128 - RNA, 19 nt, Artificial Sequence
  Description of Artificial Sequence: Synthetic oligonucleotide
  Sense strand starting at position 431 of SEQ ID NO: 587773
acgggaaaggcguguagua

SEQ ID NO: 817129 - RNA, 19 nt, Artificial Sequence
  Description of Artificial Sequence: Synthetic oligonucleotide
  Antisense strand to SEQ ID NO: 817128
uacuacacgccuuucccgu

SEQ ID NO: 817130 - RNA, 19 nt, Artificial Sequence
  Description of Artificial Sequence: Synthetic oligonucleotide
  Sense strand starting at position 763 of SEQ ID NO: 587773
acggaaaucugccgggauc

SEQ ID NO: 817131 - RNA, 19 nt, Artificial Sequence
  Description of Artificial Sequence: Synthetic oligonucleotide
  Antisense strand to SEQ ID NO: 817130
gaucccggcagauuuccgu

SEQ ID NO: 817132 - RNA, 19 nt, Artificial Sequence
  Description of Artificial Sequence: Synthetic oligonucleotide
  Sense strand starting at position 765 of SEQ ID NO: 587773
ggaaaucugccgggauccu

SEQ ID NO: 817133 - RNA, 19 nt, Artificial Sequence
  Description of Artificial Sequence: Synthetic oligonucleotide
  Antisense strand to SEQ ID NO: 817132
aggaucccggcagauuucc

SEQ ID NO: 817134 - RNA, 19 nt, Artificial Sequence
  Description of Artificial Sequence: Synthetic oligonucleotide
  Sense strand starting at position 788 of SEQ ID NO: 587773
uacucuaaauuccggguua

SEQ ID NO: 817135 - RNA, 19 nt, Artificial Sequence
  Description of Artificial Sequence: Synthetic oligonucleotide
  Antisense strand to SEQ ID NO: 817134
uaacccggaauuuagagua

SEQ ID NO: 817136 - RNA, 19 nt, Artificial Sequence
  Description of Artificial Sequence: Synthetic oligonucleotide
  Sense strand starting at position 790 of SEQ ID NO: 587773
cucuaaauuccggguuagu

SEQ ID NO: 817137 - RNA, 19 nt, Artificial Sequence
  Description of Artificial Sequence: Synthetic oligonucleotide
  Antisense strand to SEQ ID NO: 817136
acuaacccggaauuuagag

SEQ ID NO: 817138 - RNA, 19 nt, Artificial Sequence
  Description of Artificial Sequence: Synthetic oligonucleotide
  Sense strand starting at position 1524 of SEQ ID NO: 587773
ugagaucaaugagcccaau

SEQ ID NO: 817139 - RNA, 19 nt, Artificial Sequence
  Description of Artificial Sequence: Synthetic oligonucleotide
  Antisense strand to SEQ ID NO: 817138
auugggcucauugaucuca

SEQ ID NO: 817140 - RNA, 19 nt, Artificial Sequence
  Description of Artificial Sequence: Synthetic oligonucleotide
  Sense strand starting at position 1558 of SEQ ID NO: 587773
ggucaugacucagaaauua

SEQ ID NO: 817141 - RNA, 19 nt, Artificial Sequence
  Description of Artificial Sequence: Synthetic oligonucleotide
  Antisense strand to SEQ ID NO: 817140
uaauuucugagucaugacc

SEQ ID NO: 817142 - RNA, 19 nt, Artificial Sequence
  Description of Artificial Sequence: Synthetic oligonucleotide
  Sense strand starting at position 1680 of SEQ ID NO: 587773
ggaucugcaacuugggauu

SEQ ID NO: 817143 - RNA, 19 nt, Artificial Sequence
  Description of Artificial Sequence: Synthetic oligonucleotide
  Antisense strand to SEQ ID NO: 817142
aaucccaaguugcagaucc

SEQ ID NO: 817144 - RNA, 19 nt, Artificial Sequence
  Description of Artificial Sequence: Synthetic oligonucleotide
  Sense strand starting at position 2387 of SEQ ID NO: 587773
gugggugucuguuccugau

SEQ ID NO: 817145 - RNA, 19 nt, Artificial Sequence
  Description of Artificial Sequence: Synthetic oligonucleotide
  Antisense strand to SEQ ID NO: 817144
aucaggaacagacacccac

SEQ ID NO: 817146 - RNA, 19 nt, Artificial Sequence
  Description of Artificial Sequence: Synthetic oligonucleotide
  Sense strand starting at position 2389 of SEQ ID NO: 587773
gggugucuguuccugauac

SEQ ID NO: 817147 - RNA, 19 nt, Artificial Sequence
  Description of Artificial Sequence: Synthetic oligonucleotide
  Antisense strand to SEQ ID NO: 817146
guaucaggaacagacaccc

SEQ ID NO: 817148 - RNA, 19 nt, Artificial Sequence
  Description of Artificial Sequence: Synthetic oligonucleotide
  Sense strand starting at position 2391 of SEQ ID NO: 587773
gugucuguuccugauaccu

SEQ ID NO: 817149 - RNA, 19 nt, Artificial Sequence
  Description of Artificial Sequence: Synthetic oligonucleotide
  Antisense strand to SEQ ID NO: 817148
agguaucaggaacagacac

SEQ ID NO: 817150 - RNA, 19 nt, Artificial Sequence
  Description of Artificial Sequence: Synthetic oligonucleotide
  Sense strand starting at position 2441 of SEQ ID NO: 587773
gaagcuucgccucgcgagu

SEQ ID NO: 817151 - RNA, 19 nt, Artificial Sequence
  Description of Artificial Sequence: Synthetic oligonucleotide
  Antisense strand to SEQ ID NO: 817150
acucgcgaggcgaagcuuc

SEQ ID NO: 817152 - RNA, 19 nt, Artificial Sequence
  Description of Artificial Sequence: Synthetic oligonucleotide
  Sense strand starting at position 2550 of SEQ ID NO: 587773
uuccuuaaguggcuuuaaa

SEQ ID NO: 817153 - RNA, 19 nt, Artificial Sequence
  Description of Artificial Sequence: Synthetic oligonucleotide
  Antisense strand to SEQ ID NO: 817152
uuuaaagccacuuaaggaa

SEQ ID NO: 817154 - RNA, 19 nt, Artificial Sequence
  Description of Artificial Sequence: Synthetic oligonucleotide
  Sense strand starting at position 2561 of SEQ ID NO: 587773
gcuuuaaacgaccgaggau

SEQ ID NO: 817155 - RNA, 19 nt, Artificial Sequence
  Description of Artificial Sequence: Synthetic oligonucleotide
  Antisense strand to SEQ ID NO: 817154
auccucggucguuuaaagc

SEQ ID NO: 817156 - RNA, 19 nt, Artificial Sequence
  Description of Artificial Sequence: Synthetic oligonucleotide
  Sense strand starting at position 2602 of SEQ ID NO: 587773
ugucacuuccuucgggaaa

SEQ ID NO: 817157 - RNA, 19 nt, Artificial Sequence
  Description of Artificial Sequence: Synthetic oligonucleotide
  Antisense strand to SEQ ID NO: 817156
uuucccgaaggaagugaca

SEQ ID NO: 817158 - RNA, 19 nt, Artificial Sequence
  Description of Artificial Sequence: Synthetic oligonucleotide
  Sense strand starting at position 2603 of SEQ ID NO: 587773
gucacuuccuucgggaaag

SEQ ID NO: 817159 - RNA, 19 nt, Artificial Sequence
  Description of Artificial Sequence: Synthetic oligonucleotide
  Antisense strand to SEQ ID NO: 817158
cuuucccgaaggaagugac

SEQ ID NO: 817160 - RNA, 19 nt, Artificial Sequence
  Description of Artificial Sequence: Synthetic oligonucleotide
  Sense strand starting at position 2832 of SEQ ID NO: 587773
gcugcuuccucuuagcuga

SEQ ID NO: 817161 - RNA, 19 nt, Artificial Sequence
  Description of Artificial Sequence: Synthetic oligonucleotide
  Antisense strand to SEQ ID NO: 817160
ucagcuaagaggaagcagc

SEQ ID NO: 817162 - RNA, 19 nt, Artificial Sequence
  Description of Artificial Sequence: Synthetic oligonucleotide
  Sense strand starting at position 2834 of SEQ ID NO: 587773
ugcuuccucuuagcugaau

SEQ ID NO: 817163 - RNA, 19 nt, Artificial Sequence
  Description of Artificial Sequence: Synthetic oligonucleotide
  Antisense strand to SEQ ID NO: 817162
auucagcuaagaggaagca

SEQ ID NO: 817164 - RNA, 19 nt, Artificial Sequence
  Description of Artificial Sequence: Synthetic oligonucleotide
  Sense strand starting at position 3332 of SEQ ID NO: 587773
ggaucaagaucccaggguu

SEQ ID NO: 817165 - RNA, 19 nt, Artificial Sequence
  Description of Artificial Sequence: Synthetic oligonucleotide
  Antisense strand to SEQ ID NO: 817164
aacccugggaucuugaucc

SEQ ID NO: 817166 - RNA, 19 nt, Artificial Sequence
  Description of Artificial Sequence: Synthetic oligonucleotide
  Sense strand starting at position 3372 of SEQ ID NO: 587773
gugauaggaucuuagccaa

SEQ ID NO: 817167 - RNA, 19 nt, Artificial Sequence
  Description of Artificial Sequence: Synthetic oligonucleotide
  Antisense strand to SEQ ID NO: 817166
uuggcuaagauccuaucac

SEQ ID NO: 817168 - RNA, 19 nt, Artificial Sequence
  Description of Artificial Sequence: Synthetic oligonucleotide
  Sense strand starting at position 3470 of SEQ ID NO: 587773
aauaaauucuguugccguu

SEQ ID NO: 817169 - RNA, 19 nt, Artificial Sequence
  Description of Artificial Sequence: Synthetic oligonucleotide
  Antisense strand to SEQ ID NO: 817168
aacggcaacagaauuuauu

SEQ ID NO: 817170 - RNA, 19 nt, Artificial Sequence
  Description of Artificial Sequence: Synthetic oligonucleotide
  Sense strand starting at position 3529 of SEQ ID NO: 587773
acuggcauucgcuauacuu

SEQ ID NO: 817171 - RNA, 19 nt, Artificial Sequence
  Description of Artificial Sequence: Synthetic oligonucleotide
  Antisense strand to SEQ ID NO: 817170
aaguauagcgaaugccagu

SEQ ID NO: 817172 - RNA, 19 nt, Artificial Sequence
  Description of Artificial Sequence: Synthetic oligonucleotide
  Sense strand starting at position 3554 of SEQ ID NO: 587773
gggcuuuacagguaggauu

SEQ ID NO: 817173 - RNA, 19 nt, Artificial Sequence
  Description of Artificial Sequence: Synthetic oligonucleotide
  Antisense strand to SEQ ID NO: 817172
aauccuaccuguaaagccc

SEQ ID NO: 817174 - RNA, 19 nt, Artificial Sequence
  Description of Artificial Sequence: Synthetic oligonucleotide
  Sense strand starting at position 3596 of SEQ ID NO: 587773
gggugaucuguggguugca

SEQ ID NO: 817175 - RNA, 19 nt, Artificial Sequence
  Description of Artificial Sequence: Synthetic oligonucleotide
  Antisense strand to SEQ ID NO: 817174
ugcaacccacagaucaccc

SEQ ID NO: 817176 - RNA, 19 nt, Artificial Sequence
  Description of Artificial Sequence: Synthetic oligonucleotide
  Sense strand starting at position 3641 of SEQ ID NO: 587773
cacggaagugucguagcuu

SEQ ID NO: 817177 - RNA, 19 nt, Artificial Sequence
  Description of Artificial Sequence: Synthetic oligonucleotide
  Antisense strand to SEQ ID NO: 817176
aagcuacgacacuuccgug

SEQ ID NO: 817178 - RNA, 19 nt, Artificial Sequence
  Description of Artificial Sequence: Synthetic oligonucleotide
  Sense strand starting at position 3642 of SEQ ID NO: 587773
acggaagugucguagcuuu

SEQ ID NO: 817179 - RNA, 19 nt, Artificial Sequence
  Description of Artificial Sequence: Synthetic oligonucleotide
  Antisense strand to SEQ ID NO: 817178
aaagcuacgacacuuccgu

SEQ ID NO: 817180 - RNA, 19 nt, Artificial Sequence
  Description of Artificial Sequence: Synthetic oligonucleotide
  Sense strand starting at position 3714 of SEQ ID NO: 587773
uccagaguuuacuauauuu

SEQ ID NO: 817181 - RNA, 19 nt, Artificial Sequence
  Description of Artificial Sequence: Synthetic oligonucleotide
  Antisense strand to SEQ ID NO: 817180
aaauauaguaaacucugga

SEQ ID NO: 817182 - RNA, 19 nt, Artificial Sequence
  Description of Artificial Sequence: Synthetic oligonucleotide
  Sense strand starting at position 3763 of SEQ ID NO: 587773
uuaagaaguugggagaaau

SEQ ID NO: 817183 - RNA, 19 nt, Artificial Sequence
  Description of Artificial Sequence: Synthetic oligonucleotide
  Antisense strand to SEQ ID NO: 817182
auuucucccaacuucuuaa

SEQ ID NO: 817184 - RNA, 19 nt, Artificial Sequence
  Description of Artificial Sequence: Synthetic oligonucleotide
  Sense strand starting at position 3815 of SEQ ID NO: 587773
uuucuacucuaggagauaa

SEQ ID NO: 817185 - RNA, 19 nt, Artificial Sequence
  Description of Artificial Sequence: Synthetic oligonucleotide
  Antisense strand to SEQ ID NO: 817184
uuaucuccuagaguagaaa

SEQ ID NO: 817186 - RNA, 19 nt, Artificial Sequence
  Description of Artificial Sequence: Synthetic oligonucleotide
  Sense strand starting at position 3825 of SEQ ID NO: 587773
aggagauaauccugaucaa

SEQ ID NO: 817187 - RNA, 19 nt, Artificial Sequence
  Description of Artificial Sequence: Synthetic oligonucleotide
  Antisense strand to SEQ ID NO: 817186
uugaucaggauuaucuccu

SEQ ID NO: 817188 - RNA, 19 nt, Artificial Sequence
  Description of Artificial Sequence: Synthetic oligonucleotide
  Sense strand starting at position 8 of SEQ ID NO: 587774
ggcuuuguaagccagagua

SEQ ID NO: 817189 - RNA, 19 nt, Artificial Sequence
  Description of Artificial Sequence: Synthetic oligonucleotide
  Antisense strand to SEQ ID NO: 817188
uacucuggcuuacaaagcc

SEQ ID NO: 817190 - RNA, 19 nt, Artificial Sequence
  Description of Artificial Sequence: Synthetic oligonucleotide
  Sense strand starting at position 10 of SEQ ID NO: 587774
cuuuguaagccagaguaaa

SEQ ID NO: 817191 - RNA, 19 nt, Artificial Sequence
  Description of Artificial Sequence: Synthetic oligonucleotide
  Antisense strand to SEQ ID NO: 817190
uuuacucuggcuuacaaag

SEQ ID NO: 817192 - RNA, 19 nt, Artificial Sequence
  Description of Artificial Sequence: Synthetic oligonucleotide
  Sense strand starting at position 56 of SEQ ID NO: 587774
auuagugcauuugugcaua

SEQ ID NO: 817193 - RNA, 19 nt, Artificial Sequence
  Description of Artificial Sequence: Synthetic oligonucleotide
  Antisense strand to SEQ ID NO: 817192
uaugcacaaaugcacuaau

SEQ ID NO: 817194 - RNA, 19 nt, Artificial Sequence
  Description of Artificial Sequence: Synthetic oligonucleotide
  Sense strand starting at position 58 of SEQ ID NO: 587774
uagugcauuugugcauaua

SEQ ID NO: 817195 - RNA, 19 nt, Artificial Sequence
  Description of Artificial Sequence: Synthetic oligonucleotide
  Antisense strand to SEQ ID NO: 817194
uauaugcacaaaugcacua

SEQ ID NO: 817196 - RNA, 19 nt, Artificial Sequence
  Description of Artificial Sequence: Synthetic oligonucleotide
  Sense strand starting at position 126 of SEQ ID NO: 587774
cccauaaauucugaaagag

SEQ ID NO: 817197 - RNA, 19 nt, Artificial Sequence
  Description of Artificial Sequence: Synthetic oligonucleotide
  Antisense strand to SEQ ID NO: 817196
cucuuucagaauuuauggg

SEQ ID NO: 817198 - RNA, 19 nt, Artificial Sequence
  Description of Artificial Sequence: Synthetic oligonucleotide
  Sense strand starting at position 158 of SEQ ID NO: 587774
augaaaugauguucuccuu

SEQ ID NO: 817199 - RNA, 19 nt, Artificial Sequence
  Description of Artificial Sequence: Synthetic oligonucleotide
  Antisense strand to SEQ ID NO: 817198
aaggagaacaucauuucau

SEQ ID NO: 817200 - RNA, 19 nt, Artificial Sequence
  Description of Artificial Sequence: Synthetic oligonucleotide
  Sense strand starting at position 249 of SEQ ID NO: 587774
uguuguaaugaucagguuu

SEQ ID NO: 817201 - RNA, 19 nt, Artificial Sequence
  Description of Artificial Sequence: Synthetic oligonucleotide
  Antisense strand to SEQ ID NO: 817200
aaaccugaucauuacaaca

SEQ ID NO: 817202 - RNA, 19 nt, Artificial Sequence
  Description of Artificial Sequence: Synthetic oligonucleotide
  Sense strand starting at position 263 of SEQ ID NO: 587774
gguuuaagauuagaagaaa

SEQ ID NO: 817203 - RNA, 19 nt, Artificial Sequence
  Description of Artificial Sequence: Synthetic oligonucleotide
  Antisense strand to SEQ ID NO: 817202
uuucuucuaaucuuaaacc

SEQ ID NO: 817204 - RNA, 19 nt, Artificial Sequence
  Description of Artificial Sequence: Synthetic oligonucleotide
  Sense strand starting at position 348 of SEQ ID NO: 587774
auuagcauucugcacagua

SEQ ID NO: 817205 - RNA, 19 nt, Artificial Sequence
  Description of Artificial Sequence: Synthetic oligonucleotide
  Antisense strand to SEQ ID NO: 817204
uacugugcagaaugcuaau

SEQ ID NO: 817206 - RNA, 19 nt, Artificial Sequence
  Description of Artificial Sequence: Synthetic oligonucleotide
  Sense strand starting at position 510 of SEQ ID NO: 587774
ugacaaucuuuguuacaag

SEQ ID NO: 817207 - RNA, 19 nt, Artificial Sequence
  Description of Artificial Sequence: Synthetic oligonucleotide
  Antisense strand to SEQ ID NO: 817206
cuuguaacaaagauuguca

SEQ ID NO: 817208 - RNA, 19 nt, Artificial Sequence
  Description of Artificial Sequence: Synthetic oligonucleotide
  Sense strand starting at position 580 of SEQ ID NO: 587774
ccuguauauuugcagagaa

SEQ ID NO: 817209 - RNA, 19 nt, Artificial Sequence
  Description of Artificial Sequence: Synthetic oligonucleotide
  Antisense strand to SEQ ID NO: 817208
uucucugcaaauauacagg

SEQ ID NO: 817210 - RNA, 19 nt, Artificial Sequence
  Description of Artificial Sequence: Synthetic oligonucleotide
  Sense strand starting at position 632 of SEQ ID NO: 587774
agaagucaaccauaacgca

SEQ ID NO: 817211 - RNA, 19 nt, Artificial Sequence
  Description of Artificial Sequence: Synthetic oligonucleotide
  Antisense strand to SEQ ID NO: 817210
ugcguuaugguugacuucu

SEQ ID NO: 817212 - RNA, 19 nt, Artificial Sequence
  Description of Artificial Sequence: Synthetic oligonucleotide
  Sense strand starting at position 816 of SEQ ID NO: 587774
auugguuguuggaaggaga

SEQ ID NO: 817213 - RNA, 19 nt, Artificial Sequence
  Description of Artificial Sequence: Synthetic oligonucleotide
  Antisense strand to SEQ ID NO: 817212
ucuccuuccaacaaccaau

SEQ ID NO: 817214 - RNA, 19 nt, Artificial Sequence
  Description of Artificial Sequence: Synthetic oligonucleotide
  Sense strand starting at position 836 of SEQ ID NO: 587774
ggauuuggaugagaucaca

SEQ ID NO: 817215 - RNA, 19 nt, Artificial Sequence
  Description of Artificial Sequence: Synthetic oligonucleotide
  Antisense strand to SEQ ID NO: 817214
ugugaucucauccaaaucc

SEQ ID NO: 817216 - RNA, 19 nt, Artificial Sequence
  Description of Artificial Sequence: Synthetic oligonucleotide
  Sense strand starting at position 863 of SEQ ID NO: 587774
agcuccugguucuuugaau

SEQ ID NO: 817217 - RNA, 19 nt, Artificial Sequence
  Description of Artificial Sequence: Synthetic oligonucleotide
  Antisense strand to SEQ ID NO: 817216
auucaaagaaccaggagcu

SEQ ID NO: 817218 - RNA, 19 nt, Artificial Sequence
  Description of Artificial Sequence: Synthetic oligonucleotide
  Sense strand starting at position 869 of SEQ ID NO: 587774
ugguucuuugaaugaugcu

SEQ ID NO: 817219 - RNA, 19 nt, Artificial Sequence
  Description of Artificial Sequence: Synthetic oligonucleotide
  Antisense strand to SEQ ID NO: 817218
agcaucauucaaagaacca

SEQ ID NO: 817220 - RNA, 19 nt, Artificial Sequence
  Description of Artificial Sequence: Synthetic oligonucleotide
  Sense strand starting at position 878 of SEQ ID NO: 587774
gaaugaugcucucccagga

SEQ ID NO: 817221 - RNA, 19 nt, Artificial Sequence
  Description of Artificial Sequence: Synthetic oligonucleotide
  Antisense strand to SEQ ID NO: 817220
uccugggagagcaucauuc

SEQ ID NO: 817222 - RNA, 19 nt, Artificial Sequence
  Description of Artificial Sequence: Synthetic oligonucleotide
  Sense strand starting at position 1092 of SEQ ID NO: 587774
ccacgaagucccgaagcuu

SEQ ID NO: 817223 - RNA, 19 nt, Artificial Sequence
  Description of Artificial Sequence: Synthetic oligonucleotide
  Antisense strand to SEQ ID NO: 817222
aagcuucgggacuucgugg

SEQ ID NO: 817224 - RNA, 19 nt, Artificial Sequence
  Description of Artificial Sequence: Synthetic oligonucleotide
  Sense strand starting at position 1341 of SEQ ID NO: 587774
cauguuaucugaguaacga

SEQ ID NO: 817225 - RNA, 19 nt, Artificial Sequence
  Description of Artificial Sequence: Synthetic oligonucleotide
  Antisense strand to SEQ ID NO: 817224
ucguuacucagauaacaug

SEQ ID NO: 817226 - RNA, 19 nt, Artificial Sequence
  Description of Artificial Sequence: Synthetic oligonucleotide
  Sense strand starting at position 1342 of SEQ ID NO: 587774
auguuaucugaguaacgaa

SEQ ID NO: 817227 - RNA, 19 nt, Artificial Sequence
  Description of Artificial Sequence: Synthetic oligonucleotide
  Antisense strand to SEQ ID NO: 817226
uucguuacucagauaacau

SEQ ID NO: 817228 - RNA, 19 nt, Artificial Sequence
  Description of Artificial Sequence: Synthetic oligonucleotide
  Sense strand starting at position 1395 of SEQ ID NO: 587774
cuuaguguaccuggaugua

SEQ ID NO: 817229 - RNA, 19 nt, Artificial Sequence
  Description of Artificial Sequence: Synthetic oligonucleotide
  Antisense strand to SEQ ID NO: 817228
uacauccagguacacuaag

SEQ ID NO: 817230 - RNA, 19 nt, Artificial Sequence
  Description of Artificial Sequence: Synthetic oligonucleotide
  Sense strand starting at position 1569 of SEQ ID NO: 587774
ggagcucucuucucuagag

SEQ ID NO: 817231 - RNA, 19 nt, Artificial Sequence
  Description of Artificial Sequence: Synthetic oligonucleotide
  Antisense strand to SEQ ID NO: 817230
cucuagagaagagagcucc

SEQ ID NO: 817232 - RNA, 19 nt, Artificial Sequence
  Description of Artificial Sequence: Synthetic oligonucleotide
  Sense strand starting at position 2293 of SEQ ID NO: 587774
acagcagugacuuggacau

SEQ ID NO: 817233 - RNA, 19 nt, Artificial Sequence
  Description of Artificial Sequence: Synthetic oligonucleotide
  Antisense strand to SEQ ID NO: 817232
auguccaagucacugcugu

SEQ ID NO: 817234 - RNA, 19 nt, Artificial Sequence
  Description of Artificial Sequence: Synthetic oligonucleotide
  Sense strand starting at position 2541 of SEQ ID NO: 587774
gcucgaggguuacuccuaa

SEQ ID NO: 817235 - RNA, 19 nt, Artificial Sequence
  Description of Artificial Sequence: Synthetic oligonucleotide
  Antisense strand to SEQ ID NO: 817234
uuaggaguaacccucgagc

SEQ ID NO: 817236 - RNA, 19 nt, Artificial Sequence
  Description of Artificial Sequence: Synthetic oligonucleotide
  Sense strand starting at position 2591 of SEQ ID NO: 587774
cguacaaauccugaaagca

SEQ ID NO: 817237 - RNA, 19 nt, Artificial Sequence
  Description of Artificial Sequence: Synthetic oligonucleotide
  Antisense strand to SEQ ID NO: 817236
ugcuuucaggauuuguacg

SEQ ID NO: 817238 - RNA, 19 nt, Artificial Sequence
  Description of Artificial Sequence: Synthetic oligonucleotide
  Sense strand starting at position 2778 of SEQ ID NO: 587774
cagucugagcuuggaaagu

SEQ ID NO: 817239 - RNA, 19 nt, Artificial Sequence
  Description of Artificial Sequence: Synthetic oligonucleotide
  Antisense strand to SEQ ID NO: 817238
acuuuccaagcucagacug

SEQ ID NO: 817240 - RNA, 19 nt, Artificial Sequence
  Description of Artificial Sequence: Synthetic oligonucleotide
  Sense strand starting at position 2922 of SEQ ID NO: 587774
ucaagauaguauguaaauc

SEQ ID NO: 817241 - RNA, 19 nt, Artificial Sequence
  Description of Artificial Sequence: Synthetic oligonucleotide
  Antisense strand to SEQ ID NO: 817240
gauuuacauacuaucuuga

SEQ ID NO: 817242 - RNA, 19 nt, Artificial Sequence
  Description of Artificial Sequence: Synthetic oligonucleotide
  Sense strand starting at position 2952 of SEQ ID NO: 587774
gaggguauuugugccaguu

SEQ ID NO: 817243 - RNA, 19 nt, Artificial Sequence
  Description of Artificial Sequence: Synthetic oligonucleotide
  Antisense strand to SEQ ID NO: 817242
aacuggcacaaauacccuc

SEQ ID NO: 817244 - RNA, 19 nt, Artificial Sequence
  Description of Artificial Sequence: Synthetic oligonucleotide
  Sense strand starting at position 2989 of SEQ ID NO: 587774
gugauuuaagacgguguca

SEQ ID NO: 817245 - RNA, 19 nt, Artificial Sequence
  Description of Artificial Sequence: Synthetic oligonucleotide
  Antisense strand to SEQ ID NO: 817244
ugacaccgucuuaaaucac

SEQ ID NO: 817246 - RNA, 19 nt, Artificial Sequence
  Description of Artificial Sequence: Synthetic oligonucleotide
  Sense strand starting at position 3031 of SEQ ID NO: 587774
guugaaugcucaucagaag

SEQ ID NO: 817247 - RNA, 19 nt, Artificial Sequence
  Description of Artificial Sequence: Synthetic oligonucleotide
  Antisense strand to SEQ ID NO: 817246
cuucugaugagcauucaac

SEQ ID NO: 817248 - RNA, 19 nt, Artificial Sequence
  Description of Artificial Sequence: Synthetic oligonucleotide
  Sense strand starting at position 3070 of SEQ ID NO: 587774
cggaaauaaucuuagauuu

SEQ ID NO: 817249 - RNA, 19 nt, Artificial Sequence
  Description of Artificial Sequence: Synthetic oligonucleotide
  Antisense strand to SEQ ID NO: 817248
aaaucuaagauuauuuccg

SEQ ID NO: 817250 - RNA, 19 nt, Artificial Sequence
  Description of Artificial Sequence: Synthetic oligonucleotide
  Sense strand starting at position 3289 of SEQ ID NO: 587774
agugaauagaguuguugca

SEQ ID NO: 817251 - RNA, 19 nt, Artificial Sequence
  Description of Artificial Sequence: Synthetic oligonucleotide
  Antisense strand to SEQ ID NO: 817250
ugcaacaacucuauucacu

SEQ ID NO: 817252 - RNA, 19 nt, Artificial Sequence
  Description of Artificial Sequence: Synthetic oligonucleotide
  Sense strand starting at position 3291 of SEQ ID NO: 587774
ugaauagaguuguugcaag

SEQ ID NO: 817253 - RNA, 19 nt, Artificial Sequence
  Description of Artificial Sequence: Synthetic oligonucleotide
  Antisense strand to SEQ ID NO: 817252
cuugcaacaacucuauuca

SEQ ID NO: 817254 - RNA, 19 nt, Artificial Sequence
  Description of Artificial Sequence: Synthetic oligonucleotide
  Sense strand starting at position 3307 of SEQ ID NO: 587774
aagaaagugguauguuaau

SEQ ID NO: 817255 - RNA, 19 nt, Artificial Sequence
  Description of Artificial Sequence: Synthetic oligonucleotide
  Antisense strand to SEQ ID NO: 817254
auuaacauaccacuuucuu

SEQ ID NO: 817256 - RNA, 19 nt, Artificial Sequence
  Description of Artificial Sequence: Synthetic oligonucleotide
  Sense strand starting at position 3415 of SEQ ID NO: 587774
uccagaugaugucuuucca

SEQ ID NO: 817257 - RNA, 19 nt, Artificial Sequence
  Description of Artificial Sequence: Synthetic oligonucleotide
  Antisense strand to SEQ ID NO: 817256
uggaaagacaucaucugga

SEQ ID NO: 817258 - RNA, 19 nt, Artificial Sequence
  Description of Artificial Sequence: Synthetic oligonucleotide
  Sense strand starting at position 3422 of SEQ ID NO: 587774
gaugucuuuccagagcaua

SEQ ID NO: 817259 - RNA, 19 nt, Artificial Sequence
  Description of Artificial Sequence: Synthetic oligonucleotide
  Antisense strand to SEQ ID NO: 817258
uaugcucuggaaagacauc

SEQ ID NO: 817260 - RNA, 19 nt, Artificial Sequence
  Description of Artificial Sequence: Synthetic oligonucleotide
  Sense strand starting at position 3472 of SEQ ID NO: 587774
gaaggauuguacuuucuuu

SEQ ID NO: 817261 - RNA, 19 nt, Artificial Sequence
  Description of Artificial Sequence: Synthetic oligonucleotide
  Antisense strand to SEQ ID NO: 817260
aaagaaaguacaauccuuc

SEQ ID NO: 817262 - RNA, 19 nt, Artificial Sequence
  Description of Artificial Sequence: Synthetic oligonucleotide
  Sense strand starting at position 3804 of SEQ ID NO: 587774
ugcaccuuucccuagggaa

SEQ ID NO: 817263 - RNA, 19 nt, Artificial Sequence
  Description of Artificial Sequence: Synthetic oligonucleotide
  Antisense strand to SEQ ID NO: 817262
uucccuagggaaaggugca

SEQ ID NO: 817264 - RNA, 19 nt, Artificial Sequence
  Description of Artificial Sequence: Synthetic oligonucleotide
  Sense strand starting at position 3850 of SEQ ID NO: 587774
aucaguuguucuccuacau

SEQ ID NO: 817265 - RNA, 19 nt, Artificial Sequence
  Description of Artificial Sequence: Synthetic oligonucleotide
  Antisense strand to SEQ ID NO: 817264
auguaggagaacaacugau

SEQ ID NO: 817266 - RNA, 19 nt, Artificial Sequence
  Description of Artificial Sequence: Synthetic oligonucleotide
  Sense strand starting at position 3965 of SEQ ID NO: 587774
gcaagcucaucucugaaag

SEQ ID NO: 817267 - RNA, 19 nt, Artificial Sequence
  Description of Artificial Sequence: Synthetic oligonucleotide
  Antisense strand to SEQ ID NO: 817266
cuuucagagaugagcuugc

SEQ ID NO: 817268 - RNA, 19 nt, Artificial Sequence
  Description of Artificial Sequence: Synthetic oligonucleotide
  Sense strand starting at position 186 of SEQ ID NO: 587775
ugguucuagcuuggugaga

SEQ ID NO: 817269 - RNA, 19 nt, Artificial Sequence
  Description of Artificial Sequence: Synthetic oligonucleotide
  Antisense strand to SEQ ID NO: 817268
ucucaccaagcuagaacca

SEQ ID NO: 817270 - RNA, 19 nt, Artificial Sequence
  Description of Artificial Sequence: Synthetic oligonucleotide
  Sense strand starting at position 197 of SEQ ID NO: 587775
uggugagaccuguguggga

SEQ ID NO: 817271 - RNA, 19 nt, Artificial Sequence
  Description of Artificial Sequence: Synthetic oligonucleotide
  Antisense strand to SEQ ID NO: 817270
ucccacacaggucucacca

SEQ ID NO: 817272 - RNA, 19 nt, Artificial Sequence
  Description of Artificial Sequence: Synthetic oligonucleotide
  Sense strand starting at position 198 of SEQ ID NO: 587775
ggugagaccugugugggau

SEQ ID NO: 817273 - RNA, 19 nt, Artificial Sequence
  Description of Artificial Sequence: Synthetic oligonucleotide
  Antisense strand to SEQ ID NO: 817272
aucccacacaggucucacc

SEQ ID NO: 817274 - RNA, 19 nt, Artificial Sequence
  Description of Artificial Sequence: Synthetic oligonucleotide
  Sense strand starting at position 210 of SEQ ID NO: 587775
gugggauucugacucacag

SEQ ID NO: 817275 - RNA, 19 nt, Artificial Sequence
  Description of Artificial Sequence: Synthetic oligonucleotide
  Antisense strand to SEQ ID NO: 817274
cugugagucagaaucccac

SEQ ID NO: 817276 - RNA, 19 nt, Artificial Sequence
  Description of Artificial Sequence: Synthetic oligonucleotide
  Sense strand starting at position 257 of SEQ ID NO: 587775
guaacagaccugugcuguu

SEQ ID NO: 817277 - RNA, 19 nt, Artificial Sequence
  Description of Artificial Sequence: Synthetic oligonucleotide
  Antisense strand to SEQ ID NO: 817276
aacagcacaggucuguuac

SEQ ID NO: 817278 - RNA, 19 nt, Artificial Sequence
  Description of Artificial Sequence: Synthetic oligonucleotide
  Sense strand starting at position 284 of SEQ ID NO: 587775
cuaagcuugugguaauugu

SEQ ID NO: 817279 - RNA, 19 nt, Artificial Sequence
  Description of Artificial Sequence: Synthetic oligonucleotide
  Antisense strand to SEQ ID NO: 817278
acaauuaccacaagcuuag

SEQ ID NO: 817280 - RNA, 19 nt, Artificial Sequence
  Description of Artificial Sequence: Synthetic oligonucleotide
  Sense strand starting at position 288 of SEQ ID NO: 587775
gcuugugguaauuguuaca

SEQ ID NO: 817281 - RNA, 19 nt, Artificial Sequence
  Description of Artificial Sequence: Synthetic oligonucleotide
  Antisense strand to SEQ ID NO: 817280
uguaacaauuaccacaagc

SEQ ID NO: 817282 - RNA, 19 nt, Artificial Sequence
  Description of Artificial Sequence: Synthetic oligonucleotide
  Sense strand starting at position 334 of SEQ ID NO: 587775
ccuggaaucucucaaguga

SEQ ID NO: 817283 - RNA, 19 nt, Artificial Sequence
  Description of Artificial Sequence: Synthetic oligonucleotide
  Antisense strand to SEQ ID NO: 817282
ucacuugagagauuccagg

SEQ ID NO: 817284 - RNA, 19 nt, Artificial Sequence
  Description of Artificial Sequence: Synthetic oligonucleotide
  Sense strand starting at position 383 of SEQ ID NO: 587775
uuggaagugcuuuagaaac

SEQ ID NO: 817285 - RNA, 19 nt, Artificial Sequence
  Description of Artificial Sequence: Synthetic oligonucleotide
  Antisense strand to SEQ ID NO: 817284
guuucuaaagcacuuccaa

SEQ ID NO: 817286 - RNA, 19 nt, Artificial Sequence
  Description of Artificial Sequence: Synthetic oligonucleotide
  Sense strand starting at position 385 of SEQ ID NO: 587775
ggaagugcuuuagaaacaa

SEQ ID NO: 817287 - RNA, 19 nt, Artificial Sequence
  Description of Artificial Sequence: Synthetic oligonucleotide
  Antisense strand to SEQ ID NO: 817286
uuguuucuaaagcacuucc

SEQ ID NO: 817288 - RNA, 19 nt, Artificial Sequence
  Description of Artificial Sequence: Synthetic oligonucleotide
  Sense strand starting at position 448 of SEQ ID NO: 587775
aagagaaaguaaucacgca

SEQ ID NO: 817289 - RNA, 19 nt, Artificial Sequence
  Description of Artificial Sequence: Synthetic oligonucleotide
  Antisense strand to SEQ ID NO: 817288
ugcgugauuacuuucucuu

SEQ ID NO: 817290 - RNA, 19 nt, Artificial Sequence
  Description of Artificial Sequence: Synthetic oligonucleotide
  Sense strand starting at position 456 of SEQ ID NO: 587775
guaaucacgcaauguuagu

SEQ ID NO: 817291 - RNA, 19 nt, Artificial Sequence
  Description of Artificial Sequence: Synthetic oligonucleotide
  Antisense strand to SEQ ID NO: 817290
acuaacauugcgugauuac

SEQ ID NO: 817292 - RNA, 19 nt, Artificial Sequence
  Description of Artificial Sequence: Synthetic oligonucleotide
  Sense strand starting at position 523 of SEQ ID NO: 587775
gaguacauauaggauacau

SEQ ID NO: 817293 - RNA, 19 nt, Artificial Sequence
  Description of Artificial Sequence: Synthetic oligonucleotide
  Antisense strand to SEQ ID NO: 817292
auguauccuauauguacuc

SEQ ID NO: 817294 - RNA, 19 nt, Artificial Sequence
  Description of Artificial Sequence: Synthetic oligonucleotide
  Sense strand starting at position 787 of SEQ ID NO: 587775
aggugauccagcugccaca

SEQ ID NO: 817295 - RNA, 19 nt, Artificial Sequence
  Description of Artificial Sequence: Synthetic oligonucleotide
  Antisense strand to SEQ ID NO: 817294
uguggcagcuggaucaccu

SEQ ID NO: 817296 - RNA, 19 nt, Artificial Sequence
  Description of Artificial Sequence: Synthetic oligonucleotide
  Sense strand starting at position 875 of SEQ ID NO: 587775
uguuuaaguuauuccuaca

SEQ ID NO: 817297 - RNA, 19 nt, Artificial Sequence
  Description of Artificial Sequence: Synthetic oligonucleotide
  Antisense strand to SEQ ID NO: 817296
uguaggaauaacuuaaaca

SEQ ID NO: 817298 - RNA, 19 nt, Artificial Sequence
  Description of Artificial Sequence: Synthetic oligonucleotide
  Sense strand starting at position 948 of SEQ ID NO: 587775
acaucaaggucugcauacu

SEQ ID NO: 817299 - RNA, 19 nt, Artificial Sequence
  Description of Artificial Sequence: Synthetic oligonucleotide
  Antisense strand to SEQ ID NO: 817298
aguaugcagaccuugaugu

SEQ ID NO: 817300 - RNA, 19 nt, Artificial Sequence
  Description of Artificial Sequence: Synthetic oligonucleotide
  Sense strand starting at position 1073 of SEQ ID NO: 587775
ggcauugcuaaagaguuaa

SEQ ID NO: 817301 - RNA, 19 nt, Artificial Sequence
  Description of Artificial Sequence: Synthetic oligonucleotide
  Antisense strand to SEQ ID NO: 817300
uuaacucuuuagcaaugcc

SEQ ID NO: 817302 - RNA, 19 nt, Artificial Sequence
  Description of Artificial Sequence: Synthetic oligonucleotide
  Sense strand starting at position 1161 of SEQ ID NO: 587775
aaagguacuggugggauua

SEQ ID NO: 817303 - RNA, 19 nt, Artificial Sequence
  Description of Artificial Sequence: Synthetic oligonucleotide
  Antisense strand to SEQ ID NO: 817302
uaaucccaccaguaccuuu

SEQ ID NO: 817304 - RNA, 19 nt, Artificial Sequence
  Description of Artificial Sequence: Synthetic oligonucleotide
  Sense strand starting at position 1179 of SEQ ID NO: 587775
aggcgagauucaggugaaa

SEQ ID NO: 817305 - RNA, 19 nt, Artificial Sequence
  Description of Artificial Sequence: Synthetic oligonucleotide
  Antisense strand to SEQ ID NO: 817304
uuucaccugaaucucgccu

SEQ ID NO: 817306 - RNA, 19 nt, Artificial Sequence
  Description of Artificial Sequence: Synthetic oligonucleotide
  Sense strand starting at position 1542 of SEQ ID NO: 587775
agcaaugauugccauauua

SEQ ID NO: 817307 - RNA, 19 nt, Artificial Sequence
  Description of Artificial Sequence: Synthetic oligonucleotide
  Antisense strand to SEQ ID NO: 817306
uaauauggcaaucauugcu

SEQ ID NO: 817308 - RNA, 19 nt, Artificial Sequence
  Description of Artificial Sequence: Synthetic oligonucleotide
  Sense strand starting at position 1664 of SEQ ID NO: 587775
ccaagaaucuaauugcugu

SEQ ID NO: 817309 - RNA, 19 nt, Artificial Sequence
  Description of Artificial Sequence: Synthetic oligonucleotide
  Antisense strand to SEQ ID NO: 817308
acagcaauuagauucuugg

SEQ ID NO: 817310 - RNA, 19 nt, Artificial Sequence
  Description of Artificial Sequence: Synthetic oligonucleotide
  Sense strand starting at position 3194 of SEQ ID NO: 587775
ggugcugcuuaauucgauu

SEQ ID NO: 817311 - RNA, 19 nt, Artificial Sequence
  Description of Artificial Sequence: Synthetic oligonucleotide
  Antisense strand to SEQ ID NO: 817310
aaucgaauuaagcagcacc

SEQ ID NO: 817312 - RNA, 19 nt, Artificial Sequence
  Description of Artificial Sequence: Synthetic oligonucleotide
  Sense strand starting at position 3200 of SEQ ID NO: 587775
gcuuaauucgauugccauu

SEQ ID NO: 817313 - RNA, 19 nt, Artificial Sequence
  Description of Artificial Sequence: Synthetic oligonucleotide
  Antisense strand to SEQ ID NO: 817312
aauggcaaucgaauuaagc

SEQ ID NO: 817314 - RNA, 19 nt, Artificial Sequence
  Description of Artificial Sequence: Synthetic oligonucleotide
  Sense strand starting at position 3229 of SEQ ID NO: 587775
ugguuugguucagugguga

SEQ ID NO: 817315 - RNA, 19 nt, Artificial Sequence
  Description of Artificial Sequence: Synthetic oligonucleotide
  Antisense strand to SEQ ID NO: 817314
ucaccacugaaccaaacca

SEQ ID NO: 817316 - RNA, 19 nt, Artificial Sequence
  Description of Artificial Sequence: Synthetic oligonucleotide
  Sense strand starting at position 3293 of SEQ ID NO: 587775
gaaaguuaauggcugucuu

SEQ ID NO: 817317 - RNA, 19 nt, Artificial Sequence
  Description of Artificial Sequence: Synthetic oligonucleotide
  Antisense strand to SEQ ID NO: 817316
aagacagccauuaacuuuc

SEQ ID NO: 817318 - RNA, 19 nt, Artificial Sequence
  Description of Artificial Sequence: Synthetic oligonucleotide
  Sense strand starting at position 3294 of SEQ ID NO: 587775
aaaguuaauggcugucuuu

SEQ ID NO: 817319 - RNA, 19 nt, Artificial Sequence
  Description of Artificial Sequence: Synthetic oligonucleotide
  Antisense strand to SEQ ID NO: 817318
aaagacagccauuaacuuu

SEQ ID NO: 817320 - RNA, 19 nt, Artificial Sequence
  Description of Artificial Sequence: Synthetic oligonucleotide
  Sense strand starting at position 3494 of SEQ ID NO: 587775
ucaggugcgugucugaaga

SEQ ID NO: 817321 - RNA, 19 nt, Artificial Sequence
  Description of Artificial Sequence: Synthetic oligonucleotide
  Antisense strand to SEQ ID NO: 817320
ucuucagacacgcaccuga

SEQ ID NO: 817322 - RNA, 19 nt, Artificial Sequence
  Description of Artificial Sequence: Synthetic oligonucleotide
  Sense strand starting at position 3526 of SEQ ID NO: 587775
gugcuugauacacagcuga

SEQ ID NO: 817323 - RNA, 19 nt, Artificial Sequence
  Description of Artificial Sequence: Synthetic oligonucleotide
  Antisense strand to SEQ ID NO: 817322
ucagcuguguaucaagcac

SEQ ID NO: 817324 - RNA, 19 nt, Artificial Sequence
  Description of Artificial Sequence: Synthetic oligonucleotide
  Sense strand starting at position 3545 of SEQ ID NO: 587775
ugcuuuaucugcucagguu

SEQ ID NO: 817325 - RNA, 19 nt, Artificial Sequence
  Description of Artificial Sequence: Synthetic oligonucleotide
  Antisense strand to SEQ ID NO: 817324
aaccugagcagauaaagca

SEQ ID NO: 817326 - RNA, 19 nt, Artificial Sequence
  Description of Artificial Sequence: Synthetic oligonucleotide
  Sense strand starting at position 3546 of SEQ ID NO: 587775
gcuuuaucugcucagguuu

SEQ ID NO: 817327 - RNA, 19 nt, Artificial Sequence
  Description of Artificial Sequence: Synthetic oligonucleotide
  Antisense strand to SEQ ID NO: 817326
aaaccugagcagauaaagc

SEQ ID NO: 817328 - RNA, 19 nt, Artificial Sequence
  Description of Artificial Sequence: Synthetic oligonucleotide
  Sense strand starting at position 3561 of SEQ ID NO: 587775
guuuacuggcuuuauaaca

SEQ ID NO: 817329 - RNA, 19 nt, Artificial Sequence
  Description of Artificial Sequence: Synthetic oligonucleotide
  Antisense strand to SEQ ID NO: 817328
uguuauaaagccaguaaac

SEQ ID NO: 817330 - RNA, 19 nt, Artificial Sequence
  Description of Artificial Sequence: Synthetic oligonucleotide
  Sense strand starting at position 3571 of SEQ ID NO: 587775
uuuauaacaguuggcauaa

SEQ ID NO: 817331 - RNA, 19 nt, Artificial Sequence
  Description of Artificial Sequence: Synthetic oligonucleotide
  Antisense strand to SEQ ID NO: 817330
uuaugccaacuguuauaaa

SEQ ID NO: 817332 - RNA, 19 nt, Artificial Sequence
  Description of Artificial Sequence: Synthetic oligonucleotide
  Sense strand starting at position 3615 of SEQ ID NO: 587775
gacugagcauguucuuaac

SEQ ID NO: 817333 - RNA, 19 nt, Artificial Sequence
  Description of Artificial Sequence: Synthetic oligonucleotide
  Antisense strand to SEQ ID NO: 817332
guuaagaacaugcucaguc

SEQ ID NO: 817334 - RNA, 19 nt, Artificial Sequence
  Description of Artificial Sequence: Synthetic oligonucleotide
  Sense strand starting at position 3617 of SEQ ID NO: 587775
cugagcauguucuuaacca

SEQ ID NO: 817335 - RNA, 19 nt, Artificial Sequence
  Description of Artificial Sequence: Synthetic oligonucleotide
  Antisense strand to SEQ ID NO: 817334
ugguuaagaacaugcucag

SEQ ID NO: 817336 - RNA, 19 nt, Artificial Sequence
  Description of Artificial Sequence: Synthetic oligonucleotide
  Sense strand starting at position 3672 of SEQ ID NO: 587775
gggcuuagugagcagagga

SEQ ID NO: 817337 - RNA, 19 nt, Artificial Sequence
  Description of Artificial Sequence: Synthetic oligonucleotide
  Antisense strand to SEQ ID NO: 817336
uccucugcucacuaagccc

SEQ ID NO: 817338 - RNA, 19 nt, Artificial Sequence
  Description of Artificial Sequence: Synthetic oligonucleotide
  Sense strand starting at position 3770 of SEQ ID NO: 587775
uucaguuugcuguugcgau

SEQ ID NO: 817339 - RNA, 19 nt, Artificial Sequence
  Description of Artificial Sequence: Synthetic oligonucleotide
  Antisense strand to SEQ ID NO: 817338
aucgcaacagcaaacugaa

SEQ ID NO: 817340 - RNA, 19 nt, Artificial Sequence
  Description of Artificial Sequence: Synthetic oligonucleotide
  Sense strand starting at position 3772 of SEQ ID NO: 587775
caguuugcuguugcgauua

SEQ ID NO: 817341 - RNA, 19 nt, Artificial Sequence
  Description of Artificial Sequence: Synthetic oligonucleotide
  Antisense strand to SEQ ID NO: 817340
uaaucgcaacagcaaacug

SEQ ID NO: 817342 - RNA, 19 nt, Artificial Sequence
  Description of Artificial Sequence: Synthetic oligonucleotide
  Sense strand starting at position 3782 of SEQ ID NO: 587775
uugcgauuagaugguauag

SEQ ID NO: 817343 - RNA, 19 nt, Artificial Sequence
  Description of Artificial Sequence: Synthetic oligonucleotide
  Antisense strand to SEQ ID NO: 817342
cuauaccaucuaaucgcaa

SEQ ID NO: 817344 - RNA, 19 nt, Artificial Sequence
  Description of Artificial Sequence: Synthetic oligonucleotide
  Sense strand starting at position 3784 of SEQ ID NO: 587775
gcgauuagaugguauagau

SEQ ID NO: 817345 - RNA, 19 nt, Artificial Sequence
  Description of Artificial Sequence: Synthetic oligonucleotide
  Antisense strand to SEQ ID NO: 817344
aucuauaccaucuaaucgc

SEQ ID NO: 817346 - RNA, 19 nt, Artificial Sequence
  Description of Artificial Sequence: Synthetic oligonucleotide
  Sense strand starting at position 3831 of SEQ ID NO: 587775
uugauaugccaccagaauu

SEQ ID NO: 817347 - RNA, 19 nt, Artificial Sequence
  Description of Artificial Sequence: Synthetic oligonucleotide
  Antisense strand to SEQ ID NO: 817346
aauucugguggcauaucaa

SEQ ID NO: 817348 - RNA, 19 nt, Artificial Sequence
  Description of Artificial Sequence: Synthetic oligonucleotide
  Sense strand starting at position 569 of SEQ ID NO: 587776
ggaucagaccuaugugaca

SEQ ID NO: 817349 - RNA, 19 nt, Artificial Sequence
  Description of Artificial Sequence: Synthetic oligonucleotide
  Antisense strand to SEQ ID NO: 817348
ugucacauaggucugaucc

SEQ ID NO: 817350 - RNA, 19 nt, Artificial Sequence
  Description of Artificial Sequence: Synthetic oligonucleotide
  Sense strand starting at position 662 of SEQ ID NO: 587776
agagaagagauucguuuau

SEQ ID NO: 817351 - RNA, 19 nt, Artificial Sequence
  Description of Artificial Sequence: Synthetic oligonucleotide
  Antisense strand to SEQ ID NO: 817350
auaaacgaaucucuucucu

SEQ ID NO: 817352 - RNA, 19 nt, Artificial Sequence
  Description of Artificial Sequence: Synthetic oligonucleotide
  Sense strand starting at position 664 of SEQ ID NO: 587776
agaagagauucguuuaucc

SEQ ID NO: 817353 - RNA, 19 nt, Artificial Sequence
  Description of Artificial Sequence: Synthetic oligonucleotide
  Antisense strand to SEQ ID NO: 817352
ggauaaacgaaucucuucu

SEQ ID NO: 817354 - RNA, 19 nt, Artificial Sequence
  Description of Artificial Sequence: Synthetic oligonucleotide
  Sense strand starting at position 666 of SEQ ID NO: 587776
aagagauucguuuauccuu

SEQ ID NO: 817355 - RNA, 19 nt, Artificial Sequence
  Description of Artificial Sequence: Synthetic oligonucleotide
  Antisense strand to SEQ ID NO: 817354
aaggauaaacgaaucucuu

SEQ ID NO: 817356 - RNA, 19 nt, Artificial Sequence
  Description of Artificial Sequence: Synthetic oligonucleotide
  Sense strand starting at position 676 of SEQ ID NO: 587776
uuuauccuugcacgauuua

SEQ ID NO: 817357 - RNA, 19 nt, Artificial Sequence
  Description of Artificial Sequence: Synthetic oligonucleotide
  Antisense strand to SEQ ID NO: 817356
uaaaucgugcaaggauaaa

SEQ ID NO: 817358 - RNA, 19 nt, Artificial Sequence
  Description of Artificial Sequence: Synthetic oligonucleotide
  Sense strand starting at position 687 of SEQ ID NO: 587776
acgauuuagucuucuugua

SEQ ID NO: 817359 - RNA, 19 nt, Artificial Sequence
  Description of Artificial Sequence: Synthetic oligonucleotide
  Antisense strand to SEQ ID NO: 817358
uacaagaagacuaaaucgu

SEQ ID NO: 817360 - RNA, 19 nt, Artificial Sequence
  Description of Artificial Sequence: Synthetic oligonucleotide
  Sense strand starting at position 728 of SEQ ID NO: 587776
acagaaucacaguguucuc

SEQ ID NO: 817361 - RNA, 19 nt, Artificial Sequence
  Description of Artificial Sequence: Synthetic oligonucleotide
  Antisense strand to SEQ ID NO: 817360
gagaacacugugauucugu

SEQ ID NO: 817362 - RNA, 19 nt, Artificial Sequence
  Description of Artificial Sequence: Synthetic oligonucleotide
  Sense strand starting at position 731 of SEQ ID NO: 587776
gaaucacaguguucucaag

SEQ ID NO: 817363 - RNA, 19 nt, Artificial Sequence
  Description of Artificial Sequence: Synthetic oligonucleotide
  Antisense strand to SEQ ID NO: 817362
cuugagaacacugugauuc

SEQ ID NO: 817364 - RNA, 19 nt, Artificial Sequence
  Description of Artificial Sequence: Synthetic oligonucleotide
  Sense strand starting at position 738 of SEQ ID NO: 587776
aguguucucaaggacguga

SEQ ID NO: 817365 - RNA, 19 nt, Artificial Sequence
  Description of Artificial Sequence: Synthetic oligonucleotide
  Antisense strand to SEQ ID NO: 817364
ucacguccuugagaacacu

SEQ ID NO: 817366 - RNA, 19 nt, Artificial Sequence
  Description of Artificial Sequence: Synthetic oligonucleotide
  Sense strand starting at position 861 of SEQ ID NO: 587776
gauugacgcuuuccagaga

SEQ ID NO: 817367 - RNA, 19 nt, Artificial Sequence
  Description of Artificial Sequence: Synthetic oligonucleotide
  Antisense strand to SEQ ID NO: 817366
ucucuggaaagcgucaauc

SEQ ID NO: 817368 - RNA, 19 nt, Artificial Sequence
  Description of Artificial Sequence: Synthetic oligonucleotide
  Sense strand starting at position 864 of SEQ ID NO: 587776
ugacgcuuuccagagaguu

SEQ ID NO: 817369 - RNA, 19 nt, Artificial Sequence
  Description of Artificial Sequence: Synthetic oligonucleotide
  Antisense strand to SEQ ID NO: 817368
aacucucuggaaagcguca

SEQ ID NO: 817370 - RNA, 19 nt, Artificial Sequence
  Description of Artificial Sequence: Synthetic oligonucleotide
  Sense strand starting at position 866 of SEQ ID NO: 587776
acgcuuuccagagaguuac

SEQ ID NO: 817371 - RNA, 19 nt, Artificial Sequence
  Description of Artificial Sequence: Synthetic oligonucleotide
  Antisense strand to SEQ ID NO: 817370
guaacucucuggaaagcgu

SEQ ID NO: 817372 - RNA, 19 nt, Artificial Sequence
  Description of Artificial Sequence: Synthetic oligonucleotide
  Sense strand starting at position 906 of SEQ ID NO: 587776
cugagaguuucccugagag

SEQ ID NO: 817373 - RNA, 19 nt, Artificial Sequence
  Description of Artificial Sequence: Synthetic oligonucleotide
  Antisense strand to SEQ ID NO: 817372
cucucagggaaacucucag

SEQ ID NO: 817374 - RNA, 19 nt, Artificial Sequence
  Description of Artificial Sequence: Synthetic oligonucleotide
  Sense strand starting at position 993 of SEQ ID NO: 587776
auauuaacaucagaagaga

SEQ ID NO: 817375 - RNA, 19 nt, Artificial Sequence
  Description of Artificial Sequence: Synthetic oligonucleotide
  Antisense strand to SEQ ID NO: 817374
ucucuucugauguuaauau

SEQ ID NO: 817376 - RNA, 19 nt, Artificial Sequence
  Description of Artificial Sequence: Synthetic oligonucleotide
  Sense strand starting at position 1036 of SEQ ID NO: 587776
ccggaauaguuaccugacu

SEQ ID NO: 817377 - RNA, 19 nt, Artificial Sequence
  Description of Artificial Sequence: Synthetic oligonucleotide
  Antisense strand to SEQ ID NO: 817376
agucagguaacuauuccgg

SEQ ID NO: 817378 - RNA, 19 nt, Artificial Sequence
  Description of Artificial Sequence: Synthetic oligonucleotide
  Sense strand starting at position 1037 of SEQ ID NO: 587776
cggaauaguuaccugacuu

SEQ ID NO: 817379 - RNA, 19 nt, Artificial Sequence
  Description of Artificial Sequence: Synthetic oligonucleotide
  Antisense strand to SEQ ID NO: 817378
aagucagguaacuauuccg

SEQ ID NO: 817380 - RNA, 19 nt, Artificial Sequence
  Description of Artificial Sequence: Synthetic oligonucleotide
  Sense strand starting at position 1038 of SEQ ID NO: 587776
ggaauaguuaccugacuug

SEQ ID NO: 817381 - RNA, 19 nt, Artificial Sequence
  Description of Artificial Sequence: Synthetic oligonucleotide
  Antisense strand to SEQ ID NO: 817380
caagucagguaacuauucc

SEQ ID NO: 817382 - RNA, 19 nt, Artificial Sequence
  Description of Artificial Sequence: Synthetic oligonucleotide
  Sense strand starting at position 1066 of SEQ ID NO: 587776
acgucuaaggaauagucaa

SEQ ID NO: 817383 - RNA, 19 nt, Artificial Sequence
  Description of Artificial Sequence: Synthetic oligonucleotide
  Antisense strand to SEQ ID NO: 817382
uugacuauuccuuagacgu

SEQ ID NO: 817384 - RNA, 19 nt, Artificial Sequence
  Description of Artificial Sequence: Synthetic oligonucleotide
  Sense strand starting at position 1119 of SEQ ID NO: 587776
gcauaaaugcucgaucaga

SEQ ID NO: 817385 - RNA, 19 nt, Artificial Sequence
  Description of Artificial Sequence: Synthetic oligonucleotide
  Antisense strand to SEQ ID NO: 817384
ucugaucgagcauuuaugc

SEQ ID NO: 817386 - RNA, 19 nt, Artificial Sequence
  Description of Artificial Sequence: Synthetic oligonucleotide
  Sense strand starting at position 1165 of SEQ ID NO: 587776
cgucucauuccacaccauu

SEQ ID NO: 817387 - RNA, 19 nt, Artificial Sequence
  Description of Artificial Sequence: Synthetic oligonucleotide
  Antisense strand to SEQ ID NO: 817386
aaugguguggaaugagacg

SEQ ID NO: 817388 - RNA, 19 nt, Artificial Sequence
  Description of Artificial Sequence: Synthetic oligonucleotide
  Sense strand starting at position 1216 of SEQ ID NO: 587776
ugauucuuggucuaaucaa

SEQ ID NO: 817389 - RNA, 19 nt, Artificial Sequence
  Description of Artificial Sequence: Synthetic oligonucleotide
  Antisense strand to SEQ ID NO: 817388
uugauuagaccaagaauca

SEQ ID NO: 817390 - RNA, 19 nt, Artificial Sequence
  Description of Artificial Sequence: Synthetic oligonucleotide
  Sense strand starting at position 1235 of SEQ ID NO: 587776
aguccaagaggauguaaua

SEQ ID NO: 817391 - RNA, 19 nt, Artificial Sequence
  Description of Artificial Sequence: Synthetic oligonucleotide
  Antisense strand to SEQ ID NO: 817390
uauuacauccucuuggacu

SEQ ID NO: 817392 - RNA, 19 nt, Artificial Sequence
  Description of Artificial Sequence: Synthetic oligonucleotide
  Sense strand starting at position 1391 of SEQ ID NO: 587776
ggcauuucuugggcacuua

SEQ ID NO: 817393 - RNA, 19 nt, Artificial Sequence
  Description of Artificial Sequence: Synthetic oligonucleotide
  Antisense strand to SEQ ID NO: 817392
uaagugcccaagaaaugcc

SEQ ID NO: 817394 - RNA, 19 nt, Artificial Sequence
  Description of Artificial Sequence: Synthetic oligonucleotide
  Sense strand starting at position 2484 of SEQ ID NO: 587776
accacugcuguccaagaga

SEQ ID NO: 817395 - RNA, 19 nt, Artificial Sequence
  Description of Artificial Sequence: Synthetic oligonucleotide
  Antisense strand to SEQ ID NO: 817394
ucucuuggacagcaguggu

SEQ ID NO: 817396 - RNA, 19 nt, Artificial Sequence
  Description of Artificial Sequence: Synthetic oligonucleotide
  Sense strand starting at position 2487 of SEQ ID NO: 587776
acugcuguccaagagaaau

SEQ ID NO: 817397 - RNA, 19 nt, Artificial Sequence
  Description of Artificial Sequence: Synthetic oligonucleotide
  Antisense strand to SEQ ID NO: 817396
auuucucuuggacagcagu

SEQ ID NO: 817398 - RNA, 19 nt, Artificial Sequence
  Description of Artificial Sequence: Synthetic oligonucleotide
  Sense strand starting at position 2534 of SEQ ID NO: 587776
aguuucucauaggcacaua

SEQ ID NO: 817399 - RNA, 19 nt, Artificial Sequence
  Description of Artificial Sequence: Synthetic oligonucleotide
  Antisense strand to SEQ ID NO: 817398
uaugugccuaugagaaacu

SEQ ID NO: 817400 - RNA, 19 nt, Artificial Sequence
  Description of Artificial Sequence: Synthetic oligonucleotide
  Sense strand starting at position 2683 of SEQ ID NO: 587776
gguguaguguugacuugca

SEQ ID NO: 817401 - RNA, 19 nt, Artificial Sequence
  Description of Artificial Sequence: Synthetic oligonucleotide
  Antisense strand to SEQ ID NO: 817400
ugcaagucaacacuacacc

SEQ ID NO: 817402 - RNA, 19 nt, Artificial Sequence
  Description of Artificial Sequence: Synthetic oligonucleotide
  Sense strand starting at position 3028 of SEQ ID NO: 587776
cuauguugcccagauuauc

SEQ ID NO: 817403 - RNA, 19 nt, Artificial Sequence
  Description of Artificial Sequence: Synthetic oligonucleotide
  Antisense strand to SEQ ID NO: 817402
gauaaucugggcaacauag

SEQ ID NO: 817404 - RNA, 19 nt, Artificial Sequence
  Description of Artificial Sequence: Synthetic oligonucleotide
  Sense strand starting at position 3086 of SEQ ID NO: 587776
cacagaauagcugggacua

SEQ ID NO: 817405 - RNA, 19 nt, Artificial Sequence
  Description of Artificial Sequence: Synthetic oligonucleotide
  Antisense strand to SEQ ID NO: 817404
uagucccagcuauucugug

SEQ ID NO: 817406 - RNA, 19 nt, Artificial Sequence
  Description of Artificial Sequence: Synthetic oligonucleotide
  Sense strand starting at position 3153 of SEQ ID NO: 587776
ugggcaauaugguuauaaa

SEQ ID NO: 817407 - RNA, 19 nt, Artificial Sequence
  Description of Artificial Sequence: Synthetic oligonucleotide
  Antisense strand to SEQ ID NO: 817406
uuuauaaccauauugccca

SEQ ID NO: 817408 - RNA, 19 nt, Artificial Sequence
  Description of Artificial Sequence: Synthetic oligonucleotide
  Sense strand starting at position 3214 of SEQ ID NO: 587776
uacauagucagguggugaa

SEQ ID NO: 817409 - RNA, 19 nt, Artificial Sequence
  Description of Artificial Sequence: Synthetic oligonucleotide
  Antisense strand to SEQ ID NO: 817408
uucaccaccugacuaugua

SEQ ID NO: 817410 - RNA, 19 nt, Artificial Sequence
  Description of Artificial Sequence: Synthetic oligonucleotide
  Sense strand starting at position 3291 of SEQ ID NO: 587776
gcugcaauuucuguugaaa

SEQ ID NO: 817411 - RNA, 19 nt, Artificial Sequence
  Description of Artificial Sequence: Synthetic oligonucleotide
  Antisense strand to SEQ ID NO: 817410
uuucaacagaaauugcagc

SEQ ID NO: 817412 - RNA, 19 nt, Artificial Sequence
  Description of Artificial Sequence: Synthetic oligonucleotide
  Sense strand starting at position 3302 of SEQ ID NO: 587776
uguugaaaguuucucaaac

SEQ ID NO: 817413 - RNA, 19 nt, Artificial Sequence
  Description of Artificial Sequence: Synthetic oligonucleotide
  Antisense strand to SEQ ID NO: 817412
guuugagaaacuuucaaca

SEQ ID NO: 817414 - RNA, 19 nt, Artificial Sequence
  Description of Artificial Sequence: Synthetic oligonucleotide
  Sense strand starting at position 3303 of SEQ ID NO: 587776
guugaaaguuucucaaaca

SEQ ID NO: 817415 - RNA, 19 nt, Artificial Sequence
  Description of Artificial Sequence: Synthetic oligonucleotide
  Antisense strand to SEQ ID NO: 817414
uguuugagaaacuuucaac

SEQ ID NO: 817416 - RNA, 19 nt, Artificial Sequence
  Description of Artificial Sequence: Synthetic oligonucleotide
  Sense strand starting at position 3334 of SEQ ID NO: 587776
aaugaagugggaugcuauu

SEQ ID NO: 817417 - RNA, 19 nt, Artificial Sequence
  Description of Artificial Sequence: Synthetic oligonucleotide
  Antisense strand to SEQ ID NO: 817416
aauagcaucccacuucauu

SEQ ID NO: 817418 - RNA, 19 nt, Artificial Sequence
  Description of Artificial Sequence: Synthetic oligonucleotide
  Sense strand starting at position 3387 of SEQ ID NO: 587776
uggucuugucuugagguga

SEQ ID NO: 817419 - RNA, 19 nt, Artificial Sequence
  Description of Artificial Sequence: Synthetic oligonucleotide
  Antisense strand to SEQ ID NO: 817418
ucaccucaagacaagacca

SEQ ID NO: 817420 - RNA, 19 nt, Artificial Sequence
  Description of Artificial Sequence: Synthetic oligonucleotide
  Sense strand starting at position 3640 of SEQ ID NO: 587776
aggaguaauuguguucaga

SEQ ID NO: 817421 - RNA, 19 nt, Artificial Sequence
  Description of Artificial Sequence: Synthetic oligonucleotide
  Antisense strand to SEQ ID NO: 817420
ucugaacacaauuacuccu

SEQ ID NO: 817422 - RNA, 19 nt, Artificial Sequence
  Description of Artificial Sequence: Synthetic oligonucleotide
  Sense strand starting at position 3665 of SEQ ID NO: 587776
gucucuagacuugauacau

SEQ ID NO: 817423 - RNA, 19 nt, Artificial Sequence
  Description of Artificial Sequence: Synthetic oligonucleotide
  Antisense strand to SEQ ID NO: 817422
auguaucaagucuagagac

SEQ ID NO: 817424 - RNA, 19 nt, Artificial Sequence
  Description of Artificial Sequence: Synthetic oligonucleotide
  Sense strand starting at position 3675 of SEQ ID NO: 587776
uugauacaucuguacucca

SEQ ID NO: 817425 - RNA, 19 nt, Artificial Sequence
  Description of Artificial Sequence: Synthetic oligonucleotide
  Antisense strand to SEQ ID NO: 817424
uggaguacagauguaucaa

SEQ ID NO: 817426 - RNA, 19 nt, Artificial Sequence
  Description of Artificial Sequence: Synthetic oligonucleotide
  Sense strand starting at position 3927 of SEQ ID NO: 587776
gggaauguauaauccaggu

SEQ ID NO: 817427 - RNA, 19 nt, Artificial Sequence
  Description of Artificial Sequence: Synthetic oligonucleotide
  Antisense strand to SEQ ID NO: 817426
accuggauuauacauuccc

SEQ ID NO: 817428 - RNA, 19 nt, Artificial Sequence
  Description of Artificial Sequence: Synthetic oligonucleotide
  Sense strand starting at position 374 of SEQ ID NO: 587777
gcugauucuguggaaagac

SEQ ID NO: 817429 - RNA, 19 nt, Artificial Sequence
  Description of Artificial Sequence: Synthetic oligonucleotide
  Antisense strand to SEQ ID NO: 817428
gucuuuccacagaaucagc

SEQ ID NO: 817430 - RNA, 19 nt, Artificial Sequence
  Description of Artificial Sequence: Synthetic oligonucleotide
  Sense strand starting at position 846 of SEQ ID NO: 587777
cauuuaugguaucaugaga

SEQ ID NO: 817431 - RNA, 19 nt, Artificial Sequence
  Description of Artificial Sequence: Synthetic oligonucleotide
  Antisense strand to SEQ ID NO: 817430
ucucaugauaccauaaaug

SEQ ID NO: 817432 - RNA, 19 nt, Artificial Sequence
  Description of Artificial Sequence: Synthetic oligonucleotide
  Sense strand starting at position 874 of SEQ ID NO: 587777
gacuuccaggcaugggaau

SEQ ID NO: 817433 - RNA, 19 nt, Artificial Sequence
  Description of Artificial Sequence: Synthetic oligonucleotide
  Antisense strand to SEQ ID NO: 817432
auucccaugccuggaaguc

SEQ ID NO: 817434 - RNA, 19 nt, Artificial Sequence
  Description of Artificial Sequence: Synthetic oligonucleotide
  Sense strand starting at position 1059 of SEQ ID NO: 587777
uuagucauccggcacacau

SEQ ID NO: 817435 - RNA, 19 nt, Artificial Sequence
  Description of Artificial Sequence: Synthetic oligonucleotide
  Antisense strand to SEQ ID NO: 817434
augugugccggaugacuaa

SEQ ID NO: 817436 - RNA, 19 nt, Artificial Sequence
  Description of Artificial Sequence: Synthetic oligonucleotide
  Sense strand starting at position 1202 of SEQ ID NO: 587777
ugugauaagacauggcgau

SEQ ID NO: 817437 - RNA, 19 nt, Artificial Sequence
  Description of Artificial Sequence: Synthetic oligonucleotide
  Antisense strand to SEQ ID NO: 817436
aucgccaugucuuaucaca

SEQ ID NO: 817438 - RNA, 19 nt, Artificial Sequence
  Description of Artificial Sequence: Synthetic oligonucleotide
  Sense strand starting at position 1283 of SEQ ID NO: 587777
gcccgaggacuuuaggaga

SEQ ID NO: 817439 - RNA, 19 nt, Artificial Sequence
  Description of Artificial Sequence: Synthetic oligonucleotide
  Antisense strand to SEQ ID NO: 817438
ucuccuaaaguccucgggc

SEQ ID NO: 817440 - RNA, 19 nt, Artificial Sequence
  Description of Artificial Sequence: Synthetic oligonucleotide
  Sense strand starting at position 1349 of SEQ ID NO: 587777
gugugaauggagugauaaa

SEQ ID NO: 817441 - RNA, 19 nt, Artificial Sequence
  Description of Artificial Sequence: Synthetic oligonucleotide
  Antisense strand to SEQ ID NO: 817440
uuuaucacuccauucacac

SEQ ID NO: 817442 - RNA, 19 nt, Artificial Sequence
  Description of Artificial Sequence: Synthetic oligonucleotide
  Sense strand starting at position 1477 of SEQ ID NO: 587777
gauuaacaaugggaagaaa

SEQ ID NO: 817443 - RNA, 19 nt, Artificial Sequence
  Description of Artificial Sequence: Synthetic oligonucleotide
  Antisense strand to SEQ ID NO: 817442
uuucuucccauuguuaauc

SEQ ID NO: 817444 - RNA, 19 nt, Artificial Sequence
  Description of Artificial Sequence: Synthetic oligonucleotide
  Sense strand starting at position 1999 of SEQ ID NO: 587777
uggugcuuugguagaguga

SEQ ID NO: 817445 - RNA, 19 nt, Artificial Sequence
  Description of Artificial Sequence: Synthetic oligonucleotide
  Antisense strand to SEQ ID NO: 817444
ucacucuaccaaagcacca

SEQ ID NO: 817446 - RNA, 19 nt, Artificial Sequence
  Description of Artificial Sequence: Synthetic oligonucleotide
  Sense strand starting at position 2040 of SEQ ID NO: 587777
ggucuuauaagagguggag

SEQ ID NO: 817447 - RNA, 19 nt, Artificial Sequence
  Description of Artificial Sequence: Synthetic oligonucleotide
  Antisense strand to SEQ ID NO: 817446
cuccaccucuuauaagacc

SEQ ID NO: 817448 - RNA, 19 nt, Artificial Sequence
  Description of Artificial Sequence: Synthetic oligonucleotide
  Sense strand starting at position 2078 of SEQ ID NO: 587777
ggaugaaugugauuggcua

SEQ ID NO: 817449 - RNA, 19 nt, Artificial Sequence
  Description of Artificial Sequence: Synthetic oligonucleotide
  Antisense strand to SEQ ID NO: 817448
uagccaaucacauucaucc

SEQ ID NO: 817450 - RNA, 19 nt, Artificial Sequence
  Description of Artificial Sequence: Synthetic oligonucleotide
  Sense strand starting at position 2079 of SEQ ID NO: 587777
gaugaaugugauuggcuag

SEQ ID NO: 817451 - RNA, 19 nt, Artificial Sequence
  Description of Artificial Sequence: Synthetic oligonucleotide
  Antisense strand to SEQ ID NO: 817450
cuagccaaucacauucauc

SEQ ID NO: 817452 - RNA, 19 nt, Artificial Sequence
  Description of Artificial Sequence: Synthetic oligonucleotide
  Sense strand starting at position 2096 of SEQ ID NO: 587777
aguggugcugauuaaacaa

SEQ ID NO: 817453 - RNA, 19 nt, Artificial Sequence
  Description of Artificial Sequence: Synthetic oligonucleotide
  Antisense strand to SEQ ID NO: 817452
uuguuuaaucagcaccacu

SEQ ID NO: 817454 - RNA, 19 nt, Artificial Sequence
  Description of Artificial Sequence: Synthetic oligonucleotide
  Sense strand starting at position 2155 of SEQ ID NO: 587777
ucaauaugagugugaccca

SEQ ID NO: 817455 - RNA, 19 nt, Artificial Sequence
  Description of Artificial Sequence: Synthetic oligonucleotide
  Antisense strand to SEQ ID NO: 817454
ugggucacacucauauuga

SEQ ID NO: 817456 - RNA, 19 nt, Artificial Sequence
  Description of Artificial Sequence: Synthetic oligonucleotide
  Sense strand starting at position 2164 of SEQ ID NO: 587777
gugugacccagucagaauu

SEQ ID NO: 817457 - RNA, 19 nt, Artificial Sequence
  Description of Artificial Sequence: Synthetic oligonucleotide
  Antisense strand to SEQ ID NO: 817456
aauucugacugggucacac

SEQ ID NO: 817458 - RNA, 19 nt, Artificial Sequence
  Description of Artificial Sequence: Synthetic oligonucleotide
  Sense strand starting at position 2295 of SEQ ID NO: 587777
ucauuaauuugguaggaca

SEQ ID NO: 817459 - RNA, 19 nt, Artificial Sequence
  Description of Artificial Sequence: Synthetic oligonucleotide
  Antisense strand to SEQ ID NO: 817458
uguccuaccaaauuaauga

SEQ ID NO: 817460 - RNA, 19 nt, Artificial Sequence
  Description of Artificial Sequence: Synthetic oligonucleotide
  Sense strand starting at position 2335 of SEQ ID NO: 587777
guguacgucguuucuuagu

SEQ ID NO: 817461 - RNA, 19 nt, Artificial Sequence
  Description of Artificial Sequence: Synthetic oligonucleotide
  Antisense strand to SEQ ID NO: 817460
acuaagaaacgacguacac

SEQ ID NO: 817462 - RNA, 19 nt, Artificial Sequence
  Description of Artificial Sequence: Synthetic oligonucleotide
  Sense strand starting at position 2427 of SEQ ID NO: 587777
cggcguagaauuugaauau

SEQ ID NO: 817463 - RNA, 19 nt, Artificial Sequence
  Description of Artificial Sequence: Synthetic oligonucleotide
  Antisense strand to SEQ ID NO: 817462
auauucaaauucuacgccg

SEQ ID NO: 817464 - RNA, 19 nt, Artificial Sequence
  Description of Artificial Sequence: Synthetic oligonucleotide
  Sense strand starting at position 2516 of SEQ ID NO: 587777
gacgucacgucauuuaugu

SEQ ID NO: 817465 - RNA, 19 nt, Artificial Sequence
  Description of Artificial Sequence: Synthetic oligonucleotide
  Antisense strand to SEQ ID NO: 817464
acauaaaugacgugacguc

SEQ ID NO: 817466 - RNA, 19 nt, Artificial Sequence
  Description of Artificial Sequence: Synthetic oligonucleotide
  Sense strand starting at position 2518 of SEQ ID NO: 587777
cgucacgucauuuauguga

SEQ ID NO: 817467 - RNA, 19 nt, Artificial Sequence
  Description of Artificial Sequence: Synthetic oligonucleotide
  Antisense strand to SEQ ID NO: 817466
ucacauaaaugacgugacg

SEQ ID NO: 817468 - RNA, 19 nt, Artificial Sequence
  Description of Artificial Sequence: Synthetic oligonucleotide
  Sense strand starting at position 2617 of SEQ ID NO: 587777
ucaagauuaguuggaucca

SEQ ID NO: 817469 - RNA, 19 nt, Artificial Sequence
  Description of Artificial Sequence: Synthetic oligonucleotide
  Antisense strand to SEQ ID NO: 817468
uggauccaacuaaucuuga

SEQ ID NO: 817470 - RNA, 19 nt, Artificial Sequence
  Description of Artificial Sequence: Synthetic oligonucleotide
  Sense strand starting at position 3213 of SEQ ID NO: 587777
gcauuuagcugauaauuuc

SEQ ID NO: 817471 - RNA, 19 nt, Artificial Sequence
  Description of Artificial Sequence: Synthetic oligonucleotide
  Antisense strand to SEQ ID NO: 817470
gaaauuaucagcuaaaugc

SEQ ID NO: 817472 - RNA, 19 nt, Artificial Sequence
  Description of Artificial Sequence: Synthetic oligonucleotide
  Sense strand starting at position 3258 of SEQ ID NO: 587777
cccuguuucccuuaaaugu

SEQ ID NO: 817473 - RNA, 19 nt, Artificial Sequence
  Description of Artificial Sequence: Synthetic oligonucleotide
  Antisense strand to SEQ ID NO: 817472
acauuuaagggaaacaggg

SEQ ID NO: 817474 - RNA, 19 nt, Artificial Sequence
  Description of Artificial Sequence: Synthetic oligonucleotide
  Sense strand starting at position 3424 of SEQ ID NO: 587777
ugccuuuauccagagaacu

SEQ ID NO: 817475 - RNA, 19 nt, Artificial Sequence
  Description of Artificial Sequence: Synthetic oligonucleotide
  Antisense strand to SEQ ID NO: 817474
aguucucuggauaaaggca

SEQ ID NO: 817476 - RNA, 19 nt, Artificial Sequence
  Description of Artificial Sequence: Synthetic oligonucleotide
  Sense strand starting at position 3458 of SEQ ID NO: 587777
uuugauaauuucugaggag

SEQ ID NO: 817477 - RNA, 19 nt, Artificial Sequence
  Description of Artificial Sequence: Synthetic oligonucleotide
  Antisense strand to SEQ ID NO: 817476
cuccucagaaauuaucaaa

SEQ ID NO: 817478 - RNA, 19 nt, Artificial Sequence
  Description of Artificial Sequence: Synthetic oligonucleotide
  Sense strand starting at position 3459 of SEQ ID NO: 587777
uugauaauuucugaggaga

SEQ ID NO: 817479 - RNA, 19 nt, Artificial Sequence
  Description of Artificial Sequence: Synthetic oligonucleotide
  Antisense strand to SEQ ID NO: 817478
ucuccucagaaauuaucaa

SEQ ID NO: 817480 - RNA, 19 nt, Artificial Sequence
  Description of Artificial Sequence: Synthetic oligonucleotide
  Sense strand starting at position 3461 of SEQ ID NO: 587777
gauaauuucugaggagaac

SEQ ID NO: 817481 - RNA, 19 nt, Artificial Sequence
  Description of Artificial Sequence: Synthetic oligonucleotide
  Antisense strand to SEQ ID NO: 817480
guucuccucagaaauuauc

SEQ ID NO: 817482 - RNA, 19 nt, Artificial Sequence
  Description of Artificial Sequence: Synthetic oligonucleotide
  Sense strand starting at position 3472 of SEQ ID NO: 587777
aggagaacagcagguaauu

SEQ ID NO: 817483 - RNA, 19 nt, Artificial Sequence
  Description of Artificial Sequence: Synthetic oligonucleotide
  Antisense strand to SEQ ID NO: 817482
aauuaccugcuguucuccu

SEQ ID NO: 817484 - RNA, 19 nt, Artificial Sequence
  Description of Artificial Sequence: Synthetic oligonucleotide
  Sense strand starting at position 3481 of SEQ ID NO: 587777
gcagguaauuagcugaaua

SEQ ID NO: 817485 - RNA, 19 nt, Artificial Sequence
  Description of Artificial Sequence: Synthetic oligonucleotide
  Antisense strand to SEQ ID NO: 817484
uauucagcuaauuaccugc

SEQ ID NO: 817486 - RNA, 19 nt, Artificial Sequence
  Description of Artificial Sequence: Synthetic oligonucleotide
  Sense strand starting at position 3483 of SEQ ID NO: 587777
agguaauuagcugaauauc

SEQ ID NO: 817487 - RNA, 19 nt, Artificial Sequence
  Description of Artificial Sequence: Synthetic oligonucleotide
  Antisense strand to SEQ ID NO: 817486
gauauucagcuaauuaccu

SEQ ID NO: 817488 - RNA, 19 nt, Artificial Sequence
  Description of Artificial Sequence: Synthetic oligonucleotide
  Sense strand starting at position 3495 of SEQ ID NO: 587777
gaauaucagcugcaguuau

SEQ ID NO: 817489 - RNA, 19 nt, Artificial Sequence
  Description of Artificial Sequence: Synthetic oligonucleotide
  Antisense strand to SEQ ID NO: 817488
auaacugcagcugauauuc

SEQ ID NO: 817490 - RNA, 19 nt, Artificial Sequence
  Description of Artificial Sequence: Synthetic oligonucleotide
  Sense strand starting at position 3518 of SEQ ID NO: 587777
uuggauuaauugccuacau

SEQ ID NO: 817491 - RNA, 19 nt, Artificial Sequence
  Description of Artificial Sequence: Synthetic oligonucleotide
  Antisense strand to SEQ ID NO: 817490
auguaggcaauuaauccaa

SEQ ID NO: 817492 - RNA, 19 nt, Artificial Sequence
  Description of Artificial Sequence: Synthetic oligonucleotide
  Sense strand starting at position 3519 of SEQ ID NO: 587777
uggauuaauugccuacauu

SEQ ID NO: 817493 - RNA, 19 nt, Artificial Sequence
  Description of Artificial Sequence: Synthetic oligonucleotide
  Antisense strand to SEQ ID NO: 817492
aauguaggcaauuaaucca

SEQ ID NO: 817494 - RNA, 19 nt, Artificial Sequence
  Description of Artificial Sequence: Synthetic oligonucleotide
  Sense strand starting at position 3520 of SEQ ID NO: 587777
ggauuaauugccuacauuc

SEQ ID NO: 817495 - RNA, 19 nt, Artificial Sequence
  Description of Artificial Sequence: Synthetic oligonucleotide
  Antisense strand to SEQ ID NO: 817494
gaauguaggcaauuaaucc

SEQ ID NO: 817496 - RNA, 19 nt, Artificial Sequence
  Description of Artificial Sequence: Synthetic oligonucleotide
  Sense strand starting at position 3581 of SEQ ID NO: 587777
cucuauugaugauucugga

SEQ ID NO: 817497 - RNA, 19 nt, Artificial Sequence
  Description of Artificial Sequence: Synthetic oligonucleotide
  Antisense strand to SEQ ID NO: 817496
uccagaaucaucaauagag

SEQ ID NO: 817498 - RNA, 19 nt, Artificial Sequence
  Description of Artificial Sequence: Synthetic oligonucleotide
  Sense strand starting at position 3589 of SEQ ID NO: 587777
augauucuggaguauguau

SEQ ID NO: 817499 - RNA, 19 nt, Artificial Sequence
  Description of Artificial Sequence: Synthetic oligonucleotide
  Antisense strand to SEQ ID NO: 817498
auacauacuccagaaucau

SEQ ID NO: 817500 - RNA, 19 nt, Artificial Sequence
  Description of Artificial Sequence: Synthetic oligonucleotide
  Sense strand starting at position 3591 of SEQ ID NO: 587777
gauucuggaguauguauau

SEQ ID NO: 817501 - RNA, 19 nt, Artificial Sequence
  Description of Artificial Sequence: Synthetic oligonucleotide
  Antisense strand to SEQ ID NO: 817500
auauacauacuccagaauc

SEQ ID NO: 817502 - RNA, 19 nt, Artificial Sequence
  Description of Artificial Sequence: Synthetic oligonucleotide
  Sense strand starting at position 3625 of SEQ ID NO: 587777
gagaaaggcuccucauggu

SEQ ID NO: 817503 - RNA, 19 nt, Artificial Sequence
  Description of Artificial Sequence: Synthetic oligonucleotide
  Antisense strand to SEQ ID NO: 817502
accaugaggagccuuucuc

SEQ ID NO: 817504 - RNA, 19 nt, Artificial Sequence
  Description of Artificial Sequence: Synthetic oligonucleotide
  Sense strand starting at position 3713 of SEQ ID NO: 587777
ggacgugccaaauacauau

SEQ ID NO: 817505 - RNA, 19 nt, Artificial Sequence
  Description of Artificial Sequence: Synthetic oligonucleotide
  Antisense strand to SEQ ID NO: 817504
auauguauuuggcacgucc

SEQ ID NO: 817506 - RNA, 19 nt, Artificial Sequence
  Description of Artificial Sequence: Synthetic oligonucleotide
  Sense strand starting at position 3810 of SEQ ID NO: 587777
ggauauauccugcagcaca

SEQ ID NO: 817507 - RNA, 19 nt, Artificial Sequence
  Description of Artificial Sequence: Synthetic oligonucleotide
  Antisense strand to SEQ ID NO: 817506
ugugcugcaggauauaucc

SEQ ID NO: 817508 - RNA, 19 nt, Artificial Sequence
  Description of Artificial Sequence: Synthetic oligonucleotide
  Sense strand starting at position 104 of SEQ ID NO: 587778
ucuucucaugucugagaug

SEQ ID NO: 817509 - RNA, 19 nt, Artificial Sequence
  Description of Artificial Sequence: Synthetic oligonucleotide
  Antisense strand to SEQ ID NO: 817508
caucucagacaugagaaga

SEQ ID NO: 817510 - RNA, 19 nt, Artificial Sequence
  Description of Artificial Sequence: Synthetic oligonucleotide
  Sense strand starting at position 124 of SEQ ID NO: 587778
cuccaucuugagcauggaa

SEQ ID NO: 817511 - RNA, 19 nt, Artificial Sequence
  Description of Artificial Sequence: Synthetic oligonucleotide
  Antisense strand to SEQ ID NO: 817510
uuccaugcucaagauggag

SEQ ID NO: 817512 - RNA, 19 nt, Artificial Sequence
  Description of Artificial Sequence: Synthetic oligonucleotide
  Sense strand starting at position 148 of SEQ ID NO: 587778
agcugaagucaucaacgga

SEQ ID NO: 817513 - RNA, 19 nt, Artificial Sequence
  Description of Artificial Sequence: Synthetic oligonucleotide
  Antisense strand to SEQ ID NO: 817512
uccguugaugacuucagcu

SEQ ID NO: 817514 - RNA, 19 nt, Artificial Sequence
  Description of Artificial Sequence: Synthetic oligonucleotide
  Sense strand starting at position 169 of SEQ ID NO: 587778
guaugauguacuggaucug

SEQ ID NO: 817515 - RNA, 19 nt, Artificial Sequence
  Description of Artificial Sequence: Synthetic oligonucleotide
  Antisense strand to SEQ ID NO: 817514
cagauccaguacaucauac

SEQ ID NO: 817516 - RNA, 19 nt, Artificial Sequence
  Description of Artificial Sequence: Synthetic oligonucleotide
  Sense strand starting at position 220 of SEQ ID NO: 587778
ggacaugcucagggacaau

SEQ ID NO: 817517 - RNA, 19 nt, Artificial Sequence
  Description of Artificial Sequence: Synthetic oligonucleotide
  Antisense strand to SEQ ID NO: 817516
auugucccugagcaugucc

SEQ ID NO: 817518 - RNA, 19 nt, Artificial Sequence
  Description of Artificial Sequence: Synthetic oligonucleotide
  Sense strand starting at position 385 of SEQ ID NO: 587778
gaaagacaguccucaguau

SEQ ID NO: 817519 - RNA, 19 nt, Artificial Sequence
  Description of Artificial Sequence: Synthetic oligonucleotide
  Antisense strand to SEQ ID NO: 817518
auacugaggacugucuuuc

SEQ ID NO: 817520 - RNA, 19 nt, Artificial Sequence
  Description of Artificial Sequence: Synthetic oligonucleotide
  Sense strand starting at position 620 of SEQ ID NO: 587778
cagggacugguaugaauuc

SEQ ID NO: 817521 - RNA, 19 nt, Artificial Sequence
  Description of Artificial Sequence: Synthetic oligonucleotide
  Antisense strand to SEQ ID NO: 817520
gaauucauaccagucccug

SEQ ID NO: 817522 - RNA, 19 nt, Artificial Sequence
  Description of Artificial Sequence: Synthetic oligonucleotide
  Sense strand starting at position 642 of SEQ ID NO: 587778
uguggagcuccugaaauug

SEQ ID NO: 817523 - RNA, 19 nt, Artificial Sequence
  Description of Artificial Sequence: Synthetic oligonucleotide
  Antisense strand to SEQ ID NO: 817522
caauuucaggagcuccaca

SEQ ID NO: 817524 - RNA, 19 nt, Artificial Sequence
  Description of Artificial Sequence: Synthetic oligonucleotide
  Sense strand starting at position 845 of SEQ ID NO: 587778
cauuuaugguaucaugaga

SEQ ID NO: 817525 - RNA, 19 nt, Artificial Sequence
  Description of Artificial Sequence: Synthetic oligonucleotide
  Antisense strand to SEQ ID NO: 817524
ucucaugauaccauaaaug

SEQ ID NO: 817526 - RNA, 19 nt, Artificial Sequence
  Description of Artificial Sequence: Synthetic oligonucleotide
  Sense strand starting at position 1282 of SEQ ID NO: 587778
gcccgaggacuuuaggaga

SEQ ID NO: 817527 - RNA, 19 nt, Artificial Sequence
  Description of Artificial Sequence: Synthetic oligonucleotide
  Antisense strand to SEQ ID NO: 817526
ucuccuaaaguccucgggc

SEQ ID NO: 817528 - RNA, 19 nt, Artificial Sequence
  Description of Artificial Sequence: Synthetic oligonucleotide
  Sense strand starting at position 1348 of SEQ ID NO: 587778
gugugaauggagugauaaa

SEQ ID NO: 817529 - RNA, 19 nt, Artificial Sequence
  Description of Artificial Sequence: Synthetic oligonucleotide
  Antisense strand to SEQ ID NO: 817528
uuuaucacuccauucacac

SEQ ID NO: 817530 - RNA, 19 nt, Artificial Sequence
  Description of Artificial Sequence: Synthetic oligonucleotide
  Sense strand starting at position 1476 of SEQ ID NO: 587778
gauuaacaaugggaagaaa

SEQ ID NO: 817531 - RNA, 19 nt, Artificial Sequence
  Description of Artificial Sequence: Synthetic oligonucleotide
  Antisense strand to SEQ ID NO: 817530
uuucuucccauuguuaauc

SEQ ID NO: 817532 - RNA, 19 nt, Artificial Sequence
  Description of Artificial Sequence: Synthetic oligonucleotide
  Sense strand starting at position 1808 of SEQ ID NO: 587778
ccgguaaccauacauggua

SEQ ID NO: 817533 - RNA, 19 nt, Artificial Sequence
  Description of Artificial Sequence: Synthetic oligonucleotide
  Antisense strand to SEQ ID NO: 817532
uaccauguaugguuaccgg

SEQ ID NO: 817534 - RNA, 19 nt, Artificial Sequence
  Description of Artificial Sequence: Synthetic oligonucleotide
  Sense strand starting at position 1911 of SEQ ID NO: 587778
uuuacucuaccuggagaaa

SEQ ID NO: 817535 - RNA, 19 nt, Artificial Sequence
  Description of Artificial Sequence: Synthetic oligonucleotide
  Antisense strand to SEQ ID NO: 817534
uuucuccagguagaguaaa

SEQ ID NO: 817536 - RNA, 19 nt, Artificial Sequence
  Description of Artificial Sequence: Synthetic oligonucleotide
  Sense strand starting at position 1998 of SEQ ID NO: 587778
uggugcuuugguagaguga

SEQ ID NO: 817537 - RNA, 19 nt, Artificial Sequence
  Description of Artificial Sequence: Synthetic oligonucleotide
  Antisense strand to SEQ ID NO: 817536
ucacucuaccaaagcacca

SEQ ID NO: 817538 - RNA, 19 nt, Artificial Sequence
  Description of Artificial Sequence: Synthetic oligonucleotide
  Sense strand starting at position 2039 of SEQ ID NO: 587778
ggucuuauaagagguggag

SEQ ID NO: 817539 - RNA, 19 nt, Artificial Sequence
  Description of Artificial Sequence: Synthetic oligonucleotide
  Antisense strand to SEQ ID NO: 817538
cuccaccucuuauaagacc

SEQ ID NO: 817540 - RNA, 19 nt, Artificial Sequence
  Description of Artificial Sequence: Synthetic oligonucleotide
  Sense strand starting at position 2077 of SEQ ID NO: 587778
ggaugaaugugauuggcua

SEQ ID NO: 817541 - RNA, 19 nt, Artificial Sequence
  Description of Artificial Sequence: Synthetic oligonucleotide
  Antisense strand to SEQ ID NO: 817540
uagccaaucacauucaucc

SEQ ID NO: 817542 - RNA, 19 nt, Artificial Sequence
  Description of Artificial Sequence: Synthetic oligonucleotide
  Sense strand starting at position 2078 of SEQ ID NO: 587778
gaugaaugugauuggcuag

SEQ ID NO: 817543 - RNA, 19 nt, Artificial Sequence
  Description of Artificial Sequence: Synthetic oligonucleotide
  Antisense strand to SEQ ID NO: 817542
cuagccaaucacauucauc

SEQ ID NO: 817544 - RNA, 19 nt, Artificial Sequence
  Description of Artificial Sequence: Synthetic oligonucleotide
  Sense strand starting at position 2095 of SEQ ID NO: 587778
aguggugcugauuaaacaa

SEQ ID NO: 817545 - RNA, 19 nt, Artificial Sequence
  Description of Artificial Sequence: Synthetic oligonucleotide
  Antisense strand to SEQ ID NO: 817544
uuguuuaaucagcaccacu

SEQ ID NO: 817546 - RNA, 19 nt, Artificial Sequence
  Description of Artificial Sequence: Synthetic oligonucleotide
  Sense strand starting at position 2154 of SEQ ID NO: 587778
ucaauaugagugugaccca

SEQ ID NO: 817547 - RNA, 19 nt, Artificial Sequence
  Description of Artificial Sequence: Synthetic oligonucleotide
  Antisense strand to SEQ ID NO: 817546
ugggucacacucauauuga

SEQ ID NO: 817548 - RNA, 19 nt, Artificial Sequence
  Description of Artificial Sequence: Synthetic oligonucleotide
  Sense strand starting at position 2163 of SEQ ID NO: 587778
gugugacccagucagaauu

SEQ ID NO: 817549 - RNA, 19 nt, Artificial Sequence
  Description of Artificial Sequence: Synthetic oligonucleotide
  Antisense strand to SEQ ID NO: 817548
aauucugacugggucacac

SEQ ID NO: 817550 - RNA, 19 nt, Artificial Sequence
  Description of Artificial Sequence: Synthetic oligonucleotide
  Sense strand starting at position 2294 of SEQ ID NO: 587778
ucauuaauuugguaggaca

SEQ ID NO: 817551 - RNA, 19 nt, Artificial Sequence
  Description of Artificial Sequence: Synthetic oligonucleotide
  Antisense strand to SEQ ID NO: 817550
uguccuaccaaauuaauga

SEQ ID NO: 817552 - RNA, 19 nt, Artificial Sequence
  Description of Artificial Sequence: Synthetic oligonucleotide
  Sense strand starting at position 2426 of SEQ ID NO: 587778
cggcguagaauuugaauau

SEQ ID NO: 817553 - RNA, 19 nt, Artificial Sequence
  Description of Artificial Sequence: Synthetic oligonucleotide
  Antisense strand to SEQ ID NO: 817552
auauucaaauucuacgccg

SEQ ID NO: 817554 - RNA, 19 nt, Artificial Sequence
  Description of Artificial Sequence: Synthetic oligonucleotide
  Sense strand starting at position 2517 of SEQ ID NO: 587778
cgucacgucauuuauguga

SEQ ID NO: 817555 - RNA, 19 nt, Artificial Sequence
  Description of Artificial Sequence: Synthetic oligonucleotide
  Antisense strand to SEQ ID NO: 817554
ucacauaaaugacgugacg

SEQ ID NO: 817556 - RNA, 19 nt, Artificial Sequence
  Description of Artificial Sequence: Synthetic oligonucleotide
  Sense strand starting at position 2520 of SEQ ID NO: 587778
cacgucauuuaugugaacu

SEQ ID NO: 817557 - RNA, 19 nt, Artificial Sequence
  Description of Artificial Sequence: Synthetic oligonucleotide
  Antisense strand to SEQ ID NO: 817556
aguucacauaaaugacgug

SEQ ID NO: 817558 - RNA, 19 nt, Artificial Sequence
  Description of Artificial Sequence: Synthetic oligonucleotide
  Sense strand starting at position 2616 of SEQ ID NO: 587778
ucaagauuaguuggaucca

SEQ ID NO: 817559 - RNA, 19 nt, Artificial Sequence
  Description of Artificial Sequence: Synthetic oligonucleotide
  Antisense strand to SEQ ID NO: 817558
uggauccaacuaaucuuga

SEQ ID NO: 817560 - RNA, 19 nt, Artificial Sequence
  Description of Artificial Sequence: Synthetic oligonucleotide
  Sense strand starting at position 3212 of SEQ ID NO: 587778
gcauuuagcugauaauuuc

SEQ ID NO: 817561 - RNA, 19 nt, Artificial Sequence
  Description of Artificial Sequence: Synthetic oligonucleotide
  Antisense strand to SEQ ID NO: 817560
gaaauuaucagcuaaaugc

SEQ ID NO: 817562 - RNA, 19 nt, Artificial Sequence
  Description of Artificial Sequence: Synthetic oligonucleotide
  Sense strand starting at position 3423 of SEQ ID NO: 587778
ugccuuuauccagagaacu

SEQ ID NO: 817563 - RNA, 19 nt, Artificial Sequence
  Description of Artificial Sequence: Synthetic oligonucleotide
  Antisense strand to SEQ ID NO: 817562
aguucucuggauaaaggca

SEQ ID NO: 817564 - RNA, 19 nt, Artificial Sequence
  Description of Artificial Sequence: Synthetic oligonucleotide
  Sense strand starting at position 3458 of SEQ ID NO: 587778
uugauaauuucugaggaga

SEQ ID NO: 817565 - RNA, 19 nt, Artificial Sequence
  Description of Artificial Sequence: Synthetic oligonucleotide
  Antisense strand to SEQ ID NO: 817564
ucuccucagaaauuaucaa

SEQ ID NO: 817566 - RNA, 19 nt, Artificial Sequence
  Description of Artificial Sequence: Synthetic oligonucleotide
  Sense strand starting at position 3460 of SEQ ID NO: 587778
gauaauuucugaggagaac

SEQ ID NO: 817567 - RNA, 19 nt, Artificial Sequence
  Description of Artificial Sequence: Synthetic oligonucleotide
  Antisense strand to SEQ ID NO: 817566
guucuccucagaaauuauc

SEQ ID NO: 817568 - RNA, 19 nt, Artificial Sequence
  Description of Artificial Sequence: Synthetic oligonucleotide
  Sense strand starting at position 3471 of SEQ ID NO: 587778
aggagaacagcagguaauu

SEQ ID NO: 817569 - RNA, 19 nt, Artificial Sequence
  Description of Artificial Sequence: Synthetic oligonucleotide
  Antisense strand to SEQ ID NO: 817568
aauuaccugcuguucuccu

SEQ ID NO: 817570 - RNA, 19 nt, Artificial Sequence
  Description of Artificial Sequence: Synthetic oligonucleotide
  Sense strand starting at position 3482 of SEQ ID NO: 587778
agguaauuagcugaauauc

SEQ ID NO: 817571 - RNA, 19 nt, Artificial Sequence
  Description of Artificial Sequence: Synthetic oligonucleotide
  Antisense strand to SEQ ID NO: 817570
gauauucagcuaauuaccu

SEQ ID NO: 817572 - RNA, 19 nt, Artificial Sequence
  Description of Artificial Sequence: Synthetic oligonucleotide
  Sense strand starting at position 3494 of SEQ ID NO: 587778
gaauaucagcugcaguuau

SEQ ID NO: 817573 - RNA, 19 nt, Artificial Sequence
  Description of Artificial Sequence: Synthetic oligonucleotide
  Antisense strand to SEQ ID NO: 817572
auaacugcagcugauauuc

SEQ ID NO: 817574 - RNA, 19 nt, Artificial Sequence
  Description of Artificial Sequence: Synthetic oligonucleotide
  Sense strand starting at position 3517 of SEQ ID NO: 587778
uuggauuaauugccuacau

SEQ ID NO: 817575 - RNA, 19 nt, Artificial Sequence
  Description of Artificial Sequence: Synthetic oligonucleotide
  Antisense strand to SEQ ID NO: 817574
auguaggcaauuaauccaa

SEQ ID NO: 817576 - RNA, 19 nt, Artificial Sequence
  Description of Artificial Sequence: Synthetic oligonucleotide
  Sense strand starting at position 3518 of SEQ ID NO: 587778
uggauuaauugccuacauu

SEQ ID NO: 817577 - RNA, 19 nt, Artificial Sequence
  Description of Artificial Sequence: Synthetic oligonucleotide
  Antisense strand to SEQ ID NO: 817576
aauguaggcaauuaaucca

SEQ ID NO: 817578 - RNA, 19 nt, Artificial Sequence
  Description of Artificial Sequence: Synthetic oligonucleotide
  Sense strand starting at position 3519 of SEQ ID NO: 587778
ggauuaauugccuacauuc

SEQ ID NO: 817579 - RNA, 19 nt, Artificial Sequence
  Description of Artificial Sequence: Synthetic oligonucleotide
  Antisense strand to SEQ ID NO: 817578
gaauguaggcaauuaaucc

SEQ ID NO: 817580 - RNA, 19 nt, Artificial Sequence
  Description of Artificial Sequence: Synthetic oligonucleotide
  Sense strand starting at position 3580 of SEQ ID NO: 587778
cucuauugaugauucugga

SEQ ID NO: 817581 - RNA, 19 nt, Artificial Sequence
  Description of Artificial Sequence: Synthetic oligonucleotide
  Antisense strand to SEQ ID NO: 817580
uccagaaucaucaauagag

SEQ ID NO: 817582 - RNA, 19 nt, Artificial Sequence
  Description of Artificial Sequence: Synthetic oligonucleotide
  Sense strand starting at position 3588 of SEQ ID NO: 587778
augauucuggaguauguau

SEQ ID NO: 817583 - RNA, 19 nt, Artificial Sequence
  Description of Artificial Sequence: Synthetic oligonucleotide
  Antisense strand to SEQ ID NO: 817582
auacauacuccagaaucau

SEQ ID NO: 817584 - RNA, 19 nt, Artificial Sequence
  Description of Artificial Sequence: Synthetic oligonucleotide
  Sense strand starting at position 3624 of SEQ ID NO: 587778
gagaaaggcuccucauggu

SEQ ID NO: 817585 - RNA, 19 nt, Artificial Sequence
  Description of Artificial Sequence: Synthetic oligonucleotide
  Antisense strand to SEQ ID NO: 817584
accaugaggagccuuucuc

SEQ ID NO: 817586 - RNA, 19 nt, Artificial Sequence
  Description of Artificial Sequence: Synthetic oligonucleotide
  Sense strand starting at position 3809 of SEQ ID NO: 587778
ggauauauccugcagcaca

SEQ ID NO: 817587 - RNA, 19 nt, Artificial Sequence
  Description of Artificial Sequence: Synthetic oligonucleotide
  Antisense strand to SEQ ID NO: 817586
ugugcugcaggauauaucc

SEQ ID NO: 817588 - RNA, 19 nt, Artificial Sequence
  Description of Artificial Sequence: Synthetic oligonucleotide
  Sense strand starting at position 375 of SEQ ID NO: 587779
gcugauucuguggaaagac

SEQ ID NO: 817589 - RNA, 19 nt, Artificial Sequence
  Description of Artificial Sequence: Synthetic oligonucleotide
  Antisense strand to SEQ ID NO: 817588
gucuuuccacagaaucagc

SEQ ID NO: 817590 - RNA, 19 nt, Artificial Sequence
  Description of Artificial Sequence: Synthetic oligonucleotide
  Sense strand starting at position 847 of SEQ ID NO: 587779
cauuuaugguaucaugaga

SEQ ID NO: 817591 - RNA, 19 nt, Artificial Sequence
  Description of Artificial Sequence: Synthetic oligonucleotide
  Antisense strand to SEQ ID NO: 817590
ucucaugauaccauaaaug

SEQ ID NO: 817592 - RNA, 19 nt, Artificial Sequence
  Description of Artificial Sequence: Synthetic oligonucleotide
  Sense strand starting at position 875 of SEQ ID NO: 587779
gacuuccaggcaugggaau

SEQ ID NO: 817593 - RNA, 19 nt, Artificial Sequence
  Description of Artificial Sequence: Synthetic oligonucleotide
  Antisense strand to SEQ ID NO: 817592
auucccaugccuggaaguc

SEQ ID NO: 817594 - RNA, 19 nt, Artificial Sequence
  Description of Artificial Sequence: Synthetic oligonucleotide
  Sense strand starting at position 1060 of SEQ ID NO: 587779
uuagucauccggcacacau

SEQ ID NO: 817595 - RNA, 19 nt, Artificial Sequence
  Description of Artificial Sequence: Synthetic oligonucleotide
  Antisense strand to SEQ ID NO: 817594
augugugccggaugacuaa

SEQ ID NO: 817596 - RNA, 19 nt, Artificial Sequence
  Description of Artificial Sequence: Synthetic oligonucleotide
  Sense strand starting at position 1203 of SEQ ID NO: 587779
ugugauaagacauggcgau

SEQ ID NO: 817597 - RNA, 19 nt, Artificial Sequence
  Description of Artificial Sequence: Synthetic oligonucleotide
  Antisense strand to SEQ ID NO: 817596
aucgccaugucuuaucaca

SEQ ID NO: 817598 - RNA, 19 nt, Artificial Sequence
  Description of Artificial Sequence: Synthetic oligonucleotide
  Sense strand starting at position 1284 of SEQ ID NO: 587779
gcccgaggacuuuaggaga

SEQ ID NO: 817599 - RNA, 19 nt, Artificial Sequence
  Description of Artificial Sequence: Synthetic oligonucleotide
  Antisense strand to SEQ ID NO: 817598
ucuccuaaaguccucgggc

SEQ ID NO: 817600 - RNA, 19 nt, Artificial Sequence
  Description of Artificial Sequence: Synthetic oligonucleotide
  Sense strand starting at position 1350 of SEQ ID NO: 587779
gugugaauggagugauaaa

SEQ ID NO: 817601 - RNA, 19 nt, Artificial Sequence
  Description of Artificial Sequence: Synthetic oligonucleotide
  Antisense strand to SEQ ID NO: 817600
uuuaucacuccauucacac

SEQ ID NO: 817602 - RNA, 19 nt, Artificial Sequence
  Description of Artificial Sequence: Synthetic oligonucleotide
  Sense strand starting at position 1478 of SEQ ID NO: 587779
gauuaacaaugggaagaaa

SEQ ID NO: 817603 - RNA, 19 nt, Artificial Sequence
  Description of Artificial Sequence: Synthetic oligonucleotide
  Antisense strand to SEQ ID NO: 817602
uuucuucccauuguuaauc

SEQ ID NO: 817604 - RNA, 19 nt, Artificial Sequence
  Description of Artificial Sequence: Synthetic oligonucleotide
  Sense strand starting at position 2000 of SEQ ID NO: 587779
uggugcuuugguagaguga

SEQ ID NO: 817605 - RNA, 19 nt, Artificial Sequence
  Description of Artificial Sequence: Synthetic oligonucleotide
  Antisense strand to SEQ ID NO: 817604
ucacucuaccaaagcacca

SEQ ID NO: 817606 - RNA, 19 nt, Artificial Sequence
  Description of Artificial Sequence: Synthetic oligonucleotide
  Sense strand starting at position 2041 of SEQ ID NO: 587779
ggucuuauaagagguggag

SEQ ID NO: 817607 - RNA, 19 nt, Artificial Sequence
  Description of Artificial Sequence: Synthetic oligonucleotide
  Antisense strand to SEQ ID NO: 817606
cuccaccucuuauaagacc

SEQ ID NO: 817608 - RNA, 19 nt, Artificial Sequence
  Description of Artificial Sequence: Synthetic oligonucleotide
  Sense strand starting at position 2079 of SEQ ID NO: 587779
ggaugaaugugauuggcua

SEQ ID NO: 817609 - RNA, 19 nt, Artificial Sequence
  Description of Artificial Sequence: Synthetic oligonucleotide
  Antisense strand to SEQ ID NO: 817608
uagccaaucacauucaucc

SEQ ID NO: 817610 - RNA, 19 nt, Artificial Sequence
  Description of Artificial Sequence: Synthetic oligonucleotide
  Sense strand starting at position 2080 of SEQ ID NO: 587779
gaugaaugugauuggcuag

SEQ ID NO: 817611 - RNA, 19 nt, Artificial Sequence
  Description of Artificial Sequence: Synthetic oligonucleotide
  Antisense strand to SEQ ID NO: 817610
cuagccaaucacauucauc

SEQ ID NO: 817612 - RNA, 19 nt, Artificial Sequence
  Description of Artificial Sequence: Synthetic oligonucleotide
  Sense strand starting at position 2097 of SEQ ID NO: 587779
aguggugcugauuaaacaa

SEQ ID NO: 817613 - RNA, 19 nt, Artificial Sequence
  Description of Artificial Sequence: Synthetic oligonucleotide
  Antisense strand to SEQ ID NO: 817612
uuguuuaaucagcaccacu

SEQ ID NO: 817614 - RNA, 19 nt, Artificial Sequence
  Description of Artificial Sequence: Synthetic oligonucleotide
  Sense strand starting at position 2156 of SEQ ID NO: 587779
ucaauaugagugugaccca

SEQ ID NO: 817615 - RNA, 19 nt, Artificial Sequence
  Description of Artificial Sequence: Synthetic oligonucleotide
  Antisense strand to SEQ ID NO: 817614
ugggucacacucauauuga

SEQ ID NO: 817616 - RNA, 19 nt, Artificial Sequence
  Description of Artificial Sequence: Synthetic oligonucleotide
  Sense strand starting at position 2165 of SEQ ID NO: 587779
gugugacccagucagaauu

SEQ ID NO: 817617 - RNA, 19 nt, Artificial Sequence
  Description of Artificial Sequence: Synthetic oligonucleotide
  Antisense strand to SEQ ID NO: 817616
aauucugacugggucacac

SEQ ID NO: 817618 - RNA, 19 nt, Artificial Sequence
  Description of Artificial Sequence: Synthetic oligonucleotide
  Sense strand starting at position 2296 of SEQ ID NO: 587779
ucauuaauuugguaggaca

SEQ ID NO: 817619 - RNA, 19 nt, Artificial Sequence
  Description of Artificial Sequence: Synthetic oligonucleotide
  Antisense strand to SEQ ID NO: 817618
uguccuaccaaauuaauga

SEQ ID NO: 817620 - RNA, 19 nt, Artificial Sequence
  Description of Artificial Sequence: Synthetic oligonucleotide
  Sense strand starting at position 2336 of SEQ ID NO: 587779
guguacgucguuucuuagu

SEQ ID NO: 817621 - RNA, 19 nt, Artificial Sequence
  Description of Artificial Sequence: Synthetic oligonucleotide
  Antisense strand to SEQ ID NO: 817620
acuaagaaacgacguacac

SEQ ID NO: 817622 - RNA, 19 nt, Artificial Sequence
  Description of Artificial Sequence: Synthetic oligonucleotide
  Sense strand starting at position 2428 of SEQ ID NO: 587779
cggcguagaauuugaauau

SEQ ID NO: 817623 - RNA, 19 nt, Artificial Sequence
  Description of Artificial Sequence: Synthetic oligonucleotide
  Antisense strand to SEQ ID NO: 817622
auauucaaauucuacgccg

SEQ ID NO: 817624 - RNA, 19 nt, Artificial Sequence
  Description of Artificial Sequence: Synthetic oligonucleotide
  Sense strand starting at position 2517 of SEQ ID NO: 587779
gacgucacgucauuuaugu

SEQ ID NO: 817625 - RNA, 19 nt, Artificial Sequence
  Description of Artificial Sequence: Synthetic oligonucleotide
  Antisense strand to SEQ ID NO: 817624
acauaaaugacgugacguc

SEQ ID NO: 817626 - RNA, 19 nt, Artificial Sequence
  Description of Artificial Sequence: Synthetic oligonucleotide
  Sense strand starting at position 2519 of SEQ ID NO: 587779
cgucacgucauuuauguga

SEQ ID NO: 817627 - RNA, 19 nt, Artificial Sequence
  Description of Artificial Sequence: Synthetic oligonucleotide
  Antisense strand to SEQ ID NO: 817626
ucacauaaaugacgugacg

SEQ ID NO: 817628 - RNA, 19 nt, Artificial Sequence
  Description of Artificial Sequence: Synthetic oligonucleotide
  Sense strand starting at position 2618 of SEQ ID NO: 587779
ucaagauuaguuggaucca

SEQ ID NO: 817629 - RNA, 19 nt, Artificial Sequence
  Description of Artificial Sequence: Synthetic oligonucleotide
  Antisense strand to SEQ ID NO: 817628
uggauccaacuaaucuuga

SEQ ID NO: 817630 - RNA, 19 nt, Artificial Sequence
  Description of Artificial Sequence: Synthetic oligonucleotide
  Sense strand starting at position 3214 of SEQ ID NO: 587779
gcauuuagcugauaauuuc

SEQ ID NO: 817631 - RNA, 19 nt, Artificial Sequence
  Description of Artificial Sequence: Synthetic oligonucleotide
  Antisense strand to SEQ ID NO: 817630
gaaauuaucagcuaaaugc

SEQ ID NO: 817632 - RNA, 19 nt, Artificial Sequence
  Description of Artificial Sequence: Synthetic oligonucleotide
  Sense strand starting at position 3259 of SEQ ID NO: 587779
cccuguuucccuuaaaugu

SEQ ID NO: 817633 - RNA, 19 nt, Artificial Sequence
  Description of Artificial Sequence: Synthetic oligonucleotide
  Antisense strand to SEQ ID NO: 817632
acauuuaagggaaacaggg

SEQ ID NO: 817634 - RNA, 19 nt, Artificial Sequence
  Description of Artificial Sequence: Synthetic oligonucleotide
  Sense strand starting at position 3425 of SEQ ID NO: 587779
ugccuuuauccagagaacu

SEQ ID NO: 817635 - RNA, 19 nt, Artificial Sequence
  Description of Artificial Sequence: Synthetic oligonucleotide
  Antisense strand to SEQ ID NO: 817634
aguucucuggauaaaggca

SEQ ID NO: 817636 - RNA, 19 nt, Artificial Sequence
  Description of Artificial Sequence: Synthetic oligonucleotide
  Sense strand starting at position 3459 of SEQ ID NO: 587779
uuugauaauuucugaggag

SEQ ID NO: 817637 - RNA, 19 nt, Artificial Sequence
  Description of Artificial Sequence: Synthetic oligonucleotide
  Antisense strand to SEQ ID NO: 817636
cuccucagaaauuaucaaa

SEQ ID NO: 817638 - RNA, 19 nt, Artificial Sequence
  Description of Artificial Sequence: Synthetic oligonucleotide
  Sense strand starting at position 3460 of SEQ ID NO: 587779
uugauaauuucugaggaga

SEQ ID NO: 817639 - RNA, 19 nt, Artificial Sequence
  Description of Artificial Sequence: Synthetic oligonucleotide
  Antisense strand to SEQ ID NO: 817638
ucuccucagaaauuaucaa

SEQ ID NO: 817640 - RNA, 19 nt, Artificial Sequence
  Description of Artificial Sequence: Synthetic oligonucleotide
  Sense strand starting at position 3462 of SEQ ID NO: 587779
gauaauuucugaggagaac

SEQ ID NO: 817641 - RNA, 19 nt, Artificial Sequence
  Description of Artificial Sequence: Synthetic oligonucleotide
  Antisense strand to SEQ ID NO: 817640
guucuccucagaaauuauc

SEQ ID NO: 817642 - RNA, 19 nt, Artificial Sequence
  Description of Artificial Sequence: Synthetic oligonucleotide
  Sense strand starting at position 3473 of SEQ ID NO: 587779
aggagaacagcagguaauu

SEQ ID NO: 817643 - RNA, 19 nt, Artificial Sequence
  Description of Artificial Sequence: Synthetic oligonucleotide
  Antisense strand to SEQ ID NO: 817642
aauuaccugcuguucuccu

SEQ ID NO: 817644 - RNA, 19 nt, Artificial Sequence
  Description of Artificial Sequence: Synthetic oligonucleotide
  Sense strand starting at position 3482 of SEQ ID NO: 587779
gcagguaauuagcugaaua

SEQ ID NO: 817645 - RNA, 19 nt, Artificial Sequence
  Description of Artificial Sequence: Synthetic oligonucleotide
  Antisense strand to SEQ ID NO: 817644
uauucagcuaauuaccugc

SEQ ID NO: 817646 - RNA, 19 nt, Artificial Sequence
  Description of Artificial Sequence: Synthetic oligonucleotide
  Sense strand starting at position 3484 of SEQ ID NO: 587779
agguaauuagcugaauauc

SEQ ID NO: 817647 - RNA, 19 nt, Artificial Sequence
  Description of Artificial Sequence: Synthetic oligonucleotide
  Antisense strand to SEQ ID NO: 817646
gauauucagcuaauuaccu

SEQ ID NO: 817648 - RNA, 19 nt, Artificial Sequence
  Description of Artificial Sequence: Synthetic oligonucleotide
  Sense strand starting at position 3496 of SEQ ID NO: 587779
gaauaucagcugcaguuau

SEQ ID NO: 817649 - RNA, 19 nt, Artificial Sequence
  Description of Artificial Sequence: Synthetic oligonucleotide
  Antisense strand to SEQ ID NO: 817648
auaacugcagcugauauuc

SEQ ID NO: 817650 - RNA, 19 nt, Artificial Sequence
  Description of Artificial Sequence: Synthetic oligonucleotide
  Sense strand starting at position 3519 of SEQ ID NO: 587779
uuggauuaauugccuacau

SEQ ID NO: 817651 - RNA, 19 nt, Artificial Sequence
  Description of Artificial Sequence: Synthetic oligonucleotide
  Antisense strand to SEQ ID NO: 817650
auguaggcaauuaauccaa

SEQ ID NO: 817652 - RNA, 19 nt, Artificial Sequence
  Description of Artificial Sequence: Synthetic oligonucleotide
  Sense strand starting at position 3520 of SEQ ID NO: 587779
uggauuaauugccuacauu

SEQ ID NO: 817653 - RNA, 19 nt, Artificial Sequence
  Description of Artificial Sequence: Synthetic oligonucleotide
  Antisense strand to SEQ ID NO: 817652
aauguaggcaauuaaucca

SEQ ID NO: 817654 - RNA, 19 nt, Artificial Sequence
  Description of Artificial Sequence: Synthetic oligonucleotide
  Sense strand starting at position 3521 of SEQ ID NO: 587779
ggauuaauugccuacauuc

SEQ ID NO: 817655 - RNA, 19 nt, Artificial Sequence
  Description of Artificial Sequence: Synthetic oligonucleotide
  Antisense strand to SEQ ID NO: 817654
gaauguaggcaauuaaucc

SEQ ID NO: 817656 - RNA, 19 nt, Artificial Sequence
  Description of Artificial Sequence: Synthetic oligonucleotide
  Sense strand starting at position 3582 of SEQ ID NO: 587779
cucuauugaugauucugga

SEQ ID NO: 817657 - RNA, 19 nt, Artificial Sequence
  Description of Artificial Sequence: Synthetic oligonucleotide
  Antisense strand to SEQ ID NO: 817656
uccagaaucaucaauagag

SEQ ID NO: 817658 - RNA, 19 nt, Artificial Sequence
  Description of Artificial Sequence: Synthetic oligonucleotide
  Sense strand starting at position 3590 of SEQ ID NO: 587779
augauucuggaguauguau

SEQ ID NO: 817659 - RNA, 19 nt, Artificial Sequence
  Description of Artificial Sequence: Synthetic oligonucleotide
  Antisense strand to SEQ ID NO: 817658
auacauacuccagaaucau

SEQ ID NO: 817660 - RNA, 19 nt, Artificial Sequence
  Description of Artificial Sequence: Synthetic oligonucleotide
  Sense strand starting at position 3592 of SEQ ID NO: 587779
gauucuggaguauguauau

SEQ ID NO: 817661 - RNA, 19 nt, Artificial Sequence
  Description of Artificial Sequence: Synthetic oligonucleotide
  Antisense strand to SEQ ID NO: 817660
auauacauacuccagaauc

SEQ ID NO: 817662 - RNA, 19 nt, Artificial Sequence
  Description of Artificial Sequence: Synthetic oligonucleotide
  Sense strand starting at position 3626 of SEQ ID NO: 587779
gagaaaggcuccucauggu

SEQ ID NO: 817663 - RNA, 19 nt, Artificial Sequence
  Description of Artificial Sequence: Synthetic oligonucleotide
  Antisense strand to SEQ ID NO: 817662
accaugaggagccuuucuc

SEQ ID NO: 817664 - RNA, 19 nt, Artificial Sequence
  Description of Artificial Sequence: Synthetic oligonucleotide
  Sense strand starting at position 3714 of SEQ ID NO: 587779
ggacgugccaaauacauau

SEQ ID NO: 817665 - RNA, 19 nt, Artificial Sequence
  Description of Artificial Sequence: Synthetic oligonucleotide
  Antisense strand to SEQ ID NO: 817664
auauguauuuggcacgucc

SEQ ID NO: 817666 - RNA, 19 nt, Artificial Sequence
  Description of Artificial Sequence: Synthetic oligonucleotide
  Sense strand starting at position 3811 of SEQ ID NO: 587779
ggauauauccugcagcaca

SEQ ID NO: 817667 - RNA, 19 nt, Artificial Sequence
  Description of Artificial Sequence: Synthetic oligonucleotide
  Antisense strand to SEQ ID NO: 817666
ugugcugcaggauauaucc

SEQ ID NO: 817668 - RNA, 19 nt, Artificial Sequence
  Description of Artificial Sequence: Synthetic oligonucleotide
  Sense strand starting at position 105 of SEQ ID NO: 587780
ucuucucaugucugagaug

SEQ ID NO: 817669 - RNA, 19 nt, Artificial Sequence
  Description of Artificial Sequence: Synthetic oligonucleotide
  Antisense strand to SEQ ID NO: 817668
caucucagacaugagaaga

SEQ ID NO: 817670 - RNA, 19 nt, Artificial Sequence
  Description of Artificial Sequence: Synthetic oligonucleotide
  Sense strand starting at position 125 of SEQ ID NO: 587780
cuccaucuugagcauggaa

SEQ ID NO: 817671 - RNA, 19 nt, Artificial Sequence
  Description of Artificial Sequence: Synthetic oligonucleotide
  Antisense strand to SEQ ID NO: 817670
uuccaugcucaagauggag

SEQ ID NO: 817672 - RNA, 19 nt, Artificial Sequence
  Description of Artificial Sequence: Synthetic oligonucleotide
  Sense strand starting at position 149 of SEQ ID NO: 587780
agcugaagucaucaacgga

SEQ ID NO: 817673 - RNA, 19 nt, Artificial Sequence
  Description of Artificial Sequence: Synthetic oligonucleotide
  Antisense strand to SEQ ID NO: 817672
uccguugaugacuucagcu

SEQ ID NO: 817674 - RNA, 19 nt, Artificial Sequence
  Description of Artificial Sequence: Synthetic oligonucleotide
  Sense strand starting at position 170 of SEQ ID NO: 587780
guaugauguacuggaucug

SEQ ID NO: 817675 - RNA, 19 nt, Artificial Sequence
  Description of Artificial Sequence: Synthetic oligonucleotide
  Antisense strand to SEQ ID NO: 817674
cagauccaguacaucauac

SEQ ID NO: 817676 - RNA, 19 nt, Artificial Sequence
  Description of Artificial Sequence: Synthetic oligonucleotide
  Sense strand starting at position 221 of SEQ ID NO: 587780
ggacaugcucagggacaau

SEQ ID NO: 817677 - RNA, 19 nt, Artificial Sequence
  Description of Artificial Sequence: Synthetic oligonucleotide
  Antisense strand to SEQ ID NO: 817676
auugucccugagcaugucc

SEQ ID NO: 817678 - RNA, 19 nt, Artificial Sequence
  Description of Artificial Sequence: Synthetic oligonucleotide
  Sense strand starting at position 386 of SEQ ID NO: 587780
gaaagacaguccucaguau

SEQ ID NO: 817679 - RNA, 19 nt, Artificial Sequence
  Description of Artificial Sequence: Synthetic oligonucleotide
  Antisense strand to SEQ ID NO: 817678
auacugaggacugucuuuc

SEQ ID NO: 817680 - RNA, 19 nt, Artificial Sequence
  Description of Artificial Sequence: Synthetic oligonucleotide
  Sense strand starting at position 621 of SEQ ID NO: 587780
cagggacugguaugaauuc

SEQ ID NO: 817681 - RNA, 19 nt, Artificial Sequence
  Description of Artificial Sequence: Synthetic oligonucleotide
  Antisense strand to SEQ ID NO: 817680
gaauucauaccagucccug

SEQ ID NO: 817682 - RNA, 19 nt, Artificial Sequence
  Description of Artificial Sequence: Synthetic oligonucleotide
  Sense strand starting at position 643 of SEQ ID NO: 587780
uguggagcuccugaaauug

SEQ ID NO: 817683 - RNA, 19 nt, Artificial Sequence
  Description of Artificial Sequence: Synthetic oligonucleotide
  Antisense strand to SEQ ID NO: 817682
caauuucaggagcuccaca

SEQ ID NO: 817684 - RNA, 19 nt, Artificial Sequence
  Description of Artificial Sequence: Synthetic oligonucleotide
  Sense strand starting at position 846 of SEQ ID NO: 587780
cauuuaugguaucaugaga

SEQ ID NO: 817685 - RNA, 19 nt, Artificial Sequence
  Description of Artificial Sequence: Synthetic oligonucleotide
  Antisense strand to SEQ ID NO: 817684
ucucaugauaccauaaaug

SEQ ID NO: 817686 - RNA, 19 nt, Artificial Sequence
  Description of Artificial Sequence: Synthetic oligonucleotide
  Sense strand starting at position 1283 of SEQ ID NO: 587780
gcccgaggacuuuaggaga

SEQ ID NO: 817687 - RNA, 19 nt, Artificial Sequence
  Description of Artificial Sequence: Synthetic oligonucleotide
  Antisense strand to SEQ ID NO: 817686
ucuccuaaaguccucgggc

SEQ ID NO: 817688 - RNA, 19 nt, Artificial Sequence
  Description of Artificial Sequence: Synthetic oligonucleotide
  Sense strand starting at position 1349 of SEQ ID NO: 587780
gugugaauggagugauaaa

SEQ ID NO: 817689 - RNA, 19 nt, Artificial Sequence
  Description of Artificial Sequence: Synthetic oligonucleotide
  Antisense strand to SEQ ID NO: 817688
uuuaucacuccauucacac

SEQ ID NO: 817690 - RNA, 19 nt, Artificial Sequence
  Description of Artificial Sequence: Synthetic oligonucleotide
  Sense strand starting at position 1477 of SEQ ID NO: 587780
gauuaacaaugggaagaaa

SEQ ID NO: 817691 - RNA, 19 nt, Artificial Sequence
  Description of Artificial Sequence: Synthetic oligonucleotide
  Antisense strand to SEQ ID NO: 817690
uuucuucccauuguuaauc

SEQ ID NO: 817692 - RNA, 19 nt, Artificial Sequence
  Description of Artificial Sequence: Synthetic oligonucleotide
  Sense strand starting at position 1809 of SEQ ID NO: 587780
ccgguaaccauacauggua

SEQ ID NO: 817693 - RNA, 19 nt, Artificial Sequence
  Description of Artificial Sequence: Synthetic oligonucleotide
  Antisense strand to SEQ ID NO: 817692
uaccauguaugguuaccgg

SEQ ID NO: 817694 - RNA, 19 nt, Artificial Sequence
  Description of Artificial Sequence: Synthetic oligonucleotide
  Sense strand starting at position 1912 of SEQ ID NO: 587780
uuuacucuaccuggagaaa

SEQ ID NO: 817695 - RNA, 19 nt, Artificial Sequence
  Description of Artificial Sequence: Synthetic oligonucleotide
  Antisense strand to SEQ ID NO: 817694
uuucuccagguagaguaaa

SEQ ID NO: 817696 - RNA, 19 nt, Artificial Sequence
  Description of Artificial Sequence: Synthetic oligonucleotide
  Sense strand starting at position 1999 of SEQ ID NO: 587780
uggugcuuugguagaguga

SEQ ID NO: 817697 - RNA, 19 nt, Artificial Sequence
  Description of Artificial Sequence: Synthetic oligonucleotide
  Antisense strand to SEQ ID NO: 817696
ucacucuaccaaagcacca

SEQ ID NO: 817698 - RNA, 19 nt, Artificial Sequence
  Description of Artificial Sequence: Synthetic oligonucleotide
  Sense strand starting at position 2040 of SEQ ID NO: 587780
ggucuuauaagagguggag

SEQ ID NO: 817699 - RNA, 19 nt, Artificial Sequence
  Description of Artificial Sequence: Synthetic oligonucleotide
  Antisense strand to SEQ ID NO: 817698
cuccaccucuuauaagacc

SEQ ID NO: 817700 - RNA, 19 nt, Artificial Sequence
  Description of Artificial Sequence: Synthetic oligonucleotide
  Sense strand starting at position 2078 of SEQ ID NO: 587780
ggaugaaugugauuggcua

SEQ ID NO: 817701 - RNA, 19 nt, Artificial Sequence
  Description of Artificial Sequence: Synthetic oligonucleotide
  Antisense strand to SEQ ID NO: 817700
uagccaaucacauucaucc

SEQ ID NO: 817702 - RNA, 19 nt, Artificial Sequence
  Description of Artificial Sequence: Synthetic oligonucleotide
  Sense strand starting at position 2079 of SEQ ID NO: 587780
gaugaaugugauuggcuag

SEQ ID NO: 817703 - RNA, 19 nt, Artificial Sequence
  Description of Artificial Sequence: Synthetic oligonucleotide
  Antisense strand to SEQ ID NO: 817702
cuagccaaucacauucauc

SEQ ID NO: 817704 - RNA, 19 nt, Artificial Sequence
  Description of Artificial Sequence: Synthetic oligonucleotide
  Sense strand starting at position 2096 of SEQ ID NO: 587780
aguggugcugauuaaacaa

SEQ ID NO: 817705 - RNA, 19 nt, Artificial Sequence
  Description of Artificial Sequence: Synthetic oligonucleotide
  Antisense strand to SEQ ID NO: 817704
uuguuuaaucagcaccacu

SEQ ID NO: 817706 - RNA, 19 nt, Artificial Sequence
  Description of Artificial Sequence: Synthetic oligonucleotide
  Sense strand starting at position 2155 of SEQ ID NO: 587780
ucaauaugagugugaccca

SEQ ID NO: 817707 - RNA, 19 nt, Artificial Sequence
  Description of Artificial Sequence: Synthetic oligonucleotide
  Antisense strand to SEQ ID NO: 817706
ugggucacacucauauuga

SEQ ID NO: 817708 - RNA, 19 nt, Artificial Sequence
  Description of Artificial Sequence: Synthetic oligonucleotide
  Sense strand starting at position 2164 of SEQ ID NO: 587780
gugugacccagucagaauu

SEQ ID NO: 817709 - RNA, 19 nt, Artificial Sequence
  Description of Artificial Sequence: Synthetic oligonucleotide
  Antisense strand to SEQ ID NO: 817708
aauucugacugggucacac

SEQ ID NO: 817710 - RNA, 19 nt, Artificial Sequence
  Description of Artificial Sequence: Synthetic oligonucleotide
  Sense strand starting at position 2295 of SEQ ID NO: 587780
ucauuaauuugguaggaca

SEQ ID NO: 817711 - RNA, 19 nt, Artificial Sequence
  Description of Artificial Sequence: Synthetic oligonucleotide
  Antisense strand to SEQ ID NO: 817710
uguccuaccaaauuaauga

SEQ ID NO: 817712 - RNA, 19 nt, Artificial Sequence
  Description of Artificial Sequence: Synthetic oligonucleotide
  Sense strand starting at position 2427 of SEQ ID NO: 587780
cggcguagaauuugaauau

SEQ ID NO: 817713 - RNA, 19 nt, Artificial Sequence
  Description of Artificial Sequence: Synthetic oligonucleotide
  Antisense strand to SEQ ID NO: 817712
auauucaaauucuacgccg

SEQ ID NO: 817714 - RNA, 19 nt, Artificial Sequence
  Description of Artificial Sequence: Synthetic oligonucleotide
  Sense strand starting at position 2518 of SEQ ID NO: 587780
cgucacgucauuuauguga

SEQ ID NO: 817715 - RNA, 19 nt, Artificial Sequence
  Description of Artificial Sequence: Synthetic oligonucleotide
  Antisense strand to SEQ ID NO: 817714
ucacauaaaugacgugacg

SEQ ID NO: 817716 - RNA, 19 nt, Artificial Sequence
  Description of Artificial Sequence: Synthetic oligonucleotide
  Sense strand starting at position 2521 of SEQ ID NO: 587780
cacgucauuuaugugaacu

SEQ ID NO: 817717 - RNA, 19 nt, Artificial Sequence
  Description of Artificial Sequence: Synthetic oligonucleotide
  Antisense strand to SEQ ID NO: 817716
aguucacauaaaugacgug

SEQ ID NO: 817718 - RNA, 19 nt, Artificial Sequence
  Description of Artificial Sequence: Synthetic oligonucleotide
  Sense strand starting at position 2617 of SEQ ID NO: 587780
ucaagauuaguuggaucca

SEQ ID NO: 817719 - RNA, 19 nt, Artificial Sequence
  Description of Artificial Sequence: Synthetic oligonucleotide
  Antisense strand to SEQ ID NO: 817718
uggauccaacuaaucuuga

SEQ ID NO: 817720 - RNA, 19 nt, Artificial Sequence
  Description of Artificial Sequence: Synthetic oligonucleotide
  Sense strand starting at position 3213 of SEQ ID NO: 587780
gcauuuagcugauaauuuc

SEQ ID NO: 817721 - RNA, 19 nt, Artificial Sequence
  Description of Artificial Sequence: Synthetic oligonucleotide
  Antisense strand to SEQ ID NO: 817720
gaaauuaucagcuaaaugc

SEQ ID NO: 817722 - RNA, 19 nt, Artificial Sequence
  Description of Artificial Sequence: Synthetic oligonucleotide
  Sense strand starting at position 3424 of SEQ ID NO: 587780
ugccuuuauccagagaacu

SEQ ID NO: 817723 - RNA, 19 nt, Artificial Sequence
  Description of Artificial Sequence: Synthetic oligonucleotide
  Antisense strand to SEQ ID NO: 817722
aguucucuggauaaaggca

SEQ ID NO: 817724 - RNA, 19 nt, Artificial Sequence
  Description of Artificial Sequence: Synthetic oligonucleotide
  Sense strand starting at position 3459 of SEQ ID NO: 587780
uugauaauuucugaggaga

SEQ ID NO: 817725 - RNA, 19 nt, Artificial Sequence
  Description of Artificial Sequence: Synthetic oligonucleotide
  Antisense strand to SEQ ID NO: 817724
ucuccucagaaauuaucaa

SEQ ID NO: 817726 - RNA, 19 nt, Artificial Sequence
  Description of Artificial Sequence: Synthetic oligonucleotide
  Sense strand starting at position 3461 of SEQ ID NO: 587780
gauaauuucugaggagaac

SEQ ID NO: 817727 - RNA, 19 nt, Artificial Sequence
  Description of Artificial Sequence: Synthetic oligonucleotide
  Antisense strand to SEQ ID NO: 817726
guucuccucagaaauuauc

SEQ ID NO: 817728 - RNA, 19 nt, Artificial Sequence
  Description of Artificial Sequence: Synthetic oligonucleotide
  Sense strand starting at position 3472 of SEQ ID NO: 587780
aggagaacagcagguaauu

SEQ ID NO: 817729 - RNA, 19 nt, Artificial Sequence
  Description of Artificial Sequence: Synthetic oligonucleotide
  Antisense strand to SEQ ID NO: 817728
aauuaccugcuguucuccu

SEQ ID NO: 817730 - RNA, 19 nt, Artificial Sequence
  Description of Artificial Sequence: Synthetic oligonucleotide
  Sense strand starting at position 3483 of SEQ ID NO: 587780
agguaauuagcugaauauc

SEQ ID NO: 817731 - RNA, 19 nt, Artificial Sequence
  Description of Artificial Sequence: Synthetic oligonucleotide
  Antisense strand to SEQ ID NO: 817730
gauauucagcuaauuaccu

SEQ ID NO: 817732 - RNA, 19 nt, Artificial Sequence
  Description of Artificial Sequence: Synthetic oligonucleotide
  Sense strand starting at position 3495 of SEQ ID NO: 587780
gaauaucagcugcaguuau

SEQ ID NO: 817733 - RNA, 19 nt, Artificial Sequence
  Description of Artificial Sequence: Synthetic oligonucleotide
  Antisense strand to SEQ ID NO: 817732
auaacugcagcugauauuc

SEQ ID NO: 817734 - RNA, 19 nt, Artificial Sequence
  Description of Artificial Sequence: Synthetic oligonucleotide
  Sense strand starting at position 3518 of SEQ ID NO: 587780
uuggauuaauugccuacau

SEQ ID NO: 817735 - RNA, 19 nt, Artificial Sequence
  Description of Artificial Sequence: Synthetic oligonucleotide
  Antisense strand to SEQ ID NO: 817734
auguaggcaauuaauccaa

SEQ ID NO: 817736 - RNA, 19 nt, Artificial Sequence
  Description of Artificial Sequence: Synthetic oligonucleotide
  Sense strand starting at position 3519 of SEQ ID NO: 587780
uggauuaauugccuacauu

SEQ ID NO: 817737 - RNA, 19 nt, Artificial Sequence
  Description of Artificial Sequence: Synthetic oligonucleotide
  Antisense strand to SEQ ID NO: 817736
aauguaggcaauuaaucca

SEQ ID NO: 817738 - RNA, 19 nt, Artificial Sequence
  Description of Artificial Sequence: Synthetic oligonucleotide
  Sense strand starting at position 3520 of SEQ ID NO: 587780
ggauuaauugccuacauuc

SEQ ID NO: 817739 - RNA, 19 nt, Artificial Sequence
  Description of Artificial Sequence: Synthetic oligonucleotide
  Antisense strand to SEQ ID NO: 817738
gaauguaggcaauuaaucc

SEQ ID NO: 817740 - RNA, 19 nt, Artificial Sequence
  Description of Artificial Sequence: Synthetic oligonucleotide
  Sense strand starting at position 3581 of SEQ ID NO: 587780
cucuauugaugauucugga

SEQ ID NO: 817741 - RNA, 19 nt, Artificial Sequence
  Description of Artificial Sequence: Synthetic oligonucleotide
  Antisense strand to SEQ ID NO: 817740
uccagaaucaucaauagag

SEQ ID NO: 817742 - RNA, 19 nt, Artificial Sequence
  Description of Artificial Sequence: Synthetic oligonucleotide
  Sense strand starting at position 3589 of SEQ ID NO: 587780
augauucuggaguauguau

SEQ ID NO: 817743 - RNA, 19 nt, Artificial Sequence
  Description of Artificial Sequence: Synthetic oligonucleotide
  Antisense strand to SEQ ID NO: 817742
auacauacuccagaaucau

SEQ ID NO: 817744 - RNA, 19 nt, Artificial Sequence
  Description of Artificial Sequence: Synthetic oligonucleotide
  Sense strand starting at position 3625 of SEQ ID NO: 587780
gagaaaggcuccucauggu

SEQ ID NO: 817745 - RNA, 19 nt, Artificial Sequence
  Description of Artificial Sequence: Synthetic oligonucleotide
  Antisense strand to SEQ ID NO: 817744
accaugaggagccuuucuc

SEQ ID NO: 817746 - RNA, 19 nt, Artificial Sequence
  Description of Artificial Sequence: Synthetic oligonucleotide
  Sense strand starting at position 3810 of SEQ ID NO: 587780
ggauauauccugcagcaca

SEQ ID NO: 817747 - RNA, 19 nt, Artificial Sequence
  Description of Artificial Sequence: Synthetic oligonucleotide
  Antisense strand to SEQ ID NO: 817746
ugugcugcaggauauaucc

SEQ ID NO: 817748 - RNA, 19 nt, Artificial Sequence
  Description of Artificial Sequence: Synthetic oligonucleotide
  Sense strand starting at position 69 of SEQ ID NO: 587781
uugcauccucguuacauca

SEQ ID NO: 817749 - RNA, 19 nt, Artificial Sequence
  Description of Artificial Sequence: Synthetic oligonucleotide
  Antisense strand to SEQ ID NO: 817748
ugauguaacgaggaugcaa

SEQ ID NO: 817750 - RNA, 19 nt, Artificial Sequence
  Description of Artificial Sequence: Synthetic oligonucleotide
  Sense strand starting at position 164 of SEQ ID NO: 587781
gugggcugauucccugauu

SEQ ID NO: 817751 - RNA, 19 nt, Artificial Sequence
  Description of Artificial Sequence: Synthetic oligonucleotide
  Antisense strand to SEQ ID NO: 817750
aaucagggaaucagcccac

SEQ ID NO: 817752 - RNA, 19 nt, Artificial Sequence
  Description of Artificial Sequence: Synthetic oligonucleotide
  Sense strand starting at position 167 of SEQ ID NO: 587781
ggcugauucccugauugaa

SEQ ID NO: 817753 - RNA, 19 nt, Artificial Sequence
  Description of Artificial Sequence: Synthetic oligonucleotide
  Antisense strand to SEQ ID NO: 817752
uucaaucagggaaucagcc

SEQ ID NO: 817754 - RNA, 19 nt, Artificial Sequence
  Description of Artificial Sequence: Synthetic oligonucleotide
  Sense strand starting at position 169 of SEQ ID NO: 587781
cugauucccugauugaaug

SEQ ID NO: 817755 - RNA, 19 nt, Artificial Sequence
  Description of Artificial Sequence: Synthetic oligonucleotide
  Antisense strand to SEQ ID NO: 817754
cauucaaucagggaaucag

SEQ ID NO: 817756 - RNA, 19 nt, Artificial Sequence
  Description of Artificial Sequence: Synthetic oligonucleotide
  Sense strand starting at position 170 of SEQ ID NO: 587781
ugauucccugauugaauga

SEQ ID NO: 817757 - RNA, 19 nt, Artificial Sequence
  Description of Artificial Sequence: Synthetic oligonucleotide
  Antisense strand to SEQ ID NO: 817756
ucauucaaucagggaauca

SEQ ID NO: 817758 - RNA, 19 nt, Artificial Sequence
  Description of Artificial Sequence: Synthetic oligonucleotide
  Sense strand starting at position 450 of SEQ ID NO: 587781
uugagaauguggguuuaua

SEQ ID NO: 817759 - RNA, 19 nt, Artificial Sequence
  Description of Artificial Sequence: Synthetic oligonucleotide
  Antisense strand to SEQ ID NO: 817758
uauaaacccacauucucaa

SEQ ID NO: 817760 - RNA, 19 nt, Artificial Sequence
  Description of Artificial Sequence: Synthetic oligonucleotide
  Sense strand starting at position 458 of SEQ ID NO: 587781
guggguuuauaaguaugga

SEQ ID NO: 817761 - RNA, 19 nt, Artificial Sequence
  Description of Artificial Sequence: Synthetic oligonucleotide
  Antisense strand to SEQ ID NO: 817760
uccauacuuauaaacccac

SEQ ID NO: 817762 - RNA, 19 nt, Artificial Sequence
  Description of Artificial Sequence: Synthetic oligonucleotide
  Sense strand starting at position 546 of SEQ ID NO: 587781
cugucucucugucugagau

SEQ ID NO: 817763 - RNA, 19 nt, Artificial Sequence
  Description of Artificial Sequence: Synthetic oligonucleotide
  Antisense strand to SEQ ID NO: 817762
aucucagacagagagacag

SEQ ID NO: 817764 - RNA, 19 nt, Artificial Sequence
  Description of Artificial Sequence: Synthetic oligonucleotide
  Sense strand starting at position 552 of SEQ ID NO: 587781
cucugucugagaugcagaa

SEQ ID NO: 817765 - RNA, 19 nt, Artificial Sequence
  Description of Artificial Sequence: Synthetic oligonucleotide
  Antisense strand to SEQ ID NO: 817764
uucugcaucucagacagag

SEQ ID NO: 817766 - RNA, 19 nt, Artificial Sequence
  Description of Artificial Sequence: Synthetic oligonucleotide
  Sense strand starting at position 653 of SEQ ID NO: 587781
agggaaagcuacuuaucgu

SEQ ID NO: 817767 - RNA, 19 nt, Artificial Sequence
  Description of Artificial Sequence: Synthetic oligonucleotide
  Antisense strand to SEQ ID NO: 817766
acgauaaguagcuuucccu

SEQ ID NO: 817768 - RNA, 19 nt, Artificial Sequence
  Description of Artificial Sequence: Synthetic oligonucleotide
  Sense strand starting at position 654 of SEQ ID NO: 587781
gggaaagcuacuuaucguu

SEQ ID NO: 817769 - RNA, 19 nt, Artificial Sequence
  Description of Artificial Sequence: Synthetic oligonucleotide
  Antisense strand to SEQ ID NO: 817768
aacgauaaguagcuuuccc

SEQ ID NO: 817770 - RNA, 19 nt, Artificial Sequence
  Description of Artificial Sequence: Synthetic oligonucleotide
  Sense strand starting at position 729 of SEQ ID NO: 587781
auaagacugauguguggau

SEQ ID NO: 817771 - RNA, 19 nt, Artificial Sequence
  Description of Artificial Sequence: Synthetic oligonucleotide
  Antisense strand to SEQ ID NO: 817770
auccacacaucagucuuau

SEQ ID NO: 817772 - RNA, 19 nt, Artificial Sequence
  Description of Artificial Sequence: Synthetic oligonucleotide
  Sense strand starting at position 731 of SEQ ID NO: 587781
aagacugauguguggauga

SEQ ID NO: 817773 - RNA, 19 nt, Artificial Sequence
  Description of Artificial Sequence: Synthetic oligonucleotide
  Antisense strand to SEQ ID NO: 817772
ucauccacacaucagucuu

SEQ ID NO: 817774 - RNA, 19 nt, Artificial Sequence
  Description of Artificial Sequence: Synthetic oligonucleotide
  Sense strand starting at position 888 of SEQ ID NO: 587781
acaacaucuguauggaauc

SEQ ID NO: 817775 - RNA, 19 nt, Artificial Sequence
  Description of Artificial Sequence: Synthetic oligonucleotide
  Antisense strand to SEQ ID NO: 817774
gauuccauacagauguugu

SEQ ID NO: 817776 - RNA, 19 nt, Artificial Sequence
  Description of Artificial Sequence: Synthetic oligonucleotide
  Sense strand starting at position 974 of SEQ ID NO: 587781
uucuaagugaucugagcga

SEQ ID NO: 817777 - RNA, 19 nt, Artificial Sequence
  Description of Artificial Sequence: Synthetic oligonucleotide
  Antisense strand to SEQ ID NO: 817776
ucgcucagaucacuuagaa

SEQ ID NO: 817778 - RNA, 19 nt, Artificial Sequence
  Description of Artificial Sequence: Synthetic oligonucleotide
  Sense strand starting at position 978 of SEQ ID NO: 587781
aagugaucugagcgaucac

SEQ ID NO: 817779 - RNA, 19 nt, Artificial Sequence
  Description of Artificial Sequence: Synthetic oligonucleotide
  Antisense strand to SEQ ID NO: 817778
gugaucgcucagaucacuu

SEQ ID NO: 817780 - RNA, 19 nt, Artificial Sequence
  Description of Artificial Sequence: Synthetic oligonucleotide
  Sense strand starting at position 989 of SEQ ID NO: 587781
gcgaucacgcauuagagga

SEQ ID NO: 817781 - RNA, 19 nt, Artificial Sequence
  Description of Artificial Sequence: Synthetic oligonucleotide
  Antisense strand to SEQ ID NO: 817780
uccucuaaugcgugaucgc

SEQ ID NO: 817782 - RNA, 19 nt, Artificial Sequence
  Description of Artificial Sequence: Synthetic oligonucleotide
  Sense strand starting at position 994 of SEQ ID NO: 587781
cacgcauuagaggagcaua

SEQ ID NO: 817783 - RNA, 19 nt, Artificial Sequence
  Description of Artificial Sequence: Synthetic oligonucleotide
  Antisense strand to SEQ ID NO: 817782
uaugcuccucuaaugcgug

SEQ ID NO: 817784 - RNA, 19 nt, Artificial Sequence
  Description of Artificial Sequence: Synthetic oligonucleotide
  Sense strand starting at position 1005 of SEQ ID NO: 587781
ggagcauauucugcugaug

SEQ ID NO: 817785 - RNA, 19 nt, Artificial Sequence
  Description of Artificial Sequence: Synthetic oligonucleotide
  Antisense strand to SEQ ID NO: 817784
caucagcagaauaugcucc

SEQ ID NO: 817786 - RNA, 19 nt, Artificial Sequence
  Description of Artificial Sequence: Synthetic oligonucleotide
  Sense strand starting at position 1176 of SEQ ID NO: 587781
ggcagacagcucuaucauu

SEQ ID NO: 817787 - RNA, 19 nt, Artificial Sequence
  Description of Artificial Sequence: Synthetic oligonucleotide
  Antisense strand to SEQ ID NO: 817786
aaugauagagcugucugcc

SEQ ID NO: 817788 - RNA, 19 nt, Artificial Sequence
  Description of Artificial Sequence: Synthetic oligonucleotide
  Sense strand starting at position 1234 of SEQ ID NO: 587781
cuuugaguuccucauccac

SEQ ID NO: 817789 - RNA, 19 nt, Artificial Sequence
  Description of Artificial Sequence: Synthetic oligonucleotide
  Antisense strand to SEQ ID NO: 817788
guggaugaggaacucaaag

SEQ ID NO: 817790 - RNA, 19 nt, Artificial Sequence
  Description of Artificial Sequence: Synthetic oligonucleotide
  Sense strand starting at position 1438 of SEQ ID NO: 587781
gccugacugagcuaggcau

SEQ ID NO: 817791 - RNA, 19 nt, Artificial Sequence
  Description of Artificial Sequence: Synthetic oligonucleotide
  Antisense strand to SEQ ID NO: 817790
augccuagcucagucaggc

SEQ ID NO: 817792 - RNA, 19 nt, Artificial Sequence
  Description of Artificial Sequence: Synthetic oligonucleotide
  Sense strand starting at position 1582 of SEQ ID NO: 587781
cugcuauuccucugaggau

SEQ ID NO: 817793 - RNA, 19 nt, Artificial Sequence
  Description of Artificial Sequence: Synthetic oligonucleotide
  Antisense strand to SEQ ID NO: 817792
auccucagaggaauagcag

SEQ ID NO: 817794 - RNA, 19 nt, Artificial Sequence
  Description of Artificial Sequence: Synthetic oligonucleotide
  Sense strand starting at position 1675 of SEQ ID NO: 587781
ggacaagugguuuggagaa

SEQ ID NO: 817795 - RNA, 19 nt, Artificial Sequence
  Description of Artificial Sequence: Synthetic oligonucleotide
  Antisense strand to SEQ ID NO: 817794
uucuccaaaccacuugucc

SEQ ID NO: 817796 - RNA, 19 nt, Artificial Sequence
  Description of Artificial Sequence: Synthetic oligonucleotide
  Sense strand starting at position 2089 of SEQ ID NO: 587781
gacuguagccacgaagacu

SEQ ID NO: 817797 - RNA, 19 nt, Artificial Sequence
  Description of Artificial Sequence: Synthetic oligonucleotide
  Antisense strand to SEQ ID NO: 817796
agucuucguggcuacaguc

SEQ ID NO: 817798 - RNA, 19 nt, Artificial Sequence
  Description of Artificial Sequence: Synthetic oligonucleotide
  Sense strand starting at position 2213 of SEQ ID NO: 587781
uccugaguguugcugauaa

SEQ ID NO: 817799 - RNA, 19 nt, Artificial Sequence
  Description of Artificial Sequence: Synthetic oligonucleotide
  Antisense strand to SEQ ID NO: 817798
uuaucagcaacacucagga

SEQ ID NO: 817800 - RNA, 19 nt, Artificial Sequence
  Description of Artificial Sequence: Synthetic oligonucleotide
  Sense strand starting at position 2215 of SEQ ID NO: 587781
cugaguguugcugauaaag

SEQ ID NO: 817801 - RNA, 19 nt, Artificial Sequence
  Description of Artificial Sequence: Synthetic oligonucleotide
  Antisense strand to SEQ ID NO: 817800
cuuuaucagcaacacucag

SEQ ID NO: 817802 - RNA, 19 nt, Artificial Sequence
  Description of Artificial Sequence: Synthetic oligonucleotide
  Sense strand starting at position 2340 of SEQ ID NO: 587781
cuuccaugucggcagauaa

SEQ ID NO: 817803 - RNA, 19 nt, Artificial Sequence
  Description of Artificial Sequence: Synthetic oligonucleotide
  Antisense strand to SEQ ID NO: 817802
uuaucugccgacauggaag

SEQ ID NO: 817804 - RNA, 19 nt, Artificial Sequence
  Description of Artificial Sequence: Synthetic oligonucleotide
  Sense strand starting at position 2621 of SEQ ID NO: 587781
ugaggcuucucugugaaug

SEQ ID NO: 817805 - RNA, 19 nt, Artificial Sequence
  Description of Artificial Sequence: Synthetic oligonucleotide
  Antisense strand to SEQ ID NO: 817804
cauucacagagaagccuca

SEQ ID NO: 817806 - RNA, 19 nt, Artificial Sequence
  Description of Artificial Sequence: Synthetic oligonucleotide
  Sense strand starting at position 2975 of SEQ ID NO: 587781
ccuggaugucagugacuca

SEQ ID NO: 817807 - RNA, 19 nt, Artificial Sequence
  Description of Artificial Sequence: Synthetic oligonucleotide
  Antisense strand to SEQ ID NO: 817806
ugagucacugacauccagg

SEQ ID NO: 817808 - RNA, 19 nt, Artificial Sequence
  Description of Artificial Sequence: Synthetic oligonucleotide
  Sense strand starting at position 3109 of SEQ ID NO: 587781
cgugguuggaagugacuua

SEQ ID NO: 817809 - RNA, 19 nt, Artificial Sequence
  Description of Artificial Sequence: Synthetic oligonucleotide
  Antisense strand to SEQ ID NO: 817808
uaagucacuuccaaccacg

SEQ ID NO: 817810 - RNA, 19 nt, Artificial Sequence
  Description of Artificial Sequence: Synthetic oligonucleotide
  Sense strand starting at position 3110 of SEQ ID NO: 587781
gugguuggaagugacuuau

SEQ ID NO: 817811 - RNA, 19 nt, Artificial Sequence
  Description of Artificial Sequence: Synthetic oligonucleotide
  Antisense strand to SEQ ID NO: 817810
auaagucacuuccaaccac

SEQ ID NO: 817812 - RNA, 19 nt, Artificial Sequence
  Description of Artificial Sequence: Synthetic oligonucleotide
  Sense strand starting at position 3119 of SEQ ID NO: 587781
agugacuuaugggcucaau

SEQ ID NO: 817813 - RNA, 19 nt, Artificial Sequence
  Description of Artificial Sequence: Synthetic oligonucleotide
  Antisense strand to SEQ ID NO: 817812
auugagcccauaagucacu

SEQ ID NO: 817814 - RNA, 19 nt, Artificial Sequence
  Description of Artificial Sequence: Synthetic oligonucleotide
  Sense strand starting at position 3230 of SEQ ID NO: 587781
uacugugaggcuuaaagug

SEQ ID NO: 817815 - RNA, 19 nt, Artificial Sequence
  Description of Artificial Sequence: Synthetic oligonucleotide
  Antisense strand to SEQ ID NO: 817814
cacuuuaagccucacagua

SEQ ID NO: 817816 - RNA, 19 nt, Artificial Sequence
  Description of Artificial Sequence: Synthetic oligonucleotide
  Sense strand starting at position 3315 of SEQ ID NO: 587781
ccaggacuucucugcucuu

SEQ ID NO: 817817 - RNA, 19 nt, Artificial Sequence
  Description of Artificial Sequence: Synthetic oligonucleotide
  Antisense strand to SEQ ID NO: 817816
aagagcagagaaguccugg

SEQ ID NO: 817818 - RNA, 19 nt, Artificial Sequence
  Description of Artificial Sequence: Synthetic oligonucleotide
  Sense strand starting at position 3675 of SEQ ID NO: 587781
ugcuauaugccagugcuuu

SEQ ID NO: 817819 - RNA, 19 nt, Artificial Sequence
  Description of Artificial Sequence: Synthetic oligonucleotide
  Antisense strand to SEQ ID NO: 817818
aaagcacuggcauauagca

SEQ ID NO: 817820 - RNA, 19 nt, Artificial Sequence
  Description of Artificial Sequence: Synthetic oligonucleotide
  Sense strand starting at position 3687 of SEQ ID NO: 587781
gugcuuucuccuucgcuca

SEQ ID NO: 817821 - RNA, 19 nt, Artificial Sequence
  Description of Artificial Sequence: Synthetic oligonucleotide
  Antisense strand to SEQ ID NO: 817820
ugagcgaaggagaaagcac

SEQ ID NO: 817822 - RNA, 19 nt, Artificial Sequence
  Description of Artificial Sequence: Synthetic oligonucleotide
  Sense strand starting at position 3819 of SEQ ID NO: 587781
gggcauauccacugcaaac

SEQ ID NO: 817823 - RNA, 19 nt, Artificial Sequence
  Description of Artificial Sequence: Synthetic oligonucleotide
  Antisense strand to SEQ ID NO: 817822
guuugcaguggauaugccc

SEQ ID NO: 817824 - RNA, 19 nt, Artificial Sequence
  Description of Artificial Sequence: Synthetic oligonucleotide
  Sense strand starting at position 3853 of SEQ ID NO: 587781
auagaaguaucugaacaaa

SEQ ID NO: 817825 - RNA, 19 nt, Artificial Sequence
  Description of Artificial Sequence: Synthetic oligonucleotide
  Antisense strand to SEQ ID NO: 817824
uuuguucagauacuucuau

SEQ ID NO: 817826 - RNA, 19 nt, Artificial Sequence
  Description of Artificial Sequence: Synthetic oligonucleotide
  Sense strand starting at position 3946 of SEQ ID NO: 587781
augacuuaggucuauucuu

SEQ ID NO: 817827 - RNA, 19 nt, Artificial Sequence
  Description of Artificial Sequence: Synthetic oligonucleotide
  Antisense strand to SEQ ID NO: 817826
aagaauagaccuaagucau

SEQ ID NO: 817828 - RNA, 19 nt, Artificial Sequence
  Description of Artificial Sequence: Synthetic oligonucleotide
  Sense strand starting at position 620 of SEQ ID NO: 587782
ugccuaaugcucuagaguc

SEQ ID NO: 817829 - RNA, 19 nt, Artificial Sequence
  Description of Artificial Sequence: Synthetic oligonucleotide
  Antisense strand to SEQ ID NO: 817828
gacucuagagcauuaggca

SEQ ID NO: 817830 - RNA, 19 nt, Artificial Sequence
  Description of Artificial Sequence: Synthetic oligonucleotide
  Sense strand starting at position 699 of SEQ ID NO: 587782
gcccuauccagauguccga

SEQ ID NO: 817831 - RNA, 19 nt, Artificial Sequence
  Description of Artificial Sequence: Synthetic oligonucleotide
  Antisense strand to SEQ ID NO: 817830
ucggacaucuggauagggc

SEQ ID NO: 817832 - RNA, 19 nt, Artificial Sequence
  Description of Artificial Sequence: Synthetic oligonucleotide
  Sense strand starting at position 706 of SEQ ID NO: 587782
ccagauguccgaggcagau

SEQ ID NO: 817833 - RNA, 19 nt, Artificial Sequence
  Description of Artificial Sequence: Synthetic oligonucleotide
  Antisense strand to SEQ ID NO: 817832
aucugccucggacaucugg

SEQ ID NO: 817834 - RNA, 19 nt, Artificial Sequence
  Description of Artificial Sequence: Synthetic oligonucleotide
  Sense strand starting at position 731 of SEQ ID NO: 587782
cccgcugagcgucagaaau

SEQ ID NO: 817835 - RNA, 19 nt, Artificial Sequence
  Description of Artificial Sequence: Synthetic oligonucleotide
  Antisense strand to SEQ ID NO: 817834
auuucugacgcucagcggg

SEQ ID NO: 817836 - RNA, 19 nt, Artificial Sequence
  Description of Artificial Sequence: Synthetic oligonucleotide
  Sense strand starting at position 869 of SEQ ID NO: 587782
gggacagaugcugggugau

SEQ ID NO: 817837 - RNA, 19 nt, Artificial Sequence
  Description of Artificial Sequence: Synthetic oligonucleotide
  Antisense strand to SEQ ID NO: 817836
aucacccagcaucuguccc

SEQ ID NO: 817838 - RNA, 19 nt, Artificial Sequence
  Description of Artificial Sequence: Synthetic oligonucleotide
  Sense strand starting at position 1289 of SEQ ID NO: 587782
cucagugccuccgaaaugu

SEQ ID NO: 817839 - RNA, 19 nt, Artificial Sequence
  Description of Artificial Sequence: Synthetic oligonucleotide
  Antisense strand to SEQ ID NO: 817838
acauuucggaggcacugag

SEQ ID NO: 817840 - RNA, 19 nt, Artificial Sequence
  Description of Artificial Sequence: Synthetic oligonucleotide
  Sense strand starting at position 1298 of SEQ ID NO: 587782
uccgaaauguugcccuguu

SEQ ID NO: 817841 - RNA, 19 nt, Artificial Sequence
  Description of Artificial Sequence: Synthetic oligonucleotide
  Antisense strand to SEQ ID NO: 817840
aacagggcaacauuucgga

SEQ ID NO: 817842 - RNA, 19 nt, Artificial Sequence
  Description of Artificial Sequence: Synthetic oligonucleotide
  Sense strand starting at position 1299 of SEQ ID NO: 587782
ccgaaauguugcccuguuu

SEQ ID NO: 817843 - RNA, 19 nt, Artificial Sequence
  Description of Artificial Sequence: Synthetic oligonucleotide
  Antisense strand to SEQ ID NO: 817842
aaacagggcaacauuucgg

SEQ ID NO: 817844 - RNA, 19 nt, Artificial Sequence
  Description of Artificial Sequence: Synthetic oligonucleotide
  Sense strand starting at position 1339 of SEQ ID NO: 587782
gugaccguguguuucagaa

SEQ ID NO: 817845 - RNA, 19 nt, Artificial Sequence
  Description of Artificial Sequence: Synthetic oligonucleotide
  Antisense strand to SEQ ID NO: 817844
uucugaaacacacggucac

SEQ ID NO: 817846 - RNA, 19 nt, Artificial Sequence
  Description of Artificial Sequence: Synthetic oligonucleotide
  Sense strand starting at position 1341 of SEQ ID NO: 587782
gaccguguguuucagaaga

SEQ ID NO: 817847 - RNA, 19 nt, Artificial Sequence
  Description of Artificial Sequence: Synthetic oligonucleotide
  Antisense strand to SEQ ID NO: 817846
ucuucugaaacacacgguc

SEQ ID NO: 817848 - RNA, 19 nt, Artificial Sequence
  Description of Artificial Sequence: Synthetic oligonucleotide
  Sense strand starting at position 1343 of SEQ ID NO: 587782
ccguguguuucagaagagg

SEQ ID NO: 817849 - RNA, 19 nt, Artificial Sequence
  Description of Artificial Sequence: Synthetic oligonucleotide
  Antisense strand to SEQ ID NO: 817848
ccucuucugaaacacacgg

SEQ ID NO: 817850 - RNA, 19 nt, Artificial Sequence
  Description of Artificial Sequence: Synthetic oligonucleotide
  Sense strand starting at position 2036 of SEQ ID NO: 587782
cggguuuccuggagccagu

SEQ ID NO: 817851 - RNA, 19 nt, Artificial Sequence
  Description of Artificial Sequence: Synthetic oligonucleotide
  Antisense strand to SEQ ID NO: 817850
acuggcuccaggaaacccg

SEQ ID NO: 817852 - RNA, 19 nt, Artificial Sequence
  Description of Artificial Sequence: Synthetic oligonucleotide
  Sense strand starting at position 2080 of SEQ ID NO: 587782
gagucuccucccugagcga

SEQ ID NO: 817853 - RNA, 19 nt, Artificial Sequence
  Description of Artificial Sequence: Synthetic oligonucleotide
  Antisense strand to SEQ ID NO: 817852
ucgcucagggaggagacuc

SEQ ID NO: 817854 - RNA, 19 nt, Artificial Sequence
  Description of Artificial Sequence: Synthetic oligonucleotide
  Sense strand starting at position 2187 of SEQ ID NO: 587782
gcugaaacguccucaagac

SEQ ID NO: 817855 - RNA, 19 nt, Artificial Sequence
  Description of Artificial Sequence: Synthetic oligonucleotide
  Antisense strand to SEQ ID NO: 817854
gucuugaggacguuucagc

SEQ ID NO: 817856 - RNA, 19 nt, Artificial Sequence
  Description of Artificial Sequence: Synthetic oligonucleotide
  Sense strand starting at position 2257 of SEQ ID NO: 587782
gggagacccuuucuccaga

SEQ ID NO: 817857 - RNA, 19 nt, Artificial Sequence
  Description of Artificial Sequence: Synthetic oligonucleotide
  Antisense strand to SEQ ID NO: 817856
ucuggagaaagggucuccc

SEQ ID NO: 817858 - RNA, 19 nt, Artificial Sequence
  Description of Artificial Sequence: Synthetic oligonucleotide
  Sense strand starting at position 2394 of SEQ ID NO: 587782
cagcgucacugacagauca

SEQ ID NO: 817859 - RNA, 19 nt, Artificial Sequence
  Description of Artificial Sequence: Synthetic oligonucleotide
  Antisense strand to SEQ ID NO: 817858
ugaucugucagugacgcug

SEQ ID NO: 817860 - RNA, 19 nt, Artificial Sequence
  Description of Artificial Sequence: Synthetic oligonucleotide
  Sense strand starting at position 2396 of SEQ ID NO: 587782
gcgucacugacagaucauu

SEQ ID NO: 817861 - RNA, 19 nt, Artificial Sequence
  Description of Artificial Sequence: Synthetic oligonucleotide
  Antisense strand to SEQ ID NO: 817860
aaugaucugucagugacgc

SEQ ID NO: 817862 - RNA, 19 nt, Artificial Sequence
  Description of Artificial Sequence: Synthetic oligonucleotide
  Sense strand starting at position 2568 of SEQ ID NO: 587782
guuggauagccucauuauc

SEQ ID NO: 817863 - RNA, 19 nt, Artificial Sequence
  Description of Artificial Sequence: Synthetic oligonucleotide
  Antisense strand to SEQ ID NO: 817862
gauaaugaggcuauccaac

SEQ ID NO: 817864 - RNA, 19 nt, Artificial Sequence
  Description of Artificial Sequence: Synthetic oligonucleotide
  Sense strand starting at position 2660 of SEQ ID NO: 587782
accaucuauugucucggaa

SEQ ID NO: 817865 - RNA, 19 nt, Artificial Sequence
  Description of Artificial Sequence: Synthetic oligonucleotide
  Antisense strand to SEQ ID NO: 817864
uuccgagacaauagauggu

SEQ ID NO: 817866 - RNA, 19 nt, Artificial Sequence
  Description of Artificial Sequence: Synthetic oligonucleotide
  Sense strand starting at position 2730 of SEQ ID NO: 587782
ccguauaacccagacauuc

SEQ ID NO: 817867 - RNA, 19 nt, Artificial Sequence
  Description of Artificial Sequence: Synthetic oligonucleotide
  Antisense strand to SEQ ID NO: 817866
gaaugucuggguuauacgg

SEQ ID NO: 817868 - RNA, 19 nt, Artificial Sequence
  Description of Artificial Sequence: Synthetic oligonucleotide
  Sense strand starting at position 2757 of SEQ ID NO: 587782
ugauaacucuugcaagcga

SEQ ID NO: 817869 - RNA, 19 nt, Artificial Sequence
  Description of Artificial Sequence: Synthetic oligonucleotide
  Antisense strand to SEQ ID NO: 817868
ucgcuugcaagaguuauca

SEQ ID NO: 817870 - RNA, 19 nt, Artificial Sequence
  Description of Artificial Sequence: Synthetic oligonucleotide
  Sense strand starting at position 2772 of SEQ ID NO: 587782
gcgauugccaaccagaaga

SEQ ID NO: 817871 - RNA, 19 nt, Artificial Sequence
  Description of Artificial Sequence: Synthetic oligonucleotide
  Antisense strand to SEQ ID NO: 817870
ucuucugguuggcaaucgc

SEQ ID NO: 817872 - RNA, 19 nt, Artificial Sequence
  Description of Artificial Sequence: Synthetic oligonucleotide
  Sense strand starting at position 3171 of SEQ ID NO: 587782
gaacuuuagcugcaaacga

SEQ ID NO: 817873 - RNA, 19 nt, Artificial Sequence
  Description of Artificial Sequence: Synthetic oligonucleotide
  Antisense strand to SEQ ID NO: 817872
ucguuugcagcuaaaguuc

SEQ ID NO: 817874 - RNA, 19 nt, Artificial Sequence
  Description of Artificial Sequence: Synthetic oligonucleotide
  Sense strand starting at position 3250 of SEQ ID NO: 587782
ggcuguauggccucuguuu

SEQ ID NO: 817875 - RNA, 19 nt, Artificial Sequence
  Description of Artificial Sequence: Synthetic oligonucleotide
  Antisense strand to SEQ ID NO: 817874
aaacagaggccauacagcc

SEQ ID NO: 817876 - RNA, 19 nt, Artificial Sequence
  Description of Artificial Sequence: Synthetic oligonucleotide
  Sense strand starting at position 3560 of SEQ ID NO: 587782
cuaaguguugguggcagua

SEQ ID NO: 817877 - RNA, 19 nt, Artificial Sequence
  Description of Artificial Sequence: Synthetic oligonucleotide
  Antisense strand to SEQ ID NO: 817876
uacugccaccaacacuuag

SEQ ID NO: 817878 - RNA, 19 nt, Artificial Sequence
  Description of Artificial Sequence: Synthetic oligonucleotide
  Sense strand starting at position 3577 of SEQ ID NO: 587782
uagcuaugguccucuagua

SEQ ID NO: 817879 - RNA, 19 nt, Artificial Sequence
  Description of Artificial Sequence: Synthetic oligonucleotide
  Antisense strand to SEQ ID NO: 817878
uacuagaggaccauagcua

SEQ ID NO: 817880 - RNA, 19 nt, Artificial Sequence
  Description of Artificial Sequence: Synthetic oligonucleotide
  Sense strand starting at position 3639 of SEQ ID NO: 587782
uagcuaugguccucuagag

SEQ ID NO: 817881 - RNA, 19 nt, Artificial Sequence
  Description of Artificial Sequence: Synthetic oligonucleotide
  Antisense strand to SEQ ID NO: 817880
cucuagaggaccauagcua

SEQ ID NO: 817882 - RNA, 19 nt, Artificial Sequence
  Description of Artificial Sequence: Synthetic oligonucleotide
  Sense strand starting at position 44 of SEQ ID NO: 587783
acauuaagauuggcaaauc

SEQ ID NO: 817883 - RNA, 19 nt, Artificial Sequence
  Description of Artificial Sequence: Synthetic oligonucleotide
  Antisense strand to SEQ ID NO: 817882
gauuugccaaucuuaaugu

SEQ ID NO: 817884 - RNA, 19 nt, Artificial Sequence
  Description of Artificial Sequence: Synthetic oligonucleotide
  Sense strand starting at position 114 of SEQ ID NO: 587783
cacggaauuuggccguaau

SEQ ID NO: 817885 - RNA, 19 nt, Artificial Sequence
  Description of Artificial Sequence: Synthetic oligonucleotide
  Antisense strand to SEQ ID NO: 817884
auuacggccaaauuccgug

SEQ ID NO: 817886 - RNA, 19 nt, Artificial Sequence
  Description of Artificial Sequence: Synthetic oligonucleotide
  Sense strand starting at position 115 of SEQ ID NO: 587783
acggaauuuggccguaaua

SEQ ID NO: 817887 - RNA, 19 nt, Artificial Sequence
  Description of Artificial Sequence: Synthetic oligonucleotide
  Antisense strand to SEQ ID NO: 817886
uauuacggccaaauuccgu

SEQ ID NO: 817888 - RNA, 19 nt, Artificial Sequence
  Description of Artificial Sequence: Synthetic oligonucleotide
  Sense strand starting at position 181 of SEQ ID NO: 587783
ucaggauaagagugcugau

SEQ ID NO: 817889 - RNA, 19 nt, Artificial Sequence
  Description of Artificial Sequence: Synthetic oligonucleotide
  Antisense strand to SEQ ID NO: 817888
aucagcacucuuauccuga

SEQ ID NO: 817890 - RNA, 19 nt, Artificial Sequence
  Description of Artificial Sequence: Synthetic oligonucleotide
  Sense strand starting at position 276 of SEQ ID NO: 587783
gugucuaggcauggaaaua

SEQ ID NO: 817891 - RNA, 19 nt, Artificial Sequence
  Description of Artificial Sequence: Synthetic oligonucleotide
  Antisense strand to SEQ ID NO: 817890
uauuuccaugccuagacac

SEQ ID NO: 817892 - RNA, 19 nt, Artificial Sequence
  Description of Artificial Sequence: Synthetic oligonucleotide
  Sense strand starting at position 277 of SEQ ID NO: 587783
ugucuaggcauggaaauau

SEQ ID NO: 817893 - RNA, 19 nt, Artificial Sequence
  Description of Artificial Sequence: Synthetic oligonucleotide
  Antisense strand to SEQ ID NO: 817892
auauuuccaugccuagaca

SEQ ID NO: 817894 - RNA, 19 nt, Artificial Sequence
  Description of Artificial Sequence: Synthetic oligonucleotide
  Sense strand starting at position 307 of SEQ ID NO: 587783
gcuagaaggcucugaaaga

SEQ ID NO: 817895 - RNA, 19 nt, Artificial Sequence
  Description of Artificial Sequence: Synthetic oligonucleotide
  Antisense strand to SEQ ID NO: 817894
ucuuucagagccuucuagc

SEQ ID NO: 817896 - RNA, 19 nt, Artificial Sequence
  Description of Artificial Sequence: Synthetic oligonucleotide
  Sense strand starting at position 358 of SEQ ID NO: 587783
acuguagcgacagaaguua

SEQ ID NO: 817897 - RNA, 19 nt, Artificial Sequence
  Description of Artificial Sequence: Synthetic oligonucleotide
  Antisense strand to SEQ ID NO: 817896
uaacuucugucgcuacagu

SEQ ID NO: 817898 - RNA, 19 nt, Artificial Sequence
  Description of Artificial Sequence: Synthetic oligonucleotide
  Sense strand starting at position 418 of SEQ ID NO: 587783
uggcaaagccucuaagcua

SEQ ID NO: 817899 - RNA, 19 nt, Artificial Sequence
  Description of Artificial Sequence: Synthetic oligonucleotide
  Antisense strand to SEQ ID NO: 817898
uagcuuagaggcuuugcca

SEQ ID NO: 817900 - RNA, 19 nt, Artificial Sequence
  Description of Artificial Sequence: Synthetic oligonucleotide
  Sense strand starting at position 531 of SEQ ID NO: 587783
aucacuuguggauggauau

SEQ ID NO: 817901 - RNA, 19 nt, Artificial Sequence
  Description of Artificial Sequence: Synthetic oligonucleotide
  Antisense strand to SEQ ID NO: 817900
auauccauccacaagugau

SEQ ID NO: 817902 - RNA, 19 nt, Artificial Sequence
  Description of Artificial Sequence: Synthetic oligonucleotide
  Sense strand starting at position 532 of SEQ ID NO: 587783
ucacuuguggauggauaua

SEQ ID NO: 817903 - RNA, 19 nt, Artificial Sequence
  Description of Artificial Sequence: Synthetic oligonucleotide
  Antisense strand to SEQ ID NO: 817902
uauauccauccacaaguga

SEQ ID NO: 817904 - RNA, 19 nt, Artificial Sequence
  Description of Artificial Sequence: Synthetic oligonucleotide
  Sense strand starting at position 616 of SEQ ID NO: 587783
gcauuugcuuaacugguga

SEQ ID NO: 817905 - RNA, 19 nt, Artificial Sequence
  Description of Artificial Sequence: Synthetic oligonucleotide
  Antisense strand to SEQ ID NO: 817904
ucaccaguuaagcaaaugc

SEQ ID NO: 817906 - RNA, 19 nt, Artificial Sequence
  Description of Artificial Sequence: Synthetic oligonucleotide
  Sense strand starting at position 695 of SEQ ID NO: 587783
accucuugguuuguaaaua

SEQ ID NO: 817907 - RNA, 19 nt, Artificial Sequence
  Description of Artificial Sequence: Synthetic oligonucleotide
  Antisense strand to SEQ ID NO: 817906
uauuuacaaaccaagaggu

SEQ ID NO: 817908 - RNA, 19 nt, Artificial Sequence
  Description of Artificial Sequence: Synthetic oligonucleotide
  Sense strand starting at position 703 of SEQ ID NO: 587783
guuuguaaauacucucaga

SEQ ID NO: 817909 - RNA, 19 nt, Artificial Sequence
  Description of Artificial Sequence: Synthetic oligonucleotide
  Antisense strand to SEQ ID NO: 817908
ucugagaguauuuacaaac

SEQ ID NO: 817910 - RNA, 19 nt, Artificial Sequence
  Description of Artificial Sequence: Synthetic oligonucleotide
  Sense strand starting at position 882 of SEQ ID NO: 587783
ccagaagcuuccucugaga

SEQ ID NO: 817911 - RNA, 19 nt, Artificial Sequence
  Description of Artificial Sequence: Synthetic oligonucleotide
  Antisense strand to SEQ ID NO: 817910
ucucagaggaagcuucugg

SEQ ID NO: 817912 - RNA, 19 nt, Artificial Sequence
  Description of Artificial Sequence: Synthetic oligonucleotide
  Sense strand starting at position 884 of SEQ ID NO: 587783
agaagcuuccucugagauc

SEQ ID NO: 817913 - RNA, 19 nt, Artificial Sequence
  Description of Artificial Sequence: Synthetic oligonucleotide
  Antisense strand to SEQ ID NO: 817912
gaucucagaggaagcuucu

SEQ ID NO: 817914 - RNA, 19 nt, Artificial Sequence
  Description of Artificial Sequence: Synthetic oligonucleotide
  Sense strand starting at position 1042 of SEQ ID NO: 587783
aggcauuuguugccagaau

SEQ ID NO: 817915 - RNA, 19 nt, Artificial Sequence
  Description of Artificial Sequence: Synthetic oligonucleotide
  Antisense strand to SEQ ID NO: 817914
auucuggcaacaaaugccu

SEQ ID NO: 817916 - RNA, 19 nt, Artificial Sequence
  Description of Artificial Sequence: Synthetic oligonucleotide
  Sense strand starting at position 1116 of SEQ ID NO: 587783
acucaagaguuauucugga

SEQ ID NO: 817917 - RNA, 19 nt, Artificial Sequence
  Description of Artificial Sequence: Synthetic oligonucleotide
  Antisense strand to SEQ ID NO: 817916
uccagaauaacucuugagu

SEQ ID NO: 817918 - RNA, 19 nt, Artificial Sequence
  Description of Artificial Sequence: Synthetic oligonucleotide
  Sense strand starting at position 1121 of SEQ ID NO: 587783
agaguuauucuggagcgga

SEQ ID NO: 817919 - RNA, 19 nt, Artificial Sequence
  Description of Artificial Sequence: Synthetic oligonucleotide
  Antisense strand to SEQ ID NO: 817918
uccgcuccagaauaacucu

SEQ ID NO: 817920 - RNA, 19 nt, Artificial Sequence
  Description of Artificial Sequence: Synthetic oligonucleotide
  Sense strand starting at position 1161 of SEQ ID NO: 587783
gagaaccagugucuagaaa

SEQ ID NO: 817921 - RNA, 19 nt, Artificial Sequence
  Description of Artificial Sequence: Synthetic oligonucleotide
  Antisense strand to SEQ ID NO: 817920
uuucuagacacugguucuc

SEQ ID NO: 817922 - RNA, 19 nt, Artificial Sequence
  Description of Artificial Sequence: Synthetic oligonucleotide
  Sense strand starting at position 1339 of SEQ ID NO: 587783
agaacaucauucgccagaa

SEQ ID NO: 817923 - RNA, 19 nt, Artificial Sequence
  Description of Artificial Sequence: Synthetic oligonucleotide
  Antisense strand to SEQ ID NO: 817922
uucuggcgaaugauguucu

SEQ ID NO: 817924 - RNA, 19 nt, Artificial Sequence
  Description of Artificial Sequence: Synthetic oligonucleotide
  Sense strand starting at position 1430 of SEQ ID NO: 587783
ugggaauugcaccgaauaa

SEQ ID NO: 817925 - RNA, 19 nt, Artificial Sequence
  Description of Artificial Sequence: Synthetic oligonucleotide
  Antisense strand to SEQ ID NO: 817924
uuauucggugcaauuccca

SEQ ID NO: 817926 - RNA, 19 nt, Artificial Sequence
  Description of Artificial Sequence: Synthetic oligonucleotide
  Sense strand starting at position 1460 of SEQ ID NO: 587783
ccguuugcucgcucaauuc

SEQ ID NO: 817927 - RNA, 19 nt, Artificial Sequence
  Description of Artificial Sequence: Synthetic oligonucleotide
  Antisense strand to SEQ ID NO: 817926
gaauugagcgagcaaacgg

SEQ ID NO: 817928 - RNA, 19 nt, Artificial Sequence
  Description of Artificial Sequence: Synthetic oligonucleotide
  Sense strand starting at position 1511 of SEQ ID NO: 587783
uucugacagaaacgugaua

SEQ ID NO: 817929 - RNA, 19 nt, Artificial Sequence
  Description of Artificial Sequence: Synthetic oligonucleotide
  Antisense strand to SEQ ID NO: 817928
uaucacguuucugucagaa

SEQ ID NO: 817930 - RNA, 19 nt, Artificial Sequence
  Description of Artificial Sequence: Synthetic oligonucleotide
  Sense strand starting at position 1513 of SEQ ID NO: 587783
cugacagaaacgugauagu

SEQ ID NO: 817931 - RNA, 19 nt, Artificial Sequence
  Description of Artificial Sequence: Synthetic oligonucleotide
  Antisense strand to SEQ ID NO: 817930
acuaucacguuucugucag

SEQ ID NO: 817932 - RNA, 19 nt, Artificial Sequence
  Description of Artificial Sequence: Synthetic oligonucleotide
  Sense strand starting at position 1522 of SEQ ID NO: 587783
acgugauagucccuaaaua

SEQ ID NO: 817933 - RNA, 19 nt, Artificial Sequence
  Description of Artificial Sequence: Synthetic oligonucleotide
  Antisense strand to SEQ ID NO: 817932
uauuuagggacuaucacgu

SEQ ID NO: 817934 - RNA, 19 nt, Artificial Sequence
  Description of Artificial Sequence: Synthetic oligonucleotide
  Sense strand starting at position 1523 of SEQ ID NO: 587783
cgugauagucccuaaauac

SEQ ID NO: 817935 - RNA, 19 nt, Artificial Sequence
  Description of Artificial Sequence: Synthetic oligonucleotide
  Antisense strand to SEQ ID NO: 817934
guauuuagggacuaucacg

SEQ ID NO: 817936 - RNA, 19 nt, Artificial Sequence
  Description of Artificial Sequence: Synthetic oligonucleotide
  Sense strand starting at position 2871 of SEQ ID NO: 587783
guccguuaaguagauccaa

SEQ ID NO: 817937 - RNA, 19 nt, Artificial Sequence
  Description of Artificial Sequence: Synthetic oligonucleotide
  Antisense strand to SEQ ID NO: 817936
uuggaucuacuuaacggac

SEQ ID NO: 817938 - RNA, 19 nt, Artificial Sequence
  Description of Artificial Sequence: Synthetic oligonucleotide
  Sense strand starting at position 2936 of SEQ ID NO: 587783
guauguguuaccgccuuau

SEQ ID NO: 817939 - RNA, 19 nt, Artificial Sequence
  Description of Artificial Sequence: Synthetic oligonucleotide
  Antisense strand to SEQ ID NO: 817938
auaaggcgguaacacauac

SEQ ID NO: 817940 - RNA, 19 nt, Artificial Sequence
  Description of Artificial Sequence: Synthetic oligonucleotide
  Sense strand starting at position 2939 of SEQ ID NO: 587783
uguguuaccgccuuauugu

SEQ ID NO: 817941 - RNA, 19 nt, Artificial Sequence
  Description of Artificial Sequence: Synthetic oligonucleotide
  Antisense strand to SEQ ID NO: 817940
acaauaaggcgguaacaca

SEQ ID NO: 817942 - RNA, 19 nt, Artificial Sequence
  Description of Artificial Sequence: Synthetic oligonucleotide
  Sense strand starting at position 3014 of SEQ ID NO: 587783
gacugacuuggccaagcuu

SEQ ID NO: 817943 - RNA, 19 nt, Artificial Sequence
  Description of Artificial Sequence: Synthetic oligonucleotide
  Antisense strand to SEQ ID NO: 817942
aagcuuggccaagucaguc

SEQ ID NO: 817944 - RNA, 19 nt, Artificial Sequence
  Description of Artificial Sequence: Synthetic oligonucleotide
  Sense strand starting at position 3026 of SEQ ID NO: 587783
caagcuuagagaugggagu

SEQ ID NO: 817945 - RNA, 19 nt, Artificial Sequence
  Description of Artificial Sequence: Synthetic oligonucleotide
  Antisense strand to SEQ ID NO: 817944
acucccaucucuaagcuug

SEQ ID NO: 817946 - RNA, 19 nt, Artificial Sequence
  Description of Artificial Sequence: Synthetic oligonucleotide
  Sense strand starting at position 3219 of SEQ ID NO: 587783
aguguaugccuuuauacaa

SEQ ID NO: 817947 - RNA, 19 nt, Artificial Sequence
  Description of Artificial Sequence: Synthetic oligonucleotide
  Antisense strand to SEQ ID NO: 817946
uuguauaaaggcauacacu

SEQ ID NO: 817948 - RNA, 19 nt, Artificial Sequence
  Description of Artificial Sequence: Synthetic oligonucleotide
  Sense strand starting at position 3327 of SEQ ID NO: 587783
cagucacuugggcauugau

SEQ ID NO: 817949 - RNA, 19 nt, Artificial Sequence
  Description of Artificial Sequence: Synthetic oligonucleotide
  Antisense strand to SEQ ID NO: 817948
aucaaugcccaagugacug

SEQ ID NO: 817950 - RNA, 19 nt, Artificial Sequence
  Description of Artificial Sequence: Synthetic oligonucleotide
  Sense strand starting at position 3330 of SEQ ID NO: 587783
ucacuugggcauugauaug

SEQ ID NO: 817951 - RNA, 19 nt, Artificial Sequence
  Description of Artificial Sequence: Synthetic oligonucleotide
  Antisense strand to SEQ ID NO: 817950
cauaucaaugcccaaguga

SEQ ID NO: 817952 - RNA, 19 nt, Artificial Sequence
  Description of Artificial Sequence: Synthetic oligonucleotide
  Sense strand starting at position 3711 of SEQ ID NO: 587783
gcauauuucucguuuguga

SEQ ID NO: 817953 - RNA, 19 nt, Artificial Sequence
  Description of Artificial Sequence: Synthetic oligonucleotide
  Antisense strand to SEQ ID NO: 817952
ucacaaacgagaaauaugc

SEQ ID NO: 817954 - RNA, 19 nt, Artificial Sequence
  Description of Artificial Sequence: Synthetic oligonucleotide
  Sense strand starting at position 3713 of SEQ ID NO: 587783
auauuucucguuugugauc

SEQ ID NO: 817955 - RNA, 19 nt, Artificial Sequence
  Description of Artificial Sequence: Synthetic oligonucleotide
  Antisense strand to SEQ ID NO: 817954
gaucacaaacgagaaauau

SEQ ID NO: 817956 - RNA, 19 nt, Artificial Sequence
  Description of Artificial Sequence: Synthetic oligonucleotide
  Sense strand starting at position 3887 of SEQ ID NO: 587783
cuggccuuuaccugggaaa

SEQ ID NO: 817957 - RNA, 19 nt, Artificial Sequence
  Description of Artificial Sequence: Synthetic oligonucleotide
  Antisense strand to SEQ ID NO: 817956
uuucccagguaaaggccag

SEQ ID NO: 817958 - RNA, 19 nt, Artificial Sequence
  Description of Artificial Sequence: Synthetic oligonucleotide
  Sense strand starting at position 3888 of SEQ ID NO: 587783
uggccuuuaccugggaaau

SEQ ID NO: 817959 - RNA, 19 nt, Artificial Sequence
  Description of Artificial Sequence: Synthetic oligonucleotide
  Antisense strand to SEQ ID NO: 817958
auuucccagguaaaggcca

SEQ ID NO: 817960 - RNA, 19 nt, Artificial Sequence
  Description of Artificial Sequence: Synthetic oligonucleotide
  Sense strand starting at position 3889 of SEQ ID NO: 587783
ggccuuuaccugggaaauu

SEQ ID NO: 817961 - RNA, 19 nt, Artificial Sequence
  Description of Artificial Sequence: Synthetic oligonucleotide
  Antisense strand to SEQ ID NO: 817960
aauuucccagguaaaggcc

SEQ ID NO: 817962 - RNA, 19 nt, Artificial Sequence
  Description of Artificial Sequence: Synthetic oligonucleotide
  Sense strand starting at position 38 of SEQ ID NO: 587784
gggugaugaaagcauccuu

SEQ ID NO: 817963 - RNA, 19 nt, Artificial Sequence
  Description of Artificial Sequence: Synthetic oligonucleotide
  Antisense strand to SEQ ID NO: 817962
aaggaugcuuucaucaccc

SEQ ID NO: 817964 - RNA, 19 nt, Artificial Sequence
  Description of Artificial Sequence: Synthetic oligonucleotide
  Sense strand starting at position 43 of SEQ ID NO: 587784
augaaagcauccuuaagac

SEQ ID NO: 817965 - RNA, 19 nt, Artificial Sequence
  Description of Artificial Sequence: Synthetic oligonucleotide
  Antisense strand to SEQ ID NO: 817964
gucuuaaggaugcuuucau

SEQ ID NO: 817966 - RNA, 19 nt, Artificial Sequence
  Description of Artificial Sequence: Synthetic oligonucleotide
  Sense strand starting at position 52 of SEQ ID NO: 587784
uccuuaagacagugguaac

SEQ ID NO: 817967 - RNA, 19 nt, Artificial Sequence
  Description of Artificial Sequence: Synthetic oligonucleotide
  Antisense strand to SEQ ID NO: 817966
guuaccacugucuuaagga

SEQ ID NO: 817968 - RNA, 19 nt, Artificial Sequence
  Description of Artificial Sequence: Synthetic oligonucleotide
  Sense strand starting at position 443 of SEQ ID NO: 587784
guuaacuguccuuagcaac

SEQ ID NO: 817969 - RNA, 19 nt, Artificial Sequence
  Description of Artificial Sequence: Synthetic oligonucleotide
  Antisense strand to SEQ ID NO: 817968
guugcuaaggacaguuaac

SEQ ID NO: 817970 - RNA, 19 nt, Artificial Sequence
  Description of Artificial Sequence: Synthetic oligonucleotide
  Sense strand starting at position 493 of SEQ ID NO: 587784
cugacauccugcccuugaa

SEQ ID NO: 817971 - RNA, 19 nt, Artificial Sequence
  Description of Artificial Sequence: Synthetic oligonucleotide
  Antisense strand to SEQ ID NO: 817970
uucaagggcaggaugucag

SEQ ID NO: 817972 - RNA, 19 nt, Artificial Sequence
  Description of Artificial Sequence: Synthetic oligonucleotide
  Sense strand starting at position 496 of SEQ ID NO: 587784
acauccugcccuugaaaug

SEQ ID NO: 817973 - RNA, 19 nt, Artificial Sequence
  Description of Artificial Sequence: Synthetic oligonucleotide
  Antisense strand to SEQ ID NO: 817972
cauuucaagggcaggaugu

SEQ ID NO: 817974 - RNA, 19 nt, Artificial Sequence
  Description of Artificial Sequence: Synthetic oligonucleotide
  Sense strand starting at position 618 of SEQ ID NO: 587784
cgaaguuaggucuaccaaa

SEQ ID NO: 817975 - RNA, 19 nt, Artificial Sequence
  Description of Artificial Sequence: Synthetic oligonucleotide
  Antisense strand to SEQ ID NO: 817974
uuugguagaccuaacuucg

SEQ ID NO: 817976 - RNA, 19 nt, Artificial Sequence
  Description of Artificial Sequence: Synthetic oligonucleotide
  Sense strand starting at position 715 of SEQ ID NO: 587784
agucaauaucaauggcaga

SEQ ID NO: 817977 - RNA, 19 nt, Artificial Sequence
  Description of Artificial Sequence: Synthetic oligonucleotide
  Antisense strand to SEQ ID NO: 817976
ucugccauugauauugacu

SEQ ID NO: 817978 - RNA, 19 nt, Artificial Sequence
  Description of Artificial Sequence: Synthetic oligonucleotide
  Sense strand starting at position 1117 of SEQ ID NO: 587784
acugaauaaucauuaucga

SEQ ID NO: 817979 - RNA, 19 nt, Artificial Sequence
  Description of Artificial Sequence: Synthetic oligonucleotide
  Antisense strand to SEQ ID NO: 817978
ucgauaaugauuauucagu

SEQ ID NO: 817980 - RNA, 19 nt, Artificial Sequence
  Description of Artificial Sequence: Synthetic oligonucleotide
  Sense strand starting at position 1132 of SEQ ID NO: 587784
ucgacaguauaaccuauaa

SEQ ID NO: 817981 - RNA, 19 nt, Artificial Sequence
  Description of Artificial Sequence: Synthetic oligonucleotide
  Antisense strand to SEQ ID NO: 817980
uuauagguuauacugucga

SEQ ID NO: 817982 - RNA, 19 nt, Artificial Sequence
  Description of Artificial Sequence: Synthetic oligonucleotide
  Sense strand starting at position 1239 of SEQ ID NO: 587784
uuccaagaacuacguuaau

SEQ ID NO: 817983 - RNA, 19 nt, Artificial Sequence
  Description of Artificial Sequence: Synthetic oligonucleotide
  Antisense strand to SEQ ID NO: 817982
auuaacguaguucuuggaa

SEQ ID NO: 817984 - RNA, 19 nt, Artificial Sequence
  Description of Artificial Sequence: Synthetic oligonucleotide
  Sense strand starting at position 1294 of SEQ ID NO: 587784
aaacaaagcccuuggaguu

SEQ ID NO: 817985 - RNA, 19 nt, Artificial Sequence
  Description of Artificial Sequence: Synthetic oligonucleotide
  Antisense strand to SEQ ID NO: 817984
aacuccaagggcuuuguuu

SEQ ID NO: 817986 - RNA, 19 nt, Artificial Sequence
  Description of Artificial Sequence: Synthetic oligonucleotide
  Sense strand starting at position 1497 of SEQ ID NO: 587784
acaagaggcuuauucuaau

SEQ ID NO: 817987 - RNA, 19 nt, Artificial Sequence
  Description of Artificial Sequence: Synthetic oligonucleotide
  Antisense strand to SEQ ID NO: 817986
auuagaauaagccucuugu

SEQ ID NO: 817988 - RNA, 19 nt, Artificial Sequence
  Description of Artificial Sequence: Synthetic oligonucleotide
  Sense strand starting at position 1601 of SEQ ID NO: 587784
cugcccaguccagaugauu

SEQ ID NO: 817989 - RNA, 19 nt, Artificial Sequence
  Description of Artificial Sequence: Synthetic oligonucleotide
  Antisense strand to SEQ ID NO: 817988
aaucaucuggacugggcag

SEQ ID NO: 817990 - RNA, 19 nt, Artificial Sequence
  Description of Artificial Sequence: Synthetic oligonucleotide
  Sense strand starting at position 1664 of SEQ ID NO: 587784
aucugugugcaucagacuu

SEQ ID NO: 817991 - RNA, 19 nt, Artificial Sequence
  Description of Artificial Sequence: Synthetic oligonucleotide
  Antisense strand to SEQ ID NO: 817990
aagucugaugcacacagau

SEQ ID NO: 817992 - RNA, 19 nt, Artificial Sequence
  Description of Artificial Sequence: Synthetic oligonucleotide
  Sense strand starting at position 1672 of SEQ ID NO: 587784
gcaucagacuuucuggauc

SEQ ID NO: 817993 - RNA, 19 nt, Artificial Sequence
  Description of Artificial Sequence: Synthetic oligonucleotide
  Antisense strand to SEQ ID NO: 817992
gauccagaaagucugaugc

SEQ ID NO: 817994 - RNA, 19 nt, Artificial Sequence
  Description of Artificial Sequence: Synthetic oligonucleotide
  Sense strand starting at position 1734 of SEQ ID NO: 587784
ggauaaauaugucccuaga

SEQ ID NO: 817995 - RNA, 19 nt, Artificial Sequence
  Description of Artificial Sequence: Synthetic oligonucleotide
  Antisense strand to SEQ ID NO: 817994
ucuagggacauauuuaucc

SEQ ID NO: 817996 - RNA, 19 nt, Artificial Sequence
  Description of Artificial Sequence: Synthetic oligonucleotide
  Sense strand starting at position 1736 of SEQ ID NO: 587784
auaaauaugucccuagaug

SEQ ID NO: 817997 - RNA, 19 nt, Artificial Sequence
  Description of Artificial Sequence: Synthetic oligonucleotide
  Antisense strand to SEQ ID NO: 817996
caucuagggacauauuuau

SEQ ID NO: 817998 - RNA, 19 nt, Artificial Sequence
  Description of Artificial Sequence: Synthetic oligonucleotide
  Sense strand starting at position 1832 of SEQ ID NO: 587784
ugacaauaugauggcaaua

SEQ ID NO: 817999 - RNA, 19 nt, Artificial Sequence
  Description of Artificial Sequence: Synthetic oligonucleotide
  Antisense strand to SEQ ID NO: 817998
uauugccaucauauuguca

SEQ ID NO: 818000 - RNA, 19 nt, Artificial Sequence
  Description of Artificial Sequence: Synthetic oligonucleotide
  Sense strand starting at position 2052 of SEQ ID NO: 587784
cauuguugcgguuucugua

SEQ ID NO: 818001 - RNA, 19 nt, Artificial Sequence
  Description of Artificial Sequence: Synthetic oligonucleotide
  Antisense strand to SEQ ID NO: 818000
uacagaaaccgcaacaaug

SEQ ID NO: 818002 - RNA, 19 nt, Artificial Sequence
  Description of Artificial Sequence: Synthetic oligonucleotide
  Sense strand starting at position 2053 of SEQ ID NO: 587784
auuguugcgguuucuguaa

SEQ ID NO: 818003 - RNA, 19 nt, Artificial Sequence
  Description of Artificial Sequence: Synthetic oligonucleotide
  Antisense strand to SEQ ID NO: 818002
uuacagaaaccgcaacaau

SEQ ID NO: 818004 - RNA, 19 nt, Artificial Sequence
  Description of Artificial Sequence: Synthetic oligonucleotide
  Sense strand starting at position 2117 of SEQ ID NO: 587784
acugucuaucgagaacgua

SEQ ID NO: 818005 - RNA, 19 nt, Artificial Sequence
  Description of Artificial Sequence: Synthetic oligonucleotide
  Antisense strand to SEQ ID NO: 818004
uacguucucgauagacagu

SEQ ID NO: 818006 - RNA, 19 nt, Artificial Sequence
  Description of Artificial Sequence: Synthetic oligonucleotide
  Sense strand starting at position 2120 of SEQ ID NO: 587784
gucuaucgagaacguaaga

SEQ ID NO: 818007 - RNA, 19 nt, Artificial Sequence
  Description of Artificial Sequence: Synthetic oligonucleotide
  Antisense strand to SEQ ID NO: 818006
ucuuacguucucgauagac

SEQ ID NO: 818008 - RNA, 19 nt, Artificial Sequence
  Description of Artificial Sequence: Synthetic oligonucleotide
  Sense strand starting at position 2247 of SEQ ID NO: 587784
uagucugcugagcauuaga

SEQ ID NO: 818009 - RNA, 19 nt, Artificial Sequence
  Description of Artificial Sequence: Synthetic oligonucleotide
  Antisense strand to SEQ ID NO: 818008
ucuaaugcucagcagacua

SEQ ID NO: 818010 - RNA, 19 nt, Artificial Sequence
  Description of Artificial Sequence: Synthetic oligonucleotide
  Sense strand starting at position 2258 of SEQ ID NO: 587784
gcauuagaugcguucugua

SEQ ID NO: 818011 - RNA, 19 nt, Artificial Sequence
  Description of Artificial Sequence: Synthetic oligonucleotide
  Antisense strand to SEQ ID NO: 818010
uacagaacgcaucuaaugc

SEQ ID NO: 818012 - RNA, 19 nt, Artificial Sequence
  Description of Artificial Sequence: Synthetic oligonucleotide
  Sense strand starting at position 2267 of SEQ ID NO: 587784
gcguucuguaguuuggauu

SEQ ID NO: 818013 - RNA, 19 nt, Artificial Sequence
  Description of Artificial Sequence: Synthetic oligonucleotide
  Antisense strand to SEQ ID NO: 818012
aauccaaacuacagaacgc

SEQ ID NO: 818014 - RNA, 19 nt, Artificial Sequence
  Description of Artificial Sequence: Synthetic oligonucleotide
  Sense strand starting at position 2268 of SEQ ID NO: 587784
cguucuguaguuuggauuu

SEQ ID NO: 818015 - RNA, 19 nt, Artificial Sequence
  Description of Artificial Sequence: Synthetic oligonucleotide
  Antisense strand to SEQ ID NO: 818014
aaauccaaacuacagaacg

SEQ ID NO: 818016 - RNA, 19 nt, Artificial Sequence
  Description of Artificial Sequence: Synthetic oligonucleotide
  Sense strand starting at position 2379 of SEQ ID NO: 587784
ucacuuaaauguguaagag

SEQ ID NO: 818017 - RNA, 19 nt, Artificial Sequence
  Description of Artificial Sequence: Synthetic oligonucleotide
  Antisense strand to SEQ ID NO: 818016
cucuuacacauuuaaguga

SEQ ID NO: 818018 - RNA, 19 nt, Artificial Sequence
  Description of Artificial Sequence: Synthetic oligonucleotide
  Sense strand starting at position 2461 of SEQ ID NO: 587784
ccaaguaaacaugguaaua

SEQ ID NO: 818019 - RNA, 19 nt, Artificial Sequence
  Description of Artificial Sequence: Synthetic oligonucleotide
  Antisense strand to SEQ ID NO: 818018
uauuaccauguuuacuugg

SEQ ID NO: 818020 - RNA, 19 nt, Artificial Sequence
  Description of Artificial Sequence: Synthetic oligonucleotide
  Sense strand starting at position 2514 of SEQ ID NO: 587784
ggaccagaucauugacucu

SEQ ID NO: 818021 - RNA, 19 nt, Artificial Sequence
  Description of Artificial Sequence: Synthetic oligonucleotide
  Antisense strand to SEQ ID NO: 818020
agagucaaugaucuggucc

SEQ ID NO: 818022 - RNA, 19 nt, Artificial Sequence
  Description of Artificial Sequence: Synthetic oligonucleotide
  Sense strand starting at position 2517 of SEQ ID NO: 587784
ccagaucauugacucugau

SEQ ID NO: 818023 - RNA, 19 nt, Artificial Sequence
  Description of Artificial Sequence: Synthetic oligonucleotide
  Antisense strand to SEQ ID NO: 818022
aucagagucaaugaucugg

SEQ ID NO: 818024 - RNA, 19 nt, Artificial Sequence
  Description of Artificial Sequence: Synthetic oligonucleotide
  Sense strand starting at position 2565 of SEQ ID NO: 587784
auacuaagauuggcagauu

SEQ ID NO: 818025 - RNA, 19 nt, Artificial Sequence
  Description of Artificial Sequence: Synthetic oligonucleotide
  Antisense strand to SEQ ID NO: 818024
aaucugccaaucuuaguau

SEQ ID NO: 818026 - RNA, 19 nt, Artificial Sequence
  Description of Artificial Sequence: Synthetic oligonucleotide
  Sense strand starting at position 2794 of SEQ ID NO: 587784
caauaaugguguuccauga

SEQ ID NO: 818027 - RNA, 19 nt, Artificial Sequence
  Description of Artificial Sequence: Synthetic oligonucleotide
  Antisense strand to SEQ ID NO: 818026
ucauggaacaccauuauug

SEQ ID NO: 818028 - RNA, 19 nt, Artificial Sequence
  Description of Artificial Sequence: Synthetic oligonucleotide
  Sense strand starting at position 2859 of SEQ ID NO: 587784
ucacuuguuucugcgauuu

SEQ ID NO: 818029 - RNA, 19 nt, Artificial Sequence
  Description of Artificial Sequence: Synthetic oligonucleotide
  Antisense strand to SEQ ID NO: 818028
aaaucgcagaaacaaguga

SEQ ID NO: 818030 - RNA, 19 nt, Artificial Sequence
  Description of Artificial Sequence: Synthetic oligonucleotide
  Sense strand starting at position 3327 of SEQ ID NO: 587784
ugguuugaauccucaacac

SEQ ID NO: 818031 - RNA, 19 nt, Artificial Sequence
  Description of Artificial Sequence: Synthetic oligonucleotide
  Antisense strand to SEQ ID NO: 818030
guguugaggauucaaacca

SEQ ID NO: 818032 - RNA, 19 nt, Artificial Sequence
  Description of Artificial Sequence: Synthetic oligonucleotide
  Sense strand starting at position 3438 of SEQ ID NO: 587784
cuaugcuaucaauaauggu

SEQ ID NO: 818033 - RNA, 19 nt, Artificial Sequence
  Description of Artificial Sequence: Synthetic oligonucleotide
  Antisense strand to SEQ ID NO: 818032
accauuauugauagcauag

SEQ ID NO: 818034 - RNA, 19 nt, Artificial Sequence
  Description of Artificial Sequence: Synthetic oligonucleotide
  Sense strand starting at position 3446 of SEQ ID NO: 587784
ucaauaaugguauguggca

SEQ ID NO: 818035 - RNA, 19 nt, Artificial Sequence
  Description of Artificial Sequence: Synthetic oligonucleotide
  Antisense strand to SEQ ID NO: 818034
ugccacauaccauuauuga

SEQ ID NO: 818036 - RNA, 19 nt, Artificial Sequence
  Description of Artificial Sequence: Synthetic oligonucleotide
  Sense strand starting at position 3515 of SEQ ID NO: 587784
agaauacuauugccuguau

SEQ ID NO: 818037 - RNA, 19 nt, Artificial Sequence
  Description of Artificial Sequence: Synthetic oligonucleotide
  Antisense strand to SEQ ID NO: 818036
auacaggcaauaguauucu

SEQ ID NO: 818038 - RNA, 19 nt, Artificial Sequence
  Description of Artificial Sequence: Synthetic oligonucleotide
  Sense strand starting at position 3621 of SEQ ID NO: 587784
gcaauaguauacuuugaau

SEQ ID NO: 818039 - RNA, 19 nt, Artificial Sequence
  Description of Artificial Sequence: Synthetic oligonucleotide
  Antisense strand to SEQ ID NO: 818038
auucaaaguauacuauugc

SEQ ID NO: 818040 - RNA, 19 nt, Artificial Sequence
  Description of Artificial Sequence: Synthetic oligonucleotide
  Sense strand starting at position 3726 of SEQ ID NO: 587784
ccuguaugacccuguauuu

SEQ ID NO: 818041 - RNA, 19 nt, Artificial Sequence
  Description of Artificial Sequence: Synthetic oligonucleotide
  Antisense strand to SEQ ID NO: 818040
aaauacagggucauacagg

SEQ ID NO: 818042 - RNA, 19 nt, Artificial Sequence
  Description of Artificial Sequence: Synthetic oligonucleotide
  Sense strand starting at position 69 of SEQ ID NO: 587785
guuacaaucugcuugagag

SEQ ID NO: 818043 - RNA, 19 nt, Artificial Sequence
  Description of Artificial Sequence: Synthetic oligonucleotide
  Antisense strand to SEQ ID NO: 818042
cucucaagcagauuguaac

SEQ ID NO: 818044 - RNA, 19 nt, Artificial Sequence
  Description of Artificial Sequence: Synthetic oligonucleotide
  Sense strand starting at position 70 of SEQ ID NO: 587785
uuacaaucugcuugagaga

SEQ ID NO: 818045 - RNA, 19 nt, Artificial Sequence
  Description of Artificial Sequence: Synthetic oligonucleotide
  Antisense strand to SEQ ID NO: 818044
ucucucaagcagauuguaa

SEQ ID NO: 818046 - RNA, 19 nt, Artificial Sequence
  Description of Artificial Sequence: Synthetic oligonucleotide
  Sense strand starting at position 259 of SEQ ID NO: 587785
acuacucauugguuaaaga

SEQ ID NO: 818047 - RNA, 19 nt, Artificial Sequence
  Description of Artificial Sequence: Synthetic oligonucleotide
  Antisense strand to SEQ ID NO: 818046
ucuuuaaccaaugaguagu

SEQ ID NO: 818048 - RNA, 19 nt, Artificial Sequence
  Description of Artificial Sequence: Synthetic oligonucleotide
  Sense strand starting at position 273 of SEQ ID NO: 587785
aaagaugagccuugaguua

SEQ ID NO: 818049 - RNA, 19 nt, Artificial Sequence
  Description of Artificial Sequence: Synthetic oligonucleotide
  Antisense strand to SEQ ID NO: 818048
uaacucaaggcucaucuuu

SEQ ID NO: 818050 - RNA, 19 nt, Artificial Sequence
  Description of Artificial Sequence: Synthetic oligonucleotide
  Sense strand starting at position 296 of SEQ ID NO: 587785
cucugaagcccuuauaaug

SEQ ID NO: 818051 - RNA, 19 nt, Artificial Sequence
  Description of Artificial Sequence: Synthetic oligonucleotide
  Antisense strand to SEQ ID NO: 818050
cauuauaagggcuucagag

SEQ ID NO: 818052 - RNA, 19 nt, Artificial Sequence
  Description of Artificial Sequence: Synthetic oligonucleotide
  Sense strand starting at position 378 of SEQ ID NO: 587785
gaauuaguaggguggauga

SEQ ID NO: 818053 - RNA, 19 nt, Artificial Sequence
  Description of Artificial Sequence: Synthetic oligonucleotide
  Antisense strand to SEQ ID NO: 818052
ucauccacccuacuaauuc

SEQ ID NO: 818054 - RNA, 19 nt, Artificial Sequence
  Description of Artificial Sequence: Synthetic oligonucleotide
  Sense strand starting at position 547 of SEQ ID NO: 587785
acuaauccuccaggaguca

SEQ ID NO: 818055 - RNA, 19 nt, Artificial Sequence
  Description of Artificial Sequence: Synthetic oligonucleotide
  Antisense strand to SEQ ID NO: 818054
ugacuccuggaggauuagu

SEQ ID NO: 818056 - RNA, 19 nt, Artificial Sequence
  Description of Artificial Sequence: Synthetic oligonucleotide
  Sense strand starting at position 592 of SEQ ID NO: 587785
aggaaauggcucugcauag

SEQ ID NO: 818057 - RNA, 19 nt, Artificial Sequence
  Description of Artificial Sequence: Synthetic oligonucleotide
  Antisense strand to SEQ ID NO: 818056
cuaugcagagccauuuccu

SEQ ID NO: 818058 - RNA, 19 nt, Artificial Sequence
  Description of Artificial Sequence: Synthetic oligonucleotide
  Sense strand starting at position 593 of SEQ ID NO: 587785
ggaaauggcucugcauaga

SEQ ID NO: 818059 - RNA, 19 nt, Artificial Sequence
  Description of Artificial Sequence: Synthetic oligonucleotide
  Antisense strand to SEQ ID NO: 818058
ucuaugcagagccauuucc

SEQ ID NO: 818060 - RNA, 19 nt, Artificial Sequence
  Description of Artificial Sequence: Synthetic oligonucleotide
  Sense strand starting at position 730 of SEQ ID NO: 587785
ccgugauuuacuuggucaa

SEQ ID NO: 818061 - RNA, 19 nt, Artificial Sequence
  Description of Artificial Sequence: Synthetic oligonucleotide
  Antisense strand to SEQ ID NO: 818060
uugaccaaguaaaucacgg

SEQ ID NO: 818062 - RNA, 19 nt, Artificial Sequence
  Description of Artificial Sequence: Synthetic oligonucleotide
  Sense strand starting at position 857 of SEQ ID NO: 587785
uaaugucugcaugaggacu

SEQ ID NO: 818063 - RNA, 19 nt, Artificial Sequence
  Description of Artificial Sequence: Synthetic oligonucleotide
  Antisense strand to SEQ ID NO: 818062
aguccucaugcagacauua

SEQ ID NO: 818064 - RNA, 19 nt, Artificial Sequence
  Description of Artificial Sequence: Synthetic oligonucleotide
  Sense strand starting at position 1038 of SEQ ID NO: 587785
ucaagucuggcugacucaa

SEQ ID NO: 818065 - RNA, 19 nt, Artificial Sequence
  Description of Artificial Sequence: Synthetic oligonucleotide
  Antisense strand to SEQ ID NO: 818064
uugagucagccagacuuga

SEQ ID NO: 818066 - RNA, 19 nt, Artificial Sequence
  Description of Artificial Sequence: Synthetic oligonucleotide
  Sense strand starting at position 1352 of SEQ ID NO: 587785
aggcuuaucccagacuauu

SEQ ID NO: 818067 - RNA, 19 nt, Artificial Sequence
  Description of Artificial Sequence: Synthetic oligonucleotide
  Antisense strand to SEQ ID NO: 818066
aauagucugggauaagccu

SEQ ID NO: 818068 - RNA, 19 nt, Artificial Sequence
  Description of Artificial Sequence: Synthetic oligonucleotide
  Sense strand starting at position 1490 of SEQ ID NO: 587785
agagguggucaaugagauc

SEQ ID NO: 818069 - RNA, 19 nt, Artificial Sequence
  Description of Artificial Sequence: Synthetic oligonucleotide
  Antisense strand to SEQ ID NO: 818068
gaucucauugaccaccucu

SEQ ID NO: 818070 - RNA, 19 nt, Artificial Sequence
  Description of Artificial Sequence: Synthetic oligonucleotide
  Sense strand starting at position 1633 of SEQ ID NO: 587785
acacucuuggguuguagaa

SEQ ID NO: 818071 - RNA, 19 nt, Artificial Sequence
  Description of Artificial Sequence: Synthetic oligonucleotide
  Antisense strand to SEQ ID NO: 818070
uucuacaacccaagagugu

SEQ ID NO: 818072 - RNA, 19 nt, Artificial Sequence
  Description of Artificial Sequence: Synthetic oligonucleotide
  Sense strand starting at position 1682 of SEQ ID NO: 587785
ggagaucagugccuaucau

SEQ ID NO: 818073 - RNA, 19 nt, Artificial Sequence
  Description of Artificial Sequence: Synthetic oligonucleotide
  Antisense strand to SEQ ID NO: 818072
augauaggcacugaucucc

SEQ ID NO: 818074 - RNA, 19 nt, Artificial Sequence
  Description of Artificial Sequence: Synthetic oligonucleotide
  Sense strand starting at position 1683 of SEQ ID NO: 587785
gagaucagugccuaucauc

SEQ ID NO: 818075 - RNA, 19 nt, Artificial Sequence
  Description of Artificial Sequence: Synthetic oligonucleotide
  Antisense strand to SEQ ID NO: 818074
gaugauaggcacugaucuc

SEQ ID NO: 818076 - RNA, 19 nt, Artificial Sequence
  Description of Artificial Sequence: Synthetic oligonucleotide
  Sense strand starting at position 1701 of SEQ ID NO: 587785
ccgaaagaacccuguccaa

SEQ ID NO: 818077 - RNA, 19 nt, Artificial Sequence
  Description of Artificial Sequence: Synthetic oligonucleotide
  Antisense strand to SEQ ID NO: 818076
uuggacaggguucuuucgg

SEQ ID NO: 818078 - RNA, 19 nt, Artificial Sequence
  Description of Artificial Sequence: Synthetic oligonucleotide
  Sense strand starting at position 2205 of SEQ ID NO: 587785
guaaucugacgugaugaaa

SEQ ID NO: 818079 - RNA, 19 nt, Artificial Sequence
  Description of Artificial Sequence: Synthetic oligonucleotide
  Antisense strand to SEQ ID NO: 818078
uuucaucacgucagauuac

SEQ ID NO: 818080 - RNA, 19 nt, Artificial Sequence
  Description of Artificial Sequence: Synthetic oligonucleotide
  Sense strand starting at position 2327 of SEQ ID NO: 587785
aggauaucgucccucuaaa

SEQ ID NO: 818081 - RNA, 19 nt, Artificial Sequence
  Description of Artificial Sequence: Synthetic oligonucleotide
  Antisense strand to SEQ ID NO: 818080
uuuagagggacgauauccu

SEQ ID NO: 818082 - RNA, 19 nt, Artificial Sequence
  Description of Artificial Sequence: Synthetic oligonucleotide
  Sense strand starting at position 2361 of SEQ ID NO: 587785
cucauauucggaugacaug

SEQ ID NO: 818083 - RNA, 19 nt, Artificial Sequence
  Description of Artificial Sequence: Synthetic oligonucleotide
  Antisense strand to SEQ ID NO: 818082
caugucauccgaauaugag

SEQ ID NO: 818084 - RNA, 19 nt, Artificial Sequence
  Description of Artificial Sequence: Synthetic oligonucleotide
  Sense strand starting at position 2459 of SEQ ID NO: 587785
uugcauuaaacggaugaca

SEQ ID NO: 818085 - RNA, 19 nt, Artificial Sequence
  Description of Artificial Sequence: Synthetic oligonucleotide
  Antisense strand to SEQ ID NO: 818084
ugucauccguuuaaugcaa

SEQ ID NO: 818086 - RNA, 19 nt, Artificial Sequence
  Description of Artificial Sequence: Synthetic oligonucleotide
  Sense strand starting at position 2461 of SEQ ID NO: 587785
gcauuaaacggaugacaaa

SEQ ID NO: 818087 - RNA, 19 nt, Artificial Sequence
  Description of Artificial Sequence: Synthetic oligonucleotide
  Antisense strand to SEQ ID NO: 818086
uuugucauccguuuaaugc

SEQ ID NO: 818088 - RNA, 19 nt, Artificial Sequence
  Description of Artificial Sequence: Synthetic oligonucleotide
  Sense strand starting at position 2505 of SEQ ID NO: 587785
ucaucuuccggguaaucca

SEQ ID NO: 818089 - RNA, 19 nt, Artificial Sequence
  Description of Artificial Sequence: Synthetic oligonucleotide
  Antisense strand to SEQ ID NO: 818088
uggauuacccggaagauga

SEQ ID NO: 818090 - RNA, 19 nt, Artificial Sequence
  Description of Artificial Sequence: Synthetic oligonucleotide
  Sense strand starting at position 2547 of SEQ ID NO: 587785
cacgauagaugucuagaac

SEQ ID NO: 818091 - RNA, 19 nt, Artificial Sequence
  Description of Artificial Sequence: Synthetic oligonucleotide
  Antisense strand to SEQ ID NO: 818090
guucuagacaucuaucgug

SEQ ID NO: 818092 - RNA, 19 nt, Artificial Sequence
  Description of Artificial Sequence: Synthetic oligonucleotide
  Sense strand starting at position 2930 of SEQ ID NO: 587785
acacaaaugauguguggga

SEQ ID NO: 818093 - RNA, 19 nt, Artificial Sequence
  Description of Artificial Sequence: Synthetic oligonucleotide
  Antisense strand to SEQ ID NO: 818092
ucccacacaucauuugugu

SEQ ID NO: 818094 - RNA, 19 nt, Artificial Sequence
  Description of Artificial Sequence: Synthetic oligonucleotide
  Sense strand starting at position 2931 of SEQ ID NO: 587785
cacaaaugaugugugggaa

SEQ ID NO: 818095 - RNA, 19 nt, Artificial Sequence
  Description of Artificial Sequence: Synthetic oligonucleotide
  Antisense strand to SEQ ID NO: 818094
uucccacacaucauuugug

SEQ ID NO: 818096 - RNA, 19 nt, Artificial Sequence
  Description of Artificial Sequence: Synthetic oligonucleotide
  Sense strand starting at position 2934 of SEQ ID NO: 587785
aaaugaugugugggaaaug

SEQ ID NO: 818097 - RNA, 19 nt, Artificial Sequence
  Description of Artificial Sequence: Synthetic oligonucleotide
  Antisense strand to SEQ ID NO: 818096
cauuucccacacaucauuu

SEQ ID NO: 818098 - RNA, 19 nt, Artificial Sequence
  Description of Artificial Sequence: Synthetic oligonucleotide
  Sense strand starting at position 3024 of SEQ ID NO: 587785
ucccgauuuccaggccaau

SEQ ID NO: 818099 - RNA, 19 nt, Artificial Sequence
  Description of Artificial Sequence: Synthetic oligonucleotide
  Antisense strand to SEQ ID NO: 818098
auuggccuggaaaucggga

SEQ ID NO: 818100 - RNA, 19 nt, Artificial Sequence
  Description of Artificial Sequence: Synthetic oligonucleotide
  Sense strand starting at position 3081 of SEQ ID NO: 587785
uaauuuguaguuuggcuua

SEQ ID NO: 818101 - RNA, 19 nt, Artificial Sequence
  Description of Artificial Sequence: Synthetic oligonucleotide
  Antisense strand to SEQ ID NO: 818100
uaagccaaacuacaaauua

SEQ ID NO: 818102 - RNA, 19 nt, Artificial Sequence
  Description of Artificial Sequence: Synthetic oligonucleotide
  Sense strand starting at position 3101 of SEQ ID NO: 587785
cagggaaugucugugauga

SEQ ID NO: 818103 - RNA, 19 nt, Artificial Sequence
  Description of Artificial Sequence: Synthetic oligonucleotide
  Antisense strand to SEQ ID NO: 818102
ucaucacagacauucccug

SEQ ID NO: 818104 - RNA, 19 nt, Artificial Sequence
  Description of Artificial Sequence: Synthetic oligonucleotide
  Sense strand starting at position 3102 of SEQ ID NO: 587785
agggaaugucugugaugaa

SEQ ID NO: 818105 - RNA, 19 nt, Artificial Sequence
  Description of Artificial Sequence: Synthetic oligonucleotide
  Antisense strand to SEQ ID NO: 818104
uucaucacagacauucccu

SEQ ID NO: 818106 - RNA, 19 nt, Artificial Sequence
  Description of Artificial Sequence: Synthetic oligonucleotide
  Sense strand starting at position 3132 of SEQ ID NO: 587785
ugaacuuucccagagcuau

SEQ ID NO: 818107 - RNA, 19 nt, Artificial Sequence
  Description of Artificial Sequence: Synthetic oligonucleotide
  Antisense strand to SEQ ID NO: 818106
auagcucugggaaaguuca

SEQ ID NO: 818108 - RNA, 19 nt, Artificial Sequence
  Description of Artificial Sequence: Synthetic oligonucleotide
  Sense strand starting at position 3178 of SEQ ID NO: 587785
uugcauauagcugagggaa

SEQ ID NO: 818109 - RNA, 19 nt, Artificial Sequence
  Description of Artificial Sequence: Synthetic oligonucleotide
  Antisense strand to SEQ ID NO: 818108
uucccucagcuauaugcaa

SEQ ID NO: 818110 - RNA, 19 nt, Artificial Sequence
  Description of Artificial Sequence: Synthetic oligonucleotide
  Sense strand starting at position 3346 of SEQ ID NO: 587785
ugaacuaauuugcagaaua

SEQ ID NO: 818111 - RNA, 19 nt, Artificial Sequence
  Description of Artificial Sequence: Synthetic oligonucleotide
  Antisense strand to SEQ ID NO: 818110
uauucugcaaauuaguuca

SEQ ID NO: 818112 - RNA, 19 nt, Artificial Sequence
  Description of Artificial Sequence: Synthetic oligonucleotide
  Sense strand starting at position 3356 of SEQ ID NO: 587785
ugcagaauaggcuaucuau

SEQ ID NO: 818113 - RNA, 19 nt, Artificial Sequence
  Description of Artificial Sequence: Synthetic oligonucleotide
  Antisense strand to SEQ ID NO: 818112
auagauagccuauucugca

SEQ ID NO: 818114 - RNA, 19 nt, Artificial Sequence
  Description of Artificial Sequence: Synthetic oligonucleotide
  Sense strand starting at position 3359 of SEQ ID NO: 587785
agaauaggcuaucuauuag

SEQ ID NO: 818115 - RNA, 19 nt, Artificial Sequence
  Description of Artificial Sequence: Synthetic oligonucleotide
  Antisense strand to SEQ ID NO: 818114
cuaauagauagccuauucu

SEQ ID NO: 818116 - RNA, 19 nt, Artificial Sequence
  Description of Artificial Sequence: Synthetic oligonucleotide
  Sense strand starting at position 3368 of SEQ ID NO: 587785
uaucuauuagguuagagca

SEQ ID NO: 818117 - RNA, 19 nt, Artificial Sequence
  Description of Artificial Sequence: Synthetic oligonucleotide
  Antisense strand to SEQ ID NO: 818116
ugcucuaaccuaauagaua

SEQ ID NO: 818118 - RNA, 19 nt, Artificial Sequence
  Description of Artificial Sequence: Synthetic oligonucleotide
  Sense strand starting at position 3786 of SEQ ID NO: 587785
acugaagucagauguuaag

SEQ ID NO: 818119 - RNA, 19 nt, Artificial Sequence
  Description of Artificial Sequence: Synthetic oligonucleotide
  Antisense strand to SEQ ID NO: 818118
cuuaacaucugacuucagu

SEQ ID NO: 818120 - RNA, 19 nt, Artificial Sequence
  Description of Artificial Sequence: Synthetic oligonucleotide
  Sense strand starting at position 3851 of SEQ ID NO: 587785
uaaggauuguuugcauaag

SEQ ID NO: 818121 - RNA, 19 nt, Artificial Sequence
  Description of Artificial Sequence: Synthetic oligonucleotide
  Antisense strand to SEQ ID NO: 818120
cuuaugcaaacaauccuua

SEQ ID NO: 818122 - RNA, 19 nt, Artificial Sequence
  Description of Artificial Sequence: Synthetic oligonucleotide
  Sense strand starting at position 120 of SEQ ID NO: 587786
uguacagcgcugucacaua

SEQ ID NO: 818123 - RNA, 19 nt, Artificial Sequence
  Description of Artificial Sequence: Synthetic oligonucleotide
  Antisense strand to SEQ ID NO: 818122
uaugugacagcgcuguaca

SEQ ID NO: 818124 - RNA, 19 nt, Artificial Sequence
  Description of Artificial Sequence: Synthetic oligonucleotide
  Sense strand starting at position 251 of SEQ ID NO: 587786
gacagagaaccuugauugu

SEQ ID NO: 818125 - RNA, 19 nt, Artificial Sequence
  Description of Artificial Sequence: Synthetic oligonucleotide
  Antisense strand to SEQ ID NO: 818124
acaaucaagguucucuguc

SEQ ID NO: 818126 - RNA, 19 nt, Artificial Sequence
  Description of Artificial Sequence: Synthetic oligonucleotide
  Sense strand starting at position 257 of SEQ ID NO: 587786
gaaccuugauuguuggaua

SEQ ID NO: 818127 - RNA, 19 nt, Artificial Sequence
  Description of Artificial Sequence: Synthetic oligonucleotide
  Antisense strand to SEQ ID NO: 818126
uauccaacaaucaagguuc

SEQ ID NO: 818128 - RNA, 19 nt, Artificial Sequence
  Description of Artificial Sequence: Synthetic oligonucleotide
  Sense strand starting at position 526 of SEQ ID NO: 587786
uggugagagaggugugacu

SEQ ID NO: 818129 - RNA, 19 nt, Artificial Sequence
  Description of Artificial Sequence: Synthetic oligonucleotide
  Antisense strand to SEQ ID NO: 818128
agucacaccucucucacca

SEQ ID NO: 818130 - RNA, 19 nt, Artificial Sequence
  Description of Artificial Sequence: Synthetic oligonucleotide
  Sense strand starting at position 604 of SEQ ID NO: 587786
uguguaccuccuuaugaac

SEQ ID NO: 818131 - RNA, 19 nt, Artificial Sequence
  Description of Artificial Sequence: Synthetic oligonucleotide
  Antisense strand to SEQ ID NO: 818130
guucauaaggagguacaca

SEQ ID NO: 818132 - RNA, 19 nt, Artificial Sequence
  Description of Artificial Sequence: Synthetic oligonucleotide
  Sense strand starting at position 628 of SEQ ID NO: 587786
augaauuaguucucuaggu

SEQ ID NO: 818133 - RNA, 19 nt, Artificial Sequence
  Description of Artificial Sequence: Synthetic oligonucleotide
  Antisense strand to SEQ ID NO: 818132
accuagagaacuaauucau

SEQ ID NO: 818134 - RNA, 19 nt, Artificial Sequence
  Description of Artificial Sequence: Synthetic oligonucleotide
  Sense strand starting at position 629 of SEQ ID NO: 587786
ugaauuaguucucuagguu

SEQ ID NO: 818135 - RNA, 19 nt, Artificial Sequence
  Description of Artificial Sequence: Synthetic oligonucleotide
  Antisense strand to SEQ ID NO: 818134
aaccuagagaacuaauuca

SEQ ID NO: 818136 - RNA, 19 nt, Artificial Sequence
  Description of Artificial Sequence: Synthetic oligonucleotide
  Sense strand starting at position 630 of SEQ ID NO: 587786
gaauuaguucucuagguua

SEQ ID NO: 818137 - RNA, 19 nt, Artificial Sequence
  Description of Artificial Sequence: Synthetic oligonucleotide
  Antisense strand to SEQ ID NO: 818136
uaaccuagagaacuaauuc

SEQ ID NO: 818138 - RNA, 19 nt, Artificial Sequence
  Description of Artificial Sequence: Synthetic oligonucleotide
  Sense strand starting at position 633 of SEQ ID NO: 587786
uuaguucucuagguuagga

SEQ ID NO: 818139 - RNA, 19 nt, Artificial Sequence
  Description of Artificial Sequence: Synthetic oligonucleotide
  Antisense strand to SEQ ID NO: 818138
uccuaaccuagagaacuaa

SEQ ID NO: 818140 - RNA, 19 nt, Artificial Sequence
  Description of Artificial Sequence: Synthetic oligonucleotide
  Sense strand starting at position 635 of SEQ ID NO: 587786
aguucucuagguuaggaau

SEQ ID NO: 818141 - RNA, 19 nt, Artificial Sequence
  Description of Artificial Sequence: Synthetic oligonucleotide
  Antisense strand to SEQ ID NO: 818140
auuccuaaccuagagaacu

SEQ ID NO: 818142 - RNA, 19 nt, Artificial Sequence
  Description of Artificial Sequence: Synthetic oligonucleotide
  Sense strand starting at position 664 of SEQ ID NO: 587786
aggcgcagugccagaguua

SEQ ID NO: 818143 - RNA, 19 nt, Artificial Sequence
  Description of Artificial Sequence: Synthetic oligonucleotide
  Antisense strand to SEQ ID NO: 818142
uaacucuggcacugcgccu

SEQ ID NO: 818144 - RNA, 19 nt, Artificial Sequence
  Description of Artificial Sequence: Synthetic oligonucleotide
  Sense strand starting at position 675 of SEQ ID NO: 587786
cagaguuaacaugaggugu

SEQ ID NO: 818145 - RNA, 19 nt, Artificial Sequence
  Description of Artificial Sequence: Synthetic oligonucleotide
  Antisense strand to SEQ ID NO: 818144
acaccucauguuaacucug

SEQ ID NO: 818146 - RNA, 19 nt, Artificial Sequence
  Description of Artificial Sequence: Synthetic oligonucleotide
  Sense strand starting at position 720 of SEQ ID NO: 587786
uaugaaccgguauauauua

SEQ ID NO: 818147 - RNA, 19 nt, Artificial Sequence
  Description of Artificial Sequence: Synthetic oligonucleotide
  Antisense strand to SEQ ID NO: 818146
uaauauauaccgguucaua

SEQ ID NO: 818148 - RNA, 19 nt, Artificial Sequence
  Description of Artificial Sequence: Synthetic oligonucleotide
  Sense strand starting at position 763 of SEQ ID NO: 587786
gaauaagagaguuguguua

SEQ ID NO: 818149 - RNA, 19 nt, Artificial Sequence
  Description of Artificial Sequence: Synthetic oligonucleotide
  Antisense strand to SEQ ID NO: 818148
uaacacaacucucuuauuc

SEQ ID NO: 818150 - RNA, 19 nt, Artificial Sequence
  Description of Artificial Sequence: Synthetic oligonucleotide
  Sense strand starting at position 782 of SEQ ID NO: 587786
ugcugugugagguuuaugu

SEQ ID NO: 818151 - RNA, 19 nt, Artificial Sequence
  Description of Artificial Sequence: Synthetic oligonucleotide
  Antisense strand to SEQ ID NO: 818150
acauaaaccucacacagca

SEQ ID NO: 818152 - RNA, 19 nt, Artificial Sequence
  Description of Artificial Sequence: Synthetic oligonucleotide
  Sense strand starting at position 873 of SEQ ID NO: 587786
acguauguuagguaaugag

SEQ ID NO: 818153 - RNA, 19 nt, Artificial Sequence
  Description of Artificial Sequence: Synthetic oligonucleotide
  Antisense strand to SEQ ID NO: 818152
cucauuaccuaacauacgu

SEQ ID NO: 818154 - RNA, 19 nt, Artificial Sequence
  Description of Artificial Sequence: Synthetic oligonucleotide
  Sense strand starting at position 1017 of SEQ ID NO: 587786
guuugugccgugguacaga

SEQ ID NO: 818155 - RNA, 19 nt, Artificial Sequence
  Description of Artificial Sequence: Synthetic oligonucleotide
  Antisense strand to SEQ ID NO: 818154
ucuguaccacggcacaaac

SEQ ID NO: 818156 - RNA, 19 nt, Artificial Sequence
  Description of Artificial Sequence: Synthetic oligonucleotide
  Sense strand starting at position 1059 of SEQ ID NO: 587786
aguguuaugcuggaugacu

SEQ ID NO: 818157 - RNA, 19 nt, Artificial Sequence
  Description of Artificial Sequence: Synthetic oligonucleotide
  Antisense strand to SEQ ID NO: 818156
agucauccagcauaacacu

SEQ ID NO: 818158 - RNA, 19 nt, Artificial Sequence
  Description of Artificial Sequence: Synthetic oligonucleotide
  Sense strand starting at position 1095 of SEQ ID NO: 587786
ggaagugcugcacaggaaa

SEQ ID NO: 818159 - RNA, 19 nt, Artificial Sequence
  Description of Artificial Sequence: Synthetic oligonucleotide
  Antisense strand to SEQ ID NO: 818158
uuuccugugcagcacuucc

SEQ ID NO: 818160 - RNA, 19 nt, Artificial Sequence
  Description of Artificial Sequence: Synthetic oligonucleotide
  Sense strand starting at position 1272 of SEQ ID NO: 587786
gaaaguggugcauacgaca

SEQ ID NO: 818161 - RNA, 19 nt, Artificial Sequence
  Description of Artificial Sequence: Synthetic oligonucleotide
  Antisense strand to SEQ ID NO: 818160
ugucguaugcaccacuuuc

SEQ ID NO: 818162 - RNA, 19 nt, Artificial Sequence
  Description of Artificial Sequence: Synthetic oligonucleotide
  Sense strand starting at position 1277 of SEQ ID NO: 587786
uggugcauacgacaugauu

SEQ ID NO: 818163 - RNA, 19 nt, Artificial Sequence
  Description of Artificial Sequence: Synthetic oligonucleotide
  Antisense strand to SEQ ID NO: 818162
aaucaugucguaugcacca

SEQ ID NO: 818164 - RNA, 19 nt, Artificial Sequence
  Description of Artificial Sequence: Synthetic oligonucleotide
  Sense strand starting at position 2084 of SEQ ID NO: 587786
ucucuaccacucgaggaau

SEQ ID NO: 818165 - RNA, 19 nt, Artificial Sequence
  Description of Artificial Sequence: Synthetic oligonucleotide
  Antisense strand to SEQ ID NO: 818164
auuccucgagugguagaga

SEQ ID NO: 818166 - RNA, 19 nt, Artificial Sequence
  Description of Artificial Sequence: Synthetic oligonucleotide
  Sense strand starting at position 2504 of SEQ ID NO: 587786
aguagagggugauugguuu

SEQ ID NO: 818167 - RNA, 19 nt, Artificial Sequence
  Description of Artificial Sequence: Synthetic oligonucleotide
  Antisense strand to SEQ ID NO: 818166
aaaccaaucacccucuacu

SEQ ID NO: 818168 - RNA, 19 nt, Artificial Sequence
  Description of Artificial Sequence: Synthetic oligonucleotide
  Sense strand starting at position 2727 of SEQ ID NO: 587786
uagcauuucguagguagaa

SEQ ID NO: 818169 - RNA, 19 nt, Artificial Sequence
  Description of Artificial Sequence: Synthetic oligonucleotide
  Antisense strand to SEQ ID NO: 818168
uucuaccuacgaaaugcua

SEQ ID NO: 818170 - RNA, 19 nt, Artificial Sequence
  Description of Artificial Sequence: Synthetic oligonucleotide
  Sense strand starting at position 2785 of SEQ ID NO: 587786
cuaggcacucauugagaac

SEQ ID NO: 818171 - RNA, 19 nt, Artificial Sequence
  Description of Artificial Sequence: Synthetic oligonucleotide
  Antisense strand to SEQ ID NO: 818170
guucucaaugagugccuag

SEQ ID NO: 818172 - RNA, 19 nt, Artificial Sequence
  Description of Artificial Sequence: Synthetic oligonucleotide
  Sense strand starting at position 2951 of SEQ ID NO: 587786
guguaagcaagugaguuaa

SEQ ID NO: 818173 - RNA, 19 nt, Artificial Sequence
  Description of Artificial Sequence: Synthetic oligonucleotide
  Antisense strand to SEQ ID NO: 818172
uuaacucacuugcuuacac

SEQ ID NO: 818174 - RNA, 19 nt, Artificial Sequence
  Description of Artificial Sequence: Synthetic oligonucleotide
  Sense strand starting at position 2971 of SEQ ID NO: 587786
uguacuugccauugauuua

SEQ ID NO: 818175 - RNA, 19 nt, Artificial Sequence
  Description of Artificial Sequence: Synthetic oligonucleotide
  Antisense strand to SEQ ID NO: 818174
uaaaucaauggcaaguaca

SEQ ID NO: 818176 - RNA, 19 nt, Artificial Sequence
  Description of Artificial Sequence: Synthetic oligonucleotide
  Sense strand starting at position 3014 of SEQ ID NO: 587786
aguacaaggcucugggaaa

SEQ ID NO: 818177 - RNA, 19 nt, Artificial Sequence
  Description of Artificial Sequence: Synthetic oligonucleotide
  Antisense strand to SEQ ID NO: 818176
uuucccagagccuuguacu

SEQ ID NO: 818178 - RNA, 19 nt, Artificial Sequence
  Description of Artificial Sequence: Synthetic oligonucleotide
  Sense strand starting at position 3078 of SEQ ID NO: 587786
cucugcucucgugcaugaa

SEQ ID NO: 818179 - RNA, 19 nt, Artificial Sequence
  Description of Artificial Sequence: Synthetic oligonucleotide
  Antisense strand to SEQ ID NO: 818178
uucaugcacgagagcagag

SEQ ID NO: 818180 - RNA, 19 nt, Artificial Sequence
  Description of Artificial Sequence: Synthetic oligonucleotide
  Sense strand starting at position 3176 of SEQ ID NO: 587786
ggauaaacauuaguuguau

SEQ ID NO: 818181 - RNA, 19 nt, Artificial Sequence
  Description of Artificial Sequence: Synthetic oligonucleotide
  Antisense strand to SEQ ID NO: 818180
auacaacuaauguuuaucc

SEQ ID NO: 818182 - RNA, 19 nt, Artificial Sequence
  Description of Artificial Sequence: Synthetic oligonucleotide
  Sense strand starting at position 3177 of SEQ ID NO: 587786
gauaaacauuaguuguaug

SEQ ID NO: 818183 - RNA, 19 nt, Artificial Sequence
  Description of Artificial Sequence: Synthetic oligonucleotide
  Antisense strand to SEQ ID NO: 818182
cauacaacuaauguuuauc

SEQ ID NO: 818184 - RNA, 19 nt, Artificial Sequence
  Description of Artificial Sequence: Synthetic oligonucleotide
  Sense strand starting at position 3228 of SEQ ID NO: 587786
gaaagugagucuuccugau

SEQ ID NO: 818185 - RNA, 19 nt, Artificial Sequence
  Description of Artificial Sequence: Synthetic oligonucleotide
  Antisense strand to SEQ ID NO: 818184
aucaggaagacucacuuuc

SEQ ID NO: 818186 - RNA, 19 nt, Artificial Sequence
  Description of Artificial Sequence: Synthetic oligonucleotide
  Sense strand starting at position 3252 of SEQ ID NO: 587786
agugguauugaguguggaa

SEQ ID NO: 818187 - RNA, 19 nt, Artificial Sequence
  Description of Artificial Sequence: Synthetic oligonucleotide
  Antisense strand to SEQ ID NO: 818186
uuccacacucaauaccacu

SEQ ID NO: 818188 - RNA, 19 nt, Artificial Sequence
  Description of Artificial Sequence: Synthetic oligonucleotide
  Sense strand starting at position 3254 of SEQ ID NO: 587786
ugguauugaguguggaaag

SEQ ID NO: 818189 - RNA, 19 nt, Artificial Sequence
  Description of Artificial Sequence: Synthetic oligonucleotide
  Antisense strand to SEQ ID NO: 818188
cuuuccacacucaauacca

SEQ ID NO: 818190 - RNA, 19 nt, Artificial Sequence
  Description of Artificial Sequence: Synthetic oligonucleotide
  Sense strand starting at position 3299 of SEQ ID NO: 587786
gaguuugaaguaggaugaa

SEQ ID NO: 818191 - RNA, 19 nt, Artificial Sequence
  Description of Artificial Sequence: Synthetic oligonucleotide
  Antisense strand to SEQ ID NO: 818190
uucauccuacuucaaacuc

SEQ ID NO: 818192 - RNA, 19 nt, Artificial Sequence
  Description of Artificial Sequence: Synthetic oligonucleotide
  Sense strand starting at position 3311 of SEQ ID NO: 587786
ggaugaagugcuuagacgu

SEQ ID NO: 818193 - RNA, 19 nt, Artificial Sequence
  Description of Artificial Sequence: Synthetic oligonucleotide
  Antisense strand to SEQ ID NO: 818192
acgucuaagcacuucaucc

SEQ ID NO: 818194 - RNA, 19 nt, Artificial Sequence
  Description of Artificial Sequence: Synthetic oligonucleotide
  Sense strand starting at position 3477 of SEQ ID NO: 587786
cagaaacagccuugucaag

SEQ ID NO: 818195 - RNA, 19 nt, Artificial Sequence
  Description of Artificial Sequence: Synthetic oligonucleotide
  Antisense strand to SEQ ID NO: 818194
cuugacaaggcuguuucug

SEQ ID NO: 818196 - RNA, 19 nt, Artificial Sequence
  Description of Artificial Sequence: Synthetic oligonucleotide
  Sense strand starting at position 3479 of SEQ ID NO: 587786
gaaacagccuugucaaggu

SEQ ID NO: 818197 - RNA, 19 nt, Artificial Sequence
  Description of Artificial Sequence: Synthetic oligonucleotide
  Antisense strand to SEQ ID NO: 818196
accuugacaaggcuguuuc

SEQ ID NO: 818198 - RNA, 19 nt, Artificial Sequence
  Description of Artificial Sequence: Synthetic oligonucleotide
  Sense strand starting at position 3556 of SEQ ID NO: 587786
augaauguuguagguuuga

SEQ ID NO: 818199 - RNA, 19 nt, Artificial Sequence
  Description of Artificial Sequence: Synthetic oligonucleotide
  Antisense strand to SEQ ID NO: 818198
ucaaaccuacaacauucau

SEQ ID NO: 818200 - RNA, 19 nt, Artificial Sequence
  Description of Artificial Sequence: Synthetic oligonucleotide
  Sense strand starting at position 3642 of SEQ ID NO: 587786
ggguauugugaauacuuac

SEQ ID NO: 818201 - RNA, 19 nt, Artificial Sequence
  Description of Artificial Sequence: Synthetic oligonucleotide
  Antisense strand to SEQ ID NO: 818200
guaaguauucacaauaccc

SEQ ID NO: 818202 - RNA, 19 nt, Artificial Sequence
  Description of Artificial Sequence: Synthetic oligonucleotide
  Sense strand starting at position 21 of SEQ ID NO: 587787
uagauuauuugauagugac

SEQ ID NO: 818203 - RNA, 19 nt, Artificial Sequence
  Description of Artificial Sequence: Synthetic oligonucleotide
  Antisense strand to SEQ ID NO: 818202
gucacuaucaaauaaucua

SEQ ID NO: 818204 - RNA, 19 nt, Artificial Sequence
  Description of Artificial Sequence: Synthetic oligonucleotide
  Sense strand starting at position 82 of SEQ ID NO: 587787
guuucugcaguuuaauaaa

SEQ ID NO: 818205 - RNA, 19 nt, Artificial Sequence
  Description of Artificial Sequence: Synthetic oligonucleotide
  Antisense strand to SEQ ID NO: 818204
uuuauuaaacugcagaaac

SEQ ID NO: 818206 - RNA, 19 nt, Artificial Sequence
  Description of Artificial Sequence: Synthetic oligonucleotide
  Sense strand starting at position 231 of SEQ ID NO: 587787
ucuaauuaauuggcuagua

SEQ ID NO: 818207 - RNA, 19 nt, Artificial Sequence
  Description of Artificial Sequence: Synthetic oligonucleotide
  Antisense strand to SEQ ID NO: 818206
uacuagccaauuaauuaga

SEQ ID NO: 818208 - RNA, 19 nt, Artificial Sequence
  Description of Artificial Sequence: Synthetic oligonucleotide
  Sense strand starting at position 232 of SEQ ID NO: 587787
cuaauuaauuggcuaguau

SEQ ID NO: 818209 - RNA, 19 nt, Artificial Sequence
  Description of Artificial Sequence: Synthetic oligonucleotide
  Antisense strand to SEQ ID NO: 818208
auacuagccaauuaauuag

SEQ ID NO: 818210 - RNA, 19 nt, Artificial Sequence
  Description of Artificial Sequence: Synthetic oligonucleotide
  Sense strand starting at position 243 of SEQ ID NO: 587787
gcuaguauaacuggaugaa

SEQ ID NO: 818211 - RNA, 19 nt, Artificial Sequence
  Description of Artificial Sequence: Synthetic oligonucleotide
  Antisense strand to SEQ ID NO: 818210
uucauccaguuauacuagc

SEQ ID NO: 818212 - RNA, 19 nt, Artificial Sequence
  Description of Artificial Sequence: Synthetic oligonucleotide
  Sense strand starting at position 295 of SEQ ID NO: 587787
guugaaugcuaguuuacuu

SEQ ID NO: 818213 - RNA, 19 nt, Artificial Sequence
  Description of Artificial Sequence: Synthetic oligonucleotide
  Antisense strand to SEQ ID NO: 818212
aaguaaacuagcauucaac

SEQ ID NO: 818214 - RNA, 19 nt, Artificial Sequence
  Description of Artificial Sequence: Synthetic oligonucleotide
  Sense strand starting at position 387 of SEQ ID NO: 587787
ugcucaacucucgaagaca

SEQ ID NO: 818215 - RNA, 19 nt, Artificial Sequence
  Description of Artificial Sequence: Synthetic oligonucleotide
  Antisense strand to SEQ ID NO: 818214
ugucuucgagaguugagca

SEQ ID NO: 818216 - RNA, 19 nt, Artificial Sequence
  Description of Artificial Sequence: Synthetic oligonucleotide
  Sense strand starting at position 519 of SEQ ID NO: 587787
aaauccuagcgaugguuaa

SEQ ID NO: 818217 - RNA, 19 nt, Artificial Sequence
  Description of Artificial Sequence: Synthetic oligonucleotide
  Antisense strand to SEQ ID NO: 818216
uuaaccaucgcuaggauuu

SEQ ID NO: 818218 - RNA, 19 nt, Artificial Sequence
  Description of Artificial Sequence: Synthetic oligonucleotide
  Sense strand starting at position 526 of SEQ ID NO: 587787
agcgaugguuaagucuuaa

SEQ ID NO: 818219 - RNA, 19 nt, Artificial Sequence
  Description of Artificial Sequence: Synthetic oligonucleotide
  Antisense strand to SEQ ID NO: 818218
uuaagacuuaaccaucgcu

SEQ ID NO: 818220 - RNA, 19 nt, Artificial Sequence
  Description of Artificial Sequence: Synthetic oligonucleotide
  Sense strand starting at position 659 of SEQ ID NO: 587787
gcaggcuaacuaugcaaga

SEQ ID NO: 818221 - RNA, 19 nt, Artificial Sequence
  Description of Artificial Sequence: Synthetic oligonucleotide
  Antisense strand to SEQ ID NO: 818220
ucuugcauaguuagccugc

SEQ ID NO: 818222 - RNA, 19 nt, Artificial Sequence
  Description of Artificial Sequence: Synthetic oligonucleotide
  Sense strand starting at position 859 of SEQ ID NO: 587787
gagagaaauucggcaaaca

SEQ ID NO: 818223 - RNA, 19 nt, Artificial Sequence
  Description of Artificial Sequence: Synthetic oligonucleotide
  Antisense strand to SEQ ID NO: 818222
uguuugccgaauuucucuc

SEQ ID NO: 818224 - RNA, 19 nt, Artificial Sequence
  Description of Artificial Sequence: Synthetic oligonucleotide
  Sense strand starting at position 2125 of SEQ ID NO: 587787
uaggcucugcucgcguaau

SEQ ID NO: 818225 - RNA, 19 nt, Artificial Sequence
  Description of Artificial Sequence: Synthetic oligonucleotide
  Antisense strand to SEQ ID NO: 818224
auuacgcgagcagagccua

SEQ ID NO: 818226 - RNA, 19 nt, Artificial Sequence
  Description of Artificial Sequence: Synthetic oligonucleotide
  Sense strand starting at position 2136 of SEQ ID NO: 587787
cgcguaauuuguccuguag

SEQ ID NO: 818227 - RNA, 19 nt, Artificial Sequence
  Description of Artificial Sequence: Synthetic oligonucleotide
  Antisense strand to SEQ ID NO: 818226
cuacaggacaaauuacgcg

SEQ ID NO: 818228 - RNA, 19 nt, Artificial Sequence
  Description of Artificial Sequence: Synthetic oligonucleotide
  Sense strand starting at position 2548 of SEQ ID NO: 587787
auggcauuauagcuaaguu

SEQ ID NO: 818229 - RNA, 19 nt, Artificial Sequence
  Description of Artificial Sequence: Synthetic oligonucleotide
  Antisense strand to SEQ ID NO: 818228
aacuuagcuauaaugccau

SEQ ID NO: 818230 - RNA, 19 nt, Artificial Sequence
  Description of Artificial Sequence: Synthetic oligonucleotide
  Sense strand starting at position 2633 of SEQ ID NO: 587787
guagacagguuaccuaaau

SEQ ID NO: 818231 - RNA, 19 nt, Artificial Sequence
  Description of Artificial Sequence: Synthetic oligonucleotide
  Antisense strand to SEQ ID NO: 818230
auuuagguaaccugucuac

SEQ ID NO: 818232 - RNA, 19 nt, Artificial Sequence
  Description of Artificial Sequence: Synthetic oligonucleotide
  Sense strand starting at position 2779 of SEQ ID NO: 587787
cgaggagcuaguugguuau

SEQ ID NO: 818233 - RNA, 19 nt, Artificial Sequence
  Description of Artificial Sequence: Synthetic oligonucleotide
  Antisense strand to SEQ ID NO: 818232
auaaccaacuagcuccucg

SEQ ID NO: 818234 - RNA, 19 nt, Artificial Sequence
  Description of Artificial Sequence: Synthetic oligonucleotide
  Sense strand starting at position 2781 of SEQ ID NO: 587787
aggagcuaguugguuauga

SEQ ID NO: 818235 - RNA, 19 nt, Artificial Sequence
  Description of Artificial Sequence: Synthetic oligonucleotide
  Antisense strand to SEQ ID NO: 818234
ucauaaccaacuagcuccu

SEQ ID NO: 818236 - RNA, 19 nt, Artificial Sequence
  Description of Artificial Sequence: Synthetic oligonucleotide
  Sense strand starting at position 2790 of SEQ ID NO: 587787
uugguuaugaccggaacgu

SEQ ID NO: 818237 - RNA, 19 nt, Artificial Sequence
  Description of Artificial Sequence: Synthetic oligonucleotide
  Antisense strand to SEQ ID NO: 818236
acguuccggucauaaccaa

SEQ ID NO: 818238 - RNA, 19 nt, Artificial Sequence
  Description of Artificial Sequence: Synthetic oligonucleotide
  Sense strand starting at position 2894 of SEQ ID NO: 587787
ccuggaguuuauucuuuag

SEQ ID NO: 818239 - RNA, 19 nt, Artificial Sequence
  Description of Artificial Sequence: Synthetic oligonucleotide
  Antisense strand to SEQ ID NO: 818238
cuaaagaauaaacuccagg

SEQ ID NO: 818240 - RNA, 19 nt, Artificial Sequence
  Description of Artificial Sequence: Synthetic oligonucleotide
  Sense strand starting at position 2897 of SEQ ID NO: 587787
ggaguuuauucuuuaggca

SEQ ID NO: 818241 - RNA, 19 nt, Artificial Sequence
  Description of Artificial Sequence: Synthetic oligonucleotide
  Antisense strand to SEQ ID NO: 818240
ugccuaaagaauaaacucc

SEQ ID NO: 818242 - RNA, 19 nt, Artificial Sequence
  Description of Artificial Sequence: Synthetic oligonucleotide
  Sense strand starting at position 2898 of SEQ ID NO: 587787
gaguuuauucuuuaggcaa

SEQ ID NO: 818243 - RNA, 19 nt, Artificial Sequence
  Description of Artificial Sequence: Synthetic oligonucleotide
  Antisense strand to SEQ ID NO: 818242
uugccuaaagaauaaacuc

SEQ ID NO: 818244 - RNA, 19 nt, Artificial Sequence
  Description of Artificial Sequence: Synthetic oligonucleotide
  Sense strand starting at position 2933 of SEQ ID NO: 587787
ggcuuuaagcaggaaguga

SEQ ID NO: 818245 - RNA, 19 nt, Artificial Sequence
  Description of Artificial Sequence: Synthetic oligonucleotide
  Antisense strand to SEQ ID NO: 818244
ucacuuccugcuuaaagcc

SEQ ID NO: 818246 - RNA, 19 nt, Artificial Sequence
  Description of Artificial Sequence: Synthetic oligonucleotide
  Sense strand starting at position 2994 of SEQ ID NO: 587787
gcaaccuuguggucggaaa

SEQ ID NO: 818247 - RNA, 19 nt, Artificial Sequence
  Description of Artificial Sequence: Synthetic oligonucleotide
  Antisense strand to SEQ ID NO: 818246
uuuccgaccacaagguugc

SEQ ID NO: 818248 - RNA, 19 nt, Artificial Sequence
  Description of Artificial Sequence: Synthetic oligonucleotide
  Sense strand starting at position 2995 of SEQ ID NO: 587787
caaccuuguggucggaaau

SEQ ID NO: 818249 - RNA, 19 nt, Artificial Sequence
  Description of Artificial Sequence: Synthetic oligonucleotide
  Antisense strand to SEQ ID NO: 818248
auuuccgaccacaagguug

SEQ ID NO: 818250 - RNA, 19 nt, Artificial Sequence
  Description of Artificial Sequence: Synthetic oligonucleotide
  Sense strand starting at position 2996 of SEQ ID NO: 587787
aaccuuguggucggaaaug

SEQ ID NO: 818251 - RNA, 19 nt, Artificial Sequence
  Description of Artificial Sequence: Synthetic oligonucleotide
  Antisense strand to SEQ ID NO: 818250
cauuuccgaccacaagguu

SEQ ID NO: 818252 - RNA, 19 nt, Artificial Sequence
  Description of Artificial Sequence: Synthetic oligonucleotide
  Sense strand starting at position 3146 of SEQ ID NO: 587787
ugacacacgucauugcauu

SEQ ID NO: 818253 - RNA, 19 nt, Artificial Sequence
  Description of Artificial Sequence: Synthetic oligonucleotide
  Antisense strand to SEQ ID NO: 818252
aaugcaaugacguguguca

SEQ ID NO: 818254 - RNA, 19 nt, Artificial Sequence
  Description of Artificial Sequence: Synthetic oligonucleotide
  Sense strand starting at position 3147 of SEQ ID NO: 587787
gacacacgucauugcauua

SEQ ID NO: 818255 - RNA, 19 nt, Artificial Sequence
  Description of Artificial Sequence: Synthetic oligonucleotide
  Antisense strand to SEQ ID NO: 818254
uaaugcaaugacguguguc

SEQ ID NO: 818256 - RNA, 19 nt, Artificial Sequence
  Description of Artificial Sequence: Synthetic oligonucleotide
  Sense strand starting at position 3232 of SEQ ID NO: 587787
uuaaauguuuggguuguau

SEQ ID NO: 818257 - RNA, 19 nt, Artificial Sequence
  Description of Artificial Sequence: Synthetic oligonucleotide
  Antisense strand to SEQ ID NO: 818256
auacaacccaaacauuuaa

SEQ ID NO: 818258 - RNA, 19 nt, Artificial Sequence
  Description of Artificial Sequence: Synthetic oligonucleotide
  Sense strand starting at position 3234 of SEQ ID NO: 587787
aaauguuuggguuguauug

SEQ ID NO: 818259 - RNA, 19 nt, Artificial Sequence
  Description of Artificial Sequence: Synthetic oligonucleotide
  Antisense strand to SEQ ID NO: 818258
caauacaacccaaacauuu

SEQ ID NO: 818260 - RNA, 19 nt, Artificial Sequence
  Description of Artificial Sequence: Synthetic oligonucleotide
  Sense strand starting at position 3246 of SEQ ID NO: 587787
uguauuguucuuuaaugag

SEQ ID NO: 818261 - RNA, 19 nt, Artificial Sequence
  Description of Artificial Sequence: Synthetic oligonucleotide
  Antisense strand to SEQ ID NO: 818260
cucauuaaagaacaauaca

SEQ ID NO: 818262 - RNA, 19 nt, Artificial Sequence
  Description of Artificial Sequence: Synthetic oligonucleotide
  Sense strand starting at position 3497 of SEQ ID NO: 587787
gcacuuagucugcucuguu

SEQ ID NO: 818263 - RNA, 19 nt, Artificial Sequence
  Description of Artificial Sequence: Synthetic oligonucleotide
  Antisense strand to SEQ ID NO: 818262
aacagagcagacuaagugc

SEQ ID NO: 818264 - RNA, 19 nt, Artificial Sequence
  Description of Artificial Sequence: Synthetic oligonucleotide
  Sense strand starting at position 3510 of SEQ ID NO: 587787
ucuguuguucuccaaagca

SEQ ID NO: 818265 - RNA, 19 nt, Artificial Sequence
  Description of Artificial Sequence: Synthetic oligonucleotide
  Antisense strand to SEQ ID NO: 818264
ugcuuuggagaacaacaga

SEQ ID NO: 818266 - RNA, 19 nt, Artificial Sequence
  Description of Artificial Sequence: Synthetic oligonucleotide
  Sense strand starting at position 3557 of SEQ ID NO: 587787
guucuuguuuauuucuuga

SEQ ID NO: 818267 - RNA, 19 nt, Artificial Sequence
  Description of Artificial Sequence: Synthetic oligonucleotide
  Antisense strand to SEQ ID NO: 818266
ucaagaaauaaacaagaac

SEQ ID NO: 818268 - RNA, 19 nt, Artificial Sequence
  Description of Artificial Sequence: Synthetic oligonucleotide
  Sense strand starting at position 3581 of SEQ ID NO: 587787
cgcucucuccacuagaauc

SEQ ID NO: 818269 - RNA, 19 nt, Artificial Sequence
  Description of Artificial Sequence: Synthetic oligonucleotide
  Antisense strand to SEQ ID NO: 818268
gauucuaguggagagagcg

SEQ ID NO: 818270 - RNA, 19 nt, Artificial Sequence
  Description of Artificial Sequence: Synthetic oligonucleotide
  Sense strand starting at position 3653 of SEQ ID NO: 587787
caguaaguauuugucaagu

SEQ ID NO: 818271 - RNA, 19 nt, Artificial Sequence
  Description of Artificial Sequence: Synthetic oligonucleotide
  Antisense strand to SEQ ID NO: 818270
acuugacaaauacuuacug

SEQ ID NO: 818272 - RNA, 19 nt, Artificial Sequence
  Description of Artificial Sequence: Synthetic oligonucleotide
  Sense strand starting at position 3770 of SEQ ID NO: 587787
cugcauuaaggauaacuuu

SEQ ID NO: 818273 - RNA, 19 nt, Artificial Sequence
  Description of Artificial Sequence: Synthetic oligonucleotide
  Antisense strand to SEQ ID NO: 818272
aaaguuauccuuaaugcag

SEQ ID NO: 818274 - RNA, 19 nt, Artificial Sequence
  Description of Artificial Sequence: Synthetic oligonucleotide
  Sense strand starting at position 3800 of SEQ ID NO: 587787
cugcacuuagcauaguaga

SEQ ID NO: 818275 - RNA, 19 nt, Artificial Sequence
  Description of Artificial Sequence: Synthetic oligonucleotide
  Antisense strand to SEQ ID NO: 818274
ucuacuaugcuaagugcag

SEQ ID NO: 818276 - RNA, 19 nt, Artificial Sequence
  Description of Artificial Sequence: Synthetic oligonucleotide
  Sense strand starting at position 3827 of SEQ ID NO: 587787
ggccaucaauucuuugaca

SEQ ID NO: 818277 - RNA, 19 nt, Artificial Sequence
  Description of Artificial Sequence: Synthetic oligonucleotide
  Antisense strand to SEQ ID NO: 818276
ugucaaagaauugauggcc

SEQ ID NO: 818278 - RNA, 19 nt, Artificial Sequence
  Description of Artificial Sequence: Synthetic oligonucleotide
  Sense strand starting at position 3911 of SEQ ID NO: 587787
ugaccaaugggauguguca

SEQ ID NO: 818279 - RNA, 19 nt, Artificial Sequence
  Description of Artificial Sequence: Synthetic oligonucleotide
  Antisense strand to SEQ ID NO: 818278
ugacacaucccauugguca

SEQ ID NO: 818280 - RNA, 19 nt, Artificial Sequence
  Description of Artificial Sequence: Synthetic oligonucleotide
  Sense strand starting at position 3922 of SEQ ID NO: 587787
augugucacaagugacauu

SEQ ID NO: 818281 - RNA, 19 nt, Artificial Sequence
  Description of Artificial Sequence: Synthetic oligonucleotide
  Antisense strand to SEQ ID NO: 818280
aaugucacuugugacacau

SEQ ID NO: 818282 - RNA, 19 nt, Artificial Sequence
  Description of Artificial Sequence: Synthetic oligonucleotide
  Sense strand starting at position 128 of SEQ ID NO: 587788
ggagguaaucuuggugacu

SEQ ID NO: 818283 - RNA, 19 nt, Artificial Sequence
  Description of Artificial Sequence: Synthetic oligonucleotide
  Antisense strand to SEQ ID NO: 818282
agucaccaagauuaccucc

SEQ ID NO: 818284 - RNA, 19 nt, Artificial Sequence
  Description of Artificial Sequence: Synthetic oligonucleotide
  Sense strand starting at position 129 of SEQ ID NO: 587788
gagguaaucuuggugacua

SEQ ID NO: 818285 - RNA, 19 nt, Artificial Sequence
  Description of Artificial Sequence: Synthetic oligonucleotide
  Antisense strand to SEQ ID NO: 818284
uagucaccaagauuaccuc

SEQ ID NO: 818286 - RNA, 19 nt, Artificial Sequence
  Description of Artificial Sequence: Synthetic oligonucleotide
  Sense strand starting at position 131 of SEQ ID NO: 587788
gguaaucuuggugacuaca

SEQ ID NO: 818287 - RNA, 19 nt, Artificial Sequence
  Description of Artificial Sequence: Synthetic oligonucleotide
  Antisense strand to SEQ ID NO: 818286
uguagucaccaagauuacc

SEQ ID NO: 818288 - RNA, 19 nt, Artificial Sequence
  Description of Artificial Sequence: Synthetic oligonucleotide
  Sense strand starting at position 323 of SEQ ID NO: 587788
cguauucuugcgcuuggaa

SEQ ID NO: 818289 - RNA, 19 nt, Artificial Sequence
  Description of Artificial Sequence: Synthetic oligonucleotide
  Antisense strand to SEQ ID NO: 818288
uuccaagcgcaagaauacg

SEQ ID NO: 818290 - RNA, 19 nt, Artificial Sequence
  Description of Artificial Sequence: Synthetic oligonucleotide
  Sense strand starting at position 370 of SEQ ID NO: 587788
aaguuagauaccuggguga

SEQ ID NO: 818291 - RNA, 19 nt, Artificial Sequence
  Description of Artificial Sequence: Synthetic oligonucleotide
  Antisense strand to SEQ ID NO: 818290
ucacccagguaucuaacuu

SEQ ID NO: 818292 - RNA, 19 nt, Artificial Sequence
  Description of Artificial Sequence: Synthetic oligonucleotide
  Sense strand starting at position 373 of SEQ ID NO: 587788
uuagauaccugggugaguu

SEQ ID NO: 818293 - RNA, 19 nt, Artificial Sequence
  Description of Artificial Sequence: Synthetic oligonucleotide
  Antisense strand to SEQ ID NO: 818292
aacucacccagguaucuaa

SEQ ID NO: 818294 - RNA, 19 nt, Artificial Sequence
  Description of Artificial Sequence: Synthetic oligonucleotide
  Sense strand starting at position 383 of SEQ ID NO: 587788
gggugaguuguugagaguc

SEQ ID NO: 818295 - RNA, 19 nt, Artificial Sequence
  Description of Artificial Sequence: Synthetic oligonucleotide
  Antisense strand to SEQ ID NO: 818294
gacucucaacaacucaccc

SEQ ID NO: 818296 - RNA, 19 nt, Artificial Sequence
  Description of Artificial Sequence: Synthetic oligonucleotide
  Sense strand starting at position 512 of SEQ ID NO: 587788
cuuaucuugcugggaccaa

SEQ ID NO: 818297 - RNA, 19 nt, Artificial Sequence
  Description of Artificial Sequence: Synthetic oligonucleotide
  Antisense strand to SEQ ID NO: 818296
uuggucccagcaagauaag

SEQ ID NO: 818298 - RNA, 19 nt, Artificial Sequence
  Description of Artificial Sequence: Synthetic oligonucleotide
  Sense strand starting at position 701 of SEQ ID NO: 587788
cagugucauguacaagcaa

SEQ ID NO: 818299 - RNA, 19 nt, Artificial Sequence
  Description of Artificial Sequence: Synthetic oligonucleotide
  Antisense strand to SEQ ID NO: 818298
uugcuuguacaugacacug

SEQ ID NO: 818300 - RNA, 19 nt, Artificial Sequence
  Description of Artificial Sequence: Synthetic oligonucleotide
  Sense strand starting at position 737 of SEQ ID NO: 587788
ugcauuucugccuguuacu

SEQ ID NO: 818301 - RNA, 19 nt, Artificial Sequence
  Description of Artificial Sequence: Synthetic oligonucleotide
  Antisense strand to SEQ ID NO: 818300
aguaacaggcagaaaugca

SEQ ID NO: 818302 - RNA, 19 nt, Artificial Sequence
  Description of Artificial Sequence: Synthetic oligonucleotide
  Sense strand starting at position 819 of SEQ ID NO: 587788
agacacuauccauggcgau

SEQ ID NO: 818303 - RNA, 19 nt, Artificial Sequence
  Description of Artificial Sequence: Synthetic oligonucleotide
  Antisense strand to SEQ ID NO: 818302
aucgccauggauagugucu

SEQ ID NO: 818304 - RNA, 19 nt, Artificial Sequence
  Description of Artificial Sequence: Synthetic oligonucleotide
  Sense strand starting at position 1156 of SEQ ID NO: 587788
agaagucaccuuugacucu

SEQ ID NO: 818305 - RNA, 19 nt, Artificial Sequence
  Description of Artificial Sequence: Synthetic oligonucleotide
  Antisense strand to SEQ ID NO: 818304
agagucaaaggugacuucu

SEQ ID NO: 818306 - RNA, 19 nt, Artificial Sequence
  Description of Artificial Sequence: Synthetic oligonucleotide
  Sense strand starting at position 1336 of SEQ ID NO: 587788
gguugagcuggugauuaac

SEQ ID NO: 818307 - RNA, 19 nt, Artificial Sequence
  Description of Artificial Sequence: Synthetic oligonucleotide
  Antisense strand to SEQ ID NO: 818306
guuaaucaccagcucaacc

SEQ ID NO: 818308 - RNA, 19 nt, Artificial Sequence
  Description of Artificial Sequence: Synthetic oligonucleotide
  Sense strand starting at position 1384 of SEQ ID NO: 587788
uggauaaacuugucuaagg

SEQ ID NO: 818309 - RNA, 19 nt, Artificial Sequence
  Description of Artificial Sequence: Synthetic oligonucleotide
  Antisense strand to SEQ ID NO: 818308
ccuuagacaaguuuaucca

SEQ ID NO: 818310 - RNA, 19 nt, Artificial Sequence
  Description of Artificial Sequence: Synthetic oligonucleotide
  Sense strand starting at position 1386 of SEQ ID NO: 587788
gauaaacuugucuaaggca

SEQ ID NO: 818311 - RNA, 19 nt, Artificial Sequence
  Description of Artificial Sequence: Synthetic oligonucleotide
  Antisense strand to SEQ ID NO: 818310
ugccuuagacaaguuuauc

SEQ ID NO: 818312 - RNA, 19 nt, Artificial Sequence
  Description of Artificial Sequence: Synthetic oligonucleotide
  Sense strand starting at position 1391 of SEQ ID NO: 587788
acuugucuaaggcaagagu

SEQ ID NO: 818313 - RNA, 19 nt, Artificial Sequence
  Description of Artificial Sequence: Synthetic oligonucleotide
  Antisense strand to SEQ ID NO: 818312
acucuugccuuagacaagu

SEQ ID NO: 818314 - RNA, 19 nt, Artificial Sequence
  Description of Artificial Sequence: Synthetic oligonucleotide
  Sense strand starting at position 1530 of SEQ ID NO: 587788
ugaugaguccuggaaagcu

SEQ ID NO: 818315 - RNA, 19 nt, Artificial Sequence
  Description of Artificial Sequence: Synthetic oligonucleotide
  Antisense strand to SEQ ID NO: 818314
agcuuuccaggacucauca

SEQ ID NO: 818316 - RNA, 19 nt, Artificial Sequence
  Description of Artificial Sequence: Synthetic oligonucleotide
  Sense strand starting at position 1612 of SEQ ID NO: 587788
auuugucauuuaggaugau

SEQ ID NO: 818317 - RNA, 19 nt, Artificial Sequence
  Description of Artificial Sequence: Synthetic oligonucleotide
  Antisense strand to SEQ ID NO: 818316
aucauccuaaaugacaaau

SEQ ID NO: 818318 - RNA, 19 nt, Artificial Sequence
  Description of Artificial Sequence: Synthetic oligonucleotide
  Sense strand starting at position 1613 of SEQ ID NO: 587788
uuugucauuuaggaugaua

SEQ ID NO: 818319 - RNA, 19 nt, Artificial Sequence
  Description of Artificial Sequence: Synthetic oligonucleotide
  Antisense strand to SEQ ID NO: 818318
uaucauccuaaaugacaaa

SEQ ID NO: 818320 - RNA, 19 nt, Artificial Sequence
  Description of Artificial Sequence: Synthetic oligonucleotide
  Sense strand starting at position 1625 of SEQ ID NO: 587788
gaugauagccaguagagca

SEQ ID NO: 818321 - RNA, 19 nt, Artificial Sequence
  Description of Artificial Sequence: Synthetic oligonucleotide
  Antisense strand to SEQ ID NO: 818320
ugcucuacuggcuaucauc

SEQ ID NO: 818322 - RNA, 19 nt, Artificial Sequence
  Description of Artificial Sequence: Synthetic oligonucleotide
  Sense strand starting at position 1676 of SEQ ID NO: 587788
gagggaagagguugugacu

SEQ ID NO: 818323 - RNA, 19 nt, Artificial Sequence
  Description of Artificial Sequence: Synthetic oligonucleotide
  Antisense strand to SEQ ID NO: 818322
agucacaaccucuucccuc

SEQ ID NO: 818324 - RNA, 19 nt, Artificial Sequence
  Description of Artificial Sequence: Synthetic oligonucleotide
  Sense strand starting at position 1690 of SEQ ID NO: 587788
ugacuuuggacaugcgaau

SEQ ID NO: 818325 - RNA, 19 nt, Artificial Sequence
  Description of Artificial Sequence: Synthetic oligonucleotide
  Antisense strand to SEQ ID NO: 818324
auucgcauguccaaaguca

SEQ ID NO: 818326 - RNA, 19 nt, Artificial Sequence
  Description of Artificial Sequence: Synthetic oligonucleotide
  Sense strand starting at position 1802 of SEQ ID NO: 587788
uuaagugauagguguacaa

SEQ ID NO: 818327 - RNA, 19 nt, Artificial Sequence
  Description of Artificial Sequence: Synthetic oligonucleotide
  Antisense strand to SEQ ID NO: 818326
uuguacaccuaucacuuaa

SEQ ID NO: 818328 - RNA, 19 nt, Artificial Sequence
  Description of Artificial Sequence: Synthetic oligonucleotide
  Sense strand starting at position 1898 of SEQ ID NO: 587788
acauaccugccauauaguu

SEQ ID NO: 818329 - RNA, 19 nt, Artificial Sequence
  Description of Artificial Sequence: Synthetic oligonucleotide
  Antisense strand to SEQ ID NO: 818328
aacuauauggcagguaugu

SEQ ID NO: 818330 - RNA, 19 nt, Artificial Sequence
  Description of Artificial Sequence: Synthetic oligonucleotide
  Sense strand starting at position 2100 of SEQ ID NO: 587788
gacauuauguaacuggcau

SEQ ID NO: 818331 - RNA, 19 nt, Artificial Sequence
  Description of Artificial Sequence: Synthetic oligonucleotide
  Antisense strand to SEQ ID NO: 818330
augccaguuacauaauguc

SEQ ID NO: 818332 - RNA, 19 nt, Artificial Sequence
  Description of Artificial Sequence: Synthetic oligonucleotide
  Sense strand starting at position 2194 of SEQ ID NO: 587788
agaacaguaugguuauaag

SEQ ID NO: 818333 - RNA, 19 nt, Artificial Sequence
  Description of Artificial Sequence: Synthetic oligonucleotide
  Antisense strand to SEQ ID NO: 818332
cuuauaaccauacuguucu

SEQ ID NO: 818334 - RNA, 19 nt, Artificial Sequence
  Description of Artificial Sequence: Synthetic oligonucleotide
  Sense strand starting at position 2204 of SEQ ID NO: 587788
gguuauaaguauucuaaca

SEQ ID NO: 818335 - RNA, 19 nt, Artificial Sequence
  Description of Artificial Sequence: Synthetic oligonucleotide
  Antisense strand to SEQ ID NO: 818334
uguuagaauacuuauaacc

SEQ ID NO: 818336 - RNA, 19 nt, Artificial Sequence
  Description of Artificial Sequence: Synthetic oligonucleotide
  Sense strand starting at position 2459 of SEQ ID NO: 587788
agggaugucuaccucuaau

SEQ ID NO: 818337 - RNA, 19 nt, Artificial Sequence
  Description of Artificial Sequence: Synthetic oligonucleotide
  Antisense strand to SEQ ID NO: 818336
auuagagguagacaucccu

SEQ ID NO: 818338 - RNA, 19 nt, Artificial Sequence
  Description of Artificial Sequence: Synthetic oligonucleotide
  Sense strand starting at position 2486 of SEQ ID NO: 587788
acaucacuauguuuacgaa

SEQ ID NO: 818339 - RNA, 19 nt, Artificial Sequence
  Description of Artificial Sequence: Synthetic oligonucleotide
  Antisense strand to SEQ ID NO: 818338
uucguaaacauagugaugu

SEQ ID NO: 818340 - RNA, 19 nt, Artificial Sequence
  Description of Artificial Sequence: Synthetic oligonucleotide
  Sense strand starting at position 2532 of SEQ ID NO: 587788
uugaguauggcuugaauag

SEQ ID NO: 818341 - RNA, 19 nt, Artificial Sequence
  Description of Artificial Sequence: Synthetic oligonucleotide
  Antisense strand to SEQ ID NO: 818340
cuauucaagccauacucaa

SEQ ID NO: 818342 - RNA, 19 nt, Artificial Sequence
  Description of Artificial Sequence: Synthetic oligonucleotide
  Sense strand starting at position 2711 of SEQ ID NO: 587788
uccgcaaugguugaagagu

SEQ ID NO: 818343 - RNA, 19 nt, Artificial Sequence
  Description of Artificial Sequence: Synthetic oligonucleotide
  Antisense strand to SEQ ID NO: 818342
acucuucaaccauugcgga

SEQ ID NO: 818344 - RNA, 19 nt, Artificial Sequence
  Description of Artificial Sequence: Synthetic oligonucleotide
  Sense strand starting at position 2891 of SEQ ID NO: 587788
ccaugcuuacccuggacau

SEQ ID NO: 818345 - RNA, 19 nt, Artificial Sequence
  Description of Artificial Sequence: Synthetic oligonucleotide
  Antisense strand to SEQ ID NO: 818344
auguccaggguaagcaugg

SEQ ID NO: 818346 - RNA, 19 nt, Artificial Sequence
  Description of Artificial Sequence: Synthetic oligonucleotide
  Sense strand starting at position 2911 of SEQ ID NO: 587788
gucugaaccuaguuuaacu

SEQ ID NO: 818347 - RNA, 19 nt, Artificial Sequence
  Description of Artificial Sequence: Synthetic oligonucleotide
  Antisense strand to SEQ ID NO: 818346
aguuaaacuagguucagac

SEQ ID NO: 818348 - RNA, 19 nt, Artificial Sequence
  Description of Artificial Sequence: Synthetic oligonucleotide
  Sense strand starting at position 2946 of SEQ ID NO: 587788
auuuaaguugcuuggguua

SEQ ID NO: 818349 - RNA, 19 nt, Artificial Sequence
  Description of Artificial Sequence: Synthetic oligonucleotide
  Antisense strand to SEQ ID NO: 818348
uaacccaagcaacuuaaau

SEQ ID NO: 818350 - RNA, 19 nt, Artificial Sequence
  Description of Artificial Sequence: Synthetic oligonucleotide
  Sense strand starting at position 2997 of SEQ ID NO: 587788
aacugcaucggugauacua

SEQ ID NO: 818351 - RNA, 19 nt, Artificial Sequence
  Description of Artificial Sequence: Synthetic oligonucleotide
  Antisense strand to SEQ ID NO: 818350
uaguaucaccgaugcaguu

SEQ ID NO: 818352 - RNA, 19 nt, Artificial Sequence
  Description of Artificial Sequence: Synthetic oligonucleotide
  Sense strand starting at position 3338 of SEQ ID NO: 587788
cuaugauugcaccagugga

SEQ ID NO: 818353 - RNA, 19 nt, Artificial Sequence
  Description of Artificial Sequence: Synthetic oligonucleotide
  Antisense strand to SEQ ID NO: 818352
uccacuggugcaaucauag

SEQ ID NO: 818354 - RNA, 19 nt, Artificial Sequence
  Description of Artificial Sequence: Synthetic oligonucleotide
  Sense strand starting at position 3516 of SEQ ID NO: 587788
guaugaugagaaggcugaa

SEQ ID NO: 818355 - RNA, 19 nt, Artificial Sequence
  Description of Artificial Sequence: Synthetic oligonucleotide
  Antisense strand to SEQ ID NO: 818354
uucagccuucucaucauac

SEQ ID NO: 818356 - RNA, 19 nt, Artificial Sequence
  Description of Artificial Sequence: Synthetic oligonucleotide
  Sense strand starting at position 3519 of SEQ ID NO: 587788
ugaugagaaggcugaacuu

SEQ ID NO: 818357 - RNA, 19 nt, Artificial Sequence
  Description of Artificial Sequence: Synthetic oligonucleotide
  Antisense strand to SEQ ID NO: 818356
aaguucagccuucucauca

SEQ ID NO: 818358 - RNA, 19 nt, Artificial Sequence
  Description of Artificial Sequence: Synthetic oligonucleotide
  Sense strand starting at position 3579 of SEQ ID NO: 587788
gguugaguugaucacccau

SEQ ID NO: 818359 - RNA, 19 nt, Artificial Sequence
  Description of Artificial Sequence: Synthetic oligonucleotide
  Antisense strand to SEQ ID NO: 818358
augggugaucaacucaacc

SEQ ID NO: 818360 - RNA, 19 nt, Artificial Sequence
  Description of Artificial Sequence: Synthetic oligonucleotide
  Sense strand starting at position 3846 of SEQ ID NO: 587788
gccacucuagcagauuaau

SEQ ID NO: 818361 - RNA, 19 nt, Artificial Sequence
  Description of Artificial Sequence: Synthetic oligonucleotide
  Antisense strand to SEQ ID NO: 818360
auuaaucugcuagaguggc

SEQ ID NO: 818362 - RNA, 19 nt, Artificial Sequence
  Description of Artificial Sequence: Synthetic oligonucleotide
  Sense strand starting at position 71 of SEQ ID NO: 587789
ucugaaacuugccucaguu

SEQ ID NO: 818363 - RNA, 19 nt, Artificial Sequence
  Description of Artificial Sequence: Synthetic oligonucleotide
  Antisense strand to SEQ ID NO: 818362
aacugaggcaaguuucaga

SEQ ID NO: 818364 - RNA, 19 nt, Artificial Sequence
  Description of Artificial Sequence: Synthetic oligonucleotide
  Sense strand starting at position 147 of SEQ ID NO: 587789
cuuagacugacuggguaau

SEQ ID NO: 818365 - RNA, 19 nt, Artificial Sequence
  Description of Artificial Sequence: Synthetic oligonucleotide
  Antisense strand to SEQ ID NO: 818364
auuacccagucagucuaag

SEQ ID NO: 818366 - RNA, 19 nt, Artificial Sequence
  Description of Artificial Sequence: Synthetic oligonucleotide
  Sense strand starting at position 148 of SEQ ID NO: 587789
uuagacugacuggguaauu

SEQ ID NO: 818367 - RNA, 19 nt, Artificial Sequence
  Description of Artificial Sequence: Synthetic oligonucleotide
  Antisense strand to SEQ ID NO: 818366
aauuacccagucagucuaa

SEQ ID NO: 818368 - RNA, 19 nt, Artificial Sequence
  Description of Artificial Sequence: Synthetic oligonucleotide
  Sense strand starting at position 665 of SEQ ID NO: 587789
auuucuuuauggccaguua

SEQ ID NO: 818369 - RNA, 19 nt, Artificial Sequence
  Description of Artificial Sequence: Synthetic oligonucleotide
  Antisense strand to SEQ ID NO: 818368
uaacuggccauaaagaaau

SEQ ID NO: 818370 - RNA, 19 nt, Artificial Sequence
  Description of Artificial Sequence: Synthetic oligonucleotide
  Sense strand starting at position 666 of SEQ ID NO: 587789
uuucuuuauggccaguuau

SEQ ID NO: 818371 - RNA, 19 nt, Artificial Sequence
  Description of Artificial Sequence: Synthetic oligonucleotide
  Antisense strand to SEQ ID NO: 818370
auaacuggccauaaagaaa

SEQ ID NO: 818372 - RNA, 19 nt, Artificial Sequence
  Description of Artificial Sequence: Synthetic oligonucleotide
  Sense strand starting at position 1006 of SEQ ID NO: 587789
guuucugagcccuaauucu

SEQ ID NO: 818373 - RNA, 19 nt, Artificial Sequence
  Description of Artificial Sequence: Synthetic oligonucleotide
  Antisense strand to SEQ ID NO: 818372
agaauuagggcucagaaac

SEQ ID NO: 818374 - RNA, 19 nt, Artificial Sequence
  Description of Artificial Sequence: Synthetic oligonucleotide
  Sense strand starting at position 1023 of SEQ ID NO: 587789
cuugcaagacuaugugaug

SEQ ID NO: 818375 - RNA, 19 nt, Artificial Sequence
  Description of Artificial Sequence: Synthetic oligonucleotide
  Antisense strand to SEQ ID NO: 818374
caucacauagucuugcaag

SEQ ID NO: 818376 - RNA, 19 nt, Artificial Sequence
  Description of Artificial Sequence: Synthetic oligonucleotide
  Sense strand starting at position 1024 of SEQ ID NO: 587789
uugcaagacuaugugauga

SEQ ID NO: 818377 - RNA, 19 nt, Artificial Sequence
  Description of Artificial Sequence: Synthetic oligonucleotide
  Antisense strand to SEQ ID NO: 818376
ucaucacauagucuugcaa

SEQ ID NO: 818378 - RNA, 19 nt, Artificial Sequence
  Description of Artificial Sequence: Synthetic oligonucleotide
  Sense strand starting at position 1032 of SEQ ID NO: 587789
cuaugugaugaaggcuaca

SEQ ID NO: 818379 - RNA, 19 nt, Artificial Sequence
  Description of Artificial Sequence: Synthetic oligonucleotide
  Antisense strand to SEQ ID NO: 818378
uguagccuucaucacauag

SEQ ID NO: 818380 - RNA, 19 nt, Artificial Sequence
  Description of Artificial Sequence: Synthetic oligonucleotide
  Sense strand starting at position 1035 of SEQ ID NO: 587789
ugugaugaaggcuacagua

SEQ ID NO: 818381 - RNA, 19 nt, Artificial Sequence
  Description of Artificial Sequence: Synthetic oligonucleotide
  Antisense strand to SEQ ID NO: 818380
uacuguagccuucaucaca

SEQ ID NO: 818382 - RNA, 19 nt, Artificial Sequence
  Description of Artificial Sequence: Synthetic oligonucleotide
  Sense strand starting at position 1246 of SEQ ID NO: 587789
acaugugaauugucuccca

SEQ ID NO: 818383 - RNA, 19 nt, Artificial Sequence
  Description of Artificial Sequence: Synthetic oligonucleotide
  Antisense strand to SEQ ID NO: 818382
ugggagacaauucacaugu

SEQ ID NO: 818384 - RNA, 19 nt, Artificial Sequence
  Description of Artificial Sequence: Synthetic oligonucleotide
  Sense strand starting at position 1249 of SEQ ID NO: 587789
ugugaauugucucccaaua

SEQ ID NO: 818385 - RNA, 19 nt, Artificial Sequence
  Description of Artificial Sequence: Synthetic oligonucleotide
  Antisense strand to SEQ ID NO: 818384
uauugggagacaauucaca

SEQ ID NO: 818386 - RNA, 19 nt, Artificial Sequence
  Description of Artificial Sequence: Synthetic oligonucleotide
  Sense strand starting at position 1315 of SEQ ID NO: 587789
gcuguaaagugaucaaacu

SEQ ID NO: 818387 - RNA, 19 nt, Artificial Sequence
  Description of Artificial Sequence: Synthetic oligonucleotide
  Antisense strand to SEQ ID NO: 818386
aguuugaucacuuuacagc

SEQ ID NO: 818388 - RNA, 19 nt, Artificial Sequence
  Description of Artificial Sequence: Synthetic oligonucleotide
  Sense strand starting at position 1341 of SEQ ID NO: 587789
gaaugaagaucugaaggaa

SEQ ID NO: 818389 - RNA, 19 nt, Artificial Sequence
  Description of Artificial Sequence: Synthetic oligonucleotide
  Antisense strand to SEQ ID NO: 818388
uuccuucagaucuucauuc

SEQ ID NO: 818390 - RNA, 19 nt, Artificial Sequence
  Description of Artificial Sequence: Synthetic oligonucleotide
  Sense strand starting at position 1391 of SEQ ID NO: 587789
gagcaugaacucuaguuau

SEQ ID NO: 818391 - RNA, 19 nt, Artificial Sequence
  Description of Artificial Sequence: Synthetic oligonucleotide
  Antisense strand to SEQ ID NO: 818390
auaacuagaguucaugcuc

SEQ ID NO: 818392 - RNA, 19 nt, Artificial Sequence
  Description of Artificial Sequence: Synthetic oligonucleotide
  Sense strand starting at position 1411 of SEQ ID NO: 587789
ucagcuaaacuuugcagaa

SEQ ID NO: 818393 - RNA, 19 nt, Artificial Sequence
  Description of Artificial Sequence: Synthetic oligonucleotide
  Antisense strand to SEQ ID NO: 818392
uucugcaaaguuuagcuga

SEQ ID NO: 818394 - RNA, 19 nt, Artificial Sequence
  Description of Artificial Sequence: Synthetic oligonucleotide
  Sense strand starting at position 1452 of SEQ ID NO: 587789
ugggcacuugcccauuaaa

SEQ ID NO: 818395 - RNA, 19 nt, Artificial Sequence
  Description of Artificial Sequence: Synthetic oligonucleotide
  Antisense strand to SEQ ID NO: 818394
uuuaaugggcaagugccca

SEQ ID NO: 818396 - RNA, 19 nt, Artificial Sequence
  Description of Artificial Sequence: Synthetic oligonucleotide
  Sense strand starting at position 1549 of SEQ ID NO: 587789
uuguacucaugaguaaaug

SEQ ID NO: 818397 - RNA, 19 nt, Artificial Sequence
  Description of Artificial Sequence: Synthetic oligonucleotide
  Antisense strand to SEQ ID NO: 818396
cauuuacucaugaguacaa

SEQ ID NO: 818398 - RNA, 19 nt, Artificial Sequence
  Description of Artificial Sequence: Synthetic oligonucleotide
  Sense strand starting at position 1746 of SEQ ID NO: 587789
ugcaaacuuaaguggugau

SEQ ID NO: 818399 - RNA, 19 nt, Artificial Sequence
  Description of Artificial Sequence: Synthetic oligonucleotide
  Antisense strand to SEQ ID NO: 818398
aucaccacuuaaguuugca

SEQ ID NO: 818400 - RNA, 19 nt, Artificial Sequence
  Description of Artificial Sequence: Synthetic oligonucleotide
  Sense strand starting at position 1747 of SEQ ID NO: 587789
gcaaacuuaaguggugauu

SEQ ID NO: 818401 - RNA, 19 nt, Artificial Sequence
  Description of Artificial Sequence: Synthetic oligonucleotide
  Antisense strand to SEQ ID NO: 818400
aaucaccacuuaaguuugc

SEQ ID NO: 818402 - RNA, 19 nt, Artificial Sequence
  Description of Artificial Sequence: Synthetic oligonucleotide
  Sense strand starting at position 1767 of SEQ ID NO: 587789
cacucacggugcuuuaaga

SEQ ID NO: 818403 - RNA, 19 nt, Artificial Sequence
  Description of Artificial Sequence: Synthetic oligonucleotide
  Antisense strand to SEQ ID NO: 818402
ucuuaaagcaccgugagug

SEQ ID NO: 818404 - RNA, 19 nt, Artificial Sequence
  Description of Artificial Sequence: Synthetic oligonucleotide
  Sense strand starting at position 2898 of SEQ ID NO: 587789
gaaagugacagaugagguu

SEQ ID NO: 818405 - RNA, 19 nt, Artificial Sequence
  Description of Artificial Sequence: Synthetic oligonucleotide
  Antisense strand to SEQ ID NO: 818404
aaccucaucugucacuuuc

SEQ ID NO: 818406 - RNA, 19 nt, Artificial Sequence
  Description of Artificial Sequence: Synthetic oligonucleotide
  Sense strand starting at position 2914 of SEQ ID NO: 587789
guuacaugauguucccaag

SEQ ID NO: 818407 - RNA, 19 nt, Artificial Sequence
  Description of Artificial Sequence: Synthetic oligonucleotide
  Antisense strand to SEQ ID NO: 818406
cuugggaacaucauguaac

SEQ ID NO: 818408 - RNA, 19 nt, Artificial Sequence
  Description of Artificial Sequence: Synthetic oligonucleotide
  Sense strand starting at position 3154 of SEQ ID NO: 587789
guuuguauuaucugaguga

SEQ ID NO: 818409 - RNA, 19 nt, Artificial Sequence
  Description of Artificial Sequence: Synthetic oligonucleotide
  Antisense strand to SEQ ID NO: 818408
ucacucagauaauacaaac

SEQ ID NO: 818410 - RNA, 19 nt, Artificial Sequence
  Description of Artificial Sequence: Synthetic oligonucleotide
  Sense strand starting at position 3157 of SEQ ID NO: 587789
uguauuaucugagugagag

SEQ ID NO: 818411 - RNA, 19 nt, Artificial Sequence
  Description of Artificial Sequence: Synthetic oligonucleotide
  Antisense strand to SEQ ID NO: 818410
cucucacucagauaauaca

SEQ ID NO: 818412 - RNA, 19 nt, Artificial Sequence
  Description of Artificial Sequence: Synthetic oligonucleotide
  Sense strand starting at position 3158 of SEQ ID NO: 587789
guauuaucugagugagagg

SEQ ID NO: 818413 - RNA, 19 nt, Artificial Sequence
  Description of Artificial Sequence: Synthetic oligonucleotide
  Antisense strand to SEQ ID NO: 818412
ccucucacucagauaauac

SEQ ID NO: 818414 - RNA, 19 nt, Artificial Sequence
  Description of Artificial Sequence: Synthetic oligonucleotide
  Sense strand starting at position 3159 of SEQ ID NO: 587789
uauuaucugagugagaggu

SEQ ID NO: 818415 - RNA, 19 nt, Artificial Sequence
  Description of Artificial Sequence: Synthetic oligonucleotide
  Antisense strand to SEQ ID NO: 818414
accucucacucagauaaua

SEQ ID NO: 818416 - RNA, 19 nt, Artificial Sequence
  Description of Artificial Sequence: Synthetic oligonucleotide
  Sense strand starting at position 3169 of SEQ ID NO: 587789
gugagaggucucugacccu

SEQ ID NO: 818417 - RNA, 19 nt, Artificial Sequence
  Description of Artificial Sequence: Synthetic oligonucleotide
  Antisense strand to SEQ ID NO: 818416
agggucagagaccucucac

SEQ ID NO: 818418 - RNA, 19 nt, Artificial Sequence
  Description of Artificial Sequence: Synthetic oligonucleotide
  Sense strand starting at position 3196 of SEQ ID NO: 587789
ggccuauucugguuuauaa

SEQ ID NO: 818419 - RNA, 19 nt, Artificial Sequence
  Description of Artificial Sequence: Synthetic oligonucleotide
  Antisense strand to SEQ ID NO: 818418
uuauaaaccagaauaggcc

SEQ ID NO: 818420 - RNA, 19 nt, Artificial Sequence
  Description of Artificial Sequence: Synthetic oligonucleotide
  Sense strand starting at position 3198 of SEQ ID NO: 587789
ccuauucugguuuauaaag

SEQ ID NO: 818421 - RNA, 19 nt, Artificial Sequence
  Description of Artificial Sequence: Synthetic oligonucleotide
  Antisense strand to SEQ ID NO: 818420
cuuuauaaaccagaauagg

SEQ ID NO: 818422 - RNA, 19 nt, Artificial Sequence
  Description of Artificial Sequence: Synthetic oligonucleotide
  Sense strand starting at position 3216 of SEQ ID NO: 587789
gcagcaucuccauaucuag

SEQ ID NO: 818423 - RNA, 19 nt, Artificial Sequence
  Description of Artificial Sequence: Synthetic oligonucleotide
  Antisense strand to SEQ ID NO: 818422
cuagauauggagaugcugc

SEQ ID NO: 818424 - RNA, 19 nt, Artificial Sequence
  Description of Artificial Sequence: Synthetic oligonucleotide
  Sense strand starting at position 3219 of SEQ ID NO: 587789
gcaucuccauaucuagagu

SEQ ID NO: 818425 - RNA, 19 nt, Artificial Sequence
  Description of Artificial Sequence: Synthetic oligonucleotide
  Antisense strand to SEQ ID NO: 818424
acucuagauauggagaugc

SEQ ID NO: 818426 - RNA, 19 nt, Artificial Sequence
  Description of Artificial Sequence: Synthetic oligonucleotide
  Sense strand starting at position 3222 of SEQ ID NO: 587789
ucuccauaucuagaguucu

SEQ ID NO: 818427 - RNA, 19 nt, Artificial Sequence
  Description of Artificial Sequence: Synthetic oligonucleotide
  Antisense strand to SEQ ID NO: 818426
agaacucuagauauggaga

SEQ ID NO: 818428 - RNA, 19 nt, Artificial Sequence
  Description of Artificial Sequence: Synthetic oligonucleotide
  Sense strand starting at position 3234 of SEQ ID NO: 587789
gaguucuagugacuauaca

SEQ ID NO: 818429 - RNA, 19 nt, Artificial Sequence
  Description of Artificial Sequence: Synthetic oligonucleotide
  Antisense strand to SEQ ID NO: 818428
uguauagucacuagaacuc

SEQ ID NO: 818430 - RNA, 19 nt, Artificial Sequence
  Description of Artificial Sequence: Synthetic oligonucleotide
  Sense strand starting at position 3235 of SEQ ID NO: 587789
aguucuagugacuauacau

SEQ ID NO: 818431 - RNA, 19 nt, Artificial Sequence
  Description of Artificial Sequence: Synthetic oligonucleotide
  Antisense strand to SEQ ID NO: 818430
auguauagucacuagaacu

SEQ ID NO: 818432 - RNA, 19 nt, Artificial Sequence
  Description of Artificial Sequence: Synthetic oligonucleotide
  Sense strand starting at position 3362 of SEQ ID NO: 587789
guuuaaucuuagcccauag

SEQ ID NO: 818433 - RNA, 19 nt, Artificial Sequence
  Description of Artificial Sequence: Synthetic oligonucleotide
  Antisense strand to SEQ ID NO: 818432
cuaugggcuaagauuaaac

SEQ ID NO: 818434 - RNA, 19 nt, Artificial Sequence
  Description of Artificial Sequence: Synthetic oligonucleotide
  Sense strand starting at position 3364 of SEQ ID NO: 587789
uuaaucuuagcccauagga

SEQ ID NO: 818435 - RNA, 19 nt, Artificial Sequence
  Description of Artificial Sequence: Synthetic oligonucleotide
  Antisense strand to SEQ ID NO: 818434
uccuaugggcuaagauuaa

SEQ ID NO: 818436 - RNA, 19 nt, Artificial Sequence
  Description of Artificial Sequence: Synthetic oligonucleotide
  Sense strand starting at position 3411 of SEQ ID NO: 587789
acauauguaucaguugaaa

SEQ ID NO: 818437 - RNA, 19 nt, Artificial Sequence
  Description of Artificial Sequence: Synthetic oligonucleotide
  Antisense strand to SEQ ID NO: 818436
uuucaacugauacauaugu

SEQ ID NO: 818438 - RNA, 19 nt, Artificial Sequence
  Description of Artificial Sequence: Synthetic oligonucleotide
  Sense strand starting at position 3441 of SEQ ID NO: 587789
ugaacauguccauggcacu

SEQ ID NO: 818439 - RNA, 19 nt, Artificial Sequence
  Description of Artificial Sequence: Synthetic oligonucleotide
  Antisense strand to SEQ ID NO: 818438
agugccauggacauguuca

SEQ ID NO: 818440 - RNA, 19 nt, Artificial Sequence
  Description of Artificial Sequence: Synthetic oligonucleotide
  Sense strand starting at position 3504 of SEQ ID NO: 587789
accucuaucgcccagguua

SEQ ID NO: 818441 - RNA, 19 nt, Artificial Sequence
  Description of Artificial Sequence: Synthetic oligonucleotide
  Antisense strand to SEQ ID NO: 818440
uaaccugggcgauagaggu

SEQ ID NO: 818442 - RNA, 19 nt, Artificial Sequence
  Description of Artificial Sequence: Synthetic oligonucleotide
  Sense strand starting at position 28 of SEQ ID NO: 587790
agaguaggguugccagaua

SEQ ID NO: 818443 - RNA, 19 nt, Artificial Sequence
  Description of Artificial Sequence: Synthetic oligonucleotide
  Antisense strand to SEQ ID NO: 818442
uaucuggcaacccuacucu

SEQ ID NO: 818444 - RNA, 19 nt, Artificial Sequence
  Description of Artificial Sequence: Synthetic oligonucleotide
  Sense strand starting at position 86 of SEQ ID NO: 587790
agugaauaauguuugagua

SEQ ID NO: 818445 - RNA, 19 nt, Artificial Sequence
  Description of Artificial Sequence: Synthetic oligonucleotide
  Antisense strand to SEQ ID NO: 818444
uacucaaacauuauucacu

SEQ ID NO: 818446 - RNA, 19 nt, Artificial Sequence
  Description of Artificial Sequence: Synthetic oligonucleotide
  Sense strand starting at position 87 of SEQ ID NO: 587790
gugaauaauguuugaguau

SEQ ID NO: 818447 - RNA, 19 nt, Artificial Sequence
  Description of Artificial Sequence: Synthetic oligonucleotide
  Antisense strand to SEQ ID NO: 818446
auacucaaacauuauucac

SEQ ID NO: 818448 - RNA, 19 nt, Artificial Sequence
  Description of Artificial Sequence: Synthetic oligonucleotide
  Sense strand starting at position 99 of SEQ ID NO: 587790
ugaguauaaguauguucca

SEQ ID NO: 818449 - RNA, 19 nt, Artificial Sequence
  Description of Artificial Sequence: Synthetic oligonucleotide
  Antisense strand to SEQ ID NO: 818448
uggaacauacuuauacuca

SEQ ID NO: 818450 - RNA, 19 nt, Artificial Sequence
  Description of Artificial Sequence: Synthetic oligonucleotide
  Sense strand starting at position 100 of SEQ ID NO: 587790
gaguauaaguauguuccau

SEQ ID NO: 818451 - RNA, 19 nt, Artificial Sequence
  Description of Artificial Sequence: Synthetic oligonucleotide
  Antisense strand to SEQ ID NO: 818450
auggaacauacuuauacuc

SEQ ID NO: 818452 - RNA, 19 nt, Artificial Sequence
  Description of Artificial Sequence: Synthetic oligonucleotide
  Sense strand starting at position 128 of SEQ ID NO: 587790
gagacauauuuguagugaa

SEQ ID NO: 818453 - RNA, 19 nt, Artificial Sequence
  Description of Artificial Sequence: Synthetic oligonucleotide
  Antisense strand to SEQ ID NO: 818452
uucacuacaaauaugucuc

SEQ ID NO: 818454 - RNA, 19 nt, Artificial Sequence
  Description of Artificial Sequence: Synthetic oligonucleotide
  Sense strand starting at position 158 of SEQ ID NO: 587790
uugagugcuuaucugaaau

SEQ ID NO: 818455 - RNA, 19 nt, Artificial Sequence
  Description of Artificial Sequence: Synthetic oligonucleotide
  Antisense strand to SEQ ID NO: 818454
auuucagauaagcacucaa

SEQ ID NO: 818456 - RNA, 19 nt, Artificial Sequence
  Description of Artificial Sequence: Synthetic oligonucleotide
  Sense strand starting at position 481 of SEQ ID NO: 587790
uugugcuaauuucuaguca

SEQ ID NO: 818457 - RNA, 19 nt, Artificial Sequence
  Description of Artificial Sequence: Synthetic oligonucleotide
  Antisense strand to SEQ ID NO: 818456
ugacuagaaauuagcacaa

SEQ ID NO: 818458 - RNA, 19 nt, Artificial Sequence
  Description of Artificial Sequence: Synthetic oligonucleotide
  Sense strand starting at position 727 of SEQ ID NO: 587790
gugccuccugaauggauga

SEQ ID NO: 818459 - RNA, 19 nt, Artificial Sequence
  Description of Artificial Sequence: Synthetic oligonucleotide
  Antisense strand to SEQ ID NO: 818458
ucauccauucaggaggcac

SEQ ID NO: 818460 - RNA, 19 nt, Artificial Sequence
  Description of Artificial Sequence: Synthetic oligonucleotide
  Sense strand starting at position 1263 of SEQ ID NO: 587790
ggaggcggcuucucaagau

SEQ ID NO: 818461 - RNA, 19 nt, Artificial Sequence
  Description of Artificial Sequence: Synthetic oligonucleotide
  Antisense strand to SEQ ID NO: 818460
aucuugagaagccgccucc

SEQ ID NO: 818462 - RNA, 19 nt, Artificial Sequence
  Description of Artificial Sequence: Synthetic oligonucleotide
  Sense strand starting at position 1267 of SEQ ID NO: 587790
gcggcuucucaagauacca

SEQ ID NO: 818463 - RNA, 19 nt, Artificial Sequence
  Description of Artificial Sequence: Synthetic oligonucleotide
  Antisense strand to SEQ ID NO: 818462
ugguaucuugagaagccgc

SEQ ID NO: 818464 - RNA, 19 nt, Artificial Sequence
  Description of Artificial Sequence: Synthetic oligonucleotide
  Sense strand starting at position 1284 of SEQ ID NO: 587790
cagaauggccaguguuaac

SEQ ID NO: 818465 - RNA, 19 nt, Artificial Sequence
  Description of Artificial Sequence: Synthetic oligonucleotide
  Antisense strand to SEQ ID NO: 818464
guuaacacuggccauucug

SEQ ID NO: 818466 - RNA, 19 nt, Artificial Sequence
  Description of Artificial Sequence: Synthetic oligonucleotide
  Sense strand starting at position 1610 of SEQ ID NO: 587790
cugucugaauauguugaga

SEQ ID NO: 818467 - RNA, 19 nt, Artificial Sequence
  Description of Artificial Sequence: Synthetic oligonucleotide
  Antisense strand to SEQ ID NO: 818466
ucucaacauauucagacag

SEQ ID NO: 818468 - RNA, 19 nt, Artificial Sequence
  Description of Artificial Sequence: Synthetic oligonucleotide
  Sense strand starting at position 2221 of SEQ ID NO: 587790
gggauccucggauguuaug

SEQ ID NO: 818469 - RNA, 19 nt, Artificial Sequence
  Description of Artificial Sequence: Synthetic oligonucleotide
  Antisense strand to SEQ ID NO: 818468
cauaacauccgaggauccc

SEQ ID NO: 818470 - RNA, 19 nt, Artificial Sequence
  Description of Artificial Sequence: Synthetic oligonucleotide
  Sense strand starting at position 2412 of SEQ ID NO: 587790
auguuauaucuacauggua

SEQ ID NO: 818471 - RNA, 19 nt, Artificial Sequence
  Description of Artificial Sequence: Synthetic oligonucleotide
  Antisense strand to SEQ ID NO: 818470
uaccauguagauauaacau

SEQ ID NO: 818472 - RNA, 19 nt, Artificial Sequence
  Description of Artificial Sequence: Synthetic oligonucleotide
  Sense strand starting at position 2594 of SEQ ID NO: 587790
gcacaagaauaguuagaga

SEQ ID NO: 818473 - RNA, 19 nt, Artificial Sequence
  Description of Artificial Sequence: Synthetic oligonucleotide
  Antisense strand to SEQ ID NO: 818472
ucucuaacuauucuugugc

SEQ ID NO: 818474 - RNA, 19 nt, Artificial Sequence
  Description of Artificial Sequence: Synthetic oligonucleotide
  Sense strand starting at position 2672 of SEQ ID NO: 587790
ggugauaugugagcaggca

SEQ ID NO: 818475 - RNA, 19 nt, Artificial Sequence
  Description of Artificial Sequence: Synthetic oligonucleotide
  Antisense strand to SEQ ID NO: 818474
ugccugcucacauaucacc

SEQ ID NO: 818476 - RNA, 19 nt, Artificial Sequence
  Description of Artificial Sequence: Synthetic oligonucleotide
  Sense strand starting at position 2759 of SEQ ID NO: 587790
gaggaagugaccuggacuu

SEQ ID NO: 818477 - RNA, 19 nt, Artificial Sequence
  Description of Artificial Sequence: Synthetic oligonucleotide
  Antisense strand to SEQ ID NO: 818476
aaguccaggucacuuccuc

SEQ ID NO: 818478 - RNA, 19 nt, Artificial Sequence
  Description of Artificial Sequence: Synthetic oligonucleotide
  Sense strand starting at position 2765 of SEQ ID NO: 587790
gugaccuggacuuggcaua

SEQ ID NO: 818479 - RNA, 19 nt, Artificial Sequence
  Description of Artificial Sequence: Synthetic oligonucleotide
  Antisense strand to SEQ ID NO: 818478
uaugccaaguccaggucac

SEQ ID NO: 818480 - RNA, 19 nt, Artificial Sequence
  Description of Artificial Sequence: Synthetic oligonucleotide
  Sense strand starting at position 2966 of SEQ ID NO: 587790
uggaguugugcugaggaag

SEQ ID NO: 818481 - RNA, 19 nt, Artificial Sequence
  Description of Artificial Sequence: Synthetic oligonucleotide
  Antisense strand to SEQ ID NO: 818480
cuuccucagcacaacucca

SEQ ID NO: 818482 - RNA, 19 nt, Artificial Sequence
  Description of Artificial Sequence: Synthetic oligonucleotide
  Sense strand starting at position 2983 of SEQ ID NO: 587790
agcacucaguuuccaagau

SEQ ID NO: 818483 - RNA, 19 nt, Artificial Sequence
  Description of Artificial Sequence: Synthetic oligonucleotide
  Antisense strand to SEQ ID NO: 818482
aucuuggaaacugagugcu

SEQ ID NO: 818484 - RNA, 19 nt, Artificial Sequence
  Description of Artificial Sequence: Synthetic oligonucleotide
  Sense strand starting at position 2987 of SEQ ID NO: 587790
cucaguuuccaagauugca

SEQ ID NO: 818485 - RNA, 19 nt, Artificial Sequence
  Description of Artificial Sequence: Synthetic oligonucleotide
  Antisense strand to SEQ ID NO: 818484
ugcaaucuuggaaacugag

SEQ ID NO: 818486 - RNA, 19 nt, Artificial Sequence
  Description of Artificial Sequence: Synthetic oligonucleotide
  Sense strand starting at position 3060 of SEQ ID NO: 587790
cuaggaagucaauguuucu

SEQ ID NO: 818487 - RNA, 19 nt, Artificial Sequence
  Description of Artificial Sequence: Synthetic oligonucleotide
  Antisense strand to SEQ ID NO: 818486
agaaacauugacuuccuag

SEQ ID NO: 818488 - RNA, 19 nt, Artificial Sequence
  Description of Artificial Sequence: Synthetic oligonucleotide
  Sense strand starting at position 3063 of SEQ ID NO: 587790
ggaagucaauguuucucaa

SEQ ID NO: 818489 - RNA, 19 nt, Artificial Sequence
  Description of Artificial Sequence: Synthetic oligonucleotide
  Antisense strand to SEQ ID NO: 818488
uugagaaacauugacuucc

SEQ ID NO: 818490 - RNA, 19 nt, Artificial Sequence
  Description of Artificial Sequence: Synthetic oligonucleotide
  Sense strand starting at position 3066 of SEQ ID NO: 587790
agucaauguuucucaaagu

SEQ ID NO: 818491 - RNA, 19 nt, Artificial Sequence
  Description of Artificial Sequence: Synthetic oligonucleotide
  Antisense strand to SEQ ID NO: 818490
acuuugagaaacauugacu

SEQ ID NO: 818492 - RNA, 19 nt, Artificial Sequence
  Description of Artificial Sequence: Synthetic oligonucleotide
  Sense strand starting at position 3092 of SEQ ID NO: 587790
guggacuacccauagcuau

SEQ ID NO: 818493 - RNA, 19 nt, Artificial Sequence
  Description of Artificial Sequence: Synthetic oligonucleotide
  Antisense strand to SEQ ID NO: 818492
auagcuauggguaguccac

SEQ ID NO: 818494 - RNA, 19 nt, Artificial Sequence
  Description of Artificial Sequence: Synthetic oligonucleotide
  Sense strand starting at position 3105 of SEQ ID NO: 587790
agcuauuggcuggauguca

SEQ ID NO: 818495 - RNA, 19 nt, Artificial Sequence
  Description of Artificial Sequence: Synthetic oligonucleotide
  Antisense strand to SEQ ID NO: 818494
ugacauccagccaauagcu

SEQ ID NO: 818496 - RNA, 19 nt, Artificial Sequence
  Description of Artificial Sequence: Synthetic oligonucleotide
  Sense strand starting at position 3290 of SEQ ID NO: 587790
ggagguaaucuuggugacu

SEQ ID NO: 818497 - RNA, 19 nt, Artificial Sequence
  Description of Artificial Sequence: Synthetic oligonucleotide
  Antisense strand to SEQ ID NO: 818496
agucaccaagauuaccucc

SEQ ID NO: 818498 - RNA, 19 nt, Artificial Sequence
  Description of Artificial Sequence: Synthetic oligonucleotide
  Sense strand starting at position 3291 of SEQ ID NO: 587790
gagguaaucuuggugacua

SEQ ID NO: 818499 - RNA, 19 nt, Artificial Sequence
  Description of Artificial Sequence: Synthetic oligonucleotide
  Antisense strand to SEQ ID NO: 818498
uagucaccaagauuaccuc

SEQ ID NO: 818500 - RNA, 19 nt, Artificial Sequence
  Description of Artificial Sequence: Synthetic oligonucleotide
  Sense strand starting at position 3293 of SEQ ID NO: 587790
gguaaucuuggugacuaca

SEQ ID NO: 818501 - RNA, 19 nt, Artificial Sequence
  Description of Artificial Sequence: Synthetic oligonucleotide
  Antisense strand to SEQ ID NO: 818500
uguagucaccaagauuacc

SEQ ID NO: 818502 - RNA, 19 nt, Artificial Sequence
  Description of Artificial Sequence: Synthetic oligonucleotide
  Sense strand starting at position 3485 of SEQ ID NO: 587790
cguauucuugcgcuuggaa

SEQ ID NO: 818503 - RNA, 19 nt, Artificial Sequence
  Description of Artificial Sequence: Synthetic oligonucleotide
  Antisense strand to SEQ ID NO: 818502
uuccaagcgcaagaauacg

SEQ ID NO: 818504 - RNA, 19 nt, Artificial Sequence
  Description of Artificial Sequence: Synthetic oligonucleotide
  Sense strand starting at position 3532 of SEQ ID NO: 587790
aaguuagauaccuggguga

SEQ ID NO: 818505 - RNA, 19 nt, Artificial Sequence
  Description of Artificial Sequence: Synthetic oligonucleotide
  Antisense strand to SEQ ID NO: 818504
ucacccagguaucuaacuu

SEQ ID NO: 818506 - RNA, 19 nt, Artificial Sequence
  Description of Artificial Sequence: Synthetic oligonucleotide
  Sense strand starting at position 3534 of SEQ ID NO: 587790
guuagauaccugggugagu

SEQ ID NO: 818507 - RNA, 19 nt, Artificial Sequence
  Description of Artificial Sequence: Synthetic oligonucleotide
  Antisense strand to SEQ ID NO: 818506
acucacccagguaucuaac

SEQ ID NO: 818508 - RNA, 19 nt, Artificial Sequence
  Description of Artificial Sequence: Synthetic oligonucleotide
  Sense strand starting at position 3535 of SEQ ID NO: 587790
uuagauaccugggugaguu

SEQ ID NO: 818509 - RNA, 19 nt, Artificial Sequence
  Description of Artificial Sequence: Synthetic oligonucleotide
  Antisense strand to SEQ ID NO: 818508
aacucacccagguaucuaa

SEQ ID NO: 818510 - RNA, 19 nt, Artificial Sequence
  Description of Artificial Sequence: Synthetic oligonucleotide
  Sense strand starting at position 3545 of SEQ ID NO: 587790
gggugaguuguugagaguc

SEQ ID NO: 818511 - RNA, 19 nt, Artificial Sequence
  Description of Artificial Sequence: Synthetic oligonucleotide
  Antisense strand to SEQ ID NO: 818510
gacucucaacaacucaccc

SEQ ID NO: 818512 - RNA, 19 nt, Artificial Sequence
  Description of Artificial Sequence: Synthetic oligonucleotide
  Sense strand starting at position 3553 of SEQ ID NO: 587790
uguugagagucuguacuag

SEQ ID NO: 818513 - RNA, 19 nt, Artificial Sequence
  Description of Artificial Sequence: Synthetic oligonucleotide
  Antisense strand to SEQ ID NO: 818512
cuaguacagacucucaaca

SEQ ID NO: 818514 - RNA, 19 nt, Artificial Sequence
  Description of Artificial Sequence: Synthetic oligonucleotide
  Sense strand starting at position 3674 of SEQ ID NO: 587790
cuuaucuugcugggaccaa

SEQ ID NO: 818515 - RNA, 19 nt, Artificial Sequence
  Description of Artificial Sequence: Synthetic oligonucleotide
  Antisense strand to SEQ ID NO: 818514
uuggucccagcaagauaag

SEQ ID NO: 818516 - RNA, 19 nt, Artificial Sequence
  Description of Artificial Sequence: Synthetic oligonucleotide
  Sense strand starting at position 3863 of SEQ ID NO: 587790
cagugucauguacaagcaa

SEQ ID NO: 818517 - RNA, 19 nt, Artificial Sequence
  Description of Artificial Sequence: Synthetic oligonucleotide
  Antisense strand to SEQ ID NO: 818516
uugcuuguacaugacacug

SEQ ID NO: 818518 - RNA, 19 nt, Artificial Sequence
  Description of Artificial Sequence: Synthetic oligonucleotide
  Sense strand starting at position 3899 of SEQ ID NO: 587790
ugcauuucugccuguuacu

SEQ ID NO: 818519 - RNA, 19 nt, Artificial Sequence
  Description of Artificial Sequence: Synthetic oligonucleotide
  Antisense strand to SEQ ID NO: 818518
aguaacaggcagaaaugca

SEQ ID NO: 818520 - RNA, 19 nt, Artificial Sequence
  Description of Artificial Sequence: Synthetic oligonucleotide
  Sense strand starting at position 3981 of SEQ ID NO: 587790
agacacuauccauggcgau

SEQ ID NO: 818521 - RNA, 19 nt, Artificial Sequence
  Description of Artificial Sequence: Synthetic oligonucleotide
  Antisense strand to SEQ ID NO: 818520
aucgccauggauagugucu

SEQ ID NO: 818522 - RNA, 19 nt, Artificial Sequence
  Description of Artificial Sequence: Synthetic oligonucleotide
  Sense strand starting at position 1 of SEQ ID NO: 587791
agugaauaauguuugagua

SEQ ID NO: 818523 - RNA, 19 nt, Artificial Sequence
  Description of Artificial Sequence: Synthetic oligonucleotide
  Antisense strand to SEQ ID NO: 818522
uacucaaacauuauucacu

SEQ ID NO: 818524 - RNA, 19 nt, Artificial Sequence
  Description of Artificial Sequence: Synthetic oligonucleotide
  Sense strand starting at position 2 of SEQ ID NO: 587791
gugaauaauguuugaguau

SEQ ID NO: 818525 - RNA, 19 nt, Artificial Sequence
  Description of Artificial Sequence: Synthetic oligonucleotide
  Antisense strand to SEQ ID NO: 818524
auacucaaacauuauucac

SEQ ID NO: 818526 - RNA, 19 nt, Artificial Sequence
  Description of Artificial Sequence: Synthetic oligonucleotide
  Sense strand starting at position 14 of SEQ ID NO: 587791
ugaguauaaguauguucca

SEQ ID NO: 818527 - RNA, 19 nt, Artificial Sequence
  Description of Artificial Sequence: Synthetic oligonucleotide
  Antisense strand to SEQ ID NO: 818526
uggaacauacuuauacuca

SEQ ID NO: 818528 - RNA, 19 nt, Artificial Sequence
  Description of Artificial Sequence: Synthetic oligonucleotide
  Sense strand starting at position 15 of SEQ ID NO: 587791
gaguauaaguauguuccau

SEQ ID NO: 818529 - RNA, 19 nt, Artificial Sequence
  Description of Artificial Sequence: Synthetic oligonucleotide
  Antisense strand to SEQ ID NO: 818528
auggaacauacuuauacuc

SEQ ID NO: 818530 - RNA, 19 nt, Artificial Sequence
  Description of Artificial Sequence: Synthetic oligonucleotide
  Sense strand starting at position 43 of SEQ ID NO: 587791
gagacauauuuguagugaa

SEQ ID NO: 818531 - RNA, 19 nt, Artificial Sequence
  Description of Artificial Sequence: Synthetic oligonucleotide
  Antisense strand to SEQ ID NO: 818530
uucacuacaaauaugucuc

SEQ ID NO: 818532 - RNA, 19 nt, Artificial Sequence
  Description of Artificial Sequence: Synthetic oligonucleotide
  Sense strand starting at position 73 of SEQ ID NO: 587791
uugagugcuuaucugaaau

SEQ ID NO: 818533 - RNA, 19 nt, Artificial Sequence
  Description of Artificial Sequence: Synthetic oligonucleotide
  Antisense strand to SEQ ID NO: 818532
auuucagauaagcacucaa

SEQ ID NO: 818534 - RNA, 19 nt, Artificial Sequence
  Description of Artificial Sequence: Synthetic oligonucleotide
  Sense strand starting at position 396 of SEQ ID NO: 587791
uugugcuaauuucuaguca

SEQ ID NO: 818535 - RNA, 19 nt, Artificial Sequence
  Description of Artificial Sequence: Synthetic oligonucleotide
  Antisense strand to SEQ ID NO: 818534
ugacuagaaauuagcacaa

SEQ ID NO: 818536 - RNA, 19 nt, Artificial Sequence
  Description of Artificial Sequence: Synthetic oligonucleotide
  Sense strand starting at position 642 of SEQ ID NO: 587791
gugccuccugaauggauga

SEQ ID NO: 818537 - RNA, 19 nt, Artificial Sequence
  Description of Artificial Sequence: Synthetic oligonucleotide
  Antisense strand to SEQ ID NO: 818536
ucauccauucaggaggcac

SEQ ID NO: 818538 - RNA, 19 nt, Artificial Sequence
  Description of Artificial Sequence: Synthetic oligonucleotide
  Sense strand starting at position 1178 of SEQ ID NO: 587791
ggaggcggcuucucaagau

SEQ ID NO: 818539 - RNA, 19 nt, Artificial Sequence
  Description of Artificial Sequence: Synthetic oligonucleotide
  Antisense strand to SEQ ID NO: 818538
aucuugagaagccgccucc

SEQ ID NO: 818540 - RNA, 19 nt, Artificial Sequence
  Description of Artificial Sequence: Synthetic oligonucleotide
  Sense strand starting at position 1182 of SEQ ID NO: 587791
gcggcuucucaagauacca

SEQ ID NO: 818541 - RNA, 19 nt, Artificial Sequence
  Description of Artificial Sequence: Synthetic oligonucleotide
  Antisense strand to SEQ ID NO: 818540
ugguaucuugagaagccgc

SEQ ID NO: 818542 - RNA, 19 nt, Artificial Sequence
  Description of Artificial Sequence: Synthetic oligonucleotide
  Sense strand starting at position 1199 of SEQ ID NO: 587791
cagaauggccaguguuaac

SEQ ID NO: 818543 - RNA, 19 nt, Artificial Sequence
  Description of Artificial Sequence: Synthetic oligonucleotide
  Antisense strand to SEQ ID NO: 818542
guuaacacuggccauucug

SEQ ID NO: 818544 - RNA, 19 nt, Artificial Sequence
  Description of Artificial Sequence: Synthetic oligonucleotide
  Sense strand starting at position 1525 of SEQ ID NO: 587791
cugucugaauauguugaga

SEQ ID NO: 818545 - RNA, 19 nt, Artificial Sequence
  Description of Artificial Sequence: Synthetic oligonucleotide
  Antisense strand to SEQ ID NO: 818544
ucucaacauauucagacag

SEQ ID NO: 818546 - RNA, 19 nt, Artificial Sequence
  Description of Artificial Sequence: Synthetic oligonucleotide
  Sense strand starting at position 2136 of SEQ ID NO: 587791
gggauccucggauguuaug

SEQ ID NO: 818547 - RNA, 19 nt, Artificial Sequence
  Description of Artificial Sequence: Synthetic oligonucleotide
  Antisense strand to SEQ ID NO: 818546
cauaacauccgaggauccc

SEQ ID NO: 818548 - RNA, 19 nt, Artificial Sequence
  Description of Artificial Sequence: Synthetic oligonucleotide
  Sense strand starting at position 2327 of SEQ ID NO: 587791
auguuauaucuacauggua

SEQ ID NO: 818549 - RNA, 19 nt, Artificial Sequence
  Description of Artificial Sequence: Synthetic oligonucleotide
  Antisense strand to SEQ ID NO: 818548
uaccauguagauauaacau

SEQ ID NO: 818550 - RNA, 19 nt, Artificial Sequence
  Description of Artificial Sequence: Synthetic oligonucleotide
  Sense strand starting at position 2509 of SEQ ID NO: 587791
gcacaagaauaguuagaga

SEQ ID NO: 818551 - RNA, 19 nt, Artificial Sequence
  Description of Artificial Sequence: Synthetic oligonucleotide
  Antisense strand to SEQ ID NO: 818550
ucucuaacuauucuugugc

SEQ ID NO: 818552 - RNA, 19 nt, Artificial Sequence
  Description of Artificial Sequence: Synthetic oligonucleotide
  Sense strand starting at position 2587 of SEQ ID NO: 587791
ggugauaugugagcaggca

SEQ ID NO: 818553 - RNA, 19 nt, Artificial Sequence
  Description of Artificial Sequence: Synthetic oligonucleotide
  Antisense strand to SEQ ID NO: 818552
ugccugcucacauaucacc

SEQ ID NO: 818554 - RNA, 19 nt, Artificial Sequence
  Description of Artificial Sequence: Synthetic oligonucleotide
  Sense strand starting at position 2674 of SEQ ID NO: 587791
gaggaagugaccuggacuu

SEQ ID NO: 818555 - RNA, 19 nt, Artificial Sequence
  Description of Artificial Sequence: Synthetic oligonucleotide
  Antisense strand to SEQ ID NO: 818554
aaguccaggucacuuccuc

SEQ ID NO: 818556 - RNA, 19 nt, Artificial Sequence
  Description of Artificial Sequence: Synthetic oligonucleotide
  Sense strand starting at position 2680 of SEQ ID NO: 587791
gugaccuggacuuggcaua

SEQ ID NO: 818557 - RNA, 19 nt, Artificial Sequence
  Description of Artificial Sequence: Synthetic oligonucleotide
  Antisense strand to SEQ ID NO: 818556
uaugccaaguccaggucac

SEQ ID NO: 818558 - RNA, 19 nt, Artificial Sequence
  Description of Artificial Sequence: Synthetic oligonucleotide
  Sense strand starting at position 2881 of SEQ ID NO: 587791
uggaguugugcugaggaag

SEQ ID NO: 818559 - RNA, 19 nt, Artificial Sequence
  Description of Artificial Sequence: Synthetic oligonucleotide
  Antisense strand to SEQ ID NO: 818558
cuuccucagcacaacucca

SEQ ID NO: 818560 - RNA, 19 nt, Artificial Sequence
  Description of Artificial Sequence: Synthetic oligonucleotide
  Sense strand starting at position 2898 of SEQ ID NO: 587791
agcacucaguuuccaagau

SEQ ID NO: 818561 - RNA, 19 nt, Artificial Sequence
  Description of Artificial Sequence: Synthetic oligonucleotide
  Antisense strand to SEQ ID NO: 818560
aucuuggaaacugagugcu

SEQ ID NO: 818562 - RNA, 19 nt, Artificial Sequence
  Description of Artificial Sequence: Synthetic oligonucleotide
  Sense strand starting at position 2902 of SEQ ID NO: 587791
cucaguuuccaagauugca

SEQ ID NO: 818563 - RNA, 19 nt, Artificial Sequence
  Description of Artificial Sequence: Synthetic oligonucleotide
  Antisense strand to SEQ ID NO: 818562
ugcaaucuuggaaacugag

SEQ ID NO: 818564 - RNA, 19 nt, Artificial Sequence
  Description of Artificial Sequence: Synthetic oligonucleotide
  Sense strand starting at position 2975 of SEQ ID NO: 587791
cuaggaagucaauguuucu

SEQ ID NO: 818565 - RNA, 19 nt, Artificial Sequence
  Description of Artificial Sequence: Synthetic oligonucleotide
  Antisense strand to SEQ ID NO: 818564
agaaacauugacuuccuag

SEQ ID NO: 818566 - RNA, 19 nt, Artificial Sequence
  Description of Artificial Sequence: Synthetic oligonucleotide
  Sense strand starting at position 2978 of SEQ ID NO: 587791
ggaagucaauguuucucaa

SEQ ID NO: 818567 - RNA, 19 nt, Artificial Sequence
  Description of Artificial Sequence: Synthetic oligonucleotide
  Antisense strand to SEQ ID NO: 818566
uugagaaacauugacuucc

SEQ ID NO: 818568 - RNA, 19 nt, Artificial Sequence
  Description of Artificial Sequence: Synthetic oligonucleotide
  Sense strand starting at position 2981 of SEQ ID NO: 587791
agucaauguuucucaaagu

SEQ ID NO: 818569 - RNA, 19 nt, Artificial Sequence
  Description of Artificial Sequence: Synthetic oligonucleotide
  Antisense strand to SEQ ID NO: 818568
acuuugagaaacauugacu

SEQ ID NO: 818570 - RNA, 19 nt, Artificial Sequence
  Description of Artificial Sequence: Synthetic oligonucleotide
  Sense strand starting at position 3007 of SEQ ID NO: 587791
guggacuacccauagcuau

SEQ ID NO: 818571 - RNA, 19 nt, Artificial Sequence
  Description of Artificial Sequence: Synthetic oligonucleotide
  Antisense strand to SEQ ID NO: 818570
auagcuauggguaguccac

SEQ ID NO: 818572 - RNA, 19 nt, Artificial Sequence
  Description of Artificial Sequence: Synthetic oligonucleotide
  Sense strand starting at position 3020 of SEQ ID NO: 587791
agcuauuggcuggauguca

SEQ ID NO: 818573 - RNA, 19 nt, Artificial Sequence
  Description of Artificial Sequence: Synthetic oligonucleotide
  Antisense strand to SEQ ID NO: 818572
ugacauccagccaauagcu

SEQ ID NO: 818574 - RNA, 19 nt, Artificial Sequence
  Description of Artificial Sequence: Synthetic oligonucleotide
  Sense strand starting at position 3205 of SEQ ID NO: 587791
ggagguaaucuuggugacu

SEQ ID NO: 818575 - RNA, 19 nt, Artificial Sequence
  Description of Artificial Sequence: Synthetic oligonucleotide
  Antisense strand to SEQ ID NO: 818574
agucaccaagauuaccucc

SEQ ID NO: 818576 - RNA, 19 nt, Artificial Sequence
  Description of Artificial Sequence: Synthetic oligonucleotide
  Sense strand starting at position 3206 of SEQ ID NO: 587791
gagguaaucuuggugacua

SEQ ID NO: 818577 - RNA, 19 nt, Artificial Sequence
  Description of Artificial Sequence: Synthetic oligonucleotide
  Antisense strand to SEQ ID NO: 818576
uagucaccaagauuaccuc

SEQ ID NO: 818578 - RNA, 19 nt, Artificial Sequence
  Description of Artificial Sequence: Synthetic oligonucleotide
  Sense strand starting at position 3208 of SEQ ID NO: 587791
gguaaucuuggugacuaca

SEQ ID NO: 818579 - RNA, 19 nt, Artificial Sequence
  Description of Artificial Sequence: Synthetic oligonucleotide
  Antisense strand to SEQ ID NO: 818578
uguagucaccaagauuacc

SEQ ID NO: 818580 - RNA, 19 nt, Artificial Sequence
  Description of Artificial Sequence: Synthetic oligonucleotide
  Sense strand starting at position 3400 of SEQ ID NO: 587791
cguauucuugcgcuuggaa

SEQ ID NO: 818581 - RNA, 19 nt, Artificial Sequence
  Description of Artificial Sequence: Synthetic oligonucleotide
  Antisense strand to SEQ ID NO: 818580
uuccaagcgcaagaauacg

SEQ ID NO: 818582 - RNA, 19 nt, Artificial Sequence
  Description of Artificial Sequence: Synthetic oligonucleotide
  Sense strand starting at position 3447 of SEQ ID NO: 587791
aaguuagauaccuggguga

SEQ ID NO: 818583 - RNA, 19 nt, Artificial Sequence
  Description of Artificial Sequence: Synthetic oligonucleotide
  Antisense strand to SEQ ID NO: 818582
ucacccagguaucuaacuu

SEQ ID NO: 818584 - RNA, 19 nt, Artificial Sequence
  Description of Artificial Sequence: Synthetic oligonucleotide
  Sense strand starting at position 3449 of SEQ ID NO: 587791
guuagauaccugggugagu

SEQ ID NO: 818585 - RNA, 19 nt, Artificial Sequence
  Description of Artificial Sequence: Synthetic oligonucleotide
  Antisense strand to SEQ ID NO: 818584
acucacccagguaucuaac

SEQ ID NO: 818586 - RNA, 19 nt, Artificial Sequence
  Description of Artificial Sequence: Synthetic oligonucleotide
  Sense strand starting at position 3450 of SEQ ID NO: 587791
uuagauaccugggugaguu

SEQ ID NO: 818587 - RNA, 19 nt, Artificial Sequence
  Description of Artificial Sequence: Synthetic oligonucleotide
  Antisense strand to SEQ ID NO: 818586
aacucacccagguaucuaa

SEQ ID NO: 818588 - RNA, 19 nt, Artificial Sequence
  Description of Artificial Sequence: Synthetic oligonucleotide
  Sense strand starting at position 3460 of SEQ ID NO: 587791
gggugaguuguugagaguc

SEQ ID NO: 818589 - RNA, 19 nt, Artificial Sequence
  Description of Artificial Sequence: Synthetic oligonucleotide
  Antisense strand to SEQ ID NO: 818588
gacucucaacaacucaccc

SEQ ID NO: 818590 - RNA, 19 nt, Artificial Sequence
  Description of Artificial Sequence: Synthetic oligonucleotide
  Sense strand starting at position 3468 of SEQ ID NO: 587791
uguugagagucuguacuag

SEQ ID NO: 818591 - RNA, 19 nt, Artificial Sequence
  Description of Artificial Sequence: Synthetic oligonucleotide
  Antisense strand to SEQ ID NO: 818590
cuaguacagacucucaaca

SEQ ID NO: 818592 - RNA, 19 nt, Artificial Sequence
  Description of Artificial Sequence: Synthetic oligonucleotide
  Sense strand starting at position 3589 of SEQ ID NO: 587791
cuuaucuugcugggaccaa

SEQ ID NO: 818593 - RNA, 19 nt, Artificial Sequence
  Description of Artificial Sequence: Synthetic oligonucleotide
  Antisense strand to SEQ ID NO: 818592
uuggucccagcaagauaag

SEQ ID NO: 818594 - RNA, 19 nt, Artificial Sequence
  Description of Artificial Sequence: Synthetic oligonucleotide
  Sense strand starting at position 3778 of SEQ ID NO: 587791
cagugucauguacaagcaa

SEQ ID NO: 818595 - RNA, 19 nt, Artificial Sequence
  Description of Artificial Sequence: Synthetic oligonucleotide
  Antisense strand to SEQ ID NO: 818594
uugcuuguacaugacacug

SEQ ID NO: 818596 - RNA, 19 nt, Artificial Sequence
  Description of Artificial Sequence: Synthetic oligonucleotide
  Sense strand starting at position 3814 of SEQ ID NO: 587791
ugcauuucugccuguuacu

SEQ ID NO: 818597 - RNA, 19 nt, Artificial Sequence
  Description of Artificial Sequence: Synthetic oligonucleotide
  Antisense strand to SEQ ID NO: 818596
aguaacaggcagaaaugca

SEQ ID NO: 818598 - RNA, 19 nt, Artificial Sequence
  Description of Artificial Sequence: Synthetic oligonucleotide
  Sense strand starting at position 3896 of SEQ ID NO: 587791
agacacuauccauggcgau

SEQ ID NO: 818599 - RNA, 19 nt, Artificial Sequence
  Description of Artificial Sequence: Synthetic oligonucleotide
  Antisense strand to SEQ ID NO: 818598
aucgccauggauagugucu

SEQ ID NO: 818600 - RNA, 19 nt, Artificial Sequence
  Description of Artificial Sequence: Synthetic oligonucleotide
  Sense strand starting at position 3911 of SEQ ID NO: 587791
cgaugcucuccauauggca

SEQ ID NO: 818601 - RNA, 19 nt, Artificial Sequence
  Description of Artificial Sequence: Synthetic oligonucleotide
  Antisense strand to SEQ ID NO: 818600
ugccauauggagagcaucg

SEQ ID NO: 818602 - RNA, 19 nt, Artificial Sequence
  Description of Artificial Sequence: Synthetic oligonucleotide
  Sense strand starting at position 9 of SEQ ID NO: 587792
gucauauucugaggccuca

SEQ ID NO: 818603 - RNA, 19 nt, Artificial Sequence
  Description of Artificial Sequence: Synthetic oligonucleotide
  Antisense strand to SEQ ID NO: 818602
ugaggccucagaauaugac

SEQ ID NO: 818604 - RNA, 19 nt, Artificial Sequence
  Description of Artificial Sequence: Synthetic oligonucleotide
  Sense strand starting at position 41 of SEQ ID NO: 587792
ccgugcuguucucgccaau

SEQ ID NO: 818605 - RNA, 19 nt, Artificial Sequence
  Description of Artificial Sequence: Synthetic oligonucleotide
  Antisense strand to SEQ ID NO: 818604
auuggcgagaacagcacgg

SEQ ID NO: 818606 - RNA, 19 nt, Artificial Sequence
  Description of Artificial Sequence: Synthetic oligonucleotide
  Sense strand starting at position 44 of SEQ ID NO: 587792
ugcuguucucgccaaucuu

SEQ ID NO: 818607 - RNA, 19 nt, Artificial Sequence
  Description of Artificial Sequence: Synthetic oligonucleotide
  Antisense strand to SEQ ID NO: 818606
aagauuggcgagaacagca

SEQ ID NO: 818608 - RNA, 19 nt, Artificial Sequence
  Description of Artificial Sequence: Synthetic oligonucleotide
  Sense strand starting at position 52 of SEQ ID NO: 587792
ucgccaaucuuucuguaga

SEQ ID NO: 818609 - RNA, 19 nt, Artificial Sequence
  Description of Artificial Sequence: Synthetic oligonucleotide
  Antisense strand to SEQ ID NO: 818608
ucuacagaaagauuggcga

SEQ ID NO: 818610 - RNA, 19 nt, Artificial Sequence
  Description of Artificial Sequence: Synthetic oligonucleotide
  Sense strand starting at position 53 of SEQ ID NO: 587792
cgccaaucuuucuguagau

SEQ ID NO: 818611 - RNA, 19 nt, Artificial Sequence
  Description of Artificial Sequence: Synthetic oligonucleotide
  Antisense strand to SEQ ID NO: 818610
aucuacagaaagauuggcg

SEQ ID NO: 818612 - RNA, 19 nt, Artificial Sequence
  Description of Artificial Sequence: Synthetic oligonucleotide
  Sense strand starting at position 54 of SEQ ID NO: 587792
gccaaucuuucuguagaug

SEQ ID NO: 818613 - RNA, 19 nt, Artificial Sequence
  Description of Artificial Sequence: Synthetic oligonucleotide
  Antisense strand to SEQ ID NO: 818612
caucuacagaaagauuggc

SEQ ID NO: 818614 - RNA, 19 nt, Artificial Sequence
  Description of Artificial Sequence: Synthetic oligonucleotide
  Sense strand starting at position 65 of SEQ ID NO: 587792
uguagaugcugcuguuauc

SEQ ID NO: 818615 - RNA, 19 nt, Artificial Sequence
  Description of Artificial Sequence: Synthetic oligonucleotide
  Antisense strand to SEQ ID NO: 818614
gauaacagcagcaucuaca

SEQ ID NO: 818616 - RNA, 19 nt, Artificial Sequence
  Description of Artificial Sequence: Synthetic oligonucleotide
  Sense strand starting at position 246 of SEQ ID NO: 587792
gauggcuuaucucauguca

SEQ ID NO: 818617 - RNA, 19 nt, Artificial Sequence
  Description of Artificial Sequence: Synthetic oligonucleotide
  Antisense strand to SEQ ID NO: 818616
ugacaugagauaagccauc

SEQ ID NO: 818618 - RNA, 19 nt, Artificial Sequence
  Description of Artificial Sequence: Synthetic oligonucleotide
  Sense strand starting at position 248 of SEQ ID NO: 587792
uggcuuaucucaugucaca

SEQ ID NO: 818619 - RNA, 19 nt, Artificial Sequence
  Description of Artificial Sequence: Synthetic oligonucleotide
  Antisense strand to SEQ ID NO: 818618
ugugacaugagauaagcca

SEQ ID NO: 818620 - RNA, 19 nt, Artificial Sequence
  Description of Artificial Sequence: Synthetic oligonucleotide
  Sense strand starting at position 779 of SEQ ID NO: 587792
uggagucccuccuaucaca

SEQ ID NO: 818621 - RNA, 19 nt, Artificial Sequence
  Description of Artificial Sequence: Synthetic oligonucleotide
  Antisense strand to SEQ ID NO: 818620
ugugauaggagggacucca

SEQ ID NO: 818622 - RNA, 19 nt, Artificial Sequence
  Description of Artificial Sequence: Synthetic oligonucleotide
  Sense strand starting at position 883 of SEQ ID NO: 587792
ccuccaggauccuguaaca

SEQ ID NO: 818623 - RNA, 19 nt, Artificial Sequence
  Description of Artificial Sequence: Synthetic oligonucleotide
  Antisense strand to SEQ ID NO: 818622
uguuacaggauccuggagg

SEQ ID NO: 818624 - RNA, 19 nt, Artificial Sequence
  Description of Artificial Sequence: Synthetic oligonucleotide
  Sense strand starting at position 2154 of SEQ ID NO: 587792
ucuauuuccuuauauggga

SEQ ID NO: 818625 - RNA, 19 nt, Artificial Sequence
  Description of Artificial Sequence: Synthetic oligonucleotide
  Antisense strand to SEQ ID NO: 818624
ucccauauaaggaaauaga

SEQ ID NO: 818626 - RNA, 19 nt, Artificial Sequence
  Description of Artificial Sequence: Synthetic oligonucleotide
  Sense strand starting at position 2351 of SEQ ID NO: 587792
gaggccgaguuccuaagaa

SEQ ID NO: 818627 - RNA, 19 nt, Artificial Sequence
  Description of Artificial Sequence: Synthetic oligonucleotide
  Antisense strand to SEQ ID NO: 818626
uucuuaggaacucggccuc

SEQ ID NO: 818628 - RNA, 19 nt, Artificial Sequence
  Description of Artificial Sequence: Synthetic oligonucleotide
  Sense strand starting at position 2392 of SEQ ID NO: 587792
ccugcugugaucugcggaa

SEQ ID NO: 818629 - RNA, 19 nt, Artificial Sequence
  Description of Artificial Sequence: Synthetic oligonucleotide
  Antisense strand to SEQ ID NO: 818628
uuccgcagaucacagcagg

SEQ ID NO: 818630 - RNA, 19 nt, Artificial Sequence
  Description of Artificial Sequence: Synthetic oligonucleotide
  Sense strand starting at position 2394 of SEQ ID NO: 587792
ugcugugaucugcggaaac

SEQ ID NO: 818631 - RNA, 19 nt, Artificial Sequence
  Description of Artificial Sequence: Synthetic oligonucleotide
  Antisense strand to SEQ ID NO: 818630
guuuccgcagaucacagca

SEQ ID NO: 818632 - RNA, 19 nt, Artificial Sequence
  Description of Artificial Sequence: Synthetic oligonucleotide
  Sense strand starting at position 2396 of SEQ ID NO: 587792
cugugaucugcggaaacuc

SEQ ID NO: 818633 - RNA, 19 nt, Artificial Sequence
  Description of Artificial Sequence: Synthetic oligonucleotide
  Antisense strand to SEQ ID NO: 818632
gaguuuccgcagaucacag

SEQ ID NO: 818634 - RNA, 19 nt, Artificial Sequence
  Description of Artificial Sequence: Synthetic oligonucleotide
  Sense strand starting at position 2589 of SEQ ID NO: 587792
gccucuugcuuucugcaga

SEQ ID NO: 818635 - RNA, 19 nt, Artificial Sequence
  Description of Artificial Sequence: Synthetic oligonucleotide
  Antisense strand to SEQ ID NO: 818634
ucugcagaaagcaagaggc

SEQ ID NO: 818636 - RNA, 19 nt, Artificial Sequence
  Description of Artificial Sequence: Synthetic oligonucleotide
  Sense strand starting at position 2590 of SEQ ID NO: 587792
ccucuugcuuucugcagaa

SEQ ID NO: 818637 - RNA, 19 nt, Artificial Sequence
  Description of Artificial Sequence: Synthetic oligonucleotide
  Antisense strand to SEQ ID NO: 818636
uucugcagaaagcaagagg

SEQ ID NO: 818638 - RNA, 19 nt, Artificial Sequence
  Description of Artificial Sequence: Synthetic oligonucleotide
  Sense strand starting at position 2592 of SEQ ID NO: 587792
ucuugcuuucugcagaaag

SEQ ID NO: 818639 - RNA, 19 nt, Artificial Sequence
  Description of Artificial Sequence: Synthetic oligonucleotide
  Antisense strand to SEQ ID NO: 818638
cuuucugcagaaagcaaga

SEQ ID NO: 818640 - RNA, 19 nt, Artificial Sequence
  Description of Artificial Sequence: Synthetic oligonucleotide
  Sense strand starting at position 2594 of SEQ ID NO: 587792
uugcuuucugcagaaaguc

SEQ ID NO: 818641 - RNA, 19 nt, Artificial Sequence
  Description of Artificial Sequence: Synthetic oligonucleotide
  Antisense strand to SEQ ID NO: 818640
gacuuucugcagaaagcaa

SEQ ID NO: 818642 - RNA, 19 nt, Artificial Sequence
  Description of Artificial Sequence: Synthetic oligonucleotide
  Sense strand starting at position 3480 of SEQ ID NO: 587792
ugguucugggaagguuaaa

SEQ ID NO: 818643 - RNA, 19 nt, Artificial Sequence
  Description of Artificial Sequence: Synthetic oligonucleotide
  Antisense strand to SEQ ID NO: 818642
uuuaaccuucccagaacca

SEQ ID NO: 818644 - RNA, 19 nt, Artificial Sequence
  Description of Artificial Sequence: Synthetic oligonucleotide
  Sense strand starting at position 34 of SEQ ID NO: 587793
agaugacuucugugguuua

SEQ ID NO: 818645 - RNA, 19 nt, Artificial Sequence
  Description of Artificial Sequence: Synthetic oligonucleotide
  Antisense strand to SEQ ID NO: 818644
uaaaccacagaagucaucu

SEQ ID NO: 818646 - RNA, 19 nt, Artificial Sequence
  Description of Artificial Sequence: Synthetic oligonucleotide
  Sense strand starting at position 88 of SEQ ID NO: 587793
guggcuaugagcuaugcca

SEQ ID NO: 818647 - RNA, 19 nt, Artificial Sequence
  Description of Artificial Sequence: Synthetic oligonucleotide
  Antisense strand to SEQ ID NO: 818646
uggcauagcucauagccac

SEQ ID NO: 818648 - RNA, 19 nt, Artificial Sequence
  Description of Artificial Sequence: Synthetic oligonucleotide
  Sense strand starting at position 212 of SEQ ID NO: 587793
cuggcugucagugaagaga

SEQ ID NO: 818649 - RNA, 19 nt, Artificial Sequence
  Description of Artificial Sequence: Synthetic oligonucleotide
  Antisense strand to SEQ ID NO: 818648
ucucuucacugacagccag

SEQ ID NO: 818650 - RNA, 19 nt, Artificial Sequence
  Description of Artificial Sequence: Synthetic oligonucleotide
  Sense strand starting at position 230 of SEQ ID NO: 587793
aacggagccaugcgucaaa

SEQ ID NO: 818651 - RNA, 19 nt, Artificial Sequence
  Description of Artificial Sequence: Synthetic oligonucleotide
  Antisense strand to SEQ ID NO: 818650
uuugacgcauggcuccguu

SEQ ID NO: 818652 - RNA, 19 nt, Artificial Sequence
  Description of Artificial Sequence: Synthetic oligonucleotide
  Sense strand starting at position 232 of SEQ ID NO: 587793
cggagccaugcgucaaagu

SEQ ID NO: 818653 - RNA, 19 nt, Artificial Sequence
  Description of Artificial Sequence: Synthetic oligonucleotide
  Antisense strand to SEQ ID NO: 818652
acuuugacgcauggcuccg

SEQ ID NO: 818654 - RNA, 19 nt, Artificial Sequence
  Description of Artificial Sequence: Synthetic oligonucleotide
  Sense strand starting at position 871 of SEQ ID NO: 587793
ucugacugcugccugaaga

SEQ ID NO: 818655 - RNA, 19 nt, Artificial Sequence
  Description of Artificial Sequence: Synthetic oligonucleotide
  Antisense strand to SEQ ID NO: 818654
ucuucaggcagcagucaga

SEQ ID NO: 818656 - RNA, 19 nt, Artificial Sequence
  Description of Artificial Sequence: Synthetic oligonucleotide
  Sense strand starting at position 979 of SEQ ID NO: 587793
aguagaaagaguggaguua

SEQ ID NO: 818657 - RNA, 19 nt, Artificial Sequence
  Description of Artificial Sequence: Synthetic oligonucleotide
  Antisense strand to SEQ ID NO: 818656
uaacuccacucuuucuacu

SEQ ID NO: 818658 - RNA, 19 nt, Artificial Sequence
  Description of Artificial Sequence: Synthetic oligonucleotide
  Sense strand starting at position 996 of SEQ ID NO: 587793
uagccaguccugugaauca

SEQ ID NO: 818659 - RNA, 19 nt, Artificial Sequence
  Description of Artificial Sequence: Synthetic oligonucleotide
  Antisense strand to SEQ ID NO: 818658
ugauucacaggacuggcua

SEQ ID NO: 818660 - RNA, 19 nt, Artificial Sequence
  Description of Artificial Sequence: Synthetic oligonucleotide
  Sense strand starting at position 1038 of SEQ ID NO: 587793
uggguaucuuguguaaaug

SEQ ID NO: 818661 - RNA, 19 nt, Artificial Sequence
  Description of Artificial Sequence: Synthetic oligonucleotide
  Antisense strand to SEQ ID NO: 818660
cauuuacacaagauaccca

SEQ ID NO: 818662 - RNA, 19 nt, Artificial Sequence
  Description of Artificial Sequence: Synthetic oligonucleotide
  Sense strand starting at position 1260 of SEQ ID NO: 587793
guaaacugcggcugagaaa

SEQ ID NO: 818663 - RNA, 19 nt, Artificial Sequence
  Description of Artificial Sequence: Synthetic oligonucleotide
  Antisense strand to SEQ ID NO: 818662
uuucucagccgcaguuuac

SEQ ID NO: 818664 - RNA, 19 nt, Artificial Sequence
  Description of Artificial Sequence: Synthetic oligonucleotide
  Sense strand starting at position 1360 of SEQ ID NO: 587793
gguguucucccucuacguu

SEQ ID NO: 818665 - RNA, 19 nt, Artificial Sequence
  Description of Artificial Sequence: Synthetic oligonucleotide
  Antisense strand to SEQ ID NO: 818664
aacguagagggagaacacc

SEQ ID NO: 818666 - RNA, 19 nt, Artificial Sequence
  Description of Artificial Sequence: Synthetic oligonucleotide
  Sense strand starting at position 1361 of SEQ ID NO: 587793
guguucucccucuacguua

SEQ ID NO: 818667 - RNA, 19 nt, Artificial Sequence
  Description of Artificial Sequence: Synthetic oligonucleotide
  Antisense strand to SEQ ID NO: 818666
uaacguagagggagaacac

SEQ ID NO: 818668 - RNA, 19 nt, Artificial Sequence
  Description of Artificial Sequence: Synthetic oligonucleotide
  Sense strand starting at position 1363 of SEQ ID NO: 587793
guucucccucuacguuaau

SEQ ID NO: 818669 - RNA, 19 nt, Artificial Sequence
  Description of Artificial Sequence: Synthetic oligonucleotide
  Antisense strand to SEQ ID NO: 818668
auuaacguagagggagaac

SEQ ID NO: 818670 - RNA, 19 nt, Artificial Sequence
  Description of Artificial Sequence: Synthetic oligonucleotide
  Sense strand starting at position 1427 of SEQ ID NO: 587793
gcgacucacuccucuggau

SEQ ID NO: 818671 - RNA, 19 nt, Artificial Sequence
  Description of Artificial Sequence: Synthetic oligonucleotide
  Antisense strand to SEQ ID NO: 818670
auccagaggagugagucgc

SEQ ID NO: 818672 - RNA, 19 nt, Artificial Sequence
  Description of Artificial Sequence: Synthetic oligonucleotide
  Sense strand starting at position 2161 of SEQ ID NO: 587793
gcucacuuacgagagcuau

SEQ ID NO: 818673 - RNA, 19 nt, Artificial Sequence
  Description of Artificial Sequence: Synthetic oligonucleotide
  Antisense strand to SEQ ID NO: 818672
auagcucucguaagugagc

SEQ ID NO: 818674 - RNA, 19 nt, Artificial Sequence
  Description of Artificial Sequence: Synthetic oligonucleotide
  Sense strand starting at position 2610 of SEQ ID NO: 587793
uggaggagucucgggugau

SEQ ID NO: 818675 - RNA, 19 nt, Artificial Sequence
  Description of Artificial Sequence: Synthetic oligonucleotide
  Antisense strand to SEQ ID NO: 818674
aucacccgagacuccucca

SEQ ID NO: 818676 - RNA, 19 nt, Artificial Sequence
  Description of Artificial Sequence: Synthetic oligonucleotide
  Sense strand starting at position 2613 of SEQ ID NO: 587793
aggagucucgggugaugaa

SEQ ID NO: 818677 - RNA, 19 nt, Artificial Sequence
  Description of Artificial Sequence: Synthetic oligonucleotide
  Antisense strand to SEQ ID NO: 818676
uucaucacccgagacuccu

SEQ ID NO: 818678 - RNA, 19 nt, Artificial Sequence
  Description of Artificial Sequence: Synthetic oligonucleotide
  Sense strand starting at position 2614 of SEQ ID NO: 587793
ggagucucgggugaugaaa

SEQ ID NO: 818679 - RNA, 19 nt, Artificial Sequence
  Description of Artificial Sequence: Synthetic oligonucleotide
  Antisense strand to SEQ ID NO: 818678
uuucaucacccgagacucc

SEQ ID NO: 818680 - RNA, 19 nt, Artificial Sequence
  Description of Artificial Sequence: Synthetic oligonucleotide
  Sense strand starting at position 2638 of SEQ ID NO: 587793
gcguguuucaggcugacgu

SEQ ID NO: 818681 - RNA, 19 nt, Artificial Sequence
  Description of Artificial Sequence: Synthetic oligonucleotide
  Antisense strand to SEQ ID NO: 818680
acgucagccugaaacacgc

SEQ ID NO: 818682 - RNA, 19 nt, Artificial Sequence
  Description of Artificial Sequence: Synthetic oligonucleotide
  Sense strand starting at position 2758 of SEQ ID NO: 587793
gcugacaucagucgcuaga

SEQ ID NO: 818683 - RNA, 19 nt, Artificial Sequence
  Description of Artificial Sequence: Synthetic oligonucleotide
  Antisense strand to SEQ ID NO: 818682
ucuagcgacugaugucagc

SEQ ID NO: 818684 - RNA, 19 nt, Artificial Sequence
  Description of Artificial Sequence: Synthetic oligonucleotide
  Sense strand starting at position 2834 of SEQ ID NO: 587793
gucaguacugcugggaaag

SEQ ID NO: 818685 - RNA, 19 nt, Artificial Sequence
  Description of Artificial Sequence: Synthetic oligonucleotide
  Antisense strand to SEQ ID NO: 818684
cuuucccagcaguacugac

SEQ ID NO: 818686 - RNA, 19 nt, Artificial Sequence
  Description of Artificial Sequence: Synthetic oligonucleotide
  Sense strand starting at position 3115 of SEQ ID NO: 587793
gggcaaagagcugggauau

SEQ ID NO: 818687 - RNA, 19 nt, Artificial Sequence
  Description of Artificial Sequence: Synthetic oligonucleotide
  Antisense strand to SEQ ID NO: 818686
auaucccagcucuuugccc

SEQ ID NO: 818688 - RNA, 19 nt, Artificial Sequence
  Description of Artificial Sequence: Synthetic oligonucleotide
  Sense strand starting at position 3116 of SEQ ID NO: 587793
ggcaaagagcugggauauu

SEQ ID NO: 818689 - RNA, 19 nt, Artificial Sequence
  Description of Artificial Sequence: Synthetic oligonucleotide
  Antisense strand to SEQ ID NO: 818688
aauaucccagcucuuugcc

SEQ ID NO: 818690 - RNA, 19 nt, Artificial Sequence
  Description of Artificial Sequence: Synthetic oligonucleotide
  Sense strand starting at position 3126 of SEQ ID NO: 587793
ugggauauugcagagcuua

SEQ ID NO: 818691 - RNA, 19 nt, Artificial Sequence
  Description of Artificial Sequence: Synthetic oligonucleotide
  Antisense strand to SEQ ID NO: 818690
uaagcucugcaauauccca

SEQ ID NO: 818692 - RNA, 19 nt, Artificial Sequence
  Description of Artificial Sequence: Synthetic oligonucleotide
  Sense strand starting at position 3199 of SEQ ID NO: 587793
cugagggucgugggugaaa

SEQ ID NO: 818693 - RNA, 19 nt, Artificial Sequence
  Description of Artificial Sequence: Synthetic oligonucleotide
  Antisense strand to SEQ ID NO: 818692
uuucacccacgacccucag

SEQ ID NO: 818694 - RNA, 19 nt, Artificial Sequence
  Description of Artificial Sequence: Synthetic oligonucleotide
  Sense strand starting at position 3289 of SEQ ID NO: 587793
agacgugagcuccaggaga

SEQ ID NO: 818695 - RNA, 19 nt, Artificial Sequence
  Description of Artificial Sequence: Synthetic oligonucleotide
  Antisense strand to SEQ ID NO: 818694
ucuccuggagcucacgucu

SEQ ID NO: 818696 - RNA, 19 nt, Artificial Sequence
  Description of Artificial Sequence: Synthetic oligonucleotide
  Sense strand starting at position 3340 of SEQ ID NO: 587793
gucugaaagccugggagua

SEQ ID NO: 818697 - RNA, 19 nt, Artificial Sequence
  Description of Artificial Sequence: Synthetic oligonucleotide
  Antisense strand to SEQ ID NO: 818696
uacucccaggcuuucagac

SEQ ID NO: 818698 - RNA, 19 nt, Artificial Sequence
  Description of Artificial Sequence: Synthetic oligonucleotide
  Sense strand starting at position 3341 of SEQ ID NO: 587793
ucugaaagccugggaguaa

SEQ ID NO: 818699 - RNA, 19 nt, Artificial Sequence
  Description of Artificial Sequence: Synthetic oligonucleotide
  Antisense strand to SEQ ID NO: 818698
uuacucccaggcuuucaga

SEQ ID NO: 818700 - RNA, 19 nt, Artificial Sequence
  Description of Artificial Sequence: Synthetic oligonucleotide
  Sense strand starting at position 3419 of SEQ ID NO: 587793
ccaucaggcuucucagaga

SEQ ID NO: 818701 - RNA, 19 nt, Artificial Sequence
  Description of Artificial Sequence: Synthetic oligonucleotide
  Antisense strand to SEQ ID NO: 818700
ucucugagaagccugaugg

SEQ ID NO: 818702 - RNA, 19 nt, Artificial Sequence
  Description of Artificial Sequence: Synthetic oligonucleotide
  Sense strand starting at position 3422 of SEQ ID NO: 587793
ucaggcuucucagagaaga

SEQ ID NO: 818703 - RNA, 19 nt, Artificial Sequence
  Description of Artificial Sequence: Synthetic oligonucleotide
  Antisense strand to SEQ ID NO: 818702
ucuucucugagaagccuga

SEQ ID NO: 818704 - RNA, 19 nt, Artificial Sequence
  Description of Artificial Sequence: Synthetic oligonucleotide
  Sense strand starting at position 3498 of SEQ ID NO: 587793
gguagaguguugcccagua

SEQ ID NO: 818705 - RNA, 19 nt, Artificial Sequence
  Description of Artificial Sequence: Synthetic oligonucleotide
  Antisense strand to SEQ ID NO: 818704
uacugggcaacacucuacc

SEQ ID NO: 818706 - RNA, 19 nt, Artificial Sequence
  Description of Artificial Sequence: Synthetic oligonucleotide
  Sense strand starting at position 3500 of SEQ ID NO: 587793
uagaguguugcccaguaga

SEQ ID NO: 818707 - RNA, 19 nt, Artificial Sequence
  Description of Artificial Sequence: Synthetic oligonucleotide
  Antisense strand to SEQ ID NO: 818706
ucuacugggcaacacucua

SEQ ID NO: 818708 - RNA, 19 nt, Artificial Sequence
  Description of Artificial Sequence: Synthetic oligonucleotide
  Sense strand starting at position 3503 of SEQ ID NO: 587793
aguguugcccaguagaaug

SEQ ID NO: 818709 - RNA, 19 nt, Artificial Sequence
  Description of Artificial Sequence: Synthetic oligonucleotide
  Antisense strand to SEQ ID NO: 818708
cauucuacugggcaacacu

SEQ ID NO: 818710 - RNA, 19 nt, Artificial Sequence
  Description of Artificial Sequence: Synthetic oligonucleotide
  Sense strand starting at position 3543 of SEQ ID NO: 587793
cgaagcucaccaggucaua

SEQ ID NO: 818711 - RNA, 19 nt, Artificial Sequence
  Description of Artificial Sequence: Synthetic oligonucleotide
  Antisense strand to SEQ ID NO: 818710
uaugaccuggugagcuucg

SEQ ID NO: 818712 - RNA, 19 nt, Artificial Sequence
  Description of Artificial Sequence: Synthetic oligonucleotide
  Sense strand starting at position 3739 of SEQ ID NO: 587793
aaagaaaccucgggaugag

SEQ ID NO: 818713 - RNA, 19 nt, Artificial Sequence
  Description of Artificial Sequence: Synthetic oligonucleotide
  Antisense strand to SEQ ID NO: 818712
cucaucccgagguuucuuu

SEQ ID NO: 818714 - RNA, 19 nt, Artificial Sequence
  Description of Artificial Sequence: Synthetic oligonucleotide
  Sense strand starting at position 3815 of SEQ ID NO: 587793
gaugaagucuuccagaaug

SEQ ID NO: 818715 - RNA, 19 nt, Artificial Sequence
  Description of Artificial Sequence: Synthetic oligonucleotide
  Antisense strand to SEQ ID NO: 818714
cauucuggaagacuucauc

SEQ ID NO: 818716 - RNA, 19 nt, Artificial Sequence
  Description of Artificial Sequence: Synthetic oligonucleotide
  Sense strand starting at position 3817 of SEQ ID NO: 587793
ugaagucuuccagaaugua

SEQ ID NO: 818717 - RNA, 19 nt, Artificial Sequence
  Description of Artificial Sequence: Synthetic oligonucleotide
  Antisense strand to SEQ ID NO: 818716
uacauucuggaagacuuca

SEQ ID NO: 818718 - RNA, 19 nt, Artificial Sequence
  Description of Artificial Sequence: Synthetic oligonucleotide
  Sense strand starting at position 3820 of SEQ ID NO: 587793
agucuuccagaauguauaa

SEQ ID NO: 818719 - RNA, 19 nt, Artificial Sequence
  Description of Artificial Sequence: Synthetic oligonucleotide
  Antisense strand to SEQ ID NO: 818718
uuauacauucuggaagacu

SEQ ID NO: 818720 - RNA, 19 nt, Artificial Sequence
  Description of Artificial Sequence: Synthetic oligonucleotide
  Sense strand starting at position 3827 of SEQ ID NO: 587793
cagaauguauaaugacaga

SEQ ID NO: 818721 - RNA, 19 nt, Artificial Sequence
  Description of Artificial Sequence: Synthetic oligonucleotide
  Antisense strand to SEQ ID NO: 818720
ucugucauuauacauucug

SEQ ID NO: 818722 - RNA, 19 nt, Artificial Sequence
  Description of Artificial Sequence: Synthetic oligonucleotide
  Sense strand starting at position 3882 of SEQ ID NO: 587793
gugggugcucuuagggcua

SEQ ID NO: 818723 - RNA, 19 nt, Artificial Sequence
  Description of Artificial Sequence: Synthetic oligonucleotide
  Antisense strand to SEQ ID NO: 818722
uagcccuaagagcacccac

SEQ ID NO: 818724 - RNA, 19 nt, Artificial Sequence
  Description of Artificial Sequence: Synthetic oligonucleotide
  Sense strand starting at position 594 of SEQ ID NO: 587794
ucugacugcugccugaaga

SEQ ID NO: 818725 - RNA, 19 nt, Artificial Sequence
  Description of Artificial Sequence: Synthetic oligonucleotide
  Antisense strand to SEQ ID NO: 818724
ucuucaggcagcagucaga

SEQ ID NO: 818726 - RNA, 19 nt, Artificial Sequence
  Description of Artificial Sequence: Synthetic oligonucleotide
  Sense strand starting at position 702 of SEQ ID NO: 587794
aguagaaagaguggaguua

SEQ ID NO: 818727 - RNA, 19 nt, Artificial Sequence
  Description of Artificial Sequence: Synthetic oligonucleotide
  Antisense strand to SEQ ID NO: 818726
uaacuccacucuuucuacu

SEQ ID NO: 818728 - RNA, 19 nt, Artificial Sequence
  Description of Artificial Sequence: Synthetic oligonucleotide
  Sense strand starting at position 719 of SEQ ID NO: 587794
uagccaguccugugaauca

SEQ ID NO: 818729 - RNA, 19 nt, Artificial Sequence
  Description of Artificial Sequence: Synthetic oligonucleotide
  Antisense strand to SEQ ID NO: 818728
ugauucacaggacuggcua

SEQ ID NO: 818730 - RNA, 19 nt, Artificial Sequence
  Description of Artificial Sequence: Synthetic oligonucleotide
  Sense strand starting at position 761 of SEQ ID NO: 587794
uggguaucuuguguaaaug

SEQ ID NO: 818731 - RNA, 19 nt, Artificial Sequence
  Description of Artificial Sequence: Synthetic oligonucleotide
  Antisense strand to SEQ ID NO: 818730
cauuuacacaagauaccca

SEQ ID NO: 818732 - RNA, 19 nt, Artificial Sequence
  Description of Artificial Sequence: Synthetic oligonucleotide
  Sense strand starting at position 983 of SEQ ID NO: 587794
guaaacugcggcugagaaa

SEQ ID NO: 818733 - RNA, 19 nt, Artificial Sequence
  Description of Artificial Sequence: Synthetic oligonucleotide
  Antisense strand to SEQ ID NO: 818732
uuucucagccgcaguuuac

SEQ ID NO: 818734 - RNA, 19 nt, Artificial Sequence
  Description of Artificial Sequence: Synthetic oligonucleotide
  Sense strand starting at position 1083 of SEQ ID NO: 587794
gguguucucccucuacguu

SEQ ID NO: 818735 - RNA, 19 nt, Artificial Sequence
  Description of Artificial Sequence: Synthetic oligonucleotide
  Antisense strand to SEQ ID NO: 818734
aacguagagggagaacacc

SEQ ID NO: 818736 - RNA, 19 nt, Artificial Sequence
  Description of Artificial Sequence: Synthetic oligonucleotide
  Sense strand starting at position 1084 of SEQ ID NO: 587794
guguucucccucuacguua

SEQ ID NO: 818737 - RNA, 19 nt, Artificial Sequence
  Description of Artificial Sequence: Synthetic oligonucleotide
  Antisense strand to SEQ ID NO: 818736
uaacguagagggagaacac

SEQ ID NO: 818738 - RNA, 19 nt, Artificial Sequence
  Description of Artificial Sequence: Synthetic oligonucleotide
  Sense strand starting at position 1086 of SEQ ID NO: 587794
guucucccucuacguuaau

SEQ ID NO: 818739 - RNA, 19 nt, Artificial Sequence
  Description of Artificial Sequence: Synthetic oligonucleotide
  Antisense strand to SEQ ID NO: 818738
auuaacguagagggagaac

SEQ ID NO: 818740 - RNA, 19 nt, Artificial Sequence
  Description of Artificial Sequence: Synthetic oligonucleotide
  Sense strand starting at position 1150 of SEQ ID NO: 587794
gcgacucacuccucuggau

SEQ ID NO: 818741 - RNA, 19 nt, Artificial Sequence
  Description of Artificial Sequence: Synthetic oligonucleotide
  Antisense strand to SEQ ID NO: 818740
auccagaggagugagucgc

SEQ ID NO: 818742 - RNA, 19 nt, Artificial Sequence
  Description of Artificial Sequence: Synthetic oligonucleotide
  Sense strand starting at position 1884 of SEQ ID NO: 587794
gcucacuuacgagagcuau

SEQ ID NO: 818743 - RNA, 19 nt, Artificial Sequence
  Description of Artificial Sequence: Synthetic oligonucleotide
  Antisense strand to SEQ ID NO: 818742
auagcucucguaagugagc

SEQ ID NO: 818744 - RNA, 19 nt, Artificial Sequence
  Description of Artificial Sequence: Synthetic oligonucleotide
  Sense strand starting at position 2333 of SEQ ID NO: 587794
uggaggagucucgggugau

SEQ ID NO: 818745 - RNA, 19 nt, Artificial Sequence
  Description of Artificial Sequence: Synthetic oligonucleotide
  Antisense strand to SEQ ID NO: 818744
aucacccgagacuccucca

SEQ ID NO: 818746 - RNA, 19 nt, Artificial Sequence
  Description of Artificial Sequence: Synthetic oligonucleotide
  Sense strand starting at position 2336 of SEQ ID NO: 587794
aggagucucgggugaugaa

SEQ ID NO: 818747 - RNA, 19 nt, Artificial Sequence
  Description of Artificial Sequence: Synthetic oligonucleotide
  Antisense strand to SEQ ID NO: 818746
uucaucacccgagacuccu

SEQ ID NO: 818748 - RNA, 19 nt, Artificial Sequence
  Description of Artificial Sequence: Synthetic oligonucleotide
  Sense strand starting at position 2337 of SEQ ID NO: 587794
ggagucucgggugaugaaa

SEQ ID NO: 818749 - RNA, 19 nt, Artificial Sequence
  Description of Artificial Sequence: Synthetic oligonucleotide
  Antisense strand to SEQ ID NO: 818748
uuucaucacccgagacucc

SEQ ID NO: 818750 - RNA, 19 nt, Artificial Sequence
  Description of Artificial Sequence: Synthetic oligonucleotide
  Sense strand starting at position 2361 of SEQ ID NO: 587794
gcguguuucaggcugacgu

SEQ ID NO: 818751 - RNA, 19 nt, Artificial Sequence
  Description of Artificial Sequence: Synthetic oligonucleotide
  Antisense strand to SEQ ID NO: 818750
acgucagccugaaacacgc

SEQ ID NO: 818752 - RNA, 19 nt, Artificial Sequence
  Description of Artificial Sequence: Synthetic oligonucleotide
  Sense strand starting at position 2481 of SEQ ID NO: 587794
gcugacaucagucgcuaga

SEQ ID NO: 818753 - RNA, 19 nt, Artificial Sequence
  Description of Artificial Sequence: Synthetic oligonucleotide
  Antisense strand to SEQ ID NO: 818752
ucuagcgacugaugucagc

SEQ ID NO: 818754 - RNA, 19 nt, Artificial Sequence
  Description of Artificial Sequence: Synthetic oligonucleotide
  Sense strand starting at position 2557 of SEQ ID NO: 587794
gucaguacugcugggaaag

SEQ ID NO: 818755 - RNA, 19 nt, Artificial Sequence
  Description of Artificial Sequence: Synthetic oligonucleotide
  Antisense strand to SEQ ID NO: 818754
cuuucccagcaguacugac

SEQ ID NO: 818756 - RNA, 19 nt, Artificial Sequence
  Description of Artificial Sequence: Synthetic oligonucleotide
  Sense strand starting at position 2575 of SEQ ID NO: 587794
gcugccuguccuggacauu

SEQ ID NO: 818757 - RNA, 19 nt, Artificial Sequence
  Description of Artificial Sequence: Synthetic oligonucleotide
  Antisense strand to SEQ ID NO: 818756
aauguccaggacaggcagc

SEQ ID NO: 818758 - RNA, 19 nt, Artificial Sequence
  Description of Artificial Sequence: Synthetic oligonucleotide
  Sense strand starting at position 2838 of SEQ ID NO: 587794
gggcaaagagcugggauau

SEQ ID NO: 818759 - RNA, 19 nt, Artificial Sequence
  Description of Artificial Sequence: Synthetic oligonucleotide
  Antisense strand to SEQ ID NO: 818758
auaucccagcucuuugccc

SEQ ID NO: 818760 - RNA, 19 nt, Artificial Sequence
  Description of Artificial Sequence: Synthetic oligonucleotide
  Sense strand starting at position 2839 of SEQ ID NO: 587794
ggcaaagagcugggauauu

SEQ ID NO: 818761 - RNA, 19 nt, Artificial Sequence
  Description of Artificial Sequence: Synthetic oligonucleotide
  Antisense strand to SEQ ID NO: 818760
aauaucccagcucuuugcc

SEQ ID NO: 818762 - RNA, 19 nt, Artificial Sequence
  Description of Artificial Sequence: Synthetic oligonucleotide
  Sense strand starting at position 2849 of SEQ ID NO: 587794
ugggauauugcagagcuua

SEQ ID NO: 818763 - RNA, 19 nt, Artificial Sequence
  Description of Artificial Sequence: Synthetic oligonucleotide
  Antisense strand to SEQ ID NO: 818762
uaagcucugcaauauccca

SEQ ID NO: 818764 - RNA, 19 nt, Artificial Sequence
  Description of Artificial Sequence: Synthetic oligonucleotide
  Sense strand starting at position 2922 of SEQ ID NO: 587794
cugagggucgugggugaaa

SEQ ID NO: 818765 - RNA, 19 nt, Artificial Sequence
  Description of Artificial Sequence: Synthetic oligonucleotide
  Antisense strand to SEQ ID NO: 818764
uuucacccacgacccucag

SEQ ID NO: 818766 - RNA, 19 nt, Artificial Sequence
  Description of Artificial Sequence: Synthetic oligonucleotide
  Sense strand starting at position 3012 of SEQ ID NO: 587794
agacgugagcuccaggaga

SEQ ID NO: 818767 - RNA, 19 nt, Artificial Sequence
  Description of Artificial Sequence: Synthetic oligonucleotide
  Antisense strand to SEQ ID NO: 818766
ucuccuggagcucacgucu

SEQ ID NO: 818768 - RNA, 19 nt, Artificial Sequence
  Description of Artificial Sequence: Synthetic oligonucleotide
  Sense strand starting at position 3063 of SEQ ID NO: 587794
gucugaaagccugggagua

SEQ ID NO: 818769 - RNA, 19 nt, Artificial Sequence
  Description of Artificial Sequence: Synthetic oligonucleotide
  Antisense strand to SEQ ID NO: 818768
uacucccaggcuuucagac

SEQ ID NO: 818770 - RNA, 19 nt, Artificial Sequence
  Description of Artificial Sequence: Synthetic oligonucleotide
  Sense strand starting at position 3064 of SEQ ID NO: 587794
ucugaaagccugggaguaa

SEQ ID NO: 818771 - RNA, 19 nt, Artificial Sequence
  Description of Artificial Sequence: Synthetic oligonucleotide
  Antisense strand to SEQ ID NO: 818770
uuacucccaggcuuucaga

SEQ ID NO: 818772 - RNA, 19 nt, Artificial Sequence
  Description of Artificial Sequence: Synthetic oligonucleotide
  Sense strand starting at position 3142 of SEQ ID NO: 587794
ccaucaggcuucucagaga

SEQ ID NO: 818773 - RNA, 19 nt, Artificial Sequence
  Description of Artificial Sequence: Synthetic oligonucleotide
  Antisense strand to SEQ ID NO: 818772
ucucugagaagccugaugg

SEQ ID NO: 818774 - RNA, 19 nt, Artificial Sequence
  Description of Artificial Sequence: Synthetic oligonucleotide
  Sense strand starting at position 3145 of SEQ ID NO: 587794
ucaggcuucucagagaaga

SEQ ID NO: 818775 - RNA, 19 nt, Artificial Sequence
  Description of Artificial Sequence: Synthetic oligonucleotide
  Antisense strand to SEQ ID NO: 818774
ucuucucugagaagccuga

SEQ ID NO: 818776 - RNA, 19 nt, Artificial Sequence
  Description of Artificial Sequence: Synthetic oligonucleotide
  Sense strand starting at position 3221 of SEQ ID NO: 587794
gguagaguguugcccagua

SEQ ID NO: 818777 - RNA, 19 nt, Artificial Sequence
  Description of Artificial Sequence: Synthetic oligonucleotide
  Antisense strand to SEQ ID NO: 818776
uacugggcaacacucuacc

SEQ ID NO: 818778 - RNA, 19 nt, Artificial Sequence
  Description of Artificial Sequence: Synthetic oligonucleotide
  Sense strand starting at position 3223 of SEQ ID NO: 587794
uagaguguugcccaguaga

SEQ ID NO: 818779 - RNA, 19 nt, Artificial Sequence
  Description of Artificial Sequence: Synthetic oligonucleotide
  Antisense strand to SEQ ID NO: 818778
ucuacugggcaacacucua

SEQ ID NO: 818780 - RNA, 19 nt, Artificial Sequence
  Description of Artificial Sequence: Synthetic oligonucleotide
  Sense strand starting at position 3226 of SEQ ID NO: 587794
aguguugcccaguagaaug

SEQ ID NO: 818781 - RNA, 19 nt, Artificial Sequence
  Description of Artificial Sequence: Synthetic oligonucleotide
  Antisense strand to SEQ ID NO: 818780
cauucuacugggcaacacu

SEQ ID NO: 818782 - RNA, 19 nt, Artificial Sequence
  Description of Artificial Sequence: Synthetic oligonucleotide
  Sense strand starting at position 3266 of SEQ ID NO: 587794
cgaagcucaccaggucaua

SEQ ID NO: 818783 - RNA, 19 nt, Artificial Sequence
  Description of Artificial Sequence: Synthetic oligonucleotide
  Antisense strand to SEQ ID NO: 818782
uaugaccuggugagcuucg

SEQ ID NO: 818784 - RNA, 19 nt, Artificial Sequence
  Description of Artificial Sequence: Synthetic oligonucleotide
  Sense strand starting at position 3462 of SEQ ID NO: 587794
aaagaaaccucgggaugag

SEQ ID NO: 818785 - RNA, 19 nt, Artificial Sequence
  Description of Artificial Sequence: Synthetic oligonucleotide
  Antisense strand to SEQ ID NO: 818784
cucaucccgagguuucuuu

SEQ ID NO: 818786 - RNA, 19 nt, Artificial Sequence
  Description of Artificial Sequence: Synthetic oligonucleotide
  Sense strand starting at position 3538 of SEQ ID NO: 587794
gaugaagucuuccagaaug

SEQ ID NO: 818787 - RNA, 19 nt, Artificial Sequence
  Description of Artificial Sequence: Synthetic oligonucleotide
  Antisense strand to SEQ ID NO: 818786
cauucuggaagacuucauc

SEQ ID NO: 818788 - RNA, 19 nt, Artificial Sequence
  Description of Artificial Sequence: Synthetic oligonucleotide
  Sense strand starting at position 3540 of SEQ ID NO: 587794
ugaagucuuccagaaugua

SEQ ID NO: 818789 - RNA, 19 nt, Artificial Sequence
  Description of Artificial Sequence: Synthetic oligonucleotide
  Antisense strand to SEQ ID NO: 818788
uacauucuggaagacuuca

SEQ ID NO: 818790 - RNA, 19 nt, Artificial Sequence
  Description of Artificial Sequence: Synthetic oligonucleotide
  Sense strand starting at position 3543 of SEQ ID NO: 587794
agucuuccagaauguauaa

SEQ ID NO: 818791 - RNA, 19 nt, Artificial Sequence
  Description of Artificial Sequence: Synthetic oligonucleotide
  Antisense strand to SEQ ID NO: 818790
uuauacauucuggaagacu

SEQ ID NO: 818792 - RNA, 19 nt, Artificial Sequence
  Description of Artificial Sequence: Synthetic oligonucleotide
  Sense strand starting at position 3550 of SEQ ID NO: 587794
cagaauguauaaugacaga

SEQ ID NO: 818793 - RNA, 19 nt, Artificial Sequence
  Description of Artificial Sequence: Synthetic oligonucleotide
  Antisense strand to SEQ ID NO: 818792
ucugucauuauacauucug

SEQ ID NO: 818794 - RNA, 19 nt, Artificial Sequence
  Description of Artificial Sequence: Synthetic oligonucleotide
  Sense strand starting at position 3605 of SEQ ID NO: 587794
gugggugcucuuagggcua

SEQ ID NO: 818795 - RNA, 19 nt, Artificial Sequence
  Description of Artificial Sequence: Synthetic oligonucleotide
  Antisense strand to SEQ ID NO: 818794
uagcccuaagagcacccac

SEQ ID NO: 818796 - RNA, 19 nt, Artificial Sequence
  Description of Artificial Sequence: Synthetic oligonucleotide
  Sense strand starting at position 3724 of SEQ ID NO: 587794
acagcuucccuuggcaaua

SEQ ID NO: 818797 - RNA, 19 nt, Artificial Sequence
  Description of Artificial Sequence: Synthetic oligonucleotide
  Antisense strand to SEQ ID NO: 818796
uauugccaagggaagcugu

SEQ ID NO: 818798 - RNA, 19 nt, Artificial Sequence
  Description of Artificial Sequence: Synthetic oligonucleotide
  Sense strand starting at position 3767 of SEQ ID NO: 587794
ccaggacuguucuuacaca

SEQ ID NO: 818799 - RNA, 19 nt, Artificial Sequence
  Description of Artificial Sequence: Synthetic oligonucleotide
  Antisense strand to SEQ ID NO: 818798
uguguaagaacaguccugg

SEQ ID NO: 818800 - RNA, 19 nt, Artificial Sequence
  Description of Artificial Sequence: Synthetic oligonucleotide
  Sense strand starting at position 3814 of SEQ ID NO: 587794
gugcuaugcaauggauaca

SEQ ID NO: 818801 - RNA, 19 nt, Artificial Sequence
  Description of Artificial Sequence: Synthetic oligonucleotide
  Antisense strand to SEQ ID NO: 818800
uguauccauugcauagcac

SEQ ID NO: 818802 - RNA, 19 nt, Artificial Sequence
  Description of Artificial Sequence: Synthetic oligonucleotide
  Sense strand starting at position 3900 of SEQ ID NO: 587794
gccuguguucuugccacca

SEQ ID NO: 818803 - RNA, 19 nt, Artificial Sequence
  Description of Artificial Sequence: Synthetic oligonucleotide
  Antisense strand to SEQ ID NO: 818802
ugguggcaagaacacaggc

SEQ ID NO: 818804 - RNA, 19 nt, Artificial Sequence
  Description of Artificial Sequence: Synthetic oligonucleotide
  Sense strand starting at position 147 of SEQ ID NO: 587795
ccaagcuuugaauggaaca

SEQ ID NO: 818805 - RNA, 19 nt, Artificial Sequence
  Description of Artificial Sequence: Synthetic oligonucleotide
  Antisense strand to SEQ ID NO: 818804
uguuccauucaaagcuugg

SEQ ID NO: 818806 - RNA, 19 nt, Artificial Sequence
  Description of Artificial Sequence: Synthetic oligonucleotide
  Sense strand starting at position 169 of SEQ ID NO: 587795
auaguauuacgguaaggug

SEQ ID NO: 818807 - RNA, 19 nt, Artificial Sequence
  Description of Artificial Sequence: Synthetic oligonucleotide
  Antisense strand to SEQ ID NO: 818806
caccuuaccguaauacuau

SEQ ID NO: 818808 - RNA, 19 nt, Artificial Sequence
  Description of Artificial Sequence: Synthetic oligonucleotide
  Sense strand starting at position 397 of SEQ ID NO: 587795
aggacaauagucuguucuu

SEQ ID NO: 818809 - RNA, 19 nt, Artificial Sequence
  Description of Artificial Sequence: Synthetic oligonucleotide
  Antisense strand to SEQ ID NO: 818808
aagaacagacuauuguccu

SEQ ID NO: 818810 - RNA, 19 nt, Artificial Sequence
  Description of Artificial Sequence: Synthetic oligonucleotide
  Sense strand starting at position 398 of SEQ ID NO: 587795
ggacaauagucuguucuug

SEQ ID NO: 818811 - RNA, 19 nt, Artificial Sequence
  Description of Artificial Sequence: Synthetic oligonucleotide
  Antisense strand to SEQ ID NO: 818810
caagaacagacuauugucc

SEQ ID NO: 818812 - RNA, 19 nt, Artificial Sequence
  Description of Artificial Sequence: Synthetic oligonucleotide
  Sense strand starting at position 468 of SEQ ID NO: 587795
uugucuaauccguaggaag

SEQ ID NO: 818813 - RNA, 19 nt, Artificial Sequence
  Description of Artificial Sequence: Synthetic oligonucleotide
  Antisense strand to SEQ ID NO: 818812
cuuccuacggauuagacaa

SEQ ID NO: 818814 - RNA, 19 nt, Artificial Sequence
  Description of Artificial Sequence: Synthetic oligonucleotide
  Sense strand starting at position 501 of SEQ ID NO: 587795
uuccuuuaggucuagguaa

SEQ ID NO: 818815 - RNA, 19 nt, Artificial Sequence
  Description of Artificial Sequence: Synthetic oligonucleotide
  Antisense strand to SEQ ID NO: 818814
uuaccuagaccuaaaggaa

SEQ ID NO: 818816 - RNA, 19 nt, Artificial Sequence
  Description of Artificial Sequence: Synthetic oligonucleotide
  Sense strand starting at position 503 of SEQ ID NO: 587795
ccuuuaggucuagguaaua

SEQ ID NO: 818817 - RNA, 19 nt, Artificial Sequence
  Description of Artificial Sequence: Synthetic oligonucleotide
  Antisense strand to SEQ ID NO: 818816
uauuaccuagaccuaaagg

SEQ ID NO: 818818 - RNA, 19 nt, Artificial Sequence
  Description of Artificial Sequence: Synthetic oligonucleotide
  Sense strand starting at position 743 of SEQ ID NO: 587795
gggagagggucaguuuacu

SEQ ID NO: 818819 - RNA, 19 nt, Artificial Sequence
  Description of Artificial Sequence: Synthetic oligonucleotide
  Antisense strand to SEQ ID NO: 818818
aguaaacugacccucuccc

SEQ ID NO: 818820 - RNA, 19 nt, Artificial Sequence
  Description of Artificial Sequence: Synthetic oligonucleotide
  Sense strand starting at position 2584 of SEQ ID NO: 587795
cagcaaagucgagggaaau

SEQ ID NO: 818821 - RNA, 19 nt, Artificial Sequence
  Description of Artificial Sequence: Synthetic oligonucleotide
  Antisense strand to SEQ ID NO: 818820
auuucccucgacuuugcug

SEQ ID NO: 818822 - RNA, 19 nt, Artificial Sequence
  Description of Artificial Sequence: Synthetic oligonucleotide
  Sense strand starting at position 2585 of SEQ ID NO: 587795
agcaaagucgagggaaaua

SEQ ID NO: 818823 - RNA, 19 nt, Artificial Sequence
  Description of Artificial Sequence: Synthetic oligonucleotide
  Antisense strand to SEQ ID NO: 818822
uauuucccucgacuuugcu

SEQ ID NO: 818824 - RNA, 19 nt, Artificial Sequence
  Description of Artificial Sequence: Synthetic oligonucleotide
  Sense strand starting at position 2604 of SEQ ID NO: 587795
accugcugucuaugauuua

SEQ ID NO: 818825 - RNA, 19 nt, Artificial Sequence
  Description of Artificial Sequence: Synthetic oligonucleotide
  Antisense strand to SEQ ID NO: 818824
uaaaucauagacagcaggu

SEQ ID NO: 818826 - RNA, 19 nt, Artificial Sequence
  Description of Artificial Sequence: Synthetic oligonucleotide
  Sense strand starting at position 2607 of SEQ ID NO: 587795
ugcugucuaugauuuagca

SEQ ID NO: 818827 - RNA, 19 nt, Artificial Sequence
  Description of Artificial Sequence: Synthetic oligonucleotide
  Antisense strand to SEQ ID NO: 818826
ugcuaaaucauagacagca

SEQ ID NO: 818828 - RNA, 19 nt, Artificial Sequence
  Description of Artificial Sequence: Synthetic oligonucleotide
  Sense strand starting at position 2623 of SEQ ID NO: 587795
gcaagugaugauggauauu

SEQ ID NO: 818829 - RNA, 19 nt, Artificial Sequence
  Description of Artificial Sequence: Synthetic oligonucleotide
  Antisense strand to SEQ ID NO: 818828
aauauccaucaucacuugc

SEQ ID NO: 818830 - RNA, 19 nt, Artificial Sequence
  Description of Artificial Sequence: Synthetic oligonucleotide
  Sense strand starting at position 2743 of SEQ ID NO: 587795
cccuauugaagaggguaau

SEQ ID NO: 818831 - RNA, 19 nt, Artificial Sequence
  Description of Artificial Sequence: Synthetic oligonucleotide
  Antisense strand to SEQ ID NO: 818830
auuacccucuucaauaggg

SEQ ID NO: 818832 - RNA, 19 nt, Artificial Sequence
  Description of Artificial Sequence: Synthetic oligonucleotide
  Sense strand starting at position 2779 of SEQ ID NO: 587795
aauacaggagucuguaagu

SEQ ID NO: 818833 - RNA, 19 nt, Artificial Sequence
  Description of Artificial Sequence: Synthetic oligonucleotide
  Antisense strand to SEQ ID NO: 818832
acuuacagacuccuguauu

SEQ ID NO: 818834 - RNA, 19 nt, Artificial Sequence
  Description of Artificial Sequence: Synthetic oligonucleotide
  Sense strand starting at position 2876 of SEQ ID NO: 587795
ucuugaugucauugaauag

SEQ ID NO: 818835 - RNA, 19 nt, Artificial Sequence
  Description of Artificial Sequence: Synthetic oligonucleotide
  Antisense strand to SEQ ID NO: 818834
cuauucaaugacaucaaga

SEQ ID NO: 818836 - RNA, 19 nt, Artificial Sequence
  Description of Artificial Sequence: Synthetic oligonucleotide
  Sense strand starting at position 2890 of SEQ ID NO: 587795
aauaguggugucuaccuaa

SEQ ID NO: 818837 - RNA, 19 nt, Artificial Sequence
  Description of Artificial Sequence: Synthetic oligonucleotide
  Antisense strand to SEQ ID NO: 818836
uuagguagacaccacuauu

SEQ ID NO: 818838 - RNA, 19 nt, Artificial Sequence
  Description of Artificial Sequence: Synthetic oligonucleotide
  Sense strand starting at position 3051 of SEQ ID NO: 587795
ggaagagugggcugagaca

SEQ ID NO: 818839 - RNA, 19 nt, Artificial Sequence
  Description of Artificial Sequence: Synthetic oligonucleotide
  Antisense strand to SEQ ID NO: 818838
ugucucagcccacucuucc

SEQ ID NO: 818840 - RNA, 19 nt, Artificial Sequence
  Description of Artificial Sequence: Synthetic oligonucleotide
  Sense strand starting at position 3069 of SEQ ID NO: 587795
aaaguuggucaggaauugu

SEQ ID NO: 818841 - RNA, 19 nt, Artificial Sequence
  Description of Artificial Sequence: Synthetic oligonucleotide
  Antisense strand to SEQ ID NO: 818840
acaauuccugaccaacuuu

SEQ ID NO: 818842 - RNA, 19 nt, Artificial Sequence
  Description of Artificial Sequence: Synthetic oligonucleotide
  Sense strand starting at position 3078 of SEQ ID NO: 587795
caggaauuguuauugguuu

SEQ ID NO: 818843 - RNA, 19 nt, Artificial Sequence
  Description of Artificial Sequence: Synthetic oligonucleotide
  Antisense strand to SEQ ID NO: 818842
aaaccaauaacaauuccug

SEQ ID NO: 818844 - RNA, 19 nt, Artificial Sequence
  Description of Artificial Sequence: Synthetic oligonucleotide
  Sense strand starting at position 3082 of SEQ ID NO: 587795
aauuguuauugguuuacag

SEQ ID NO: 818845 - RNA, 19 nt, Artificial Sequence
  Description of Artificial Sequence: Synthetic oligonucleotide
  Antisense strand to SEQ ID NO: 818844
cuguaaaccaauaacaauu

SEQ ID NO: 818846 - RNA, 19 nt, Artificial Sequence
  Description of Artificial Sequence: Synthetic oligonucleotide
  Sense strand starting at position 3084 of SEQ ID NO: 587795
uuguuauugguuuacagag

SEQ ID NO: 818847 - RNA, 19 nt, Artificial Sequence
  Description of Artificial Sequence: Synthetic oligonucleotide
  Antisense strand to SEQ ID NO: 818846
cucuguaaaccaauaacaa

SEQ ID NO: 818848 - RNA, 19 nt, Artificial Sequence
  Description of Artificial Sequence: Synthetic oligonucleotide
  Sense strand starting at position 3098 of SEQ ID NO: 587795
cagagauaccauugcuuag

SEQ ID NO: 818849 - RNA, 19 nt, Artificial Sequence
  Description of Artificial Sequence: Synthetic oligonucleotide
  Antisense strand to SEQ ID NO: 818848
cuaagcaaugguaucucug

SEQ ID NO: 818850 - RNA, 19 nt, Artificial Sequence
  Description of Artificial Sequence: Synthetic oligonucleotide
  Sense strand starting at position 3101 of SEQ ID NO: 587795
agauaccauugcuuaguga

SEQ ID NO: 818851 - RNA, 19 nt, Artificial Sequence
  Description of Artificial Sequence: Synthetic oligonucleotide
  Antisense strand to SEQ ID NO: 818850
ucacuaagcaaugguaucu

SEQ ID NO: 818852 - RNA, 19 nt, Artificial Sequence
  Description of Artificial Sequence: Synthetic oligonucleotide
  Sense strand starting at position 3102 of SEQ ID NO: 587795
gauaccauugcuuagugau

SEQ ID NO: 818853 - RNA, 19 nt, Artificial Sequence
  Description of Artificial Sequence: Synthetic oligonucleotide
  Antisense strand to SEQ ID NO: 818852
aucacuaagcaaugguauc

SEQ ID NO: 818854 - RNA, 19 nt, Artificial Sequence
  Description of Artificial Sequence: Synthetic oligonucleotide
  Sense strand starting at position 3136 of SEQ ID NO: 587795
acucauaggguaugaguua

SEQ ID NO: 818855 - RNA, 19 nt, Artificial Sequence
  Description of Artificial Sequence: Synthetic oligonucleotide
  Antisense strand to SEQ ID NO: 818854
uaacucauacccuaugagu

SEQ ID NO: 818856 - RNA, 19 nt, Artificial Sequence
  Description of Artificial Sequence: Synthetic oligonucleotide
  Sense strand starting at position 3211 of SEQ ID NO: 587795
gcaggugggcuuuaagaga

SEQ ID NO: 818857 - RNA, 19 nt, Artificial Sequence
  Description of Artificial Sequence: Synthetic oligonucleotide
  Antisense strand to SEQ ID NO: 818856
ucucuuaaagcccaccugc

SEQ ID NO: 818858 - RNA, 19 nt, Artificial Sequence
  Description of Artificial Sequence: Synthetic oligonucleotide
  Sense strand starting at position 3362 of SEQ ID NO: 587795
guggucucccuuuauuaau

SEQ ID NO: 818859 - RNA, 19 nt, Artificial Sequence
  Description of Artificial Sequence: Synthetic oligonucleotide
  Antisense strand to SEQ ID NO: 818858
auuaauaaagggagaccac

SEQ ID NO: 818860 - RNA, 19 nt, Artificial Sequence
  Description of Artificial Sequence: Synthetic oligonucleotide
  Sense strand starting at position 3391 of SEQ ID NO: 587795
uuuauuaaggacugcucua

SEQ ID NO: 818861 - RNA, 19 nt, Artificial Sequence
  Description of Artificial Sequence: Synthetic oligonucleotide
  Antisense strand to SEQ ID NO: 818860
uagagcaguccuuaauaaa

SEQ ID NO: 818862 - RNA, 19 nt, Artificial Sequence
  Description of Artificial Sequence: Synthetic oligonucleotide
  Sense strand starting at position 3403 of SEQ ID NO: 587795
ugcucuaggcacuagagau

SEQ ID NO: 818863 - RNA, 19 nt, Artificial Sequence
  Description of Artificial Sequence: Synthetic oligonucleotide
  Antisense strand to SEQ ID NO: 818862
aucucuagugccuagagca

SEQ ID NO: 818864 - RNA, 19 nt, Artificial Sequence
  Description of Artificial Sequence: Synthetic oligonucleotide
  Sense strand starting at position 3604 of SEQ ID NO: 587795
uacaauaaguggucaggga

SEQ ID NO: 818865 - RNA, 19 nt, Artificial Sequence
  Description of Artificial Sequence: Synthetic oligonucleotide
  Antisense strand to SEQ ID NO: 818864
ucccugaccacuuauugua

SEQ ID NO: 818866 - RNA, 19 nt, Artificial Sequence
  Description of Artificial Sequence: Synthetic oligonucleotide
  Sense strand starting at position 3671 of SEQ ID NO: 587795
gagaacuuaccuugacguu

SEQ ID NO: 818867 - RNA, 19 nt, Artificial Sequence
  Description of Artificial Sequence: Synthetic oligonucleotide
  Antisense strand to SEQ ID NO: 818866
aacgucaagguaaguucuc

SEQ ID NO: 818868 - RNA, 19 nt, Artificial Sequence
  Description of Artificial Sequence: Synthetic oligonucleotide
  Sense strand starting at position 3683 of SEQ ID NO: 587795
ugacguucucuggaggaga

SEQ ID NO: 818869 - RNA, 19 nt, Artificial Sequence
  Description of Artificial Sequence: Synthetic oligonucleotide
  Antisense strand to SEQ ID NO: 818868
ucuccuccagagaacguca

SEQ ID NO: 818870 - RNA, 19 nt, Artificial Sequence
  Description of Artificial Sequence: Synthetic oligonucleotide
  Sense strand starting at position 3822 of SEQ ID NO: 587795
ccagaauguguaggacuuu

SEQ ID NO: 818871 - RNA, 19 nt, Artificial Sequence
  Description of Artificial Sequence: Synthetic oligonucleotide
  Antisense strand to SEQ ID NO: 818870
aaaguccuacacauucugg

SEQ ID NO: 818872 - RNA, 19 nt, Artificial Sequence
  Description of Artificial Sequence: Synthetic oligonucleotide
  Sense strand starting at position 3833 of SEQ ID NO: 587795
aggacuuuaugggcuauau

SEQ ID NO: 818873 - RNA, 19 nt, Artificial Sequence
  Description of Artificial Sequence: Synthetic oligonucleotide
  Antisense strand to SEQ ID NO: 818872
auauagcccauaaaguccu

SEQ ID NO: 818874 - RNA, 19 nt, Artificial Sequence
  Description of Artificial Sequence: Synthetic oligonucleotide
  Sense strand starting at position 3837 of SEQ ID NO: 587795
cuuuaugggcuauauugaa

SEQ ID NO: 818875 - RNA, 19 nt, Artificial Sequence
  Description of Artificial Sequence: Synthetic oligonucleotide
  Antisense strand to SEQ ID NO: 818874
uucaauauagcccauaaag

SEQ ID NO: 818876 - RNA, 19 nt, Artificial Sequence
  Description of Artificial Sequence: Synthetic oligonucleotide
  Sense strand starting at position 3891 of SEQ ID NO: 587795
guuggagaguuguuaggga

SEQ ID NO: 818877 - RNA, 19 nt, Artificial Sequence
  Description of Artificial Sequence: Synthetic oligonucleotide
  Antisense strand to SEQ ID NO: 818876
ucccuaacaacucuccaac

SEQ ID NO: 818878 - RNA, 19 nt, Artificial Sequence
  Description of Artificial Sequence: Synthetic oligonucleotide
  Sense strand starting at position 3896 of SEQ ID NO: 587795
agaguuguuagggaaacgu

SEQ ID NO: 818879 - RNA, 19 nt, Artificial Sequence
  Description of Artificial Sequence: Synthetic oligonucleotide
  Antisense strand to SEQ ID NO: 818878
acguuucccuaacaacucu

SEQ ID NO: 818880 - RNA, 19 nt, Artificial Sequence
  Description of Artificial Sequence: Synthetic oligonucleotide
  Sense strand starting at position 3905 of SEQ ID NO: 587795
agggaaacgugaucugaau

SEQ ID NO: 818881 - RNA, 19 nt, Artificial Sequence
  Description of Artificial Sequence: Synthetic oligonucleotide
  Antisense strand to SEQ ID NO: 818880
auucagaucacguuucccu

SEQ ID NO: 818882 - RNA, 19 nt, Artificial Sequence
  Description of Artificial Sequence: Synthetic oligonucleotide
  Sense strand starting at position 3912 of SEQ ID NO: 587795
cgugaucugaauuauguuu

SEQ ID NO: 818883 - RNA, 19 nt, Artificial Sequence
  Description of Artificial Sequence: Synthetic oligonucleotide
  Antisense strand to SEQ ID NO: 818882
aaacauaauucagaucacg

SEQ ID NO: 818884 - RNA, 19 nt, Artificial Sequence
  Description of Artificial Sequence: Synthetic oligonucleotide
  Sense strand starting at position 47 of SEQ ID NO: 587796
ccuugaguccaugauauau

SEQ ID NO: 818885 - RNA, 19 nt, Artificial Sequence
  Description of Artificial Sequence: Synthetic oligonucleotide
  Antisense strand to SEQ ID NO: 818884
auauaucauggacucaagg

SEQ ID NO: 818886 - RNA, 19 nt, Artificial Sequence
  Description of Artificial Sequence: Synthetic oligonucleotide
  Sense strand starting at position 130 of SEQ ID NO: 587796
uagcaaagccauuggauga

SEQ ID NO: 818887 - RNA, 19 nt, Artificial Sequence
  Description of Artificial Sequence: Synthetic oligonucleotide
  Antisense strand to SEQ ID NO: 818886
ucauccaauggcuuugcua

SEQ ID NO: 818888 - RNA, 19 nt, Artificial Sequence
  Description of Artificial Sequence: Synthetic oligonucleotide
  Sense strand starting at position 274 of SEQ ID NO: 587796
cucccauggcuuugauaug

SEQ ID NO: 818889 - RNA, 19 nt, Artificial Sequence
  Description of Artificial Sequence: Synthetic oligonucleotide
  Antisense strand to SEQ ID NO: 818888
cauaucaaagccaugggag

SEQ ID NO: 818890 - RNA, 19 nt, Artificial Sequence
  Description of Artificial Sequence: Synthetic oligonucleotide
  Sense strand starting at position 392 of SEQ ID NO: 587796
guaauaagauuugauccuu

SEQ ID NO: 818891 - RNA, 19 nt, Artificial Sequence
  Description of Artificial Sequence: Synthetic oligonucleotide
  Antisense strand to SEQ ID NO: 818890
aaggaucaaaucuuauuac

SEQ ID NO: 818892 - RNA, 19 nt, Artificial Sequence
  Description of Artificial Sequence: Synthetic oligonucleotide
  Sense strand starting at position 403 of SEQ ID NO: 587796
ugauccuuugaugguauau

SEQ ID NO: 818893 - RNA, 19 nt, Artificial Sequence
  Description of Artificial Sequence: Synthetic oligonucleotide
  Antisense strand to SEQ ID NO: 818892
auauaccaucaaaggauca

SEQ ID NO: 818894 - RNA, 19 nt, Artificial Sequence
  Description of Artificial Sequence: Synthetic oligonucleotide
  Sense strand starting at position 437 of SEQ ID NO: 587796
acaauauacgucuacuugu

SEQ ID NO: 818895 - RNA, 19 nt, Artificial Sequence
  Description of Artificial Sequence: Synthetic oligonucleotide
  Antisense strand to SEQ ID NO: 818894
acaaguagacguauauugu

SEQ ID NO: 818896 - RNA, 19 nt, Artificial Sequence
  Description of Artificial Sequence: Synthetic oligonucleotide
  Sense strand starting at position 476 of SEQ ID NO: 587796
auauauaccggaggucaau

SEQ ID NO: 818897 - RNA, 19 nt, Artificial Sequence
  Description of Artificial Sequence: Synthetic oligonucleotide
  Antisense strand to SEQ ID NO: 818896
auugaccuccgguauauau

SEQ ID NO: 818898 - RNA, 19 nt, Artificial Sequence
  Description of Artificial Sequence: Synthetic oligonucleotide
  Sense strand starting at position 493 of SEQ ID NO: 587796
auuucuguuucugugguaa

SEQ ID NO: 818899 - RNA, 19 nt, Artificial Sequence
  Description of Artificial Sequence: Synthetic oligonucleotide
  Antisense strand to SEQ ID NO: 818898
uuaccacagaaacagaaau

SEQ ID NO: 818900 - RNA, 19 nt, Artificial Sequence
  Description of Artificial Sequence: Synthetic oligonucleotide
  Sense strand starting at position 630 of SEQ ID NO: 587796
guaaaucuuaguuauggua

SEQ ID NO: 818901 - RNA, 19 nt, Artificial Sequence
  Description of Artificial Sequence: Synthetic oligonucleotide
  Antisense strand to SEQ ID NO: 818900
uaccauaacuaagauuuac

SEQ ID NO: 818902 - RNA, 19 nt, Artificial Sequence
  Description of Artificial Sequence: Synthetic oligonucleotide
  Sense strand starting at position 647 of SEQ ID NO: 587796
uauuuagaaugucagaaug

SEQ ID NO: 818903 - RNA, 19 nt, Artificial Sequence
  Description of Artificial Sequence: Synthetic oligonucleotide
  Antisense strand to SEQ ID NO: 818902
cauucugacauucuaaaua

SEQ ID NO: 818904 - RNA, 19 nt, Artificial Sequence
  Description of Artificial Sequence: Synthetic oligonucleotide
  Sense strand starting at position 742 of SEQ ID NO: 587796
uuggaauucccguaagaau

SEQ ID NO: 818905 - RNA, 19 nt, Artificial Sequence
  Description of Artificial Sequence: Synthetic oligonucleotide
  Antisense strand to SEQ ID NO: 818904
auucuuacgggaauuccaa

SEQ ID NO: 818906 - RNA, 19 nt, Artificial Sequence
  Description of Artificial Sequence: Synthetic oligonucleotide
  Sense strand starting at position 757 of SEQ ID NO: 587796
gaauuauagugaucuaugu

SEQ ID NO: 818907 - RNA, 19 nt, Artificial Sequence
  Description of Artificial Sequence: Synthetic oligonucleotide
  Antisense strand to SEQ ID NO: 818906
acauagaucacuauaauuc

SEQ ID NO: 818908 - RNA, 19 nt, Artificial Sequence
  Description of Artificial Sequence: Synthetic oligonucleotide
  Sense strand starting at position 759 of SEQ ID NO: 587796
auuauagugaucuaugugu

SEQ ID NO: 818909 - RNA, 19 nt, Artificial Sequence
  Description of Artificial Sequence: Synthetic oligonucleotide
  Antisense strand to SEQ ID NO: 818908
acacauagaucacuauaau

SEQ ID NO: 818910 - RNA, 19 nt, Artificial Sequence
  Description of Artificial Sequence: Synthetic oligonucleotide
  Sense strand starting at position 761 of SEQ ID NO: 587796
uauagugaucuauguguaa

SEQ ID NO: 818911 - RNA, 19 nt, Artificial Sequence
  Description of Artificial Sequence: Synthetic oligonucleotide
  Antisense strand to SEQ ID NO: 818910
uuacacauagaucacuaua

SEQ ID NO: 818912 - RNA, 19 nt, Artificial Sequence
  Description of Artificial Sequence: Synthetic oligonucleotide
  Sense strand starting at position 764 of SEQ ID NO: 587796
agugaucuauguguaacau

SEQ ID NO: 818913 - RNA, 19 nt, Artificial Sequence
  Description of Artificial Sequence: Synthetic oligonucleotide
  Antisense strand to SEQ ID NO: 818912
auguuacacauagaucacu

SEQ ID NO: 818914 - RNA, 19 nt, Artificial Sequence
  Description of Artificial Sequence: Synthetic oligonucleotide
  Sense strand starting at position 765 of SEQ ID NO: 587796
gugaucuauguguaacaua

SEQ ID NO: 818915 - RNA, 19 nt, Artificial Sequence
  Description of Artificial Sequence: Synthetic oligonucleotide
  Antisense strand to SEQ ID NO: 818914
uauguuacacauagaucac

SEQ ID NO: 818916 - RNA, 19 nt, Artificial Sequence
  Description of Artificial Sequence: Synthetic oligonucleotide
  Sense strand starting at position 790 of SEQ ID NO: 587796
gaaucagacuuccugaagu

SEQ ID NO: 818917 - RNA, 19 nt, Artificial Sequence
  Description of Artificial Sequence: Synthetic oligonucleotide
  Antisense strand to SEQ ID NO: 818916
acuucaggaagucugauuc

SEQ ID NO: 818918 - RNA, 19 nt, Artificial Sequence
  Description of Artificial Sequence: Synthetic oligonucleotide
  Sense strand starting at position 871 of SEQ ID NO: 587796
gauaauggaucaguacuuu

SEQ ID NO: 818919 - RNA, 19 nt, Artificial Sequence
  Description of Artificial Sequence: Synthetic oligonucleotide
  Antisense strand to SEQ ID NO: 818918
aaaguacugauccauuauc

SEQ ID NO: 818920 - RNA, 19 nt, Artificial Sequence
  Description of Artificial Sequence: Synthetic oligonucleotide
  Sense strand starting at position 1061 of SEQ ID NO: 587796
ccaagcuuugaauggaaca

SEQ ID NO: 818921 - RNA, 19 nt, Artificial Sequence
  Description of Artificial Sequence: Synthetic oligonucleotide
  Antisense strand to SEQ ID NO: 818920
uguuccauucaaagcuugg

SEQ ID NO: 818922 - RNA, 19 nt, Artificial Sequence
  Description of Artificial Sequence: Synthetic oligonucleotide
  Sense strand starting at position 1083 of SEQ ID NO: 587796
auaguauuacgguaaggug

SEQ ID NO: 818923 - RNA, 19 nt, Artificial Sequence
  Description of Artificial Sequence: Synthetic oligonucleotide
  Antisense strand to SEQ ID NO: 818922
caccuuaccguaauacuau

SEQ ID NO: 818924 - RNA, 19 nt, Artificial Sequence
  Description of Artificial Sequence: Synthetic oligonucleotide
  Sense strand starting at position 1311 of SEQ ID NO: 587796
aggacaauagucuguucuu

SEQ ID NO: 818925 - RNA, 19 nt, Artificial Sequence
  Description of Artificial Sequence: Synthetic oligonucleotide
  Antisense strand to SEQ ID NO: 818924
aagaacagacuauuguccu

SEQ ID NO: 818926 - RNA, 19 nt, Artificial Sequence
  Description of Artificial Sequence: Synthetic oligonucleotide
  Sense strand starting at position 1312 of SEQ ID NO: 587796
ggacaauagucuguucuug

SEQ ID NO: 818927 - RNA, 19 nt, Artificial Sequence
  Description of Artificial Sequence: Synthetic oligonucleotide
  Antisense strand to SEQ ID NO: 818926
caagaacagacuauugucc

SEQ ID NO: 818928 - RNA, 19 nt, Artificial Sequence
  Description of Artificial Sequence: Synthetic oligonucleotide
  Sense strand starting at position 1382 of SEQ ID NO: 587796
uugucuaauccguaggaag

SEQ ID NO: 818929 - RNA, 19 nt, Artificial Sequence
  Description of Artificial Sequence: Synthetic oligonucleotide
  Antisense strand to SEQ ID NO: 818928
cuuccuacggauuagacaa

SEQ ID NO: 818930 - RNA, 19 nt, Artificial Sequence
  Description of Artificial Sequence: Synthetic oligonucleotide
  Sense strand starting at position 1415 of SEQ ID NO: 587796
uuccuuuaggucuagguaa

SEQ ID NO: 818931 - RNA, 19 nt, Artificial Sequence
  Description of Artificial Sequence: Synthetic oligonucleotide
  Antisense strand to SEQ ID NO: 818930
uuaccuagaccuaaaggaa

SEQ ID NO: 818932 - RNA, 19 nt, Artificial Sequence
  Description of Artificial Sequence: Synthetic oligonucleotide
  Sense strand starting at position 1417 of SEQ ID NO: 587796
ccuuuaggucuagguaaua

SEQ ID NO: 818933 - RNA, 19 nt, Artificial Sequence
  Description of Artificial Sequence: Synthetic oligonucleotide
  Antisense strand to SEQ ID NO: 818932
uauuaccuagaccuaaagg

SEQ ID NO: 818934 - RNA, 19 nt, Artificial Sequence
  Description of Artificial Sequence: Synthetic oligonucleotide
  Sense strand starting at position 1601 of SEQ ID NO: 587796
ggcauagugcucgaugaag

SEQ ID NO: 818935 - RNA, 19 nt, Artificial Sequence
  Description of Artificial Sequence: Synthetic oligonucleotide
  Antisense strand to SEQ ID NO: 818934
cuucaucgagcacuaugcc

SEQ ID NO: 818936 - RNA, 19 nt, Artificial Sequence
  Description of Artificial Sequence: Synthetic oligonucleotide
  Sense strand starting at position 1657 of SEQ ID NO: 587796
gggagagggucaguuuacu

SEQ ID NO: 818937 - RNA, 19 nt, Artificial Sequence
  Description of Artificial Sequence: Synthetic oligonucleotide
  Antisense strand to SEQ ID NO: 818936
aguaaacugacccucuccc

SEQ ID NO: 818938 - RNA, 19 nt, Artificial Sequence
  Description of Artificial Sequence: Synthetic oligonucleotide
  Sense strand starting at position 1709 of SEQ ID NO: 587796
ccagacuucggcuaucuuu

SEQ ID NO: 818939 - RNA, 19 nt, Artificial Sequence
  Description of Artificial Sequence: Synthetic oligonucleotide
  Antisense strand to SEQ ID NO: 818938
aaagauagccgaagucugg

SEQ ID NO: 818940 - RNA, 19 nt, Artificial Sequence
  Description of Artificial Sequence: Synthetic oligonucleotide
  Sense strand starting at position 3419 of SEQ ID NO: 587796
uaccuugcgcgcuuaguua

SEQ ID NO: 818941 - RNA, 19 nt, Artificial Sequence
  Description of Artificial Sequence: Synthetic oligonucleotide
  Antisense strand to SEQ ID NO: 818940
uaacuaagcgcgcaaggua

SEQ ID NO: 818942 - RNA, 19 nt, Artificial Sequence
  Description of Artificial Sequence: Synthetic oligonucleotide
  Sense strand starting at position 3498 of SEQ ID NO: 587796
cagcaaagucgagggaaau

SEQ ID NO: 818943 - RNA, 19 nt, Artificial Sequence
  Description of Artificial Sequence: Synthetic oligonucleotide
  Antisense strand to SEQ ID NO: 818942
auuucccucgacuuugcug

SEQ ID NO: 818944 - RNA, 19 nt, Artificial Sequence
  Description of Artificial Sequence: Synthetic oligonucleotide
  Sense strand starting at position 3499 of SEQ ID NO: 587796
agcaaagucgagggaaaua

SEQ ID NO: 818945 - RNA, 19 nt, Artificial Sequence
  Description of Artificial Sequence: Synthetic oligonucleotide
  Antisense strand to SEQ ID NO: 818944
uauuucccucgacuuugcu

SEQ ID NO: 818946 - RNA, 19 nt, Artificial Sequence
  Description of Artificial Sequence: Synthetic oligonucleotide
  Sense strand starting at position 3518 of SEQ ID NO: 587796
accugcugucuaugauuua

SEQ ID NO: 818947 - RNA, 19 nt, Artificial Sequence
  Description of Artificial Sequence: Synthetic oligonucleotide
  Antisense strand to SEQ ID NO: 818946
uaaaucauagacagcaggu

SEQ ID NO: 818948 - RNA, 19 nt, Artificial Sequence
  Description of Artificial Sequence: Synthetic oligonucleotide
  Sense strand starting at position 3521 of SEQ ID NO: 587796
ugcugucuaugauuuagca

SEQ ID NO: 818949 - RNA, 19 nt, Artificial Sequence
  Description of Artificial Sequence: Synthetic oligonucleotide
  Antisense strand to SEQ ID NO: 818948
ugcuaaaucauagacagca

SEQ ID NO: 818950 - RNA, 19 nt, Artificial Sequence
  Description of Artificial Sequence: Synthetic oligonucleotide
  Sense strand starting at position 3537 of SEQ ID NO: 587796
gcaagugaugauggauauu

SEQ ID NO: 818951 - RNA, 19 nt, Artificial Sequence
  Description of Artificial Sequence: Synthetic oligonucleotide
  Antisense strand to SEQ ID NO: 818950
aauauccaucaucacuugc

SEQ ID NO: 818952 - RNA, 19 nt, Artificial Sequence
  Description of Artificial Sequence: Synthetic oligonucleotide
  Sense strand starting at position 3657 of SEQ ID NO: 587796
cccuauugaagaggguaau

SEQ ID NO: 818953 - RNA, 19 nt, Artificial Sequence
  Description of Artificial Sequence: Synthetic oligonucleotide
  Antisense strand to SEQ ID NO: 818952
auuacccucuucaauaggg

SEQ ID NO: 818954 - RNA, 19 nt, Artificial Sequence
  Description of Artificial Sequence: Synthetic oligonucleotide
  Sense strand starting at position 3693 of SEQ ID NO: 587796
aauacaggagucuguaagu

SEQ ID NO: 818955 - RNA, 19 nt, Artificial Sequence
  Description of Artificial Sequence: Synthetic oligonucleotide
  Antisense strand to SEQ ID NO: 818954
acuuacagacuccuguauu

SEQ ID NO: 818956 - RNA, 19 nt, Artificial Sequence
  Description of Artificial Sequence: Synthetic oligonucleotide
  Sense strand starting at position 3790 of SEQ ID NO: 587796
ucuugaugucauugaauag

SEQ ID NO: 818957 - RNA, 19 nt, Artificial Sequence
  Description of Artificial Sequence: Synthetic oligonucleotide
  Antisense strand to SEQ ID NO: 818956
cuauucaaugacaucaaga

SEQ ID NO: 818958 - RNA, 19 nt, Artificial Sequence
  Description of Artificial Sequence: Synthetic oligonucleotide
  Sense strand starting at position 3804 of SEQ ID NO: 587796
aauaguggugucuaccuaa

SEQ ID NO: 818959 - RNA, 19 nt, Artificial Sequence
  Description of Artificial Sequence: Synthetic oligonucleotide
  Antisense strand to SEQ ID NO: 818958
uuagguagacaccacuauu

SEQ ID NO: 818960 - RNA, 19 nt, Artificial Sequence
  Description of Artificial Sequence: Synthetic oligonucleotide
  Sense strand starting at position 3965 of SEQ ID NO: 587796
ggaagagugggcugagaca

SEQ ID NO: 818961 - RNA, 19 nt, Artificial Sequence
  Description of Artificial Sequence: Synthetic oligonucleotide
  Antisense strand to SEQ ID NO: 818960
ugucucagcccacucuucc

SEQ ID NO: 818962 - RNA, 19 nt, Artificial Sequence
  Description of Artificial Sequence: Synthetic oligonucleotide
  Sense strand starting at position 3983 of SEQ ID NO: 587796
aaaguuggucaggaauugu

SEQ ID NO: 818963 - RNA, 19 nt, Artificial Sequence
  Description of Artificial Sequence: Synthetic oligonucleotide
  Antisense strand to SEQ ID NO: 818962
acaauuccugaccaacuuu

SEQ ID NO: 818964 - RNA, 19 nt, Artificial Sequence
  Description of Artificial Sequence: Synthetic oligonucleotide
  Sense strand starting at position 182 of SEQ ID NO: 587797
uagccaagggccugagaau

SEQ ID NO: 818965 - RNA, 19 nt, Artificial Sequence
  Description of Artificial Sequence: Synthetic oligonucleotide
  Antisense strand to SEQ ID NO: 818964
auucucaggcccuuggcua

SEQ ID NO: 818966 - RNA, 19 nt, Artificial Sequence
  Description of Artificial Sequence: Synthetic oligonucleotide
  Sense strand starting at position 228 of SEQ ID NO: 587797
aguggaaggcucugcauga

SEQ ID NO: 818967 - RNA, 19 nt, Artificial Sequence
  Description of Artificial Sequence: Synthetic oligonucleotide
  Antisense strand to SEQ ID NO: 818966
ucaugcagagccuuccacu

SEQ ID NO: 818968 - RNA, 19 nt, Artificial Sequence
  Description of Artificial Sequence: Synthetic oligonucleotide
  Sense strand starting at position 350 of SEQ ID NO: 587797
cgaguuguaccucauguag

SEQ ID NO: 818969 - RNA, 19 nt, Artificial Sequence
  Description of Artificial Sequence: Synthetic oligonucleotide
  Antisense strand to SEQ ID NO: 818968
cuacaugagguacaacucg

SEQ ID NO: 818970 - RNA, 19 nt, Artificial Sequence
  Description of Artificial Sequence: Synthetic oligonucleotide
  Sense strand starting at position 538 of SEQ ID NO: 587797
caguuauuacaguaagacg

SEQ ID NO: 818971 - RNA, 19 nt, Artificial Sequence
  Description of Artificial Sequence: Synthetic oligonucleotide
  Antisense strand to SEQ ID NO: 818970
cgucuuacuguaauaacug

SEQ ID NO: 818972 - RNA, 19 nt, Artificial Sequence
  Description of Artificial Sequence: Synthetic oligonucleotide
  Sense strand starting at position 693 of SEQ ID NO: 587797
cugacaaauguguggcaau

SEQ ID NO: 818973 - RNA, 19 nt, Artificial Sequence
  Description of Artificial Sequence: Synthetic oligonucleotide
  Antisense strand to SEQ ID NO: 818972
auugccacacauuugucag

SEQ ID NO: 818974 - RNA, 19 nt, Artificial Sequence
  Description of Artificial Sequence: Synthetic oligonucleotide
  Sense strand starting at position 705 of SEQ ID NO: 587797
uggcaaugauccucuuaaa

SEQ ID NO: 818975 - RNA, 19 nt, Artificial Sequence
  Description of Artificial Sequence: Synthetic oligonucleotide
  Antisense strand to SEQ ID NO: 818974
uuuaagaggaucauugcca

SEQ ID NO: 818976 - RNA, 19 nt, Artificial Sequence
  Description of Artificial Sequence: Synthetic oligonucleotide
  Sense strand starting at position 1032 of SEQ ID NO: 587797
aaucuaaauguuuggguuu

SEQ ID NO: 818977 - RNA, 19 nt, Artificial Sequence
  Description of Artificial Sequence: Synthetic oligonucleotide
  Antisense strand to SEQ ID NO: 818976
aaacccaaacauuuagauu

SEQ ID NO: 818978 - RNA, 19 nt, Artificial Sequence
  Description of Artificial Sequence: Synthetic oligonucleotide
  Sense strand starting at position 1038 of SEQ ID NO: 587797
aauguuuggguuuauuauc

SEQ ID NO: 818979 - RNA, 19 nt, Artificial Sequence
  Description of Artificial Sequence: Synthetic oligonucleotide
  Antisense strand to SEQ ID NO: 818978
gauaauaaacccaaacauu

SEQ ID NO: 818980 - RNA, 19 nt, Artificial Sequence
  Description of Artificial Sequence: Synthetic oligonucleotide
  Sense strand starting at position 1043 of SEQ ID NO: 587797
uuggguuuauuaucugaau

SEQ ID NO: 818981 - RNA, 19 nt, Artificial Sequence
  Description of Artificial Sequence: Synthetic oligonucleotide
  Antisense strand to SEQ ID NO: 818980
auucagauaauaaacccaa

SEQ ID NO: 818982 - RNA, 19 nt, Artificial Sequence
  Description of Artificial Sequence: Synthetic oligonucleotide
  Sense strand starting at position 1044 of SEQ ID NO: 587797
uggguuuauuaucugaaua

SEQ ID NO: 818983 - RNA, 19 nt, Artificial Sequence
  Description of Artificial Sequence: Synthetic oligonucleotide
  Antisense strand to SEQ ID NO: 818982
uauucagauaauaaaccca

SEQ ID NO: 818984 - RNA, 19 nt, Artificial Sequence
  Description of Artificial Sequence: Synthetic oligonucleotide
  Sense strand starting at position 1092 of SEQ ID NO: 587797
agaccuguuugacuuccaa

SEQ ID NO: 818985 - RNA, 19 nt, Artificial Sequence
  Description of Artificial Sequence: Synthetic oligonucleotide
  Antisense strand to SEQ ID NO: 818984
uuggaagucaaacaggucu

SEQ ID NO: 818986 - RNA, 19 nt, Artificial Sequence
  Description of Artificial Sequence: Synthetic oligonucleotide
  Sense strand starting at position 1141 of SEQ ID NO: 587797
cuccuagaugccgauuagu

SEQ ID NO: 818987 - RNA, 19 nt, Artificial Sequence
  Description of Artificial Sequence: Synthetic oligonucleotide
  Antisense strand to SEQ ID NO: 818986
acuaaucggcaucuaggag

SEQ ID NO: 818988 - RNA, 19 nt, Artificial Sequence
  Description of Artificial Sequence: Synthetic oligonucleotide
  Sense strand starting at position 1144 of SEQ ID NO: 587797
cuagaugccgauuagucua

SEQ ID NO: 818989 - RNA, 19 nt, Artificial Sequence
  Description of Artificial Sequence: Synthetic oligonucleotide
  Antisense strand to SEQ ID NO: 818988
uagacuaaucggcaucuag

SEQ ID NO: 818990 - RNA, 19 nt, Artificial Sequence
  Description of Artificial Sequence: Synthetic oligonucleotide
  Sense strand starting at position 1217 of SEQ ID NO: 587797
gggucuguucuggagacag

SEQ ID NO: 818991 - RNA, 19 nt, Artificial Sequence
  Description of Artificial Sequence: Synthetic oligonucleotide
  Antisense strand to SEQ ID NO: 818990
cugucuccagaacagaccc

SEQ ID NO: 818992 - RNA, 19 nt, Artificial Sequence
  Description of Artificial Sequence: Synthetic oligonucleotide
  Sense strand starting at position 1373 of SEQ ID NO: 587797
acacgugcugaccaauuaa

SEQ ID NO: 818993 - RNA, 19 nt, Artificial Sequence
  Description of Artificial Sequence: Synthetic oligonucleotide
  Antisense strand to SEQ ID NO: 818992
uuaauuggucagcacgugu

SEQ ID NO: 818994 - RNA, 19 nt, Artificial Sequence
  Description of Artificial Sequence: Synthetic oligonucleotide
  Sense strand starting at position 1394 of SEQ ID NO: 587797
ggcccaaagacuugggagu

SEQ ID NO: 818995 - RNA, 19 nt, Artificial Sequence
  Description of Artificial Sequence: Synthetic oligonucleotide
  Antisense strand to SEQ ID NO: 818994
acucccaagucuuugggcc

SEQ ID NO: 818996 - RNA, 19 nt, Artificial Sequence
  Description of Artificial Sequence: Synthetic oligonucleotide
  Sense strand starting at position 1395 of SEQ ID NO: 587797
gcccaaagacuugggagua

SEQ ID NO: 818997 - RNA, 19 nt, Artificial Sequence
  Description of Artificial Sequence: Synthetic oligonucleotide
  Antisense strand to SEQ ID NO: 818996
uacucccaagucuuugggc

SEQ ID NO: 818998 - RNA, 19 nt, Artificial Sequence
  Description of Artificial Sequence: Synthetic oligonucleotide
  Sense strand starting at position 1425 of SEQ ID NO: 587797
ggaauaaauugagaaagua

SEQ ID NO: 818999 - RNA, 19 nt, Artificial Sequence
  Description of Artificial Sequence: Synthetic oligonucleotide
  Antisense strand to SEQ ID NO: 818998
uacuuucucaauuuauucc

SEQ ID NO: 819000 - RNA, 19 nt, Artificial Sequence
  Description of Artificial Sequence: Synthetic oligonucleotide
  Sense strand starting at position 1433 of SEQ ID NO: 587797
uugagaaaguaugcaggaa

SEQ ID NO: 819001 - RNA, 19 nt, Artificial Sequence
  Description of Artificial Sequence: Synthetic oligonucleotide
  Antisense strand to SEQ ID NO: 819000
uuccugcauacuuucucaa

SEQ ID NO: 819002 - RNA, 19 nt, Artificial Sequence
  Description of Artificial Sequence: Synthetic oligonucleotide
  Sense strand starting at position 1488 of SEQ ID NO: 587797
ugcuaaguucuggaagaug

SEQ ID NO: 819003 - RNA, 19 nt, Artificial Sequence
  Description of Artificial Sequence: Synthetic oligonucleotide
  Antisense strand to SEQ ID NO: 819002
caucuuccagaacuuagca

SEQ ID NO: 819004 - RNA, 19 nt, Artificial Sequence
  Description of Artificial Sequence: Synthetic oligonucleotide
  Sense strand starting at position 1640 of SEQ ID NO: 587797
agcauuaggaaucguaaau

SEQ ID NO: 819005 - RNA, 19 nt, Artificial Sequence
  Description of Artificial Sequence: Synthetic oligonucleotide
  Antisense strand to SEQ ID NO: 819004
auuuacgauuccuaaugcu

SEQ ID NO: 819006 - RNA, 19 nt, Artificial Sequence
  Description of Artificial Sequence: Synthetic oligonucleotide
  Sense strand starting at position 1716 of SEQ ID NO: 587797
gggaauuuaugugaacuua

SEQ ID NO: 819007 - RNA, 19 nt, Artificial Sequence
  Description of Artificial Sequence: Synthetic oligonucleotide
  Antisense strand to SEQ ID NO: 819006
uaaguucacauaaauuccc

SEQ ID NO: 819008 - RNA, 19 nt, Artificial Sequence
  Description of Artificial Sequence: Synthetic oligonucleotide
  Sense strand starting at position 1760 of SEQ ID NO: 587797
ugaggaaugugguccagca

SEQ ID NO: 819009 - RNA, 19 nt, Artificial Sequence
  Description of Artificial Sequence: Synthetic oligonucleotide
  Antisense strand to SEQ ID NO: 819008
ugcuggaccacauuccuca

SEQ ID NO: 819010 - RNA, 19 nt, Artificial Sequence
  Description of Artificial Sequence: Synthetic oligonucleotide
  Sense strand starting at position 1865 of SEQ ID NO: 587797
aagagagugguccagcaga

SEQ ID NO: 819011 - RNA, 19 nt, Artificial Sequence
  Description of Artificial Sequence: Synthetic oligonucleotide
  Antisense strand to SEQ ID NO: 819010
ucugcuggaccacucucuu

SEQ ID NO: 819012 - RNA, 19 nt, Artificial Sequence
  Description of Artificial Sequence: Synthetic oligonucleotide
  Sense strand starting at position 1993 of SEQ ID NO: 587797
gcuggacugagccaaguuu

SEQ ID NO: 819013 - RNA, 19 nt, Artificial Sequence
  Description of Artificial Sequence: Synthetic oligonucleotide
  Antisense strand to SEQ ID NO: 819012
aaacuuggcucaguccagc

SEQ ID NO: 819014 - RNA, 19 nt, Artificial Sequence
  Description of Artificial Sequence: Synthetic oligonucleotide
  Sense strand starting at position 2280 of SEQ ID NO: 587797
agcccaaguugauuaagaa

SEQ ID NO: 819015 - RNA, 19 nt, Artificial Sequence
  Description of Artificial Sequence: Synthetic oligonucleotide
  Antisense strand to SEQ ID NO: 819014
uucuuaaucaacuugggcu

SEQ ID NO: 819016 - RNA, 19 nt, Artificial Sequence
  Description of Artificial Sequence: Synthetic oligonucleotide
  Sense strand starting at position 2281 of SEQ ID NO: 587797
gcccaaguugauuaagaau

SEQ ID NO: 819017 - RNA, 19 nt, Artificial Sequence
  Description of Artificial Sequence: Synthetic oligonucleotide
  Antisense strand to SEQ ID NO: 819016
auucuuaaucaacuugggc

SEQ ID NO: 819018 - RNA, 19 nt, Artificial Sequence
  Description of Artificial Sequence: Synthetic oligonucleotide
  Sense strand starting at position 2287 of SEQ ID NO: 587797
guugauuaagaauguauug

SEQ ID NO: 819019 - RNA, 19 nt, Artificial Sequence
  Description of Artificial Sequence: Synthetic oligonucleotide
  Antisense strand to SEQ ID NO: 819018
caauacauucuuaaucaac

SEQ ID NO: 819020 - RNA, 19 nt, Artificial Sequence
  Description of Artificial Sequence: Synthetic oligonucleotide
  Sense strand starting at position 2495 of SEQ ID NO: 587797
guaagacucaaacgggcua

SEQ ID NO: 819021 - RNA, 19 nt, Artificial Sequence
  Description of Artificial Sequence: Synthetic oligonucleotide
  Antisense strand to SEQ ID NO: 819020
uagcccguuugagucuuac

SEQ ID NO: 819022 - RNA, 19 nt, Artificial Sequence
  Description of Artificial Sequence: Synthetic oligonucleotide
  Sense strand starting at position 2597 of SEQ ID NO: 587797
ggacaaaccuaaguaugua

SEQ ID NO: 819023 - RNA, 19 nt, Artificial Sequence
  Description of Artificial Sequence: Synthetic oligonucleotide
  Antisense strand to SEQ ID NO: 819022
uacauacuuagguuugucc

SEQ ID NO: 819024 - RNA, 19 nt, Artificial Sequence
  Description of Artificial Sequence: Synthetic oligonucleotide
  Sense strand starting at position 2697 of SEQ ID NO: 587797
guuugaacuggccaucuuu

SEQ ID NO: 819025 - RNA, 19 nt, Artificial Sequence
  Description of Artificial Sequence: Synthetic oligonucleotide
  Antisense strand to SEQ ID NO: 819024
aaagauggccaguucaaac

SEQ ID NO: 819026 - RNA, 19 nt, Artificial Sequence
  Description of Artificial Sequence: Synthetic oligonucleotide
  Sense strand starting at position 2708 of SEQ ID NO: 587797
ccaucuuucccugaaguga

SEQ ID NO: 819027 - RNA, 19 nt, Artificial Sequence
  Description of Artificial Sequence: Synthetic oligonucleotide
  Antisense strand to SEQ ID NO: 819026
ucacuucagggaaagaugg

SEQ ID NO: 819028 - RNA, 19 nt, Artificial Sequence
  Description of Artificial Sequence: Synthetic oligonucleotide
  Sense strand starting at position 2821 of SEQ ID NO: 587797
uuggcuuuaucuuuaaaga

SEQ ID NO: 819029 - RNA, 19 nt, Artificial Sequence
  Description of Artificial Sequence: Synthetic oligonucleotide
  Antisense strand to SEQ ID NO: 819028
ucuuuaaagauaaagccaa

SEQ ID NO: 819030 - RNA, 19 nt, Artificial Sequence
  Description of Artificial Sequence: Synthetic oligonucleotide
  Sense strand starting at position 2822 of SEQ ID NO: 587797
uggcuuuaucuuuaaagac

SEQ ID NO: 819031 - RNA, 19 nt, Artificial Sequence
  Description of Artificial Sequence: Synthetic oligonucleotide
  Antisense strand to SEQ ID NO: 819030
gucuuuaaagauaaagcca

SEQ ID NO: 819032 - RNA, 19 nt, Artificial Sequence
  Description of Artificial Sequence: Synthetic oligonucleotide
  Sense strand starting at position 2960 of SEQ ID NO: 587797
auccuugucucugcagaaa

SEQ ID NO: 819033 - RNA, 19 nt, Artificial Sequence
  Description of Artificial Sequence: Synthetic oligonucleotide
  Antisense strand to SEQ ID NO: 819032
uuucugcagagacaaggau

SEQ ID NO: 819034 - RNA, 19 nt, Artificial Sequence
  Description of Artificial Sequence: Synthetic oligonucleotide
  Sense strand starting at position 2996 of SEQ ID NO: 587797
auucuacuguaggcgaaua

SEQ ID NO: 819035 - RNA, 19 nt, Artificial Sequence
  Description of Artificial Sequence: Synthetic oligonucleotide
  Antisense strand to SEQ ID NO: 819034
uauucgccuacaguagaau

SEQ ID NO: 819036 - RNA, 19 nt, Artificial Sequence
  Description of Artificial Sequence: Synthetic oligonucleotide
  Sense strand starting at position 3259 of SEQ ID NO: 587797
agacaagaccugcagguuu

SEQ ID NO: 819037 - RNA, 19 nt, Artificial Sequence
  Description of Artificial Sequence: Synthetic oligonucleotide
  Antisense strand to SEQ ID NO: 819036
aaaccugcaggucuugucu

SEQ ID NO: 819038 - RNA, 19 nt, Artificial Sequence
  Description of Artificial Sequence: Synthetic oligonucleotide
  Sense strand starting at position 3455 of SEQ ID NO: 587797
uugagcuaaggguguauaa

SEQ ID NO: 819039 - RNA, 19 nt, Artificial Sequence
  Description of Artificial Sequence: Synthetic oligonucleotide
  Antisense strand to SEQ ID NO: 819038
uuauacacccuuagcucaa

SEQ ID NO: 819040 - RNA, 19 nt, Artificial Sequence
  Description of Artificial Sequence: Synthetic oligonucleotide
  Sense strand starting at position 3457 of SEQ ID NO: 587797
gagcuaaggguguauaaua

SEQ ID NO: 819041 - RNA, 19 nt, Artificial Sequence
  Description of Artificial Sequence: Synthetic oligonucleotide
  Antisense strand to SEQ ID NO: 819040
uauuauacacccuuagcuc

SEQ ID NO: 819042 - RNA, 19 nt, Artificial Sequence
  Description of Artificial Sequence: Synthetic oligonucleotide
  Sense strand starting at position 3471 of SEQ ID NO: 587797
uaauaauuaggucgaagga

SEQ ID NO: 819043 - RNA, 19 nt, Artificial Sequence
  Description of Artificial Sequence: Synthetic oligonucleotide
  Antisense strand to SEQ ID NO: 819042
uccuucgaccuaauuauua

SEQ ID NO: 819044 - RNA, 19 nt, Artificial Sequence
  Description of Artificial Sequence: Synthetic oligonucleotide
  Sense strand starting at position 363 of SEQ ID NO: 587798
ggcucugauaagugucuua

SEQ ID NO: 819045 - RNA, 19 nt, Artificial Sequence
  Description of Artificial Sequence: Synthetic oligonucleotide
  Antisense strand to SEQ ID NO: 819044
uaagacacuuaucagagcc

SEQ ID NO: 819046 - RNA, 19 nt, Artificial Sequence
  Description of Artificial Sequence: Synthetic oligonucleotide
  Sense strand starting at position 366 of SEQ ID NO: 587798
ucugauaagugucuuagug

SEQ ID NO: 819047 - RNA, 19 nt, Artificial Sequence
  Description of Artificial Sequence: Synthetic oligonucleotide
  Antisense strand to SEQ ID NO: 819046
cacuaagacacuuaucaga

SEQ ID NO: 819048 - RNA, 19 nt, Artificial Sequence
  Description of Artificial Sequence: Synthetic oligonucleotide
  Sense strand starting at position 423 of SEQ ID NO: 587798
ugaagaaccugggcucuau

SEQ ID NO: 819049 - RNA, 19 nt, Artificial Sequence
  Description of Artificial Sequence: Synthetic oligonucleotide
  Antisense strand to SEQ ID NO: 819048
auagagcccagguucuuca

SEQ ID NO: 819050 - RNA, 19 nt, Artificial Sequence
  Description of Artificial Sequence: Synthetic oligonucleotide
  Sense strand starting at position 433 of SEQ ID NO: 587798
gggcucuaugcucacuuga

SEQ ID NO: 819051 - RNA, 19 nt, Artificial Sequence
  Description of Artificial Sequence: Synthetic oligonucleotide
  Antisense strand to SEQ ID NO: 819050
ucaagugagcauagagccc

SEQ ID NO: 819052 - RNA, 19 nt, Artificial Sequence
  Description of Artificial Sequence: Synthetic oligonucleotide
  Sense strand starting at position 435 of SEQ ID NO: 587798
gcucuaugcucacuugaaa

SEQ ID NO: 819053 - RNA, 19 nt, Artificial Sequence
  Description of Artificial Sequence: Synthetic oligonucleotide
  Antisense strand to SEQ ID NO: 819052
uuucaagugagcauagagc

SEQ ID NO: 819054 - RNA, 19 nt, Artificial Sequence
  Description of Artificial Sequence: Synthetic oligonucleotide
  Sense strand starting at position 746 of SEQ ID NO: 587798
gagcuuaccucauugguga

SEQ ID NO: 819055 - RNA, 19 nt, Artificial Sequence
  Description of Artificial Sequence: Synthetic oligonucleotide
  Antisense strand to SEQ ID NO: 819054
ucaccaaugagguaagcuc

SEQ ID NO: 819056 - RNA, 19 nt, Artificial Sequence
  Description of Artificial Sequence: Synthetic oligonucleotide
  Sense strand starting at position 856 of SEQ ID NO: 587798
gggaaugugguggguacaa

SEQ ID NO: 819057 - RNA, 19 nt, Artificial Sequence
  Description of Artificial Sequence: Synthetic oligonucleotide
  Antisense strand to SEQ ID NO: 819056
uuguacccaccacauuccc

SEQ ID NO: 819058 - RNA, 19 nt, Artificial Sequence
  Description of Artificial Sequence: Synthetic oligonucleotide
  Sense strand starting at position 877 of SEQ ID NO: 587798
gcaguugauuggccacaga

SEQ ID NO: 819059 - RNA, 19 nt, Artificial Sequence
  Description of Artificial Sequence: Synthetic oligonucleotide
  Antisense strand to SEQ ID NO: 819058
ucuguggccaaucaacugc

SEQ ID NO: 819060 - RNA, 19 nt, Artificial Sequence
  Description of Artificial Sequence: Synthetic oligonucleotide
  Sense strand starting at position 911 of SEQ ID NO: 587798
ccagguucuucgagaggga

SEQ ID NO: 819061 - RNA, 19 nt, Artificial Sequence
  Description of Artificial Sequence: Synthetic oligonucleotide
  Antisense strand to SEQ ID NO: 819060
ucccucucgaagaaccugg

SEQ ID NO: 819062 - RNA, 19 nt, Artificial Sequence
  Description of Artificial Sequence: Synthetic oligonucleotide
  Sense strand starting at position 926 of SEQ ID NO: 587798
gggagagucuaugcuggaa

SEQ ID NO: 819063 - RNA, 19 nt, Artificial Sequence
  Description of Artificial Sequence: Synthetic oligonucleotide
  Antisense strand to SEQ ID NO: 819062
uuccagcauagacucuccc

SEQ ID NO: 819064 - RNA, 19 nt, Artificial Sequence
  Description of Artificial Sequence: Synthetic oligonucleotide
  Sense strand starting at position 929 of SEQ ID NO: 587798
agagucuaugcuggaaugu

SEQ ID NO: 819065 - RNA, 19 nt, Artificial Sequence
  Description of Artificial Sequence: Synthetic oligonucleotide
  Antisense strand to SEQ ID NO: 819064
acauuccagcauagacucu

SEQ ID NO: 819066 - RNA, 19 nt, Artificial Sequence
  Description of Artificial Sequence: Synthetic oligonucleotide
  Sense strand starting at position 962 of SEQ ID NO: 587798
aaugccuacuugguagaaa

SEQ ID NO: 819067 - RNA, 19 nt, Artificial Sequence
  Description of Artificial Sequence: Synthetic oligonucleotide
  Antisense strand to SEQ ID NO: 819066
uuucuaccaaguaggcauu

SEQ ID NO: 819068 - RNA, 19 nt, Artificial Sequence
  Description of Artificial Sequence: Synthetic oligonucleotide
  Sense strand starting at position 965 of SEQ ID NO: 587798
gccuacuugguagaaauua

SEQ ID NO: 819069 - RNA, 19 nt, Artificial Sequence
  Description of Artificial Sequence: Synthetic oligonucleotide
  Antisense strand to SEQ ID NO: 819068
uaauuucuaccaaguaggc

SEQ ID NO: 819070 - RNA, 19 nt, Artificial Sequence
  Description of Artificial Sequence: Synthetic oligonucleotide
  Sense strand starting at position 973 of SEQ ID NO: 587798
gguagaaauuaucugcuuu

SEQ ID NO: 819071 - RNA, 19 nt, Artificial Sequence
  Description of Artificial Sequence: Synthetic oligonucleotide
  Antisense strand to SEQ ID NO: 819070
aaagcagauaauuucuacc

SEQ ID NO: 819072 - RNA, 19 nt, Artificial Sequence
  Description of Artificial Sequence: Synthetic oligonucleotide
  Sense strand starting at position 1003 of SEQ ID NO: 587798
ggguggaaagauuggguua

SEQ ID NO: 819073 - RNA, 19 nt, Artificial Sequence
  Description of Artificial Sequence: Synthetic oligonucleotide
  Antisense strand to SEQ ID NO: 819072
uaacccaaucuuuccaccc

SEQ ID NO: 819074 - RNA, 19 nt, Artificial Sequence
  Description of Artificial Sequence: Synthetic oligonucleotide
  Sense strand starting at position 1076 of SEQ ID NO: 587798
gcaauuaaucaugacagug

SEQ ID NO: 819075 - RNA, 19 nt, Artificial Sequence
  Description of Artificial Sequence: Synthetic oligonucleotide
  Antisense strand to SEQ ID NO: 819074
cacugucaugauuaauugc

SEQ ID NO: 819076 - RNA, 19 nt, Artificial Sequence
  Description of Artificial Sequence: Synthetic oligonucleotide
  Sense strand starting at position 1125 of SEQ ID NO: 587798
acuagacauuuaugucuca

SEQ ID NO: 819077 - RNA, 19 nt, Artificial Sequence
  Description of Artificial Sequence: Synthetic oligonucleotide
  Antisense strand to SEQ ID NO: 819076
ugagacauaaaugucuagu

SEQ ID NO: 819078 - RNA, 19 nt, Artificial Sequence
  Description of Artificial Sequence: Synthetic oligonucleotide
  Sense strand starting at position 1191 of SEQ ID NO: 587798
agggaagacuccugagacu

SEQ ID NO: 819079 - RNA, 19 nt, Artificial Sequence
  Description of Artificial Sequence: Synthetic oligonucleotide
  Antisense strand to SEQ ID NO: 819078
agucucaggagucuucccu

SEQ ID NO: 819080 - RNA, 19 nt, Artificial Sequence
  Description of Artificial Sequence: Synthetic oligonucleotide
  Sense strand starting at position 1200 of SEQ ID NO: 587798
uccugagacucauaguaag

SEQ ID NO: 819081 - RNA, 19 nt, Artificial Sequence
  Description of Artificial Sequence: Synthetic oligonucleotide
  Antisense strand to SEQ ID NO: 819080
cuuacuaugagucucagga

SEQ ID NO: 819082 - RNA, 19 nt, Artificial Sequence
  Description of Artificial Sequence: Synthetic oligonucleotide
  Sense strand starting at position 1226 of SEQ ID NO: 587798
ccgauugaucuugacucuu

SEQ ID NO: 819083 - RNA, 19 nt, Artificial Sequence
  Description of Artificial Sequence: Synthetic oligonucleotide
  Antisense strand to SEQ ID NO: 819082
aagagucaagaucaaucgg

SEQ ID NO: 819084 - RNA, 19 nt, Artificial Sequence
  Description of Artificial Sequence: Synthetic oligonucleotide
  Sense strand starting at position 1241 of SEQ ID NO: 587798
ucuucuggacccugaagua

SEQ ID NO: 819085 - RNA, 19 nt, Artificial Sequence
  Description of Artificial Sequence: Synthetic oligonucleotide
  Antisense strand to SEQ ID NO: 819084
uacuucaggguccagaaga

SEQ ID NO: 819086 - RNA, 19 nt, Artificial Sequence
  Description of Artificial Sequence: Synthetic oligonucleotide
  Sense strand starting at position 1253 of SEQ ID NO: 587798
ugaaguauggcugaaggca

SEQ ID NO: 819087 - RNA, 19 nt, Artificial Sequence
  Description of Artificial Sequence: Synthetic oligonucleotide
  Antisense strand to SEQ ID NO: 819086
ugccuucagccauacuuca

SEQ ID NO: 819088 - RNA, 19 nt, Artificial Sequence
  Description of Artificial Sequence: Synthetic oligonucleotide
  Sense strand starting at position 1320 of SEQ ID NO: 587798
cuucuaaaugccuggagga

SEQ ID NO: 819089 - RNA, 19 nt, Artificial Sequence
  Description of Artificial Sequence: Synthetic oligonucleotide
  Antisense strand to SEQ ID NO: 819088
uccuccaggcauuuagaag

SEQ ID NO: 819090 - RNA, 19 nt, Artificial Sequence
  Description of Artificial Sequence: Synthetic oligonucleotide
  Sense strand starting at position 1322 of SEQ ID NO: 587798
ucuaaaugccuggaggagu

SEQ ID NO: 819091 - RNA, 19 nt, Artificial Sequence
  Description of Artificial Sequence: Synthetic oligonucleotide
  Antisense strand to SEQ ID NO: 819090
acuccuccaggcauuuaga

SEQ ID NO: 819092 - RNA, 19 nt, Artificial Sequence
  Description of Artificial Sequence: Synthetic oligonucleotide
  Sense strand starting at position 1335 of SEQ ID NO: 587798
aggaguauauggucagcau

SEQ ID NO: 819093 - RNA, 19 nt, Artificial Sequence
  Description of Artificial Sequence: Synthetic oligonucleotide
  Antisense strand to SEQ ID NO: 819092
augcugaccauauacuccu

SEQ ID NO: 819094 - RNA, 19 nt, Artificial Sequence
  Description of Artificial Sequence: Synthetic oligonucleotide
  Sense strand starting at position 1336 of SEQ ID NO: 587798
ggaguauauggucagcaua

SEQ ID NO: 819095 - RNA, 19 nt, Artificial Sequence
  Description of Artificial Sequence: Synthetic oligonucleotide
  Antisense strand to SEQ ID NO: 819094
uaugcugaccauauacucc

SEQ ID NO: 819096 - RNA, 19 nt, Artificial Sequence
  Description of Artificial Sequence: Synthetic oligonucleotide
  Sense strand starting at position 1338 of SEQ ID NO: 587798
aguauauggucagcauaaa

SEQ ID NO: 819097 - RNA, 19 nt, Artificial Sequence
  Description of Artificial Sequence: Synthetic oligonucleotide
  Antisense strand to SEQ ID NO: 819096
uuuaugcugaccauauacu

SEQ ID NO: 819098 - RNA, 19 nt, Artificial Sequence
  Description of Artificial Sequence: Synthetic oligonucleotide
  Sense strand starting at position 1339 of SEQ ID NO: 587798
guauauggucagcauaaau

SEQ ID NO: 819099 - RNA, 19 nt, Artificial Sequence
  Description of Artificial Sequence: Synthetic oligonucleotide
  Antisense strand to SEQ ID NO: 819098
auuuaugcugaccauauac

SEQ ID NO: 819100 - RNA, 19 nt, Artificial Sequence
  Description of Artificial Sequence: Synthetic oligonucleotide
  Sense strand starting at position 1352 of SEQ ID NO: 587798
auaaauauuccggguauaa

SEQ ID NO: 819101 - RNA, 19 nt, Artificial Sequence
  Description of Artificial Sequence: Synthetic oligonucleotide
  Antisense strand to SEQ ID NO: 819100
uuauacccggaauauuuau

SEQ ID NO: 819102 - RNA, 19 nt, Artificial Sequence
  Description of Artificial Sequence: Synthetic oligonucleotide
  Sense strand starting at position 1364 of SEQ ID NO: 587798
gguauaaagcaguguuucu

SEQ ID NO: 819103 - RNA, 19 nt, Artificial Sequence
  Description of Artificial Sequence: Synthetic oligonucleotide
  Antisense strand to SEQ ID NO: 819102
agaaacacugcuuuauacc

SEQ ID NO: 819104 - RNA, 19 nt, Artificial Sequence
  Description of Artificial Sequence: Synthetic oligonucleotide
  Sense strand starting at position 1651 of SEQ ID NO: 587798
agccacgugugacucaaau

SEQ ID NO: 819105 - RNA, 19 nt, Artificial Sequence
  Description of Artificial Sequence: Synthetic oligonucleotide
  Antisense strand to SEQ ID NO: 819104
auuugagucacacguggcu

SEQ ID NO: 819106 - RNA, 19 nt, Artificial Sequence
  Description of Artificial Sequence: Synthetic oligonucleotide
  Sense strand starting at position 2172 of SEQ ID NO: 587798
ugcccauuggcugagagaa

SEQ ID NO: 819107 - RNA, 19 nt, Artificial Sequence
  Description of Artificial Sequence: Synthetic oligonucleotide
  Antisense strand to SEQ ID NO: 819106
uucucucagccaaugggca

SEQ ID NO: 819108 - RNA, 19 nt, Artificial Sequence
  Description of Artificial Sequence: Synthetic oligonucleotide
  Sense strand starting at position 2225 of SEQ ID NO: 587798
ggguacucgcgcucggaga

SEQ ID NO: 819109 - RNA, 19 nt, Artificial Sequence
  Description of Artificial Sequence: Synthetic oligonucleotide
  Antisense strand to SEQ ID NO: 819108
ucuccgagcgcgaguaccc

SEQ ID NO: 819110 - RNA, 19 nt, Artificial Sequence
  Description of Artificial Sequence: Synthetic oligonucleotide
  Sense strand starting at position 2517 of SEQ ID NO: 587798
ugaagaucugagugcgguu

SEQ ID NO: 819111 - RNA, 19 nt, Artificial Sequence
  Description of Artificial Sequence: Synthetic oligonucleotide
  Antisense strand to SEQ ID NO: 819110
aaccgcacucagaucuuca

SEQ ID NO: 819112 - RNA, 19 nt, Artificial Sequence
  Description of Artificial Sequence: Synthetic oligonucleotide
  Sense strand starting at position 2550 of SEQ ID NO: 587798
ucuaaagcugcauguuaca

SEQ ID NO: 819113 - RNA, 19 nt, Artificial Sequence
  Description of Artificial Sequence: Synthetic oligonucleotide
  Antisense strand to SEQ ID NO: 819112
uguaacaugcagcuuuaga

SEQ ID NO: 819114 - RNA, 19 nt, Artificial Sequence
  Description of Artificial Sequence: Synthetic oligonucleotide
  Sense strand starting at position 2582 of SEQ ID NO: 587798
uuugaagccuuugacauuu

SEQ ID NO: 819115 - RNA, 19 nt, Artificial Sequence
  Description of Artificial Sequence: Synthetic oligonucleotide
  Antisense strand to SEQ ID NO: 819114
aaaugucaaaggcuucaaa

SEQ ID NO: 819116 - RNA, 19 nt, Artificial Sequence
  Description of Artificial Sequence: Synthetic oligonucleotide
  Sense strand starting at position 2895 of SEQ ID NO: 587798
ggcccaagccuuugacauu

SEQ ID NO: 819117 - RNA, 19 nt, Artificial Sequence
  Description of Artificial Sequence: Synthetic oligonucleotide
  Antisense strand to SEQ ID NO: 819116
aaugucaaaggcuugggcc

SEQ ID NO: 819118 - RNA, 19 nt, Artificial Sequence
  Description of Artificial Sequence: Synthetic oligonucleotide
  Sense strand starting at position 2896 of SEQ ID NO: 587798
gcccaagccuuugacauuu

SEQ ID NO: 819119 - RNA, 19 nt, Artificial Sequence
  Description of Artificial Sequence: Synthetic oligonucleotide
  Antisense strand to SEQ ID NO: 819118
aaaugucaaaggcuugggc

SEQ ID NO: 819120 - RNA, 19 nt, Artificial Sequence
  Description of Artificial Sequence: Synthetic oligonucleotide
  Sense strand starting at position 3107 of SEQ ID NO: 587798
gugucaaggcucugaagca

SEQ ID NO: 819121 - RNA, 19 nt, Artificial Sequence
  Description of Artificial Sequence: Synthetic oligonucleotide
  Antisense strand to SEQ ID NO: 819120
ugcuucagagccuugacac

SEQ ID NO: 819122 - RNA, 19 nt, Artificial Sequence
  Description of Artificial Sequence: Synthetic oligonucleotide
  Sense strand starting at position 3360 of SEQ ID NO: 587798
gugccaugccaucauacau

SEQ ID NO: 819123 - RNA, 19 nt, Artificial Sequence
  Description of Artificial Sequence: Synthetic oligonucleotide
  Antisense strand to SEQ ID NO: 819122
auguaugauggcauggcac

SEQ ID NO: 819124 - RNA, 19 nt, Artificial Sequence
  Description of Artificial Sequence: Synthetic oligonucleotide
  Sense strand starting at position 247 of SEQ ID NO: 587799
agguaaucagaguguguag

SEQ ID NO: 819125 - RNA, 19 nt, Artificial Sequence
  Description of Artificial Sequence: Synthetic oligonucleotide
  Antisense strand to SEQ ID NO: 819124
cuacacacucugauuaccu

SEQ ID NO: 819126 - RNA, 19 nt, Artificial Sequence
  Description of Artificial Sequence: Synthetic oligonucleotide
  Sense strand starting at position 312 of SEQ ID NO: 587799
agacauucgggucagcauu

SEQ ID NO: 819127 - RNA, 19 nt, Artificial Sequence
  Description of Artificial Sequence: Synthetic oligonucleotide
  Antisense strand to SEQ ID NO: 819126
aaugcugacccgaaugucu

SEQ ID NO: 819128 - RNA, 19 nt, Artificial Sequence
  Description of Artificial Sequence: Synthetic oligonucleotide
  Sense strand starting at position 545 of SEQ ID NO: 587799
ggaucacagucauuaaagu

SEQ ID NO: 819129 - RNA, 19 nt, Artificial Sequence
  Description of Artificial Sequence: Synthetic oligonucleotide
  Antisense strand to SEQ ID NO: 819128
acuuuaaugacugugaucc

SEQ ID NO: 819130 - RNA, 19 nt, Artificial Sequence
  Description of Artificial Sequence: Synthetic oligonucleotide
  Sense strand starting at position 559 of SEQ ID NO: 587799
aaaguaagaugcucacuga

SEQ ID NO: 819131 - RNA, 19 nt, Artificial Sequence
  Description of Artificial Sequence: Synthetic oligonucleotide
  Antisense strand to SEQ ID NO: 819130
ucagugagcaucuuacuuu

SEQ ID NO: 819132 - RNA, 19 nt, Artificial Sequence
  Description of Artificial Sequence: Synthetic oligonucleotide
  Sense strand starting at position 562 of SEQ ID NO: 587799
guaagaugcucacugagac

SEQ ID NO: 819133 - RNA, 19 nt, Artificial Sequence
  Description of Artificial Sequence: Synthetic oligonucleotide
  Antisense strand to SEQ ID NO: 819132
gucucagugagcaucuuac

SEQ ID NO: 819134 - RNA, 19 nt, Artificial Sequence
  Description of Artificial Sequence: Synthetic oligonucleotide
  Sense strand starting at position 1133 of SEQ ID NO: 587799
gguccacucccagguuaau

SEQ ID NO: 819135 - RNA, 19 nt, Artificial Sequence
  Description of Artificial Sequence: Synthetic oligonucleotide
  Antisense strand to SEQ ID NO: 819134
auuaaccugggaguggacc

SEQ ID NO: 819136 - RNA, 19 nt, Artificial Sequence
  Description of Artificial Sequence: Synthetic oligonucleotide
  Sense strand starting at position 1144 of SEQ ID NO: 587799
agguuaaucgcggauuaac

SEQ ID NO: 819137 - RNA, 19 nt, Artificial Sequence
  Description of Artificial Sequence: Synthetic oligonucleotide
  Antisense strand to SEQ ID NO: 819136
guuaauccgcgauuaaccu

SEQ ID NO: 819138 - RNA, 19 nt, Artificial Sequence
  Description of Artificial Sequence: Synthetic oligonucleotide
  Sense strand starting at position 1200 of SEQ ID NO: 587799
cugcaaaggaucugagcau

SEQ ID NO: 819139 - RNA, 19 nt, Artificial Sequence
  Description of Artificial Sequence: Synthetic oligonucleotide
  Antisense strand to SEQ ID NO: 819138
augcucagauccuuugcag

SEQ ID NO: 819140 - RNA, 19 nt, Artificial Sequence
  Description of Artificial Sequence: Synthetic oligonucleotide
  Sense strand starting at position 1330 of SEQ ID NO: 587799
uggcguuauaaagacuaaa

SEQ ID NO: 819141 - RNA, 19 nt, Artificial Sequence
  Description of Artificial Sequence: Synthetic oligonucleotide
  Antisense strand to SEQ ID NO: 819140
uuuagucuuuauaacgcca

SEQ ID NO: 819142 - RNA, 19 nt, Artificial Sequence
  Description of Artificial Sequence: Synthetic oligonucleotide
  Sense strand starting at position 1448 of SEQ ID NO: 587799
acaugagccuacuuugaca

SEQ ID NO: 819143 - RNA, 19 nt, Artificial Sequence
  Description of Artificial Sequence: Synthetic oligonucleotide
  Antisense strand to SEQ ID NO: 819142
ugucaaaguaggcucaugu

SEQ ID NO: 819144 - RNA, 19 nt, Artificial Sequence
  Description of Artificial Sequence: Synthetic oligonucleotide
  Sense strand starting at position 1577 of SEQ ID NO: 587799
ggugggagagccuguaaga

SEQ ID NO: 819145 - RNA, 19 nt, Artificial Sequence
  Description of Artificial Sequence: Synthetic oligonucleotide
  Antisense strand to SEQ ID NO: 819144
ucuuacaggcucucccacc

SEQ ID NO: 819146 - RNA, 19 nt, Artificial Sequence
  Description of Artificial Sequence: Synthetic oligonucleotide
  Sense strand starting at position 2068 of SEQ ID NO: 587799
ggagagugcguguucuugu

SEQ ID NO: 819147 - RNA, 19 nt, Artificial Sequence
  Description of Artificial Sequence: Synthetic oligonucleotide
  Antisense strand to SEQ ID NO: 819146
acaagaacacgcacucucc

SEQ ID NO: 819148 - RNA, 19 nt, Artificial Sequence
  Description of Artificial Sequence: Synthetic oligonucleotide
  Sense strand starting at position 2137 of SEQ ID NO: 587799
gagugacacgacuagcuuu

SEQ ID NO: 819149 - RNA, 19 nt, Artificial Sequence
  Description of Artificial Sequence: Synthetic oligonucleotide
  Antisense strand to SEQ ID NO: 819148
aaagcuagucgugucacuc

SEQ ID NO: 819150 - RNA, 19 nt, Artificial Sequence
  Description of Artificial Sequence: Synthetic oligonucleotide
  Sense strand starting at position 2188 of SEQ ID NO: 587799
ugaaauaacuugccucaag

SEQ ID NO: 819151 - RNA, 19 nt, Artificial Sequence
  Description of Artificial Sequence: Synthetic oligonucleotide
  Antisense strand to SEQ ID NO: 819150
cuugaggcaaguuauuuca

SEQ ID NO: 819152 - RNA, 19 nt, Artificial Sequence
  Description of Artificial Sequence: Synthetic oligonucleotide
  Sense strand starting at position 2202 of SEQ ID NO: 587799
ucaaguugcacagauggua

SEQ ID NO: 819153 - RNA, 19 nt, Artificial Sequence
  Description of Artificial Sequence: Synthetic oligonucleotide
  Antisense strand to SEQ ID NO: 819152
uaccaucugugcaacuuga

SEQ ID NO: 819154 - RNA, 19 nt, Artificial Sequence
  Description of Artificial Sequence: Synthetic oligonucleotide
  Sense strand starting at position 2216 of SEQ ID NO: 587799
ugguacauucuagagucuu

SEQ ID NO: 819155 - RNA, 19 nt, Artificial Sequence
  Description of Artificial Sequence: Synthetic oligonucleotide
  Antisense strand to SEQ ID NO: 819154
aagacucuagaauguacca

SEQ ID NO: 819156 - RNA, 19 nt, Artificial Sequence
  Description of Artificial Sequence: Synthetic oligonucleotide
  Sense strand starting at position 2224 of SEQ ID NO: 587799
ucuagagucuuacuuugag

SEQ ID NO: 819157 - RNA, 19 nt, Artificial Sequence
  Description of Artificial Sequence: Synthetic oligonucleotide
  Antisense strand to SEQ ID NO: 819156
cucaaaguaagacucuaga

SEQ ID NO: 819158 - RNA, 19 nt, Artificial Sequence
  Description of Artificial Sequence: Synthetic oligonucleotide
  Sense strand starting at position 2227 of SEQ ID NO: 587799
agagucuuacuuugagcaa

SEQ ID NO: 819159 - RNA, 19 nt, Artificial Sequence
  Description of Artificial Sequence: Synthetic oligonucleotide
  Antisense strand to SEQ ID NO: 819158
uugcucaaaguaagacucu

SEQ ID NO: 819160 - RNA, 19 nt, Artificial Sequence
  Description of Artificial Sequence: Synthetic oligonucleotide
  Sense strand starting at position 2240 of SEQ ID NO: 587799
gagcaaagauaggucugau

SEQ ID NO: 819161 - RNA, 19 nt, Artificial Sequence
  Description of Artificial Sequence: Synthetic oligonucleotide
  Antisense strand to SEQ ID NO: 819160
aucagaccuaucuuugcuc

SEQ ID NO: 819162 - RNA, 19 nt, Artificial Sequence
  Description of Artificial Sequence: Synthetic oligonucleotide
  Sense strand starting at position 2416 of SEQ ID NO: 587799
cuaauagcacuguaagcua

SEQ ID NO: 819163 - RNA, 19 nt, Artificial Sequence
  Description of Artificial Sequence: Synthetic oligonucleotide
  Antisense strand to SEQ ID NO: 819162
uagcuuacagugcuauuag

SEQ ID NO: 819164 - RNA, 19 nt, Artificial Sequence
  Description of Artificial Sequence: Synthetic oligonucleotide
  Sense strand starting at position 2507 of SEQ ID NO: 587799
ggaaguuucugagcaccag

SEQ ID NO: 819165 - RNA, 19 nt, Artificial Sequence
  Description of Artificial Sequence: Synthetic oligonucleotide
  Antisense strand to SEQ ID NO: 819164
cuggugcucagaaacuucc

SEQ ID NO: 819166 - RNA, 19 nt, Artificial Sequence
  Description of Artificial Sequence: Synthetic oligonucleotide
  Sense strand starting at position 2508 of SEQ ID NO: 587799
gaaguuucugagcaccaga

SEQ ID NO: 819167 - RNA, 19 nt, Artificial Sequence
  Description of Artificial Sequence: Synthetic oligonucleotide
  Antisense strand to SEQ ID NO: 819166
ucuggugcucagaaacuuc

SEQ ID NO: 819168 - RNA, 19 nt, Artificial Sequence
  Description of Artificial Sequence: Synthetic oligonucleotide
  Sense strand starting at position 2511 of SEQ ID NO: 587799
guuucugagcaccagauau

SEQ ID NO: 819169 - RNA, 19 nt, Artificial Sequence
  Description of Artificial Sequence: Synthetic oligonucleotide
  Antisense strand to SEQ ID NO: 819168
auaucuggugcucagaaac

SEQ ID NO: 819170 - RNA, 19 nt, Artificial Sequence
  Description of Artificial Sequence: Synthetic oligonucleotide
  Sense strand starting at position 2762 of SEQ ID NO: 587799
gccugugggauggaugauu

SEQ ID NO: 819171 - RNA, 19 nt, Artificial Sequence
  Description of Artificial Sequence: Synthetic oligonucleotide
  Antisense strand to SEQ ID NO: 819170
aaucauccaucccacaggc

SEQ ID NO: 819172 - RNA, 19 nt, Artificial Sequence
  Description of Artificial Sequence: Synthetic oligonucleotide
  Sense strand starting at position 2778 of SEQ ID NO: 587799
auuauaaucuaggagacca

SEQ ID NO: 819173 - RNA, 19 nt, Artificial Sequence
  Description of Artificial Sequence: Synthetic oligonucleotide
  Antisense strand to SEQ ID NO: 819172
uggucuccuagauuauaau

SEQ ID NO: 819174 - RNA, 19 nt, Artificial Sequence
  Description of Artificial Sequence: Synthetic oligonucleotide
  Sense strand starting at position 2838 of SEQ ID NO: 587799
gucccuuggucacucugaa

SEQ ID NO: 819175 - RNA, 19 nt, Artificial Sequence
  Description of Artificial Sequence: Synthetic oligonucleotide
  Antisense strand to SEQ ID NO: 819174
uucagagugaccaagggac

SEQ ID NO: 819176 - RNA, 19 nt, Artificial Sequence
  Description of Artificial Sequence: Synthetic oligonucleotide
  Sense strand starting at position 2916 of SEQ ID NO: 587799
cugagugggcucugacaua

SEQ ID NO: 819177 - RNA, 19 nt, Artificial Sequence
  Description of Artificial Sequence: Synthetic oligonucleotide
  Antisense strand to SEQ ID NO: 819176
uaugucagagcccacucag

SEQ ID NO: 819178 - RNA, 19 nt, Artificial Sequence
  Description of Artificial Sequence: Synthetic oligonucleotide
  Sense strand starting at position 3210 of SEQ ID NO: 587799
augguugugagaggaguuu

SEQ ID NO: 819179 - RNA, 19 nt, Artificial Sequence
  Description of Artificial Sequence: Synthetic oligonucleotide
  Antisense strand to SEQ ID NO: 819178
aaacuccucucacaaccau

SEQ ID NO: 819180 - RNA, 19 nt, Artificial Sequence
  Description of Artificial Sequence: Synthetic oligonucleotide
  Sense strand starting at position 3450 of SEQ ID NO: 587799
accacaugcugucucugaa

SEQ ID NO: 819181 - RNA, 19 nt, Artificial Sequence
  Description of Artificial Sequence: Synthetic oligonucleotide
  Antisense strand to SEQ ID NO: 819180
uucagagacagcauguggu

SEQ ID NO: 819182 - RNA, 19 nt, Artificial Sequence
  Description of Artificial Sequence: Synthetic oligonucleotide
  Sense strand starting at position 3558 of SEQ ID NO: 587799
ccucuuuagagcuggguca

SEQ ID NO: 819183 - RNA, 19 nt, Artificial Sequence
  Description of Artificial Sequence: Synthetic oligonucleotide
  Antisense strand to SEQ ID NO: 819182
ugacccagcucuaaagagg

SEQ ID NO: 819184 - RNA, 19 nt, Artificial Sequence
  Description of Artificial Sequence: Synthetic oligonucleotide
  Sense strand starting at position 3559 of SEQ ID NO: 587799
cucuuuagagcugggucau

SEQ ID NO: 819185 - RNA, 19 nt, Artificial Sequence
  Description of Artificial Sequence: Synthetic oligonucleotide
  Antisense strand to SEQ ID NO: 819184
augacccagcucuaaagag

SEQ ID NO: 819186 - RNA, 19 nt, Artificial Sequence
  Description of Artificial Sequence: Synthetic oligonucleotide
  Sense strand starting at position 3634 of SEQ ID NO: 587799
gaaggcuguccaggaaucu

SEQ ID NO: 819187 - RNA, 19 nt, Artificial Sequence
  Description of Artificial Sequence: Synthetic oligonucleotide
  Antisense strand to SEQ ID NO: 819186
agauuccuggacagccuuc

SEQ ID NO: 819188 - RNA, 19 nt, Artificial Sequence
  Description of Artificial Sequence: Synthetic oligonucleotide
  Sense strand starting at position 3635 of SEQ ID NO: 587799
aaggcuguccaggaaucua

SEQ ID NO: 819189 - RNA, 19 nt, Artificial Sequence
  Description of Artificial Sequence: Synthetic oligonucleotide
  Antisense strand to SEQ ID NO: 819188
uagauuccuggacagccuu

SEQ ID NO: 819190 - RNA, 19 nt, Artificial Sequence
  Description of Artificial Sequence: Synthetic oligonucleotide
  Sense strand starting at position 3643 of SEQ ID NO: 587799
ccaggaaucuaguuucuac

SEQ ID NO: 819191 - RNA, 19 nt, Artificial Sequence
  Description of Artificial Sequence: Synthetic oligonucleotide
  Antisense strand to SEQ ID NO: 819190
guagaaacuagauuccugg

SEQ ID NO: 819192 - RNA, 19 nt, Artificial Sequence
  Description of Artificial Sequence: Synthetic oligonucleotide
  Sense strand starting at position 3646 of SEQ ID NO: 587799
ggaaucuaguuucuaccaa

SEQ ID NO: 819193 - RNA, 19 nt, Artificial Sequence
  Description of Artificial Sequence: Synthetic oligonucleotide
  Antisense strand to SEQ ID NO: 819192
uugguagaaacuagauucc

SEQ ID NO: 819194 - RNA, 19 nt, Artificial Sequence
  Description of Artificial Sequence: Synthetic oligonucleotide
  Sense strand starting at position 3674 of SEQ ID NO: 587799
aggcaacucagagguuaaa

SEQ ID NO: 819195 - RNA, 19 nt, Artificial Sequence
  Description of Artificial Sequence: Synthetic oligonucleotide
  Antisense strand to SEQ ID NO: 819194
uuuaaccucugaguugccu

SEQ ID NO: 819196 - RNA, 19 nt, Artificial Sequence
  Description of Artificial Sequence: Synthetic oligonucleotide
  Sense strand starting at position 3722 of SEQ ID NO: 587799
ccaucauggguggauguua

SEQ ID NO: 819197 - RNA, 19 nt, Artificial Sequence
  Description of Artificial Sequence: Synthetic oligonucleotide
  Antisense strand to SEQ ID NO: 819196
uaacauccacccaugaugg

SEQ ID NO: 819198 - RNA, 19 nt, Artificial Sequence
  Description of Artificial Sequence: Synthetic oligonucleotide
  Sense strand starting at position 3730 of SEQ ID NO: 587799
gguggauguuaucuagaga

SEQ ID NO: 819199 - RNA, 19 nt, Artificial Sequence
  Description of Artificial Sequence: Synthetic oligonucleotide
  Antisense strand to SEQ ID NO: 819198
ucucuagauaacauccacc

SEQ ID NO: 819200 - RNA, 19 nt, Artificial Sequence
  Description of Artificial Sequence: Synthetic oligonucleotide
  Sense strand starting at position 3731 of SEQ ID NO: 587799
guggauguuaucuagagau

SEQ ID NO: 819201 - RNA, 19 nt, Artificial Sequence
  Description of Artificial Sequence: Synthetic oligonucleotide
  Antisense strand to SEQ ID NO: 819200
aucucuagauaacauccac

SEQ ID NO: 819202 - RNA, 19 nt, Artificial Sequence
  Description of Artificial Sequence: Synthetic oligonucleotide
  Sense strand starting at position 3831 of SEQ ID NO: 587799
caucaaaggugaguaaaug

SEQ ID NO: 819203 - RNA, 19 nt, Artificial Sequence
  Description of Artificial Sequence: Synthetic oligonucleotide
  Antisense strand to SEQ ID NO: 819202
cauuuacucaccuuugaug

SEQ ID NO: 819204 - RNA, 19 nt, Artificial Sequence
  Description of Artificial Sequence: Synthetic oligonucleotide
  Sense strand starting at position 35 of SEQ ID NO: 587800
uccgaacaccugugaaaca

SEQ ID NO: 819205 - RNA, 19 nt, Artificial Sequence
  Description of Artificial Sequence: Synthetic oligonucleotide
  Antisense strand to SEQ ID NO: 819204
uguuucacagguguucgga

SEQ ID NO: 819206 - RNA, 19 nt, Artificial Sequence
  Description of Artificial Sequence: Synthetic oligonucleotide
  Sense strand starting at position 61 of SEQ ID NO: 587800
cgguaauaucauggaguga

SEQ ID NO: 819207 - RNA, 19 nt, Artificial Sequence
  Description of Artificial Sequence: Synthetic oligonucleotide
  Antisense strand to SEQ ID NO: 819206
ucacuccaugauauuaccg

SEQ ID NO: 819208 - RNA, 19 nt, Artificial Sequence
  Description of Artificial Sequence: Synthetic oligonucleotide
  Sense strand starting at position 300 of SEQ ID NO: 587800
guuguaacauucuuucugu

SEQ ID NO: 819209 - RNA, 19 nt, Artificial Sequence
  Description of Artificial Sequence: Synthetic oligonucleotide
  Antisense strand to SEQ ID NO: 819208
acagaaagaauguuacaac

SEQ ID NO: 819210 - RNA, 19 nt, Artificial Sequence
  Description of Artificial Sequence: Synthetic oligonucleotide
  Sense strand starting at position 301 of SEQ ID NO: 587800
uuguaacauucuuucugua

SEQ ID NO: 819211 - RNA, 19 nt, Artificial Sequence
  Description of Artificial Sequence: Synthetic oligonucleotide
  Antisense strand to SEQ ID NO: 819210
uacagaaagaauguuacaa

SEQ ID NO: 819212 - RNA, 19 nt, Artificial Sequence
  Description of Artificial Sequence: Synthetic oligonucleotide
  Sense strand starting at position 370 of SEQ ID NO: 587800
ggguuagcaagucauguga

SEQ ID NO: 819213 - RNA, 19 nt, Artificial Sequence
  Description of Artificial Sequence: Synthetic oligonucleotide
  Antisense strand to SEQ ID NO: 819212
ucacaugacuugcuaaccc

SEQ ID NO: 819214 - RNA, 19 nt, Artificial Sequence
  Description of Artificial Sequence: Synthetic oligonucleotide
  Sense strand starting at position 381 of SEQ ID NO: 587800
ucaugugacagccggcaaa

SEQ ID NO: 819215 - RNA, 19 nt, Artificial Sequence
  Description of Artificial Sequence: Synthetic oligonucleotide
  Antisense strand to SEQ ID NO: 819214
uuugccggcugucacauga

SEQ ID NO: 819216 - RNA, 19 nt, Artificial Sequence
  Description of Artificial Sequence: Synthetic oligonucleotide
  Sense strand starting at position 527 of SEQ ID NO: 587800
gucauucucggcucgaagu

SEQ ID NO: 819217 - RNA, 19 nt, Artificial Sequence
  Description of Artificial Sequence: Synthetic oligonucleotide
  Antisense strand to SEQ ID NO: 819216
acuucgagccgagaaugac

SEQ ID NO: 819218 - RNA, 19 nt, Artificial Sequence
  Description of Artificial Sequence: Synthetic oligonucleotide
  Sense strand starting at position 538 of SEQ ID NO: 587800
cucgaaguguucuucuauu

SEQ ID NO: 819219 - RNA, 19 nt, Artificial Sequence
  Description of Artificial Sequence: Synthetic oligonucleotide
  Antisense strand to SEQ ID NO: 819218
aauagaagaacacuucgag

SEQ ID NO: 819220 - RNA, 19 nt, Artificial Sequence
  Description of Artificial Sequence: Synthetic oligonucleotide
  Sense strand starting at position 640 of SEQ ID NO: 587800
gcccacguauaguuggaau

SEQ ID NO: 819221 - RNA, 19 nt, Artificial Sequence
  Description of Artificial Sequence: Synthetic oligonucleotide
  Antisense strand to SEQ ID NO: 819220
auuccaacuauacgugggc

SEQ ID NO: 819222 - RNA, 19 nt, Artificial Sequence
  Description of Artificial Sequence: Synthetic oligonucleotide
  Sense strand starting at position 703 of SEQ ID NO: 587800
gggcguccugcagauucaa

SEQ ID NO: 819223 - RNA, 19 nt, Artificial Sequence
  Description of Artificial Sequence: Synthetic oligonucleotide
  Antisense strand to SEQ ID NO: 819222
uugaaucugcaggacgccc

SEQ ID NO: 819224 - RNA, 19 nt, Artificial Sequence
  Description of Artificial Sequence: Synthetic oligonucleotide
  Sense strand starting at position 1482 of SEQ ID NO: 587800
cggcuuacucucgaagggu

SEQ ID NO: 819225 - RNA, 19 nt, Artificial Sequence
  Description of Artificial Sequence: Synthetic oligonucleotide
  Antisense strand to SEQ ID NO: 819224
acccuucgagaguaagccg

SEQ ID NO: 819226 - RNA, 19 nt, Artificial Sequence
  Description of Artificial Sequence: Synthetic oligonucleotide
  Sense strand starting at position 2243 of SEQ ID NO: 587800
ucgagaaucuaaucugaga

SEQ ID NO: 819227 - RNA, 19 nt, Artificial Sequence
  Description of Artificial Sequence: Synthetic oligonucleotide
  Antisense strand to SEQ ID NO: 819226
ucucagauuagauucucga

SEQ ID NO: 819228 - RNA, 19 nt, Artificial Sequence
  Description of Artificial Sequence: Synthetic oligonucleotide
  Sense strand starting at position 2246 of SEQ ID NO: 587800
agaaucuaaucugagaggu

SEQ ID NO: 819229 - RNA, 19 nt, Artificial Sequence
  Description of Artificial Sequence: Synthetic oligonucleotide
  Antisense strand to SEQ ID NO: 819228
accucucagauuagauucu

SEQ ID NO: 819230 - RNA, 19 nt, Artificial Sequence
  Description of Artificial Sequence: Synthetic oligonucleotide
  Sense strand starting at position 2250 of SEQ ID NO: 587800
ucuaaucugagagguggua

SEQ ID NO: 819231 - RNA, 19 nt, Artificial Sequence
  Description of Artificial Sequence: Synthetic oligonucleotide
  Antisense strand to SEQ ID NO: 819230
uaccaccucucagauuaga

SEQ ID NO: 819232 - RNA, 19 nt, Artificial Sequence
  Description of Artificial Sequence: Synthetic oligonucleotide
  Sense strand starting at position 2431 of SEQ ID NO: 587800
cuccuaggauugcuguaaa

SEQ ID NO: 819233 - RNA, 19 nt, Artificial Sequence
  Description of Artificial Sequence: Synthetic oligonucleotide
  Antisense strand to SEQ ID NO: 819232
uuuacagcaauccuaggag

SEQ ID NO: 819234 - RNA, 19 nt, Artificial Sequence
  Description of Artificial Sequence: Synthetic oligonucleotide
  Sense strand starting at position 2492 of SEQ ID NO: 587800
ggcucauggugaguucuca

SEQ ID NO: 819235 - RNA, 19 nt, Artificial Sequence
  Description of Artificial Sequence: Synthetic oligonucleotide
  Antisense strand to SEQ ID NO: 819234
ugagaacucaccaugagcc

SEQ ID NO: 819236 - RNA, 19 nt, Artificial Sequence
  Description of Artificial Sequence: Synthetic oligonucleotide
  Sense strand starting at position 2500 of SEQ ID NO: 587800
gugaguucucaguaaauaa

SEQ ID NO: 819237 - RNA, 19 nt, Artificial Sequence
  Description of Artificial Sequence: Synthetic oligonucleotide
  Antisense strand to SEQ ID NO: 819236
uuauuuacugagaacucac

SEQ ID NO: 819238 - RNA, 19 nt, Artificial Sequence
  Description of Artificial Sequence: Synthetic oligonucleotide
  Sense strand starting at position 2796 of SEQ ID NO: 587800
gguaacuaugagggugcua

SEQ ID NO: 819239 - RNA, 19 nt, Artificial Sequence
  Description of Artificial Sequence: Synthetic oligonucleotide
  Antisense strand to SEQ ID NO: 819238
uagcacccucauaguuacc

SEQ ID NO: 819240 - RNA, 19 nt, Artificial Sequence
  Description of Artificial Sequence: Synthetic oligonucleotide
  Sense strand starting at position 2798 of SEQ ID NO: 587800
uaacuaugagggugcuaag

SEQ ID NO: 819241 - RNA, 19 nt, Artificial Sequence
  Description of Artificial Sequence: Synthetic oligonucleotide
  Antisense strand to SEQ ID NO: 819240
cuuagcacccucauaguua

SEQ ID NO: 819242 - RNA, 19 nt, Artificial Sequence
  Description of Artificial Sequence: Synthetic oligonucleotide
  Sense strand starting at position 2941 of SEQ ID NO: 587800
ggagcaugaguucaaugug

SEQ ID NO: 819243 - RNA, 19 nt, Artificial Sequence
  Description of Artificial Sequence: Synthetic oligonucleotide
  Antisense strand to SEQ ID NO: 819242
cacauugaacucaugcucc

SEQ ID NO: 819244 - RNA, 19 nt, Artificial Sequence
  Description of Artificial Sequence: Synthetic oligonucleotide
  Sense strand starting at position 2944 of SEQ ID NO: 587800
gcaugaguucaauguggga

SEQ ID NO: 819245 - RNA, 19 nt, Artificial Sequence
  Description of Artificial Sequence: Synthetic oligonucleotide
  Antisense strand to SEQ ID NO: 819244
ucccacauugaacucaugc

SEQ ID NO: 819246 - RNA, 19 nt, Artificial Sequence
  Description of Artificial Sequence: Synthetic oligonucleotide
  Sense strand starting at position 2994 of SEQ ID NO: 587800
aggcgaggcugaguuagaa

SEQ ID NO: 819247 - RNA, 19 nt, Artificial Sequence
  Description of Artificial Sequence: Synthetic oligonucleotide
  Antisense strand to SEQ ID NO: 819246
uucuaacucagccucgccu

SEQ ID NO: 819248 - RNA, 19 nt, Artificial Sequence
  Description of Artificial Sequence: Synthetic oligonucleotide
  Sense strand starting at position 3156 of SEQ ID NO: 587800
gucccuuucuuguuccaaa

SEQ ID NO: 819249 - RNA, 19 nt, Artificial Sequence
  Description of Artificial Sequence: Synthetic oligonucleotide
  Antisense strand to SEQ ID NO: 819248
uuuggaacaagaaagggac

SEQ ID NO: 819250 - RNA, 19 nt, Artificial Sequence
  Description of Artificial Sequence: Synthetic oligonucleotide
  Sense strand starting at position 3167 of SEQ ID NO: 587800
guuccaaaugccuaauaga

SEQ ID NO: 819251 - RNA, 19 nt, Artificial Sequence
  Description of Artificial Sequence: Synthetic oligonucleotide
  Antisense strand to SEQ ID NO: 819250
ucuauuaggcauuuggaac

SEQ ID NO: 819252 - RNA, 19 nt, Artificial Sequence
  Description of Artificial Sequence: Synthetic oligonucleotide
  Sense strand starting at position 3177 of SEQ ID NO: 587800
ccuaauagaucggcugcuu

SEQ ID NO: 819253 - RNA, 19 nt, Artificial Sequence
  Description of Artificial Sequence: Synthetic oligonucleotide
  Antisense strand to SEQ ID NO: 819252
aagcagccgaucuauuagg

SEQ ID NO: 819254 - RNA, 19 nt, Artificial Sequence
  Description of Artificial Sequence: Synthetic oligonucleotide
  Sense strand starting at position 3223 of SEQ ID NO: 587800
aggcucaacuguuuaacga

SEQ ID NO: 819255 - RNA, 19 nt, Artificial Sequence
  Description of Artificial Sequence: Synthetic oligonucleotide
  Antisense strand to SEQ ID NO: 819254
ucguuaaacaguugagccu

SEQ ID NO: 819256 - RNA, 19 nt, Artificial Sequence
  Description of Artificial Sequence: Synthetic oligonucleotide
  Sense strand starting at position 3232 of SEQ ID NO: 587800
uguuuaacgagucaucaga

SEQ ID NO: 819257 - RNA, 19 nt, Artificial Sequence
  Description of Artificial Sequence: Synthetic oligonucleotide
  Antisense strand to SEQ ID NO: 819256
ucugaugacucguuaaaca

SEQ ID NO: 819258 - RNA, 19 nt, Artificial Sequence
  Description of Artificial Sequence: Synthetic oligonucleotide
  Sense strand starting at position 3234 of SEQ ID NO: 587800
uuuaacgagucaucagauu

SEQ ID NO: 819259 - RNA, 19 nt, Artificial Sequence
  Description of Artificial Sequence: Synthetic oligonucleotide
  Antisense strand to SEQ ID NO: 819258
aaucugaugacucguuaaa

SEQ ID NO: 819260 - RNA, 19 nt, Artificial Sequence
  Description of Artificial Sequence: Synthetic oligonucleotide
  Sense strand starting at position 3291 of SEQ ID NO: 587800
aggaaagacucagaagaga

SEQ ID NO: 819261 - RNA, 19 nt, Artificial Sequence
  Description of Artificial Sequence: Synthetic oligonucleotide
  Antisense strand to SEQ ID NO: 819260
ucucuucugagucuuuccu

SEQ ID NO: 819262 - RNA, 19 nt, Artificial Sequence
  Description of Artificial Sequence: Synthetic oligonucleotide
  Sense strand starting at position 3307 of SEQ ID NO: 587800
agaggagugacauguccaa

SEQ ID NO: 819263 - RNA, 19 nt, Artificial Sequence
  Description of Artificial Sequence: Synthetic oligonucleotide
  Antisense strand to SEQ ID NO: 819262
uuggacaugucacuccucu

SEQ ID NO: 819264 - RNA, 19 nt, Artificial Sequence
  Description of Artificial Sequence: Synthetic oligonucleotide
  Sense strand starting at position 3384 of SEQ ID NO: 587800
agugcaucucuugauucuu

SEQ ID NO: 819265 - RNA, 19 nt, Artificial Sequence
  Description of Artificial Sequence: Synthetic oligonucleotide
  Antisense strand to SEQ ID NO: 819264
aagaaucaagagaugcacu

SEQ ID NO: 819266 - RNA, 19 nt, Artificial Sequence
  Description of Artificial Sequence: Synthetic oligonucleotide
  Sense strand starting at position 3433 of SEQ ID NO: 587800
cuacucgugucccuccaau

SEQ ID NO: 819267 - RNA, 19 nt, Artificial Sequence
  Description of Artificial Sequence: Synthetic oligonucleotide
  Antisense strand to SEQ ID NO: 819266
auuggagggacacgaguag

SEQ ID NO: 819268 - RNA, 19 nt, Artificial Sequence
  Description of Artificial Sequence: Synthetic oligonucleotide
  Sense strand starting at position 3656 of SEQ ID NO: 587800
ccuugacugucuuugccaa

SEQ ID NO: 819269 - RNA, 19 nt, Artificial Sequence
  Description of Artificial Sequence: Synthetic oligonucleotide
  Antisense strand to SEQ ID NO: 819268
uuggcaaagacagucaagg

SEQ ID NO: 819270 - RNA, 19 nt, Artificial Sequence
  Description of Artificial Sequence: Synthetic oligonucleotide
  Sense strand starting at position 3741 of SEQ ID NO: 587800
ggaccagguagugacuuau

SEQ ID NO: 819271 - RNA, 19 nt, Artificial Sequence
  Description of Artificial Sequence: Synthetic oligonucleotide
  Antisense strand to SEQ ID NO: 819270
auaagucacuaccuggucc

SEQ ID NO: 819272 - RNA, 19 nt, Artificial Sequence
  Description of Artificial Sequence: Synthetic oligonucleotide
  Sense strand starting at position 3816 of SEQ ID NO: 587800
ggaagugcuacugaacuca

SEQ ID NO: 819273 - RNA, 19 nt, Artificial Sequence
  Description of Artificial Sequence: Synthetic oligonucleotide
  Antisense strand to SEQ ID NO: 819272
ugaguucaguagcacuucc

SEQ ID NO: 819274 - RNA, 19 nt, Artificial Sequence
  Description of Artificial Sequence: Synthetic oligonucleotide
  Sense strand starting at position 3845 of SEQ ID NO: 587800
gguuaaguuggccaaccau

SEQ ID NO: 819275 - RNA, 19 nt, Artificial Sequence
  Description of Artificial Sequence: Synthetic oligonucleotide
  Antisense strand to SEQ ID NO: 819274
augguuggccaacuuaacc

SEQ ID NO: 819276 - RNA, 19 nt, Artificial Sequence
  Description of Artificial Sequence: Synthetic oligonucleotide
  Sense strand starting at position 3907 of SEQ ID NO: 587800
agagguaugccucagguuu

SEQ ID NO: 819277 - RNA, 19 nt, Artificial Sequence
  Description of Artificial Sequence: Synthetic oligonucleotide
  Antisense strand to SEQ ID NO: 819276
aaaccugaggcauaccucu

SEQ ID NO: 819278 - RNA, 19 nt, Artificial Sequence
  Description of Artificial Sequence: Synthetic oligonucleotide
  Sense strand starting at position 3936 of SEQ ID NO: 587800
gcagcugcagugugagaaa

SEQ ID NO: 819279 - RNA, 19 nt, Artificial Sequence
  Description of Artificial Sequence: Synthetic oligonucleotide
  Antisense strand to SEQ ID NO: 819278
uuucucacacugcagcugc

SEQ ID NO: 819280 - RNA, 19 nt, Artificial Sequence
  Description of Artificial Sequence: Synthetic oligonucleotide
  Sense strand starting at position 3947 of SEQ ID NO: 587800
gugagaaaggccuguuuag

SEQ ID NO: 819281 - RNA, 19 nt, Artificial Sequence
  Description of Artificial Sequence: Synthetic oligonucleotide
  Antisense strand to SEQ ID NO: 819280
cuaaacaggccuuucucac

SEQ ID NO: 819282 - RNA, 19 nt, Artificial Sequence
  Description of Artificial Sequence: Synthetic oligonucleotide
  Sense strand starting at position 3957 of SEQ ID NO: 587800
ccuguuuaguauguuggaa

SEQ ID NO: 819283 - RNA, 19 nt, Artificial Sequence
  Description of Artificial Sequence: Synthetic oligonucleotide
  Antisense strand to SEQ ID NO: 819282
uuccaacauacuaaacagg

SEQ ID NO: 819284 - RNA, 19 nt, Artificial Sequence
  Description of Artificial Sequence: Synthetic oligonucleotide
  Sense strand starting at position 540 of SEQ ID NO: 587801
augcuucuuuaguuacuua

SEQ ID NO: 819285 - RNA, 19 nt, Artificial Sequence
  Description of Artificial Sequence: Synthetic oligonucleotide
  Antisense strand to SEQ ID NO: 819284
uaaguaacuaaagaagcau

SEQ ID NO: 819286 - RNA, 19 nt, Artificial Sequence
  Description of Artificial Sequence: Synthetic oligonucleotide
  Sense strand starting at position 596 of SEQ ID NO: 587801
ugcuuacaugaccgaaguu

SEQ ID NO: 819287 - RNA, 19 nt, Artificial Sequence
  Description of Artificial Sequence: Synthetic oligonucleotide
  Antisense strand to SEQ ID NO: 819286
aacuucggucauguaagca

SEQ ID NO: 819288 - RNA, 19 nt, Artificial Sequence
  Description of Artificial Sequence: Synthetic oligonucleotide
  Sense strand starting at position 615 of SEQ ID NO: 587801
gugcaaaggguccaaaguu

SEQ ID NO: 819289 - RNA, 19 nt, Artificial Sequence
  Description of Artificial Sequence: Synthetic oligonucleotide
  Antisense strand to SEQ ID NO: 819288
aacuuuggacccuuugcac

SEQ ID NO: 819290 - RNA, 19 nt, Artificial Sequence
  Description of Artificial Sequence: Synthetic oligonucleotide
  Sense strand starting at position 625 of SEQ ID NO: 587801
uccaaaguugugcaagagu

SEQ ID NO: 819291 - RNA, 19 nt, Artificial Sequence
  Description of Artificial Sequence: Synthetic oligonucleotide
  Antisense strand to SEQ ID NO: 819290
acucuugcacaacuuugga

SEQ ID NO: 819292 - RNA, 19 nt, Artificial Sequence
  Description of Artificial Sequence: Synthetic oligonucleotide
  Sense strand starting at position 628 of SEQ ID NO: 587801
aaaguugugcaagaguaac

SEQ ID NO: 819293 - RNA, 19 nt, Artificial Sequence
  Description of Artificial Sequence: Synthetic oligonucleotide
  Antisense strand to SEQ ID NO: 819292
guuacucuugcacaacuuu

SEQ ID NO: 819294 - RNA, 19 nt, Artificial Sequence
  Description of Artificial Sequence: Synthetic oligonucleotide
  Sense strand starting at position 651 of SEQ ID NO: 587801
gaaaucagacucugguaua

SEQ ID NO: 819295 - RNA, 19 nt, Artificial Sequence
  Description of Artificial Sequence: Synthetic oligonucleotide
  Antisense strand to SEQ ID NO: 819294
uauaccagagucugauuuc

SEQ ID NO: 819296 - RNA, 19 nt, Artificial Sequence
  Description of Artificial Sequence: Synthetic oligonucleotide
  Sense strand starting at position 665 of SEQ ID NO: 587801
guauauuaauaguugcaac

SEQ ID NO: 819297 - RNA, 19 nt, Artificial Sequence
  Description of Artificial Sequence: Synthetic oligonucleotide
  Antisense strand to SEQ ID NO: 819296
guugcaacuauuaauauac

SEQ ID NO: 819298 - RNA, 19 nt, Artificial Sequence
  Description of Artificial Sequence: Synthetic oligonucleotide
  Sense strand starting at position 750 of SEQ ID NO: 587801
cuacgaagagucuguuuac

SEQ ID NO: 819299 - RNA, 19 nt, Artificial Sequence
  Description of Artificial Sequence: Synthetic oligonucleotide
  Antisense strand to SEQ ID NO: 819298
guaaacagacucuucguag

SEQ ID NO: 819300 - RNA, 19 nt, Artificial Sequence
  Description of Artificial Sequence: Synthetic oligonucleotide
  Sense strand starting at position 751 of SEQ ID NO: 587801
uacgaagagucuguuuacu

SEQ ID NO: 819301 - RNA, 19 nt, Artificial Sequence
  Description of Artificial Sequence: Synthetic oligonucleotide
  Antisense strand to SEQ ID NO: 819300
aguaaacagacucuucgua

SEQ ID NO: 819302 - RNA, 19 nt, Artificial Sequence
  Description of Artificial Sequence: Synthetic oligonucleotide
  Sense strand starting at position 753 of SEQ ID NO: 587801
cgaagagucuguuuacuuu

SEQ ID NO: 819303 - RNA, 19 nt, Artificial Sequence
  Description of Artificial Sequence: Synthetic oligonucleotide
  Antisense strand to SEQ ID NO: 819302
aaaguaaacagacucuucg

SEQ ID NO: 819304 - RNA, 19 nt, Artificial Sequence
  Description of Artificial Sequence: Synthetic oligonucleotide
  Sense strand starting at position 888 of SEQ ID NO: 587801
acaucagcguccucaacau

SEQ ID NO: 819305 - RNA, 19 nt, Artificial Sequence
  Description of Artificial Sequence: Synthetic oligonucleotide
  Antisense strand to SEQ ID NO: 819304
auguugaggacgcugaugu

SEQ ID NO: 819306 - RNA, 19 nt, Artificial Sequence
  Description of Artificial Sequence: Synthetic oligonucleotide
  Sense strand starting at position 1032 of SEQ ID NO: 587801
ccgucaaguaaugagaugu

SEQ ID NO: 819307 - RNA, 19 nt, Artificial Sequence
  Description of Artificial Sequence: Synthetic oligonucleotide
  Antisense strand to SEQ ID NO: 819306
acaucucauuacuugacgg

SEQ ID NO: 819308 - RNA, 19 nt, Artificial Sequence
  Description of Artificial Sequence: Synthetic oligonucleotide
  Sense strand starting at position 1038 of SEQ ID NO: 587801
aguaaugagaugugacuua

SEQ ID NO: 819309 - RNA, 19 nt, Artificial Sequence
  Description of Artificial Sequence: Synthetic oligonucleotide
  Antisense strand to SEQ ID NO: 819308
uaagucacaucucauuacu

SEQ ID NO: 819310 - RNA, 19 nt, Artificial Sequence
  Description of Artificial Sequence: Synthetic oligonucleotide
  Sense strand starting at position 1045 of SEQ ID NO: 587801
agaugugacuuauucugac

SEQ ID NO: 819311 - RNA, 19 nt, Artificial Sequence
  Description of Artificial Sequence: Synthetic oligonucleotide
  Antisense strand to SEQ ID NO: 819310
gucagaauaagucacaucu

SEQ ID NO: 819312 - RNA, 19 nt, Artificial Sequence
  Description of Artificial Sequence: Synthetic oligonucleotide
  Sense strand starting at position 1053 of SEQ ID NO: 587801
cuuauucugacgugagagu

SEQ ID NO: 819313 - RNA, 19 nt, Artificial Sequence
  Description of Artificial Sequence: Synthetic oligonucleotide
  Antisense strand to SEQ ID NO: 819312
acucucacgucagaauaag

SEQ ID NO: 819314 - RNA, 19 nt, Artificial Sequence
  Description of Artificial Sequence: Synthetic oligonucleotide
  Sense strand starting at position 1054 of SEQ ID NO: 587801
uuauucugacgugagaguu

SEQ ID NO: 819315 - RNA, 19 nt, Artificial Sequence
  Description of Artificial Sequence: Synthetic oligonucleotide
  Antisense strand to SEQ ID NO: 819314
aacucucacgucagaauaa

SEQ ID NO: 819316 - RNA, 19 nt, Artificial Sequence
  Description of Artificial Sequence: Synthetic oligonucleotide
  Sense strand starting at position 1064 of SEQ ID NO: 587801
gugagaguugaagguguua

SEQ ID NO: 819317 - RNA, 19 nt, Artificial Sequence
  Description of Artificial Sequence: Synthetic oligonucleotide
  Antisense strand to SEQ ID NO: 819316
uaacaccuucaacucucac

SEQ ID NO: 819318 - RNA, 19 nt, Artificial Sequence
  Description of Artificial Sequence: Synthetic oligonucleotide
  Sense strand starting at position 1066 of SEQ ID NO: 587801
gagaguugaagguguuaaa

SEQ ID NO: 819319 - RNA, 19 nt, Artificial Sequence
  Description of Artificial Sequence: Synthetic oligonucleotide
  Antisense strand to SEQ ID NO: 819318
uuuaacaccuucaacucuc

SEQ ID NO: 819320 - RNA, 19 nt, Artificial Sequence
  Description of Artificial Sequence: Synthetic oligonucleotide
  Sense strand starting at position 1181 of SEQ ID NO: 587801
ugcccaggccuugauagau

SEQ ID NO: 819321 - RNA, 19 nt, Artificial Sequence
  Description of Artificial Sequence: Synthetic oligonucleotide
  Antisense strand to SEQ ID NO: 819320
aucuaucaaggccugggca

SEQ ID NO: 819322 - RNA, 19 nt, Artificial Sequence
  Description of Artificial Sequence: Synthetic oligonucleotide
  Sense strand starting at position 2362 of SEQ ID NO: 587801
guauuucuguguuuggcau

SEQ ID NO: 819323 - RNA, 19 nt, Artificial Sequence
  Description of Artificial Sequence: Synthetic oligonucleotide
  Antisense strand to SEQ ID NO: 819322
augccaaacacagaaauac

SEQ ID NO: 819324 - RNA, 19 nt, Artificial Sequence
  Description of Artificial Sequence: Synthetic oligonucleotide
  Sense strand starting at position 2813 of SEQ ID NO: 587801
ccgagaugaucuguuuaug

SEQ ID NO: 819325 - RNA, 19 nt, Artificial Sequence
  Description of Artificial Sequence: Synthetic oligonucleotide
  Antisense strand to SEQ ID NO: 819324
cauaaacagaucaucucgg

SEQ ID NO: 819326 - RNA, 19 nt, Artificial Sequence
  Description of Artificial Sequence: Synthetic oligonucleotide
  Sense strand starting at position 2816 of SEQ ID NO: 587801
agaugaucuguuuaugugu

SEQ ID NO: 819327 - RNA, 19 nt, Artificial Sequence
  Description of Artificial Sequence: Synthetic oligonucleotide
  Antisense strand to SEQ ID NO: 819326
acacauaaacagaucaucu

SEQ ID NO: 819328 - RNA, 19 nt, Artificial Sequence
  Description of Artificial Sequence: Synthetic oligonucleotide
  Sense strand starting at position 2941 of SEQ ID NO: 587801
aaggaaagcuaacugguau

SEQ ID NO: 819329 - RNA, 19 nt, Artificial Sequence
  Description of Artificial Sequence: Synthetic oligonucleotide
  Antisense strand to SEQ ID NO: 819328
auaccaguuagcuuuccuu

SEQ ID NO: 819330 - RNA, 19 nt, Artificial Sequence
  Description of Artificial Sequence: Synthetic oligonucleotide
  Sense strand starting at position 2942 of SEQ ID NO: 587801
aggaaagcuaacugguauu

SEQ ID NO: 819331 - RNA, 19 nt, Artificial Sequence
  Description of Artificial Sequence: Synthetic oligonucleotide
  Antisense strand to SEQ ID NO: 819330
aauaccaguuagcuuuccu

SEQ ID NO: 819332 - RNA, 19 nt, Artificial Sequence
  Description of Artificial Sequence: Synthetic oligonucleotide
  Sense strand starting at position 3059 of SEQ ID NO: 587801
aggaaauacuguuaaagga

SEQ ID NO: 819333 - RNA, 19 nt, Artificial Sequence
  Description of Artificial Sequence: Synthetic oligonucleotide
  Antisense strand to SEQ ID NO: 819332
uccuuuaacaguauuuccu

SEQ ID NO: 819334 - RNA, 19 nt, Artificial Sequence
  Description of Artificial Sequence: Synthetic oligonucleotide
  Sense strand starting at position 3263 of SEQ ID NO: 587801
agaauagggugucaggaaa

SEQ ID NO: 819335 - RNA, 19 nt, Artificial Sequence
  Description of Artificial Sequence: Synthetic oligonucleotide
  Antisense strand to SEQ ID NO: 819334
uuuccugacacccuauucu

SEQ ID NO: 819336 - RNA, 19 nt, Artificial Sequence
  Description of Artificial Sequence: Synthetic oligonucleotide
  Sense strand starting at position 3279 of SEQ ID NO: 587801
aaagguuacuuagagauua

SEQ ID NO: 819337 - RNA, 19 nt, Artificial Sequence
  Description of Artificial Sequence: Synthetic oligonucleotide
  Antisense strand to SEQ ID NO: 819336
uaaucucuaaguaaccuuu

SEQ ID NO: 819338 - RNA, 19 nt, Artificial Sequence
  Description of Artificial Sequence: Synthetic oligonucleotide
  Sense strand starting at position 3287 of SEQ ID NO: 587801
cuuagagauuaugauuucu

SEQ ID NO: 819339 - RNA, 19 nt, Artificial Sequence
  Description of Artificial Sequence: Synthetic oligonucleotide
  Antisense strand to SEQ ID NO: 819338
agaaaucauaaucucuaag

SEQ ID NO: 819340 - RNA, 19 nt, Artificial Sequence
  Description of Artificial Sequence: Synthetic oligonucleotide
  Sense strand starting at position 3293 of SEQ ID NO: 587801
gauuaugauuucugagcca

SEQ ID NO: 819341 - RNA, 19 nt, Artificial Sequence
  Description of Artificial Sequence: Synthetic oligonucleotide
  Antisense strand to SEQ ID NO: 819340
uggcucagaaaucauaauc

SEQ ID NO: 819342 - RNA, 19 nt, Artificial Sequence
  Description of Artificial Sequence: Synthetic oligonucleotide
  Sense strand starting at position 3324 of SEQ ID NO: 587801
auguauagaguuugucgaa

SEQ ID NO: 819343 - RNA, 19 nt, Artificial Sequence
  Description of Artificial Sequence: Synthetic oligonucleotide
  Antisense strand to SEQ ID NO: 819342
uucgacaaacucuauacau

SEQ ID NO: 819344 - RNA, 19 nt, Artificial Sequence
  Description of Artificial Sequence: Synthetic oligonucleotide
  Sense strand starting at position 3325 of SEQ ID NO: 587801
uguauagaguuugucgaaa

SEQ ID NO: 819345 - RNA, 19 nt, Artificial Sequence
  Description of Artificial Sequence: Synthetic oligonucleotide
  Antisense strand to SEQ ID NO: 819344
uuucgacaaacucuauaca

SEQ ID NO: 819346 - RNA, 19 nt, Artificial Sequence
  Description of Artificial Sequence: Synthetic oligonucleotide
  Sense strand starting at position 3534 of SEQ ID NO: 587801
guuccuguugccuaauacu

SEQ ID NO: 819347 - RNA, 19 nt, Artificial Sequence
  Description of Artificial Sequence: Synthetic oligonucleotide
  Antisense strand to SEQ ID NO: 819346
aguauuaggcaacaggaac

SEQ ID NO: 819348 - RNA, 19 nt, Artificial Sequence
  Description of Artificial Sequence: Synthetic oligonucleotide
  Sense strand starting at position 3606 of SEQ ID NO: 587801
uugcuaacaugcuuuggau

SEQ ID NO: 819349 - RNA, 19 nt, Artificial Sequence
  Description of Artificial Sequence: Synthetic oligonucleotide
  Antisense strand to SEQ ID NO: 819348
auccaaagcauguuagcaa

SEQ ID NO: 819350 - RNA, 19 nt, Artificial Sequence
  Description of Artificial Sequence: Synthetic oligonucleotide
  Sense strand starting at position 3618 of SEQ ID NO: 587801
uuuggauggccuugccaaa

SEQ ID NO: 819351 - RNA, 19 nt, Artificial Sequence
  Description of Artificial Sequence: Synthetic oligonucleotide
  Antisense strand to SEQ ID NO: 819350
uuuggcaaggccauccaaa

SEQ ID NO: 819352 - RNA, 19 nt, Artificial Sequence
  Description of Artificial Sequence: Synthetic oligonucleotide
  Sense strand starting at position 3700 of SEQ ID NO: 587801
acggaagaauuugacauga

SEQ ID NO: 819353 - RNA, 19 nt, Artificial Sequence
  Description of Artificial Sequence: Synthetic oligonucleotide
  Antisense strand to SEQ ID NO: 819352
ucaugucaaauucuuccgu

SEQ ID NO: 819354 - RNA, 19 nt, Artificial Sequence
  Description of Artificial Sequence: Synthetic oligonucleotide
  Sense strand starting at position 3764 of SEQ ID NO: 587801
ucaccuuuaguuugaggaa

SEQ ID NO: 819355 - RNA, 19 nt, Artificial Sequence
  Description of Artificial Sequence: Synthetic oligonucleotide
  Antisense strand to SEQ ID NO: 819354
uuccucaaacuaaagguga

SEQ ID NO: 819356 - RNA, 19 nt, Artificial Sequence
  Description of Artificial Sequence: Synthetic oligonucleotide
  Sense strand starting at position 3932 of SEQ ID NO: 587801
acucuauuaggauguuaua

SEQ ID NO: 819357 - RNA, 19 nt, Artificial Sequence
  Description of Artificial Sequence: Synthetic oligonucleotide
  Antisense strand to SEQ ID NO: 819356
uauaacauccuaauagagu

SEQ ID NO: 819358 - RNA, 19 nt, Artificial Sequence
  Description of Artificial Sequence: Synthetic oligonucleotide
  Sense strand starting at position 3973 of SEQ ID NO: 587801
ucaggaguauuccuacacu

SEQ ID NO: 819359 - RNA, 19 nt, Artificial Sequence
  Description of Artificial Sequence: Synthetic oligonucleotide
  Antisense strand to SEQ ID NO: 819358
aguguaggaauacuccuga

SEQ ID NO: 819360 - RNA, 19 nt, Artificial Sequence
  Description of Artificial Sequence: Synthetic oligonucleotide
  Sense strand starting at position 3976 of SEQ ID NO: 587801
ggaguauuccuacacuguu

SEQ ID NO: 819361 - RNA, 19 nt, Artificial Sequence
  Description of Artificial Sequence: Synthetic oligonucleotide
  Antisense strand to SEQ ID NO: 819360
aacaguguaggaauacucc

SEQ ID NO: 819362 - RNA, 19 nt, Artificial Sequence
  Description of Artificial Sequence: Synthetic oligonucleotide
  Sense strand starting at position 3979 of SEQ ID NO: 587801
guauuccuacacuguuaga

SEQ ID NO: 819363 - RNA, 19 nt, Artificial Sequence
  Description of Artificial Sequence: Synthetic oligonucleotide
  Antisense strand to SEQ ID NO: 819362
ucuaacaguguaggaauac

SEQ ID NO: 819364 - RNA, 19 nt, Artificial Sequence
  Description of Artificial Sequence: Synthetic oligonucleotide
  Sense strand starting at position 82 of SEQ ID NO: 587802
gugaauaaguuacuucuca

SEQ ID NO: 819365 - RNA, 19 nt, Artificial Sequence
  Description of Artificial Sequence: Synthetic oligonucleotide
  Antisense strand to SEQ ID NO: 819364
ugagaaguaacuuauucac

SEQ ID NO: 819366 - RNA, 19 nt, Artificial Sequence
  Description of Artificial Sequence: Synthetic oligonucleotide
  Sense strand starting at position 101 of SEQ ID NO: 587802
acuauaaacugggauaaua

SEQ ID NO: 819367 - RNA, 19 nt, Artificial Sequence
  Description of Artificial Sequence: Synthetic oligonucleotide
  Antisense strand to SEQ ID NO: 819366
uauuaucccaguuuauagu

SEQ ID NO: 819368 - RNA, 19 nt, Artificial Sequence
  Description of Artificial Sequence: Synthetic oligonucleotide
  Sense strand starting at position 247 of SEQ ID NO: 587802
acaacucugguuugacauu

SEQ ID NO: 819369 - RNA, 19 nt, Artificial Sequence
  Description of Artificial Sequence: Synthetic oligonucleotide
  Antisense strand to SEQ ID NO: 819368
aaugucaaaccagaguugu

SEQ ID NO: 819370 - RNA, 19 nt, Artificial Sequence
  Description of Artificial Sequence: Synthetic oligonucleotide
  Sense strand starting at position 330 of SEQ ID NO: 587802
aagcguuucuuagaauuug

SEQ ID NO: 819371 - RNA, 19 nt, Artificial Sequence
  Description of Artificial Sequence: Synthetic oligonucleotide
  Antisense strand to SEQ ID NO: 819370
caaauucuaagaaacgcuu

SEQ ID NO: 819372 - RNA, 19 nt, Artificial Sequence
  Description of Artificial Sequence: Synthetic oligonucleotide
  Sense strand starting at position 382 of SEQ ID NO: 587802
uuguaauucugacuugugu

SEQ ID NO: 819373 - RNA, 19 nt, Artificial Sequence
  Description of Artificial Sequence: Synthetic oligonucleotide
  Antisense strand to SEQ ID NO: 819372
acacaagucagaauuacaa

SEQ ID NO: 819374 - RNA, 19 nt, Artificial Sequence
  Description of Artificial Sequence: Synthetic oligonucleotide
  Sense strand starting at position 384 of SEQ ID NO: 587802
guaauucugacuuguguau

SEQ ID NO: 819375 - RNA, 19 nt, Artificial Sequence
  Description of Artificial Sequence: Synthetic oligonucleotide
  Antisense strand to SEQ ID NO: 819374
auacacaagucagaauuac

SEQ ID NO: 819376 - RNA, 19 nt, Artificial Sequence
  Description of Artificial Sequence: Synthetic oligonucleotide
  Sense strand starting at position 460 of SEQ ID NO: 587802
guuaacuuauuugaagauc

SEQ ID NO: 819377 - RNA, 19 nt, Artificial Sequence
  Description of Artificial Sequence: Synthetic oligonucleotide
  Antisense strand to SEQ ID NO: 819376
gaucuucaaauaaguuaac

SEQ ID NO: 819378 - RNA, 19 nt, Artificial Sequence
  Description of Artificial Sequence: Synthetic oligonucleotide
  Sense strand starting at position 472 of SEQ ID NO: 587802
gaagaucagauauggcgua

SEQ ID NO: 819379 - RNA, 19 nt, Artificial Sequence
  Description of Artificial Sequence: Synthetic oligonucleotide
  Antisense strand to SEQ ID NO: 819378
uacgccauaucugaucuuc

SEQ ID NO: 819380 - RNA, 19 nt, Artificial Sequence
  Description of Artificial Sequence: Synthetic oligonucleotide
  Sense strand starting at position 484 of SEQ ID NO: 587802
uggcguauguccucaucaa

SEQ ID NO: 819381 - RNA, 19 nt, Artificial Sequence
  Description of Artificial Sequence: Synthetic oligonucleotide
  Antisense strand to SEQ ID NO: 819380
uugaugaggacauacgcca

SEQ ID NO: 819382 - RNA, 19 nt, Artificial Sequence
  Description of Artificial Sequence: Synthetic oligonucleotide
  Sense strand starting at position 485 of SEQ ID NO: 587802
ggcguauguccucaucaau

SEQ ID NO: 819383 - RNA, 19 nt, Artificial Sequence
  Description of Artificial Sequence: Synthetic oligonucleotide
  Antisense strand to SEQ ID NO: 819382
auugaugaggacauacgcc

SEQ ID NO: 819384 - RNA, 19 nt, Artificial Sequence
  Description of Artificial Sequence: Synthetic oligonucleotide
  Sense strand starting at position 519 of SEQ ID NO: 587802
auuaguugccuccgacauu

SEQ ID NO: 819385 - RNA, 19 nt, Artificial Sequence
  Description of Artificial Sequence: Synthetic oligonucleotide
  Antisense strand to SEQ ID NO: 819384
aaugucggaggcaacuaau

SEQ ID NO: 819386 - RNA, 19 nt, Artificial Sequence
  Description of Artificial Sequence: Synthetic oligonucleotide
  Sense strand starting at position 745 of SEQ ID NO: 587802
cccagaaacucuucgcaca

SEQ ID NO: 819387 - RNA, 19 nt, Artificial Sequence
  Description of Artificial Sequence: Synthetic oligonucleotide
  Antisense strand to SEQ ID NO: 819386
ugugcgaagaguuucuggg

SEQ ID NO: 819388 - RNA, 19 nt, Artificial Sequence
  Description of Artificial Sequence: Synthetic oligonucleotide
  Sense strand starting at position 746 of SEQ ID NO: 587802
ccagaaacucuucgcacaa

SEQ ID NO: 819389 - RNA, 19 nt, Artificial Sequence
  Description of Artificial Sequence: Synthetic oligonucleotide
  Antisense strand to SEQ ID NO: 819388
uugugcgaagaguuucugg

SEQ ID NO: 819390 - RNA, 19 nt, Artificial Sequence
  Description of Artificial Sequence: Synthetic oligonucleotide
  Sense strand starting at position 827 of SEQ ID NO: 587802
ggguuucccucuuacaaau

SEQ ID NO: 819391 - RNA, 19 nt, Artificial Sequence
  Description of Artificial Sequence: Synthetic oligonucleotide
  Antisense strand to SEQ ID NO: 819390
auuuguaagagggaaaccc

SEQ ID NO: 819392 - RNA, 19 nt, Artificial Sequence
  Description of Artificial Sequence: Synthetic oligonucleotide
  Sense strand starting at position 1098 of SEQ ID NO: 587802
uuuccacgcgucugugaaa

SEQ ID NO: 819393 - RNA, 19 nt, Artificial Sequence
  Description of Artificial Sequence: Synthetic oligonucleotide
  Antisense strand to SEQ ID NO: 819392
uuucacagacgcguggaaa

SEQ ID NO: 819394 - RNA, 19 nt, Artificial Sequence
  Description of Artificial Sequence: Synthetic oligonucleotide
  Sense strand starting at position 1099 of SEQ ID NO: 587802
uuccacgcgucugugaaau

SEQ ID NO: 819395 - RNA, 19 nt, Artificial Sequence
  Description of Artificial Sequence: Synthetic oligonucleotide
  Antisense strand to SEQ ID NO: 819394
auuucacagacgcguggaa

SEQ ID NO: 819396 - RNA, 19 nt, Artificial Sequence
  Description of Artificial Sequence: Synthetic oligonucleotide
  Sense strand starting at position 1253 of SEQ ID NO: 587802
ccgaguucggcggaagguu

SEQ ID NO: 819397 - RNA, 19 nt, Artificial Sequence
  Description of Artificial Sequence: Synthetic oligonucleotide
  Antisense strand to SEQ ID NO: 819396
aaccuuccgccgaacucgg

SEQ ID NO: 819398 - RNA, 19 nt, Artificial Sequence
  Description of Artificial Sequence: Synthetic oligonucleotide
  Sense strand starting at position 1450 of SEQ ID NO: 587802
gguaacagccuuuguagau

SEQ ID NO: 819399 - RNA, 19 nt, Artificial Sequence
  Description of Artificial Sequence: Synthetic oligonucleotide
  Antisense strand to SEQ ID NO: 819398
aucuacaaaggcuguuacc

SEQ ID NO: 819400 - RNA, 19 nt, Artificial Sequence
  Description of Artificial Sequence: Synthetic oligonucleotide
  Sense strand starting at position 1451 of SEQ ID NO: 587802
guaacagccuuuguagauc

SEQ ID NO: 819401 - RNA, 19 nt, Artificial Sequence
  Description of Artificial Sequence: Synthetic oligonucleotide
  Antisense strand to SEQ ID NO: 819400
gaucuacaaaggcuguuac

SEQ ID NO: 819402 - RNA, 19 nt, Artificial Sequence
  Description of Artificial Sequence: Synthetic oligonucleotide
  Sense strand starting at position 1459 of SEQ ID NO: 587802
cuuuguagaucucagaaug

SEQ ID NO: 819403 - RNA, 19 nt, Artificial Sequence
  Description of Artificial Sequence: Synthetic oligonucleotide
  Antisense strand to SEQ ID NO: 819402
cauucugagaucuacaaag

SEQ ID NO: 819404 - RNA, 19 nt, Artificial Sequence
  Description of Artificial Sequence: Synthetic oligonucleotide
  Sense strand starting at position 1482 of SEQ ID NO: 587802
agaaucauuuguuaccgaa

SEQ ID NO: 819405 - RNA, 19 nt, Artificial Sequence
  Description of Artificial Sequence: Synthetic oligonucleotide
  Antisense strand to SEQ ID NO: 819404
uucgguaacaaaugauucu

SEQ ID NO: 819406 - RNA, 19 nt, Artificial Sequence
  Description of Artificial Sequence: Synthetic oligonucleotide
  Sense strand starting at position 1485 of SEQ ID NO: 587802
aucauuuguuaccgaacaa

SEQ ID NO: 819407 - RNA, 19 nt, Artificial Sequence
  Description of Artificial Sequence: Synthetic oligonucleotide
  Antisense strand to SEQ ID NO: 819406
uuguucgguaacaaaugau

SEQ ID NO: 819408 - RNA, 19 nt, Artificial Sequence
  Description of Artificial Sequence: Synthetic oligonucleotide
  Sense strand starting at position 2112 of SEQ ID NO: 587802
gcgcaaaggugauucucuu

SEQ ID NO: 819409 - RNA, 19 nt, Artificial Sequence
  Description of Artificial Sequence: Synthetic oligonucleotide
  Antisense strand to SEQ ID NO: 819408
aagagaaucaccuuugcgc

SEQ ID NO: 819410 - RNA, 19 nt, Artificial Sequence
  Description of Artificial Sequence: Synthetic oligonucleotide
  Sense strand starting at position 2116 of SEQ ID NO: 587802
aaaggugauucucuugcga

SEQ ID NO: 819411 - RNA, 19 nt, Artificial Sequence
  Description of Artificial Sequence: Synthetic oligonucleotide
  Antisense strand to SEQ ID NO: 819410
ucgcaagagaaucaccuuu

SEQ ID NO: 819412 - RNA, 19 nt, Artificial Sequence
  Description of Artificial Sequence: Synthetic oligonucleotide
  Sense strand starting at position 2130 of SEQ ID NO: 587802
ugcgagggucuuugagagu

SEQ ID NO: 819413 - RNA, 19 nt, Artificial Sequence
  Description of Artificial Sequence: Synthetic oligonucleotide
  Antisense strand to SEQ ID NO: 819412
acucucaaagacccucgca

SEQ ID NO: 819414 - RNA, 19 nt, Artificial Sequence
  Description of Artificial Sequence: Synthetic oligonucleotide
  Sense strand starting at position 2152 of SEQ ID NO: 587802
gguguuagccaauagcgua

SEQ ID NO: 819415 - RNA, 19 nt, Artificial Sequence
  Description of Artificial Sequence: Synthetic oligonucleotide
  Antisense strand to SEQ ID NO: 819414
uacgcuauuggcuaacacc

SEQ ID NO: 819416 - RNA, 19 nt, Artificial Sequence
  Description of Artificial Sequence: Synthetic oligonucleotide
  Sense strand starting at position 2157 of SEQ ID NO: 587802
uagccaauagcguaagaua

SEQ ID NO: 819417 - RNA, 19 nt, Artificial Sequence
  Description of Artificial Sequence: Synthetic oligonucleotide
  Antisense strand to SEQ ID NO: 819416
uaucuuacgcuauuggcua

SEQ ID NO: 819418 - RNA, 19 nt, Artificial Sequence
  Description of Artificial Sequence: Synthetic oligonucleotide
  Sense strand starting at position 2191 of SEQ ID NO: 587802
uuuccagugcggugaauau

SEQ ID NO: 819419 - RNA, 19 nt, Artificial Sequence
  Description of Artificial Sequence: Synthetic oligonucleotide
  Antisense strand to SEQ ID NO: 819418
auauucaccgcacuggaaa

SEQ ID NO: 819420 - RNA, 19 nt, Artificial Sequence
  Description of Artificial Sequence: Synthetic oligonucleotide
  Sense strand starting at position 2200 of SEQ ID NO: 587802
cggugaauauuugcguuua

SEQ ID NO: 819421 - RNA, 19 nt, Artificial Sequence
  Description of Artificial Sequence: Synthetic oligonucleotide
  Antisense strand to SEQ ID NO: 819420
uaaacgcaaauauucaccg

SEQ ID NO: 819422 - RNA, 19 nt, Artificial Sequence
  Description of Artificial Sequence: Synthetic oligonucleotide
  Sense strand starting at position 2210 of SEQ ID NO: 587802
uugcguuuagcuuuauucu

SEQ ID NO: 819423 - RNA, 19 nt, Artificial Sequence
  Description of Artificial Sequence: Synthetic oligonucleotide
  Antisense strand to SEQ ID NO: 819422
agaauaaagcuaaacgcaa

SEQ ID NO: 819424 - RNA, 19 nt, Artificial Sequence
  Description of Artificial Sequence: Synthetic oligonucleotide
  Sense strand starting at position 2211 of SEQ ID NO: 587802
ugcguuuagcuuuauucuu

SEQ ID NO: 819425 - RNA, 19 nt, Artificial Sequence
  Description of Artificial Sequence: Synthetic oligonucleotide
  Antisense strand to SEQ ID NO: 819424
aagaauaaagcuaaacgca

SEQ ID NO: 819426 - RNA, 19 nt, Artificial Sequence
  Description of Artificial Sequence: Synthetic oligonucleotide
  Sense strand starting at position 2248 of SEQ ID NO: 587802
aaagcugucguggugcaau

SEQ ID NO: 819427 - RNA, 19 nt, Artificial Sequence
  Description of Artificial Sequence: Synthetic oligonucleotide
  Antisense strand to SEQ ID NO: 819426
auugcaccacgacagcuuu

SEQ ID NO: 819428 - RNA, 19 nt, Artificial Sequence
  Description of Artificial Sequence: Synthetic oligonucleotide
  Sense strand starting at position 2297 of SEQ ID NO: 587802
auggcucuauagggaugaa

SEQ ID NO: 819429 - RNA, 19 nt, Artificial Sequence
  Description of Artificial Sequence: Synthetic oligonucleotide
  Antisense strand to SEQ ID NO: 819428
uucaucccuauagagccau

SEQ ID NO: 819430 - RNA, 19 nt, Artificial Sequence
  Description of Artificial Sequence: Synthetic oligonucleotide
  Sense strand starting at position 2300 of SEQ ID NO: 587802
gcucuauagggaugaaagu

SEQ ID NO: 819431 - RNA, 19 nt, Artificial Sequence
  Description of Artificial Sequence: Synthetic oligonucleotide
  Antisense strand to SEQ ID NO: 819430
acuuucaucccuauagagc

SEQ ID NO: 819432 - RNA, 19 nt, Artificial Sequence
  Description of Artificial Sequence: Synthetic oligonucleotide
  Sense strand starting at position 2382 of SEQ ID NO: 587802
uauagagggucuucuguuu

SEQ ID NO: 819433 - RNA, 19 nt, Artificial Sequence
  Description of Artificial Sequence: Synthetic oligonucleotide
  Antisense strand to SEQ ID NO: 819432
aaacagaagacccucuaua

SEQ ID NO: 819434 - RNA, 19 nt, Artificial Sequence
  Description of Artificial Sequence: Synthetic oligonucleotide
  Sense strand starting at position 2388 of SEQ ID NO: 587802
gggucuucuguuugcuaca

SEQ ID NO: 819435 - RNA, 19 nt, Artificial Sequence
  Description of Artificial Sequence: Synthetic oligonucleotide
  Antisense strand to SEQ ID NO: 819434
uguagcaaacagaagaccc

SEQ ID NO: 819436 - RNA, 19 nt, Artificial Sequence
  Description of Artificial Sequence: Synthetic oligonucleotide
  Sense strand starting at position 2405 of SEQ ID NO: 587802
cacguugggcucuggauau

SEQ ID NO: 819437 - RNA, 19 nt, Artificial Sequence
  Description of Artificial Sequence: Synthetic oligonucleotide
  Antisense strand to SEQ ID NO: 819436
auauccagagcccaacgug

SEQ ID NO: 819438 - RNA, 19 nt, Artificial Sequence
  Description of Artificial Sequence: Synthetic oligonucleotide
  Sense strand starting at position 2467 of SEQ ID NO: 587802
ucaguauugcuugggagga

SEQ ID NO: 819439 - RNA, 19 nt, Artificial Sequence
  Description of Artificial Sequence: Synthetic oligonucleotide
  Antisense strand to SEQ ID NO: 819438
uccucccaagcaauacuga

SEQ ID NO: 819440 - RNA, 19 nt, Artificial Sequence
  Description of Artificial Sequence: Synthetic oligonucleotide
  Sense strand starting at position 2469 of SEQ ID NO: 587802
aguauugcuugggaggaau

SEQ ID NO: 819441 - RNA, 19 nt, Artificial Sequence
  Description of Artificial Sequence: Synthetic oligonucleotide
  Antisense strand to SEQ ID NO: 819440
auuccucccaagcaauacu

SEQ ID NO: 819442 - RNA, 19 nt, Artificial Sequence
  Description of Artificial Sequence: Synthetic oligonucleotide
  Sense strand starting at position 2513 of SEQ ID NO: 587802
uuacuuguaccacgaagaa

SEQ ID NO: 819443 - RNA, 19 nt, Artificial Sequence
  Description of Artificial Sequence: Synthetic oligonucleotide
  Antisense strand to SEQ ID NO: 819442
uucuucgugguacaaguaa

SEQ ID NO: 819444 - RNA, 19 nt, Artificial Sequence
  Description of Artificial Sequence: Synthetic oligonucleotide
  Sense strand starting at position 22 of SEQ ID NO: 587803
uuguccuguccauaauaaa

SEQ ID NO: 819445 - RNA, 19 nt, Artificial Sequence
  Description of Artificial Sequence: Synthetic oligonucleotide
  Antisense strand to SEQ ID NO: 819444
uuuauuauggacaggacaa

SEQ ID NO: 819446 - RNA, 19 nt, Artificial Sequence
  Description of Artificial Sequence: Synthetic oligonucleotide
  Sense strand starting at position 176 of SEQ ID NO: 587803
agcugacaacuguaauaca

SEQ ID NO: 819447 - RNA, 19 nt, Artificial Sequence
  Description of Artificial Sequence: Synthetic oligonucleotide
  Antisense strand to SEQ ID NO: 819446
uguauuacaguugucagcu

SEQ ID NO: 819448 - RNA, 19 nt, Artificial Sequence
  Description of Artificial Sequence: Synthetic oligonucleotide
  Sense strand starting at position 290 of SEQ ID NO: 587803
aauggucuugcacaguuua

SEQ ID NO: 819449 - RNA, 19 nt, Artificial Sequence
  Description of Artificial Sequence: Synthetic oligonucleotide
  Antisense strand to SEQ ID NO: 819448
uaaacugugcaagaccauu

SEQ ID NO: 819450 - RNA, 19 nt, Artificial Sequence
  Description of Artificial Sequence: Synthetic oligonucleotide
  Sense strand starting at position 314 of SEQ ID NO: 587803
gcuccaugugucucaguuu

SEQ ID NO: 819451 - RNA, 19 nt, Artificial Sequence
  Description of Artificial Sequence: Synthetic oligonucleotide
  Antisense strand to SEQ ID NO: 819450
aaacugagacacauggagc

SEQ ID NO: 819452 - RNA, 19 nt, Artificial Sequence
  Description of Artificial Sequence: Synthetic oligonucleotide
  Sense strand starting at position 329 of SEQ ID NO: 587803
guuuccucaucuuuaagag

SEQ ID NO: 819453 - RNA, 19 nt, Artificial Sequence
  Description of Artificial Sequence: Synthetic oligonucleotide
  Antisense strand to SEQ ID NO: 819452
cucuuaaagaugaggaaac

SEQ ID NO: 819454 - RNA, 19 nt, Artificial Sequence
  Description of Artificial Sequence: Synthetic oligonucleotide
  Sense strand starting at position 458 of SEQ ID NO: 587803
uaauuaguauuaucggaga

SEQ ID NO: 819455 - RNA, 19 nt, Artificial Sequence
  Description of Artificial Sequence: Synthetic oligonucleotide
  Antisense strand to SEQ ID NO: 819454
ucuccgauaauacuaauua

SEQ ID NO: 819456 - RNA, 19 nt, Artificial Sequence
  Description of Artificial Sequence: Synthetic oligonucleotide
  Sense strand starting at position 460 of SEQ ID NO: 587803
auuaguauuaucggagagu

SEQ ID NO: 819457 - RNA, 19 nt, Artificial Sequence
  Description of Artificial Sequence: Synthetic oligonucleotide
  Antisense strand to SEQ ID NO: 819456
acucuccgauaauacuaau

SEQ ID NO: 819458 - RNA, 19 nt, Artificial Sequence
  Description of Artificial Sequence: Synthetic oligonucleotide
  Sense strand starting at position 463 of SEQ ID NO: 587803
aguauuaucggagaguaga

SEQ ID NO: 819459 - RNA, 19 nt, Artificial Sequence
  Description of Artificial Sequence: Synthetic oligonucleotide
  Antisense strand to SEQ ID NO: 819458
ucuacucuccgauaauacu

SEQ ID NO: 819460 - RNA, 19 nt, Artificial Sequence
  Description of Artificial Sequence: Synthetic oligonucleotide
  Sense strand starting at position 490 of SEQ ID NO: 587803
agguccugugaaggagaua

SEQ ID NO: 819461 - RNA, 19 nt, Artificial Sequence
  Description of Artificial Sequence: Synthetic oligonucleotide
  Antisense strand to SEQ ID NO: 819460
uaucuccuucacaggaccu

SEQ ID NO: 819462 - RNA, 19 nt, Artificial Sequence
  Description of Artificial Sequence: Synthetic oligonucleotide
  Sense strand starting at position 538 of SEQ ID NO: 587803
ugaccagaaucuuuggguu

SEQ ID NO: 819463 - RNA, 19 nt, Artificial Sequence
  Description of Artificial Sequence: Synthetic oligonucleotide
  Antisense strand to SEQ ID NO: 819462
aacccaaagauucugguca

SEQ ID NO: 819464 - RNA, 19 nt, Artificial Sequence
  Description of Artificial Sequence: Synthetic oligonucleotide
  Sense strand starting at position 564 of SEQ ID NO: 587803
gcuuuaaagagagguaugu

SEQ ID NO: 819465 - RNA, 19 nt, Artificial Sequence
  Description of Artificial Sequence: Synthetic oligonucleotide
  Antisense strand to SEQ ID NO: 819464
acauaccucucuuuaaagc

SEQ ID NO: 819466 - RNA, 19 nt, Artificial Sequence
  Description of Artificial Sequence: Synthetic oligonucleotide
  Sense strand starting at position 568 of SEQ ID NO: 587803
uaaagagagguaugugcaa

SEQ ID NO: 819467 - RNA, 19 nt, Artificial Sequence
  Description of Artificial Sequence: Synthetic oligonucleotide
  Antisense strand to SEQ ID NO: 819466
uugcacauaccucucuuua

SEQ ID NO: 819468 - RNA, 19 nt, Artificial Sequence
  Description of Artificial Sequence: Synthetic oligonucleotide
  Sense strand starting at position 663 of SEQ ID NO: 587803
gcugcuugucgacuuccaa

SEQ ID NO: 819469 - RNA, 19 nt, Artificial Sequence
  Description of Artificial Sequence: Synthetic oligonucleotide
  Antisense strand to SEQ ID NO: 819468
uuggaagucgacaagcagc

SEQ ID NO: 819470 - RNA, 19 nt, Artificial Sequence
  Description of Artificial Sequence: Synthetic oligonucleotide
  Sense strand starting at position 715 of SEQ ID NO: 587803
uuaaauugcuccuuugaga

SEQ ID NO: 819471 - RNA, 19 nt, Artificial Sequence
  Description of Artificial Sequence: Synthetic oligonucleotide
  Antisense strand to SEQ ID NO: 819470
ucucaaaggagcaauuuaa

SEQ ID NO: 819472 - RNA, 19 nt, Artificial Sequence
  Description of Artificial Sequence: Synthetic oligonucleotide
  Sense strand starting at position 731 of SEQ ID NO: 587803
agacuccggcuauauagau

SEQ ID NO: 819473 - RNA, 19 nt, Artificial Sequence
  Description of Artificial Sequence: Synthetic oligonucleotide
  Antisense strand to SEQ ID NO: 819472
aucuauauagccggagucu

SEQ ID NO: 819474 - RNA, 19 nt, Artificial Sequence
  Description of Artificial Sequence: Synthetic oligonucleotide
  Sense strand starting at position 740 of SEQ ID NO: 587803
cuauauagaugguuccuaa

SEQ ID NO: 819475 - RNA, 19 nt, Artificial Sequence
  Description of Artificial Sequence: Synthetic oligonucleotide
  Antisense strand to SEQ ID NO: 819474
uuaggaaccaucuauauag

SEQ ID NO: 819476 - RNA, 19 nt, Artificial Sequence
  Description of Artificial Sequence: Synthetic oligonucleotide
  Sense strand starting at position 744 of SEQ ID NO: 587803
auagaugguuccuaauuua

SEQ ID NO: 819477 - RNA, 19 nt, Artificial Sequence
  Description of Artificial Sequence: Synthetic oligonucleotide
  Antisense strand to SEQ ID NO: 819476
uaaauuaggaaccaucuau

SEQ ID NO: 819478 - RNA, 19 nt, Artificial Sequence
  Description of Artificial Sequence: Synthetic oligonucleotide
  Sense strand starting at position 764 of SEQ ID NO: 587803
gacggugucacuuagaauu

SEQ ID NO: 819479 - RNA, 19 nt, Artificial Sequence
  Description of Artificial Sequence: Synthetic oligonucleotide
  Antisense strand to SEQ ID NO: 819478
aauucuaagugacaccguc

SEQ ID NO: 819480 - RNA, 19 nt, Artificial Sequence
  Description of Artificial Sequence: Synthetic oligonucleotide
  Sense strand starting at position 792 of SEQ ID NO: 587803
uuaagaaagccaugagcau

SEQ ID NO: 819481 - RNA, 19 nt, Artificial Sequence
  Description of Artificial Sequence: Synthetic oligonucleotide
  Antisense strand to SEQ ID NO: 819480
augcucauggcuuucuuaa

SEQ ID NO: 819482 - RNA, 19 nt, Artificial Sequence
  Description of Artificial Sequence: Synthetic oligonucleotide
  Sense strand starting at position 868 of SEQ ID NO: 587803
uguagauuaagguaagugu

SEQ ID NO: 819483 - RNA, 19 nt, Artificial Sequence
  Description of Artificial Sequence: Synthetic oligonucleotide
  Antisense strand to SEQ ID NO: 819482
acacuuaccuuaaucuaca

SEQ ID NO: 819484 - RNA, 19 nt, Artificial Sequence
  Description of Artificial Sequence: Synthetic oligonucleotide
  Sense strand starting at position 1195 of SEQ ID NO: 587803
acguaauauaccgaugcaa

SEQ ID NO: 819485 - RNA, 19 nt, Artificial Sequence
  Description of Artificial Sequence: Synthetic oligonucleotide
  Antisense strand to SEQ ID NO: 819484
uugcaucgguauauuacgu

SEQ ID NO: 819486 - RNA, 19 nt, Artificial Sequence
  Description of Artificial Sequence: Synthetic oligonucleotide
  Sense strand starting at position 1197 of SEQ ID NO: 587803
guaauauaccgaugcaaca

SEQ ID NO: 819487 - RNA, 19 nt, Artificial Sequence
  Description of Artificial Sequence: Synthetic oligonucleotide
  Antisense strand to SEQ ID NO: 819486
uguugcaucgguauauuac

SEQ ID NO: 819488 - RNA, 19 nt, Artificial Sequence
  Description of Artificial Sequence: Synthetic oligonucleotide
  Sense strand starting at position 1294 of SEQ ID NO: 587803
cuuuaauacucaguagguu

SEQ ID NO: 819489 - RNA, 19 nt, Artificial Sequence
  Description of Artificial Sequence: Synthetic oligonucleotide
  Antisense strand to SEQ ID NO: 819488
aaccuacugaguauuaaag

SEQ ID NO: 819490 - RNA, 19 nt, Artificial Sequence
  Description of Artificial Sequence: Synthetic oligonucleotide
  Sense strand starting at position 1295 of SEQ ID NO: 587803
uuuaauacucaguagguua

SEQ ID NO: 819491 - RNA, 19 nt, Artificial Sequence
  Description of Artificial Sequence: Synthetic oligonucleotide
  Antisense strand to SEQ ID NO: 819490
uaaccuacugaguauuaaa

SEQ ID NO: 819492 - RNA, 19 nt, Artificial Sequence
  Description of Artificial Sequence: Synthetic oligonucleotide
  Sense strand starting at position 1398 of SEQ ID NO: 587803
uccauaagguaaucgauua

SEQ ID NO: 819493 - RNA, 19 nt, Artificial Sequence
  Description of Artificial Sequence: Synthetic oligonucleotide
  Antisense strand to SEQ ID NO: 819492
uaaucgauuaccuuaugga

SEQ ID NO: 819494 - RNA, 19 nt, Artificial Sequence
  Description of Artificial Sequence: Synthetic oligonucleotide
  Sense strand starting at position 1535 of SEQ ID NO: 587803
ggaaauucccagugcagga

SEQ ID NO: 819495 - RNA, 19 nt, Artificial Sequence
  Description of Artificial Sequence: Synthetic oligonucleotide
  Antisense strand to SEQ ID NO: 819494
uccugcacugggaauuucc

SEQ ID NO: 819496 - RNA, 19 nt, Artificial Sequence
  Description of Artificial Sequence: Synthetic oligonucleotide
  Sense strand starting at position 1955 of SEQ ID NO: 587803
gccggagaagcucaaggau

SEQ ID NO: 819497 - RNA, 19 nt, Artificial Sequence
  Description of Artificial Sequence: Synthetic oligonucleotide
  Antisense strand to SEQ ID NO: 819496
auccuugagcuucuccggc

SEQ ID NO: 819498 - RNA, 19 nt, Artificial Sequence
  Description of Artificial Sequence: Synthetic oligonucleotide
  Sense strand starting at position 2090 of SEQ ID NO: 587803
guaucuuugcguuuggcuu

SEQ ID NO: 819499 - RNA, 19 nt, Artificial Sequence
  Description of Artificial Sequence: Synthetic oligonucleotide
  Antisense strand to SEQ ID NO: 819498
aagccaaacgcaaagauac

SEQ ID NO: 819500 - RNA, 19 nt, Artificial Sequence
  Description of Artificial Sequence: Synthetic oligonucleotide
  Sense strand starting at position 2275 of SEQ ID NO: 587803
aucgcagaaguauacgaua

SEQ ID NO: 819501 - RNA, 19 nt, Artificial Sequence
  Description of Artificial Sequence: Synthetic oligonucleotide
  Antisense strand to SEQ ID NO: 819500
uaucguauacuucugcgau

SEQ ID NO: 819502 - RNA, 19 nt, Artificial Sequence
  Description of Artificial Sequence: Synthetic oligonucleotide
  Sense strand starting at position 2384 of SEQ ID NO: 587803
agaaacgaauacgugauua

SEQ ID NO: 819503 - RNA, 19 nt, Artificial Sequence
  Description of Artificial Sequence: Synthetic oligonucleotide
  Antisense strand to SEQ ID NO: 819502
uaaucacguauucguuucu

SEQ ID NO: 819504 - RNA, 19 nt, Artificial Sequence
  Description of Artificial Sequence: Synthetic oligonucleotide
  Sense strand starting at position 2386 of SEQ ID NO: 587803
aaacgaauacgugauuauu

SEQ ID NO: 819505 - RNA, 19 nt, Artificial Sequence
  Description of Artificial Sequence: Synthetic oligonucleotide
  Antisense strand to SEQ ID NO: 819504
aauaaucacguauucguuu

SEQ ID NO: 819506 - RNA, 19 nt, Artificial Sequence
  Description of Artificial Sequence: Synthetic oligonucleotide
  Sense strand starting at position 2388 of SEQ ID NO: 587803
acgaauacgugauuauuag

SEQ ID NO: 819507 - RNA, 19 nt, Artificial Sequence
  Description of Artificial Sequence: Synthetic oligonucleotide
  Antisense strand to SEQ ID NO: 819506
cuaauaaucacguauucgu

SEQ ID NO: 819508 - RNA, 19 nt, Artificial Sequence
  Description of Artificial Sequence: Synthetic oligonucleotide
  Sense strand starting at position 2450 of SEQ ID NO: 587803
aaagcauguuaaguaggaa

SEQ ID NO: 819509 - RNA, 19 nt, Artificial Sequence
  Description of Artificial Sequence: Synthetic oligonucleotide
  Antisense strand to SEQ ID NO: 819508
uuccuacuuaacaugcuuu

SEQ ID NO: 819510 - RNA, 19 nt, Artificial Sequence
  Description of Artificial Sequence: Synthetic oligonucleotide
  Sense strand starting at position 2546 of SEQ ID NO: 587803
ugguauuagaaaggcuaau

SEQ ID NO: 819511 - RNA, 19 nt, Artificial Sequence
  Description of Artificial Sequence: Synthetic oligonucleotide
  Antisense strand to SEQ ID NO: 819510
auuagccuuucuaauacca

SEQ ID NO: 819512 - RNA, 19 nt, Artificial Sequence
  Description of Artificial Sequence: Synthetic oligonucleotide
  Sense strand starting at position 3023 of SEQ ID NO: 587803
agaguaaugugcuuaagga

SEQ ID NO: 819513 - RNA, 19 nt, Artificial Sequence
  Description of Artificial Sequence: Synthetic oligonucleotide
  Antisense strand to SEQ ID NO: 819512
uccuuaagcacauuacucu

SEQ ID NO: 819514 - RNA, 19 nt, Artificial Sequence
  Description of Artificial Sequence: Synthetic oligonucleotide
  Sense strand starting at position 3024 of SEQ ID NO: 587803
gaguaaugugcuuaaggag

SEQ ID NO: 819515 - RNA, 19 nt, Artificial Sequence
  Description of Artificial Sequence: Synthetic oligonucleotide
  Antisense strand to SEQ ID NO: 819514
cuccuuaagcacauuacuc

SEQ ID NO: 819516 - RNA, 19 nt, Artificial Sequence
  Description of Artificial Sequence: Synthetic oligonucleotide
  Sense strand starting at position 3184 of SEQ ID NO: 587803
ucuucuuuggacugggaca

SEQ ID NO: 819517 - RNA, 19 nt, Artificial Sequence
  Description of Artificial Sequence: Synthetic oligonucleotide
  Antisense strand to SEQ ID NO: 819516
ugucccaguccaaagaaga

SEQ ID NO: 819518 - RNA, 19 nt, Artificial Sequence
  Description of Artificial Sequence: Synthetic oligonucleotide
  Sense strand starting at position 3385 of SEQ ID NO: 587803
gucaaagggcuuuaucuga

SEQ ID NO: 819519 - RNA, 19 nt, Artificial Sequence
  Description of Artificial Sequence: Synthetic oligonucleotide
  Antisense strand to SEQ ID NO: 819518
ucagauaaagcccuuugac

SEQ ID NO: 819520 - RNA, 19 nt, Artificial Sequence
  Description of Artificial Sequence: Synthetic oligonucleotide
  Sense strand starting at position 3571 of SEQ ID NO: 587803
auguguuuagaauaguacu

SEQ ID NO: 819521 - RNA, 19 nt, Artificial Sequence
  Description of Artificial Sequence: Synthetic oligonucleotide
  Antisense strand to SEQ ID NO: 819520
aguacuauucuaaacacau

SEQ ID NO: 819522 - RNA, 19 nt, Artificial Sequence
  Description of Artificial Sequence: Synthetic oligonucleotide
  Sense strand starting at position 3895 of SEQ ID NO: 587803
cagccagaacuguacuagu

SEQ ID NO: 819523 - RNA, 19 nt, Artificial Sequence
  Description of Artificial Sequence: Synthetic oligonucleotide
  Antisense strand to SEQ ID NO: 819522
acuaguacaguucuggcug

SEQ ID NO: 819524 - RNA, 19 nt, Artificial Sequence
  Description of Artificial Sequence: Synthetic oligonucleotide
  Sense strand starting at position 184 of SEQ ID NO: 587804
gcauaaguagcacaguaua

SEQ ID NO: 819525 - RNA, 19 nt, Artificial Sequence
  Description of Artificial Sequence: Synthetic oligonucleotide
  Antisense strand to SEQ ID NO: 819524
uauacugugcuacuuaugc

SEQ ID NO: 819526 - RNA, 19 nt, Artificial Sequence
  Description of Artificial Sequence: Synthetic oligonucleotide
  Sense strand starting at position 256 of SEQ ID NO: 587804
uugucaucacagugaacau

SEQ ID NO: 819527 - RNA, 19 nt, Artificial Sequence
  Description of Artificial Sequence: Synthetic oligonucleotide
  Antisense strand to SEQ ID NO: 819526
auguucacugugaugacaa

SEQ ID NO: 819528 - RNA, 19 nt, Artificial Sequence
  Description of Artificial Sequence: Synthetic oligonucleotide
  Sense strand starting at position 319 of SEQ ID NO: 587804
cuggauucccacuggugau

SEQ ID NO: 819529 - RNA, 19 nt, Artificial Sequence
  Description of Artificial Sequence: Synthetic oligonucleotide
  Antisense strand to SEQ ID NO: 819528
aucaccagugggaauccag

SEQ ID NO: 819530 - RNA, 19 nt, Artificial Sequence
  Description of Artificial Sequence: Synthetic oligonucleotide
  Sense strand starting at position 320 of SEQ ID NO: 587804
uggauucccacuggugaua

SEQ ID NO: 819531 - RNA, 19 nt, Artificial Sequence
  Description of Artificial Sequence: Synthetic oligonucleotide
  Antisense strand to SEQ ID NO: 819530
uaucaccagugggaaucca

SEQ ID NO: 819532 - RNA, 19 nt, Artificial Sequence
  Description of Artificial Sequence: Synthetic oligonucleotide
  Sense strand starting at position 380 of SEQ ID NO: 587804
guaagaagcuaggcucaaa

SEQ ID NO: 819533 - RNA, 19 nt, Artificial Sequence
  Description of Artificial Sequence: Synthetic oligonucleotide
  Antisense strand to SEQ ID NO: 819532
uuugagccuagcuucuuac

SEQ ID NO: 819534 - RNA, 19 nt, Artificial Sequence
  Description of Artificial Sequence: Synthetic oligonucleotide
  Sense strand starting at position 546 of SEQ ID NO: 587804
uguaaagcuuuguuugaaa

SEQ ID NO: 819535 - RNA, 19 nt, Artificial Sequence
  Description of Artificial Sequence: Synthetic oligonucleotide
  Antisense strand to SEQ ID NO: 819534
uuucaaacaaagcuuuaca

SEQ ID NO: 819536 - RNA, 19 nt, Artificial Sequence
  Description of Artificial Sequence: Synthetic oligonucleotide
  Sense strand starting at position 559 of SEQ ID NO: 587804
uugaaaggcuccucaaacu

SEQ ID NO: 819537 - RNA, 19 nt, Artificial Sequence
  Description of Artificial Sequence: Synthetic oligonucleotide
  Antisense strand to SEQ ID NO: 819536
aguuugaggagccuuucaa

SEQ ID NO: 819538 - RNA, 19 nt, Artificial Sequence
  Description of Artificial Sequence: Synthetic oligonucleotide
  Sense strand starting at position 623 of SEQ ID NO: 587804
auaagaauguagcugccau

SEQ ID NO: 819539 - RNA, 19 nt, Artificial Sequence
  Description of Artificial Sequence: Synthetic oligonucleotide
  Antisense strand to SEQ ID NO: 819538
auggcagcuacauucuuau

SEQ ID NO: 819540 - RNA, 19 nt, Artificial Sequence
  Description of Artificial Sequence: Synthetic oligonucleotide
  Sense strand starting at position 666 of SEQ ID NO: 587804
aucugaauuaguggcaaga

SEQ ID NO: 819541 - RNA, 19 nt, Artificial Sequence
  Description of Artificial Sequence: Synthetic oligonucleotide
  Antisense strand to SEQ ID NO: 819540
ucuugccacuaauucagau

SEQ ID NO: 819542 - RNA, 19 nt, Artificial Sequence
  Description of Artificial Sequence: Synthetic oligonucleotide
  Sense strand starting at position 823 of SEQ ID NO: 587804
agagaaagcuuacucuuuc

SEQ ID NO: 819543 - RNA, 19 nt, Artificial Sequence
  Description of Artificial Sequence: Synthetic oligonucleotide
  Antisense strand to SEQ ID NO: 819542
gaaagaguaagcuuucucu

SEQ ID NO: 819544 - RNA, 19 nt, Artificial Sequence
  Description of Artificial Sequence: Synthetic oligonucleotide
  Sense strand starting at position 942 of SEQ ID NO: 587804
ggcauuaacucccuuuagu

SEQ ID NO: 819545 - RNA, 19 nt, Artificial Sequence
  Description of Artificial Sequence: Synthetic oligonucleotide
  Antisense strand to SEQ ID NO: 819544
acuaaagggaguuaaugcc

SEQ ID NO: 819546 - RNA, 19 nt, Artificial Sequence
  Description of Artificial Sequence: Synthetic oligonucleotide
  Sense strand starting at position 1085 of SEQ ID NO: 587804
aaguguagacaaugacaau

SEQ ID NO: 819547 - RNA, 19 nt, Artificial Sequence
  Description of Artificial Sequence: Synthetic oligonucleotide
  Antisense strand to SEQ ID NO: 819546
auugucauugucuacacuu

SEQ ID NO: 819548 - RNA, 19 nt, Artificial Sequence
  Description of Artificial Sequence: Synthetic oligonucleotide
  Sense strand starting at position 1254 of SEQ ID NO: 587804
aguuuaugaagugauguca

SEQ ID NO: 819549 - RNA, 19 nt, Artificial Sequence
  Description of Artificial Sequence: Synthetic oligonucleotide
  Antisense strand to SEQ ID NO: 819548
ugacaucacuucauaaacu

SEQ ID NO: 819550 - RNA, 19 nt, Artificial Sequence
  Description of Artificial Sequence: Synthetic oligonucleotide
  Sense strand starting at position 1448 of SEQ ID NO: 587804
ggaugcuuacuaugcauau

SEQ ID NO: 819551 - RNA, 19 nt, Artificial Sequence
  Description of Artificial Sequence: Synthetic oligonucleotide
  Antisense strand to SEQ ID NO: 819550
auaugcauaguaagcaucc

SEQ ID NO: 819552 - RNA, 19 nt, Artificial Sequence
  Description of Artificial Sequence: Synthetic oligonucleotide
  Sense strand starting at position 1608 of SEQ ID NO: 587804
uuucuugguuggcucagaa

SEQ ID NO: 819553 - RNA, 19 nt, Artificial Sequence
  Description of Artificial Sequence: Synthetic oligonucleotide
  Antisense strand to SEQ ID NO: 819552
uucugagccaaccaagaaa

SEQ ID NO: 819554 - RNA, 19 nt, Artificial Sequence
  Description of Artificial Sequence: Synthetic oligonucleotide
  Sense strand starting at position 1661 of SEQ ID NO: 587804
gcugcaauagcuccuguuu

SEQ ID NO: 819555 - RNA, 19 nt, Artificial Sequence
  Description of Artificial Sequence: Synthetic oligonucleotide
  Antisense strand to SEQ ID NO: 819554
aaacaggagcuauugcagc

SEQ ID NO: 819556 - RNA, 19 nt, Artificial Sequence
  Description of Artificial Sequence: Synthetic oligonucleotide
  Sense strand starting at position 1672 of SEQ ID NO: 587804
uccuguuuggcauauucuu

SEQ ID NO: 819557 - RNA, 19 nt, Artificial Sequence
  Description of Artificial Sequence: Synthetic oligonucleotide
  Antisense strand to SEQ ID NO: 819556
aagaauaugccaaacagga

SEQ ID NO: 819558 - RNA, 19 nt, Artificial Sequence
  Description of Artificial Sequence: Synthetic oligonucleotide
  Sense strand starting at position 1760 of SEQ ID NO: 587804
aguuaacugcuaugauauc

SEQ ID NO: 819559 - RNA, 19 nt, Artificial Sequence
  Description of Artificial Sequence: Synthetic oligonucleotide
  Antisense strand to SEQ ID NO: 819558
gauaucauagcaguuaacu

SEQ ID NO: 819560 - RNA, 19 nt, Artificial Sequence
  Description of Artificial Sequence: Synthetic oligonucleotide
  Sense strand starting at position 1804 of SEQ ID NO: 587804
acugaauguuuauuagugu

SEQ ID NO: 819561 - RNA, 19 nt, Artificial Sequence
  Description of Artificial Sequence: Synthetic oligonucleotide
  Antisense strand to SEQ ID NO: 819560
acacuaauaaacauucagu

SEQ ID NO: 819562 - RNA, 19 nt, Artificial Sequence
  Description of Artificial Sequence: Synthetic oligonucleotide
  Sense strand starting at position 2090 of SEQ ID NO: 587804
aggaaaucugcuuaagcca

SEQ ID NO: 819563 - RNA, 19 nt, Artificial Sequence
  Description of Artificial Sequence: Synthetic oligonucleotide
  Antisense strand to SEQ ID NO: 819562
uggcuuaagcagauuuccu

SEQ ID NO: 819564 - RNA, 19 nt, Artificial Sequence
  Description of Artificial Sequence: Synthetic oligonucleotide
  Sense strand starting at position 2249 of SEQ ID NO: 587804
cuaauuuagugagaauauc

SEQ ID NO: 819565 - RNA, 19 nt, Artificial Sequence
  Description of Artificial Sequence: Synthetic oligonucleotide
  Antisense strand to SEQ ID NO: 819564
gauauucucacuaaauuag

SEQ ID NO: 819566 - RNA, 19 nt, Artificial Sequence
  Description of Artificial Sequence: Synthetic oligonucleotide
  Sense strand starting at position 2393 of SEQ ID NO: 587804
augaguagugaauguagua

SEQ ID NO: 819567 - RNA, 19 nt, Artificial Sequence
  Description of Artificial Sequence: Synthetic oligonucleotide
  Antisense strand to SEQ ID NO: 819566
uacuacauucacuacucau

SEQ ID NO: 819568 - RNA, 19 nt, Artificial Sequence
  Description of Artificial Sequence: Synthetic oligonucleotide
  Sense strand starting at position 2688 of SEQ ID NO: 587804
ccguaauguaugugaauuu

SEQ ID NO: 819569 - RNA, 19 nt, Artificial Sequence
  Description of Artificial Sequence: Synthetic oligonucleotide
  Antisense strand to SEQ ID NO: 819568
aaauucacauacauuacgg

SEQ ID NO: 819570 - RNA, 19 nt, Artificial Sequence
  Description of Artificial Sequence: Synthetic oligonucleotide
  Sense strand starting at position 2759 of SEQ ID NO: 587804
auaaucacgccuuaagacu

SEQ ID NO: 819571 - RNA, 19 nt, Artificial Sequence
  Description of Artificial Sequence: Synthetic oligonucleotide
  Antisense strand to SEQ ID NO: 819570
agucuuaaggcgugauuau

SEQ ID NO: 819572 - RNA, 19 nt, Artificial Sequence
  Description of Artificial Sequence: Synthetic oligonucleotide
  Sense strand starting at position 2892 of SEQ ID NO: 587804
aguuucggugcuuagaaua

SEQ ID NO: 819573 - RNA, 19 nt, Artificial Sequence
  Description of Artificial Sequence: Synthetic oligonucleotide
  Antisense strand to SEQ ID NO: 819572
uauucuaagcaccgaaacu

SEQ ID NO: 819574 - RNA, 19 nt, Artificial Sequence
  Description of Artificial Sequence: Synthetic oligonucleotide
  Sense strand starting at position 3003 of SEQ ID NO: 587804
gggaauaaauuagaacaua

SEQ ID NO: 819575 - RNA, 19 nt, Artificial Sequence
  Description of Artificial Sequence: Synthetic oligonucleotide
  Antisense strand to SEQ ID NO: 819574
uauguucuaauuuauuccc

SEQ ID NO: 819576 - RNA, 19 nt, Artificial Sequence
  Description of Artificial Sequence: Synthetic oligonucleotide
  Sense strand starting at position 3053 of SEQ ID NO: 587804
acugaacaacugugauagu

SEQ ID NO: 819577 - RNA, 19 nt, Artificial Sequence
  Description of Artificial Sequence: Synthetic oligonucleotide
  Antisense strand to SEQ ID NO: 819576
acuaucacaguuguucagu

SEQ ID NO: 819578 - RNA, 19 nt, Artificial Sequence
  Description of Artificial Sequence: Synthetic oligonucleotide
  Sense strand starting at position 3062 of SEQ ID NO: 587804
cugugauaguuauuaagag

SEQ ID NO: 819579 - RNA, 19 nt, Artificial Sequence
  Description of Artificial Sequence: Synthetic oligonucleotide
  Antisense strand to SEQ ID NO: 819578
cucuuaauaacuaucacag

SEQ ID NO: 819580 - RNA, 19 nt, Artificial Sequence
  Description of Artificial Sequence: Synthetic oligonucleotide
  Sense strand starting at position 3068 of SEQ ID NO: 587804
uaguuauuaagagguagga

SEQ ID NO: 819581 - RNA, 19 nt, Artificial Sequence
  Description of Artificial Sequence: Synthetic oligonucleotide
  Antisense strand to SEQ ID NO: 819580
uccuaccucuuaauaacua

SEQ ID NO: 819582 - RNA, 19 nt, Artificial Sequence
  Description of Artificial Sequence: Synthetic oligonucleotide
  Sense strand starting at position 3100 of SEQ ID NO: 587804
uuuaauuacugaccacgua

SEQ ID NO: 819583 - RNA, 19 nt, Artificial Sequence
  Description of Artificial Sequence: Synthetic oligonucleotide
  Antisense strand to SEQ ID NO: 819582
uacguggucaguaauuaaa

SEQ ID NO: 819584 - RNA, 19 nt, Artificial Sequence
  Description of Artificial Sequence: Synthetic oligonucleotide
  Sense strand starting at position 3193 of SEQ ID NO: 587804
acuguaguuccacagaaau

SEQ ID NO: 819585 - RNA, 19 nt, Artificial Sequence
  Description of Artificial Sequence: Synthetic oligonucleotide
  Antisense strand to SEQ ID NO: 819584
auuucuguggaacuacagu

SEQ ID NO: 819586 - RNA, 19 nt, Artificial Sequence
  Description of Artificial Sequence: Synthetic oligonucleotide
  Sense strand starting at position 3338 of SEQ ID NO: 587804
gaaagauugcuggauguuc

SEQ ID NO: 819587 - RNA, 19 nt, Artificial Sequence
  Description of Artificial Sequence: Synthetic oligonucleotide
  Antisense strand to SEQ ID NO: 819586
gaacauccagcaaucuuuc

SEQ ID NO: 819588 - RNA, 19 nt, Artificial Sequence
  Description of Artificial Sequence: Synthetic oligonucleotide
  Sense strand starting at position 3340 of SEQ ID NO: 587804
aagauugcuggauguucua

SEQ ID NO: 819589 - RNA, 19 nt, Artificial Sequence
  Description of Artificial Sequence: Synthetic oligonucleotide
  Antisense strand to SEQ ID NO: 819588
uagaacauccagcaaucuu

SEQ ID NO: 819590 - RNA, 19 nt, Artificial Sequence
  Description of Artificial Sequence: Synthetic oligonucleotide
  Sense strand starting at position 3347 of SEQ ID NO: 587804
cuggauguucuacggaaug

SEQ ID NO: 819591 - RNA, 19 nt, Artificial Sequence
  Description of Artificial Sequence: Synthetic oligonucleotide
  Antisense strand to SEQ ID NO: 819590
cauuccguagaacauccag

SEQ ID NO: 819592 - RNA, 19 nt, Artificial Sequence
  Description of Artificial Sequence: Synthetic oligonucleotide
  Sense strand starting at position 3349 of SEQ ID NO: 587804
ggauguucuacggaaugcu

SEQ ID NO: 819593 - RNA, 19 nt, Artificial Sequence
  Description of Artificial Sequence: Synthetic oligonucleotide
  Antisense strand to SEQ ID NO: 819592
agcauuccguagaacaucc

SEQ ID NO: 819594 - RNA, 19 nt, Artificial Sequence
  Description of Artificial Sequence: Synthetic oligonucleotide
  Sense strand starting at position 3352 of SEQ ID NO: 587804
uguucuacggaaugcuaga

SEQ ID NO: 819595 - RNA, 19 nt, Artificial Sequence
  Description of Artificial Sequence: Synthetic oligonucleotide
  Antisense strand to SEQ ID NO: 819594
ucuagcauuccguagaaca

SEQ ID NO: 819596 - RNA, 19 nt, Artificial Sequence
  Description of Artificial Sequence: Synthetic oligonucleotide
  Sense strand starting at position 3380 of SEQ ID NO: 587804
guauacgcuacugaguaau

SEQ ID NO: 819597 - RNA, 19 nt, Artificial Sequence
  Description of Artificial Sequence: Synthetic oligonucleotide
  Antisense strand to SEQ ID NO: 819596
auuacucaguagcguauac

SEQ ID NO: 819598 - RNA, 19 nt, Artificial Sequence
  Description of Artificial Sequence: Synthetic oligonucleotide
  Sense strand starting at position 3459 of SEQ ID NO: 587804
uguagaaaucaguaaugca

SEQ ID NO: 819599 - RNA, 19 nt, Artificial Sequence
  Description of Artificial Sequence: Synthetic oligonucleotide
  Antisense strand to SEQ ID NO: 819598
ugcauuacugauuucuaca

SEQ ID NO: 819600 - RNA, 19 nt, Artificial Sequence
  Description of Artificial Sequence: Synthetic oligonucleotide
  Sense strand starting at position 3676 of SEQ ID NO: 587804
caggguauauacuuuagau

SEQ ID NO: 819601 - RNA, 19 nt, Artificial Sequence
  Description of Artificial Sequence: Synthetic oligonucleotide
  Antisense strand to SEQ ID NO: 819600
aucuaaaguauauacccug

SEQ ID NO: 819602 - RNA, 19 nt, Artificial Sequence
  Description of Artificial Sequence: Synthetic oligonucleotide
  Sense strand starting at position 3883 of SEQ ID NO: 587804
gggccuguaauccaacagu

SEQ ID NO: 819603 - RNA, 19 nt, Artificial Sequence
  Description of Artificial Sequence: Synthetic oligonucleotide
  Antisense strand to SEQ ID NO: 819602
acuguuggauuacaggccc

SEQ ID NO: 819604 - RNA, 19 nt, Artificial Sequence
  Description of Artificial Sequence: Synthetic oligonucleotide
  Sense strand starting at position 5 of SEQ ID NO: 587805
guuguagaauucccagaau

SEQ ID NO: 819605 - RNA, 19 nt, Artificial Sequence
  Description of Artificial Sequence: Synthetic oligonucleotide
  Antisense strand to SEQ ID NO: 819604
auucugggaauucuacaac

SEQ ID NO: 819606 - RNA, 19 nt, Artificial Sequence
  Description of Artificial Sequence: Synthetic oligonucleotide
  Sense strand starting at position 131 of SEQ ID NO: 587805
acuaaagguucuuagaaug

SEQ ID NO: 819607 - RNA, 19 nt, Artificial Sequence
  Description of Artificial Sequence: Synthetic oligonucleotide
  Antisense strand to SEQ ID NO: 819606
cauucuaagaaccuuuagu

SEQ ID NO: 819608 - RNA, 19 nt, Artificial Sequence
  Description of Artificial Sequence: Synthetic oligonucleotide
  Sense strand starting at position 136 of SEQ ID NO: 587805
agguucuuagaaugaucuu

SEQ ID NO: 819609 - RNA, 19 nt, Artificial Sequence
  Description of Artificial Sequence: Synthetic oligonucleotide
  Antisense strand to SEQ ID NO: 819608
aagaucauucuaagaaccu

SEQ ID NO: 819610 - RNA, 19 nt, Artificial Sequence
  Description of Artificial Sequence: Synthetic oligonucleotide
  Sense strand starting at position 145 of SEQ ID NO: 587805
gaaugaucuuaaguuacag

SEQ ID NO: 819611 - RNA, 19 nt, Artificial Sequence
  Description of Artificial Sequence: Synthetic oligonucleotide
  Antisense strand to SEQ ID NO: 819610
cuguaacuuaagaucauuc

SEQ ID NO: 819612 - RNA, 19 nt, Artificial Sequence
  Description of Artificial Sequence: Synthetic oligonucleotide
  Sense strand starting at position 227 of SEQ ID NO: 587805
ucaaucucauugggaaaua

SEQ ID NO: 819613 - RNA, 19 nt, Artificial Sequence
  Description of Artificial Sequence: Synthetic oligonucleotide
  Antisense strand to SEQ ID NO: 819612
uauuucccaaugagauuga

SEQ ID NO: 819614 - RNA, 19 nt, Artificial Sequence
  Description of Artificial Sequence: Synthetic oligonucleotide
  Sense strand starting at position 237 of SEQ ID NO: 587805
ugggaaauaucacacagua

SEQ ID NO: 819615 - RNA, 19 nt, Artificial Sequence
  Description of Artificial Sequence: Synthetic oligonucleotide
  Antisense strand to SEQ ID NO: 819614
uacugugugauauuuccca

SEQ ID NO: 819616 - RNA, 19 nt, Artificial Sequence
  Description of Artificial Sequence: Synthetic oligonucleotide
  Sense strand starting at position 256 of SEQ ID NO: 587805
cagcuagugcuuugcccaa

SEQ ID NO: 819617 - RNA, 19 nt, Artificial Sequence
  Description of Artificial Sequence: Synthetic oligonucleotide
  Antisense strand to SEQ ID NO: 819616
uugggcaaagcacuagcug

SEQ ID NO: 819618 - RNA, 19 nt, Artificial Sequence
  Description of Artificial Sequence: Synthetic oligonucleotide
  Sense strand starting at position 328 of SEQ ID NO: 587805
aaaugcagguucgaucauu

SEQ ID NO: 819619 - RNA, 19 nt, Artificial Sequence
  Description of Artificial Sequence: Synthetic oligonucleotide
  Antisense strand to SEQ ID NO: 819618
aaugaucgaaccugcauuu

SEQ ID NO: 819620 - RNA, 19 nt, Artificial Sequence
  Description of Artificial Sequence: Synthetic oligonucleotide
  Sense strand starting at position 551 of SEQ ID NO: 587805
agcuguuugaggcauauga

SEQ ID NO: 819621 - RNA, 19 nt, Artificial Sequence
  Description of Artificial Sequence: Synthetic oligonucleotide
  Antisense strand to SEQ ID NO: 819620
ucauaugccucaaacagcu

SEQ ID NO: 819622 - RNA, 19 nt, Artificial Sequence
  Description of Artificial Sequence: Synthetic oligonucleotide
  Sense strand starting at position 553 of SEQ ID NO: 587805
cuguuugaggcauaugaaa

SEQ ID NO: 819623 - RNA, 19 nt, Artificial Sequence
  Description of Artificial Sequence: Synthetic oligonucleotide
  Antisense strand to SEQ ID NO: 819622
uuucauaugccucaaacag

SEQ ID NO: 819624 - RNA, 19 nt, Artificial Sequence
  Description of Artificial Sequence: Synthetic oligonucleotide
  Sense strand starting at position 555 of SEQ ID NO: 587805
guuugaggcauaugaaaga

SEQ ID NO: 819625 - RNA, 19 nt, Artificial Sequence
  Description of Artificial Sequence: Synthetic oligonucleotide
  Antisense strand to SEQ ID NO: 819624
ucuuucauaugccucaaac

SEQ ID NO: 819626 - RNA, 19 nt, Artificial Sequence
  Description of Artificial Sequence: Synthetic oligonucleotide
  Sense strand starting at position 623 of SEQ ID NO: 587805
caggcuuagugccaucaua

SEQ ID NO: 819627 - RNA, 19 nt, Artificial Sequence
  Description of Artificial Sequence: Synthetic oligonucleotide
  Antisense strand to SEQ ID NO: 819626
uaugauggcacuaagccug

SEQ ID NO: 819628 - RNA, 19 nt, Artificial Sequence
  Description of Artificial Sequence: Synthetic oligonucleotide
  Sense strand starting at position 679 of SEQ ID NO: 587805
caaauaugguguccacaga

SEQ ID NO: 819629 - RNA, 19 nt, Artificial Sequence
  Description of Artificial Sequence: Synthetic oligonucleotide
  Antisense strand to SEQ ID NO: 819628
ucuguggacaccauauuug

SEQ ID NO: 819630 - RNA, 19 nt, Artificial Sequence
  Description of Artificial Sequence: Synthetic oligonucleotide
  Sense strand starting at position 689 of SEQ ID NO: 587805
guccacagacagugacaua

SEQ ID NO: 819631 - RNA, 19 nt, Artificial Sequence
  Description of Artificial Sequence: Synthetic oligonucleotide
  Antisense strand to SEQ ID NO: 819630
uaugucacugucuguggac

SEQ ID NO: 819632 - RNA, 19 nt, Artificial Sequence
  Description of Artificial Sequence: Synthetic oligonucleotide
  Sense strand starting at position 831 of SEQ ID NO: 587805
uugagauacuugcaugagu

SEQ ID NO: 819633 - RNA, 19 nt, Artificial Sequence
  Description of Artificial Sequence: Synthetic oligonucleotide
  Antisense strand to SEQ ID NO: 819632
acucaugcaaguaucucaa

SEQ ID NO: 819634 - RNA, 19 nt, Artificial Sequence
  Description of Artificial Sequence: Synthetic oligonucleotide
  Sense strand starting at position 833 of SEQ ID NO: 587805
gagauacuugcaugaguug

SEQ ID NO: 819635 - RNA, 19 nt, Artificial Sequence
  Description of Artificial Sequence: Synthetic oligonucleotide
  Antisense strand to SEQ ID NO: 819634
caacucaugcaaguaucuc

SEQ ID NO: 819636 - RNA, 19 nt, Artificial Sequence
  Description of Artificial Sequence: Synthetic oligonucleotide
  Sense strand starting at position 838 of SEQ ID NO: 587805
acuugcaugaguugugaau

SEQ ID NO: 819637 - RNA, 19 nt, Artificial Sequence
  Description of Artificial Sequence: Synthetic oligonucleotide
  Antisense strand to SEQ ID NO: 819636
auucacaacucaugcaagu

SEQ ID NO: 819638 - RNA, 19 nt, Artificial Sequence
  Description of Artificial Sequence: Synthetic oligonucleotide
  Sense strand starting at position 907 of SEQ ID NO: 587805
aguuaaauggcccauugca

SEQ ID NO: 819639 - RNA, 19 nt, Artificial Sequence
  Description of Artificial Sequence: Synthetic oligonucleotide
  Antisense strand to SEQ ID NO: 819638
ugcaaugggccauuuaacu

SEQ ID NO: 819640 - RNA, 19 nt, Artificial Sequence
  Description of Artificial Sequence: Synthetic oligonucleotide
  Sense strand starting at position 990 of SEQ ID NO: 587805
gguuacagacagugaaaua

SEQ ID NO: 819641 - RNA, 19 nt, Artificial Sequence
  Description of Artificial Sequence: Synthetic oligonucleotide
  Antisense strand to SEQ ID NO: 819640
uauuucacugucuguaacc

SEQ ID NO: 819642 - RNA, 19 nt, Artificial Sequence
  Description of Artificial Sequence: Synthetic oligonucleotide
  Sense strand starting at position 1019 of SEQ ID NO: 587805
aaagccaguguauguuaua

SEQ ID NO: 819643 - RNA, 19 nt, Artificial Sequence
  Description of Artificial Sequence: Synthetic oligonucleotide
  Antisense strand to SEQ ID NO: 819642
uauaacauacacuggcuuu

SEQ ID NO: 819644 - RNA, 19 nt, Artificial Sequence
  Description of Artificial Sequence: Synthetic oligonucleotide
  Sense strand starting at position 1020 of SEQ ID NO: 587805
aagccaguguauguuauaa

SEQ ID NO: 819645 - RNA, 19 nt, Artificial Sequence
  Description of Artificial Sequence: Synthetic oligonucleotide
  Antisense strand to SEQ ID NO: 819644
uuauaacauacacuggcuu

SEQ ID NO: 819646 - RNA, 19 nt, Artificial Sequence
  Description of Artificial Sequence: Synthetic oligonucleotide
  Sense strand starting at position 1022 of SEQ ID NO: 587805
gccaguguauguuauaaac

SEQ ID NO: 819647 - RNA, 19 nt, Artificial Sequence
  Description of Artificial Sequence: Synthetic oligonucleotide
  Antisense strand to SEQ ID NO: 819646
guuuauaacauacacuggc

SEQ ID NO: 819648 - RNA, 19 nt, Artificial Sequence
  Description of Artificial Sequence: Synthetic oligonucleotide
  Sense strand starting at position 1060 of SEQ ID NO: 587805
cuguauguugcagucaguu

SEQ ID NO: 819649 - RNA, 19 nt, Artificial Sequence
  Description of Artificial Sequence: Synthetic oligonucleotide
  Antisense strand to SEQ ID NO: 819648
aacugacugcaacauacag

SEQ ID NO: 819650 - RNA, 19 nt, Artificial Sequence
  Description of Artificial Sequence: Synthetic oligonucleotide
  Sense strand starting at position 1170 of SEQ ID NO: 587805
guauauacacaugguaauu

SEQ ID NO: 819651 - RNA, 19 nt, Artificial Sequence
  Description of Artificial Sequence: Synthetic oligonucleotide
  Antisense strand to SEQ ID NO: 819650
aauuaccauguguauauac

SEQ ID NO: 819652 - RNA, 19 nt, Artificial Sequence
  Description of Artificial Sequence: Synthetic oligonucleotide
  Sense strand starting at position 1260 of SEQ ID NO: 587805
aauggugacucuccagauu

SEQ ID NO: 819653 - RNA, 19 nt, Artificial Sequence
  Description of Artificial Sequence: Synthetic oligonucleotide
  Antisense strand to SEQ ID NO: 819652
aaucuggagagucaccauu

SEQ ID NO: 819654 - RNA, 19 nt, Artificial Sequence
  Description of Artificial Sequence: Synthetic oligonucleotide
  Sense strand starting at position 1333 of SEQ ID NO: 587805
cggucacaguguuaaauac

SEQ ID NO: 819655 - RNA, 19 nt, Artificial Sequence
  Description of Artificial Sequence: Synthetic oligonucleotide
  Antisense strand to SEQ ID NO: 819654
guauuuaacacugugaccg

SEQ ID NO: 819656 - RNA, 19 nt, Artificial Sequence
  Description of Artificial Sequence: Synthetic oligonucleotide
  Sense strand starting at position 1556 of SEQ ID NO: 587805
gccaguaucaggugguuaa

SEQ ID NO: 819657 - RNA, 19 nt, Artificial Sequence
  Description of Artificial Sequence: Synthetic oligonucleotide
  Antisense strand to SEQ ID NO: 819656
uuaaccaccugauacuggc

SEQ ID NO: 819658 - RNA, 19 nt, Artificial Sequence
  Description of Artificial Sequence: Synthetic oligonucleotide
  Sense strand starting at position 1557 of SEQ ID NO: 587805
ccaguaucaggugguuaaa

SEQ ID NO: 819659 - RNA, 19 nt, Artificial Sequence
  Description of Artificial Sequence: Synthetic oligonucleotide
  Antisense strand to SEQ ID NO: 819658
uuuaaccaccugauacugg

SEQ ID NO: 819660 - RNA, 19 nt, Artificial Sequence
  Description of Artificial Sequence: Synthetic oligonucleotide
  Sense strand starting at position 1645 of SEQ ID NO: 587805
gggucauuacugcaaacua

SEQ ID NO: 819661 - RNA, 19 nt, Artificial Sequence
  Description of Artificial Sequence: Synthetic oligonucleotide
  Antisense strand to SEQ ID NO: 819660
uaguuugcaguaaugaccc

SEQ ID NO: 819662 - RNA, 19 nt, Artificial Sequence
  Description of Artificial Sequence: Synthetic oligonucleotide
  Sense strand starting at position 1665 of SEQ ID NO: 587805
cagcgucguccucaacauu

SEQ ID NO: 819663 - RNA, 19 nt, Artificial Sequence
  Description of Artificial Sequence: Synthetic oligonucleotide
  Antisense strand to SEQ ID NO: 819662
aauguugaggacgacgcug

SEQ ID NO: 819664 - RNA, 19 nt, Artificial Sequence
  Description of Artificial Sequence: Synthetic oligonucleotide
  Sense strand starting at position 1668 of SEQ ID NO: 587805
cgucguccucaacauuaaa

SEQ ID NO: 819665 - RNA, 19 nt, Artificial Sequence
  Description of Artificial Sequence: Synthetic oligonucleotide
  Antisense strand to SEQ ID NO: 819664
uuuaauguugaggacgacg

SEQ ID NO: 819666 - RNA, 19 nt, Artificial Sequence
  Description of Artificial Sequence: Synthetic oligonucleotide
  Sense strand starting at position 1692 of SEQ ID NO: 587805
gugaucaucuuauaagaaa

SEQ ID NO: 819667 - RNA, 19 nt, Artificial Sequence
  Description of Artificial Sequence: Synthetic oligonucleotide
  Antisense strand to SEQ ID NO: 819666
uuucuuauaagaugaucac

SEQ ID NO: 819668 - RNA, 19 nt, Artificial Sequence
  Description of Artificial Sequence: Synthetic oligonucleotide
  Sense strand starting at position 1808 of SEQ ID NO: 587805
agcaaagcccuuugguaaa

SEQ ID NO: 819669 - RNA, 19 nt, Artificial Sequence
  Description of Artificial Sequence: Synthetic oligonucleotide
  Antisense strand to SEQ ID NO: 819668
uuuaccaaagggcuuugcu

SEQ ID NO: 819670 - RNA, 19 nt, Artificial Sequence
  Description of Artificial Sequence: Synthetic oligonucleotide
  Sense strand starting at position 1844 of SEQ ID NO: 587805
ggaccuacugcgucguuua

SEQ ID NO: 819671 - RNA, 19 nt, Artificial Sequence
  Description of Artificial Sequence: Synthetic oligonucleotide
  Antisense strand to SEQ ID NO: 819670
uaaacgacgcaguaggucc

SEQ ID NO: 819672 - RNA, 19 nt, Artificial Sequence
  Description of Artificial Sequence: Synthetic oligonucleotide
  Sense strand starting at position 2084 of SEQ ID NO: 587805
gcaaguggcccucggagaa

SEQ ID NO: 819673 - RNA, 19 nt, Artificial Sequence
  Description of Artificial Sequence: Synthetic oligonucleotide
  Antisense strand to SEQ ID NO: 819672
uucuccgagggccacuugc

SEQ ID NO: 819674 - RNA, 19 nt, Artificial Sequence
  Description of Artificial Sequence: Synthetic oligonucleotide
  Sense strand starting at position 3873 of SEQ ID NO: 587805
uugccacuuccuuguguau

SEQ ID NO: 819675 - RNA, 19 nt, Artificial Sequence
  Description of Artificial Sequence: Synthetic oligonucleotide
  Antisense strand to SEQ ID NO: 819674
auacacaaggaaguggcaa

SEQ ID NO: 819676 - RNA, 19 nt, Artificial Sequence
  Description of Artificial Sequence: Synthetic oligonucleotide
  Sense strand starting at position 3875 of SEQ ID NO: 587805
gccacuuccuuguguauuu

SEQ ID NO: 819677 - RNA, 19 nt, Artificial Sequence
  Description of Artificial Sequence: Synthetic oligonucleotide
  Antisense strand to SEQ ID NO: 819676
aaauacacaaggaaguggc

SEQ ID NO: 819678 - RNA, 19 nt, Artificial Sequence
  Description of Artificial Sequence: Synthetic oligonucleotide
  Sense strand starting at position 3927 of SEQ ID NO: 587805
gagagaucccaucgucuuc

SEQ ID NO: 819679 - RNA, 19 nt, Artificial Sequence
  Description of Artificial Sequence: Synthetic oligonucleotide
  Antisense strand to SEQ ID NO: 819678
gaagacgaugggaucucuc

SEQ ID NO: 819680 - RNA, 19 nt, Artificial Sequence
  Description of Artificial Sequence: Synthetic oligonucleotide
  Sense strand starting at position 3938 of SEQ ID NO: 587805
ucgucuucucucuggaagu

SEQ ID NO: 819681 - RNA, 19 nt, Artificial Sequence
  Description of Artificial Sequence: Synthetic oligonucleotide
  Antisense strand to SEQ ID NO: 819680
acuuccagagagaagacga

SEQ ID NO: 819682 - RNA, 19 nt, Artificial Sequence
  Description of Artificial Sequence: Synthetic oligonucleotide
  Sense strand starting at position 3940 of SEQ ID NO: 587805
gucuucucucuggaaguuu

SEQ ID NO: 819683 - RNA, 19 nt, Artificial Sequence
  Description of Artificial Sequence: Synthetic oligonucleotide
  Antisense strand to SEQ ID NO: 819682
aaacuuccagagagaagac

SEQ ID NO: 819684 - RNA, 19 nt, Artificial Sequence
  Description of Artificial Sequence: Synthetic oligonucleotide
  Sense strand starting at position 21 of SEQ ID NO: 587806
cgucguccucaacauuaaa

SEQ ID NO: 819685 - RNA, 19 nt, Artificial Sequence
  Description of Artificial Sequence: Synthetic oligonucleotide
  Antisense strand to SEQ ID NO: 819684
uuuaauguugaggacgacg

SEQ ID NO: 819686 - RNA, 19 nt, Artificial Sequence
  Description of Artificial Sequence: Synthetic oligonucleotide
  Sense strand starting at position 45 of SEQ ID NO: 587806
gugaucaucuuauaagaaa

SEQ ID NO: 819687 - RNA, 19 nt, Artificial Sequence
  Description of Artificial Sequence: Synthetic oligonucleotide
  Antisense strand to SEQ ID NO: 819686
uuucuuauaagaugaucac

SEQ ID NO: 819688 - RNA, 19 nt, Artificial Sequence
  Description of Artificial Sequence: Synthetic oligonucleotide
  Sense strand starting at position 161 of SEQ ID NO: 587806
agcaaagcccuuugguaaa

SEQ ID NO: 819689 - RNA, 19 nt, Artificial Sequence
  Description of Artificial Sequence: Synthetic oligonucleotide
  Antisense strand to SEQ ID NO: 819688
uuuaccaaagggcuuugcu

SEQ ID NO: 819690 - RNA, 19 nt, Artificial Sequence
  Description of Artificial Sequence: Synthetic oligonucleotide
  Sense strand starting at position 197 of SEQ ID NO: 587806
ggaccuacugcgucguuua

SEQ ID NO: 819691 - RNA, 19 nt, Artificial Sequence
  Description of Artificial Sequence: Synthetic oligonucleotide
  Antisense strand to SEQ ID NO: 819690
uaaacgacgcaguaggucc

SEQ ID NO: 819692 - RNA, 19 nt, Artificial Sequence
  Description of Artificial Sequence: Synthetic oligonucleotide
  Sense strand starting at position 437 of SEQ ID NO: 587806
gcaaguggcccucggagaa

SEQ ID NO: 819693 - RNA, 19 nt, Artificial Sequence
  Description of Artificial Sequence: Synthetic oligonucleotide
  Antisense strand to SEQ ID NO: 819692
uucuccgagggccacuugc

SEQ ID NO: 819694 - RNA, 19 nt, Artificial Sequence
  Description of Artificial Sequence: Synthetic oligonucleotide
  Sense strand starting at position 2280 of SEQ ID NO: 587806
gagagaucccaucgucuuc

SEQ ID NO: 819695 - RNA, 19 nt, Artificial Sequence
  Description of Artificial Sequence: Synthetic oligonucleotide
  Antisense strand to SEQ ID NO: 819694
gaagacgaugggaucucuc

SEQ ID NO: 819696 - RNA, 19 nt, Artificial Sequence
  Description of Artificial Sequence: Synthetic oligonucleotide
  Sense strand starting at position 2291 of SEQ ID NO: 587806
ucgucuucucucuggaagu

SEQ ID NO: 819697 - RNA, 19 nt, Artificial Sequence
  Description of Artificial Sequence: Synthetic oligonucleotide
  Antisense strand to SEQ ID NO: 819696
acuuccagagagaagacga

SEQ ID NO: 819698 - RNA, 19 nt, Artificial Sequence
  Description of Artificial Sequence: Synthetic oligonucleotide
  Sense strand starting at position 2293 of SEQ ID NO: 587806
gucuucucucuggaaguuu

SEQ ID NO: 819699 - RNA, 19 nt, Artificial Sequence
  Description of Artificial Sequence: Synthetic oligonucleotide
  Antisense strand to SEQ ID NO: 819698
aaacuuccagagagaagac

SEQ ID NO: 819700 - RNA, 19 nt, Artificial Sequence
  Description of Artificial Sequence: Synthetic oligonucleotide
  Sense strand starting at position 2354 of SEQ ID NO: 587806
uuuguuuguuucccugauu

SEQ ID NO: 819701 - RNA, 19 nt, Artificial Sequence
  Description of Artificial Sequence: Synthetic oligonucleotide
  Antisense strand to SEQ ID NO: 819700
aaucagggaaacaaacaaa

SEQ ID NO: 819702 - RNA, 19 nt, Artificial Sequence
  Description of Artificial Sequence: Synthetic oligonucleotide
  Sense strand starting at position 2355 of SEQ ID NO: 587806
uuguuuguuucccugauuu

SEQ ID NO: 819703 - RNA, 19 nt, Artificial Sequence
  Description of Artificial Sequence: Synthetic oligonucleotide
  Antisense strand to SEQ ID NO: 819702
aaaucagggaaacaaacaa

SEQ ID NO: 819704 - RNA, 19 nt, Artificial Sequence
  Description of Artificial Sequence: Synthetic oligonucleotide
  Sense strand starting at position 2494 of SEQ ID NO: 587806
gggcaaagccacugucaau

SEQ ID NO: 819705 - RNA, 19 nt, Artificial Sequence
  Description of Artificial Sequence: Synthetic oligonucleotide
  Antisense strand to SEQ ID NO: 819704
auugacaguggcuuugccc

SEQ ID NO: 819706 - RNA, 19 nt, Artificial Sequence
  Description of Artificial Sequence: Synthetic oligonucleotide
  Sense strand starting at position 2563 of SEQ ID NO: 587806
augcuugcaguuugaaaga

SEQ ID NO: 819707 - RNA, 19 nt, Artificial Sequence
  Description of Artificial Sequence: Synthetic oligonucleotide
  Antisense strand to SEQ ID NO: 819706
ucuuucaaacugcaagcau

SEQ ID NO: 819708 - RNA, 19 nt, Artificial Sequence
  Description of Artificial Sequence: Synthetic oligonucleotide
  Sense strand starting at position 2652 of SEQ ID NO: 587806
gggcauggguguccuuuau

SEQ ID NO: 819709 - RNA, 19 nt, Artificial Sequence
  Description of Artificial Sequence: Synthetic oligonucleotide
  Antisense strand to SEQ ID NO: 819708
auaaaggacacccaugccc

SEQ ID NO: 819710 - RNA, 19 nt, Artificial Sequence
  Description of Artificial Sequence: Synthetic oligonucleotide
  Sense strand starting at position 2742 of SEQ ID NO: 587806
gggucuaugcuccauggca

SEQ ID NO: 819711 - RNA, 19 nt, Artificial Sequence
  Description of Artificial Sequence: Synthetic oligonucleotide
  Antisense strand to SEQ ID NO: 819710
ugccauggagcauagaccc

SEQ ID NO: 819712 - RNA, 19 nt, Artificial Sequence
  Description of Artificial Sequence: Synthetic oligonucleotide
  Sense strand starting at position 2744 of SEQ ID NO: 587806
gucuaugcuccauggcaga

SEQ ID NO: 819713 - RNA, 19 nt, Artificial Sequence
  Description of Artificial Sequence: Synthetic oligonucleotide
  Antisense strand to SEQ ID NO: 819712
ucugccauggagcauagac

SEQ ID NO: 819714 - RNA, 19 nt, Artificial Sequence
  Description of Artificial Sequence: Synthetic oligonucleotide
  Sense strand starting at position 2770 of SEQ ID NO: 587806
guuugacucuugcucaagu

SEQ ID NO: 819715 - RNA, 19 nt, Artificial Sequence
  Description of Artificial Sequence: Synthetic oligonucleotide
  Antisense strand to SEQ ID NO: 819714
acuugagcaagagucaaac

SEQ ID NO: 819716 - RNA, 19 nt, Artificial Sequence
  Description of Artificial Sequence: Synthetic oligonucleotide
  Sense strand starting at position 2771 of SEQ ID NO: 587806
uuugacucuugcucaaguu

SEQ ID NO: 819717 - RNA, 19 nt, Artificial Sequence
  Description of Artificial Sequence: Synthetic oligonucleotide
  Antisense strand to SEQ ID NO: 819716
aacuugagcaagagucaaa

SEQ ID NO: 819718 - RNA, 19 nt, Artificial Sequence
  Description of Artificial Sequence: Synthetic oligonucleotide
  Sense strand starting at position 2826 of SEQ ID NO: 587806
ggaaacaagugaguccauu

SEQ ID NO: 819719 - RNA, 19 nt, Artificial Sequence
  Description of Artificial Sequence: Synthetic oligonucleotide
  Antisense strand to SEQ ID NO: 819718
aauggacucacuuguuucc

SEQ ID NO: 819720 - RNA, 19 nt, Artificial Sequence
  Description of Artificial Sequence: Synthetic oligonucleotide
  Sense strand starting at position 2832 of SEQ ID NO: 587806
aagugaguccauuguguga

SEQ ID NO: 819721 - RNA, 19 nt, Artificial Sequence
  Description of Artificial Sequence: Synthetic oligonucleotide
  Antisense strand to SEQ ID NO: 819720
ucacacaauggacucacuu

SEQ ID NO: 819722 - RNA, 19 nt, Artificial Sequence
  Description of Artificial Sequence: Synthetic oligonucleotide
  Sense strand starting at position 2845 of SEQ ID NO: 587806
gugugagugcucgccugga

SEQ ID NO: 819723 - RNA, 19 nt, Artificial Sequence
  Description of Artificial Sequence: Synthetic oligonucleotide
  Antisense strand to SEQ ID NO: 819722
uccaggcgagcacucacac

SEQ ID NO: 819724 - RNA, 19 nt, Artificial Sequence
  Description of Artificial Sequence: Synthetic oligonucleotide
  Sense strand starting at position 2950 of SEQ ID NO: 587806
aguggauucugaaggugag

SEQ ID NO: 819725 - RNA, 19 nt, Artificial Sequence
  Description of Artificial Sequence: Synthetic oligonucleotide
  Antisense strand to SEQ ID NO: 819724
cucaccuucagaauccacu

SEQ ID NO: 819726 - RNA, 19 nt, Artificial Sequence
  Description of Artificial Sequence: Synthetic oligonucleotide
  Sense strand starting at position 3013 of SEQ ID NO: 587806
caucgaucgccugaacaaa

SEQ ID NO: 819727 - RNA, 19 nt, Artificial Sequence
  Description of Artificial Sequence: Synthetic oligonucleotide
  Antisense strand to SEQ ID NO: 819726
uuuguucaggcgaucgaug

SEQ ID NO: 819728 - RNA, 19 nt, Artificial Sequence
  Description of Artificial Sequence: Synthetic oligonucleotide
  Sense strand starting at position 3065 of SEQ ID NO: 587806
uucuauuacugccuguuga

SEQ ID NO: 819729 - RNA, 19 nt, Artificial Sequence
  Description of Artificial Sequence: Synthetic oligonucleotide
  Antisense strand to SEQ ID NO: 819728
ucaacaggcaguaauagaa

SEQ ID NO: 819730 - RNA, 19 nt, Artificial Sequence
  Description of Artificial Sequence: Synthetic oligonucleotide
  Sense strand starting at position 3066 of SEQ ID NO: 587806
ucuauuacugccuguugaa

SEQ ID NO: 819731 - RNA, 19 nt, Artificial Sequence
  Description of Artificial Sequence: Synthetic oligonucleotide
  Antisense strand to SEQ ID NO: 819730
uucaacaggcaguaauaga

SEQ ID NO: 819732 - RNA, 19 nt, Artificial Sequence
  Description of Artificial Sequence: Synthetic oligonucleotide
  Sense strand starting at position 3079 of SEQ ID NO: 587806
guugaagaaucagcuuugu

SEQ ID NO: 819733 - RNA, 19 nt, Artificial Sequence
  Description of Artificial Sequence: Synthetic oligonucleotide
  Antisense strand to SEQ ID NO: 819732
acaaagcugauucuucaac

SEQ ID NO: 819734 - RNA, 19 nt, Artificial Sequence
  Description of Artificial Sequence: Synthetic oligonucleotide
  Sense strand starting at position 3092 of SEQ ID NO: 587806
cuuuguggacgcuagaaca

SEQ ID NO: 819735 - RNA, 19 nt, Artificial Sequence
  Description of Artificial Sequence: Synthetic oligonucleotide
  Antisense strand to SEQ ID NO: 819734
uguucuagcguccacaaag

SEQ ID NO: 819736 - RNA, 19 nt, Artificial Sequence
  Description of Artificial Sequence: Synthetic oligonucleotide
  Sense strand starting at position 3168 of SEQ ID NO: 587806
cuuugaaucuagguugugu

SEQ ID NO: 819737 - RNA, 19 nt, Artificial Sequence
  Description of Artificial Sequence: Synthetic oligonucleotide
  Antisense strand to SEQ ID NO: 819736
acacaaccuagauucaaag

SEQ ID NO: 819738 - RNA, 19 nt, Artificial Sequence
  Description of Artificial Sequence: Synthetic oligonucleotide
  Sense strand starting at position 3173 of SEQ ID NO: 587806
aaucuagguuguguggaau

SEQ ID NO: 819739 - RNA, 19 nt, Artificial Sequence
  Description of Artificial Sequence: Synthetic oligonucleotide
  Antisense strand to SEQ ID NO: 819738
auuccacacaaccuagauu

SEQ ID NO: 819740 - RNA, 19 nt, Artificial Sequence
  Description of Artificial Sequence: Synthetic oligonucleotide
  Sense strand starting at position 3176 of SEQ ID NO: 587806
cuagguuguguggaauuaa

SEQ ID NO: 819741 - RNA, 19 nt, Artificial Sequence
  Description of Artificial Sequence: Synthetic oligonucleotide
  Antisense strand to SEQ ID NO: 819740
uuaauuccacacaaccuag

SEQ ID NO: 819742 - RNA, 19 nt, Artificial Sequence
  Description of Artificial Sequence: Synthetic oligonucleotide
  Sense strand starting at position 3198 of SEQ ID NO: 587806
gcgucucuauauuugagaa

SEQ ID NO: 819743 - RNA, 19 nt, Artificial Sequence
  Description of Artificial Sequence: Synthetic oligonucleotide
  Antisense strand to SEQ ID NO: 819742
uucucaaauauagagacgc

SEQ ID NO: 819744 - RNA, 19 nt, Artificial Sequence
  Description of Artificial Sequence: Synthetic oligonucleotide
  Sense strand starting at position 3200 of SEQ ID NO: 587806
gucucuauauuugagaaug

SEQ ID NO: 819745 - RNA, 19 nt, Artificial Sequence
  Description of Artificial Sequence: Synthetic oligonucleotide
  Antisense strand to SEQ ID NO: 819744
cauucucaaauauagagac

SEQ ID NO: 819746 - RNA, 19 nt, Artificial Sequence
  Description of Artificial Sequence: Synthetic oligonucleotide
  Sense strand starting at position 3202 of SEQ ID NO: 587806
cucuauauuugagaaugag

SEQ ID NO: 819747 - RNA, 19 nt, Artificial Sequence
  Description of Artificial Sequence: Synthetic oligonucleotide
  Antisense strand to SEQ ID NO: 819746
cucauucucaaauauagag

SEQ ID NO: 819748 - RNA, 19 nt, Artificial Sequence
  Description of Artificial Sequence: Synthetic oligonucleotide
  Sense strand starting at position 3317 of SEQ ID NO: 587806
augaucuaaccucgacauu

SEQ ID NO: 819749 - RNA, 19 nt, Artificial Sequence
  Description of Artificial Sequence: Synthetic oligonucleotide
  Antisense strand to SEQ ID NO: 819748
aaugucgagguuagaucau

SEQ ID NO: 819750 - RNA, 19 nt, Artificial Sequence
  Description of Artificial Sequence: Synthetic oligonucleotide
  Sense strand starting at position 3318 of SEQ ID NO: 587806
ugaucuaaccucgacauuc

SEQ ID NO: 819751 - RNA, 19 nt, Artificial Sequence
  Description of Artificial Sequence: Synthetic oligonucleotide
  Antisense strand to SEQ ID NO: 819750
gaaugucgagguuagauca

SEQ ID NO: 819752 - RNA, 19 nt, Artificial Sequence
  Description of Artificial Sequence: Synthetic oligonucleotide
  Sense strand starting at position 3388 of SEQ ID NO: 587806
cucaaacauugugcucaga

SEQ ID NO: 819753 - RNA, 19 nt, Artificial Sequence
  Description of Artificial Sequence: Synthetic oligonucleotide
  Antisense strand to SEQ ID NO: 819752
ucugagcacaauguuugag

SEQ ID NO: 819754 - RNA, 19 nt, Artificial Sequence
  Description of Artificial Sequence: Synthetic oligonucleotide
  Sense strand starting at position 3581 of SEQ ID NO: 587806
caaaguggauuugauaacu

SEQ ID NO: 819755 - RNA, 19 nt, Artificial Sequence
  Description of Artificial Sequence: Synthetic oligonucleotide
  Antisense strand to SEQ ID NO: 819754
aguuaucaaauccacuuug

SEQ ID NO: 819756 - RNA, 19 nt, Artificial Sequence
  Description of Artificial Sequence: Synthetic oligonucleotide
  Sense strand starting at position 3609 of SEQ ID NO: 587806
uugaguucuacucggaaau

SEQ ID NO: 819757 - RNA, 19 nt, Artificial Sequence
  Description of Artificial Sequence: Synthetic oligonucleotide
  Antisense strand to SEQ ID NO: 819756
auuuccgaguagaacucaa

SEQ ID NO: 819758 - RNA, 19 nt, Artificial Sequence
  Description of Artificial Sequence: Synthetic oligonucleotide
  Sense strand starting at position 3661 of SEQ ID NO: 587806
uauugugcucucgcuguaa

SEQ ID NO: 819759 - RNA, 19 nt, Artificial Sequence
  Description of Artificial Sequence: Synthetic oligonucleotide
  Antisense strand to SEQ ID NO: 819758
uuacagcgagagcacaaua

SEQ ID NO: 819760 - RNA, 19 nt, Artificial Sequence
  Description of Artificial Sequence: Synthetic oligonucleotide
  Sense strand starting at position 3714 of SEQ ID NO: 587806
guaagaucucuuuacacgu

SEQ ID NO: 819761 - RNA, 19 nt, Artificial Sequence
  Description of Artificial Sequence: Synthetic oligonucleotide
  Antisense strand to SEQ ID NO: 819760
acguguaaagagaucuuac

SEQ ID NO: 819762 - RNA, 19 nt, Artificial Sequence
  Description of Artificial Sequence: Synthetic oligonucleotide
  Sense strand starting at position 3721 of SEQ ID NO: 587806
cucuuuacacgugaucuuu

SEQ ID NO: 819763 - RNA, 19 nt, Artificial Sequence
  Description of Artificial Sequence: Synthetic oligonucleotide
  Antisense strand to SEQ ID NO: 819762
aaagaucacguguaaagag

SEQ ID NO: 819764 - RNA, 19 nt, Artificial Sequence
  Description of Artificial Sequence: Synthetic oligonucleotide
  Sense strand starting at position 42 of SEQ ID NO: 587807
gccaguaucaggugguuaa

SEQ ID NO: 819765 - RNA, 19 nt, Artificial Sequence
  Description of Artificial Sequence: Synthetic oligonucleotide
  Antisense strand to SEQ ID NO: 819764
uuaaccaccugauacuggc

SEQ ID NO: 819766 - RNA, 19 nt, Artificial Sequence
  Description of Artificial Sequence: Synthetic oligonucleotide
  Sense strand starting at position 43 of SEQ ID NO: 587807
ccaguaucaggugguuaaa

SEQ ID NO: 819767 - RNA, 19 nt, Artificial Sequence
  Description of Artificial Sequence: Synthetic oligonucleotide
  Antisense strand to SEQ ID NO: 819766
uuuaaccaccugauacugg

SEQ ID NO: 819768 - RNA, 19 nt, Artificial Sequence
  Description of Artificial Sequence: Synthetic oligonucleotide
  Sense strand starting at position 131 of SEQ ID NO: 587807
gggucauuacugcaaacua

SEQ ID NO: 819769 - RNA, 19 nt, Artificial Sequence
  Description of Artificial Sequence: Synthetic oligonucleotide
  Antisense strand to SEQ ID NO: 819768
uaguuugcaguaaugaccc

SEQ ID NO: 819770 - RNA, 19 nt, Artificial Sequence
  Description of Artificial Sequence: Synthetic oligonucleotide
  Sense strand starting at position 154 of SEQ ID NO: 587807
cgucguccucaacauuaaa

SEQ ID NO: 819771 - RNA, 19 nt, Artificial Sequence
  Description of Artificial Sequence: Synthetic oligonucleotide
  Antisense strand to SEQ ID NO: 819770
uuuaauguugaggacgacg

SEQ ID NO: 819772 - RNA, 19 nt, Artificial Sequence
  Description of Artificial Sequence: Synthetic oligonucleotide
  Sense strand starting at position 178 of SEQ ID NO: 587807
gugaucaucuuauaagaaa

SEQ ID NO: 819773 - RNA, 19 nt, Artificial Sequence
  Description of Artificial Sequence: Synthetic oligonucleotide
  Antisense strand to SEQ ID NO: 819772
uuucuuauaagaugaucac

SEQ ID NO: 819774 - RNA, 19 nt, Artificial Sequence
  Description of Artificial Sequence: Synthetic oligonucleotide
  Sense strand starting at position 294 of SEQ ID NO: 587807
agcaaagcccuuugguaaa

SEQ ID NO: 819775 - RNA, 19 nt, Artificial Sequence
  Description of Artificial Sequence: Synthetic oligonucleotide
  Antisense strand to SEQ ID NO: 819774
uuuaccaaagggcuuugcu

SEQ ID NO: 819776 - RNA, 19 nt, Artificial Sequence
  Description of Artificial Sequence: Synthetic oligonucleotide
  Sense strand starting at position 330 of SEQ ID NO: 587807
ggaccuacugcgucguuua

SEQ ID NO: 819777 - RNA, 19 nt, Artificial Sequence
  Description of Artificial Sequence: Synthetic oligonucleotide
  Antisense strand to SEQ ID NO: 819776
uaaacgacgcaguaggucc

SEQ ID NO: 819778 - RNA, 19 nt, Artificial Sequence
  Description of Artificial Sequence: Synthetic oligonucleotide
  Sense strand starting at position 570 of SEQ ID NO: 587807
gcaaguggcccucggagaa

SEQ ID NO: 819779 - RNA, 19 nt, Artificial Sequence
  Description of Artificial Sequence: Synthetic oligonucleotide
  Antisense strand to SEQ ID NO: 819778
uucuccgagggccacuugc

SEQ ID NO: 819780 - RNA, 19 nt, Artificial Sequence
  Description of Artificial Sequence: Synthetic oligonucleotide
  Sense strand starting at position 2413 of SEQ ID NO: 587807
gagagaucccaucgucuuc

SEQ ID NO: 819781 - RNA, 19 nt, Artificial Sequence
  Description of Artificial Sequence: Synthetic oligonucleotide
  Antisense strand to SEQ ID NO: 819780
gaagacgaugggaucucuc

SEQ ID NO: 819782 - RNA, 19 nt, Artificial Sequence
  Description of Artificial Sequence: Synthetic oligonucleotide
  Sense strand starting at position 2426 of SEQ ID NO: 587807
gucuucucucuggaaguuu

SEQ ID NO: 819783 - RNA, 19 nt, Artificial Sequence
  Description of Artificial Sequence: Synthetic oligonucleotide
  Antisense strand to SEQ ID NO: 819782
aaacuuccagagagaagac

SEQ ID NO: 819784 - RNA, 19 nt, Artificial Sequence
  Description of Artificial Sequence: Synthetic oligonucleotide
  Sense strand starting at position 2488 of SEQ ID NO: 587807
uuguuuguuucccugauuu

SEQ ID NO: 819785 - RNA, 19 nt, Artificial Sequence
  Description of Artificial Sequence: Synthetic oligonucleotide
  Antisense strand to SEQ ID NO: 819784
aaaucagggaaacaaacaa

SEQ ID NO: 819786 - RNA, 19 nt, Artificial Sequence
  Description of Artificial Sequence: Synthetic oligonucleotide
  Sense strand starting at position 2627 of SEQ ID NO: 587807
gggcaaagccacugucaau

SEQ ID NO: 819787 - RNA, 19 nt, Artificial Sequence
  Description of Artificial Sequence: Synthetic oligonucleotide
  Antisense strand to SEQ ID NO: 819786
auugacaguggcuuugccc

SEQ ID NO: 819788 - RNA, 19 nt, Artificial Sequence
  Description of Artificial Sequence: Synthetic oligonucleotide
  Sense strand starting at position 2696 of SEQ ID NO: 587807
augcuugcaguuugaaaga

SEQ ID NO: 819789 - RNA, 19 nt, Artificial Sequence
  Description of Artificial Sequence: Synthetic oligonucleotide
  Antisense strand to SEQ ID NO: 819788
ucuuucaaacugcaagcau

SEQ ID NO: 819790 - RNA, 19 nt, Artificial Sequence
  Description of Artificial Sequence: Synthetic oligonucleotide
  Sense strand starting at position 2785 of SEQ ID NO: 587807
gggcauggguguccuuuau

SEQ ID NO: 819791 - RNA, 19 nt, Artificial Sequence
  Description of Artificial Sequence: Synthetic oligonucleotide
  Antisense strand to SEQ ID NO: 819790
auaaaggacacccaugccc

SEQ ID NO: 819792 - RNA, 19 nt, Artificial Sequence
  Description of Artificial Sequence: Synthetic oligonucleotide
  Sense strand starting at position 2875 of SEQ ID NO: 587807
gggucuaugcuccauggca

SEQ ID NO: 819793 - RNA, 19 nt, Artificial Sequence
  Description of Artificial Sequence: Synthetic oligonucleotide
  Antisense strand to SEQ ID NO: 819792
ugccauggagcauagaccc

SEQ ID NO: 819794 - RNA, 19 nt, Artificial Sequence
  Description of Artificial Sequence: Synthetic oligonucleotide
  Sense strand starting at position 2877 of SEQ ID NO: 587807
gucuaugcuccauggcaga

SEQ ID NO: 819795 - RNA, 19 nt, Artificial Sequence
  Description of Artificial Sequence: Synthetic oligonucleotide
  Antisense strand to SEQ ID NO: 819794
ucugccauggagcauagac

SEQ ID NO: 819796 - RNA, 19 nt, Artificial Sequence
  Description of Artificial Sequence: Synthetic oligonucleotide
  Sense strand starting at position 2904 of SEQ ID NO: 587807
uuugacucuugcucaaguu

SEQ ID NO: 819797 - RNA, 19 nt, Artificial Sequence
  Description of Artificial Sequence: Synthetic oligonucleotide
  Antisense strand to SEQ ID NO: 819796
aacuugagcaagagucaaa

SEQ ID NO: 819798 - RNA, 19 nt, Artificial Sequence
  Description of Artificial Sequence: Synthetic oligonucleotide
  Sense strand starting at position 2959 of SEQ ID NO: 587807
ggaaacaagugaguccauu

SEQ ID NO: 819799 - RNA, 19 nt, Artificial Sequence
  Description of Artificial Sequence: Synthetic oligonucleotide
  Antisense strand to SEQ ID NO: 819798
aauggacucacuuguuucc

SEQ ID NO: 819800 - RNA, 19 nt, Artificial Sequence
  Description of Artificial Sequence: Synthetic oligonucleotide
  Sense strand starting at position 2965 of SEQ ID NO: 587807
aagugaguccauuguguga

SEQ ID NO: 819801 - RNA, 19 nt, Artificial Sequence
  Description of Artificial Sequence: Synthetic oligonucleotide
  Antisense strand to SEQ ID NO: 819800
ucacacaauggacucacuu

SEQ ID NO: 819802 - RNA, 19 nt, Artificial Sequence
  Description of Artificial Sequence: Synthetic oligonucleotide
  Sense strand starting at position 2978 of SEQ ID NO: 587807
gugugagugcucgccugga

SEQ ID NO: 819803 - RNA, 19 nt, Artificial Sequence
  Description of Artificial Sequence: Synthetic oligonucleotide
  Antisense strand to SEQ ID NO: 819802
uccaggcgagcacucacac

SEQ ID NO: 819804 - RNA, 19 nt, Artificial Sequence
  Description of Artificial Sequence: Synthetic oligonucleotide
  Sense strand starting at position 3083 of SEQ ID NO: 587807
aguggauucugaaggugag

SEQ ID NO: 819805 - RNA, 19 nt, Artificial Sequence
  Description of Artificial Sequence: Synthetic oligonucleotide
  Antisense strand to SEQ ID NO: 819804
cucaccuucagaauccacu

SEQ ID NO: 819806 - RNA, 19 nt, Artificial Sequence
  Description of Artificial Sequence: Synthetic oligonucleotide
  Sense strand starting at position 3146 of SEQ ID NO: 587807
caucgaucgccugaacaaa

SEQ ID NO: 819807 - RNA, 19 nt, Artificial Sequence
  Description of Artificial Sequence: Synthetic oligonucleotide
  Antisense strand to SEQ ID NO: 819806
uuuguucaggcgaucgaug

SEQ ID NO: 819808 - RNA, 19 nt, Artificial Sequence
  Description of Artificial Sequence: Synthetic oligonucleotide
  Sense strand starting at position 3198 of SEQ ID NO: 587807
uucuauuacugccuguuga

SEQ ID NO: 819809 - RNA, 19 nt, Artificial Sequence
  Description of Artificial Sequence: Synthetic oligonucleotide
  Antisense strand to SEQ ID NO: 819808
ucaacaggcaguaauagaa

SEQ ID NO: 819810 - RNA, 19 nt, Artificial Sequence
  Description of Artificial Sequence: Synthetic oligonucleotide
  Sense strand starting at position 3199 of SEQ ID NO: 587807
ucuauuacugccuguugaa

SEQ ID NO: 819811 - RNA, 19 nt, Artificial Sequence
  Description of Artificial Sequence: Synthetic oligonucleotide
  Antisense strand to SEQ ID NO: 819810
uucaacaggcaguaauaga

SEQ ID NO: 819812 - RNA, 19 nt, Artificial Sequence
  Description of Artificial Sequence: Synthetic oligonucleotide
  Sense strand starting at position 3212 of SEQ ID NO: 587807
guugaagaaucagcuuugu

SEQ ID NO: 819813 - RNA, 19 nt, Artificial Sequence
  Description of Artificial Sequence: Synthetic oligonucleotide
  Antisense strand to SEQ ID NO: 819812
acaaagcugauucuucaac

SEQ ID NO: 819814 - RNA, 19 nt, Artificial Sequence
  Description of Artificial Sequence: Synthetic oligonucleotide
  Sense strand starting at position 3225 of SEQ ID NO: 587807
cuuuguggacgcuagaaca

SEQ ID NO: 819815 - RNA, 19 nt, Artificial Sequence
  Description of Artificial Sequence: Synthetic oligonucleotide
  Antisense strand to SEQ ID NO: 819814
uguucuagcguccacaaag

SEQ ID NO: 819816 - RNA, 19 nt, Artificial Sequence
  Description of Artificial Sequence: Synthetic oligonucleotide
  Sense strand starting at position 3301 of SEQ ID NO: 587807
cuuugaaucuagguugugu

SEQ ID NO: 819817 - RNA, 19 nt, Artificial Sequence
  Description of Artificial Sequence: Synthetic oligonucleotide
  Antisense strand to SEQ ID NO: 819816
acacaaccuagauucaaag

SEQ ID NO: 819818 - RNA, 19 nt, Artificial Sequence
  Description of Artificial Sequence: Synthetic oligonucleotide
  Sense strand starting at position 3306 of SEQ ID NO: 587807
aaucuagguuguguggaau

SEQ ID NO: 819819 - RNA, 19 nt, Artificial Sequence
  Description of Artificial Sequence: Synthetic oligonucleotide
  Antisense strand to SEQ ID NO: 819818
auuccacacaaccuagauu

SEQ ID NO: 819820 - RNA, 19 nt, Artificial Sequence
  Description of Artificial Sequence: Synthetic oligonucleotide
  Sense strand starting at position 3309 of SEQ ID NO: 587807
cuagguuguguggaauuaa

SEQ ID NO: 819821 - RNA, 19 nt, Artificial Sequence
  Description of Artificial Sequence: Synthetic oligonucleotide
  Antisense strand to SEQ ID NO: 819820
uuaauuccacacaaccuag

SEQ ID NO: 819822 - RNA, 19 nt, Artificial Sequence
  Description of Artificial Sequence: Synthetic oligonucleotide
  Sense strand starting at position 3331 of SEQ ID NO: 587807
gcgucucuauauuugagaa

SEQ ID NO: 819823 - RNA, 19 nt, Artificial Sequence
  Description of Artificial Sequence: Synthetic oligonucleotide
  Antisense strand to SEQ ID NO: 819822
uucucaaauauagagacgc

SEQ ID NO: 819824 - RNA, 19 nt, Artificial Sequence
  Description of Artificial Sequence: Synthetic oligonucleotide
  Sense strand starting at position 3333 of SEQ ID NO: 587807
gucucuauauuugagaaug

SEQ ID NO: 819825 - RNA, 19 nt, Artificial Sequence
  Description of Artificial Sequence: Synthetic oligonucleotide
  Antisense strand to SEQ ID NO: 819824
cauucucaaauauagagac

SEQ ID NO: 819826 - RNA, 19 nt, Artificial Sequence
  Description of Artificial Sequence: Synthetic oligonucleotide
  Sense strand starting at position 3335 of SEQ ID NO: 587807
cucuauauuugagaaugag

SEQ ID NO: 819827 - RNA, 19 nt, Artificial Sequence
  Description of Artificial Sequence: Synthetic oligonucleotide
  Antisense strand to SEQ ID NO: 819826
cucauucucaaauauagag

SEQ ID NO: 819828 - RNA, 19 nt, Artificial Sequence
  Description of Artificial Sequence: Synthetic oligonucleotide
  Sense strand starting at position 3450 of SEQ ID NO: 587807
augaucuaaccucgacauu

SEQ ID NO: 819829 - RNA, 19 nt, Artificial Sequence
  Description of Artificial Sequence: Synthetic oligonucleotide
  Antisense strand to SEQ ID NO: 819828
aaugucgagguuagaucau

SEQ ID NO: 819830 - RNA, 19 nt, Artificial Sequence
  Description of Artificial Sequence: Synthetic oligonucleotide
  Sense strand starting at position 3451 of SEQ ID NO: 587807
ugaucuaaccucgacauuc

SEQ ID NO: 819831 - RNA, 19 nt, Artificial Sequence
  Description of Artificial Sequence: Synthetic oligonucleotide
  Antisense strand to SEQ ID NO: 819830
gaaugucgagguuagauca

SEQ ID NO: 819832 - RNA, 19 nt, Artificial Sequence
  Description of Artificial Sequence: Synthetic oligonucleotide
  Sense strand starting at position 3521 of SEQ ID NO: 587807
cucaaacauugugcucaga

SEQ ID NO: 819833 - RNA, 19 nt, Artificial Sequence
  Description of Artificial Sequence: Synthetic oligonucleotide
  Antisense strand to SEQ ID NO: 819832
ucugagcacaauguuugag

SEQ ID NO: 819834 - RNA, 19 nt, Artificial Sequence
  Description of Artificial Sequence: Synthetic oligonucleotide
  Sense strand starting at position 3714 of SEQ ID NO: 587807
caaaguggauuugauaacu

SEQ ID NO: 819835 - RNA, 19 nt, Artificial Sequence
  Description of Artificial Sequence: Synthetic oligonucleotide
  Antisense strand to SEQ ID NO: 819834
aguuaucaaauccacuuug

SEQ ID NO: 819836 - RNA, 19 nt, Artificial Sequence
  Description of Artificial Sequence: Synthetic oligonucleotide
  Sense strand starting at position 3742 of SEQ ID NO: 587807
uugaguucuacucggaaau

SEQ ID NO: 819837 - RNA, 19 nt, Artificial Sequence
  Description of Artificial Sequence: Synthetic oligonucleotide
  Antisense strand to SEQ ID NO: 819836
auuuccgaguagaacucaa

SEQ ID NO: 819838 - RNA, 19 nt, Artificial Sequence
  Description of Artificial Sequence: Synthetic oligonucleotide
  Sense strand starting at position 3794 of SEQ ID NO: 587807
uauugugcucucgcuguaa

SEQ ID NO: 819839 - RNA, 19 nt, Artificial Sequence
  Description of Artificial Sequence: Synthetic oligonucleotide
  Antisense strand to SEQ ID NO: 819838
uuacagcgagagcacaaua

SEQ ID NO: 819840 - RNA, 19 nt, Artificial Sequence
  Description of Artificial Sequence: Synthetic oligonucleotide
  Sense strand starting at position 3847 of SEQ ID NO: 587807
guaagaucucuuuacacgu

SEQ ID NO: 819841 - RNA, 19 nt, Artificial Sequence
  Description of Artificial Sequence: Synthetic oligonucleotide
  Antisense strand to SEQ ID NO: 819840
acguguaaagagaucuuac

SEQ ID NO: 819842 - RNA, 19 nt, Artificial Sequence
  Description of Artificial Sequence: Synthetic oligonucleotide
  Sense strand starting at position 3854 of SEQ ID NO: 587807
cucuuuacacgugaucuuu

SEQ ID NO: 819843 - RNA, 19 nt, Artificial Sequence
  Description of Artificial Sequence: Synthetic oligonucleotide
  Antisense strand to SEQ ID NO: 819842
aaagaucacguguaaagag

SEQ ID NO: 819844 - RNA, 19 nt, Artificial Sequence
  Description of Artificial Sequence: Synthetic oligonucleotide
  Sense strand starting at position 468 of SEQ ID NO: 587808
gcauuaaggcauugauaau

SEQ ID NO: 819845 - RNA, 19 nt, Artificial Sequence
  Description of Artificial Sequence: Synthetic oligonucleotide
  Antisense strand to SEQ ID NO: 819844
auuaucaaugccuuaaugc

SEQ ID NO: 819846 - RNA, 19 nt, Artificial Sequence
  Description of Artificial Sequence: Synthetic oligonucleotide
  Sense strand starting at position 474 of SEQ ID NO: 587808
aggcauugauaauccacaa

SEQ ID NO: 819847 - RNA, 19 nt, Artificial Sequence
  Description of Artificial Sequence: Synthetic oligonucleotide
  Antisense strand to SEQ ID NO: 819846
uuguggauuaucaaugccu

SEQ ID NO: 819848 - RNA, 19 nt, Artificial Sequence
  Description of Artificial Sequence: Synthetic oligonucleotide
  Sense strand starting at position 608 of SEQ ID NO: 587808
gcaauauauguguagacuu

SEQ ID NO: 819849 - RNA, 19 nt, Artificial Sequence
  Description of Artificial Sequence: Synthetic oligonucleotide
  Antisense strand to SEQ ID NO: 819848
aagucuacacauauauugc

SEQ ID NO: 819850 - RNA, 19 nt, Artificial Sequence
  Description of Artificial Sequence: Synthetic oligonucleotide
  Sense strand starting at position 763 of SEQ ID NO: 587808
gcaugaaacuucuuugaac

SEQ ID NO: 819851 - RNA, 19 nt, Artificial Sequence
  Description of Artificial Sequence: Synthetic oligonucleotide
  Antisense strand to SEQ ID NO: 819850
guucaaagaaguuucaugc

SEQ ID NO: 819852 - RNA, 19 nt, Artificial Sequence
  Description of Artificial Sequence: Synthetic oligonucleotide
  Sense strand starting at position 958 of SEQ ID NO: 587808
uacagacuuugaguacaga

SEQ ID NO: 819853 - RNA, 19 nt, Artificial Sequence
  Description of Artificial Sequence: Synthetic oligonucleotide
  Antisense strand to SEQ ID NO: 819852
ucuguacucaaagucugua

SEQ ID NO: 819854 - RNA, 19 nt, Artificial Sequence
  Description of Artificial Sequence: Synthetic oligonucleotide
  Sense strand starting at position 991 of SEQ ID NO: 587808
ccugucuaugacgauaaau

SEQ ID NO: 819855 - RNA, 19 nt, Artificial Sequence
  Description of Artificial Sequence: Synthetic oligonucleotide
  Antisense strand to SEQ ID NO: 819854
auuuaucgucauagacagg

SEQ ID NO: 819856 - RNA, 19 nt, Artificial Sequence
  Description of Artificial Sequence: Synthetic oligonucleotide
  Sense strand starting at position 1213 of SEQ ID NO: 587808
aucuuuguucuggacuuua

SEQ ID NO: 819857 - RNA, 19 nt, Artificial Sequence
  Description of Artificial Sequence: Synthetic oligonucleotide
  Antisense strand to SEQ ID NO: 819856
uaaaguccagaacaaagau

SEQ ID NO: 819858 - RNA, 19 nt, Artificial Sequence
  Description of Artificial Sequence: Synthetic oligonucleotide
  Sense strand starting at position 1239 of SEQ ID NO: 587808
guaauugugcugcuccuuu

SEQ ID NO: 819859 - RNA, 19 nt, Artificial Sequence
  Description of Artificial Sequence: Synthetic oligonucleotide
  Antisense strand to SEQ ID NO: 819858
aaaggagcagcacaauuac

SEQ ID NO: 819860 - RNA, 19 nt, Artificial Sequence
  Description of Artificial Sequence: Synthetic oligonucleotide
  Sense strand starting at position 1322 of SEQ ID NO: 587808
ccuguagugaauuauguca

SEQ ID NO: 819861 - RNA, 19 nt, Artificial Sequence
  Description of Artificial Sequence: Synthetic oligonucleotide
  Antisense strand to SEQ ID NO: 819860
ugacauaauucacuacagg

SEQ ID NO: 819862 - RNA, 19 nt, Artificial Sequence
  Description of Artificial Sequence: Synthetic oligonucleotide
  Sense strand starting at position 1330 of SEQ ID NO: 587808
gaauuaugucacuagcaug

SEQ ID NO: 819863 - RNA, 19 nt, Artificial Sequence
  Description of Artificial Sequence: Synthetic oligonucleotide
  Antisense strand to SEQ ID NO: 819862
caugcuagugacauaauuc

SEQ ID NO: 819864 - RNA, 19 nt, Artificial Sequence
  Description of Artificial Sequence: Synthetic oligonucleotide
  Sense strand starting at position 1354 of SEQ ID NO: 587808
gaccaagaaguuuggcaau

SEQ ID NO: 819865 - RNA, 19 nt, Artificial Sequence
  Description of Artificial Sequence: Synthetic oligonucleotide
  Antisense strand to SEQ ID NO: 819864
auugccaaacuucuugguc

SEQ ID NO: 819866 - RNA, 19 nt, Artificial Sequence
  Description of Artificial Sequence: Synthetic oligonucleotide
  Sense strand starting at position 1356 of SEQ ID NO: 587808
ccaagaaguuuggcaauga

SEQ ID NO: 819867 - RNA, 19 nt, Artificial Sequence
  Description of Artificial Sequence: Synthetic oligonucleotide
  Antisense strand to SEQ ID NO: 819866
ucauugccaaacuucuugg

SEQ ID NO: 819868 - RNA, 19 nt, Artificial Sequence
  Description of Artificial Sequence: Synthetic oligonucleotide
  Sense strand starting at position 1360 of SEQ ID NO: 587808
gaaguuuggcaaugaauau

SEQ ID NO: 819869 - RNA, 19 nt, Artificial Sequence
  Description of Artificial Sequence: Synthetic oligonucleotide
  Antisense strand to SEQ ID NO: 819868
auauucauugccaaacuuc

SEQ ID NO: 819870 - RNA, 19 nt, Artificial Sequence
  Description of Artificial Sequence: Synthetic oligonucleotide
  Sense strand starting at position 1367 of SEQ ID NO: 587808
ggcaaugaauauccuguua

SEQ ID NO: 819871 - RNA, 19 nt, Artificial Sequence
  Description of Artificial Sequence: Synthetic oligonucleotide
  Antisense strand to SEQ ID NO: 819870
uaacaggauauucauugcc

SEQ ID NO: 819872 - RNA, 19 nt, Artificial Sequence
  Description of Artificial Sequence: Synthetic oligonucleotide
  Sense strand starting at position 1561 of SEQ ID NO: 587808
agaacuguccagugaucau

SEQ ID NO: 819873 - RNA, 19 nt, Artificial Sequence
  Description of Artificial Sequence: Synthetic oligonucleotide
  Antisense strand to SEQ ID NO: 819872
augaucacuggacaguucu

SEQ ID NO: 819874 - RNA, 19 nt, Artificial Sequence
  Description of Artificial Sequence: Synthetic oligonucleotide
  Sense strand starting at position 1570 of SEQ ID NO: 587808
cagugaucaugccugaaug

SEQ ID NO: 819875 - RNA, 19 nt, Artificial Sequence
  Description of Artificial Sequence: Synthetic oligonucleotide
  Antisense strand to SEQ ID NO: 819874
cauucaggcaugaucacug

SEQ ID NO: 819876 - RNA, 19 nt, Artificial Sequence
  Description of Artificial Sequence: Synthetic oligonucleotide
  Sense strand starting at position 1571 of SEQ ID NO: 587808
agugaucaugccugaauga

SEQ ID NO: 819877 - RNA, 19 nt, Artificial Sequence
  Description of Artificial Sequence: Synthetic oligonucleotide
  Antisense strand to SEQ ID NO: 819876
ucauucaggcaugaucacu

SEQ ID NO: 819878 - RNA, 19 nt, Artificial Sequence
  Description of Artificial Sequence: Synthetic oligonucleotide
  Sense strand starting at position 1572 of SEQ ID NO: 587808
gugaucaugccugaaugaa

SEQ ID NO: 819879 - RNA, 19 nt, Artificial Sequence
  Description of Artificial Sequence: Synthetic oligonucleotide
  Antisense strand to SEQ ID NO: 819878
uucauucaggcaugaucac

SEQ ID NO: 819880 - RNA, 19 nt, Artificial Sequence
  Description of Artificial Sequence: Synthetic oligonucleotide
  Sense strand starting at position 1654 of SEQ ID NO: 587808
aaggguuuccaugguaaca

SEQ ID NO: 819881 - RNA, 19 nt, Artificial Sequence
  Description of Artificial Sequence: Synthetic oligonucleotide
  Antisense strand to SEQ ID NO: 819880
uguuaccauggaaacccuu

SEQ ID NO: 819882 - RNA, 19 nt, Artificial Sequence
  Description of Artificial Sequence: Synthetic oligonucleotide
  Sense strand starting at position 1664 of SEQ ID NO: 587808
augguaacaagcgaauuau

SEQ ID NO: 819883 - RNA, 19 nt, Artificial Sequence
  Description of Artificial Sequence: Synthetic oligonucleotide
  Antisense strand to SEQ ID NO: 819882
auaauucgcuuguuaccau

SEQ ID NO: 819884 - RNA, 19 nt, Artificial Sequence
  Description of Artificial Sequence: Synthetic oligonucleotide
  Sense strand starting at position 1761 of SEQ ID NO: 587808
uucuacuaccaggauguau

SEQ ID NO: 819885 - RNA, 19 nt, Artificial Sequence
  Description of Artificial Sequence: Synthetic oligonucleotide
  Antisense strand to SEQ ID NO: 819884
auacauccugguaguagaa

SEQ ID NO: 819886 - RNA, 19 nt, Artificial Sequence
  Description of Artificial Sequence: Synthetic oligonucleotide
  Sense strand starting at position 1784 of SEQ ID NO: 587808
agaagucaugauuagucuu

SEQ ID NO: 819887 - RNA, 19 nt, Artificial Sequence
  Description of Artificial Sequence: Synthetic oligonucleotide
  Antisense strand to SEQ ID NO: 819886
aagacuaaucaugacuucu

SEQ ID NO: 819888 - RNA, 19 nt, Artificial Sequence
  Description of Artificial Sequence: Synthetic oligonucleotide
  Sense strand starting at position 2026 of SEQ ID NO: 587808
cagugaaagccaggguaau

SEQ ID NO: 819889 - RNA, 19 nt, Artificial Sequence
  Description of Artificial Sequence: Synthetic oligonucleotide
  Antisense strand to SEQ ID NO: 819888
auuacccuggcuuucacug

SEQ ID NO: 819890 - RNA, 19 nt, Artificial Sequence
  Description of Artificial Sequence: Synthetic oligonucleotide
  Sense strand starting at position 2027 of SEQ ID NO: 587808
agugaaagccaggguaaua

SEQ ID NO: 819891 - RNA, 19 nt, Artificial Sequence
  Description of Artificial Sequence: Synthetic oligonucleotide
  Antisense strand to SEQ ID NO: 819890
uauuacccuggcuuucacu

SEQ ID NO: 819892 - RNA, 19 nt, Artificial Sequence
  Description of Artificial Sequence: Synthetic oligonucleotide
  Sense strand starting at position 2153 of SEQ ID NO: 587808
aguuaaguucucuaaugaa

SEQ ID NO: 819893 - RNA, 19 nt, Artificial Sequence
  Description of Artificial Sequence: Synthetic oligonucleotide
  Antisense strand to SEQ ID NO: 819892
uucauuagagaacuuaacu

SEQ ID NO: 819894 - RNA, 19 nt, Artificial Sequence
  Description of Artificial Sequence: Synthetic oligonucleotide
  Sense strand starting at position 2186 of SEQ ID NO: 587808
acugcuguccaugaagcaa

SEQ ID NO: 819895 - RNA, 19 nt, Artificial Sequence
  Description of Artificial Sequence: Synthetic oligonucleotide
  Antisense strand to SEQ ID NO: 819894
uugcuucauggacagcagu

SEQ ID NO: 819896 - RNA, 19 nt, Artificial Sequence
  Description of Artificial Sequence: Synthetic oligonucleotide
  Sense strand starting at position 2197 of SEQ ID NO: 587808
ugaagcaauguuggauuaa

SEQ ID NO: 819897 - RNA, 19 nt, Artificial Sequence
  Description of Artificial Sequence: Synthetic oligonucleotide
  Antisense strand to SEQ ID NO: 819896
uuaauccaacauugcuuca

SEQ ID NO: 819898 - RNA, 19 nt, Artificial Sequence
  Description of Artificial Sequence: Synthetic oligonucleotide
  Sense strand starting at position 2859 of SEQ ID NO: 587808
ugacuugggugucugaaau

SEQ ID NO: 819899 - RNA, 19 nt, Artificial Sequence
  Description of Artificial Sequence: Synthetic oligonucleotide
  Antisense strand to SEQ ID NO: 819898
auuucagacacccaaguca

SEQ ID NO: 819900 - RNA, 19 nt, Artificial Sequence
  Description of Artificial Sequence: Synthetic oligonucleotide
  Sense strand starting at position 2933 of SEQ ID NO: 587808
auaagacuuccuuguuaug

SEQ ID NO: 819901 - RNA, 19 nt, Artificial Sequence
  Description of Artificial Sequence: Synthetic oligonucleotide
  Antisense strand to SEQ ID NO: 819900
cauaacaaggaagucuuau

SEQ ID NO: 819902 - RNA, 19 nt, Artificial Sequence
  Description of Artificial Sequence: Synthetic oligonucleotide
  Sense strand starting at position 3044 of SEQ ID NO: 587808
cuacuaguagcgggaaaua

SEQ ID NO: 819903 - RNA, 19 nt, Artificial Sequence
  Description of Artificial Sequence: Synthetic oligonucleotide
  Antisense strand to SEQ ID NO: 819902
uauuucccgcuacuaguag

SEQ ID NO: 819904 - RNA, 19 nt, Artificial Sequence
  Description of Artificial Sequence: Synthetic oligonucleotide
  Sense strand starting at position 3054 of SEQ ID NO: 587808
cgggaaauaucaucuccau

SEQ ID NO: 819905 - RNA, 19 nt, Artificial Sequence
  Description of Artificial Sequence: Synthetic oligonucleotide
  Antisense strand to SEQ ID NO: 819904
auggagaugauauuucccg

SEQ ID NO: 819906 - RNA, 19 nt, Artificial Sequence
  Description of Artificial Sequence: Synthetic oligonucleotide
  Sense strand starting at position 3224 of SEQ ID NO: 587808
guaagacuguuugucaaag

SEQ ID NO: 819907 - RNA, 19 nt, Artificial Sequence
  Description of Artificial Sequence: Synthetic oligonucleotide
  Antisense strand to SEQ ID NO: 819906
cuuugacaaacagucuuac

SEQ ID NO: 819908 - RNA, 19 nt, Artificial Sequence
  Description of Artificial Sequence: Synthetic oligonucleotide
  Sense strand starting at position 3225 of SEQ ID NO: 587808
uaagacuguuugucaaaga

SEQ ID NO: 819909 - RNA, 19 nt, Artificial Sequence
  Description of Artificial Sequence: Synthetic oligonucleotide
  Antisense strand to SEQ ID NO: 819908
ucuuugacaaacagucuua

SEQ ID NO: 819910 - RNA, 19 nt, Artificial Sequence
  Description of Artificial Sequence: Synthetic oligonucleotide
  Sense strand starting at position 3328 of SEQ ID NO: 587808
acauacauuucugaggaua

SEQ ID NO: 819911 - RNA, 19 nt, Artificial Sequence
  Description of Artificial Sequence: Synthetic oligonucleotide
  Antisense strand to SEQ ID NO: 819910
uauccucagaaauguaugu

SEQ ID NO: 819912 - RNA, 19 nt, Artificial Sequence
  Description of Artificial Sequence: Synthetic oligonucleotide
  Sense strand starting at position 3368 of SEQ ID NO: 587808
gauguauguccagagguua

SEQ ID NO: 819913 - RNA, 19 nt, Artificial Sequence
  Description of Artificial Sequence: Synthetic oligonucleotide
  Antisense strand to SEQ ID NO: 819912
uaaccucuggacauacauc

SEQ ID NO: 819914 - RNA, 19 nt, Artificial Sequence
  Description of Artificial Sequence: Synthetic oligonucleotide
  Sense strand starting at position 3386 of SEQ ID NO: 587808
agaucaaugccuggcacaa

SEQ ID NO: 819915 - RNA, 19 nt, Artificial Sequence
  Description of Artificial Sequence: Synthetic oligonucleotide
  Antisense strand to SEQ ID NO: 819914
uugugccaggcauugaucu

SEQ ID NO: 819916 - RNA, 19 nt, Artificial Sequence
  Description of Artificial Sequence: Synthetic oligonucleotide
  Sense strand starting at position 3430 of SEQ ID NO: 587808
gaauaaaugaguuguugug

SEQ ID NO: 819917 - RNA, 19 nt, Artificial Sequence
  Description of Artificial Sequence: Synthetic oligonucleotide
  Antisense strand to SEQ ID NO: 819916
cacaacaacucauuuauuc

SEQ ID NO: 819918 - RNA, 19 nt, Artificial Sequence
  Description of Artificial Sequence: Synthetic oligonucleotide
  Sense strand starting at position 3873 of SEQ ID NO: 587808
auguuuauugacuacagua

SEQ ID NO: 819919 - RNA, 19 nt, Artificial Sequence
  Description of Artificial Sequence: Synthetic oligonucleotide
  Antisense strand to SEQ ID NO: 819918
uacuguagucaauaaacau

SEQ ID NO: 819920 - RNA, 19 nt, Artificial Sequence
  Description of Artificial Sequence: Synthetic oligonucleotide
  Sense strand starting at position 3970 of SEQ ID NO: 587808
gugaguucucaguauauag

SEQ ID NO: 819921 - RNA, 19 nt, Artificial Sequence
  Description of Artificial Sequence: Synthetic oligonucleotide
  Antisense strand to SEQ ID NO: 819920
cuauauacugagaacucac

SEQ ID NO: 819922 - RNA, 19 nt, Artificial Sequence
  Description of Artificial Sequence: Synthetic oligonucleotide
  Sense strand starting at position 3972 of SEQ ID NO: 587808
gaguucucaguauauagau

SEQ ID NO: 819923 - RNA, 19 nt, Artificial Sequence
  Description of Artificial Sequence: Synthetic oligonucleotide
  Antisense strand to SEQ ID NO: 819922
aucuauauacugagaacuc

SEQ ID NO: 819924 - RNA, 19 nt, Artificial Sequence
  Description of Artificial Sequence: Synthetic oligonucleotide
  Sense strand starting at position 83 of SEQ ID NO: 587809
ccugucguccaauaacaaa

SEQ ID NO: 819925 - RNA, 19 nt, Artificial Sequence
  Description of Artificial Sequence: Synthetic oligonucleotide
  Antisense strand to SEQ ID NO: 819924
uuuguuauuggacgacagg

SEQ ID NO: 819926 - RNA, 19 nt, Artificial Sequence
  Description of Artificial Sequence: Synthetic oligonucleotide
  Sense strand starting at position 309 of SEQ ID NO: 587809
acaugacaggaauguuauu

SEQ ID NO: 819927 - RNA, 19 nt, Artificial Sequence
  Description of Artificial Sequence: Synthetic oligonucleotide
  Antisense strand to SEQ ID NO: 819926
aauaacauuccugucaugu

SEQ ID NO: 819928 - RNA, 19 nt, Artificial Sequence
  Description of Artificial Sequence: Synthetic oligonucleotide
  Sense strand starting at position 593 of SEQ ID NO: 587809
guccaaacuuauguauaaa

SEQ ID NO: 819929 - RNA, 19 nt, Artificial Sequence
  Description of Artificial Sequence: Synthetic oligonucleotide
  Antisense strand to SEQ ID NO: 819928
uuuauacauaaguuuggac

SEQ ID NO: 819930 - RNA, 19 nt, Artificial Sequence
  Description of Artificial Sequence: Synthetic oligonucleotide
  Sense strand starting at position 672 of SEQ ID NO: 587809
auagguacacuuuaaaugu

SEQ ID NO: 819931 - RNA, 19 nt, Artificial Sequence
  Description of Artificial Sequence: Synthetic oligonucleotide
  Antisense strand to SEQ ID NO: 819930
acauuuaaaguguaccuau

SEQ ID NO: 819932 - RNA, 19 nt, Artificial Sequence
  Description of Artificial Sequence: Synthetic oligonucleotide
  Sense strand starting at position 685 of SEQ ID NO: 587809
aaauguuugcagcagacuu

SEQ ID NO: 819933 - RNA, 19 nt, Artificial Sequence
  Description of Artificial Sequence: Synthetic oligonucleotide
  Antisense strand to SEQ ID NO: 819932
aagucugcugcaaacauuu

SEQ ID NO: 819934 - RNA, 19 nt, Artificial Sequence
  Description of Artificial Sequence: Synthetic oligonucleotide
  Sense strand starting at position 930 of SEQ ID NO: 587809
ucuacuguugguuaaugua

SEQ ID NO: 819935 - RNA, 19 nt, Artificial Sequence
  Description of Artificial Sequence: Synthetic oligonucleotide
  Antisense strand to SEQ ID NO: 819934
uacauuaaccaacaguaga

SEQ ID NO: 819936 - RNA, 19 nt, Artificial Sequence
  Description of Artificial Sequence: Synthetic oligonucleotide
  Sense strand starting at position 971 of SEQ ID NO: 587809
ugugaaauccgcgugcaca

SEQ ID NO: 819937 - RNA, 19 nt, Artificial Sequence
  Description of Artificial Sequence: Synthetic oligonucleotide
  Antisense strand to SEQ ID NO: 819936
ugugcacgcggauuucaca

SEQ ID NO: 819938 - RNA, 19 nt, Artificial Sequence
  Description of Artificial Sequence: Synthetic oligonucleotide
  Sense strand starting at position 1015 of SEQ ID NO: 587809
gggcgcaggcugagucauu

SEQ ID NO: 819939 - RNA, 19 nt, Artificial Sequence
  Description of Artificial Sequence: Synthetic oligonucleotide
  Antisense strand to SEQ ID NO: 819938
aaugacucagccugcgccc

SEQ ID NO: 819940 - RNA, 19 nt, Artificial Sequence
  Description of Artificial Sequence: Synthetic oligonucleotide
  Sense strand starting at position 1026 of SEQ ID NO: 587809
gagucauuccuaggaguaa

SEQ ID NO: 819941 - RNA, 19 nt, Artificial Sequence
  Description of Artificial Sequence: Synthetic oligonucleotide
  Antisense strand to SEQ ID NO: 819940
uuacuccuaggaaugacuc

SEQ ID NO: 819942 - RNA, 19 nt, Artificial Sequence
  Description of Artificial Sequence: Synthetic oligonucleotide
  Sense strand starting at position 2188 of SEQ ID NO: 587809
guacuuucccaaggugaau

SEQ ID NO: 819943 - RNA, 19 nt, Artificial Sequence
  Description of Artificial Sequence: Synthetic oligonucleotide
  Antisense strand to SEQ ID NO: 819942
auucaccuugggaaaguac

SEQ ID NO: 819944 - RNA, 19 nt, Artificial Sequence
  Description of Artificial Sequence: Synthetic oligonucleotide
  Sense strand starting at position 2481 of SEQ ID NO: 587809
cuguuaacucugcaagggu

SEQ ID NO: 819945 - RNA, 19 nt, Artificial Sequence
  Description of Artificial Sequence: Synthetic oligonucleotide
  Antisense strand to SEQ ID NO: 819944
acccuugcagaguuaacag

SEQ ID NO: 819946 - RNA, 19 nt, Artificial Sequence
  Description of Artificial Sequence: Synthetic oligonucleotide
  Sense strand starting at position 2658 of SEQ ID NO: 587809
gcaugagcacccuaauggu

SEQ ID NO: 819947 - RNA, 19 nt, Artificial Sequence
  Description of Artificial Sequence: Synthetic oligonucleotide
  Antisense strand to SEQ ID NO: 819946
accauuagggugcucaugc

SEQ ID NO: 819948 - RNA, 19 nt, Artificial Sequence
  Description of Artificial Sequence: Synthetic oligonucleotide
  Sense strand starting at position 2665 of SEQ ID NO: 587809
cacccuaaugguugggaga

SEQ ID NO: 819949 - RNA, 19 nt, Artificial Sequence
  Description of Artificial Sequence: Synthetic oligonucleotide
  Antisense strand to SEQ ID NO: 819948
ucucccaaccauuagggug

SEQ ID NO: 819950 - RNA, 19 nt, Artificial Sequence
  Description of Artificial Sequence: Synthetic oligonucleotide
  Sense strand starting at position 2706 of SEQ ID NO: 587809
uugugaagaugaucaguca

SEQ ID NO: 819951 - RNA, 19 nt, Artificial Sequence
  Description of Artificial Sequence: Synthetic oligonucleotide
  Antisense strand to SEQ ID NO: 819950
ugacugaucaucuucacaa

SEQ ID NO: 819952 - RNA, 19 nt, Artificial Sequence
  Description of Artificial Sequence: Synthetic oligonucleotide
  Sense strand starting at position 2763 of SEQ ID NO: 587809
aucugaugagcagauguua

SEQ ID NO: 819953 - RNA, 19 nt, Artificial Sequence
  Description of Artificial Sequence: Synthetic oligonucleotide
  Antisense strand to SEQ ID NO: 819952
uaacaucugcucaucagau

SEQ ID NO: 819954 - RNA, 19 nt, Artificial Sequence
  Description of Artificial Sequence: Synthetic oligonucleotide
  Sense strand starting at position 2774 of SEQ ID NO: 587809
agauguuacacguagaaua

SEQ ID NO: 819955 - RNA, 19 nt, Artificial Sequence
  Description of Artificial Sequence: Synthetic oligonucleotide
  Antisense strand to SEQ ID NO: 819954
uauucuacguguaacaucu

SEQ ID NO: 819956 - RNA, 19 nt, Artificial Sequence
  Description of Artificial Sequence: Synthetic oligonucleotide
  Sense strand starting at position 2776 of SEQ ID NO: 587809
auguuacacguagaauaau

SEQ ID NO: 819957 - RNA, 19 nt, Artificial Sequence
  Description of Artificial Sequence: Synthetic oligonucleotide
  Antisense strand to SEQ ID NO: 819956
auuauucuacguguaacau

SEQ ID NO: 819958 - RNA, 19 nt, Artificial Sequence
  Description of Artificial Sequence: Synthetic oligonucleotide
  Sense strand starting at position 2816 of SEQ ID NO: 587809
cuguuauauccaggaauau

SEQ ID NO: 819959 - RNA, 19 nt, Artificial Sequence
  Description of Artificial Sequence: Synthetic oligonucleotide
  Antisense strand to SEQ ID NO: 819958
auauuccuggauauaacag

SEQ ID NO: 819960 - RNA, 19 nt, Artificial Sequence
  Description of Artificial Sequence: Synthetic oligonucleotide
  Sense strand starting at position 2829 of SEQ ID NO: 587809
gaauaucugguaugaguga

SEQ ID NO: 819961 - RNA, 19 nt, Artificial Sequence
  Description of Artificial Sequence: Synthetic oligonucleotide
  Antisense strand to SEQ ID NO: 819960
ucacucauaccagauauuc

SEQ ID NO: 819962 - RNA, 19 nt, Artificial Sequence
  Description of Artificial Sequence: Synthetic oligonucleotide
  Sense strand starting at position 2854 of SEQ ID NO: 587809
ggaggugccuucucuaaag

SEQ ID NO: 819963 - RNA, 19 nt, Artificial Sequence
  Description of Artificial Sequence: Synthetic oligonucleotide
  Antisense strand to SEQ ID NO: 819962
cuuuagagaaggcaccucc

SEQ ID NO: 819964 - RNA, 19 nt, Artificial Sequence
  Description of Artificial Sequence: Synthetic oligonucleotide
  Sense strand starting at position 2864 of SEQ ID NO: 587809
ucucuaaagucaucaggaa

SEQ ID NO: 819965 - RNA, 19 nt, Artificial Sequence
  Description of Artificial Sequence: Synthetic oligonucleotide
  Antisense strand to SEQ ID NO: 819964
uuccugaugacuuuagaga

SEQ ID NO: 819966 - RNA, 19 nt, Artificial Sequence
  Description of Artificial Sequence: Synthetic oligonucleotide
  Sense strand starting at position 2961 of SEQ ID NO: 587809
guugguuagcaugaacaau

SEQ ID NO: 819967 - RNA, 19 nt, Artificial Sequence
  Description of Artificial Sequence: Synthetic oligonucleotide
  Antisense strand to SEQ ID NO: 819966
auuguucaugcuaaccaac

SEQ ID NO: 819968 - RNA, 19 nt, Artificial Sequence
  Description of Artificial Sequence: Synthetic oligonucleotide
  Sense strand starting at position 3002 of SEQ ID NO: 587809
caguaucuguaaguuagga

SEQ ID NO: 819969 - RNA, 19 nt, Artificial Sequence
  Description of Artificial Sequence: Synthetic oligonucleotide
  Antisense strand to SEQ ID NO: 819968
uccuaacuuacagauacug

SEQ ID NO: 819970 - RNA, 19 nt, Artificial Sequence
  Description of Artificial Sequence: Synthetic oligonucleotide
  Sense strand starting at position 3004 of SEQ ID NO: 587809
guaucuguaaguuaggauu

SEQ ID NO: 819971 - RNA, 19 nt, Artificial Sequence
  Description of Artificial Sequence: Synthetic oligonucleotide
  Antisense strand to SEQ ID NO: 819970
aauccuaacuuacagauac

SEQ ID NO: 819972 - RNA, 19 nt, Artificial Sequence
  Description of Artificial Sequence: Synthetic oligonucleotide
  Sense strand starting at position 3010 of SEQ ID NO: 587809
guaaguuaggauugagaug

SEQ ID NO: 819973 - RNA, 19 nt, Artificial Sequence
  Description of Artificial Sequence: Synthetic oligonucleotide
  Antisense strand to SEQ ID NO: 819972
caucucaauccuaacuuac

SEQ ID NO: 819974 - RNA, 19 nt, Artificial Sequence
  Description of Artificial Sequence: Synthetic oligonucleotide
  Sense strand starting at position 3015 of SEQ ID NO: 587809
uuaggauugagaugggcuu

SEQ ID NO: 819975 - RNA, 19 nt, Artificial Sequence
  Description of Artificial Sequence: Synthetic oligonucleotide
  Antisense strand to SEQ ID NO: 819974
aagcccaucucaauccuaa

SEQ ID NO: 819976 - RNA, 19 nt, Artificial Sequence
  Description of Artificial Sequence: Synthetic oligonucleotide
  Sense strand starting at position 3182 of SEQ ID NO: 587809
guaguaaaugguuauuaug

SEQ ID NO: 819977 - RNA, 19 nt, Artificial Sequence
  Description of Artificial Sequence: Synthetic oligonucleotide
  Antisense strand to SEQ ID NO: 819976
cauaauaaccauuuacuac

SEQ ID NO: 819978 - RNA, 19 nt, Artificial Sequence
  Description of Artificial Sequence: Synthetic oligonucleotide
  Sense strand starting at position 3192 of SEQ ID NO: 587809
guuauuaugccuuaaggga

SEQ ID NO: 819979 - RNA, 19 nt, Artificial Sequence
  Description of Artificial Sequence: Synthetic oligonucleotide
  Antisense strand to SEQ ID NO: 819978
ucccuuaaggcauaauaac

SEQ ID NO: 819980 - RNA, 19 nt, Artificial Sequence
  Description of Artificial Sequence: Synthetic oligonucleotide
  Sense strand starting at position 3245 of SEQ ID NO: 587809
aguaguaaagcauagucau

SEQ ID NO: 819981 - RNA, 19 nt, Artificial Sequence
  Description of Artificial Sequence: Synthetic oligonucleotide
  Antisense strand to SEQ ID NO: 819980
augacuaugcuuuacuacu

SEQ ID NO: 819982 - RNA, 19 nt, Artificial Sequence
  Description of Artificial Sequence: Synthetic oligonucleotide
  Sense strand starting at position 3288 of SEQ ID NO: 587809
ggaggaguuuggccagaaa

SEQ ID NO: 819983 - RNA, 19 nt, Artificial Sequence
  Description of Artificial Sequence: Synthetic oligonucleotide
  Antisense strand to SEQ ID NO: 819982
uuucuggccaaacuccucc

SEQ ID NO: 819984 - RNA, 19 nt, Artificial Sequence
  Description of Artificial Sequence: Synthetic oligonucleotide
  Sense strand starting at position 3370 of SEQ ID NO: 587809
caguaugaggccuguaaag

SEQ ID NO: 819985 - RNA, 19 nt, Artificial Sequence
  Description of Artificial Sequence: Synthetic oligonucleotide
  Antisense strand to SEQ ID NO: 819984
cuuuacaggccucauacug

SEQ ID NO: 819986 - RNA, 19 nt, Artificial Sequence
  Description of Artificial Sequence: Synthetic oligonucleotide
  Sense strand starting at position 3372 of SEQ ID NO: 587809
guaugaggccuguaaagaa

SEQ ID NO: 819987 - RNA, 19 nt, Artificial Sequence
  Description of Artificial Sequence: Synthetic oligonucleotide
  Antisense strand to SEQ ID NO: 819986
uucuuuacaggccucauac

SEQ ID NO: 819988 - RNA, 19 nt, Artificial Sequence
  Description of Artificial Sequence: Synthetic oligonucleotide
  Sense strand starting at position 3381 of SEQ ID NO: 587809
cuguaaagaacguauuggu

SEQ ID NO: 819989 - RNA, 19 nt, Artificial Sequence
  Description of Artificial Sequence: Synthetic oligonucleotide
  Antisense strand to SEQ ID NO: 819988
accaauacguucuuuacag

SEQ ID NO: 819990 - RNA, 19 nt, Artificial Sequence
  Description of Artificial Sequence: Synthetic oligonucleotide
  Sense strand starting at position 3408 of SEQ ID NO: 587809
uuccucuuauuagugacau

SEQ ID NO: 819991 - RNA, 19 nt, Artificial Sequence
  Description of Artificial Sequence: Synthetic oligonucleotide
  Antisense strand to SEQ ID NO: 819990
augucacuaauaagaggaa

SEQ ID NO: 819992 - RNA, 19 nt, Artificial Sequence
  Description of Artificial Sequence: Synthetic oligonucleotide
  Sense strand starting at position 3496 of SEQ ID NO: 587809
cuggaaucccagcacuuau

SEQ ID NO: 819993 - RNA, 19 nt, Artificial Sequence
  Description of Artificial Sequence: Synthetic oligonucleotide
  Antisense strand to SEQ ID NO: 819992
auaagugcugggauuccag

SEQ ID NO: 819994 - RNA, 19 nt, Artificial Sequence
  Description of Artificial Sequence: Synthetic oligonucleotide
  Sense strand starting at position 3778 of SEQ ID NO: 587809
gaacuaugccagugauaau

SEQ ID NO: 819995 - RNA, 19 nt, Artificial Sequence
  Description of Artificial Sequence: Synthetic oligonucleotide
  Antisense strand to SEQ ID NO: 819994
auuaucacuggcauaguuc

SEQ ID NO: 819996 - RNA, 19 nt, Artificial Sequence
  Description of Artificial Sequence: Synthetic oligonucleotide
  Sense strand starting at position 3805 of SEQ ID NO: 587809
uuauaaauguugucugacu

SEQ ID NO: 819997 - RNA, 19 nt, Artificial Sequence
  Description of Artificial Sequence: Synthetic oligonucleotide
  Antisense strand to SEQ ID NO: 819996
agucagacaacauuuauaa

SEQ ID NO: 819998 - RNA, 19 nt, Artificial Sequence
  Description of Artificial Sequence: Synthetic oligonucleotide
  Sense strand starting at position 3867 of SEQ ID NO: 587809
uuaaucacagguugcaaua

SEQ ID NO: 819999 - RNA, 19 nt, Artificial Sequence
  Description of Artificial Sequence: Synthetic oligonucleotide
  Antisense strand to SEQ ID NO: 819998
uauugcaaccugugauuaa

SEQ ID NO: 820000 - RNA, 19 nt, Artificial Sequence
  Description of Artificial Sequence: Synthetic oligonucleotide
  Sense strand starting at position 3915 of SEQ ID NO: 587809
auacaccuccaguguaaau

SEQ ID NO: 820001 - RNA, 19 nt, Artificial Sequence
  Description of Artificial Sequence: Synthetic oligonucleotide
  Antisense strand to SEQ ID NO: 820000
auuuacacuggagguguau

SEQ ID NO: 820002 - RNA, 19 nt, Artificial Sequence
  Description of Artificial Sequence: Synthetic oligonucleotide
  Sense strand starting at position 3976 of SEQ ID NO: 587809
aguaauucuuuccuaggga

SEQ ID NO: 820003 - RNA, 19 nt, Artificial Sequence
  Description of Artificial Sequence: Synthetic oligonucleotide
  Antisense strand to SEQ ID NO: 820002
ucccuaggaaagaauuacu

SEQ ID NO: 820004 - RNA, 19 nt, Artificial Sequence
  Description of Artificial Sequence: Synthetic oligonucleotide
  Sense strand starting at position 400 of SEQ ID NO: 587810
gcagacuauuuagaaaguu

SEQ ID NO: 820005 - RNA, 19 nt, Artificial Sequence
  Description of Artificial Sequence: Synthetic oligonucleotide
  Antisense strand to SEQ ID NO: 820004
aacuuucuaaauagucugc

SEQ ID NO: 820006 - RNA, 19 nt, Artificial Sequence
  Description of Artificial Sequence: Synthetic oligonucleotide
  Sense strand starting at position 415 of SEQ ID NO: 587810
aguuuauucucauuugcca

SEQ ID NO: 820007 - RNA, 19 nt, Artificial Sequence
  Description of Artificial Sequence: Synthetic oligonucleotide
  Antisense strand to SEQ ID NO: 820006
uggcaaaugagaauaaacu

SEQ ID NO: 820008 - RNA, 19 nt, Artificial Sequence
  Description of Artificial Sequence: Synthetic oligonucleotide
  Sense strand starting at position 480 of SEQ ID NO: 587810
aggguaauguaccauuuau

SEQ ID NO: 820009 - RNA, 19 nt, Artificial Sequence
  Description of Artificial Sequence: Synthetic oligonucleotide
  Antisense strand to SEQ ID NO: 820008
auaaaugguacauuacccu

SEQ ID NO: 820010 - RNA, 19 nt, Artificial Sequence
  Description of Artificial Sequence: Synthetic oligonucleotide
  Sense strand starting at position 656 of SEQ ID NO: 587810
ccucaaguagucugcaauu

SEQ ID NO: 820011 - RNA, 19 nt, Artificial Sequence
  Description of Artificial Sequence: Synthetic oligonucleotide
  Antisense strand to SEQ ID NO: 820010
aauugcagacuacuugagg

SEQ ID NO: 820012 - RNA, 19 nt, Artificial Sequence
  Description of Artificial Sequence: Synthetic oligonucleotide
  Sense strand starting at position 658 of SEQ ID NO: 587810
ucaaguagucugcaauuaa

SEQ ID NO: 820013 - RNA, 19 nt, Artificial Sequence
  Description of Artificial Sequence: Synthetic oligonucleotide
  Antisense strand to SEQ ID NO: 820012
uuaauugcagacuacuuga

SEQ ID NO: 820014 - RNA, 19 nt, Artificial Sequence
  Description of Artificial Sequence: Synthetic oligonucleotide
  Sense strand starting at position 790 of SEQ ID NO: 587810
ucacuuaagucagugaaau

SEQ ID NO: 820015 - RNA, 19 nt, Artificial Sequence
  Description of Artificial Sequence: Synthetic oligonucleotide
  Antisense strand to SEQ ID NO: 820014
auuucacugacuuaaguga

SEQ ID NO: 820016 - RNA, 19 nt, Artificial Sequence
  Description of Artificial Sequence: Synthetic oligonucleotide
  Sense strand starting at position 884 of SEQ ID NO: 587810
acguaacgugccucuucua

SEQ ID NO: 820017 - RNA, 19 nt, Artificial Sequence
  Description of Artificial Sequence: Synthetic oligonucleotide
  Antisense strand to SEQ ID NO: 820016
uagaagaggcacguuacgu

SEQ ID NO: 820018 - RNA, 19 nt, Artificial Sequence
  Description of Artificial Sequence: Synthetic oligonucleotide
  Sense strand starting at position 885 of SEQ ID NO: 587810
cguaacgugccucuucuaa

SEQ ID NO: 820019 - RNA, 19 nt, Artificial Sequence
  Description of Artificial Sequence: Synthetic oligonucleotide
  Antisense strand to SEQ ID NO: 820018
uuagaagaggcacguuacg

SEQ ID NO: 820020 - RNA, 19 nt, Artificial Sequence
  Description of Artificial Sequence: Synthetic oligonucleotide
  Sense strand starting at position 1047 of SEQ ID NO: 587810
cugcgacuacuucguaaag

SEQ ID NO: 820021 - RNA, 19 nt, Artificial Sequence
  Description of Artificial Sequence: Synthetic oligonucleotide
  Antisense strand to SEQ ID NO: 820020
cuuuacgaaguagucgcag

SEQ ID NO: 820022 - RNA, 19 nt, Artificial Sequence
  Description of Artificial Sequence: Synthetic oligonucleotide
  Sense strand starting at position 1921 of SEQ ID NO: 587810
gagggaacucuucgucgca

SEQ ID NO: 820023 - RNA, 19 nt, Artificial Sequence
  Description of Artificial Sequence: Synthetic oligonucleotide
  Antisense strand to SEQ ID NO: 820022
ugcgacgaagaguucccuc

SEQ ID NO: 820024 - RNA, 19 nt, Artificial Sequence
  Description of Artificial Sequence: Synthetic oligonucleotide
  Sense strand starting at position 2182 of SEQ ID NO: 587810
cucgacuuucaacgggaga

SEQ ID NO: 820025 - RNA, 19 nt, Artificial Sequence
  Description of Artificial Sequence: Synthetic oligonucleotide
  Antisense strand to SEQ ID NO: 820024
ucucccguugaaagucgag

SEQ ID NO: 820026 - RNA, 19 nt, Artificial Sequence
  Description of Artificial Sequence: Synthetic oligonucleotide
  Sense strand starting at position 2229 of SEQ ID NO: 587810
gguagaugugcugagaauc

SEQ ID NO: 820027 - RNA, 19 nt, Artificial Sequence
  Description of Artificial Sequence: Synthetic oligonucleotide
  Antisense strand to SEQ ID NO: 820026
gauucucagcacaucuacc

SEQ ID NO: 820028 - RNA, 19 nt, Artificial Sequence
  Description of Artificial Sequence: Synthetic oligonucleotide
  Sense strand starting at position 2237 of SEQ ID NO: 587810
ugcugagaaucuucgguag

SEQ ID NO: 820029 - RNA, 19 nt, Artificial Sequence
  Description of Artificial Sequence: Synthetic oligonucleotide
  Antisense strand to SEQ ID NO: 820028
cuaccgaagauucucagca

SEQ ID NO: 820030 - RNA, 19 nt, Artificial Sequence
  Description of Artificial Sequence: Synthetic oligonucleotide
  Sense strand starting at position 2240 of SEQ ID NO: 587810
ugagaaucuucgguagaca

SEQ ID NO: 820031 - RNA, 19 nt, Artificial Sequence
  Description of Artificial Sequence: Synthetic oligonucleotide
  Antisense strand to SEQ ID NO: 820030
ugucuaccgaagauucuca

SEQ ID NO: 820032 - RNA, 19 nt, Artificial Sequence
  Description of Artificial Sequence: Synthetic oligonucleotide
  Sense strand starting at position 2243 of SEQ ID NO: 587810
gaaucuucgguagacaacu

SEQ ID NO: 820033 - RNA, 19 nt, Artificial Sequence
  Description of Artificial Sequence: Synthetic oligonucleotide
  Antisense strand to SEQ ID NO: 820032
aguugucuaccgaagauuc

SEQ ID NO: 820034 - RNA, 19 nt, Artificial Sequence
  Description of Artificial Sequence: Synthetic oligonucleotide
  Sense strand starting at position 2249 of SEQ ID NO: 587810
ucgguagacaacugucgaa

SEQ ID NO: 820035 - RNA, 19 nt, Artificial Sequence
  Description of Artificial Sequence: Synthetic oligonucleotide
  Antisense strand to SEQ ID NO: 820034
uucgacaguugucuaccga

SEQ ID NO: 820036 - RNA, 19 nt, Artificial Sequence
  Description of Artificial Sequence: Synthetic oligonucleotide
  Sense strand starting at position 2293 of SEQ ID NO: 587810
uccagaaguuaaggaaaga

SEQ ID NO: 820037 - RNA, 19 nt, Artificial Sequence
  Description of Artificial Sequence: Synthetic oligonucleotide
  Antisense strand to SEQ ID NO: 820036
ucuuuccuuaacuucugga

SEQ ID NO: 820038 - RNA, 19 nt, Artificial Sequence
  Description of Artificial Sequence: Synthetic oligonucleotide
  Sense strand starting at position 2741 of SEQ ID NO: 587810
cuuagauguucgccaagua

SEQ ID NO: 820039 - RNA, 19 nt, Artificial Sequence
  Description of Artificial Sequence: Synthetic oligonucleotide
  Antisense strand to SEQ ID NO: 820038
uacuuggcgaacaucuaag

SEQ ID NO: 820040 - RNA, 19 nt, Artificial Sequence
  Description of Artificial Sequence: Synthetic oligonucleotide
  Sense strand starting at position 2742 of SEQ ID NO: 587810
uuagauguucgccaaguac

SEQ ID NO: 820041 - RNA, 19 nt, Artificial Sequence
  Description of Artificial Sequence: Synthetic oligonucleotide
  Antisense strand to SEQ ID NO: 820040
guacuuggcgaacaucuaa

SEQ ID NO: 820042 - RNA, 19 nt, Artificial Sequence
  Description of Artificial Sequence: Synthetic oligonucleotide
  Sense strand starting at position 2824 of SEQ ID NO: 587810
ugugaagugucuuuauaaa

SEQ ID NO: 820043 - RNA, 19 nt, Artificial Sequence
  Description of Artificial Sequence: Synthetic oligonucleotide
  Antisense strand to SEQ ID NO: 820042
uuuauaaagacacuucaca

SEQ ID NO: 820044 - RNA, 19 nt, Artificial Sequence
  Description of Artificial Sequence: Synthetic oligonucleotide
  Sense strand starting at position 2923 of SEQ ID NO: 587810
acagguguacucugugaug

SEQ ID NO: 820045 - RNA, 19 nt, Artificial Sequence
  Description of Artificial Sequence: Synthetic oligonucleotide
  Antisense strand to SEQ ID NO: 820044
caucacagaguacaccugu

SEQ ID NO: 820046 - RNA, 19 nt, Artificial Sequence
  Description of Artificial Sequence: Synthetic oligonucleotide
  Sense strand starting at position 2934 of SEQ ID NO: 587810
cugugaugccugcuacgua

SEQ ID NO: 820047 - RNA, 19 nt, Artificial Sequence
  Description of Artificial Sequence: Synthetic oligonucleotide
  Antisense strand to SEQ ID NO: 820046
uacguagcaggcaucacag

SEQ ID NO: 820048 - RNA, 19 nt, Artificial Sequence
  Description of Artificial Sequence: Synthetic oligonucleotide
  Sense strand starting at position 2946 of SEQ ID NO: 587810
cuacguaauagcuggugaa

SEQ ID NO: 820049 - RNA, 19 nt, Artificial Sequence
  Description of Artificial Sequence: Synthetic oligonucleotide
  Antisense strand to SEQ ID NO: 820048
uucaccagcuauuacguag

SEQ ID NO: 820050 - RNA, 19 nt, Artificial Sequence
  Description of Artificial Sequence: Synthetic oligonucleotide
  Sense strand starting at position 2947 of SEQ ID NO: 587810
uacguaauagcuggugaac

SEQ ID NO: 820051 - RNA, 19 nt, Artificial Sequence
  Description of Artificial Sequence: Synthetic oligonucleotide
  Antisense strand to SEQ ID NO: 820050
guucaccagcuauuacgua

SEQ ID NO: 820052 - RNA, 19 nt, Artificial Sequence
  Description of Artificial Sequence: Synthetic oligonucleotide
  Sense strand starting at position 2959 of SEQ ID NO: 587810
ggugaacaaccuuguguuu

SEQ ID NO: 820053 - RNA, 19 nt, Artificial Sequence
  Description of Artificial Sequence: Synthetic oligonucleotide
  Antisense strand to SEQ ID NO: 820052
aaacacaagguuguucacc

SEQ ID NO: 820054 - RNA, 19 nt, Artificial Sequence
  Description of Artificial Sequence: Synthetic oligonucleotide
  Sense strand starting at position 3029 of SEQ ID NO: 587810
ugauguauuuguggaugga

SEQ ID NO: 820055 - RNA, 19 nt, Artificial Sequence
  Description of Artificial Sequence: Synthetic oligonucleotide
  Antisense strand to SEQ ID NO: 820054
uccauccacaaauacauca

SEQ ID NO: 820056 - RNA, 19 nt, Artificial Sequence
  Description of Artificial Sequence: Synthetic oligonucleotide
  Sense strand starting at position 3054 of SEQ ID NO: 587810
gcucauuaagcagaaagua

SEQ ID NO: 820057 - RNA, 19 nt, Artificial Sequence
  Description of Artificial Sequence: Synthetic oligonucleotide
  Antisense strand to SEQ ID NO: 820056
uacuuucugcuuaaugagc

SEQ ID NO: 820058 - RNA, 19 nt, Artificial Sequence
  Description of Artificial Sequence: Synthetic oligonucleotide
  Sense strand starting at position 3331 of SEQ ID NO: 587810
aguaaauauguaugucuca

SEQ ID NO: 820059 - RNA, 19 nt, Artificial Sequence
  Description of Artificial Sequence: Synthetic oligonucleotide
  Antisense strand to SEQ ID NO: 820058
ugagacauacauauuuacu

SEQ ID NO: 820060 - RNA, 19 nt, Artificial Sequence
  Description of Artificial Sequence: Synthetic oligonucleotide
  Sense strand starting at position 3340 of SEQ ID NO: 587810
guaugucucagauauaugu

SEQ ID NO: 820061 - RNA, 19 nt, Artificial Sequence
  Description of Artificial Sequence: Synthetic oligonucleotide
  Antisense strand to SEQ ID NO: 820060
acauauaucugagacauac

SEQ ID NO: 820062 - RNA, 19 nt, Artificial Sequence
  Description of Artificial Sequence: Synthetic oligonucleotide
  Sense strand starting at position 3376 of SEQ ID NO: 587810
auaaguauuugugacuugu

SEQ ID NO: 820063 - RNA, 19 nt, Artificial Sequence
  Description of Artificial Sequence: Synthetic oligonucleotide
  Antisense strand to SEQ ID NO: 820062
acaagucacaaauacuuau

SEQ ID NO: 820064 - RNA, 19 nt, Artificial Sequence
  Description of Artificial Sequence: Synthetic oligonucleotide
  Sense strand starting at position 3378 of SEQ ID NO: 587810
aaguauuugugacuuguuu

SEQ ID NO: 820065 - RNA, 19 nt, Artificial Sequence
  Description of Artificial Sequence: Synthetic oligonucleotide
  Antisense strand to SEQ ID NO: 820064
aaacaagucacaaauacuu

SEQ ID NO: 820066 - RNA, 19 nt, Artificial Sequence
  Description of Artificial Sequence: Synthetic oligonucleotide
  Sense strand starting at position 3384 of SEQ ID NO: 587810
uugugacuuguuugaaaug

SEQ ID NO: 820067 - RNA, 19 nt, Artificial Sequence
  Description of Artificial Sequence: Synthetic oligonucleotide
  Antisense strand to SEQ ID NO: 820066
cauuucaaacaagucacaa

SEQ ID NO: 820068 - RNA, 19 nt, Artificial Sequence
  Description of Artificial Sequence: Synthetic oligonucleotide
  Sense strand starting at position 3395 of SEQ ID NO: 587810
uugaaaugucaaggugauc

SEQ ID NO: 820069 - RNA, 19 nt, Artificial Sequence
  Description of Artificial Sequence: Synthetic oligonucleotide
  Antisense strand to SEQ ID NO: 820068
gaucaccuugacauuucaa

SEQ ID NO: 820070 - RNA, 19 nt, Artificial Sequence
  Description of Artificial Sequence: Synthetic oligonucleotide
  Sense strand starting at position 3400 of SEQ ID NO: 587810
augucaaggugaucuauac

SEQ ID NO: 820071 - RNA, 19 nt, Artificial Sequence
  Description of Artificial Sequence: Synthetic oligonucleotide
  Antisense strand to SEQ ID NO: 820070
guauagaucaccuugacau

SEQ ID NO: 820072 - RNA, 19 nt, Artificial Sequence
  Description of Artificial Sequence: Synthetic oligonucleotide
  Sense strand starting at position 3443 of SEQ ID NO: 587810
gagguaggcucauugacua

SEQ ID NO: 820073 - RNA, 19 nt, Artificial Sequence
  Description of Artificial Sequence: Synthetic oligonucleotide
  Antisense strand to SEQ ID NO: 820072
uagucaaugagccuaccuc

SEQ ID NO: 820074 - RNA, 19 nt, Artificial Sequence
  Description of Artificial Sequence: Synthetic oligonucleotide
  Sense strand starting at position 3447 of SEQ ID NO: 587810
uaggcucauugacuagaua

SEQ ID NO: 820075 - RNA, 19 nt, Artificial Sequence
  Description of Artificial Sequence: Synthetic oligonucleotide
  Antisense strand to SEQ ID NO: 820074
uaucuagucaaugagccua

SEQ ID NO: 820076 - RNA, 19 nt, Artificial Sequence
  Description of Artificial Sequence: Synthetic oligonucleotide
  Sense strand starting at position 3450 of SEQ ID NO: 587810
gcucauugacuagauauca

SEQ ID NO: 820077 - RNA, 19 nt, Artificial Sequence
  Description of Artificial Sequence: Synthetic oligonucleotide
  Antisense strand to SEQ ID NO: 820076
ugauaucuagucaaugagc

SEQ ID NO: 820078 - RNA, 19 nt, Artificial Sequence
  Description of Artificial Sequence: Synthetic oligonucleotide
  Sense strand starting at position 3474 of SEQ ID NO: 587810
cuugauaauccauaguuug

SEQ ID NO: 820079 - RNA, 19 nt, Artificial Sequence
  Description of Artificial Sequence: Synthetic oligonucleotide
  Antisense strand to SEQ ID NO: 820078
caaacuauggauuaucaag

SEQ ID NO: 820080 - RNA, 19 nt, Artificial Sequence
  Description of Artificial Sequence: Synthetic oligonucleotide
  Sense strand starting at position 3864 of SEQ ID NO: 587810
uauuaugugccaggacgua

SEQ ID NO: 820081 - RNA, 19 nt, Artificial Sequence
  Description of Artificial Sequence: Synthetic oligonucleotide
  Antisense strand to SEQ ID NO: 820080
uacguccuggcacauaaua

SEQ ID NO: 820082 - RNA, 19 nt, Artificial Sequence
  Description of Artificial Sequence: Synthetic oligonucleotide
  Sense strand starting at position 3876 of SEQ ID NO: 587810
ggacguauacauuaucuca

SEQ ID NO: 820083 - RNA, 19 nt, Artificial Sequence
  Description of Artificial Sequence: Synthetic oligonucleotide
  Antisense strand to SEQ ID NO: 820082
ugagauaauguauacgucc

SEQ ID NO: 820084 - RNA, 19 nt, Artificial Sequence
  Description of Artificial Sequence: Synthetic oligonucleotide
  Sense strand starting at position 174 of SEQ ID NO: 587811
ggacaaugugcagagaagu

SEQ ID NO: 820085 - RNA, 19 nt, Artificial Sequence
  Description of Artificial Sequence: Synthetic oligonucleotide
  Antisense strand to SEQ ID NO: 820084
acuucucugcacauugucc

SEQ ID NO: 820086 - RNA, 19 nt, Artificial Sequence
  Description of Artificial Sequence: Synthetic oligonucleotide
  Sense strand starting at position 185 of SEQ ID NO: 587811
agagaaguuguauguauua

SEQ ID NO: 820087 - RNA, 19 nt, Artificial Sequence
  Description of Artificial Sequence: Synthetic oligonucleotide
  Antisense strand to SEQ ID NO: 820086
uaauacauacaacuucucu

SEQ ID NO: 820088 - RNA, 19 nt, Artificial Sequence
  Description of Artificial Sequence: Synthetic oligonucleotide
  Sense strand starting at position 253 of SEQ ID NO: 587811
acaacauagugucucaaca

SEQ ID NO: 820089 - RNA, 19 nt, Artificial Sequence
  Description of Artificial Sequence: Synthetic oligonucleotide
  Antisense strand to SEQ ID NO: 820088
uguugagacacuauguugu

SEQ ID NO: 820090 - RNA, 19 nt, Artificial Sequence
  Description of Artificial Sequence: Synthetic oligonucleotide
  Sense strand starting at position 283 of SEQ ID NO: 587811
auucuaacgcuuuagaauc

SEQ ID NO: 820091 - RNA, 19 nt, Artificial Sequence
  Description of Artificial Sequence: Synthetic oligonucleotide
  Antisense strand to SEQ ID NO: 820090
gauucuaaagcguuagaau

SEQ ID NO: 820092 - RNA, 19 nt, Artificial Sequence
  Description of Artificial Sequence: Synthetic oligonucleotide
  Sense strand starting at position 330 of SEQ ID NO: 587811
ggauccaauaccuguguga

SEQ ID NO: 820093 - RNA, 19 nt, Artificial Sequence
  Description of Artificial Sequence: Synthetic oligonucleotide
  Antisense strand to SEQ ID NO: 820092
ucacacagguauuggaucc

SEQ ID NO: 820094 - RNA, 19 nt, Artificial Sequence
  Description of Artificial Sequence: Synthetic oligonucleotide
  Sense strand starting at position 332 of SEQ ID NO: 587811
auccaauaccugugugaau

SEQ ID NO: 820095 - RNA, 19 nt, Artificial Sequence
  Description of Artificial Sequence: Synthetic oligonucleotide
  Antisense strand to SEQ ID NO: 820094
auucacacagguauuggau

SEQ ID NO: 820096 - RNA, 19 nt, Artificial Sequence
  Description of Artificial Sequence: Synthetic oligonucleotide
  Sense strand starting at position 333 of SEQ ID NO: 587811
uccaauaccugugugaauc

SEQ ID NO: 820097 - RNA, 19 nt, Artificial Sequence
  Description of Artificial Sequence: Synthetic oligonucleotide
  Antisense strand to SEQ ID NO: 820096
gauucacacagguauugga

SEQ ID NO: 820098 - RNA, 19 nt, Artificial Sequence
  Description of Artificial Sequence: Synthetic oligonucleotide
  Sense strand starting at position 359 of SEQ ID NO: 587811
gucauauuuagacgugcac

SEQ ID NO: 820099 - RNA, 19 nt, Artificial Sequence
  Description of Artificial Sequence: Synthetic oligonucleotide
  Antisense strand to SEQ ID NO: 820098
gugcacgucuaaauaugac

SEQ ID NO: 820100 - RNA, 19 nt, Artificial Sequence
  Description of Artificial Sequence: Synthetic oligonucleotide
  Sense strand starting at position 407 of SEQ ID NO: 587811
ccucuagaauguuuaagaa

SEQ ID NO: 820101 - RNA, 19 nt, Artificial Sequence
  Description of Artificial Sequence: Synthetic oligonucleotide
  Antisense strand to SEQ ID NO: 820100
uucuuaaacauucuagagg

SEQ ID NO: 820102 - RNA, 19 nt, Artificial Sequence
  Description of Artificial Sequence: Synthetic oligonucleotide
  Sense strand starting at position 423 of SEQ ID NO: 587811
gaacucaacugugugggau

SEQ ID NO: 820103 - RNA, 19 nt, Artificial Sequence
  Description of Artificial Sequence: Synthetic oligonucleotide
  Antisense strand to SEQ ID NO: 820102
aucccacacaguugaguuc

SEQ ID NO: 820104 - RNA, 19 nt, Artificial Sequence
  Description of Artificial Sequence: Synthetic oligonucleotide
  Sense strand starting at position 429 of SEQ ID NO: 587811
aacugugugggauguuaag

SEQ ID NO: 820105 - RNA, 19 nt, Artificial Sequence
  Description of Artificial Sequence: Synthetic oligonucleotide
  Antisense strand to SEQ ID NO: 820104
cuuaacaucccacacaguu

SEQ ID NO: 820106 - RNA, 19 nt, Artificial Sequence
  Description of Artificial Sequence: Synthetic oligonucleotide
  Sense strand starting at position 444 of SEQ ID NO: 587811
uaagaaguacgccagaaau

SEQ ID NO: 820107 - RNA, 19 nt, Artificial Sequence
  Description of Artificial Sequence: Synthetic oligonucleotide
  Antisense strand to SEQ ID NO: 820106
auuucuggcguacuucuua

SEQ ID NO: 820108 - RNA, 19 nt, Artificial Sequence
  Description of Artificial Sequence: Synthetic oligonucleotide
  Sense strand starting at position 469 of SEQ ID NO: 587811
uuggacuccagauaacgua

SEQ ID NO: 820109 - RNA, 19 nt, Artificial Sequence
  Description of Artificial Sequence: Synthetic oligonucleotide
  Antisense strand to SEQ ID NO: 820108
uacguuaucuggaguccaa

SEQ ID NO: 820110 - RNA, 19 nt, Artificial Sequence
  Description of Artificial Sequence: Synthetic oligonucleotide
  Sense strand starting at position 497 of SEQ ID NO: 587811
agagucauuugguaggaua

SEQ ID NO: 820111 - RNA, 19 nt, Artificial Sequence
  Description of Artificial Sequence: Synthetic oligonucleotide
  Antisense strand to SEQ ID NO: 820110
uauccuaccaaaugacucu

SEQ ID NO: 820112 - RNA, 19 nt, Artificial Sequence
  Description of Artificial Sequence: Synthetic oligonucleotide
  Sense strand starting at position 589 of SEQ ID NO: 587811
uuuguuuccaccgaaggaa

SEQ ID NO: 820113 - RNA, 19 nt, Artificial Sequence
  Description of Artificial Sequence: Synthetic oligonucleotide
  Antisense strand to SEQ ID NO: 820112
uuccuucgguggaaacaaa

SEQ ID NO: 820114 - RNA, 19 nt, Artificial Sequence
  Description of Artificial Sequence: Synthetic oligonucleotide
  Sense strand starting at position 795 of SEQ ID NO: 587811
gggucuuugacucagcaga

SEQ ID NO: 820115 - RNA, 19 nt, Artificial Sequence
  Description of Artificial Sequence: Synthetic oligonucleotide
  Antisense strand to SEQ ID NO: 820114
ucugcugagucaaagaccc

SEQ ID NO: 820116 - RNA, 19 nt, Artificial Sequence
  Description of Artificial Sequence: Synthetic oligonucleotide
  Sense strand starting at position 813 of SEQ ID NO: 587811
agaagaauguggcugauga

SEQ ID NO: 820117 - RNA, 19 nt, Artificial Sequence
  Description of Artificial Sequence: Synthetic oligonucleotide
  Antisense strand to SEQ ID NO: 820116
ucaucagccacauucuucu

SEQ ID NO: 820118 - RNA, 19 nt, Artificial Sequence
  Description of Artificial Sequence: Synthetic oligonucleotide
  Sense strand starting at position 814 of SEQ ID NO: 587811
gaagaauguggcugaugag

SEQ ID NO: 820119 - RNA, 19 nt, Artificial Sequence
  Description of Artificial Sequence: Synthetic oligonucleotide
  Antisense strand to SEQ ID NO: 820118
cucaucagccacauucuuc

SEQ ID NO: 820120 - RNA, 19 nt, Artificial Sequence
  Description of Artificial Sequence: Synthetic oligonucleotide
  Sense strand starting at position 815 of SEQ ID NO: 587811
aagaauguggcugaugagu

SEQ ID NO: 820121 - RNA, 19 nt, Artificial Sequence
  Description of Artificial Sequence: Synthetic oligonucleotide
  Antisense strand to SEQ ID NO: 820120
acucaucagccacauucuu

SEQ ID NO: 820122 - RNA, 19 nt, Artificial Sequence
  Description of Artificial Sequence: Synthetic oligonucleotide
  Sense strand starting at position 1023 of SEQ ID NO: 587811
ccgagucccgauuaucuga

SEQ ID NO: 820123 - RNA, 19 nt, Artificial Sequence
  Description of Artificial Sequence: Synthetic oligonucleotide
  Antisense strand to SEQ ID NO: 820122
ucagauaaucgggacucgg

SEQ ID NO: 820124 - RNA, 19 nt, Artificial Sequence
  Description of Artificial Sequence: Synthetic oligonucleotide
  Sense strand starting at position 1071 of SEQ ID NO: 587811
cuuauaaaucccgggcaaa

SEQ ID NO: 820125 - RNA, 19 nt, Artificial Sequence
  Description of Artificial Sequence: Synthetic oligonucleotide
  Antisense strand to SEQ ID NO: 820124
uuugcccgggauuuauaag

SEQ ID NO: 820126 - RNA, 19 nt, Artificial Sequence
  Description of Artificial Sequence: Synthetic oligonucleotide
  Sense strand starting at position 1072 of SEQ ID NO: 587811
uuauaaaucccgggcaaac

SEQ ID NO: 820127 - RNA, 19 nt, Artificial Sequence
  Description of Artificial Sequence: Synthetic oligonucleotide
  Antisense strand to SEQ ID NO: 820126
guuugcccgggauuuauaa

SEQ ID NO: 820128 - RNA, 19 nt, Artificial Sequence
  Description of Artificial Sequence: Synthetic oligonucleotide
  Sense strand starting at position 2785 of SEQ ID NO: 587811
gugaauauuccuuauugca

SEQ ID NO: 820129 - RNA, 19 nt, Artificial Sequence
  Description of Artificial Sequence: Synthetic oligonucleotide
  Antisense strand to SEQ ID NO: 820128
ugcaauaaggaauauucac

SEQ ID NO: 820130 - RNA, 19 nt, Artificial Sequence
  Description of Artificial Sequence: Synthetic oligonucleotide
  Sense strand starting at position 2896 of SEQ ID NO: 587811
ugcguacuuguuuccucau

SEQ ID NO: 820131 - RNA, 19 nt, Artificial Sequence
  Description of Artificial Sequence: Synthetic oligonucleotide
  Antisense strand to SEQ ID NO: 820130
augaggaaacaaguacgca

SEQ ID NO: 820132 - RNA, 19 nt, Artificial Sequence
  Description of Artificial Sequence: Synthetic oligonucleotide
  Sense strand starting at position 2957 of SEQ ID NO: 587811
aggugauuauagguugaua

SEQ ID NO: 820133 - RNA, 19 nt, Artificial Sequence
  Description of Artificial Sequence: Synthetic oligonucleotide
  Antisense strand to SEQ ID NO: 820132
uaucaaccuauaaucaccu

SEQ ID NO: 820134 - RNA, 19 nt, Artificial Sequence
  Description of Artificial Sequence: Synthetic oligonucleotide
  Sense strand starting at position 2959 of SEQ ID NO: 587811
gugauuauagguugauaga

SEQ ID NO: 820135 - RNA, 19 nt, Artificial Sequence
  Description of Artificial Sequence: Synthetic oligonucleotide
  Antisense strand to SEQ ID NO: 820134
ucuaucaaccuauaaucac

SEQ ID NO: 820136 - RNA, 19 nt, Artificial Sequence
  Description of Artificial Sequence: Synthetic oligonucleotide
  Sense strand starting at position 2968 of SEQ ID NO: 587811
gguugauagagcuauauac

SEQ ID NO: 820137 - RNA, 19 nt, Artificial Sequence
  Description of Artificial Sequence: Synthetic oligonucleotide
  Antisense strand to SEQ ID NO: 820136
guauauagcucuaucaacc

SEQ ID NO: 820138 - RNA, 19 nt, Artificial Sequence
  Description of Artificial Sequence: Synthetic oligonucleotide
  Sense strand starting at position 3009 of SEQ ID NO: 587811
uucguuuagguuuacaaua

SEQ ID NO: 820139 - RNA, 19 nt, Artificial Sequence
  Description of Artificial Sequence: Synthetic oligonucleotide
  Antisense strand to SEQ ID NO: 820138
uauuguaaaccuaaacgaa

SEQ ID NO: 820140 - RNA, 19 nt, Artificial Sequence
  Description of Artificial Sequence: Synthetic oligonucleotide
  Sense strand starting at position 3251 of SEQ ID NO: 587811
guuaaacucuuagauuuga

SEQ ID NO: 820141 - RNA, 19 nt, Artificial Sequence
  Description of Artificial Sequence: Synthetic oligonucleotide
  Antisense strand to SEQ ID NO: 820140
ucaaaucuaagaguuuaac

SEQ ID NO: 820142 - RNA, 19 nt, Artificial Sequence
  Description of Artificial Sequence: Synthetic oligonucleotide
  Sense strand starting at position 3262 of SEQ ID NO: 587811
agauuugacugcuacaaag

SEQ ID NO: 820143 - RNA, 19 nt, Artificial Sequence
  Description of Artificial Sequence: Synthetic oligonucleotide
  Antisense strand to SEQ ID NO: 820142
cuuuguagcagucaaaucu

SEQ ID NO: 820144 - RNA, 19 nt, Artificial Sequence
  Description of Artificial Sequence: Synthetic oligonucleotide
  Sense strand starting at position 3272 of SEQ ID NO: 587811
gcuacaaagguauaaaugu

SEQ ID NO: 820145 - RNA, 19 nt, Artificial Sequence
  Description of Artificial Sequence: Synthetic oligonucleotide
  Antisense strand to SEQ ID NO: 820144
acauuuauaccuuuguagc

SEQ ID NO: 820146 - RNA, 19 nt, Artificial Sequence
  Description of Artificial Sequence: Synthetic oligonucleotide
  Sense strand starting at position 3433 of SEQ ID NO: 587811
ucuuuauacuugguuuaag

SEQ ID NO: 820147 - RNA, 19 nt, Artificial Sequence
  Description of Artificial Sequence: Synthetic oligonucleotide
  Antisense strand to SEQ ID NO: 820146
cuuaaaccaaguauaaaga

SEQ ID NO: 820148 - RNA, 19 nt, Artificial Sequence
  Description of Artificial Sequence: Synthetic oligonucleotide
  Sense strand starting at position 3540 of SEQ ID NO: 587811
cuuggaaucucagcacuua

SEQ ID NO: 820149 - RNA, 19 nt, Artificial Sequence
  Description of Artificial Sequence: Synthetic oligonucleotide
  Antisense strand to SEQ ID NO: 820148
uaagugcugagauuccaag

SEQ ID NO: 820150 - RNA, 19 nt, Artificial Sequence
  Description of Artificial Sequence: Synthetic oligonucleotide
  Sense strand starting at position 3541 of SEQ ID NO: 587811
uuggaaucucagcacuuaa

SEQ ID NO: 820151 - RNA, 19 nt, Artificial Sequence
  Description of Artificial Sequence: Synthetic oligonucleotide
  Antisense strand to SEQ ID NO: 820150
uuaagugcugagauuccaa

SEQ ID NO: 820152 - RNA, 19 nt, Artificial Sequence
  Description of Artificial Sequence: Synthetic oligonucleotide
  Sense strand starting at position 3623 of SEQ ID NO: 587811
agacucuguucuccacaga

SEQ ID NO: 820153 - RNA, 19 nt, Artificial Sequence
  Description of Artificial Sequence: Synthetic oligonucleotide
  Antisense strand to SEQ ID NO: 820152
ucuguggagaacagagucu

SEQ ID NO: 820154 - RNA, 19 nt, Artificial Sequence
  Description of Artificial Sequence: Synthetic oligonucleotide
  Sense strand starting at position 3672 of SEQ ID NO: 587811
gugguauggagccaagaua

SEQ ID NO: 820155 - RNA, 19 nt, Artificial Sequence
  Description of Artificial Sequence: Synthetic oligonucleotide
  Antisense strand to SEQ ID NO: 820154
uaucuuggcuccauaccac

SEQ ID NO: 820156 - RNA, 19 nt, Artificial Sequence
  Description of Artificial Sequence: Synthetic oligonucleotide
  Sense strand starting at position 3694 of SEQ ID NO: 587811
ucagaauccucuuuccgau

SEQ ID NO: 820157 - RNA, 19 nt, Artificial Sequence
  Description of Artificial Sequence: Synthetic oligonucleotide
  Antisense strand to SEQ ID NO: 820156
aucggaaagaggauucuga

SEQ ID NO: 820158 - RNA, 19 nt, Artificial Sequence
  Description of Artificial Sequence: Synthetic oligonucleotide
  Sense strand starting at position 3696 of SEQ ID NO: 587811
agaauccucuuuccgauua

SEQ ID NO: 820159 - RNA, 19 nt, Artificial Sequence
  Description of Artificial Sequence: Synthetic oligonucleotide
  Antisense strand to SEQ ID NO: 820158
uaaucggaaagaggauucu

SEQ ID NO: 820160 - RNA, 19 nt, Artificial Sequence
  Description of Artificial Sequence: Synthetic oligonucleotide
  Sense strand starting at position 3701 of SEQ ID NO: 587811
ccucuuuccgauuauagaa

SEQ ID NO: 820161 - RNA, 19 nt, Artificial Sequence
  Description of Artificial Sequence: Synthetic oligonucleotide
  Antisense strand to SEQ ID NO: 820160
uucuauaaucggaaagagg

SEQ ID NO: 820162 - RNA, 19 nt, Artificial Sequence
  Description of Artificial Sequence: Synthetic oligonucleotide
  Sense strand starting at position 3766 of SEQ ID NO: 587811
uagugauacuuggauuuac

SEQ ID NO: 820163 - RNA, 19 nt, Artificial Sequence
  Description of Artificial Sequence: Synthetic oligonucleotide
  Antisense strand to SEQ ID NO: 820162
guaaauccaaguaucacua

SEQ ID NO: 820164 - RNA, 19 nt, Artificial Sequence
  Description of Artificial Sequence: Synthetic oligonucleotide
  Sense strand starting at position 174 of SEQ ID NO: 587812
agguaucaauaaguuugau

SEQ ID NO: 820165 - RNA, 19 nt, Artificial Sequence
  Description of Artificial Sequence: Synthetic oligonucleotide
  Antisense strand to SEQ ID NO: 820164
aucaaacuuauugauaccu

SEQ ID NO: 820166 - RNA, 19 nt, Artificial Sequence
  Description of Artificial Sequence: Synthetic oligonucleotide
  Sense strand starting at position 211 of SEQ ID NO: 587812
gggagaagugcccaaguca

SEQ ID NO: 820167 - RNA, 19 nt, Artificial Sequence
  Description of Artificial Sequence: Synthetic oligonucleotide
  Antisense strand to SEQ ID NO: 820166
ugacuugggcacuucuccc

SEQ ID NO: 820168 - RNA, 19 nt, Artificial Sequence
  Description of Artificial Sequence: Synthetic oligonucleotide
  Sense strand starting at position 529 of SEQ ID NO: 587812
ggcgaaacaauguaauuau

SEQ ID NO: 820169 - RNA, 19 nt, Artificial Sequence
  Description of Artificial Sequence: Synthetic oligonucleotide
  Antisense strand to SEQ ID NO: 820168
auaauuacauuguuucgcc

SEQ ID NO: 820170 - RNA, 19 nt, Artificial Sequence
  Description of Artificial Sequence: Synthetic oligonucleotide
  Sense strand starting at position 699 of SEQ ID NO: 587812
gacauuucuuugggaucca

SEQ ID NO: 820171 - RNA, 19 nt, Artificial Sequence
  Description of Artificial Sequence: Synthetic oligonucleotide
  Antisense strand to SEQ ID NO: 820170
uggaucccaaagaaauguc

SEQ ID NO: 820172 - RNA, 19 nt, Artificial Sequence
  Description of Artificial Sequence: Synthetic oligonucleotide
  Sense strand starting at position 700 of SEQ ID NO: 587812
acauuucuuugggauccaa

SEQ ID NO: 820173 - RNA, 19 nt, Artificial Sequence
  Description of Artificial Sequence: Synthetic oligonucleotide
  Antisense strand to SEQ ID NO: 820172
uuggaucccaaagaaaugu

SEQ ID NO: 820174 - RNA, 19 nt, Artificial Sequence
  Description of Artificial Sequence: Synthetic oligonucleotide
  Sense strand starting at position 710 of SEQ ID NO: 587812
gggauccaaaccuguggua

SEQ ID NO: 820175 - RNA, 19 nt, Artificial Sequence
  Description of Artificial Sequence: Synthetic oligonucleotide
  Antisense strand to SEQ ID NO: 820174
uaccacagguuuggauccc

SEQ ID NO: 820176 - RNA, 19 nt, Artificial Sequence
  Description of Artificial Sequence: Synthetic oligonucleotide
  Sense strand starting at position 712 of SEQ ID NO: 587812
gauccaaaccugugguaac

SEQ ID NO: 820177 - RNA, 19 nt, Artificial Sequence
  Description of Artificial Sequence: Synthetic oligonucleotide
  Antisense strand to SEQ ID NO: 820176
guuaccacagguuuggauc

SEQ ID NO: 820178 - RNA, 19 nt, Artificial Sequence
  Description of Artificial Sequence: Synthetic oligonucleotide
  Sense strand starting at position 848 of SEQ ID NO: 587812
aagugaucgcguuccuuua

SEQ ID NO: 820179 - RNA, 19 nt, Artificial Sequence
  Description of Artificial Sequence: Synthetic oligonucleotide
  Antisense strand to SEQ ID NO: 820178
uaaaggaacgcgaucacuu

SEQ ID NO: 820180 - RNA, 19 nt, Artificial Sequence
  Description of Artificial Sequence: Synthetic oligonucleotide
  Sense strand starting at position 849 of SEQ ID NO: 587812
agugaucgcguuccuuuau

SEQ ID NO: 820181 - RNA, 19 nt, Artificial Sequence
  Description of Artificial Sequence: Synthetic oligonucleotide
  Antisense strand to SEQ ID NO: 820180
auaaaggaacgcgaucacu

SEQ ID NO: 820182 - RNA, 19 nt, Artificial Sequence
  Description of Artificial Sequence: Synthetic oligonucleotide
  Sense strand starting at position 859 of SEQ ID NO: 587812
uuccuuuaucaggaagcga

SEQ ID NO: 820183 - RNA, 19 nt, Artificial Sequence
  Description of Artificial Sequence: Synthetic oligonucleotide
  Antisense strand to SEQ ID NO: 820182
ucgcuuccugauaaaggaa

SEQ ID NO: 820184 - RNA, 19 nt, Artificial Sequence
  Description of Artificial Sequence: Synthetic oligonucleotide
  Sense strand starting at position 2011 of SEQ ID NO: 587812
ccacgcuccgcgcuauaua

SEQ ID NO: 820185 - RNA, 19 nt, Artificial Sequence
  Description of Artificial Sequence: Synthetic oligonucleotide
  Antisense strand to SEQ ID NO: 820184
uauauagcgcggagcgugg

SEQ ID NO: 820186 - RNA, 19 nt, Artificial Sequence
  Description of Artificial Sequence: Synthetic oligonucleotide
  Sense strand starting at position 2501 of SEQ ID NO: 587812
ugcagcuagccguuuggaa

SEQ ID NO: 820187 - RNA, 19 nt, Artificial Sequence
  Description of Artificial Sequence: Synthetic oligonucleotide
  Antisense strand to SEQ ID NO: 820186
uuccaaacggcuagcugca

SEQ ID NO: 820188 - RNA, 19 nt, Artificial Sequence
  Description of Artificial Sequence: Synthetic oligonucleotide
  Sense strand starting at position 2713 of SEQ ID NO: 587812
gggauuaggacccggaguu

SEQ ID NO: 820189 - RNA, 19 nt, Artificial Sequence
  Description of Artificial Sequence: Synthetic oligonucleotide
  Antisense strand to SEQ ID NO: 820188
aacuccggguccuaauccc

SEQ ID NO: 820190 - RNA, 19 nt, Artificial Sequence
  Description of Artificial Sequence: Synthetic oligonucleotide
  Sense strand starting at position 2747 of SEQ ID NO: 587812
cucuuugcucuugaauuga

SEQ ID NO: 820191 - RNA, 19 nt, Artificial Sequence
  Description of Artificial Sequence: Synthetic oligonucleotide
  Antisense strand to SEQ ID NO: 820190
ucaauucaagagcaaagag

SEQ ID NO: 820192 - RNA, 19 nt, Artificial Sequence
  Description of Artificial Sequence: Synthetic oligonucleotide
  Sense strand starting at position 2811 of SEQ ID NO: 587812
acccgaaaguuuguugaaa

SEQ ID NO: 820193 - RNA, 19 nt, Artificial Sequence
  Description of Artificial Sequence: Synthetic oligonucleotide
  Antisense strand to SEQ ID NO: 820192
uuucaacaaacuuucgggu

SEQ ID NO: 820194 - RNA, 19 nt, Artificial Sequence
  Description of Artificial Sequence: Synthetic oligonucleotide
  Sense strand starting at position 2812 of SEQ ID NO: 587812
cccgaaaguuuguugaaag

SEQ ID NO: 820195 - RNA, 19 nt, Artificial Sequence
  Description of Artificial Sequence: Synthetic oligonucleotide
  Antisense strand to SEQ ID NO: 820194
cuuucaacaaacuuucggg

SEQ ID NO: 820196 - RNA, 19 nt, Artificial Sequence
  Description of Artificial Sequence: Synthetic oligonucleotide
  Sense strand starting at position 2832 of SEQ ID NO: 587812
ggcuaaaucagggaguucu

SEQ ID NO: 820197 - RNA, 19 nt, Artificial Sequence
  Description of Artificial Sequence: Synthetic oligonucleotide
  Antisense strand to SEQ ID NO: 820196
agaacucccugauuuagcc

SEQ ID NO: 820198 - RNA, 19 nt, Artificial Sequence
  Description of Artificial Sequence: Synthetic oligonucleotide
  Sense strand starting at position 2844 of SEQ ID NO: 587812
gaguucuuugcgucugcaa

SEQ ID NO: 820199 - RNA, 19 nt, Artificial Sequence
  Description of Artificial Sequence: Synthetic oligonucleotide
  Antisense strand to SEQ ID NO: 820198
uugcagacgcaaagaacuc

SEQ ID NO: 820200 - RNA, 19 nt, Artificial Sequence
  Description of Artificial Sequence: Synthetic oligonucleotide
  Sense strand starting at position 2928 of SEQ ID NO: 587812
ucucgcgaagucuuuaagu

SEQ ID NO: 820201 - RNA, 19 nt, Artificial Sequence
  Description of Artificial Sequence: Synthetic oligonucleotide
  Antisense strand to SEQ ID NO: 820200
acuuaaagacuucgcgaga

SEQ ID NO: 820202 - RNA, 19 nt, Artificial Sequence
  Description of Artificial Sequence: Synthetic oligonucleotide
  Sense strand starting at position 2933 of SEQ ID NO: 587812
cgaagucuuuaaguggaca

SEQ ID NO: 820203 - RNA, 19 nt, Artificial Sequence
  Description of Artificial Sequence: Synthetic oligonucleotide
  Antisense strand to SEQ ID NO: 820202
uguccacuuaaagacuucg

SEQ ID NO: 820204 - RNA, 19 nt, Artificial Sequence
  Description of Artificial Sequence: Synthetic oligonucleotide
  Sense strand starting at position 2936 of SEQ ID NO: 587812
agucuuuaaguggacagua

SEQ ID NO: 820205 - RNA, 19 nt, Artificial Sequence
  Description of Artificial Sequence: Synthetic oligonucleotide
  Antisense strand to SEQ ID NO: 820204
uacuguccacuuaaagacu

SEQ ID NO: 820206 - RNA, 19 nt, Artificial Sequence
  Description of Artificial Sequence: Synthetic oligonucleotide
  Sense strand starting at position 3015 of SEQ ID NO: 587812
ucugguccucuugagaauc

SEQ ID NO: 820207 - RNA, 19 nt, Artificial Sequence
  Description of Artificial Sequence: Synthetic oligonucleotide
  Antisense strand to SEQ ID NO: 820206
gauucucaagaggaccaga

SEQ ID NO: 820208 - RNA, 19 nt, Artificial Sequence
  Description of Artificial Sequence: Synthetic oligonucleotide
  Sense strand starting at position 3371 of SEQ ID NO: 587812
guggauccugauugaacca

SEQ ID NO: 820209 - RNA, 19 nt, Artificial Sequence
  Description of Artificial Sequence: Synthetic oligonucleotide
  Antisense strand to SEQ ID NO: 820208
ugguucaaucaggauccac

SEQ ID NO: 820210 - RNA, 19 nt, Artificial Sequence
  Description of Artificial Sequence: Synthetic oligonucleotide
  Sense strand starting at position 3549 of SEQ ID NO: 587812
gggccucuugguugaaaua

SEQ ID NO: 820211 - RNA, 19 nt, Artificial Sequence
  Description of Artificial Sequence: Synthetic oligonucleotide
  Antisense strand to SEQ ID NO: 820210
uauuucaaccaagaggccc

SEQ ID NO: 820212 - RNA, 19 nt, Artificial Sequence
  Description of Artificial Sequence: Synthetic oligonucleotide
  Sense strand starting at position 3550 of SEQ ID NO: 587812
ggccucuugguugaaauag

SEQ ID NO: 820213 - RNA, 19 nt, Artificial Sequence
  Description of Artificial Sequence: Synthetic oligonucleotide
  Antisense strand to SEQ ID NO: 820212
cuauuucaaccaagaggcc

SEQ ID NO: 820214 - RNA, 19 nt, Artificial Sequence
  Description of Artificial Sequence: Synthetic oligonucleotide
  Sense strand starting at position 3589 of SEQ ID NO: 587812
ucauauuugugauugcguu

SEQ ID NO: 820215 - RNA, 19 nt, Artificial Sequence
  Description of Artificial Sequence: Synthetic oligonucleotide
  Antisense strand to SEQ ID NO: 820214
aacgcaaucacaaauauga

SEQ ID NO: 820216 - RNA, 19 nt, Artificial Sequence
  Description of Artificial Sequence: Synthetic oligonucleotide
  Sense strand starting at position 3590 of SEQ ID NO: 587812
cauauuugugauugcguuu

SEQ ID NO: 820217 - RNA, 19 nt, Artificial Sequence
  Description of Artificial Sequence: Synthetic oligonucleotide
  Antisense strand to SEQ ID NO: 820216
aaacgcaaucacaaauaug

SEQ ID NO: 820218 - RNA, 19 nt, Artificial Sequence
  Description of Artificial Sequence: Synthetic oligonucleotide
  Sense strand starting at position 3619 of SEQ ID NO: 587812
gguguuaaagguuauugac

SEQ ID NO: 820219 - RNA, 19 nt, Artificial Sequence
  Description of Artificial Sequence: Synthetic oligonucleotide
  Antisense strand to SEQ ID NO: 820218
gucaauaaccuuuaacacc

SEQ ID NO: 820220 - RNA, 19 nt, Artificial Sequence
  Description of Artificial Sequence: Synthetic oligonucleotide
  Sense strand starting at position 3621 of SEQ ID NO: 587812
uguuaaagguuauugacau

SEQ ID NO: 820221 - RNA, 19 nt, Artificial Sequence
  Description of Artificial Sequence: Synthetic oligonucleotide
  Antisense strand to SEQ ID NO: 820220
augucaauaaccuuuaaca

SEQ ID NO: 820222 - RNA, 19 nt, Artificial Sequence
  Description of Artificial Sequence: Synthetic oligonucleotide
  Sense strand starting at position 3627 of SEQ ID NO: 587812
agguuauugacauggagcu

SEQ ID NO: 820223 - RNA, 19 nt, Artificial Sequence
  Description of Artificial Sequence: Synthetic oligonucleotide
  Antisense strand to SEQ ID NO: 820222
agcuccaugucaauaaccu

SEQ ID NO: 820224 - RNA, 19 nt, Artificial Sequence
  Description of Artificial Sequence: Synthetic oligonucleotide
  Sense strand starting at position 3628 of SEQ ID NO: 587812
gguuauugacauggagcua

SEQ ID NO: 820225 - RNA, 19 nt, Artificial Sequence
  Description of Artificial Sequence: Synthetic oligonucleotide
  Antisense strand to SEQ ID NO: 820224
uagcuccaugucaauaacc

SEQ ID NO: 820226 - RNA, 19 nt, Artificial Sequence
  Description of Artificial Sequence: Synthetic oligonucleotide
  Sense strand starting at position 3629 of SEQ ID NO: 587812
guuauugacauggagcuaa

SEQ ID NO: 820227 - RNA, 19 nt, Artificial Sequence
  Description of Artificial Sequence: Synthetic oligonucleotide
  Antisense strand to SEQ ID NO: 820226
uuagcuccaugucaauaac

SEQ ID NO: 820228 - RNA, 19 nt, Artificial Sequence
  Description of Artificial Sequence: Synthetic oligonucleotide
  Sense strand starting at position 3679 of SEQ ID NO: 587812
caaguaaaguuacuaguga

SEQ ID NO: 820229 - RNA, 19 nt, Artificial Sequence
  Description of Artificial Sequence: Synthetic oligonucleotide
  Antisense strand to SEQ ID NO: 820228
ucacuaguaacuuuacuug

SEQ ID NO: 820230 - RNA, 19 nt, Artificial Sequence
  Description of Artificial Sequence: Synthetic oligonucleotide
  Sense strand starting at position 3686 of SEQ ID NO: 587812
aguuacuagugacuaaagu

SEQ ID NO: 820231 - RNA, 19 nt, Artificial Sequence
  Description of Artificial Sequence: Synthetic oligonucleotide
  Antisense strand to SEQ ID NO: 820230
acuuuagucacuaguaacu

SEQ ID NO: 820232 - RNA, 19 nt, Artificial Sequence
  Description of Artificial Sequence: Synthetic oligonucleotide
  Sense strand starting at position 3733 of SEQ ID NO: 587812
ugcucaguacgggaguaau

SEQ ID NO: 820233 - RNA, 19 nt, Artificial Sequence
  Description of Artificial Sequence: Synthetic oligonucleotide
  Antisense strand to SEQ ID NO: 820232
auuacucccguacugagca

SEQ ID NO: 820234 - RNA, 19 nt, Artificial Sequence
  Description of Artificial Sequence: Synthetic oligonucleotide
  Sense strand starting at position 3736 of SEQ ID NO: 587812
ucaguacgggaguaauaca

SEQ ID NO: 820235 - RNA, 19 nt, Artificial Sequence
  Description of Artificial Sequence: Synthetic oligonucleotide
  Antisense strand to SEQ ID NO: 820234
uguauuacucccguacuga

SEQ ID NO: 820236 - RNA, 19 nt, Artificial Sequence
  Description of Artificial Sequence: Synthetic oligonucleotide
  Sense strand starting at position 3791 of SEQ ID NO: 587812
guuuauuaacguuagagag

SEQ ID NO: 820237 - RNA, 19 nt, Artificial Sequence
  Description of Artificial Sequence: Synthetic oligonucleotide
  Antisense strand to SEQ ID NO: 820236
cucucuaacguuaauaaac

SEQ ID NO: 820238 - RNA, 19 nt, Artificial Sequence
  Description of Artificial Sequence: Synthetic oligonucleotide
  Sense strand starting at position 3969 of SEQ ID NO: 587812
ggaugaggugaauguucuu

SEQ ID NO: 820239 - RNA, 19 nt, Artificial Sequence
  Description of Artificial Sequence: Synthetic oligonucleotide
  Antisense strand to SEQ ID NO: 820238
aagaacauucaccucaucc

SEQ ID NO: 820240 - RNA, 19 nt, Artificial Sequence
  Description of Artificial Sequence: Synthetic oligonucleotide
  Sense strand starting at position 3974 of SEQ ID NO: 587812
aggugaauguucuuggcaa

SEQ ID NO: 820241 - RNA, 19 nt, Artificial Sequence
  Description of Artificial Sequence: Synthetic oligonucleotide
  Antisense strand to SEQ ID NO: 820240
uugccaagaacauucaccu

SEQ ID NO: 820242 - RNA, 19 nt, Artificial Sequence
  Description of Artificial Sequence: Synthetic oligonucleotide
  Sense strand starting at position 3976 of SEQ ID NO: 587812
gugaauguucuuggcaaga

SEQ ID NO: 820243 - RNA, 19 nt, Artificial Sequence
  Description of Artificial Sequence: Synthetic oligonucleotide
  Antisense strand to SEQ ID NO: 820242
ucuugccaagaacauucac

SEQ ID NO: 820244 - RNA, 19 nt, Artificial Sequence
  Description of Artificial Sequence: Synthetic oligonucleotide
  Sense strand starting at position 87 of SEQ ID NO: 587813
ggucacugggcgggaaaua

SEQ ID NO: 820245 - RNA, 19 nt, Artificial Sequence
  Description of Artificial Sequence: Synthetic oligonucleotide
  Antisense strand to SEQ ID NO: 820244
uauuucccgcccagugacc

SEQ ID NO: 820246 - RNA, 19 nt, Artificial Sequence
  Description of Artificial Sequence: Synthetic oligonucleotide
  Sense strand starting at position 200 of SEQ ID NO: 587813
gcacguaguguuucugcuu

SEQ ID NO: 820247 - RNA, 19 nt, Artificial Sequence
  Description of Artificial Sequence: Synthetic oligonucleotide
  Antisense strand to SEQ ID NO: 820246
aagcagaaacacuacgugc

SEQ ID NO: 820248 - RNA, 19 nt, Artificial Sequence
  Description of Artificial Sequence: Synthetic oligonucleotide
  Sense strand starting at position 218 of SEQ ID NO: 587813
ucauguugagccguacgua

SEQ ID NO: 820249 - RNA, 19 nt, Artificial Sequence
  Description of Artificial Sequence: Synthetic oligonucleotide
  Antisense strand to SEQ ID NO: 820248
uacguacggcucaacauga

SEQ ID NO: 820250 - RNA, 19 nt, Artificial Sequence
  Description of Artificial Sequence: Synthetic oligonucleotide
  Sense strand starting at position 219 of SEQ ID NO: 587813
cauguugagccguacguaa

SEQ ID NO: 820251 - RNA, 19 nt, Artificial Sequence
  Description of Artificial Sequence: Synthetic oligonucleotide
  Antisense strand to SEQ ID NO: 820250
uuacguacggcucaacaug

SEQ ID NO: 820252 - RNA, 19 nt, Artificial Sequence
  Description of Artificial Sequence: Synthetic oligonucleotide
  Sense strand starting at position 394 of SEQ ID NO: 587813
ccuggagggucuuccucaa

SEQ ID NO: 820253 - RNA, 19 nt, Artificial Sequence
  Description of Artificial Sequence: Synthetic oligonucleotide
  Antisense strand to SEQ ID NO: 820252
uugaggaagacccuccagg

SEQ ID NO: 820254 - RNA, 19 nt, Artificial Sequence
  Description of Artificial Sequence: Synthetic oligonucleotide
  Sense strand starting at position 552 of SEQ ID NO: 587813
gaugcugacuucuuggaag

SEQ ID NO: 820255 - RNA, 19 nt, Artificial Sequence
  Description of Artificial Sequence: Synthetic oligonucleotide
  Antisense strand to SEQ ID NO: 820254
cuuccaagaagucagcauc

SEQ ID NO: 820256 - RNA, 19 nt, Artificial Sequence
  Description of Artificial Sequence: Synthetic oligonucleotide
  Sense strand starting at position 628 of SEQ ID NO: 587813
gggaucagaaguugugauu

SEQ ID NO: 820257 - RNA, 19 nt, Artificial Sequence
  Description of Artificial Sequence: Synthetic oligonucleotide
  Antisense strand to SEQ ID NO: 820256
aaucacaacuucugauccc

SEQ ID NO: 820258 - RNA, 19 nt, Artificial Sequence
  Description of Artificial Sequence: Synthetic oligonucleotide
  Sense strand starting at position 639 of SEQ ID NO: 587813
uugugauuccucugagccu

SEQ ID NO: 820259 - RNA, 19 nt, Artificial Sequence
  Description of Artificial Sequence: Synthetic oligonucleotide
  Antisense strand to SEQ ID NO: 820258
aggcucagaggaaucacaa

SEQ ID NO: 820260 - RNA, 19 nt, Artificial Sequence
  Description of Artificial Sequence: Synthetic oligonucleotide
  Sense strand starting at position 815 of SEQ ID NO: 587813
gaggcucaucacugacuuu

SEQ ID NO: 820261 - RNA, 19 nt, Artificial Sequence
  Description of Artificial Sequence: Synthetic oligonucleotide
  Antisense strand to SEQ ID NO: 820260
aaagucagugaugagccuc

SEQ ID NO: 820262 - RNA, 19 nt, Artificial Sequence
  Description of Artificial Sequence: Synthetic oligonucleotide
  Sense strand starting at position 1085 of SEQ ID NO: 587813
ccgagaagcucccugaaga

SEQ ID NO: 820263 - RNA, 19 nt, Artificial Sequence
  Description of Artificial Sequence: Synthetic oligonucleotide
  Antisense strand to SEQ ID NO: 820262
ucuucagggagcuucucgg

SEQ ID NO: 820264 - RNA, 19 nt, Artificial Sequence
  Description of Artificial Sequence: Synthetic oligonucleotide
  Sense strand starting at position 1086 of SEQ ID NO: 587813
cgagaagcucccugaagac

SEQ ID NO: 820265 - RNA, 19 nt, Artificial Sequence
  Description of Artificial Sequence: Synthetic oligonucleotide
  Antisense strand to SEQ ID NO: 820264
gucuucagggagcuucucg

SEQ ID NO: 820266 - RNA, 19 nt, Artificial Sequence
  Description of Artificial Sequence: Synthetic oligonucleotide
  Sense strand starting at position 1318 of SEQ ID NO: 587813
gucgcagcccgauucagau

SEQ ID NO: 820267 - RNA, 19 nt, Artificial Sequence
  Description of Artificial Sequence: Synthetic oligonucleotide
  Antisense strand to SEQ ID NO: 820266
aucugaaucgggcugcgac

SEQ ID NO: 820268 - RNA, 19 nt, Artificial Sequence
  Description of Artificial Sequence: Synthetic oligonucleotide
  Sense strand starting at position 1642 of SEQ ID NO: 587813
gcccgugguacgcuucaga

SEQ ID NO: 820269 - RNA, 19 nt, Artificial Sequence
  Description of Artificial Sequence: Synthetic oligonucleotide
  Antisense strand to SEQ ID NO: 820268
ucugaagcguaccacgggc

SEQ ID NO: 820270 - RNA, 19 nt, Artificial Sequence
  Description of Artificial Sequence: Synthetic oligonucleotide
  Sense strand starting at position 1663 of SEQ ID NO: 587813
gcgguauucccgguagagc

SEQ ID NO: 820271 - RNA, 19 nt, Artificial Sequence
  Description of Artificial Sequence: Synthetic oligonucleotide
  Antisense strand to SEQ ID NO: 820270
gcucuaccgggaauaccgc

SEQ ID NO: 820272 - RNA, 19 nt, Artificial Sequence
  Description of Artificial Sequence: Synthetic oligonucleotide
  Sense strand starting at position 2540 of SEQ ID NO: 587813
ggcgucuucgcgaaacgca

SEQ ID NO: 820273 - RNA, 19 nt, Artificial Sequence
  Description of Artificial Sequence: Synthetic oligonucleotide
  Antisense strand to SEQ ID NO: 820272
ugcguuucgcgaagacgcc

SEQ ID NO: 820274 - RNA, 19 nt, Artificial Sequence
  Description of Artificial Sequence: Synthetic oligonucleotide
  Sense strand starting at position 2656 of SEQ ID NO: 587813
gguguucucccgugacaag

SEQ ID NO: 820275 - RNA, 19 nt, Artificial Sequence
  Description of Artificial Sequence: Synthetic oligonucleotide
  Antisense strand to SEQ ID NO: 820274
cuugucacgggagaacacc

SEQ ID NO: 820276 - RNA, 19 nt, Artificial Sequence
  Description of Artificial Sequence: Synthetic oligonucleotide
  Sense strand starting at position 2657 of SEQ ID NO: 587813
guguucucccgugacaagu

SEQ ID NO: 820277 - RNA, 19 nt, Artificial Sequence
  Description of Artificial Sequence: Synthetic oligonucleotide
  Antisense strand to SEQ ID NO: 820276
acuugucacgggagaacac

SEQ ID NO: 820278 - RNA, 19 nt, Artificial Sequence
  Description of Artificial Sequence: Synthetic oligonucleotide
  Sense strand starting at position 2698 of SEQ ID NO: 587813
gagcgaguaugaucguuga

SEQ ID NO: 820279 - RNA, 19 nt, Artificial Sequence
  Description of Artificial Sequence: Synthetic oligonucleotide
  Antisense strand to SEQ ID NO: 820278
ucaacgaucauacucgcuc

SEQ ID NO: 820280 - RNA, 19 nt, Artificial Sequence
  Description of Artificial Sequence: Synthetic oligonucleotide
  Sense strand starting at position 2701 of SEQ ID NO: 587813
cgaguaugaucguugagau

SEQ ID NO: 820281 - RNA, 19 nt, Artificial Sequence
  Description of Artificial Sequence: Synthetic oligonucleotide
  Antisense strand to SEQ ID NO: 820280
aucucaacgaucauacucg

SEQ ID NO: 820282 - RNA, 19 nt, Artificial Sequence
  Description of Artificial Sequence: Synthetic oligonucleotide
  Sense strand starting at position 2702 of SEQ ID NO: 587813
gaguaugaucguugagauc

SEQ ID NO: 820283 - RNA, 19 nt, Artificial Sequence
  Description of Artificial Sequence: Synthetic oligonucleotide
  Antisense strand to SEQ ID NO: 820282
gaucucaacgaucauacuc

SEQ ID NO: 820284 - RNA, 19 nt, Artificial Sequence
  Description of Artificial Sequence: Synthetic oligonucleotide
  Sense strand starting at position 2716 of SEQ ID NO: 587813
agaucuguccaccggcaga

SEQ ID NO: 820285 - RNA, 19 nt, Artificial Sequence
  Description of Artificial Sequence: Synthetic oligonucleotide
  Antisense strand to SEQ ID NO: 820284
ucugccgguggacagaucu

SEQ ID NO: 820286 - RNA, 19 nt, Artificial Sequence
  Description of Artificial Sequence: Synthetic oligonucleotide
  Sense strand starting at position 2786 of SEQ ID NO: 587813
acuuacuuguauguggaaa

SEQ ID NO: 820287 - RNA, 19 nt, Artificial Sequence
  Description of Artificial Sequence: Synthetic oligonucleotide
  Antisense strand to SEQ ID NO: 820286
uuuccacauacaaguaagu

SEQ ID NO: 820288 - RNA, 19 nt, Artificial Sequence
  Description of Artificial Sequence: Synthetic oligonucleotide
  Sense strand starting at position 3125 of SEQ ID NO: 587813
aguggcucuccagggaaga

SEQ ID NO: 820289 - RNA, 19 nt, Artificial Sequence
  Description of Artificial Sequence: Synthetic oligonucleotide
  Antisense strand to SEQ ID NO: 820288
ucuucccuggagagccacu

SEQ ID NO: 820290 - RNA, 19 nt, Artificial Sequence
  Description of Artificial Sequence: Synthetic oligonucleotide
  Sense strand starting at position 3150 of SEQ ID NO: 587813
gguuuaggccagugguaag

SEQ ID NO: 820291 - RNA, 19 nt, Artificial Sequence
  Description of Artificial Sequence: Synthetic oligonucleotide
  Antisense strand to SEQ ID NO: 820290
cuuaccacuggccuaaacc

SEQ ID NO: 820292 - RNA, 19 nt, Artificial Sequence
  Description of Artificial Sequence: Synthetic oligonucleotide
  Sense strand starting at position 3214 of SEQ ID NO: 587813
ggugacgcucuggagaaua

SEQ ID NO: 820293 - RNA, 19 nt, Artificial Sequence
  Description of Artificial Sequence: Synthetic oligonucleotide
  Antisense strand to SEQ ID NO: 820292
uauucuccagagcgucacc

SEQ ID NO: 820294 - RNA, 19 nt, Artificial Sequence
  Description of Artificial Sequence: Synthetic oligonucleotide
  Sense strand starting at position 3216 of SEQ ID NO: 587813
ugacgcucuggagaauagu

SEQ ID NO: 820295 - RNA, 19 nt, Artificial Sequence
  Description of Artificial Sequence: Synthetic oligonucleotide
  Antisense strand to SEQ ID NO: 820294
acuauucuccagagcguca

SEQ ID NO: 820296 - RNA, 19 nt, Artificial Sequence
  Description of Artificial Sequence: Synthetic oligonucleotide
  Sense strand starting at position 3311 of SEQ ID NO: 587813
ugccuuguugcuuaugaag

SEQ ID NO: 820297 - RNA, 19 nt, Artificial Sequence
  Description of Artificial Sequence: Synthetic oligonucleotide
  Antisense strand to SEQ ID NO: 820296
cuucauaagcaacaaggca

SEQ ID NO: 820298 - RNA, 19 nt, Artificial Sequence
  Description of Artificial Sequence: Synthetic oligonucleotide
  Sense strand starting at position 3413 of SEQ ID NO: 587813
aggugauuuggcugcuuga

SEQ ID NO: 820299 - RNA, 19 nt, Artificial Sequence
  Description of Artificial Sequence: Synthetic oligonucleotide
  Antisense strand to SEQ ID NO: 820298
ucaagcagccaaaucaccu

SEQ ID NO: 820300 - RNA, 19 nt, Artificial Sequence
  Description of Artificial Sequence: Synthetic oligonucleotide
  Sense strand starting at position 3424 of SEQ ID NO: 587813
cugcuugacuccuuagagu

SEQ ID NO: 820301 - RNA, 19 nt, Artificial Sequence
  Description of Artificial Sequence: Synthetic oligonucleotide
  Antisense strand to SEQ ID NO: 820300
acucuaaggagucaagcag

SEQ ID NO: 820302 - RNA, 19 nt, Artificial Sequence
  Description of Artificial Sequence: Synthetic oligonucleotide
  Sense strand starting at position 3441 of SEQ ID NO: 587813
gugucccgucaauacuaau

SEQ ID NO: 820303 - RNA, 19 nt, Artificial Sequence
  Description of Artificial Sequence: Synthetic oligonucleotide
  Antisense strand to SEQ ID NO: 820302
auuaguauugacgggacac

SEQ ID NO: 820304 - RNA, 19 nt, Artificial Sequence
  Description of Artificial Sequence: Synthetic oligonucleotide
  Sense strand starting at position 3477 of SEQ ID NO: 587813
gggagaguccugggcuuua

SEQ ID NO: 820305 - RNA, 19 nt, Artificial Sequence
  Description of Artificial Sequence: Synthetic oligonucleotide
  Antisense strand to SEQ ID NO: 820304
uaaagcccaggacucuccc

SEQ ID NO: 820306 - RNA, 19 nt, Artificial Sequence
  Description of Artificial Sequence: Synthetic oligonucleotide
  Sense strand starting at position 3497 of SEQ ID NO: 587813
ucagguuucgaagaagguu

SEQ ID NO: 820307 - RNA, 19 nt, Artificial Sequence
  Description of Artificial Sequence: Synthetic oligonucleotide
  Antisense strand to SEQ ID NO: 820306
aaccuucuucgaaaccuga

SEQ ID NO: 820308 - RNA, 19 nt, Artificial Sequence
  Description of Artificial Sequence: Synthetic oligonucleotide
  Sense strand starting at position 3519 of SEQ ID NO: 587813
ugaagcagcuuuguaauuu

SEQ ID NO: 820309 - RNA, 19 nt, Artificial Sequence
  Description of Artificial Sequence: Synthetic oligonucleotide
  Antisense strand to SEQ ID NO: 820308
aaauuacaaagcugcuuca

SEQ ID NO: 820310 - RNA, 19 nt, Artificial Sequence
  Description of Artificial Sequence: Synthetic oligonucleotide
  Sense strand starting at position 3523 of SEQ ID NO: 587813
gcagcuuuguaauuugaga

SEQ ID NO: 820311 - RNA, 19 nt, Artificial Sequence
  Description of Artificial Sequence: Synthetic oligonucleotide
  Antisense strand to SEQ ID NO: 820310
ucucaaauuacaaagcugc

SEQ ID NO: 820312 - RNA, 19 nt, Artificial Sequence
  Description of Artificial Sequence: Synthetic oligonucleotide
  Sense strand starting at position 3608 of SEQ ID NO: 587813
cgaguuguugacgaugcca

SEQ ID NO: 820313 - RNA, 19 nt, Artificial Sequence
  Description of Artificial Sequence: Synthetic oligonucleotide
  Antisense strand to SEQ ID NO: 820312
uggcaucgucaacaacucg

SEQ ID NO: 820314 - RNA, 19 nt, Artificial Sequence
  Description of Artificial Sequence: Synthetic oligonucleotide
  Sense strand starting at position 3610 of SEQ ID NO: 587813
aguuguugacgaugccaca

SEQ ID NO: 820315 - RNA, 19 nt, Artificial Sequence
  Description of Artificial Sequence: Synthetic oligonucleotide
  Antisense strand to SEQ ID NO: 820314
uguggcaucgucaacaacu

SEQ ID NO: 820316 - RNA, 19 nt, Artificial Sequence
  Description of Artificial Sequence: Synthetic oligonucleotide
  Sense strand starting at position 3635 of SEQ ID NO: 587813
gacgcuuaguuucucuaaa

SEQ ID NO: 820317 - RNA, 19 nt, Artificial Sequence
  Description of Artificial Sequence: Synthetic oligonucleotide
  Antisense strand to SEQ ID NO: 820316
uuuagagaaacuaagcguc

SEQ ID NO: 820318 - RNA, 19 nt, Artificial Sequence
  Description of Artificial Sequence: Synthetic oligonucleotide
  Sense strand starting at position 3636 of SEQ ID NO: 587813
acgcuuaguuucucuaaag

SEQ ID NO: 820319 - RNA, 19 nt, Artificial Sequence
  Description of Artificial Sequence: Synthetic oligonucleotide
  Antisense strand to SEQ ID NO: 820318
cuuuagagaaacuaagcgu

SEQ ID NO: 820320 - RNA, 19 nt, Artificial Sequence
  Description of Artificial Sequence: Synthetic oligonucleotide
  Sense strand starting at position 3637 of SEQ ID NO: 587813
cgcuuaguuucucuaaaga

SEQ ID NO: 820321 - RNA, 19 nt, Artificial Sequence
  Description of Artificial Sequence: Synthetic oligonucleotide
  Antisense strand to SEQ ID NO: 820320
ucuuuagagaaacuaagcg

SEQ ID NO: 820322 - RNA, 19 nt, Artificial Sequence
  Description of Artificial Sequence: Synthetic oligonucleotide
  Sense strand starting at position 3680 of SEQ ID NO: 587813
ggcugaguugugaguuugu

SEQ ID NO: 820323 - RNA, 19 nt, Artificial Sequence
  Description of Artificial Sequence: Synthetic oligonucleotide
  Antisense strand to SEQ ID NO: 820322
acaaacucacaacucagcc

SEQ ID NO: 820324 - RNA, 19 nt, Artificial Sequence
  Description of Artificial Sequence: Synthetic oligonucleotide
  Sense strand starting at position 117 of SEQ ID NO: 587814
aggccaucuugaucucaua

SEQ ID NO: 820325 - RNA, 19 nt, Artificial Sequence
  Description of Artificial Sequence: Synthetic oligonucleotide
  Antisense strand to SEQ ID NO: 820324
uaugagaucaagauggccu

SEQ ID NO: 820326 - RNA, 19 nt, Artificial Sequence
  Description of Artificial Sequence: Synthetic oligonucleotide
  Sense strand starting at position 227 of SEQ ID NO: 587814
gcguccauaccaggagaua

SEQ ID NO: 820327 - RNA, 19 nt, Artificial Sequence
  Description of Artificial Sequence: Synthetic oligonucleotide
  Antisense strand to SEQ ID NO: 820326
uaucuccugguauggacgc

SEQ ID NO: 820328 - RNA, 19 nt, Artificial Sequence
  Description of Artificial Sequence: Synthetic oligonucleotide
  Sense strand starting at position 263 of SEQ ID NO: 587814
cucugcugccaugaagagu

SEQ ID NO: 820329 - RNA, 19 nt, Artificial Sequence
  Description of Artificial Sequence: Synthetic oligonucleotide
  Antisense strand to SEQ ID NO: 820328
acucuucauggcagcagag

SEQ ID NO: 820330 - RNA, 19 nt, Artificial Sequence
  Description of Artificial Sequence: Synthetic oligonucleotide
  Sense strand starting at position 384 of SEQ ID NO: 587814
cagagauuccagggagccu

SEQ ID NO: 820331 - RNA, 19 nt, Artificial Sequence
  Description of Artificial Sequence: Synthetic oligonucleotide
  Antisense strand to SEQ ID NO: 820330
aggcucccuggaaucucug

SEQ ID NO: 820332 - RNA, 19 nt, Artificial Sequence
  Description of Artificial Sequence: Synthetic oligonucleotide
  Sense strand starting at position 397 of SEQ ID NO: 587814
gagccuguccggcugcaua

SEQ ID NO: 820333 - RNA, 19 nt, Artificial Sequence
  Description of Artificial Sequence: Synthetic oligonucleotide
  Antisense strand to SEQ ID NO: 820332
uaugcagccggacaggcuc

SEQ ID NO: 820334 - RNA, 19 nt, Artificial Sequence
  Description of Artificial Sequence: Synthetic oligonucleotide
  Sense strand starting at position 983 of SEQ ID NO: 587814
ggugcaugauggagugaga

SEQ ID NO: 820335 - RNA, 19 nt, Artificial Sequence
  Description of Artificial Sequence: Synthetic oligonucleotide
  Antisense strand to SEQ ID NO: 820334
ucucacuccaucaugcacc

SEQ ID NO: 820336 - RNA, 19 nt, Artificial Sequence
  Description of Artificial Sequence: Synthetic oligonucleotide
  Sense strand starting at position 1098 of SEQ ID NO: 587814
ugcagauagggcuauguga

SEQ ID NO: 820337 - RNA, 19 nt, Artificial Sequence
  Description of Artificial Sequence: Synthetic oligonucleotide
  Antisense strand to SEQ ID NO: 820336
ucacauagcccuaucugca

SEQ ID NO: 820338 - RNA, 19 nt, Artificial Sequence
  Description of Artificial Sequence: Synthetic oligonucleotide
  Sense strand starting at position 1105 of SEQ ID NO: 587814
agggcuaugugagccagau

SEQ ID NO: 820339 - RNA, 19 nt, Artificial Sequence
  Description of Artificial Sequence: Synthetic oligonucleotide
  Antisense strand to SEQ ID NO: 820338
aucuggcucacauagcccu

SEQ ID NO: 820340 - RNA, 19 nt, Artificial Sequence
  Description of Artificial Sequence: Synthetic oligonucleotide
  Sense strand starting at position 1107 of SEQ ID NO: 587814
ggcuaugugagccagaugu

SEQ ID NO: 820341 - RNA, 19 nt, Artificial Sequence
  Description of Artificial Sequence: Synthetic oligonucleotide
  Antisense strand to SEQ ID NO: 820340
acaucuggcucacauagcc

SEQ ID NO: 820342 - RNA, 19 nt, Artificial Sequence
  Description of Artificial Sequence: Synthetic oligonucleotide
  Sense strand starting at position 1160 of SEQ ID NO: 587814
ucaugugacugcucagaug

SEQ ID NO: 820343 - RNA, 19 nt, Artificial Sequence
  Description of Artificial Sequence: Synthetic oligonucleotide
  Antisense strand to SEQ ID NO: 820342
caucugagcagucacauga

SEQ ID NO: 820344 - RNA, 19 nt, Artificial Sequence
  Description of Artificial Sequence: Synthetic oligonucleotide
  Sense strand starting at position 1937 of SEQ ID NO: 587814
guucgcaacucacuugaaa

SEQ ID NO: 820345 - RNA, 19 nt, Artificial Sequence
  Description of Artificial Sequence: Synthetic oligonucleotide
  Antisense strand to SEQ ID NO: 820344
uuucaagugaguugcgaac

SEQ ID NO: 820346 - RNA, 19 nt, Artificial Sequence
  Description of Artificial Sequence: Synthetic oligonucleotide
  Sense strand starting at position 1940 of SEQ ID NO: 587814
cgcaacucacuugaaaguu

SEQ ID NO: 820347 - RNA, 19 nt, Artificial Sequence
  Description of Artificial Sequence: Synthetic oligonucleotide
  Antisense strand to SEQ ID NO: 820346
aacuuucaagugaguugcg

SEQ ID NO: 820348 - RNA, 19 nt, Artificial Sequence
  Description of Artificial Sequence: Synthetic oligonucleotide
  Sense strand starting at position 2129 of SEQ ID NO: 587814
gaaagauuagcguguggga

SEQ ID NO: 820349 - RNA, 19 nt, Artificial Sequence
  Description of Artificial Sequence: Synthetic oligonucleotide
  Antisense strand to SEQ ID NO: 820348
ucccacacgcuaaucuuuc

SEQ ID NO: 820350 - RNA, 19 nt, Artificial Sequence
  Description of Artificial Sequence: Synthetic oligonucleotide
  Sense strand starting at position 2131 of SEQ ID NO: 587814
aagauuagcgugugggaag

SEQ ID NO: 820351 - RNA, 19 nt, Artificial Sequence
  Description of Artificial Sequence: Synthetic oligonucleotide
  Antisense strand to SEQ ID NO: 820350
cuucccacacgcuaaucuu

SEQ ID NO: 820352 - RNA, 19 nt, Artificial Sequence
  Description of Artificial Sequence: Synthetic oligonucleotide
  Sense strand starting at position 2279 of SEQ ID NO: 587814
cggguaaaggcaugagaug

SEQ ID NO: 820353 - RNA, 19 nt, Artificial Sequence
  Description of Artificial Sequence: Synthetic oligonucleotide
  Antisense strand to SEQ ID NO: 820352
caucucaugccuuuacccg

SEQ ID NO: 820354 - RNA, 19 nt, Artificial Sequence
  Description of Artificial Sequence: Synthetic oligonucleotide
  Sense strand starting at position 2485 of SEQ ID NO: 587814
ugggaugccuuuccagauc

SEQ ID NO: 820355 - RNA, 19 nt, Artificial Sequence
  Description of Artificial Sequence: Synthetic oligonucleotide
  Antisense strand to SEQ ID NO: 820354
gaucuggaaaggcauccca

SEQ ID NO: 820356 - RNA, 19 nt, Artificial Sequence
  Description of Artificial Sequence: Synthetic oligonucleotide
  Sense strand starting at position 2517 of SEQ ID NO: 587814
caggcugaccgcgaugauu

SEQ ID NO: 820357 - RNA, 19 nt, Artificial Sequence
  Description of Artificial Sequence: Synthetic oligonucleotide
  Antisense strand to SEQ ID NO: 820356
aaucaucgcggucagccug

SEQ ID NO: 820358 - RNA, 19 nt, Artificial Sequence
  Description of Artificial Sequence: Synthetic oligonucleotide
  Sense strand starting at position 2519 of SEQ ID NO: 587814
ggcugaccgcgaugauuug

SEQ ID NO: 820359 - RNA, 19 nt, Artificial Sequence
  Description of Artificial Sequence: Synthetic oligonucleotide
  Antisense strand to SEQ ID NO: 820358
caaaucaucgcggucagcc

SEQ ID NO: 820360 - RNA, 19 nt, Artificial Sequence
  Description of Artificial Sequence: Synthetic oligonucleotide
  Sense strand starting at position 2538 of SEQ ID NO: 587814
aggcauucuggguagagcu

SEQ ID NO: 820361 - RNA, 19 nt, Artificial Sequence
  Description of Artificial Sequence: Synthetic oligonucleotide
  Antisense strand to SEQ ID NO: 820360
agcucuacccagaaugccu

SEQ ID NO: 820362 - RNA, 19 nt, Artificial Sequence
  Description of Artificial Sequence: Synthetic oligonucleotide
  Sense strand starting at position 2575 of SEQ ID NO: 587814
ucagcagaaguuugaaauu

SEQ ID NO: 820363 - RNA, 19 nt, Artificial Sequence
  Description of Artificial Sequence: Synthetic oligonucleotide
  Antisense strand to SEQ ID NO: 820362
aauuucaaacuucugcuga

SEQ ID NO: 820364 - RNA, 19 nt, Artificial Sequence
  Description of Artificial Sequence: Synthetic oligonucleotide
  Sense strand starting at position 2686 of SEQ ID NO: 587814
aggucuuagucuuugcaaa

SEQ ID NO: 820365 - RNA, 19 nt, Artificial Sequence
  Description of Artificial Sequence: Synthetic oligonucleotide
  Antisense strand to SEQ ID NO: 820364
uuugcaaagacuaagaccu

SEQ ID NO: 820366 - RNA, 19 nt, Artificial Sequence
  Description of Artificial Sequence: Synthetic oligonucleotide
  Sense strand starting at position 2726 of SEQ ID NO: 587814
auaggaugcucagugguga

SEQ ID NO: 820367 - RNA, 19 nt, Artificial Sequence
  Description of Artificial Sequence: Synthetic oligonucleotide
  Antisense strand to SEQ ID NO: 820366
ucaccacugagcauccuau

SEQ ID NO: 820368 - RNA, 19 nt, Artificial Sequence
  Description of Artificial Sequence: Synthetic oligonucleotide
  Sense strand starting at position 2727 of SEQ ID NO: 587814
uaggaugcucaguggugaa

SEQ ID NO: 820369 - RNA, 19 nt, Artificial Sequence
  Description of Artificial Sequence: Synthetic oligonucleotide
  Antisense strand to SEQ ID NO: 820368
uucaccacugagcauccua

SEQ ID NO: 820370 - RNA, 19 nt, Artificial Sequence
  Description of Artificial Sequence: Synthetic oligonucleotide
  Sense strand starting at position 2747 of SEQ ID NO: 587814
aguaacuuuccugguauca

SEQ ID NO: 820371 - RNA, 19 nt, Artificial Sequence
  Description of Artificial Sequence: Synthetic oligonucleotide
  Antisense strand to SEQ ID NO: 820370
ugauaccaggaaaguuacu

SEQ ID NO: 820372 - RNA, 19 nt, Artificial Sequence
  Description of Artificial Sequence: Synthetic oligonucleotide
  Sense strand starting at position 2759 of SEQ ID NO: 587814
gguaucacccagugguauu

SEQ ID NO: 820373 - RNA, 19 nt, Artificial Sequence
  Description of Artificial Sequence: Synthetic oligonucleotide
  Antisense strand to SEQ ID NO: 820372
aauaccacugggugauacc

SEQ ID NO: 820374 - RNA, 19 nt, Artificial Sequence
  Description of Artificial Sequence: Synthetic oligonucleotide
  Sense strand starting at position 2760 of SEQ ID NO: 587814
guaucacccagugguauuu

SEQ ID NO: 820375 - RNA, 19 nt, Artificial Sequence
  Description of Artificial Sequence: Synthetic oligonucleotide
  Antisense strand to SEQ ID NO: 820374
aaauaccacugggugauac

SEQ ID NO: 820376 - RNA, 19 nt, Artificial Sequence
  Description of Artificial Sequence: Synthetic oligonucleotide
  Sense strand starting at position 2797 of SEQ ID NO: 587814
caugcuuggcuugaucagu

SEQ ID NO: 820377 - RNA, 19 nt, Artificial Sequence
  Description of Artificial Sequence: Synthetic oligonucleotide
  Antisense strand to SEQ ID NO: 820376
acugaucaagccaagcaug

SEQ ID NO: 820378 - RNA, 19 nt, Artificial Sequence
  Description of Artificial Sequence: Synthetic oligonucleotide
  Sense strand starting at position 2806 of SEQ ID NO: 587814
cuugaucagucuucugaga

SEQ ID NO: 820379 - RNA, 19 nt, Artificial Sequence
  Description of Artificial Sequence: Synthetic oligonucleotide
  Antisense strand to SEQ ID NO: 820378
ucucagaagacugaucaag

SEQ ID NO: 820380 - RNA, 19 nt, Artificial Sequence
  Description of Artificial Sequence: Synthetic oligonucleotide
  Sense strand starting at position 2870 of SEQ ID NO: 587814
cggauaaguuccucuggga

SEQ ID NO: 820381 - RNA, 19 nt, Artificial Sequence
  Description of Artificial Sequence: Synthetic oligonucleotide
  Antisense strand to SEQ ID NO: 820380
ucccagaggaacuuauccg

SEQ ID NO: 820382 - RNA, 19 nt, Artificial Sequence
  Description of Artificial Sequence: Synthetic oligonucleotide
  Sense strand starting at position 3189 of SEQ ID NO: 587814
aaauaaacacacggugauu

SEQ ID NO: 820383 - RNA, 19 nt, Artificial Sequence
  Description of Artificial Sequence: Synthetic oligonucleotide
  Antisense strand to SEQ ID NO: 820382
aaucaccguguguuuauuu

SEQ ID NO: 820384 - RNA, 19 nt, Artificial Sequence
  Description of Artificial Sequence: Synthetic oligonucleotide
  Sense strand starting at position 3202 of SEQ ID NO: 587814
gugauuauauggucuuaau

SEQ ID NO: 820385 - RNA, 19 nt, Artificial Sequence
  Description of Artificial Sequence: Synthetic oligonucleotide
  Antisense strand to SEQ ID NO: 820384
auuaagaccauauaaucac

SEQ ID NO: 820386 - RNA, 19 nt, Artificial Sequence
  Description of Artificial Sequence: Synthetic oligonucleotide
  Sense strand starting at position 3424 of SEQ ID NO: 587814
guccaucuuuaggcacaga

SEQ ID NO: 820387 - RNA, 19 nt, Artificial Sequence
  Description of Artificial Sequence: Synthetic oligonucleotide
  Antisense strand to SEQ ID NO: 820386
ucugugccuaaagauggac

SEQ ID NO: 820388 - RNA, 19 nt, Artificial Sequence
  Description of Artificial Sequence: Synthetic oligonucleotide
  Sense strand starting at position 3439 of SEQ ID NO: 587814
cagacaugguucucuaggu

SEQ ID NO: 820389 - RNA, 19 nt, Artificial Sequence
  Description of Artificial Sequence: Synthetic oligonucleotide
  Antisense strand to SEQ ID NO: 820388
accuagagaaccaugucug

SEQ ID NO: 820390 - RNA, 19 nt, Artificial Sequence
  Description of Artificial Sequence: Synthetic oligonucleotide
  Sense strand starting at position 3483 of SEQ ID NO: 587814
ggaggaaagcugugacuga

SEQ ID NO: 820391 - RNA, 19 nt, Artificial Sequence
  Description of Artificial Sequence: Synthetic oligonucleotide
  Antisense strand to SEQ ID NO: 820390
ucagucacagcuuuccucc

SEQ ID NO: 820392 - RNA, 19 nt, Artificial Sequence
  Description of Artificial Sequence: Synthetic oligonucleotide
  Sense strand starting at position 3487 of SEQ ID NO: 587814
gaaagcugugacugaauag

SEQ ID NO: 820393 - RNA, 19 nt, Artificial Sequence
  Description of Artificial Sequence: Synthetic oligonucleotide
  Antisense strand to SEQ ID NO: 820392
cuauucagucacagcuuuc

SEQ ID NO: 820394 - RNA, 19 nt, Artificial Sequence
  Description of Artificial Sequence: Synthetic oligonucleotide
  Sense strand starting at position 3657 of SEQ ID NO: 587814
cccauuugcugggaaacau

SEQ ID NO: 820395 - RNA, 19 nt, Artificial Sequence
  Description of Artificial Sequence: Synthetic oligonucleotide
  Antisense strand to SEQ ID NO: 820394
auguuucccagcaaauggg

SEQ ID NO: 820396 - RNA, 19 nt, Artificial Sequence
  Description of Artificial Sequence: Synthetic oligonucleotide
  Sense strand starting at position 3723 of SEQ ID NO: 587814
ggagacuccuggucccaau

SEQ ID NO: 820397 - RNA, 19 nt, Artificial Sequence
  Description of Artificial Sequence: Synthetic oligonucleotide
  Antisense strand to SEQ ID NO: 820396
auugggaccaggagucucc

SEQ ID NO: 820398 - RNA, 19 nt, Artificial Sequence
  Description of Artificial Sequence: Synthetic oligonucleotide
  Sense strand starting at position 3739 of SEQ ID NO: 587814
aaugccugugcuugggaaa

SEQ ID NO: 820399 - RNA, 19 nt, Artificial Sequence
  Description of Artificial Sequence: Synthetic oligonucleotide
  Antisense strand to SEQ ID NO: 820398
uuucccaagcacaggcauu

SEQ ID NO: 820400 - RNA, 19 nt, Artificial Sequence
  Description of Artificial Sequence: Synthetic oligonucleotide
  Sense strand starting at position 3751 of SEQ ID NO: 587814
ugggaaaucucagagaaga

SEQ ID NO: 820401 - RNA, 19 nt, Artificial Sequence
  Description of Artificial Sequence: Synthetic oligonucleotide
  Antisense strand to SEQ ID NO: 820400
ucuucucugagauuuccca

SEQ ID NO: 820402 - RNA, 19 nt, Artificial Sequence
  Description of Artificial Sequence: Synthetic oligonucleotide
  Sense strand starting at position 3847 of SEQ ID NO: 587814
uggucuuggcagagugagu

SEQ ID NO: 820403 - RNA, 19 nt, Artificial Sequence
  Description of Artificial Sequence: Synthetic oligonucleotide
  Antisense strand to SEQ ID NO: 820402
acucacucugccaagacca

SEQ ID NO: 820404 - RNA, 19 nt, Artificial Sequence
  Description of Artificial Sequence: Synthetic oligonucleotide
  Sense strand starting at position 8 of SEQ ID NO: 587815
augagucaugcugauaaua

SEQ ID NO: 820405 - RNA, 19 nt, Artificial Sequence
  Description of Artificial Sequence: Synthetic oligonucleotide
  Antisense strand to SEQ ID NO: 820404
uauuaucagcaugacucau

SEQ ID NO: 820406 - RNA, 19 nt, Artificial Sequence
  Description of Artificial Sequence: Synthetic oligonucleotide
  Sense strand starting at position 147 of SEQ ID NO: 587815
augguaucugcagacucaa

SEQ ID NO: 820407 - RNA, 19 nt, Artificial Sequence
  Description of Artificial Sequence: Synthetic oligonucleotide
  Antisense strand to SEQ ID NO: 820406
uugagucugcagauaccau

SEQ ID NO: 820408 - RNA, 19 nt, Artificial Sequence
  Description of Artificial Sequence: Synthetic oligonucleotide
  Sense strand starting at position 401 of SEQ ID NO: 587815
ggucgauuccaggaugcca

SEQ ID NO: 820409 - RNA, 19 nt, Artificial Sequence
  Description of Artificial Sequence: Synthetic oligonucleotide
  Antisense strand to SEQ ID NO: 820408
uggcauccuggaaucgacc

SEQ ID NO: 820410 - RNA, 19 nt, Artificial Sequence
  Description of Artificial Sequence: Synthetic oligonucleotide
  Sense strand starting at position 427 of SEQ ID NO: 587815
guguaauacugauucuuaa

SEQ ID NO: 820411 - RNA, 19 nt, Artificial Sequence
  Description of Artificial Sequence: Synthetic oligonucleotide
  Antisense strand to SEQ ID NO: 820410
uuaagaaucaguauuacac

SEQ ID NO: 820412 - RNA, 19 nt, Artificial Sequence
  Description of Artificial Sequence: Synthetic oligonucleotide
  Sense strand starting at position 491 of SEQ ID NO: 587815
uucucaagauaguuagaac

SEQ ID NO: 820413 - RNA, 19 nt, Artificial Sequence
  Description of Artificial Sequence: Synthetic oligonucleotide
  Antisense strand to SEQ ID NO: 820412
guucuaacuaucuugagaa

SEQ ID NO: 820414 - RNA, 19 nt, Artificial Sequence
  Description of Artificial Sequence: Synthetic oligonucleotide
  Sense strand starting at position 577 of SEQ ID NO: 587815
accauacaauggguauauu

SEQ ID NO: 820415 - RNA, 19 nt, Artificial Sequence
  Description of Artificial Sequence: Synthetic oligonucleotide
  Antisense strand to SEQ ID NO: 820414
aauauacccauuguauggu

SEQ ID NO: 820416 - RNA, 19 nt, Artificial Sequence
  Description of Artificial Sequence: Synthetic oligonucleotide
  Sense strand starting at position 738 of SEQ ID NO: 587815
acucuuagugcuuagauga

SEQ ID NO: 820417 - RNA, 19 nt, Artificial Sequence
  Description of Artificial Sequence: Synthetic oligonucleotide
  Antisense strand to SEQ ID NO: 820416
ucaucuaagcacuaagagu

SEQ ID NO: 820418 - RNA, 19 nt, Artificial Sequence
  Description of Artificial Sequence: Synthetic oligonucleotide
  Sense strand starting at position 743 of SEQ ID NO: 587815
uagugcuuagaugauaaua

SEQ ID NO: 820419 - RNA, 19 nt, Artificial Sequence
  Description of Artificial Sequence: Synthetic oligonucleotide
  Antisense strand to SEQ ID NO: 820418
uauuaucaucuaagcacua

SEQ ID NO: 820420 - RNA, 19 nt, Artificial Sequence
  Description of Artificial Sequence: Synthetic oligonucleotide
  Sense strand starting at position 812 of SEQ ID NO: 587815
aaagaacagguccguauau

SEQ ID NO: 820421 - RNA, 19 nt, Artificial Sequence
  Description of Artificial Sequence: Synthetic oligonucleotide
  Antisense strand to SEQ ID NO: 820420
auauacggaccuguucuuu

SEQ ID NO: 820422 - RNA, 19 nt, Artificial Sequence
  Description of Artificial Sequence: Synthetic oligonucleotide
  Sense strand starting at position 813 of SEQ ID NO: 587815
aagaacagguccguauauu

SEQ ID NO: 820423 - RNA, 19 nt, Artificial Sequence
  Description of Artificial Sequence: Synthetic oligonucleotide
  Antisense strand to SEQ ID NO: 820422
aauauacggaccuguucuu

SEQ ID NO: 820424 - RNA, 19 nt, Artificial Sequence
  Description of Artificial Sequence: Synthetic oligonucleotide
  Sense strand starting at position 1358 of SEQ ID NO: 587815
uagaaagcggucuauaauu

SEQ ID NO: 820425 - RNA, 19 nt, Artificial Sequence
  Description of Artificial Sequence: Synthetic oligonucleotide
  Antisense strand to SEQ ID NO: 820424
aauuauagaccgcuuucua

SEQ ID NO: 820426 - RNA, 19 nt, Artificial Sequence
  Description of Artificial Sequence: Synthetic oligonucleotide
  Sense strand starting at position 1403 of SEQ ID NO: 587815
auauuuauaucggagaaag

SEQ ID NO: 820427 - RNA, 19 nt, Artificial Sequence
  Description of Artificial Sequence: Synthetic oligonucleotide
  Antisense strand to SEQ ID NO: 820426
cuuucuccgauauaaauau

SEQ ID NO: 820428 - RNA, 19 nt, Artificial Sequence
  Description of Artificial Sequence: Synthetic oligonucleotide
  Sense strand starting at position 1533 of SEQ ID NO: 587815
aagggaaucuguuuagauu

SEQ ID NO: 820429 - RNA, 19 nt, Artificial Sequence
  Description of Artificial Sequence: Synthetic oligonucleotide
  Antisense strand to SEQ ID NO: 820428
aaucuaaacagauucccuu

SEQ ID NO: 820430 - RNA, 19 nt, Artificial Sequence
  Description of Artificial Sequence: Synthetic oligonucleotide
  Sense strand starting at position 1539 of SEQ ID NO: 587815
aucuguuuagauuggagaa

SEQ ID NO: 820431 - RNA, 19 nt, Artificial Sequence
  Description of Artificial Sequence: Synthetic oligonucleotide
  Antisense strand to SEQ ID NO: 820430
uucuccaaucuaaacagau

SEQ ID NO: 820432 - RNA, 19 nt, Artificial Sequence
  Description of Artificial Sequence: Synthetic oligonucleotide
  Sense strand starting at position 1540 of SEQ ID NO: 587815
ucuguuuagauuggagaaa

SEQ ID NO: 820433 - RNA, 19 nt, Artificial Sequence
  Description of Artificial Sequence: Synthetic oligonucleotide
  Antisense strand to SEQ ID NO: 820432
uuucuccaaucuaaacaga

SEQ ID NO: 820434 - RNA, 19 nt, Artificial Sequence
  Description of Artificial Sequence: Synthetic oligonucleotide
  Sense strand starting at position 1571 of SEQ ID NO: 587815
agguaauuaucaucuaggu

SEQ ID NO: 820435 - RNA, 19 nt, Artificial Sequence
  Description of Artificial Sequence: Synthetic oligonucleotide
  Antisense strand to SEQ ID NO: 820434
accuagaugauaauuaccu

SEQ ID NO: 820436 - RNA, 19 nt, Artificial Sequence
  Description of Artificial Sequence: Synthetic oligonucleotide
  Sense strand starting at position 1647 of SEQ ID NO: 587815
gagcaauggcacuaaagcu

SEQ ID NO: 820437 - RNA, 19 nt, Artificial Sequence
  Description of Artificial Sequence: Synthetic oligonucleotide
  Antisense strand to SEQ ID NO: 820436
agcuuuagugccauugcuc

SEQ ID NO: 820438 - RNA, 19 nt, Artificial Sequence
  Description of Artificial Sequence: Synthetic oligonucleotide
  Sense strand starting at position 1655 of SEQ ID NO: 587815
gcacuaaagcuugaguaua

SEQ ID NO: 820439 - RNA, 19 nt, Artificial Sequence
  Description of Artificial Sequence: Synthetic oligonucleotide
  Antisense strand to SEQ ID NO: 820438
uauacucaagcuuuagugc

SEQ ID NO: 820440 - RNA, 19 nt, Artificial Sequence
  Description of Artificial Sequence: Synthetic oligonucleotide
  Sense strand starting at position 1657 of SEQ ID NO: 587815
acuaaagcuugaguauagu

SEQ ID NO: 820441 - RNA, 19 nt, Artificial Sequence
  Description of Artificial Sequence: Synthetic oligonucleotide
  Antisense strand to SEQ ID NO: 820440
acuauacucaagcuuuagu

SEQ ID NO: 820442 - RNA, 19 nt, Artificial Sequence
  Description of Artificial Sequence: Synthetic oligonucleotide
  Sense strand starting at position 1679 of SEQ ID NO: 587815
auauucuuucuggguaaac

SEQ ID NO: 820443 - RNA, 19 nt, Artificial Sequence
  Description of Artificial Sequence: Synthetic oligonucleotide
  Antisense strand to SEQ ID NO: 820442
guuuacccagaaagaauau

SEQ ID NO: 820444 - RNA, 19 nt, Artificial Sequence
  Description of Artificial Sequence: Synthetic oligonucleotide
  Sense strand starting at position 1681 of SEQ ID NO: 587815
auucuuucuggguaaacac

SEQ ID NO: 820445 - RNA, 19 nt, Artificial Sequence
  Description of Artificial Sequence: Synthetic oligonucleotide
  Antisense strand to SEQ ID NO: 820444
guguuuacccagaaagaau

SEQ ID NO: 820446 - RNA, 19 nt, Artificial Sequence
  Description of Artificial Sequence: Synthetic oligonucleotide
  Sense strand starting at position 2084 of SEQ ID NO: 587815
gcagcuuauccacagaucu

SEQ ID NO: 820447 - RNA, 19 nt, Artificial Sequence
  Description of Artificial Sequence: Synthetic oligonucleotide
  Antisense strand to SEQ ID NO: 820446
agaucuguggauaagcugc

SEQ ID NO: 820448 - RNA, 19 nt, Artificial Sequence
  Description of Artificial Sequence: Synthetic oligonucleotide
  Sense strand starting at position 2167 of SEQ ID NO: 587815
ccucuaaaggcagaaaugu

SEQ ID NO: 820449 - RNA, 19 nt, Artificial Sequence
  Description of Artificial Sequence: Synthetic oligonucleotide
  Antisense strand to SEQ ID NO: 820448
acauuucugccuuuagagg

SEQ ID NO: 820450 - RNA, 19 nt, Artificial Sequence
  Description of Artificial Sequence: Synthetic oligonucleotide
  Sense strand starting at position 2237 of SEQ ID NO: 587815
ugauauacagcuuagcaua

SEQ ID NO: 820451 - RNA, 19 nt, Artificial Sequence
  Description of Artificial Sequence: Synthetic oligonucleotide
  Antisense strand to SEQ ID NO: 820450
uaugcuaagcuguauauca

SEQ ID NO: 820452 - RNA, 19 nt, Artificial Sequence
  Description of Artificial Sequence: Synthetic oligonucleotide
  Sense strand starting at position 2266 of SEQ ID NO: 587815
uuaaauagauuguuuggca

SEQ ID NO: 820453 - RNA, 19 nt, Artificial Sequence
  Description of Artificial Sequence: Synthetic oligonucleotide
  Antisense strand to SEQ ID NO: 820452
ugccaaacaaucuauuuaa

SEQ ID NO: 820454 - RNA, 19 nt, Artificial Sequence
  Description of Artificial Sequence: Synthetic oligonucleotide
  Sense strand starting at position 2267 of SEQ ID NO: 587815
uaaauagauuguuuggcaa

SEQ ID NO: 820455 - RNA, 19 nt, Artificial Sequence
  Description of Artificial Sequence: Synthetic oligonucleotide
  Antisense strand to SEQ ID NO: 820454
uugccaaacaaucuauuua

SEQ ID NO: 820456 - RNA, 19 nt, Artificial Sequence
  Description of Artificial Sequence: Synthetic oligonucleotide
  Sense strand starting at position 2293 of SEQ ID NO: 587815
uguguuaguggugugugau

SEQ ID NO: 820457 - RNA, 19 nt, Artificial Sequence
  Description of Artificial Sequence: Synthetic oligonucleotide
  Antisense strand to SEQ ID NO: 820456
aucacacaccacuaacaca

SEQ ID NO: 820458 - RNA, 19 nt, Artificial Sequence
  Description of Artificial Sequence: Synthetic oligonucleotide
  Sense strand starting at position 2306 of SEQ ID NO: 587815
ugugauagccaauaguacu

SEQ ID NO: 820459 - RNA, 19 nt, Artificial Sequence
  Description of Artificial Sequence: Synthetic oligonucleotide
  Antisense strand to SEQ ID NO: 820458
aguacuauuggcuaucaca

SEQ ID NO: 820460 - RNA, 19 nt, Artificial Sequence
  Description of Artificial Sequence: Synthetic oligonucleotide
  Sense strand starting at position 2312 of SEQ ID NO: 587815
agccaauaguacuugacaa

SEQ ID NO: 820461 - RNA, 19 nt, Artificial Sequence
  Description of Artificial Sequence: Synthetic oligonucleotide
  Antisense strand to SEQ ID NO: 820460
uugucaaguacuauuggcu

SEQ ID NO: 820462 - RNA, 19 nt, Artificial Sequence
  Description of Artificial Sequence: Synthetic oligonucleotide
  Sense strand starting at position 2327 of SEQ ID NO: 587815
acaaucuugggcuaugcaa

SEQ ID NO: 820463 - RNA, 19 nt, Artificial Sequence
  Description of Artificial Sequence: Synthetic oligonucleotide
  Antisense strand to SEQ ID NO: 820462
uugcauagcccaagauugu

SEQ ID NO: 820464 - RNA, 19 nt, Artificial Sequence
  Description of Artificial Sequence: Synthetic oligonucleotide
  Sense strand starting at position 2340 of SEQ ID NO: 587815
augcaauugacaggcagau

SEQ ID NO: 820465 - RNA, 19 nt, Artificial Sequence
  Description of Artificial Sequence: Synthetic oligonucleotide
  Antisense strand to SEQ ID NO: 820464
aucugccugucaauugcau

SEQ ID NO: 820466 - RNA, 19 nt, Artificial Sequence
  Description of Artificial Sequence: Synthetic oligonucleotide
  Sense strand starting at position 2482 of SEQ ID NO: 587815
caucauguggaguaaguua

SEQ ID NO: 820467 - RNA, 19 nt, Artificial Sequence
  Description of Artificial Sequence: Synthetic oligonucleotide
  Antisense strand to SEQ ID NO: 820466
uaacuuacuccacaugaug

SEQ ID NO: 820468 - RNA, 19 nt, Artificial Sequence
  Description of Artificial Sequence: Synthetic oligonucleotide
  Sense strand starting at position 2523 of SEQ ID NO: 587815
cuagguacccaaugaguaa

SEQ ID NO: 820469 - RNA, 19 nt, Artificial Sequence
  Description of Artificial Sequence: Synthetic oligonucleotide
  Antisense strand to SEQ ID NO: 820468
uuacucauuggguaccuag

SEQ ID NO: 820470 - RNA, 19 nt, Artificial Sequence
  Description of Artificial Sequence: Synthetic oligonucleotide
  Sense strand starting at position 2541 of SEQ ID NO: 587815
agccaagaauuggcuucua

SEQ ID NO: 820471 - RNA, 19 nt, Artificial Sequence
  Description of Artificial Sequence: Synthetic oligonucleotide
  Antisense strand to SEQ ID NO: 820470
uagaagccaauucuuggcu

SEQ ID NO: 820472 - RNA, 19 nt, Artificial Sequence
  Description of Artificial Sequence: Synthetic oligonucleotide
  Sense strand starting at position 2631 of SEQ ID NO: 587815
ccuuucugucaagaggcaa

SEQ ID NO: 820473 - RNA, 19 nt, Artificial Sequence
  Description of Artificial Sequence: Synthetic oligonucleotide
  Antisense strand to SEQ ID NO: 820472
uugccucuugacagaaagg

SEQ ID NO: 820474 - RNA, 19 nt, Artificial Sequence
  Description of Artificial Sequence: Synthetic oligonucleotide
  Sense strand starting at position 2688 of SEQ ID NO: 587815
aaagguaagggauguguau

SEQ ID NO: 820475 - RNA, 19 nt, Artificial Sequence
  Description of Artificial Sequence: Synthetic oligonucleotide
  Antisense strand to SEQ ID NO: 820474
auacacaucccuuaccuuu

SEQ ID NO: 820476 - RNA, 19 nt, Artificial Sequence
  Description of Artificial Sequence: Synthetic oligonucleotide
  Sense strand starting at position 2690 of SEQ ID NO: 587815
agguaagggauguguauua

SEQ ID NO: 820477 - RNA, 19 nt, Artificial Sequence
  Description of Artificial Sequence: Synthetic oligonucleotide
  Antisense strand to SEQ ID NO: 820476
uaauacacaucccuuaccu

SEQ ID NO: 820478 - RNA, 19 nt, Artificial Sequence
  Description of Artificial Sequence: Synthetic oligonucleotide
  Sense strand starting at position 2801 of SEQ ID NO: 587815
ggaguugauaguugauucu

SEQ ID NO: 820479 - RNA, 19 nt, Artificial Sequence
  Description of Artificial Sequence: Synthetic oligonucleotide
  Antisense strand to SEQ ID NO: 820478
agaaucaacuaucaacucc

SEQ ID NO: 820480 - RNA, 19 nt, Artificial Sequence
  Description of Artificial Sequence: Synthetic oligonucleotide
  Sense strand starting at position 2804 of SEQ ID NO: 587815
guugauaguugauucuaaa

SEQ ID NO: 820481 - RNA, 19 nt, Artificial Sequence
  Description of Artificial Sequence: Synthetic oligonucleotide
  Antisense strand to SEQ ID NO: 820480
uuuagaaucaacuaucaac

SEQ ID NO: 820482 - RNA, 19 nt, Artificial Sequence
  Description of Artificial Sequence: Synthetic oligonucleotide
  Sense strand starting at position 3598 of SEQ ID NO: 587815
uuguauagccaagaugauc

SEQ ID NO: 820483 - RNA, 19 nt, Artificial Sequence
  Description of Artificial Sequence: Synthetic oligonucleotide
  Antisense strand to SEQ ID NO: 820482
gaucaucuuggcuauacaa

SEQ ID NO: 820484 - RNA, 19 nt, Artificial Sequence
  Description of Artificial Sequence: Synthetic oligonucleotide
  Sense strand starting at position 9 of SEQ ID NO: 587816
gcuggagacugaugcagaa

SEQ ID NO: 820485 - RNA, 19 nt, Artificial Sequence
  Description of Artificial Sequence: Synthetic oligonucleotide
  Antisense strand to SEQ ID NO: 820484
uucugcaucagucuccagc

SEQ ID NO: 820486 - RNA, 19 nt, Artificial Sequence
  Description of Artificial Sequence: Synthetic oligonucleotide
  Sense strand starting at position 75 of SEQ ID NO: 587816
ugccuaauuccgcuagcca

SEQ ID NO: 820487 - RNA, 19 nt, Artificial Sequence
  Description of Artificial Sequence: Synthetic oligonucleotide
  Antisense strand to SEQ ID NO: 820486
uggcuagcggaauuaggca

SEQ ID NO: 820488 - RNA, 19 nt, Artificial Sequence
  Description of Artificial Sequence: Synthetic oligonucleotide
  Sense strand starting at position 187 of SEQ ID NO: 587816
gacaaagagcgauaggcuu

SEQ ID NO: 820489 - RNA, 19 nt, Artificial Sequence
  Description of Artificial Sequence: Synthetic oligonucleotide
  Antisense strand to SEQ ID NO: 820488
aagccuaucgcucuuuguc

SEQ ID NO: 820490 - RNA, 19 nt, Artificial Sequence
  Description of Artificial Sequence: Synthetic oligonucleotide
  Sense strand starting at position 1061 of SEQ ID NO: 587816
ccggguuuguuccaggaaa

SEQ ID NO: 820491 - RNA, 19 nt, Artificial Sequence
  Description of Artificial Sequence: Synthetic oligonucleotide
  Antisense strand to SEQ ID NO: 820490
uuuccuggaacaaacccgg

SEQ ID NO: 820492 - RNA, 19 nt, Artificial Sequence
  Description of Artificial Sequence: Synthetic oligonucleotide
  Sense strand starting at position 1376 of SEQ ID NO: 587816
cucccuaucccgugagaaa

SEQ ID NO: 820493 - RNA, 19 nt, Artificial Sequence
  Description of Artificial Sequence: Synthetic oligonucleotide
  Antisense strand to SEQ ID NO: 820492
uuucucacgggauagggag

SEQ ID NO: 820494 - RNA, 19 nt, Artificial Sequence
  Description of Artificial Sequence: Synthetic oligonucleotide
  Sense strand starting at position 1377 of SEQ ID NO: 587816
ucccuaucccgugagaaag

SEQ ID NO: 820495 - RNA, 19 nt, Artificial Sequence
  Description of Artificial Sequence: Synthetic oligonucleotide
  Antisense strand to SEQ ID NO: 820494
cuuucucacgggauaggga

SEQ ID NO: 820496 - RNA, 19 nt, Artificial Sequence
  Description of Artificial Sequence: Synthetic oligonucleotide
  Sense strand starting at position 1412 of SEQ ID NO: 587816
ccuggucuuuccgaaauac

SEQ ID NO: 820497 - RNA, 19 nt, Artificial Sequence
  Description of Artificial Sequence: Synthetic oligonucleotide
  Antisense strand to SEQ ID NO: 820496
guauuucggaaagaccagg

SEQ ID NO: 820498 - RNA, 19 nt, Artificial Sequence
  Description of Artificial Sequence: Synthetic oligonucleotide
  Sense strand starting at position 1428 of SEQ ID NO: 587816
uacgcuucggguggucaau

SEQ ID NO: 820499 - RNA, 19 nt, Artificial Sequence
  Description of Artificial Sequence: Synthetic oligonucleotide
  Antisense strand to SEQ ID NO: 820498
auugaccacccgaagcgua

SEQ ID NO: 820500 - RNA, 19 nt, Artificial Sequence
  Description of Artificial Sequence: Synthetic oligonucleotide
  Sense strand starting at position 1434 of SEQ ID NO: 587816
ucggguggucaaugcgauu

SEQ ID NO: 820501 - RNA, 19 nt, Artificial Sequence
  Description of Artificial Sequence: Synthetic oligonucleotide
  Antisense strand to SEQ ID NO: 820500
aaucgcauugaccacccga

SEQ ID NO: 820502 - RNA, 19 nt, Artificial Sequence
  Description of Artificial Sequence: Synthetic oligonucleotide
  Sense strand starting at position 1445 of SEQ ID NO: 587816
augcgauuucuagggucua

SEQ ID NO: 820503 - RNA, 19 nt, Artificial Sequence
  Description of Artificial Sequence: Synthetic oligonucleotide
  Antisense strand to SEQ ID NO: 820502
uagacccuagaaaucgcau

SEQ ID NO: 820504 - RNA, 19 nt, Artificial Sequence
  Description of Artificial Sequence: Synthetic oligonucleotide
  Sense strand starting at position 1446 of SEQ ID NO: 587816
ugcgauuucuagggucuaa

SEQ ID NO: 820505 - RNA, 19 nt, Artificial Sequence
  Description of Artificial Sequence: Synthetic oligonucleotide
  Antisense strand to SEQ ID NO: 820504
uuagacccuagaaaucgca

SEQ ID NO: 820506 - RNA, 19 nt, Artificial Sequence
  Description of Artificial Sequence: Synthetic oligonucleotide
  Sense strand starting at position 1760 of SEQ ID NO: 587816
aagagaguucgaggaacug

SEQ ID NO: 820507 - RNA, 19 nt, Artificial Sequence
  Description of Artificial Sequence: Synthetic oligonucleotide
  Antisense strand to SEQ ID NO: 820506
caguuccucgaacucucuu

SEQ ID NO: 820508 - RNA, 19 nt, Artificial Sequence
  Description of Artificial Sequence: Synthetic oligonucleotide
  Sense strand starting at position 2291 of SEQ ID NO: 587816
gugcucggaccucgugaau

SEQ ID NO: 820509 - RNA, 19 nt, Artificial Sequence
  Description of Artificial Sequence: Synthetic oligonucleotide
  Antisense strand to SEQ ID NO: 820508
auucacgagguccgagcac

SEQ ID NO: 820510 - RNA, 19 nt, Artificial Sequence
  Description of Artificial Sequence: Synthetic oligonucleotide
  Sense strand starting at position 2294 of SEQ ID NO: 587816
cucggaccucgugaaugaa

SEQ ID NO: 820511 - RNA, 19 nt, Artificial Sequence
  Description of Artificial Sequence: Synthetic oligonucleotide
  Antisense strand to SEQ ID NO: 820510
uucauucacgagguccgag

SEQ ID NO: 820512 - RNA, 19 nt, Artificial Sequence
  Description of Artificial Sequence: Synthetic oligonucleotide
  Sense strand starting at position 3680 of SEQ ID NO: 587816
ggcucuuuacuacagaauu

SEQ ID NO: 820513 - RNA, 19 nt, Artificial Sequence
  Description of Artificial Sequence: Synthetic oligonucleotide
  Antisense strand to SEQ ID NO: 820512
aauucuguaguaaagagcc

SEQ ID NO: 820514 - RNA, 19 nt, Artificial Sequence
  Description of Artificial Sequence: Synthetic oligonucleotide
  Sense strand starting at position 3748 of SEQ ID NO: 587816
aaaggccuauaguuagauu

SEQ ID NO: 820515 - RNA, 19 nt, Artificial Sequence
  Description of Artificial Sequence: Synthetic oligonucleotide
  Antisense strand to SEQ ID NO: 820514
aaucuaacuauaggccuuu

SEQ ID NO: 820516 - RNA, 19 nt, Artificial Sequence
  Description of Artificial Sequence: Synthetic oligonucleotide
  Sense strand starting at position 3751 of SEQ ID NO: 587816
ggccuauaguuagauucuu

SEQ ID NO: 820517 - RNA, 19 nt, Artificial Sequence
  Description of Artificial Sequence: Synthetic oligonucleotide
  Antisense strand to SEQ ID NO: 820516
aagaaucuaacuauaggcc

SEQ ID NO: 820518 - RNA, 19 nt, Artificial Sequence
  Description of Artificial Sequence: Synthetic oligonucleotide
  Sense strand starting at position 3847 of SEQ ID NO: 587816
aggagcuuguuagaaauaa

SEQ ID NO: 820519 - RNA, 19 nt, Artificial Sequence
  Description of Artificial Sequence: Synthetic oligonucleotide
  Antisense strand to SEQ ID NO: 820518
uuauuucuaacaagcuccu

SEQ ID NO: 820520 - RNA, 19 nt, Artificial Sequence
  Description of Artificial Sequence: Synthetic oligonucleotide
  Sense strand starting at position 3895 of SEQ ID NO: 587816
ucggaaucugcaugguaac

SEQ ID NO: 820521 - RNA, 19 nt, Artificial Sequence
  Description of Artificial Sequence: Synthetic oligonucleotide
  Antisense strand to SEQ ID NO: 820520
guuaccaugcagauuccga

SEQ ID NO: 820522 - RNA, 19 nt, Artificial Sequence
  Description of Artificial Sequence: Synthetic oligonucleotide
  Sense strand starting at position 3896 of SEQ ID NO: 587816
cggaaucugcaugguaaca

SEQ ID NO: 820523 - RNA, 19 nt, Artificial Sequence
  Description of Artificial Sequence: Synthetic oligonucleotide
  Antisense strand to SEQ ID NO: 820522
uguuaccaugcagauuccg

SEQ ID NO: 820524 - RNA, 19 nt, Artificial Sequence
  Description of Artificial Sequence: Synthetic oligonucleotide
  Sense strand starting at position 3898 of SEQ ID NO: 587816
gaaucugcaugguaacauu

SEQ ID NO: 820525 - RNA, 19 nt, Artificial Sequence
  Description of Artificial Sequence: Synthetic oligonucleotide
  Antisense strand to SEQ ID NO: 820524
aauguuaccaugcagauuc

SEQ ID NO: 820526 - RNA, 19 nt, Artificial Sequence
  Description of Artificial Sequence: Synthetic oligonucleotide
  Sense strand starting at position 3938 of SEQ ID NO: 587816
cugaaugugacaugcggua

SEQ ID NO: 820527 - RNA, 19 nt, Artificial Sequence
  Description of Artificial Sequence: Synthetic oligonucleotide
  Antisense strand to SEQ ID NO: 820526
uaccgcaugucacauucag

SEQ ID NO: 820528 - RNA, 19 nt, Artificial Sequence
  Description of Artificial Sequence: Synthetic oligonucleotide
  Sense strand starting at position 3958 of SEQ ID NO: 587816
gcagaagggucuguguuca

SEQ ID NO: 820529 - RNA, 19 nt, Artificial Sequence
  Description of Artificial Sequence: Synthetic oligonucleotide
  Antisense strand to SEQ ID NO: 820528
ugaacacagacccuucugc

SEQ ID NO: 820530 - RNA, 19 nt, Artificial Sequence
  Description of Artificial Sequence: Synthetic oligonucleotide
  Sense strand starting at position 90 of SEQ ID NO: 587817
gacucagauggcugagaca

SEQ ID NO: 820531 - RNA, 19 nt, Artificial Sequence
  Description of Artificial Sequence: Synthetic oligonucleotide
  Antisense strand to SEQ ID NO: 820530
ugucucagccaucugaguc

SEQ ID NO: 820532 - RNA, 19 nt, Artificial Sequence
  Description of Artificial Sequence: Synthetic oligonucleotide
  Sense strand starting at position 294 of SEQ ID NO: 587817
gaaggaauuucugacuugu

SEQ ID NO: 820533 - RNA, 19 nt, Artificial Sequence
  Description of Artificial Sequence: Synthetic oligonucleotide
  Antisense strand to SEQ ID NO: 820532
acaagucagaaauuccuuc

SEQ ID NO: 820534 - RNA, 19 nt, Artificial Sequence
  Description of Artificial Sequence: Synthetic oligonucleotide
  Sense strand starting at position 394 of SEQ ID NO: 587817
ggaccagagcucuggaaag

SEQ ID NO: 820535 - RNA, 19 nt, Artificial Sequence
  Description of Artificial Sequence: Synthetic oligonucleotide
  Antisense strand to SEQ ID NO: 820534
cuuuccagagcucuggucc

SEQ ID NO: 820536 - RNA, 19 nt, Artificial Sequence
  Description of Artificial Sequence: Synthetic oligonucleotide
  Sense strand starting at position 400 of SEQ ID NO: 587817
gagcucuggaaaggugaau

SEQ ID NO: 820537 - RNA, 19 nt, Artificial Sequence
  Description of Artificial Sequence: Synthetic oligonucleotide
  Antisense strand to SEQ ID NO: 820536
auucaccuuuccagagcuc

SEQ ID NO: 820538 - RNA, 19 nt, Artificial Sequence
  Description of Artificial Sequence: Synthetic oligonucleotide
  Sense strand starting at position 478 of SEQ ID NO: 587817
ugugaacuucuugagacuu

SEQ ID NO: 820539 - RNA, 19 nt, Artificial Sequence
  Description of Artificial Sequence: Synthetic oligonucleotide
  Antisense strand to SEQ ID NO: 820538
aagucucaagaaguucaca

SEQ ID NO: 820540 - RNA, 19 nt, Artificial Sequence
  Description of Artificial Sequence: Synthetic oligonucleotide
  Sense strand starting at position 538 of SEQ ID NO: 587817
cauguuuguugauugaaag

SEQ ID NO: 820541 - RNA, 19 nt, Artificial Sequence
  Description of Artificial Sequence: Synthetic oligonucleotide
  Antisense strand to SEQ ID NO: 820540
cuuucaaucaacaaacaug

SEQ ID NO: 820542 - RNA, 19 nt, Artificial Sequence
  Description of Artificial Sequence: Synthetic oligonucleotide
  Sense strand starting at position 589 of SEQ ID NO: 587817
gaaguaagugcuggaagac

SEQ ID NO: 820543 - RNA, 19 nt, Artificial Sequence
  Description of Artificial Sequence: Synthetic oligonucleotide
  Antisense strand to SEQ ID NO: 820542
gucuuccagcacuuacuuc

SEQ ID NO: 820544 - RNA, 19 nt, Artificial Sequence
  Description of Artificial Sequence: Synthetic oligonucleotide
  Sense strand starting at position 647 of SEQ ID NO: 587817
gacucagaucuugguagga

SEQ ID NO: 820545 - RNA, 19 nt, Artificial Sequence
  Description of Artificial Sequence: Synthetic oligonucleotide
  Antisense strand to SEQ ID NO: 820544
uccuaccaagaucugaguc

SEQ ID NO: 820546 - RNA, 19 nt, Artificial Sequence
  Description of Artificial Sequence: Synthetic oligonucleotide
  Sense strand starting at position 651 of SEQ ID NO: 587817
cagaucuugguaggaauua

SEQ ID NO: 820547 - RNA, 19 nt, Artificial Sequence
  Description of Artificial Sequence: Synthetic oligonucleotide
  Antisense strand to SEQ ID NO: 820546
uaauuccuaccaagaucug

SEQ ID NO: 820548 - RNA, 19 nt, Artificial Sequence
  Description of Artificial Sequence: Synthetic oligonucleotide
  Sense strand starting at position 681 of SEQ ID NO: 587817
cuccuauuugucuguguaa

SEQ ID NO: 820549 - RNA, 19 nt, Artificial Sequence
  Description of Artificial Sequence: Synthetic oligonucleotide
  Antisense strand to SEQ ID NO: 820548
uuacacagacaaauaggag

SEQ ID NO: 820550 - RNA, 19 nt, Artificial Sequence
  Description of Artificial Sequence: Synthetic oligonucleotide
  Sense strand starting at position 682 of SEQ ID NO: 587817
uccuauuugucuguguaac

SEQ ID NO: 820551 - RNA, 19 nt, Artificial Sequence
  Description of Artificial Sequence: Synthetic oligonucleotide
  Antisense strand to SEQ ID NO: 820550
guuacacagacaaauagga

SEQ ID NO: 820552 - RNA, 19 nt, Artificial Sequence
  Description of Artificial Sequence: Synthetic oligonucleotide
  Sense strand starting at position 683 of SEQ ID NO: 587817
ccuauuugucuguguaacc

SEQ ID NO: 820553 - RNA, 19 nt, Artificial Sequence
  Description of Artificial Sequence: Synthetic oligonucleotide
  Antisense strand to SEQ ID NO: 820552
gguuacacagacaaauagg

SEQ ID NO: 820554 - RNA, 19 nt, Artificial Sequence
  Description of Artificial Sequence: Synthetic oligonucleotide
  Sense strand starting at position 684 of SEQ ID NO: 587817
cuauuugucuguguaaccu

SEQ ID NO: 820555 - RNA, 19 nt, Artificial Sequence
  Description of Artificial Sequence: Synthetic oligonucleotide
  Antisense strand to SEQ ID NO: 820554
agguuacacagacaaauag

SEQ ID NO: 820556 - RNA, 19 nt, Artificial Sequence
  Description of Artificial Sequence: Synthetic oligonucleotide
  Sense strand starting at position 704 of SEQ ID NO: 587817
aggcaaguuccugaaacac

SEQ ID NO: 820557 - RNA, 19 nt, Artificial Sequence
  Description of Artificial Sequence: Synthetic oligonucleotide
  Antisense strand to SEQ ID NO: 820556
guguuucaggaacuugccu

SEQ ID NO: 820558 - RNA, 19 nt, Artificial Sequence
  Description of Artificial Sequence: Synthetic oligonucleotide
  Sense strand starting at position 720 of SEQ ID NO: 587817
cacuguauacaaugggaau

SEQ ID NO: 820559 - RNA, 19 nt, Artificial Sequence
  Description of Artificial Sequence: Synthetic oligonucleotide
  Antisense strand to SEQ ID NO: 820558
auucccauuguauacagug

SEQ ID NO: 820560 - RNA, 19 nt, Artificial Sequence
  Description of Artificial Sequence: Synthetic oligonucleotide
  Sense strand starting at position 789 of SEQ ID NO: 587817
ggauauauuuagcaaauac

SEQ ID NO: 820561 - RNA, 19 nt, Artificial Sequence
  Description of Artificial Sequence: Synthetic oligonucleotide
  Antisense strand to SEQ ID NO: 820560
guauuugcuaaauauaucc

SEQ ID NO: 820562 - RNA, 19 nt, Artificial Sequence
  Description of Artificial Sequence: Synthetic oligonucleotide
  Sense strand starting at position 823 of SEQ ID NO: 587817
ucucuagaagucugaaaug

SEQ ID NO: 820563 - RNA, 19 nt, Artificial Sequence
  Description of Artificial Sequence: Synthetic oligonucleotide
  Antisense strand to SEQ ID NO: 820562
cauuucagacuucuagaga

SEQ ID NO: 820564 - RNA, 19 nt, Artificial Sequence
  Description of Artificial Sequence: Synthetic oligonucleotide
  Sense strand starting at position 828 of SEQ ID NO: 587817
agaagucugaaaugggagu

SEQ ID NO: 820565 - RNA, 19 nt, Artificial Sequence
  Description of Artificial Sequence: Synthetic oligonucleotide
  Antisense strand to SEQ ID NO: 820564
acucccauuucagacuucu

SEQ ID NO: 820566 - RNA, 19 nt, Artificial Sequence
  Description of Artificial Sequence: Synthetic oligonucleotide
  Sense strand starting at position 829 of SEQ ID NO: 587817
gaagucugaaaugggagua

SEQ ID NO: 820567 - RNA, 19 nt, Artificial Sequence
  Description of Artificial Sequence: Synthetic oligonucleotide
  Antisense strand to SEQ ID NO: 820566
uacucccauuucagacuuc

SEQ ID NO: 820568 - RNA, 19 nt, Artificial Sequence
  Description of Artificial Sequence: Synthetic oligonucleotide
  Sense strand starting at position 945 of SEQ ID NO: 587817
auaauacagccauggagau

SEQ ID NO: 820569 - RNA, 19 nt, Artificial Sequence
  Description of Artificial Sequence: Synthetic oligonucleotide
  Antisense strand to SEQ ID NO: 820568
aucuccauggcuguauuau

SEQ ID NO: 820570 - RNA, 19 nt, Artificial Sequence
  Description of Artificial Sequence: Synthetic oligonucleotide
  Sense strand starting at position 1116 of SEQ ID NO: 587817
uguacacaguuauuacaau

SEQ ID NO: 820571 - RNA, 19 nt, Artificial Sequence
  Description of Artificial Sequence: Synthetic oligonucleotide
  Antisense strand to SEQ ID NO: 820570
auuguaauaacuguguaca

SEQ ID NO: 820572 - RNA, 19 nt, Artificial Sequence
  Description of Artificial Sequence: Synthetic oligonucleotide
  Sense strand starting at position 1444 of SEQ ID NO: 587817
guuggaauucaagguggaa

SEQ ID NO: 820573 - RNA, 19 nt, Artificial Sequence
  Description of Artificial Sequence: Synthetic oligonucleotide
  Antisense strand to SEQ ID NO: 820572
uuccaccuugaauuccaac

SEQ ID NO: 820574 - RNA, 19 nt, Artificial Sequence
  Description of Artificial Sequence: Synthetic oligonucleotide
  Sense strand starting at position 1469 of SEQ ID NO: 587817
aggaaaggccucuggaauc

SEQ ID NO: 820575 - RNA, 19 nt, Artificial Sequence
  Description of Artificial Sequence: Synthetic oligonucleotide
  Antisense strand to SEQ ID NO: 820574
gauuccagaggccuuuccu

SEQ ID NO: 820576 - RNA, 19 nt, Artificial Sequence
  Description of Artificial Sequence: Synthetic oligonucleotide
  Sense strand starting at position 1505 of SEQ ID NO: 587817
cacugugacccaggaguua

SEQ ID NO: 820577 - RNA, 19 nt, Artificial Sequence
  Description of Artificial Sequence: Synthetic oligonucleotide
  Antisense strand to SEQ ID NO: 820576
uaacuccugggucacagug

SEQ ID NO: 820578 - RNA, 19 nt, Artificial Sequence
  Description of Artificial Sequence: Synthetic oligonucleotide
  Sense strand starting at position 1568 of SEQ ID NO: 587817
gcagaauuaagcgagauaa

SEQ ID NO: 820579 - RNA, 19 nt, Artificial Sequence
  Description of Artificial Sequence: Synthetic oligonucleotide
  Antisense strand to SEQ ID NO: 820578
uuaucucgcuuaauucugc

SEQ ID NO: 820580 - RNA, 19 nt, Artificial Sequence
  Description of Artificial Sequence: Synthetic oligonucleotide
  Sense strand starting at position 1954 of SEQ ID NO: 587817
ugcuauggagcuuagacaa

SEQ ID NO: 820581 - RNA, 19 nt, Artificial Sequence
  Description of Artificial Sequence: Synthetic oligonucleotide
  Antisense strand to SEQ ID NO: 820580
uugucuaagcuccauagca

SEQ ID NO: 820582 - RNA, 19 nt, Artificial Sequence
  Description of Artificial Sequence: Synthetic oligonucleotide
  Sense strand starting at position 2414 of SEQ ID NO: 587817
cuugaucuccaucacaguu

SEQ ID NO: 820583 - RNA, 19 nt, Artificial Sequence
  Description of Artificial Sequence: Synthetic oligonucleotide
  Antisense strand to SEQ ID NO: 820582
aacugugauggagaucaag

SEQ ID NO: 820584 - RNA, 19 nt, Artificial Sequence
  Description of Artificial Sequence: Synthetic oligonucleotide
  Sense strand starting at position 2424 of SEQ ID NO: 587817
aucacaguuguaugaaaug

SEQ ID NO: 820585 - RNA, 19 nt, Artificial Sequence
  Description of Artificial Sequence: Synthetic oligonucleotide
  Antisense strand to SEQ ID NO: 820584
cauuucauacaacugugau

SEQ ID NO: 820586 - RNA, 19 nt, Artificial Sequence
  Description of Artificial Sequence: Synthetic oligonucleotide
  Sense strand starting at position 2528 of SEQ ID NO: 587817
ucaagauagcuaggcuuaa

SEQ ID NO: 820587 - RNA, 19 nt, Artificial Sequence
  Description of Artificial Sequence: Synthetic oligonucleotide
  Antisense strand to SEQ ID NO: 820586
uuaagccuagcuaucuuga

SEQ ID NO: 820588 - RNA, 19 nt, Artificial Sequence
  Description of Artificial Sequence: Synthetic oligonucleotide
  Sense strand starting at position 2809 of SEQ ID NO: 587817
gcccauucuccaugaugaa

SEQ ID NO: 820589 - RNA, 19 nt, Artificial Sequence
  Description of Artificial Sequence: Synthetic oligonucleotide
  Antisense strand to SEQ ID NO: 820588
uucaucauggagaaugggc

SEQ ID NO: 820590 - RNA, 19 nt, Artificial Sequence
  Description of Artificial Sequence: Synthetic oligonucleotide
  Sense strand starting at position 2902 of SEQ ID NO: 587817
guaggaauacuccaaggcu

SEQ ID NO: 820591 - RNA, 19 nt, Artificial Sequence
  Description of Artificial Sequence: Synthetic oligonucleotide
  Antisense strand to SEQ ID NO: 820590
agccuuggaguauuccuac

SEQ ID NO: 820592 - RNA, 19 nt, Artificial Sequence
  Description of Artificial Sequence: Synthetic oligonucleotide
  Sense strand starting at position 2934 of SEQ ID NO: 587817
cagguauaugaaugcuuaa

SEQ ID NO: 820593 - RNA, 19 nt, Artificial Sequence
  Description of Artificial Sequence: Synthetic oligonucleotide
  Antisense strand to SEQ ID NO: 820592
uuaagcauucauauaccug

SEQ ID NO: 820594 - RNA, 19 nt, Artificial Sequence
  Description of Artificial Sequence: Synthetic oligonucleotide
  Sense strand starting at position 2937 of SEQ ID NO: 587817
guauaugaaugcuuaacaa

SEQ ID NO: 820595 - RNA, 19 nt, Artificial Sequence
  Description of Artificial Sequence: Synthetic oligonucleotide
  Antisense strand to SEQ ID NO: 820594
uuguuaagcauucauauac

SEQ ID NO: 820596 - RNA, 19 nt, Artificial Sequence
  Description of Artificial Sequence: Synthetic oligonucleotide
  Sense strand starting at position 3056 of SEQ ID NO: 587817
ccacuaucuuggccagaca

SEQ ID NO: 820597 - RNA, 19 nt, Artificial Sequence
  Description of Artificial Sequence: Synthetic oligonucleotide
  Antisense strand to SEQ ID NO: 820596
ugucuggccaagauagugg

SEQ ID NO: 820598 - RNA, 19 nt, Artificial Sequence
  Description of Artificial Sequence: Synthetic oligonucleotide
  Sense strand starting at position 3089 of SEQ ID NO: 587817
aaugaagugacgggauacu

SEQ ID NO: 820599 - RNA, 19 nt, Artificial Sequence
  Description of Artificial Sequence: Synthetic oligonucleotide
  Antisense strand to SEQ ID NO: 820598
aguaucccgucacuucauu

SEQ ID NO: 820600 - RNA, 19 nt, Artificial Sequence
  Description of Artificial Sequence: Synthetic oligonucleotide
  Sense strand starting at position 3275 of SEQ ID NO: 587817
cugggugcugucuagagaa

SEQ ID NO: 820601 - RNA, 19 nt, Artificial Sequence
  Description of Artificial Sequence: Synthetic oligonucleotide
  Antisense strand to SEQ ID NO: 820600
uucucuagacagcacccag

SEQ ID NO: 820602 - RNA, 19 nt, Artificial Sequence
  Description of Artificial Sequence: Synthetic oligonucleotide
  Sense strand starting at position 3277 of SEQ ID NO: 587817
gggugcugucuagagaaua

SEQ ID NO: 820603 - RNA, 19 nt, Artificial Sequence
  Description of Artificial Sequence: Synthetic oligonucleotide
  Antisense strand to SEQ ID NO: 820602
uauucucuagacagcaccc

SEQ ID NO: 820604 - RNA, 19 nt, Artificial Sequence
  Description of Artificial Sequence: Synthetic oligonucleotide
  Sense strand starting at position 3377 of SEQ ID NO: 587817
cagauagauucugcagaca

SEQ ID NO: 820605 - RNA, 19 nt, Artificial Sequence
  Description of Artificial Sequence: Synthetic oligonucleotide
  Antisense strand to SEQ ID NO: 820604
ugucugcagaaucuaucug

SEQ ID NO: 820606 - RNA, 19 nt, Artificial Sequence
  Description of Artificial Sequence: Synthetic oligonucleotide
  Sense strand starting at position 3415 of SEQ ID NO: 587817
aggauuuccugacaaguug

SEQ ID NO: 820607 - RNA, 19 nt, Artificial Sequence
  Description of Artificial Sequence: Synthetic oligonucleotide
  Antisense strand to SEQ ID NO: 820606
caacuugucaggaaauccu

SEQ ID NO: 820608 - RNA, 19 nt, Artificial Sequence
  Description of Artificial Sequence: Synthetic oligonucleotide
  Sense strand starting at position 3555 of SEQ ID NO: 587817
guuuaagaagucuauuagc

SEQ ID NO: 820609 - RNA, 19 nt, Artificial Sequence
  Description of Artificial Sequence: Synthetic oligonucleotide
  Antisense strand to SEQ ID NO: 820608
gcuaauagacuucuuaaac

SEQ ID NO: 820610 - RNA, 19 nt, Artificial Sequence
  Description of Artificial Sequence: Synthetic oligonucleotide
  Sense strand starting at position 1 of SEQ ID NO: 587818
guggaagucccacgaaaca

SEQ ID NO: 820611 - RNA, 19 nt, Artificial Sequence
  Description of Artificial Sequence: Synthetic oligonucleotide
  Antisense strand to SEQ ID NO: 820610
uguuucgugggacuuccac

SEQ ID NO: 820612 - RNA, 19 nt, Artificial Sequence
  Description of Artificial Sequence: Synthetic oligonucleotide
  Sense strand starting at position 187 of SEQ ID NO: 587818
agggaaugccuagagucuu

SEQ ID NO: 820613 - RNA, 19 nt, Artificial Sequence
  Description of Artificial Sequence: Synthetic oligonucleotide
  Antisense strand to SEQ ID NO: 820612
aagacucuaggcauucccu

SEQ ID NO: 820614 - RNA, 19 nt, Artificial Sequence
  Description of Artificial Sequence: Synthetic oligonucleotide
  Sense strand starting at position 264 of SEQ ID NO: 587818
guaaguggcguguuguuga

SEQ ID NO: 820615 - RNA, 19 nt, Artificial Sequence
  Description of Artificial Sequence: Synthetic oligonucleotide
  Antisense strand to SEQ ID NO: 820614
ucaacaacacgccacuuac

SEQ ID NO: 820616 - RNA, 19 nt, Artificial Sequence
  Description of Artificial Sequence: Synthetic oligonucleotide
  Sense strand starting at position 580 of SEQ ID NO: 587818
gacucagauggcugagaca

SEQ ID NO: 820617 - RNA, 19 nt, Artificial Sequence
  Description of Artificial Sequence: Synthetic oligonucleotide
  Antisense strand to SEQ ID NO: 820616
ugucucagccaucugaguc

SEQ ID NO: 820618 - RNA, 19 nt, Artificial Sequence
  Description of Artificial Sequence: Synthetic oligonucleotide
  Sense strand starting at position 884 of SEQ ID NO: 587818
ggaccagagcucuggaaag

SEQ ID NO: 820619 - RNA, 19 nt, Artificial Sequence
  Description of Artificial Sequence: Synthetic oligonucleotide
  Antisense strand to SEQ ID NO: 820618
cuuuccagagcucuggucc

SEQ ID NO: 820620 - RNA, 19 nt, Artificial Sequence
  Description of Artificial Sequence: Synthetic oligonucleotide
  Sense strand starting at position 890 of SEQ ID NO: 587818
gagcucuggaaaggugaau

SEQ ID NO: 820621 - RNA, 19 nt, Artificial Sequence
  Description of Artificial Sequence: Synthetic oligonucleotide
  Antisense strand to SEQ ID NO: 820620
auucaccuuuccagagcuc

SEQ ID NO: 820622 - RNA, 19 nt, Artificial Sequence
  Description of Artificial Sequence: Synthetic oligonucleotide
  Sense strand starting at position 968 of SEQ ID NO: 587818
ugugaacuucuugagacuu

SEQ ID NO: 820623 - RNA, 19 nt, Artificial Sequence
  Description of Artificial Sequence: Synthetic oligonucleotide
  Antisense strand to SEQ ID NO: 820622
aagucucaagaaguucaca

SEQ ID NO: 820624 - RNA, 19 nt, Artificial Sequence
  Description of Artificial Sequence: Synthetic oligonucleotide
  Sense strand starting at position 1028 of SEQ ID NO: 587818
cauguuuguugauugaaag

SEQ ID NO: 820625 - RNA, 19 nt, Artificial Sequence
  Description of Artificial Sequence: Synthetic oligonucleotide
  Antisense strand to SEQ ID NO: 820624
cuuucaaucaacaaacaug

SEQ ID NO: 820626 - RNA, 19 nt, Artificial Sequence
  Description of Artificial Sequence: Synthetic oligonucleotide
  Sense strand starting at position 1079 of SEQ ID NO: 587818
gaaguaagugcuggaagac

SEQ ID NO: 820627 - RNA, 19 nt, Artificial Sequence
  Description of Artificial Sequence: Synthetic oligonucleotide
  Antisense strand to SEQ ID NO: 820626
gucuuccagcacuuacuuc

SEQ ID NO: 820628 - RNA, 19 nt, Artificial Sequence
  Description of Artificial Sequence: Synthetic oligonucleotide
  Sense strand starting at position 1137 of SEQ ID NO: 587818
gacucagaucuugguagga

SEQ ID NO: 820629 - RNA, 19 nt, Artificial Sequence
  Description of Artificial Sequence: Synthetic oligonucleotide
  Antisense strand to SEQ ID NO: 820628
uccuaccaagaucugaguc

SEQ ID NO: 820630 - RNA, 19 nt, Artificial Sequence
  Description of Artificial Sequence: Synthetic oligonucleotide
  Sense strand starting at position 1141 of SEQ ID NO: 587818
cagaucuugguaggaauua

SEQ ID NO: 820631 - RNA, 19 nt, Artificial Sequence
  Description of Artificial Sequence: Synthetic oligonucleotide
  Antisense strand to SEQ ID NO: 820630
uaauuccuaccaagaucug

SEQ ID NO: 820632 - RNA, 19 nt, Artificial Sequence
  Description of Artificial Sequence: Synthetic oligonucleotide
  Sense strand starting at position 1171 of SEQ ID NO: 587818
cuccuauuugucuguguaa

SEQ ID NO: 820633 - RNA, 19 nt, Artificial Sequence
  Description of Artificial Sequence: Synthetic oligonucleotide
  Antisense strand to SEQ ID NO: 820632
uuacacagacaaauaggag

SEQ ID NO: 820634 - RNA, 19 nt, Artificial Sequence
  Description of Artificial Sequence: Synthetic oligonucleotide
  Sense strand starting at position 1172 of SEQ ID NO: 587818
uccuauuugucuguguaac

SEQ ID NO: 820635 - RNA, 19 nt, Artificial Sequence
  Description of Artificial Sequence: Synthetic oligonucleotide
  Antisense strand to SEQ ID NO: 820634
guuacacagacaaauagga

SEQ ID NO: 820636 - RNA, 19 nt, Artificial Sequence
  Description of Artificial Sequence: Synthetic oligonucleotide
  Sense strand starting at position 1173 of SEQ ID NO: 587818
ccuauuugucuguguaacc

SEQ ID NO: 820637 - RNA, 19 nt, Artificial Sequence
  Description of Artificial Sequence: Synthetic oligonucleotide
  Antisense strand to SEQ ID NO: 820636
gguuacacagacaaauagg

SEQ ID NO: 820638 - RNA, 19 nt, Artificial Sequence
  Description of Artificial Sequence: Synthetic oligonucleotide
  Sense strand starting at position 1174 of SEQ ID NO: 587818
cuauuugucuguguaaccu

SEQ ID NO: 820639 - RNA, 19 nt, Artificial Sequence
  Description of Artificial Sequence: Synthetic oligonucleotide
  Antisense strand to SEQ ID NO: 820638
agguuacacagacaaauag

SEQ ID NO: 820640 - RNA, 19 nt, Artificial Sequence
  Description of Artificial Sequence: Synthetic oligonucleotide
  Sense strand starting at position 1194 of SEQ ID NO: 587818
aggcaaguuccugaaacac

SEQ ID NO: 820641 - RNA, 19 nt, Artificial Sequence
  Description of Artificial Sequence: Synthetic oligonucleotide
  Antisense strand to SEQ ID NO: 820640
guguuucaggaacuugccu

SEQ ID NO: 820642 - RNA, 19 nt, Artificial Sequence
  Description of Artificial Sequence: Synthetic oligonucleotide
  Sense strand starting at position 1210 of SEQ ID NO: 587818
cacuguauacaaugggaau

SEQ ID NO: 820643 - RNA, 19 nt, Artificial Sequence
  Description of Artificial Sequence: Synthetic oligonucleotide
  Antisense strand to SEQ ID NO: 820642
auucccauuguauacagug

SEQ ID NO: 820644 - RNA, 19 nt, Artificial Sequence
  Description of Artificial Sequence: Synthetic oligonucleotide
  Sense strand starting at position 1279 of SEQ ID NO: 587818
ggauauauuuagcaaauac

SEQ ID NO: 820645 - RNA, 19 nt, Artificial Sequence
  Description of Artificial Sequence: Synthetic oligonucleotide
  Antisense strand to SEQ ID NO: 820644
guauuugcuaaauauaucc

SEQ ID NO: 820646 - RNA, 19 nt, Artificial Sequence
  Description of Artificial Sequence: Synthetic oligonucleotide
  Sense strand starting at position 1313 of SEQ ID NO: 587818
ucucuagaagucugaaaug

SEQ ID NO: 820647 - RNA, 19 nt, Artificial Sequence
  Description of Artificial Sequence: Synthetic oligonucleotide
  Antisense strand to SEQ ID NO: 820646
cauuucagacuucuagaga

SEQ ID NO: 820648 - RNA, 19 nt, Artificial Sequence
  Description of Artificial Sequence: Synthetic oligonucleotide
  Sense strand starting at position 1318 of SEQ ID NO: 587818
agaagucugaaaugggagu

SEQ ID NO: 820649 - RNA, 19 nt, Artificial Sequence
  Description of Artificial Sequence: Synthetic oligonucleotide
  Antisense strand to SEQ ID NO: 820648
acucccauuucagacuucu

SEQ ID NO: 820650 - RNA, 19 nt, Artificial Sequence
  Description of Artificial Sequence: Synthetic oligonucleotide
  Sense strand starting at position 1319 of SEQ ID NO: 587818
gaagucugaaaugggagua

SEQ ID NO: 820651 - RNA, 19 nt, Artificial Sequence
  Description of Artificial Sequence: Synthetic oligonucleotide
  Antisense strand to SEQ ID NO: 820650
uacucccauuucagacuuc

SEQ ID NO: 820652 - RNA, 19 nt, Artificial Sequence
  Description of Artificial Sequence: Synthetic oligonucleotide
  Sense strand starting at position 1435 of SEQ ID NO: 587818
auaauacagccauggagau

SEQ ID NO: 820653 - RNA, 19 nt, Artificial Sequence
  Description of Artificial Sequence: Synthetic oligonucleotide
  Antisense strand to SEQ ID NO: 820652
aucuccauggcuguauuau

SEQ ID NO: 820654 - RNA, 19 nt, Artificial Sequence
  Description of Artificial Sequence: Synthetic oligonucleotide
  Sense strand starting at position 1606 of SEQ ID NO: 587818
uguacacaguuauuacaau

SEQ ID NO: 820655 - RNA, 19 nt, Artificial Sequence
  Description of Artificial Sequence: Synthetic oligonucleotide
  Antisense strand to SEQ ID NO: 820654
auuguaauaacuguguaca

SEQ ID NO: 820656 - RNA, 19 nt, Artificial Sequence
  Description of Artificial Sequence: Synthetic oligonucleotide
  Sense strand starting at position 1934 of SEQ ID NO: 587818
guuggaauucaagguggaa

SEQ ID NO: 820657 - RNA, 19 nt, Artificial Sequence
  Description of Artificial Sequence: Synthetic oligonucleotide
  Antisense strand to SEQ ID NO: 820656
uuccaccuugaauuccaac

SEQ ID NO: 820658 - RNA, 19 nt, Artificial Sequence
  Description of Artificial Sequence: Synthetic oligonucleotide
  Sense strand starting at position 1959 of SEQ ID NO: 587818
aggaaaggccucuggaauc

SEQ ID NO: 820659 - RNA, 19 nt, Artificial Sequence
  Description of Artificial Sequence: Synthetic oligonucleotide
  Antisense strand to SEQ ID NO: 820658
gauuccagaggccuuuccu

SEQ ID NO: 820660 - RNA, 19 nt, Artificial Sequence
  Description of Artificial Sequence: Synthetic oligonucleotide
  Sense strand starting at position 1995 of SEQ ID NO: 587818
cacugugacccaggaguua

SEQ ID NO: 820661 - RNA, 19 nt, Artificial Sequence
  Description of Artificial Sequence: Synthetic oligonucleotide
  Antisense strand to SEQ ID NO: 820660
uaacuccugggucacagug

SEQ ID NO: 820662 - RNA, 19 nt, Artificial Sequence
  Description of Artificial Sequence: Synthetic oligonucleotide
  Sense strand starting at position 2058 of SEQ ID NO: 587818
gcagaauuaagcgagauaa

SEQ ID NO: 820663 - RNA, 19 nt, Artificial Sequence
  Description of Artificial Sequence: Synthetic oligonucleotide
  Antisense strand to SEQ ID NO: 820662
uuaucucgcuuaauucugc

SEQ ID NO: 820664 - RNA, 19 nt, Artificial Sequence
  Description of Artificial Sequence: Synthetic oligonucleotide
  Sense strand starting at position 2444 of SEQ ID NO: 587818
ugcuauggagcuuagacaa

SEQ ID NO: 820665 - RNA, 19 nt, Artificial Sequence
  Description of Artificial Sequence: Synthetic oligonucleotide
  Antisense strand to SEQ ID NO: 820664
uugucuaagcuccauagca

SEQ ID NO: 820666 - RNA, 19 nt, Artificial Sequence
  Description of Artificial Sequence: Synthetic oligonucleotide
  Sense strand starting at position 2904 of SEQ ID NO: 587818
cuugaucuccaucacaguu

SEQ ID NO: 820667 - RNA, 19 nt, Artificial Sequence
  Description of Artificial Sequence: Synthetic oligonucleotide
  Antisense strand to SEQ ID NO: 820666
aacugugauggagaucaag

SEQ ID NO: 820668 - RNA, 19 nt, Artificial Sequence
  Description of Artificial Sequence: Synthetic oligonucleotide
  Sense strand starting at position 2914 of SEQ ID NO: 587818
aucacaguuguaugaaaug

SEQ ID NO: 820669 - RNA, 19 nt, Artificial Sequence
  Description of Artificial Sequence: Synthetic oligonucleotide
  Antisense strand to SEQ ID NO: 820668
cauuucauacaacugugau

SEQ ID NO: 820670 - RNA, 19 nt, Artificial Sequence
  Description of Artificial Sequence: Synthetic oligonucleotide
  Sense strand starting at position 3299 of SEQ ID NO: 587818
gcccauucuccaugaugaa

SEQ ID NO: 820671 - RNA, 19 nt, Artificial Sequence
  Description of Artificial Sequence: Synthetic oligonucleotide
  Antisense strand to SEQ ID NO: 820670
uucaucauggagaaugggc

SEQ ID NO: 820672 - RNA, 19 nt, Artificial Sequence
  Description of Artificial Sequence: Synthetic oligonucleotide
  Sense strand starting at position 3392 of SEQ ID NO: 587818
guaggaauacuccaaggcu

SEQ ID NO: 820673 - RNA, 19 nt, Artificial Sequence
  Description of Artificial Sequence: Synthetic oligonucleotide
  Antisense strand to SEQ ID NO: 820672
agccuuggaguauuccuac

SEQ ID NO: 820674 - RNA, 19 nt, Artificial Sequence
  Description of Artificial Sequence: Synthetic oligonucleotide
  Sense strand starting at position 3424 of SEQ ID NO: 587818
cagguauaugaaugcuuaa

SEQ ID NO: 820675 - RNA, 19 nt, Artificial Sequence
  Description of Artificial Sequence: Synthetic oligonucleotide
  Antisense strand to SEQ ID NO: 820674
uuaagcauucauauaccug

SEQ ID NO: 820676 - RNA, 19 nt, Artificial Sequence
  Description of Artificial Sequence: Synthetic oligonucleotide
  Sense strand starting at position 3427 of SEQ ID NO: 587818
guauaugaaugcuuaacaa

SEQ ID NO: 820677 - RNA, 19 nt, Artificial Sequence
  Description of Artificial Sequence: Synthetic oligonucleotide
  Antisense strand to SEQ ID NO: 820676
uuguuaagcauucauauac

SEQ ID NO: 820678 - RNA, 19 nt, Artificial Sequence
  Description of Artificial Sequence: Synthetic oligonucleotide
  Sense strand starting at position 3546 of SEQ ID NO: 587818
ccacuaucuuggccagaca

SEQ ID NO: 820679 - RNA, 19 nt, Artificial Sequence
  Description of Artificial Sequence: Synthetic oligonucleotide
  Antisense strand to SEQ ID NO: 820678
ugucuggccaagauagugg

SEQ ID NO: 820680 - RNA, 19 nt, Artificial Sequence
  Description of Artificial Sequence: Synthetic oligonucleotide
  Sense strand starting at position 3579 of SEQ ID NO: 587818
aaugaagugacgggauacu

SEQ ID NO: 820681 - RNA, 19 nt, Artificial Sequence
  Description of Artificial Sequence: Synthetic oligonucleotide
  Antisense strand to SEQ ID NO: 820680
aguaucccgucacuucauu

SEQ ID NO: 820682 - RNA, 19 nt, Artificial Sequence
  Description of Artificial Sequence: Synthetic oligonucleotide
  Sense strand starting at position 3765 of SEQ ID NO: 587818
cugggugcugucuagagaa

SEQ ID NO: 820683 - RNA, 19 nt, Artificial Sequence
  Description of Artificial Sequence: Synthetic oligonucleotide
  Antisense strand to SEQ ID NO: 820682
uucucuagacagcacccag

SEQ ID NO: 820684 - RNA, 19 nt, Artificial Sequence
  Description of Artificial Sequence: Synthetic oligonucleotide
  Sense strand starting at position 3767 of SEQ ID NO: 587818
gggugcugucuagagaaua

SEQ ID NO: 820685 - RNA, 19 nt, Artificial Sequence
  Description of Artificial Sequence: Synthetic oligonucleotide
  Antisense strand to SEQ ID NO: 820684
uauucucuagacagcaccc

SEQ ID NO: 820686 - RNA, 19 nt, Artificial Sequence
  Description of Artificial Sequence: Synthetic oligonucleotide
  Sense strand starting at position 3867 of SEQ ID NO: 587818
cagauagauucugcagaca

SEQ ID NO: 820687 - RNA, 19 nt, Artificial Sequence
  Description of Artificial Sequence: Synthetic oligonucleotide
  Antisense strand to SEQ ID NO: 820686
ugucugcagaaucuaucug

SEQ ID NO: 820688 - RNA, 19 nt, Artificial Sequence
  Description of Artificial Sequence: Synthetic oligonucleotide
  Sense strand starting at position 3905 of SEQ ID NO: 587818
aggauuuccugacaaguug

SEQ ID NO: 820689 - RNA, 19 nt, Artificial Sequence
  Description of Artificial Sequence: Synthetic oligonucleotide
  Antisense strand to SEQ ID NO: 820688
caacuugucaggaaauccu

SEQ ID NO: 820690 - RNA, 19 nt, Artificial Sequence
  Description of Artificial Sequence: Synthetic oligonucleotide
  Sense strand starting at position 311 of SEQ ID NO: 587819
gaaggaaaguaugcgugua

SEQ ID NO: 820691 - RNA, 19 nt, Artificial Sequence
  Description of Artificial Sequence: Synthetic oligonucleotide
  Antisense strand to SEQ ID NO: 820690
uacacgcauacuuuccuuc

SEQ ID NO: 820692 - RNA, 19 nt, Artificial Sequence
  Description of Artificial Sequence: Synthetic oligonucleotide
  Sense strand starting at position 312 of SEQ ID NO: 587819
aaggaaaguaugcguguau

SEQ ID NO: 820693 - RNA, 19 nt, Artificial Sequence
  Description of Artificial Sequence: Synthetic oligonucleotide
  Antisense strand to SEQ ID NO: 820692
auacacgcauacuuuccuu

SEQ ID NO: 820694 - RNA, 19 nt, Artificial Sequence
  Description of Artificial Sequence: Synthetic oligonucleotide
  Sense strand starting at position 316 of SEQ ID NO: 587819
aaaguaugcguguauugau

SEQ ID NO: 820695 - RNA, 19 nt, Artificial Sequence
  Description of Artificial Sequence: Synthetic oligonucleotide
  Antisense strand to SEQ ID NO: 820694
aucaauacacgcauacuuu

SEQ ID NO: 820696 - RNA, 19 nt, Artificial Sequence
  Description of Artificial Sequence: Synthetic oligonucleotide
  Sense strand starting at position 361 of SEQ ID NO: 587819
ggucuuagcaguuacagau

SEQ ID NO: 820697 - RNA, 19 nt, Artificial Sequence
  Description of Artificial Sequence: Synthetic oligonucleotide
  Antisense strand to SEQ ID NO: 820696
aucuguaacugcuaagacc

SEQ ID NO: 820698 - RNA, 19 nt, Artificial Sequence
  Description of Artificial Sequence: Synthetic oligonucleotide
  Sense strand starting at position 365 of SEQ ID NO: 587819
uuagcaguuacagaugagu

SEQ ID NO: 820699 - RNA, 19 nt, Artificial Sequence
  Description of Artificial Sequence: Synthetic oligonucleotide
  Antisense strand to SEQ ID NO: 820698
acucaucuguaacugcuaa

SEQ ID NO: 820700 - RNA, 19 nt, Artificial Sequence
  Description of Artificial Sequence: Synthetic oligonucleotide
  Sense strand starting at position 367 of SEQ ID NO: 587819
agcaguuacagaugaguuu

SEQ ID NO: 820701 - RNA, 19 nt, Artificial Sequence
  Description of Artificial Sequence: Synthetic oligonucleotide
  Antisense strand to SEQ ID NO: 820700
aaacucaucuguaacugcu

SEQ ID NO: 820702 - RNA, 19 nt, Artificial Sequence
  Description of Artificial Sequence: Synthetic oligonucleotide
  Sense strand starting at position 376 of SEQ ID NO: 587819
agaugaguuuccucuagag

SEQ ID NO: 820703 - RNA, 19 nt, Artificial Sequence
  Description of Artificial Sequence: Synthetic oligonucleotide
  Antisense strand to SEQ ID NO: 820702
cucuagaggaaacucaucu

SEQ ID NO: 820704 - RNA, 19 nt, Artificial Sequence
  Description of Artificial Sequence: Synthetic oligonucleotide
  Sense strand starting at position 378 of SEQ ID NO: 587819
augaguuuccucuagaggu

SEQ ID NO: 820705 - RNA, 19 nt, Artificial Sequence
  Description of Artificial Sequence: Synthetic oligonucleotide
  Antisense strand to SEQ ID NO: 820704
accucuagaggaaacucau

SEQ ID NO: 820706 - RNA, 19 nt, Artificial Sequence
  Description of Artificial Sequence: Synthetic oligonucleotide
  Sense strand starting at position 380 of SEQ ID NO: 587819
gaguuuccucuagagguca

SEQ ID NO: 820707 - RNA, 19 nt, Artificial Sequence
  Description of Artificial Sequence: Synthetic oligonucleotide
  Antisense strand to SEQ ID NO: 820706
ugaccucuagaggaaacuc

SEQ ID NO: 820708 - RNA, 19 nt, Artificial Sequence
  Description of Artificial Sequence: Synthetic oligonucleotide
  Sense strand starting at position 464 of SEQ ID NO: 587819
ccagcaagauccuuacaug

SEQ ID NO: 820709 - RNA, 19 nt, Artificial Sequence
  Description of Artificial Sequence: Synthetic oligonucleotide
  Antisense strand to SEQ ID NO: 820708
cauguaaggaucuugcugg

SEQ ID NO: 820710 - RNA, 19 nt, Artificial Sequence
  Description of Artificial Sequence: Synthetic oligonucleotide
  Sense strand starting at position 473 of SEQ ID NO: 587819
uccuuacauggugagguaa

SEQ ID NO: 820711 - RNA, 19 nt, Artificial Sequence
  Description of Artificial Sequence: Synthetic oligonucleotide
  Antisense strand to SEQ ID NO: 820710
uuaccucaccauguaagga

SEQ ID NO: 820712 - RNA, 19 nt, Artificial Sequence
  Description of Artificial Sequence: Synthetic oligonucleotide
  Sense strand starting at position 835 of SEQ ID NO: 587819
ugcucaguuucucuugaua

SEQ ID NO: 820713 - RNA, 19 nt, Artificial Sequence
  Description of Artificial Sequence: Synthetic oligonucleotide
  Antisense strand to SEQ ID NO: 820712
uaucaagagaaacugagca

SEQ ID NO: 820714 - RNA, 19 nt, Artificial Sequence
  Description of Artificial Sequence: Synthetic oligonucleotide
  Sense strand starting at position 1441 of SEQ ID NO: 587819
agugucaucuacuugaucu

SEQ ID NO: 820715 - RNA, 19 nt, Artificial Sequence
  Description of Artificial Sequence: Synthetic oligonucleotide
  Antisense strand to SEQ ID NO: 820714
agaucaaguagaugacacu

SEQ ID NO: 820716 - RNA, 19 nt, Artificial Sequence
  Description of Artificial Sequence: Synthetic oligonucleotide
  Sense strand starting at position 1592 of SEQ ID NO: 587819
cccagaucuggcugccaca

SEQ ID NO: 820717 - RNA, 19 nt, Artificial Sequence
  Description of Artificial Sequence: Synthetic oligonucleotide
  Antisense strand to SEQ ID NO: 820716
uguggcagccagaucuggg

SEQ ID NO: 820718 - RNA, 19 nt, Artificial Sequence
  Description of Artificial Sequence: Synthetic oligonucleotide
  Sense strand starting at position 1656 of SEQ ID NO: 587819
gaagauuccugauugcuga

SEQ ID NO: 820719 - RNA, 19 nt, Artificial Sequence
  Description of Artificial Sequence: Synthetic oligonucleotide
  Antisense strand to SEQ ID NO: 820718
ucagcaaucaggaaucuuc

SEQ ID NO: 820720 - RNA, 19 nt, Artificial Sequence
  Description of Artificial Sequence: Synthetic oligonucleotide
  Sense strand starting at position 1703 of SEQ ID NO: 587819
acaucccuccuuuggaaga

SEQ ID NO: 820721 - RNA, 19 nt, Artificial Sequence
  Description of Artificial Sequence: Synthetic oligonucleotide
  Antisense strand to SEQ ID NO: 820720
ucuuccaaaggagggaugu

SEQ ID NO: 820722 - RNA, 19 nt, Artificial Sequence
  Description of Artificial Sequence: Synthetic oligonucleotide
  Sense strand starting at position 2000 of SEQ ID NO: 587819
acaugauuccugugaccag

SEQ ID NO: 820723 - RNA, 19 nt, Artificial Sequence
  Description of Artificial Sequence: Synthetic oligonucleotide
  Antisense strand to SEQ ID NO: 820722
cuggucacaggaaucaugu

SEQ ID NO: 820724 - RNA, 19 nt, Artificial Sequence
  Description of Artificial Sequence: Synthetic oligonucleotide
  Sense strand starting at position 2059 of SEQ ID NO: 587819
gugcaaagcccagagauaa

SEQ ID NO: 820725 - RNA, 19 nt, Artificial Sequence
  Description of Artificial Sequence: Synthetic oligonucleotide
  Antisense strand to SEQ ID NO: 820724
uuaucucugggcuuugcac

SEQ ID NO: 820726 - RNA, 19 nt, Artificial Sequence
  Description of Artificial Sequence: Synthetic oligonucleotide
  Sense strand starting at position 2173 of SEQ ID NO: 587819
gugagcauucuugaugccu

SEQ ID NO: 820727 - RNA, 19 nt, Artificial Sequence
  Description of Artificial Sequence: Synthetic oligonucleotide
  Antisense strand to SEQ ID NO: 820726
aggcaucaagaaugcucac

SEQ ID NO: 820728 - RNA, 19 nt, Artificial Sequence
  Description of Artificial Sequence: Synthetic oligonucleotide
  Sense strand starting at position 2276 of SEQ ID NO: 587819
cucacacugcuuuggaauu

SEQ ID NO: 820729 - RNA, 19 nt, Artificial Sequence
  Description of Artificial Sequence: Synthetic oligonucleotide
  Antisense strand to SEQ ID NO: 820728
aauuccaaagcagugugag

SEQ ID NO: 820730 - RNA, 19 nt, Artificial Sequence
  Description of Artificial Sequence: Synthetic oligonucleotide
  Sense strand starting at position 2377 of SEQ ID NO: 587819
auuaauucuggcuaccuga

SEQ ID NO: 820731 - RNA, 19 nt, Artificial Sequence
  Description of Artificial Sequence: Synthetic oligonucleotide
  Antisense strand to SEQ ID NO: 820730
ucagguagccagaauuaau

SEQ ID NO: 820732 - RNA, 19 nt, Artificial Sequence
  Description of Artificial Sequence: Synthetic oligonucleotide
  Sense strand starting at position 2467 of SEQ ID NO: 587819
ggaggaggcuuugcuccua

SEQ ID NO: 820733 - RNA, 19 nt, Artificial Sequence
  Description of Artificial Sequence: Synthetic oligonucleotide
  Antisense strand to SEQ ID NO: 820732
uaggagcaaagccuccucc

SEQ ID NO: 820734 - RNA, 19 nt, Artificial Sequence
  Description of Artificial Sequence: Synthetic oligonucleotide
  Sense strand starting at position 2585 of SEQ ID NO: 587819
gcaggacugaucuagugua

SEQ ID NO: 820735 - RNA, 19 nt, Artificial Sequence
  Description of Artificial Sequence: Synthetic oligonucleotide
  Antisense strand to SEQ ID NO: 820734
uacacuagaucaguccugc

SEQ ID NO: 820736 - RNA, 19 nt, Artificial Sequence
  Description of Artificial Sequence: Synthetic oligonucleotide
  Sense strand starting at position 2617 of SEQ ID NO: 587819
ccauuaugcuucuuggagu

SEQ ID NO: 820737 - RNA, 19 nt, Artificial Sequence
  Description of Artificial Sequence: Synthetic oligonucleotide
  Antisense strand to SEQ ID NO: 820736
acuccaagaagcauaaugg

SEQ ID NO: 820738 - RNA, 19 nt, Artificial Sequence
  Description of Artificial Sequence: Synthetic oligonucleotide
  Sense strand starting at position 2623 of SEQ ID NO: 587819
ugcuucuuggaguggauuu

SEQ ID NO: 820739 - RNA, 19 nt, Artificial Sequence
  Description of Artificial Sequence: Synthetic oligonucleotide
  Antisense strand to SEQ ID NO: 820738
aaauccacuccaagaagca

SEQ ID NO: 820740 - RNA, 19 nt, Artificial Sequence
  Description of Artificial Sequence: Synthetic oligonucleotide
  Sense strand starting at position 2662 of SEQ ID NO: 587819
uugugaguccuauagguuu

SEQ ID NO: 820741 - RNA, 19 nt, Artificial Sequence
  Description of Artificial Sequence: Synthetic oligonucleotide
  Antisense strand to SEQ ID NO: 820740
aaaccuauaggacucacaa

SEQ ID NO: 820742 - RNA, 19 nt, Artificial Sequence
  Description of Artificial Sequence: Synthetic oligonucleotide
  Sense strand starting at position 2664 of SEQ ID NO: 587819
gugaguccuauagguuuga

SEQ ID NO: 820743 - RNA, 19 nt, Artificial Sequence
  Description of Artificial Sequence: Synthetic oligonucleotide
  Antisense strand to SEQ ID NO: 820742
ucaaaccuauaggacucac

SEQ ID NO: 820744 - RNA, 19 nt, Artificial Sequence
  Description of Artificial Sequence: Synthetic oligonucleotide
  Sense strand starting at position 2665 of SEQ ID NO: 587819
ugaguccuauagguuugau

SEQ ID NO: 820745 - RNA, 19 nt, Artificial Sequence
  Description of Artificial Sequence: Synthetic oligonucleotide
  Antisense strand to SEQ ID NO: 820744
aucaaaccuauaggacuca

SEQ ID NO: 820746 - RNA, 19 nt, Artificial Sequence
  Description of Artificial Sequence: Synthetic oligonucleotide
  Sense strand starting at position 2668 of SEQ ID NO: 587819
guccuauagguuugauagc

SEQ ID NO: 820747 - RNA, 19 nt, Artificial Sequence
  Description of Artificial Sequence: Synthetic oligonucleotide
  Antisense strand to SEQ ID NO: 820746
gcuaucaaaccuauaggac

SEQ ID NO: 820748 - RNA, 19 nt, Artificial Sequence
  Description of Artificial Sequence: Synthetic oligonucleotide
  Sense strand starting at position 2674 of SEQ ID NO: 587819
uagguuugauagcuccuga

SEQ ID NO: 820749 - RNA, 19 nt, Artificial Sequence
  Description of Artificial Sequence: Synthetic oligonucleotide
  Antisense strand to SEQ ID NO: 820748
ucaggagcuaucaaaccua

SEQ ID NO: 820750 - RNA, 19 nt, Artificial Sequence
  Description of Artificial Sequence: Synthetic oligonucleotide
  Sense strand starting at position 2723 of SEQ ID NO: 587819
ugaucaugccuccauguca

SEQ ID NO: 820751 - RNA, 19 nt, Artificial Sequence
  Description of Artificial Sequence: Synthetic oligonucleotide
  Antisense strand to SEQ ID NO: 820750
ugacauggaggcaugauca

SEQ ID NO: 820752 - RNA, 19 nt, Artificial Sequence
  Description of Artificial Sequence: Synthetic oligonucleotide
  Sense strand starting at position 2791 of SEQ ID NO: 587819
cggguuggcccuggauaga

SEQ ID NO: 820753 - RNA, 19 nt, Artificial Sequence
  Description of Artificial Sequence: Synthetic oligonucleotide
  Antisense strand to SEQ ID NO: 820752
ucuauccagggccaacccg

SEQ ID NO: 820754 - RNA, 19 nt, Artificial Sequence
  Description of Artificial Sequence: Synthetic oligonucleotide
  Sense strand starting at position 2794 of SEQ ID NO: 587819
guuggcccuggauagaauu

SEQ ID NO: 820755 - RNA, 19 nt, Artificial Sequence
  Description of Artificial Sequence: Synthetic oligonucleotide
  Antisense strand to SEQ ID NO: 820754
aauucuauccagggccaac

SEQ ID NO: 820756 - RNA, 19 nt, Artificial Sequence
  Description of Artificial Sequence: Synthetic oligonucleotide
  Sense strand starting at position 2911 of SEQ ID NO: 587819
guggguggauacuuugagu

SEQ ID NO: 820757 - RNA, 19 nt, Artificial Sequence
  Description of Artificial Sequence: Synthetic oligonucleotide
  Antisense strand to SEQ ID NO: 820756
acucaaaguauccacccac

SEQ ID NO: 820758 - RNA, 19 nt, Artificial Sequence
  Description of Artificial Sequence: Synthetic oligonucleotide
  Sense strand starting at position 2916 of SEQ ID NO: 587819
uggauacuuugaguccagu

SEQ ID NO: 820759 - RNA, 19 nt, Artificial Sequence
  Description of Artificial Sequence: Synthetic oligonucleotide
  Antisense strand to SEQ ID NO: 820758
acuggacucaaaguaucca

SEQ ID NO: 820760 - RNA, 19 nt, Artificial Sequence
  Description of Artificial Sequence: Synthetic oligonucleotide
  Sense strand starting at position 3044 of SEQ ID NO: 587819
gaaucaucugagcgcagga

SEQ ID NO: 820761 - RNA, 19 nt, Artificial Sequence
  Description of Artificial Sequence: Synthetic oligonucleotide
  Antisense strand to SEQ ID NO: 820760
uccugcgcucagaugauuc

SEQ ID NO: 820762 - RNA, 19 nt, Artificial Sequence
  Description of Artificial Sequence: Synthetic oligonucleotide
  Sense strand starting at position 3222 of SEQ ID NO: 587819
ccaagugccucaucaguua

SEQ ID NO: 820763 - RNA, 19 nt, Artificial Sequence
  Description of Artificial Sequence: Synthetic oligonucleotide
  Antisense strand to SEQ ID NO: 820762
uaacugaugaggcacuugg

SEQ ID NO: 820764 - RNA, 19 nt, Artificial Sequence
  Description of Artificial Sequence: Synthetic oligonucleotide
  Sense strand starting at position 3225 of SEQ ID NO: 587819
agugccucaucaguuaaau

SEQ ID NO: 820765 - RNA, 19 nt, Artificial Sequence
  Description of Artificial Sequence: Synthetic oligonucleotide
  Antisense strand to SEQ ID NO: 820764
auuuaacugaugaggcacu

SEQ ID NO: 820766 - RNA, 19 nt, Artificial Sequence
  Description of Artificial Sequence: Synthetic oligonucleotide
  Sense strand starting at position 3273 of SEQ ID NO: 587819
agagaaguccaccguccuu

SEQ ID NO: 820767 - RNA, 19 nt, Artificial Sequence
  Description of Artificial Sequence: Synthetic oligonucleotide
  Antisense strand to SEQ ID NO: 820766
aaggacgguggacuucucu

SEQ ID NO: 820768 - RNA, 19 nt, Artificial Sequence
  Description of Artificial Sequence: Synthetic oligonucleotide
  Sense strand starting at position 3661 of SEQ ID NO: 587819
cacccugaggucuggucaa

SEQ ID NO: 820769 - RNA, 19 nt, Artificial Sequence
  Description of Artificial Sequence: Synthetic oligonucleotide
  Antisense strand to SEQ ID NO: 820768
uugaccagaccucagggug

SEQ ID NO: 820770 - RNA, 19 nt, Artificial Sequence
  Description of Artificial Sequence: Synthetic oligonucleotide
  Sense strand starting at position 7 of SEQ ID NO: 587820
acuugagaucucugcauga

SEQ ID NO: 820771 - RNA, 19 nt, Artificial Sequence
  Description of Artificial Sequence: Synthetic oligonucleotide
  Antisense strand to SEQ ID NO: 820770
ucaugcagagaucucaagu

SEQ ID NO: 820772 - RNA, 19 nt, Artificial Sequence
  Description of Artificial Sequence: Synthetic oligonucleotide
  Sense strand starting at position 9 of SEQ ID NO: 587820
uugagaucucugcaugauu

SEQ ID NO: 820773 - RNA, 19 nt, Artificial Sequence
  Description of Artificial Sequence: Synthetic oligonucleotide
  Antisense strand to SEQ ID NO: 820772
aaucaugcagagaucucaa

SEQ ID NO: 820774 - RNA, 19 nt, Artificial Sequence
  Description of Artificial Sequence: Synthetic oligonucleotide
  Sense strand starting at position 244 of SEQ ID NO: 587820
cccuuucugccuugggaga

SEQ ID NO: 820775 - RNA, 19 nt, Artificial Sequence
  Description of Artificial Sequence: Synthetic oligonucleotide
  Antisense strand to SEQ ID NO: 820774
ucucccaaggcagaaaggg

SEQ ID NO: 820776 - RNA, 19 nt, Artificial Sequence
  Description of Artificial Sequence: Synthetic oligonucleotide
  Sense strand starting at position 245 of SEQ ID NO: 587820
ccuuucugccuugggagaa

SEQ ID NO: 820777 - RNA, 19 nt, Artificial Sequence
  Description of Artificial Sequence: Synthetic oligonucleotide
  Antisense strand to SEQ ID NO: 820776
uucucccaaggcagaaagg

SEQ ID NO: 820778 - RNA, 19 nt, Artificial Sequence
  Description of Artificial Sequence: Synthetic oligonucleotide
  Sense strand starting at position 292 of SEQ ID NO: 587820
caggcuggacugugugaau

SEQ ID NO: 820779 - RNA, 19 nt, Artificial Sequence
  Description of Artificial Sequence: Synthetic oligonucleotide
  Antisense strand to SEQ ID NO: 820778
auucacacaguccagccug

SEQ ID NO: 820780 - RNA, 19 nt, Artificial Sequence
  Description of Artificial Sequence: Synthetic oligonucleotide
  Sense strand starting at position 304 of SEQ ID NO: 587820
ugugaauuccaagguguag

SEQ ID NO: 820781 - RNA, 19 nt, Artificial Sequence
  Description of Artificial Sequence: Synthetic oligonucleotide
  Antisense strand to SEQ ID NO: 820780
cuacaccuuggaauucaca

SEQ ID NO: 820782 - RNA, 19 nt, Artificial Sequence
  Description of Artificial Sequence: Synthetic oligonucleotide
  Sense strand starting at position 334 of SEQ ID NO: 587820
guggaagggucuuggacaa

SEQ ID NO: 820783 - RNA, 19 nt, Artificial Sequence
  Description of Artificial Sequence: Synthetic oligonucleotide
  Antisense strand to SEQ ID NO: 820782
uuguccaagacccuuccac

SEQ ID NO: 820784 - RNA, 19 nt, Artificial Sequence
  Description of Artificial Sequence: Synthetic oligonucleotide
  Sense strand starting at position 353 of SEQ ID NO: 587820
aaaugugggugucaaauga

SEQ ID NO: 820785 - RNA, 19 nt, Artificial Sequence
  Description of Artificial Sequence: Synthetic oligonucleotide
  Antisense strand to SEQ ID NO: 820784
ucauuugacacccacauuu

SEQ ID NO: 820786 - RNA, 19 nt, Artificial Sequence
  Description of Artificial Sequence: Synthetic oligonucleotide
  Sense strand starting at position 574 of SEQ ID NO: 587820
ucccucuuaucaucagagu

SEQ ID NO: 820787 - RNA, 19 nt, Artificial Sequence
  Description of Artificial Sequence: Synthetic oligonucleotide
  Antisense strand to SEQ ID NO: 820786
acucugaugauaagaggga

SEQ ID NO: 820788 - RNA, 19 nt, Artificial Sequence
  Description of Artificial Sequence: Synthetic oligonucleotide
  Sense strand starting at position 575 of SEQ ID NO: 587820
cccucuuaucaucagaguu

SEQ ID NO: 820789 - RNA, 19 nt, Artificial Sequence
  Description of Artificial Sequence: Synthetic oligonucleotide
  Antisense strand to SEQ ID NO: 820788
aacucugaugauaagaggg

SEQ ID NO: 820790 - RNA, 19 nt, Artificial Sequence
  Description of Artificial Sequence: Synthetic oligonucleotide
  Sense strand starting at position 1379 of SEQ ID NO: 587820
cuuggaaacacugguguga

SEQ ID NO: 820791 - RNA, 19 nt, Artificial Sequence
  Description of Artificial Sequence: Synthetic oligonucleotide
  Antisense strand to SEQ ID NO: 820790
ucacaccaguguuuccaag

SEQ ID NO: 820792 - RNA, 19 nt, Artificial Sequence
  Description of Artificial Sequence: Synthetic oligonucleotide
  Sense strand starting at position 1392 of SEQ ID NO: 587820
gugugauuccgaggagcag

SEQ ID NO: 820793 - RNA, 19 nt, Artificial Sequence
  Description of Artificial Sequence: Synthetic oligonucleotide
  Antisense strand to SEQ ID NO: 820792
cugcuccucggaaucacac

SEQ ID NO: 820794 - RNA, 19 nt, Artificial Sequence
  Description of Artificial Sequence: Synthetic oligonucleotide
  Sense strand starting at position 1393 of SEQ ID NO: 587820
ugugauuccgaggagcagu

SEQ ID NO: 820795 - RNA, 19 nt, Artificial Sequence
  Description of Artificial Sequence: Synthetic oligonucleotide
  Antisense strand to SEQ ID NO: 820794
acugcuccucggaaucaca

SEQ ID NO: 820796 - RNA, 19 nt, Artificial Sequence
  Description of Artificial Sequence: Synthetic oligonucleotide
  Sense strand starting at position 1727 of SEQ ID NO: 587820
gcagaugccugccugugaa

SEQ ID NO: 820797 - RNA, 19 nt, Artificial Sequence
  Description of Artificial Sequence: Synthetic oligonucleotide
  Antisense strand to SEQ ID NO: 820796
uucacaggcaggcaucugc

SEQ ID NO: 820798 - RNA, 19 nt, Artificial Sequence
  Description of Artificial Sequence: Synthetic oligonucleotide
  Sense strand starting at position 2254 of SEQ ID NO: 587820
acaggaagcuucugggacu

SEQ ID NO: 820799 - RNA, 19 nt, Artificial Sequence
  Description of Artificial Sequence: Synthetic oligonucleotide
  Antisense strand to SEQ ID NO: 820798
agucccagaagcuuccugu

SEQ ID NO: 820800 - RNA, 19 nt, Artificial Sequence
  Description of Artificial Sequence: Synthetic oligonucleotide
  Sense strand starting at position 2321 of SEQ ID NO: 587820
ccagauaaauguguacuca

SEQ ID NO: 820801 - RNA, 19 nt, Artificial Sequence
  Description of Artificial Sequence: Synthetic oligonucleotide
  Antisense strand to SEQ ID NO: 820800
ugaguacacauuuaucugg

SEQ ID NO: 820802 - RNA, 19 nt, Artificial Sequence
  Description of Artificial Sequence: Synthetic oligonucleotide
  Sense strand starting at position 2325 of SEQ ID NO: 587820
auaaauguguacucaucuu

SEQ ID NO: 820803 - RNA, 19 nt, Artificial Sequence
  Description of Artificial Sequence: Synthetic oligonucleotide
  Antisense strand to SEQ ID NO: 820802
aagaugaguacacauuuau

SEQ ID NO: 820804 - RNA, 19 nt, Artificial Sequence
  Description of Artificial Sequence: Synthetic oligonucleotide
  Sense strand starting at position 2347 of SEQ ID NO: 587820
agucucagccuagauauca

SEQ ID NO: 820805 - RNA, 19 nt, Artificial Sequence
  Description of Artificial Sequence: Synthetic oligonucleotide
  Antisense strand to SEQ ID NO: 820804
ugauaucuaggcugagacu

SEQ ID NO: 820806 - RNA, 19 nt, Artificial Sequence
  Description of Artificial Sequence: Synthetic oligonucleotide
  Sense strand starting at position 2375 of SEQ ID NO: 587820
gcaagccuuccaugaauac

SEQ ID NO: 820807 - RNA, 19 nt, Artificial Sequence
  Description of Artificial Sequence: Synthetic oligonucleotide
  Antisense strand to SEQ ID NO: 820806
guauucauggaaggcuugc

SEQ ID NO: 820808 - RNA, 19 nt, Artificial Sequence
  Description of Artificial Sequence: Synthetic oligonucleotide
  Sense strand starting at position 2477 of SEQ ID NO: 587820
guucuucucuguccuugau

SEQ ID NO: 820809 - RNA, 19 nt, Artificial Sequence
  Description of Artificial Sequence: Synthetic oligonucleotide
  Antisense strand to SEQ ID NO: 820808
aucaaggacagagaagaac

SEQ ID NO: 820810 - RNA, 19 nt, Artificial Sequence
  Description of Artificial Sequence: Synthetic oligonucleotide
  Sense strand starting at position 2480 of SEQ ID NO: 587820
cuucucuguccuugauugu

SEQ ID NO: 820811 - RNA, 19 nt, Artificial Sequence
  Description of Artificial Sequence: Synthetic oligonucleotide
  Antisense strand to SEQ ID NO: 820810
acaaucaaggacagagaag

SEQ ID NO: 820812 - RNA, 19 nt, Artificial Sequence
  Description of Artificial Sequence: Synthetic oligonucleotide
  Sense strand starting at position 2481 of SEQ ID NO: 587820
uucucuguccuugauugua

SEQ ID NO: 820813 - RNA, 19 nt, Artificial Sequence
  Description of Artificial Sequence: Synthetic oligonucleotide
  Antisense strand to SEQ ID NO: 820812
uacaaucaaggacagagaa

SEQ ID NO: 820814 - RNA, 19 nt, Artificial Sequence
  Description of Artificial Sequence: Synthetic oligonucleotide
  Sense strand starting at position 2670 of SEQ ID NO: 587820
gagagaauagcuugagguu

SEQ ID NO: 820815 - RNA, 19 nt, Artificial Sequence
  Description of Artificial Sequence: Synthetic oligonucleotide
  Antisense strand to SEQ ID NO: 820814
aaccucaagcuauucucuc

SEQ ID NO: 820816 - RNA, 19 nt, Artificial Sequence
  Description of Artificial Sequence: Synthetic oligonucleotide
  Sense strand starting at position 3132 of SEQ ID NO: 587820
uugggaguugcuuaauaaa

SEQ ID NO: 820817 - RNA, 19 nt, Artificial Sequence
  Description of Artificial Sequence: Synthetic oligonucleotide
  Antisense strand to SEQ ID NO: 820816
uuuauuaagcaacucccaa

SEQ ID NO: 820818 - RNA, 19 nt, Artificial Sequence
  Description of Artificial Sequence: Synthetic oligonucleotide
  Sense strand starting at position 3143 of SEQ ID NO: 587820
uuaauaaaugcucgaugga

SEQ ID NO: 820819 - RNA, 19 nt, Artificial Sequence
  Description of Artificial Sequence: Synthetic oligonucleotide
  Antisense strand to SEQ ID NO: 820818
uccaucgagcauuuauuaa

SEQ ID NO: 820820 - RNA, 19 nt, Artificial Sequence
  Description of Artificial Sequence: Synthetic oligonucleotide
  Sense strand starting at position 3144 of SEQ ID NO: 587820
uaauaaaugcucgauggau

SEQ ID NO: 820821 - RNA, 19 nt, Artificial Sequence
  Description of Artificial Sequence: Synthetic oligonucleotide
  Antisense strand to SEQ ID NO: 820820
auccaucgagcauuuauua

SEQ ID NO: 820822 - RNA, 19 nt, Artificial Sequence
  Description of Artificial Sequence: Synthetic oligonucleotide
  Sense strand starting at position 3146 of SEQ ID NO: 587820
auaaaugcucgauggauga

SEQ ID NO: 820823 - RNA, 19 nt, Artificial Sequence
  Description of Artificial Sequence: Synthetic oligonucleotide
  Antisense strand to SEQ ID NO: 820822
ucauccaucgagcauuuau

SEQ ID NO: 820824 - RNA, 19 nt, Artificial Sequence
  Description of Artificial Sequence: Synthetic oligonucleotide
  Sense strand starting at position 3165 of SEQ ID NO: 587820
aucaauguuugggaaggga

SEQ ID NO: 820825 - RNA, 19 nt, Artificial Sequence
  Description of Artificial Sequence: Synthetic oligonucleotide
  Antisense strand to SEQ ID NO: 820824
ucccuucccaaacauugau

SEQ ID NO: 820826 - RNA, 19 nt, Artificial Sequence
  Description of Artificial Sequence: Synthetic oligonucleotide
  Sense strand starting at position 3205 of SEQ ID NO: 587820
cucacaugcugucugaaga

SEQ ID NO: 820827 - RNA, 19 nt, Artificial Sequence
  Description of Artificial Sequence: Synthetic oligonucleotide
  Antisense strand to SEQ ID NO: 820826
ucuucagacagcaugugag

SEQ ID NO: 820828 - RNA, 19 nt, Artificial Sequence
  Description of Artificial Sequence: Synthetic oligonucleotide
  Sense strand starting at position 3359 of SEQ ID NO: 587820
cgcgaauuacuccaagguc

SEQ ID NO: 820829 - RNA, 19 nt, Artificial Sequence
  Description of Artificial Sequence: Synthetic oligonucleotide
  Antisense strand to SEQ ID NO: 820828
gaccuuggaguaauucgcg

SEQ ID NO: 820830 - RNA, 19 nt, Artificial Sequence
  Description of Artificial Sequence: Synthetic oligonucleotide
  Sense strand starting at position 3538 of SEQ ID NO: 587820
gccucaggcauuuguggau

SEQ ID NO: 820831 - RNA, 19 nt, Artificial Sequence
  Description of Artificial Sequence: Synthetic oligonucleotide
  Antisense strand to SEQ ID NO: 820830
auccacaaaugccugaggc

SEQ ID NO: 820832 - RNA, 19 nt, Artificial Sequence
  Description of Artificial Sequence: Synthetic oligonucleotide
  Sense strand starting at position 3608 of SEQ ID NO: 587820
ccuggauucugccugcaca

SEQ ID NO: 820833 - RNA, 19 nt, Artificial Sequence
  Description of Artificial Sequence: Synthetic oligonucleotide
  Antisense strand to SEQ ID NO: 820832
ugugcaggcagaauccagg

SEQ ID NO: 820834 - RNA, 19 nt, Artificial Sequence
  Description of Artificial Sequence: Synthetic oligonucleotide
  Sense strand starting at position 3609 of SEQ ID NO: 587820
cuggauucugccugcacaa

SEQ ID NO: 820835 - RNA, 19 nt, Artificial Sequence
  Description of Artificial Sequence: Synthetic oligonucleotide
  Antisense strand to SEQ ID NO: 820834
uugugcaggcagaauccag

SEQ ID NO: 820836 - RNA, 19 nt, Artificial Sequence
  Description of Artificial Sequence: Synthetic oligonucleotide
  Sense strand starting at position 3629 of SEQ ID NO: 587820
gcugcuugacacuggacaa

SEQ ID NO: 820837 - RNA, 19 nt, Artificial Sequence
  Description of Artificial Sequence: Synthetic oligonucleotide
  Antisense strand to SEQ ID NO: 820836
uuguccagugucaagcagc

SEQ ID NO: 820838 - RNA, 19 nt, Artificial Sequence
  Description of Artificial Sequence: Synthetic oligonucleotide
  Sense strand starting at position 3668 of SEQ ID NO: 587820
ucacuuucucauggacaag

SEQ ID NO: 820839 - RNA, 19 nt, Artificial Sequence
  Description of Artificial Sequence: Synthetic oligonucleotide
  Antisense strand to SEQ ID NO: 820838
cuuguccaugagaaaguga

SEQ ID NO: 820840 - RNA, 19 nt, Artificial Sequence
  Description of Artificial Sequence: Synthetic oligonucleotide
  Sense strand starting at position 3709 of SEQ ID NO: 587820
gacucauucuggcccugau

SEQ ID NO: 820841 - RNA, 19 nt, Artificial Sequence
  Description of Artificial Sequence: Synthetic oligonucleotide
  Antisense strand to SEQ ID NO: 820840
aucagggccagaaugaguc

SEQ ID NO: 820842 - RNA, 19 nt, Artificial Sequence
  Description of Artificial Sequence: Synthetic oligonucleotide
  Sense strand starting at position 3712 of SEQ ID NO: 587820
ucauucuggcccugauauc

SEQ ID NO: 820843 - RNA, 19 nt, Artificial Sequence
  Description of Artificial Sequence: Synthetic oligonucleotide
  Antisense strand to SEQ ID NO: 820842
gauaucagggccagaauga

SEQ ID NO: 820844 - RNA, 19 nt, Artificial Sequence
  Description of Artificial Sequence: Synthetic oligonucleotide
  Sense strand starting at position 3722 of SEQ ID NO: 587820
ccugauauccucugugcgu

SEQ ID NO: 820845 - RNA, 19 nt, Artificial Sequence
  Description of Artificial Sequence: Synthetic oligonucleotide
  Antisense strand to SEQ ID NO: 820844
acgcacagaggauaucagg

SEQ ID NO: 820846 - RNA, 19 nt, Artificial Sequence
  Description of Artificial Sequence: Synthetic oligonucleotide
  Sense strand starting at position 3944 of SEQ ID NO: 587820
guuucuuuaaauggucagu

SEQ ID NO: 820847 - RNA, 19 nt, Artificial Sequence
  Description of Artificial Sequence: Synthetic oligonucleotide
  Antisense strand to SEQ ID NO: 820846
acugaccauuuaaagaaac

SEQ ID NO: 820848 - RNA, 19 nt, Artificial Sequence
  Description of Artificial Sequence: Synthetic oligonucleotide
  Sense strand starting at position 3973 of SEQ ID NO: 587820
ggaccaguuuagccaaaga

SEQ ID NO: 820849 - RNA, 19 nt, Artificial Sequence
  Description of Artificial Sequence: Synthetic oligonucleotide
  Antisense strand to SEQ ID NO: 820848
ucuuuggcuaaacuggucc

SEQ ID NO: 820850 - RNA, 19 nt, Artificial Sequence
  Description of Artificial Sequence: Synthetic oligonucleotide
  Sense strand starting at position 8 of SEQ ID NO: 587821
auugcauaucuauaugugu

SEQ ID NO: 820851 - RNA, 19 nt, Artificial Sequence
  Description of Artificial Sequence: Synthetic oligonucleotide
  Antisense strand to SEQ ID NO: 820850
acacauauagauaugcaau

SEQ ID NO: 820852 - RNA, 19 nt, Artificial Sequence
  Description of Artificial Sequence: Synthetic oligonucleotide
  Sense strand starting at position 11 of SEQ ID NO: 587821
gcauaucuauauguguaau

SEQ ID NO: 820853 - RNA, 19 nt, Artificial Sequence
  Description of Artificial Sequence: Synthetic oligonucleotide
  Antisense strand to SEQ ID NO: 820852
auuacacauauagauaugc

SEQ ID NO: 820854 - RNA, 19 nt, Artificial Sequence
  Description of Artificial Sequence: Synthetic oligonucleotide
  Sense strand starting at position 23 of SEQ ID NO: 587821
guguaauuauaucugucuu

SEQ ID NO: 820855 - RNA, 19 nt, Artificial Sequence
  Description of Artificial Sequence: Synthetic oligonucleotide
  Antisense strand to SEQ ID NO: 820854
aagacagauauaauuacac

SEQ ID NO: 820856 - RNA, 19 nt, Artificial Sequence
  Description of Artificial Sequence: Synthetic oligonucleotide
  Sense strand starting at position 83 of SEQ ID NO: 587821
ucuaaucaggccugucuua

SEQ ID NO: 820857 - RNA, 19 nt, Artificial Sequence
  Description of Artificial Sequence: Synthetic oligonucleotide
  Antisense strand to SEQ ID NO: 820856
uaagacaggccugauuaga

SEQ ID NO: 820858 - RNA, 19 nt, Artificial Sequence
  Description of Artificial Sequence: Synthetic oligonucleotide
  Sense strand starting at position 92 of SEQ ID NO: 587821
gccugucuuaaaggaggau

SEQ ID NO: 820859 - RNA, 19 nt, Artificial Sequence
  Description of Artificial Sequence: Synthetic oligonucleotide
  Antisense strand to SEQ ID NO: 820858
auccuccuuuaagacaggc

SEQ ID NO: 820860 - RNA, 19 nt, Artificial Sequence
  Description of Artificial Sequence: Synthetic oligonucleotide
  Sense strand starting at position 107 of SEQ ID NO: 587821
ggauccuguccuggagaga

SEQ ID NO: 820861 - RNA, 19 nt, Artificial Sequence
  Description of Artificial Sequence: Synthetic oligonucleotide
  Antisense strand to SEQ ID NO: 820860
ucucuccaggacaggaucc

SEQ ID NO: 820862 - RNA, 19 nt, Artificial Sequence
  Description of Artificial Sequence: Synthetic oligonucleotide
  Sense strand starting at position 126 of SEQ ID NO: 587821
gugugccaagaguaauaua

SEQ ID NO: 820863 - RNA, 19 nt, Artificial Sequence
  Description of Artificial Sequence: Synthetic oligonucleotide
  Antisense strand to SEQ ID NO: 820862
uauauuacucuuggcacac

SEQ ID NO: 820864 - RNA, 19 nt, Artificial Sequence
  Description of Artificial Sequence: Synthetic oligonucleotide
  Sense strand starting at position 167 of SEQ ID NO: 587821
gauguuguaucauugcuga

SEQ ID NO: 820865 - RNA, 19 nt, Artificial Sequence
  Description of Artificial Sequence: Synthetic oligonucleotide
  Antisense strand to SEQ ID NO: 820864
ucagcaaugauacaacauc

SEQ ID NO: 820866 - RNA, 19 nt, Artificial Sequence
  Description of Artificial Sequence: Synthetic oligonucleotide
  Sense strand starting at position 172 of SEQ ID NO: 587821
uguaucauugcugauguau

SEQ ID NO: 820867 - RNA, 19 nt, Artificial Sequence
  Description of Artificial Sequence: Synthetic oligonucleotide
  Antisense strand to SEQ ID NO: 820866
auacaucagcaaugauaca

SEQ ID NO: 820868 - RNA, 19 nt, Artificial Sequence
  Description of Artificial Sequence: Synthetic oligonucleotide
  Sense strand starting at position 191 of SEQ ID NO: 587821
ggugauacagcccacucau

SEQ ID NO: 820869 - RNA, 19 nt, Artificial Sequence
  Description of Artificial Sequence: Synthetic oligonucleotide
  Antisense strand to SEQ ID NO: 820868
augagugggcuguaucacc

SEQ ID NO: 820870 - RNA, 19 nt, Artificial Sequence
  Description of Artificial Sequence: Synthetic oligonucleotide
  Sense strand starting at position 200 of SEQ ID NO: 587821
gcccacucauugcugauau

SEQ ID NO: 820871 - RNA, 19 nt, Artificial Sequence
  Description of Artificial Sequence: Synthetic oligonucleotide
  Antisense strand to SEQ ID NO: 820870
auaucagcaaugagugggc

SEQ ID NO: 820872 - RNA, 19 nt, Artificial Sequence
  Description of Artificial Sequence: Synthetic oligonucleotide
  Sense strand starting at position 208 of SEQ ID NO: 587821
auugcugauauauggugau

SEQ ID NO: 820873 - RNA, 19 nt, Artificial Sequence
  Description of Artificial Sequence: Synthetic oligonucleotide
  Antisense strand to SEQ ID NO: 820872
aucaccauauaucagcaau

SEQ ID NO: 820874 - RNA, 19 nt, Artificial Sequence
  Description of Artificial Sequence: Synthetic oligonucleotide
  Sense strand starting at position 531 of SEQ ID NO: 587821
ugcugaaauuagcuacaaa

SEQ ID NO: 820875 - RNA, 19 nt, Artificial Sequence
  Description of Artificial Sequence: Synthetic oligonucleotide
  Antisense strand to SEQ ID NO: 820874
uuuguagcuaauuucagca

SEQ ID NO: 820876 - RNA, 19 nt, Artificial Sequence
  Description of Artificial Sequence: Synthetic oligonucleotide
  Sense strand starting at position 663 of SEQ ID NO: 587821
cuagucugguugucaagga

SEQ ID NO: 820877 - RNA, 19 nt, Artificial Sequence
  Description of Artificial Sequence: Synthetic oligonucleotide
  Antisense strand to SEQ ID NO: 820876
uccuugacaaccagacuag

SEQ ID NO: 820878 - RNA, 19 nt, Artificial Sequence
  Description of Artificial Sequence: Synthetic oligonucleotide
  Sense strand starting at position 667 of SEQ ID NO: 587821
ucugguugucaaggaaaca

SEQ ID NO: 820879 - RNA, 19 nt, Artificial Sequence
  Description of Artificial Sequence: Synthetic oligonucleotide
  Antisense strand to SEQ ID NO: 820878
uguuuccuugacaaccaga

SEQ ID NO: 820880 - RNA, 19 nt, Artificial Sequence
  Description of Artificial Sequence: Synthetic oligonucleotide
  Sense strand starting at position 927 of SEQ ID NO: 587821
gacccugaauggucagauu

SEQ ID NO: 820881 - RNA, 19 nt, Artificial Sequence
  Description of Artificial Sequence: Synthetic oligonucleotide
  Antisense strand to SEQ ID NO: 820880
aaucugaccauucaggguc

SEQ ID NO: 820882 - RNA, 19 nt, Artificial Sequence
  Description of Artificial Sequence: Synthetic oligonucleotide
  Sense strand starting at position 2647 of SEQ ID NO: 587821
gcugcuaaucucugaaaga

SEQ ID NO: 820883 - RNA, 19 nt, Artificial Sequence
  Description of Artificial Sequence: Synthetic oligonucleotide
  Antisense strand to SEQ ID NO: 820882
ucuuucagagauuagcagc

SEQ ID NO: 820884 - RNA, 19 nt, Artificial Sequence
  Description of Artificial Sequence: Synthetic oligonucleotide
  Sense strand starting at position 3130 of SEQ ID NO: 587821
ggaugaucuugacugcuag

SEQ ID NO: 820885 - RNA, 19 nt, Artificial Sequence
  Description of Artificial Sequence: Synthetic oligonucleotide
  Antisense strand to SEQ ID NO: 820884
cuagcagucaagaucaucc

SEQ ID NO: 820886 - RNA, 19 nt, Artificial Sequence
  Description of Artificial Sequence: Synthetic oligonucleotide
  Sense strand starting at position 3131 of SEQ ID NO: 587821
gaugaucuugacugcuagu

SEQ ID NO: 820887 - RNA, 19 nt, Artificial Sequence
  Description of Artificial Sequence: Synthetic oligonucleotide
  Antisense strand to SEQ ID NO: 820886
acuagcagucaagaucauc

SEQ ID NO: 820888 - RNA, 19 nt, Artificial Sequence
  Description of Artificial Sequence: Synthetic oligonucleotide
  Sense strand starting at position 3148 of SEQ ID NO: 587821
guguuaaguagucagcuca

SEQ ID NO: 820889 - RNA, 19 nt, Artificial Sequence
  Description of Artificial Sequence: Synthetic oligonucleotide
  Antisense strand to SEQ ID NO: 820888
ugagcugacuacuuaacac

SEQ ID NO: 820890 - RNA, 19 nt, Artificial Sequence
  Description of Artificial Sequence: Synthetic oligonucleotide
  Sense strand starting at position 3161 of SEQ ID NO: 587821
agcucagucugguuugauu

SEQ ID NO: 820891 - RNA, 19 nt, Artificial Sequence
  Description of Artificial Sequence: Synthetic oligonucleotide
  Antisense strand to SEQ ID NO: 820890
aaucaaaccagacugagcu

SEQ ID NO: 820892 - RNA, 19 nt, Artificial Sequence
  Description of Artificial Sequence: Synthetic oligonucleotide
  Sense strand starting at position 3186 of SEQ ID NO: 587821
cucaguuaccucuggacaa

SEQ ID NO: 820893 - RNA, 19 nt, Artificial Sequence
  Description of Artificial Sequence: Synthetic oligonucleotide
  Antisense strand to SEQ ID NO: 820892
uuguccagagguaacugag

SEQ ID NO: 820894 - RNA, 19 nt, Artificial Sequence
  Description of Artificial Sequence: Synthetic oligonucleotide
  Sense strand starting at position 3257 of SEQ ID NO: 587821
uccaucuugugcucugaaa

SEQ ID NO: 820895 - RNA, 19 nt, Artificial Sequence
  Description of Artificial Sequence: Synthetic oligonucleotide
  Antisense strand to SEQ ID NO: 820894
uuucagagcacaagaugga

SEQ ID NO: 820896 - RNA, 19 nt, Artificial Sequence
  Description of Artificial Sequence: Synthetic oligonucleotide
  Sense strand starting at position 3307 of SEQ ID NO: 587821
aaauaugauuaggaagaga

SEQ ID NO: 820897 - RNA, 19 nt, Artificial Sequence
  Description of Artificial Sequence: Synthetic oligonucleotide
  Antisense strand to SEQ ID NO: 820896
ucucuuccuaaucauauuu

SEQ ID NO: 820898 - RNA, 19 nt, Artificial Sequence
  Description of Artificial Sequence: Synthetic oligonucleotide
  Sense strand starting at position 3321 of SEQ ID NO: 587821
agagaaauuuacugccaaa

SEQ ID NO: 820899 - RNA, 19 nt, Artificial Sequence
  Description of Artificial Sequence: Synthetic oligonucleotide
  Antisense strand to SEQ ID NO: 820898
uuuggcaguaaauuucucu

SEQ ID NO: 820900 - RNA, 19 nt, Artificial Sequence
  Description of Artificial Sequence: Synthetic oligonucleotide
  Sense strand starting at position 3381 of SEQ ID NO: 587821
ugcuucucaucugugaaug

SEQ ID NO: 820901 - RNA, 19 nt, Artificial Sequence
  Description of Artificial Sequence: Synthetic oligonucleotide
  Antisense strand to SEQ ID NO: 820900
cauucacagaugagaagca

SEQ ID NO: 820902 - RNA, 19 nt, Artificial Sequence
  Description of Artificial Sequence: Synthetic oligonucleotide
  Sense strand starting at position 3386 of SEQ ID NO: 587821
cucaucugugaaugcauau

SEQ ID NO: 820903 - RNA, 19 nt, Artificial Sequence
  Description of Artificial Sequence: Synthetic oligonucleotide
  Antisense strand to SEQ ID NO: 820902
auaugcauucacagaugag

SEQ ID NO: 820904 - RNA, 19 nt, Artificial Sequence
  Description of Artificial Sequence: Synthetic oligonucleotide
  Sense strand starting at position 3418 of SEQ ID NO: 587821
cccucaagguguuugugau

SEQ ID NO: 820905 - RNA, 19 nt, Artificial Sequence
  Description of Artificial Sequence: Synthetic oligonucleotide
  Antisense strand to SEQ ID NO: 820904
aucacaaacaccuugaggg

SEQ ID NO: 820906 - RNA, 19 nt, Artificial Sequence
  Description of Artificial Sequence: Synthetic oligonucleotide
  Sense strand starting at position 3419 of SEQ ID NO: 587821
ccucaagguguuugugauc

SEQ ID NO: 820907 - RNA, 19 nt, Artificial Sequence
  Description of Artificial Sequence: Synthetic oligonucleotide
  Antisense strand to SEQ ID NO: 820906
gaucacaaacaccuugagg

SEQ ID NO: 820908 - RNA, 19 nt, Artificial Sequence
  Description of Artificial Sequence: Synthetic oligonucleotide
  Sense strand starting at position 3425 of SEQ ID NO: 587821
gguguuugugaucaacgug

SEQ ID NO: 820909 - RNA, 19 nt, Artificial Sequence
  Description of Artificial Sequence: Synthetic oligonucleotide
  Antisense strand to SEQ ID NO: 820908
cacguugaucacaaacacc

SEQ ID NO: 820910 - RNA, 19 nt, Artificial Sequence
  Description of Artificial Sequence: Synthetic oligonucleotide
  Sense strand starting at position 3520 of SEQ ID NO: 587821
agagcuagccaagagguua

SEQ ID NO: 820911 - RNA, 19 nt, Artificial Sequence
  Description of Artificial Sequence: Synthetic oligonucleotide
  Antisense strand to SEQ ID NO: 820910
uaaccucuuggcuagcucu

SEQ ID NO: 820912 - RNA, 19 nt, Artificial Sequence
  Description of Artificial Sequence: Synthetic oligonucleotide
  Sense strand starting at position 3535 of SEQ ID NO: 587821
guuaacaaugacugacagu

SEQ ID NO: 820913 - RNA, 19 nt, Artificial Sequence
  Description of Artificial Sequence: Synthetic oligonucleotide
  Antisense strand to SEQ ID NO: 820912
acugucagucauuguuaac

SEQ ID NO: 820914 - RNA, 19 nt, Artificial Sequence
  Description of Artificial Sequence: Synthetic oligonucleotide
  Sense strand starting at position 3655 of SEQ ID NO: 587821
guucuuccuccacauguuu

SEQ ID NO: 820915 - RNA, 19 nt, Artificial Sequence
  Description of Artificial Sequence: Synthetic oligonucleotide
  Antisense strand to SEQ ID NO: 820914
aaacauguggaggaagaac

SEQ ID NO: 820916 - RNA, 19 nt, Artificial Sequence
  Description of Artificial Sequence: Synthetic oligonucleotide
  Sense strand starting at position 3663 of SEQ ID NO: 587821
uccacauguuuggcauuga

SEQ ID NO: 820917 - RNA, 19 nt, Artificial Sequence
  Description of Artificial Sequence: Synthetic oligonucleotide
  Antisense strand to SEQ ID NO: 820916
ucaaugccaaacaugugga

SEQ ID NO: 820918 - RNA, 19 nt, Artificial Sequence
  Description of Artificial Sequence: Synthetic oligonucleotide
  Sense strand starting at position 3667 of SEQ ID NO: 587821
cauguuuggcauugaagag

SEQ ID NO: 820919 - RNA, 19 nt, Artificial Sequence
  Description of Artificial Sequence: Synthetic oligonucleotide
  Antisense strand to SEQ ID NO: 820918
cucuucaaugccaaacaug

SEQ ID NO: 820920 - RNA, 19 nt, Artificial Sequence
  Description of Artificial Sequence: Synthetic oligonucleotide
  Sense strand starting at position 3693 of SEQ ID NO: 587821
ccaucuucugugugccaaa

SEQ ID NO: 820921 - RNA, 19 nt, Artificial Sequence
  Description of Artificial Sequence: Synthetic oligonucleotide
  Antisense strand to SEQ ID NO: 820920
uuuggcacacagaagaugg

SEQ ID NO: 820922 - RNA, 19 nt, Artificial Sequence
  Description of Artificial Sequence: Synthetic oligonucleotide
  Sense strand starting at position 3738 of SEQ ID NO: 587821
acuugagaucucugcauga

SEQ ID NO: 820923 - RNA, 19 nt, Artificial Sequence
  Description of Artificial Sequence: Synthetic oligonucleotide
  Antisense strand to SEQ ID NO: 820922
ucaugcagagaucucaagu

SEQ ID NO: 820924 - RNA, 19 nt, Artificial Sequence
  Description of Artificial Sequence: Synthetic oligonucleotide
  Sense strand starting at position 3740 of SEQ ID NO: 587821
uugagaucucugcaugauu

SEQ ID NO: 820925 - RNA, 19 nt, Artificial Sequence
  Description of Artificial Sequence: Synthetic oligonucleotide
  Antisense strand to SEQ ID NO: 820924
aaucaugcagagaucucaa

SEQ ID NO: 820926 - RNA, 19 nt, Artificial Sequence
  Description of Artificial Sequence: Synthetic oligonucleotide
  Sense strand starting at position 3975 of SEQ ID NO: 587821
cccuuucugccuugggaga

SEQ ID NO: 820927 - RNA, 19 nt, Artificial Sequence
  Description of Artificial Sequence: Synthetic oligonucleotide
  Antisense strand to SEQ ID NO: 820926
ucucccaaggcagaaaggg

SEQ ID NO: 820928 - RNA, 19 nt, Artificial Sequence
  Description of Artificial Sequence: Synthetic oligonucleotide
  Sense strand starting at position 3976 of SEQ ID NO: 587821
ccuuucugccuugggagaa

SEQ ID NO: 820929 - RNA, 19 nt, Artificial Sequence
  Description of Artificial Sequence: Synthetic oligonucleotide
  Antisense strand to SEQ ID NO: 820928
uucucccaaggcagaaagg

SEQ ID NO: 820930 - RNA, 19 nt, Artificial Sequence
  Description of Artificial Sequence: Synthetic oligonucleotide
  Sense strand starting at position 18 of SEQ ID NO: 587822
ggcuguauuccuugugguc

SEQ ID NO: 820931 - RNA, 19 nt, Artificial Sequence
  Description of Artificial Sequence: Synthetic oligonucleotide
  Antisense strand to SEQ ID NO: 820930
gaccacaaggaauacagcc

SEQ ID NO: 820932 - RNA, 19 nt, Artificial Sequence
  Description of Artificial Sequence: Synthetic oligonucleotide
  Sense strand starting at position 471 of SEQ ID NO: 587822
gaguggugcgcgugugaca

SEQ ID NO: 820933 - RNA, 19 nt, Artificial Sequence
  Description of Artificial Sequence: Synthetic oligonucleotide
  Antisense strand to SEQ ID NO: 820932
ugucacacgcgcaccacuc

SEQ ID NO: 820934 - RNA, 19 nt, Artificial Sequence
  Description of Artificial Sequence: Synthetic oligonucleotide
  Sense strand starting at position 556 of SEQ ID NO: 587822
auuucuggacgcugugaga

SEQ ID NO: 820935 - RNA, 19 nt, Artificial Sequence
  Description of Artificial Sequence: Synthetic oligonucleotide
  Antisense strand to SEQ ID NO: 820934
ucucacagcguccagaaau

SEQ ID NO: 820936 - RNA, 19 nt, Artificial Sequence
  Description of Artificial Sequence: Synthetic oligonucleotide
  Sense strand starting at position 694 of SEQ ID NO: 587822
gggacaucuuguuuguaca

SEQ ID NO: 820937 - RNA, 19 nt, Artificial Sequence
  Description of Artificial Sequence: Synthetic oligonucleotide
  Antisense strand to SEQ ID NO: 820936
uguacaaacaagauguccc

SEQ ID NO: 820938 - RNA, 19 nt, Artificial Sequence
  Description of Artificial Sequence: Synthetic oligonucleotide
  Sense strand starting at position 695 of SEQ ID NO: 587822
ggacaucuuguuuguacag

SEQ ID NO: 820939 - RNA, 19 nt, Artificial Sequence
  Description of Artificial Sequence: Synthetic oligonucleotide
  Antisense strand to SEQ ID NO: 820938
cuguacaaacaagaugucc

SEQ ID NO: 820940 - RNA, 19 nt, Artificial Sequence
  Description of Artificial Sequence: Synthetic oligonucleotide
  Sense strand starting at position 1565 of SEQ ID NO: 587822
ccgcuucagcggugaggau

SEQ ID NO: 820941 - RNA, 19 nt, Artificial Sequence
  Description of Artificial Sequence: Synthetic oligonucleotide
  Antisense strand to SEQ ID NO: 820940
auccucaccgcugaagcgg

SEQ ID NO: 820942 - RNA, 19 nt, Artificial Sequence
  Description of Artificial Sequence: Synthetic oligonucleotide
  Sense strand starting at position 2258 of SEQ ID NO: 587822
gcgggagaaguucgggaaa

SEQ ID NO: 820943 - RNA, 19 nt, Artificial Sequence
  Description of Artificial Sequence: Synthetic oligonucleotide
  Antisense strand to SEQ ID NO: 820942
uuucccgaacuucucccgc

SEQ ID NO: 820944 - RNA, 19 nt, Artificial Sequence
  Description of Artificial Sequence: Synthetic oligonucleotide
  Sense strand starting at position 2425 of SEQ ID NO: 587822
cuaagaggcuuguuccaaa

SEQ ID NO: 820945 - RNA, 19 nt, Artificial Sequence
  Description of Artificial Sequence: Synthetic oligonucleotide
  Antisense strand to SEQ ID NO: 820944
uuuggaacaagccucuuag

SEQ ID NO: 820946 - RNA, 19 nt, Artificial Sequence
  Description of Artificial Sequence: Synthetic oligonucleotide
  Sense strand starting at position 2481 of SEQ ID NO: 587822
gggacaagugcuuguguga

SEQ ID NO: 820947 - RNA, 19 nt, Artificial Sequence
  Description of Artificial Sequence: Synthetic oligonucleotide
  Antisense strand to SEQ ID NO: 820946
ucacacaagcacuuguccc

SEQ ID NO: 820948 - RNA, 19 nt, Artificial Sequence
  Description of Artificial Sequence: Synthetic oligonucleotide
  Sense strand starting at position 2490 of SEQ ID NO: 587822
gcuugugugaguccuccga

SEQ ID NO: 820949 - RNA, 19 nt, Artificial Sequence
  Description of Artificial Sequence: Synthetic oligonucleotide
  Antisense strand to SEQ ID NO: 820948
ucggaggacucacacaagc

SEQ ID NO: 820950 - RNA, 19 nt, Artificial Sequence
  Description of Artificial Sequence: Synthetic oligonucleotide
  Sense strand starting at position 2492 of SEQ ID NO: 587822
uugugugaguccuccgaca

SEQ ID NO: 820951 - RNA, 19 nt, Artificial Sequence
  Description of Artificial Sequence: Synthetic oligonucleotide
  Antisense strand to SEQ ID NO: 820950
ugucggaggacucacacaa

SEQ ID NO: 820952 - RNA, 19 nt, Artificial Sequence
  Description of Artificial Sequence: Synthetic oligonucleotide
  Sense strand starting at position 2494 of SEQ ID NO: 587822
gugugaguccuccgacaau

SEQ ID NO: 820953 - RNA, 19 nt, Artificial Sequence
  Description of Artificial Sequence: Synthetic oligonucleotide
  Antisense strand to SEQ ID NO: 820952
auugucggaggacucacac

SEQ ID NO: 820954 - RNA, 19 nt, Artificial Sequence
  Description of Artificial Sequence: Synthetic oligonucleotide
  Sense strand starting at position 2582 of SEQ ID NO: 587822
ggugucguccugcuuccaa

SEQ ID NO: 820955 - RNA, 19 nt, Artificial Sequence
  Description of Artificial Sequence: Synthetic oligonucleotide
  Antisense strand to SEQ ID NO: 820954
uuggaagcaggacgacacc

SEQ ID NO: 820956 - RNA, 19 nt, Artificial Sequence
  Description of Artificial Sequence: Synthetic oligonucleotide
  Sense strand starting at position 2719 of SEQ ID NO: 587822
agaacuaccuguuuguaga

SEQ ID NO: 820957 - RNA, 19 nt, Artificial Sequence
  Description of Artificial Sequence: Synthetic oligonucleotide
  Antisense strand to SEQ ID NO: 820956
ucuacaaacagguaguucu

SEQ ID NO: 820958 - RNA, 19 nt, Artificial Sequence
  Description of Artificial Sequence: Synthetic oligonucleotide
  Sense strand starting at position 2720 of SEQ ID NO: 587822
gaacuaccuguuuguagaa

SEQ ID NO: 820959 - RNA, 19 nt, Artificial Sequence
  Description of Artificial Sequence: Synthetic oligonucleotide
  Antisense strand to SEQ ID NO: 820958
uucuacaaacagguaguuc

SEQ ID NO: 820960 - RNA, 19 nt, Artificial Sequence
  Description of Artificial Sequence: Synthetic oligonucleotide
  Sense strand starting at position 2732 of SEQ ID NO: 587822
uguagaacuuguuuccaga

SEQ ID NO: 820961 - RNA, 19 nt, Artificial Sequence
  Description of Artificial Sequence: Synthetic oligonucleotide
  Antisense strand to SEQ ID NO: 820960
ucuggaaacaaguucuaca

SEQ ID NO: 820962 - RNA, 19 nt, Artificial Sequence
  Description of Artificial Sequence: Synthetic oligonucleotide
  Sense strand starting at position 2785 of SEQ ID NO: 587822
gcuuguuuccuggacugac

SEQ ID NO: 820963 - RNA, 19 nt, Artificial Sequence
  Description of Artificial Sequence: Synthetic oligonucleotide
  Antisense strand to SEQ ID NO: 820962
gucaguccaggaaacaagc

SEQ ID NO: 820964 - RNA, 19 nt, Artificial Sequence
  Description of Artificial Sequence: Synthetic oligonucleotide
  Sense strand starting at position 2984 of SEQ ID NO: 587822
gcucggauuucgugugggu

SEQ ID NO: 820965 - RNA, 19 nt, Artificial Sequence
  Description of Artificial Sequence: Synthetic oligonucleotide
  Antisense strand to SEQ ID NO: 820964
acccacacgaaauccgagc

SEQ ID NO: 820966 - RNA, 19 nt, Artificial Sequence
  Description of Artificial Sequence: Synthetic oligonucleotide
  Sense strand starting at position 3066 of SEQ ID NO: 587822
ggcuccuggucaucaaguu

SEQ ID NO: 820967 - RNA, 19 nt, Artificial Sequence
  Description of Artificial Sequence: Synthetic oligonucleotide
  Antisense strand to SEQ ID NO: 820966
aacuugaugaccaggagcc

SEQ ID NO: 820968 - RNA, 19 nt, Artificial Sequence
  Description of Artificial Sequence: Synthetic oligonucleotide
  Sense strand starting at position 3074 of SEQ ID NO: 587822
gucaucaaguuccucugaa

SEQ ID NO: 820969 - RNA, 19 nt, Artificial Sequence
  Description of Artificial Sequence: Synthetic oligonucleotide
  Antisense strand to SEQ ID NO: 820968
uucagaggaacuugaugac

SEQ ID NO: 820970 - RNA, 19 nt, Artificial Sequence
  Description of Artificial Sequence: Synthetic oligonucleotide
  Sense strand starting at position 3075 of SEQ ID NO: 587822
ucaucaaguuccucugaag

SEQ ID NO: 820971 - RNA, 19 nt, Artificial Sequence
  Description of Artificial Sequence: Synthetic oligonucleotide
  Antisense strand to SEQ ID NO: 820970
cuucagaggaacuugauga

SEQ ID NO: 820972 - RNA, 19 nt, Artificial Sequence
  Description of Artificial Sequence: Synthetic oligonucleotide
  Sense strand starting at position 3146 of SEQ ID NO: 587822
agcugagcccugggaucau

SEQ ID NO: 820973 - RNA, 19 nt, Artificial Sequence
  Description of Artificial Sequence: Synthetic oligonucleotide
  Antisense strand to SEQ ID NO: 820972
augaucccagggcucagcu

SEQ ID NO: 820974 - RNA, 19 nt, Artificial Sequence
  Description of Artificial Sequence: Synthetic oligonucleotide
  Sense strand starting at position 3158 of SEQ ID NO: 587822
ggaucauucuggugccugu

SEQ ID NO: 820975 - RNA, 19 nt, Artificial Sequence
  Description of Artificial Sequence: Synthetic oligonucleotide
  Antisense strand to SEQ ID NO: 820974
acaggcaccagaaugaucc

SEQ ID NO: 820976 - RNA, 19 nt, Artificial Sequence
  Description of Artificial Sequence: Synthetic oligonucleotide
  Sense strand starting at position 3283 of SEQ ID NO: 587822
gcaacagccuucucauaag

SEQ ID NO: 820977 - RNA, 19 nt, Artificial Sequence
  Description of Artificial Sequence: Synthetic oligonucleotide
  Antisense strand to SEQ ID NO: 820976
cuuaugagaaggcuguugc

SEQ ID NO: 820978 - RNA, 19 nt, Artificial Sequence
  Description of Artificial Sequence: Synthetic oligonucleotide
  Sense strand starting at position 3805 of SEQ ID NO: 587822
gcagcucugugguucaagu

SEQ ID NO: 820979 - RNA, 19 nt, Artificial Sequence
  Description of Artificial Sequence: Synthetic oligonucleotide
  Antisense strand to SEQ ID NO: 820978
acuugaaccacagagcugc

SEQ ID NO: 820980 - RNA, 19 nt, Artificial Sequence
  Description of Artificial Sequence: Synthetic oligonucleotide
  Sense strand starting at position 3874 of SEQ ID NO: 587822
ggccgaugcuuccaaaguu

SEQ ID NO: 820981 - RNA, 19 nt, Artificial Sequence
  Description of Artificial Sequence: Synthetic oligonucleotide
  Antisense strand to SEQ ID NO: 820980
aacuuuggaagcaucggcc

SEQ ID NO: 820982 - RNA, 19 nt, Artificial Sequence
  Description of Artificial Sequence: Synthetic oligonucleotide
  Sense strand starting at position 3914 of SEQ ID NO: 587822
gggacuuccaugugaguca

SEQ ID NO: 820983 - RNA, 19 nt, Artificial Sequence
  Description of Artificial Sequence: Synthetic oligonucleotide
  Antisense strand to SEQ ID NO: 820982
ugacucacauggaaguccc

SEQ ID NO: 820984 - RNA, 19 nt, Artificial Sequence
  Description of Artificial Sequence: Synthetic oligonucleotide
  Sense strand starting at position 3915 of SEQ ID NO: 587822
ggacuuccaugugagucau

SEQ ID NO: 820985 - RNA, 19 nt, Artificial Sequence
  Description of Artificial Sequence: Synthetic oligonucleotide
  Antisense strand to SEQ ID NO: 820984
augacucacauggaagucc

SEQ ID NO: 820986 - RNA, 19 nt, Artificial Sequence
  Description of Artificial Sequence: Synthetic oligonucleotide
  Sense strand starting at position 80 of SEQ ID NO: 587823
aaagcuuggcauuguuagu

SEQ ID NO: 820987 - RNA, 19 nt, Artificial Sequence
  Description of Artificial Sequence: Synthetic oligonucleotide
  Antisense strand to SEQ ID NO: 820986
acuaacaaugccaagcuuu

SEQ ID NO: 820988 - RNA, 19 nt, Artificial Sequence
  Description of Artificial Sequence: Synthetic oligonucleotide
  Sense strand starting at position 85 of SEQ ID NO: 587823
uuggcauuguuaguauaca

SEQ ID NO: 820989 - RNA, 19 nt, Artificial Sequence
  Description of Artificial Sequence: Synthetic oligonucleotide
  Antisense strand to SEQ ID NO: 820988
uguauacuaacaaugccaa

SEQ ID NO: 820990 - RNA, 19 nt, Artificial Sequence
  Description of Artificial Sequence: Synthetic oligonucleotide
  Sense strand starting at position 86 of SEQ ID NO: 587823
uggcauuguuaguauacaa

SEQ ID NO: 820991 - RNA, 19 nt, Artificial Sequence
  Description of Artificial Sequence: Synthetic oligonucleotide
  Antisense strand to SEQ ID NO: 820990
uuguauacuaacaaugcca

SEQ ID NO: 820992 - RNA, 19 nt, Artificial Sequence
  Description of Artificial Sequence: Synthetic oligonucleotide
  Sense strand starting at position 120 of SEQ ID NO: 587823
caguaagaaguaugcucaa

SEQ ID NO: 820993 - RNA, 19 nt, Artificial Sequence
  Description of Artificial Sequence: Synthetic oligonucleotide
  Antisense strand to SEQ ID NO: 820992
uugagcauacuucuuacug

SEQ ID NO: 820994 - RNA, 19 nt, Artificial Sequence
  Description of Artificial Sequence: Synthetic oligonucleotide
  Sense strand starting at position 163 of SEQ ID NO: 587823
uucuucuauuaguuagagu

SEQ ID NO: 820995 - RNA, 19 nt, Artificial Sequence
  Description of Artificial Sequence: Synthetic oligonucleotide
  Antisense strand to SEQ ID NO: 820994
acucuaacuaauagaagaa

SEQ ID NO: 820996 - RNA, 19 nt, Artificial Sequence
  Description of Artificial Sequence: Synthetic oligonucleotide
  Sense strand starting at position 177 of SEQ ID NO: 587823
agaguaaacugcuuaaguc

SEQ ID NO: 820997 - RNA, 19 nt, Artificial Sequence
  Description of Artificial Sequence: Synthetic oligonucleotide
  Antisense strand to SEQ ID NO: 820996
gacuuaagcaguuuacucu

SEQ ID NO: 820998 - RNA, 19 nt, Artificial Sequence
  Description of Artificial Sequence: Synthetic oligonucleotide
  Sense strand starting at position 178 of SEQ ID NO: 587823
gaguaaacugcuuaagucu

SEQ ID NO: 820999 - RNA, 19 nt, Artificial Sequence
  Description of Artificial Sequence: Synthetic oligonucleotide
  Antisense strand to SEQ ID NO: 820998
agacuuaagcaguuuacuc

SEQ ID NO: 821000 - RNA, 19 nt, Artificial Sequence
  Description of Artificial Sequence: Synthetic oligonucleotide
  Sense strand starting at position 209 of SEQ ID NO: 587823
auaucugaaggcuguuaau

SEQ ID NO: 821001 - RNA, 19 nt, Artificial Sequence
  Description of Artificial Sequence: Synthetic oligonucleotide
  Antisense strand to SEQ ID NO: 821000
auuaacagccuucagauau

SEQ ID NO: 821002 - RNA, 19 nt, Artificial Sequence
  Description of Artificial Sequence: Synthetic oligonucleotide
  Sense strand starting at position 212 of SEQ ID NO: 587823
ucugaaggcuguuaauaaa

SEQ ID NO: 821003 - RNA, 19 nt, Artificial Sequence
  Description of Artificial Sequence: Synthetic oligonucleotide
  Antisense strand to SEQ ID NO: 821002
uuuauuaacagccuucaga

SEQ ID NO: 821004 - RNA, 19 nt, Artificial Sequence
  Description of Artificial Sequence: Synthetic oligonucleotide
  Sense strand starting at position 356 of SEQ ID NO: 587823
cucuaagauuugugaauau

SEQ ID NO: 821005 - RNA, 19 nt, Artificial Sequence
  Description of Artificial Sequence: Synthetic oligonucleotide
  Antisense strand to SEQ ID NO: 821004
auauucacaaaucuuagag

SEQ ID NO: 821006 - RNA, 19 nt, Artificial Sequence
  Description of Artificial Sequence: Synthetic oligonucleotide
  Sense strand starting at position 373 of SEQ ID NO: 587823
auuugauguuugcuacuau

SEQ ID NO: 821007 - RNA, 19 nt, Artificial Sequence
  Description of Artificial Sequence: Synthetic oligonucleotide
  Antisense strand to SEQ ID NO: 821006
auaguagcaaacaucaaau

SEQ ID NO: 821008 - RNA, 19 nt, Artificial Sequence
  Description of Artificial Sequence: Synthetic oligonucleotide
  Sense strand starting at position 374 of SEQ ID NO: 587823
uuugauguuugcuacuaua

SEQ ID NO: 821009 - RNA, 19 nt, Artificial Sequence
  Description of Artificial Sequence: Synthetic oligonucleotide
  Antisense strand to SEQ ID NO: 821008
uauaguagcaaacaucaaa

SEQ ID NO: 821010 - RNA, 19 nt, Artificial Sequence
  Description of Artificial Sequence: Synthetic oligonucleotide
  Sense strand starting at position 454 of SEQ ID NO: 587823
cuguuucuuuauuaguaca

SEQ ID NO: 821011 - RNA, 19 nt, Artificial Sequence
  Description of Artificial Sequence: Synthetic oligonucleotide
  Antisense strand to SEQ ID NO: 821010
uguacuaauaaagaaacag

SEQ ID NO: 821012 - RNA, 19 nt, Artificial Sequence
  Description of Artificial Sequence: Synthetic oligonucleotide
  Sense strand starting at position 513 of SEQ ID NO: 587823
ccugaauagaggugagugu

SEQ ID NO: 821013 - RNA, 19 nt, Artificial Sequence
  Description of Artificial Sequence: Synthetic oligonucleotide
  Antisense strand to SEQ ID NO: 821012
acacucaccucuauucagg

SEQ ID NO: 821014 - RNA, 19 nt, Artificial Sequence
  Description of Artificial Sequence: Synthetic oligonucleotide
  Sense strand starting at position 517 of SEQ ID NO: 587823
aauagaggugaguguauua

SEQ ID NO: 821015 - RNA, 19 nt, Artificial Sequence
  Description of Artificial Sequence: Synthetic oligonucleotide
  Antisense strand to SEQ ID NO: 821014
uaauacacucaccucuauu

SEQ ID NO: 821016 - RNA, 19 nt, Artificial Sequence
  Description of Artificial Sequence: Synthetic oligonucleotide
  Sense strand starting at position 524 of SEQ ID NO: 587823
gugaguguauuaguuccuu

SEQ ID NO: 821017 - RNA, 19 nt, Artificial Sequence
  Description of Artificial Sequence: Synthetic oligonucleotide
  Antisense strand to SEQ ID NO: 821016
aaggaacuaauacacucac

SEQ ID NO: 821018 - RNA, 19 nt, Artificial Sequence
  Description of Artificial Sequence: Synthetic oligonucleotide
  Sense strand starting at position 566 of SEQ ID NO: 587823
auuguauauuucuguggag

SEQ ID NO: 821019 - RNA, 19 nt, Artificial Sequence
  Description of Artificial Sequence: Synthetic oligonucleotide
  Antisense strand to SEQ ID NO: 821018
cuccacagaaauauacaau

SEQ ID NO: 821020 - RNA, 19 nt, Artificial Sequence
  Description of Artificial Sequence: Synthetic oligonucleotide
  Sense strand starting at position 569 of SEQ ID NO: 587823
guauauuucuguggagaau

SEQ ID NO: 821021 - RNA, 19 nt, Artificial Sequence
  Description of Artificial Sequence: Synthetic oligonucleotide
  Antisense strand to SEQ ID NO: 821020
auucuccacagaaauauac

SEQ ID NO: 821022 - RNA, 19 nt, Artificial Sequence
  Description of Artificial Sequence: Synthetic oligonucleotide
  Sense strand starting at position 591 of SEQ ID NO: 587823
ggaaacguauacuugacaa

SEQ ID NO: 821023 - RNA, 19 nt, Artificial Sequence
  Description of Artificial Sequence: Synthetic oligonucleotide
  Antisense strand to SEQ ID NO: 821022
uugucaaguauacguuucc

SEQ ID NO: 821024 - RNA, 19 nt, Artificial Sequence
  Description of Artificial Sequence: Synthetic oligonucleotide
  Sense strand starting at position 681 of SEQ ID NO: 587823
gguuacacaucuucugaau

SEQ ID NO: 821025 - RNA, 19 nt, Artificial Sequence
  Description of Artificial Sequence: Synthetic oligonucleotide
  Antisense strand to SEQ ID NO: 821024
auucagaagauguguaacc

SEQ ID NO: 821026 - RNA, 19 nt, Artificial Sequence
  Description of Artificial Sequence: Synthetic oligonucleotide
  Sense strand starting at position 794 of SEQ ID NO: 587823
aaaguagucucagagcuaa

SEQ ID NO: 821027 - RNA, 19 nt, Artificial Sequence
  Description of Artificial Sequence: Synthetic oligonucleotide
  Antisense strand to SEQ ID NO: 821026
uuagcucugagacuacuuu

SEQ ID NO: 821028 - RNA, 19 nt, Artificial Sequence
  Description of Artificial Sequence: Synthetic oligonucleotide
  Sense strand starting at position 922 of SEQ ID NO: 587823
gaccgugagcaagaauagu

SEQ ID NO: 821029 - RNA, 19 nt, Artificial Sequence
  Description of Artificial Sequence: Synthetic oligonucleotide
  Antisense strand to SEQ ID NO: 821028
acuauucuugcucacgguc

SEQ ID NO: 821030 - RNA, 19 nt, Artificial Sequence
  Description of Artificial Sequence: Synthetic oligonucleotide
  Sense strand starting at position 928 of SEQ ID NO: 587823
gagcaagaauaguagaacu

SEQ ID NO: 821031 - RNA, 19 nt, Artificial Sequence
  Description of Artificial Sequence: Synthetic oligonucleotide
  Antisense strand to SEQ ID NO: 821030
aguucuacuauucuugcuc

SEQ ID NO: 821032 - RNA, 19 nt, Artificial Sequence
  Description of Artificial Sequence: Synthetic oligonucleotide
  Sense strand starting at position 1051 of SEQ ID NO: 587823
ggguguuagcacucgccga

SEQ ID NO: 821033 - RNA, 19 nt, Artificial Sequence
  Description of Artificial Sequence: Synthetic oligonucleotide
  Antisense strand to SEQ ID NO: 821032
ucggcgagugcuaacaccc

SEQ ID NO: 821034 - RNA, 19 nt, Artificial Sequence
  Description of Artificial Sequence: Synthetic oligonucleotide
  Sense strand starting at position 1672 of SEQ ID NO: 587823
gagccagguccuuacuuga

SEQ ID NO: 821035 - RNA, 19 nt, Artificial Sequence
  Description of Artificial Sequence: Synthetic oligonucleotide
  Antisense strand to SEQ ID NO: 821034
ucaaguaaggaccuggcuc

SEQ ID NO: 821036 - RNA, 19 nt, Artificial Sequence
  Description of Artificial Sequence: Synthetic oligonucleotide
  Sense strand starting at position 2061 of SEQ ID NO: 587823
aggagugcgcuucgggaaa

SEQ ID NO: 821037 - RNA, 19 nt, Artificial Sequence
  Description of Artificial Sequence: Synthetic oligonucleotide
  Antisense strand to SEQ ID NO: 821036
uuucccgaagcgcacuccu

SEQ ID NO: 821038 - RNA, 19 nt, Artificial Sequence
  Description of Artificial Sequence: Synthetic oligonucleotide
  Sense strand starting at position 2065 of SEQ ID NO: 587823
gugcgcuucgggaaauguu

SEQ ID NO: 821039 - RNA, 19 nt, Artificial Sequence
  Description of Artificial Sequence: Synthetic oligonucleotide
  Antisense strand to SEQ ID NO: 821038
aacauuucccgaagcgcac

SEQ ID NO: 821040 - RNA, 19 nt, Artificial Sequence
  Description of Artificial Sequence: Synthetic oligonucleotide
  Sense strand starting at position 2066 of SEQ ID NO: 587823
ugcgcuucgggaaauguuu

SEQ ID NO: 821041 - RNA, 19 nt, Artificial Sequence
  Description of Artificial Sequence: Synthetic oligonucleotide
  Antisense strand to SEQ ID NO: 821040
aaacauuucccgaagcgca

SEQ ID NO: 821042 - RNA, 19 nt, Artificial Sequence
  Description of Artificial Sequence: Synthetic oligonucleotide
  Sense strand starting at position 2073 of SEQ ID NO: 587823
cgggaaauguuucuucuuc

SEQ ID NO: 821043 - RNA, 19 nt, Artificial Sequence
  Description of Artificial Sequence: Synthetic oligonucleotide
  Antisense strand to SEQ ID NO: 821042
gaagaagaaacauuucccg

SEQ ID NO: 821044 - RNA, 19 nt, Artificial Sequence
  Description of Artificial Sequence: Synthetic oligonucleotide
  Sense strand starting at position 2107 of SEQ ID NO: 587823
ugugaagugagcgguucaa

SEQ ID NO: 821045 - RNA, 19 nt, Artificial Sequence
  Description of Artificial Sequence: Synthetic oligonucleotide
  Antisense strand to SEQ ID NO: 821044
uugaaccgcucacuucaca

SEQ ID NO: 821046 - RNA, 19 nt, Artificial Sequence
  Description of Artificial Sequence: Synthetic oligonucleotide
  Sense strand starting at position 2427 of SEQ ID NO: 587823
ggacgguuucccggagaag

SEQ ID NO: 821047 - RNA, 19 nt, Artificial Sequence
  Description of Artificial Sequence: Synthetic oligonucleotide
  Antisense strand to SEQ ID NO: 821046
cuucuccgggaaaccgucc

SEQ ID NO: 821048 - RNA, 19 nt, Artificial Sequence
  Description of Artificial Sequence: Synthetic oligonucleotide
  Sense strand starting at position 2430 of SEQ ID NO: 587823
cgguuucccggagaagcaa

SEQ ID NO: 821049 - RNA, 19 nt, Artificial Sequence
  Description of Artificial Sequence: Synthetic oligonucleotide
  Antisense strand to SEQ ID NO: 821048
uugcuucuccgggaaaccg

SEQ ID NO: 821050 - RNA, 19 nt, Artificial Sequence
  Description of Artificial Sequence: Synthetic oligonucleotide
  Sense strand starting at position 3039 of SEQ ID NO: 587823
ggacggaaguguggagaau

SEQ ID NO: 821051 - RNA, 19 nt, Artificial Sequence
  Description of Artificial Sequence: Synthetic oligonucleotide
  Antisense strand to SEQ ID NO: 821050
auucuccacacuuccgucc

SEQ ID NO: 821052 - RNA, 19 nt, Artificial Sequence
  Description of Artificial Sequence: Synthetic oligonucleotide
  Sense strand starting at position 3510 of SEQ ID NO: 587823
gugaggaaguugugggaaa

SEQ ID NO: 821053 - RNA, 19 nt, Artificial Sequence
  Description of Artificial Sequence: Synthetic oligonucleotide
  Antisense strand to SEQ ID NO: 821052
uuucccacaacuuccucac

SEQ ID NO: 821054 - RNA, 19 nt, Artificial Sequence
  Description of Artificial Sequence: Synthetic oligonucleotide
  Sense strand starting at position 3542 of SEQ ID NO: 587823
ugagaaugugcggaaggau

SEQ ID NO: 821055 - RNA, 19 nt, Artificial Sequence
  Description of Artificial Sequence: Synthetic oligonucleotide
  Antisense strand to SEQ ID NO: 821054
auccuuccgcacauucuca

SEQ ID NO: 821056 - RNA, 19 nt, Artificial Sequence
  Description of Artificial Sequence: Synthetic oligonucleotide
  Sense strand starting at position 3665 of SEQ ID NO: 587823
gagcaagaaucgucuagag

SEQ ID NO: 821057 - RNA, 19 nt, Artificial Sequence
  Description of Artificial Sequence: Synthetic oligonucleotide
  Antisense strand to SEQ ID NO: 821056
cucuagacgauucuugcuc

SEQ ID NO: 821058 - RNA, 19 nt, Artificial Sequence
  Description of Artificial Sequence: Synthetic oligonucleotide
  Sense strand starting at position 3667 of SEQ ID NO: 587823
gcaagaaucgucuagagac

SEQ ID NO: 821059 - RNA, 19 nt, Artificial Sequence
  Description of Artificial Sequence: Synthetic oligonucleotide
  Antisense strand to SEQ ID NO: 821058
gucucuagacgauucuugc

SEQ ID NO: 821060 - RNA, 19 nt, Artificial Sequence
  Description of Artificial Sequence: Synthetic oligonucleotide
  Sense strand starting at position 3737 of SEQ ID NO: 587823
gcgcucacucuagaaagaa

SEQ ID NO: 821061 - RNA, 19 nt, Artificial Sequence
  Description of Artificial Sequence: Synthetic oligonucleotide
  Antisense strand to SEQ ID NO: 821060
uucuuucuagagugagcgc

SEQ ID NO: 821062 - RNA, 19 nt, Artificial Sequence
  Description of Artificial Sequence: Synthetic oligonucleotide
  Sense strand starting at position 3765 of SEQ ID NO: 587823
acgcgaagagaucggguua

SEQ ID NO: 821063 - RNA, 19 nt, Artificial Sequence
  Description of Artificial Sequence: Synthetic oligonucleotide
  Antisense strand to SEQ ID NO: 821062
uaacccgaucucuucgcgu

SEQ ID NO: 821064 - RNA, 19 nt, Artificial Sequence
  Description of Artificial Sequence: Synthetic oligonucleotide
  Sense strand starting at position 3770 of SEQ ID NO: 587823
aagagaucggguuagaguc

SEQ ID NO: 821065 - RNA, 19 nt, Artificial Sequence
  Description of Artificial Sequence: Synthetic oligonucleotide
  Antisense strand to SEQ ID NO: 821064
gacucuaacccgaucucuu

SEQ ID NO: 821066 - RNA, 19 nt, Artificial Sequence
  Description of Artificial Sequence: Synthetic oligonucleotide
  Sense strand starting at position 177 of SEQ ID NO: 587824
guuuauaaaggaugaguac

SEQ ID NO: 821067 - RNA, 19 nt, Artificial Sequence
  Description of Artificial Sequence: Synthetic oligonucleotide
  Antisense strand to SEQ ID NO: 821066
guacucauccuuuauaaac

SEQ ID NO: 821068 - RNA, 19 nt, Artificial Sequence
  Description of Artificial Sequence: Synthetic oligonucleotide
  Sense strand starting at position 212 of SEQ ID NO: 587824
guagcuucaggucauggaa

SEQ ID NO: 821069 - RNA, 19 nt, Artificial Sequence
  Description of Artificial Sequence: Synthetic oligonucleotide
  Antisense strand to SEQ ID NO: 821068
uuccaugaccugaagcuac

SEQ ID NO: 821070 - RNA, 19 nt, Artificial Sequence
  Description of Artificial Sequence: Synthetic oligonucleotide
  Sense strand starting at position 303 of SEQ ID NO: 587824
acacuaaagugauguauca

SEQ ID NO: 821071 - RNA, 19 nt, Artificial Sequence
  Description of Artificial Sequence: Synthetic oligonucleotide
  Antisense strand to SEQ ID NO: 821070
ugauacaucacuuuagugu

SEQ ID NO: 821072 - RNA, 19 nt, Artificial Sequence
  Description of Artificial Sequence: Synthetic oligonucleotide
  Sense strand starting at position 310 of SEQ ID NO: 587824
agugauguaucacuuuaaa

SEQ ID NO: 821073 - RNA, 19 nt, Artificial Sequence
  Description of Artificial Sequence: Synthetic oligonucleotide
  Antisense strand to SEQ ID NO: 821072
uuuaaagugauacaucacu

SEQ ID NO: 821074 - RNA, 19 nt, Artificial Sequence
  Description of Artificial Sequence: Synthetic oligonucleotide
  Sense strand starting at position 383 of SEQ ID NO: 587824
ucauauacuguuugauguu

SEQ ID NO: 821075 - RNA, 19 nt, Artificial Sequence
  Description of Artificial Sequence: Synthetic oligonucleotide
  Antisense strand to SEQ ID NO: 821074
aacaucaaacaguauauga

SEQ ID NO: 821076 - RNA, 19 nt, Artificial Sequence
  Description of Artificial Sequence: Synthetic oligonucleotide
  Sense strand starting at position 662 of SEQ ID NO: 587824
cagagauacuaagaagaag

SEQ ID NO: 821077 - RNA, 19 nt, Artificial Sequence
  Description of Artificial Sequence: Synthetic oligonucleotide
  Antisense strand to SEQ ID NO: 821076
cuucuucuuaguaucucug

SEQ ID NO: 821078 - RNA, 19 nt, Artificial Sequence
  Description of Artificial Sequence: Synthetic oligonucleotide
  Sense strand starting at position 924 of SEQ ID NO: 587824
uuuaguguaagccagagaa

SEQ ID NO: 821079 - RNA, 19 nt, Artificial Sequence
  Description of Artificial Sequence: Synthetic oligonucleotide
  Antisense strand to SEQ ID NO: 821078
uucucuggcuuacacuaaa

SEQ ID NO: 821080 - RNA, 19 nt, Artificial Sequence
  Description of Artificial Sequence: Synthetic oligonucleotide
  Sense strand starting at position 938 of SEQ ID NO: 587824
gagaaaccaucugagagau

SEQ ID NO: 821081 - RNA, 19 nt, Artificial Sequence
  Description of Artificial Sequence: Synthetic oligonucleotide
  Antisense strand to SEQ ID NO: 821080
aucucucagaugguuucuc

SEQ ID NO: 821082 - RNA, 19 nt, Artificial Sequence
  Description of Artificial Sequence: Synthetic oligonucleotide
  Sense strand starting at position 1036 of SEQ ID NO: 587824
gccaaauuagcugaccuaa

SEQ ID NO: 821083 - RNA, 19 nt, Artificial Sequence
  Description of Artificial Sequence: Synthetic oligonucleotide
  Antisense strand to SEQ ID NO: 821082
uuaggucagcuaauuuggc

SEQ ID NO: 821084 - RNA, 19 nt, Artificial Sequence
  Description of Artificial Sequence: Synthetic oligonucleotide
  Sense strand starting at position 1060 of SEQ ID NO: 587824
agcauuauucgcgguucca

SEQ ID NO: 821085 - RNA, 19 nt, Artificial Sequence
  Description of Artificial Sequence: Synthetic oligonucleotide
  Antisense strand to SEQ ID NO: 821084
uggaaccgcgaauaaugcu

SEQ ID NO: 821086 - RNA, 19 nt, Artificial Sequence
  Description of Artificial Sequence: Synthetic oligonucleotide
  Sense strand starting at position 1061 of SEQ ID NO: 587824
gcauuauucgcgguuccac

SEQ ID NO: 821087 - RNA, 19 nt, Artificial Sequence
  Description of Artificial Sequence: Synthetic oligonucleotide
  Antisense strand to SEQ ID NO: 821086
guggaaccgcgaauaaugc

SEQ ID NO: 821088 - RNA, 19 nt, Artificial Sequence
  Description of Artificial Sequence: Synthetic oligonucleotide
  Sense strand starting at position 1070 of SEQ ID NO: 587824
gcgguuccacaauauaucu

SEQ ID NO: 821089 - RNA, 19 nt, Artificial Sequence
  Description of Artificial Sequence: Synthetic oligonucleotide
  Antisense strand to SEQ ID NO: 821088
agauauauuguggaaccgc

SEQ ID NO: 821090 - RNA, 19 nt, Artificial Sequence
  Description of Artificial Sequence: Synthetic oligonucleotide
  Sense strand starting at position 1238 of SEQ ID NO: 587824
cugccaugaucacaaagaa

SEQ ID NO: 821091 - RNA, 19 nt, Artificial Sequence
  Description of Artificial Sequence: Synthetic oligonucleotide
  Antisense strand to SEQ ID NO: 821090
uucuuugugaucauggcag

SEQ ID NO: 821092 - RNA, 19 nt, Artificial Sequence
  Description of Artificial Sequence: Synthetic oligonucleotide
  Sense strand starting at position 1310 of SEQ ID NO: 587824
gaaacagccugauaucugu

SEQ ID NO: 821093 - RNA, 19 nt, Artificial Sequence
  Description of Artificial Sequence: Synthetic oligonucleotide
  Antisense strand to SEQ ID NO: 821092
acagauaucaggcuguuuc

SEQ ID NO: 821094 - RNA, 19 nt, Artificial Sequence
  Description of Artificial Sequence: Synthetic oligonucleotide
  Sense strand starting at position 1313 of SEQ ID NO: 587824
acagccugauaucuguauu

SEQ ID NO: 821095 - RNA, 19 nt, Artificial Sequence
  Description of Artificial Sequence: Synthetic oligonucleotide
  Antisense strand to SEQ ID NO: 821094
aauacagauaucaggcugu

SEQ ID NO: 821096 - RNA, 19 nt, Artificial Sequence
  Description of Artificial Sequence: Synthetic oligonucleotide
  Sense strand starting at position 1316 of SEQ ID NO: 587824
gccugauaucuguauuacg

SEQ ID NO: 821097 - RNA, 19 nt, Artificial Sequence
  Description of Artificial Sequence: Synthetic oligonucleotide
  Antisense strand to SEQ ID NO: 821096
cguaauacagauaucaggc

SEQ ID NO: 821098 - RNA, 19 nt, Artificial Sequence
  Description of Artificial Sequence: Synthetic oligonucleotide
  Sense strand starting at position 1333 of SEQ ID NO: 587824
cguuucagaggucaagcua

SEQ ID NO: 821099 - RNA, 19 nt, Artificial Sequence
  Description of Artificial Sequence: Synthetic oligonucleotide
  Antisense strand to SEQ ID NO: 821098
uagcuugaccucugaaacg

SEQ ID NO: 821100 - RNA, 19 nt, Artificial Sequence
  Description of Artificial Sequence: Synthetic oligonucleotide
  Sense strand starting at position 1341 of SEQ ID NO: 587824
aggucaagcuaguuaaauu

SEQ ID NO: 821101 - RNA, 19 nt, Artificial Sequence
  Description of Artificial Sequence: Synthetic oligonucleotide
  Antisense strand to SEQ ID NO: 821100
aauuuaacuagcuugaccu

SEQ ID NO: 821102 - RNA, 19 nt, Artificial Sequence
  Description of Artificial Sequence: Synthetic oligonucleotide
  Sense strand starting at position 2036 of SEQ ID NO: 587824
agaugcugucgucaggagu

SEQ ID NO: 821103 - RNA, 19 nt, Artificial Sequence
  Description of Artificial Sequence: Synthetic oligonucleotide
  Antisense strand to SEQ ID NO: 821102
acuccugacgacagcaucu

SEQ ID NO: 821104 - RNA, 19 nt, Artificial Sequence
  Description of Artificial Sequence: Synthetic oligonucleotide
  Sense strand starting at position 2064 of SEQ ID NO: 587824
ucuggcugccagcaauaaa

SEQ ID NO: 821105 - RNA, 19 nt, Artificial Sequence
  Description of Artificial Sequence: Synthetic oligonucleotide
  Antisense strand to SEQ ID NO: 821104
uuuauugcuggcagccaga

SEQ ID NO: 821106 - RNA, 19 nt, Artificial Sequence
  Description of Artificial Sequence: Synthetic oligonucleotide
  Sense strand starting at position 2104 of SEQ ID NO: 587824
gggacaagguaucuucuca

SEQ ID NO: 821107 - RNA, 19 nt, Artificial Sequence
  Description of Artificial Sequence: Synthetic oligonucleotide
  Antisense strand to SEQ ID NO: 821106
ugagaagauaccuuguccc

SEQ ID NO: 821108 - RNA, 19 nt, Artificial Sequence
  Description of Artificial Sequence: Synthetic oligonucleotide
  Sense strand starting at position 2123 of SEQ ID NO: 587824
augcuacuacuggguaaga

SEQ ID NO: 821109 - RNA, 19 nt, Artificial Sequence
  Description of Artificial Sequence: Synthetic oligonucleotide
  Antisense strand to SEQ ID NO: 821108
ucuuacccaguaguagcau

SEQ ID NO: 821110 - RNA, 19 nt, Artificial Sequence
  Description of Artificial Sequence: Synthetic oligonucleotide
  Sense strand starting at position 2125 of SEQ ID NO: 587824
gcuacuacuggguaagagu

SEQ ID NO: 821111 - RNA, 19 nt, Artificial Sequence
  Description of Artificial Sequence: Synthetic oligonucleotide
  Antisense strand to SEQ ID NO: 821110
acucuuacccaguaguagc

SEQ ID NO: 821112 - RNA, 19 nt, Artificial Sequence
  Description of Artificial Sequence: Synthetic oligonucleotide
  Sense strand starting at position 2134 of SEQ ID NO: 587824
ggguaagaguaagagaaau

SEQ ID NO: 821113 - RNA, 19 nt, Artificial Sequence
  Description of Artificial Sequence: Synthetic oligonucleotide
  Antisense strand to SEQ ID NO: 821112
auuucucuuacucuuaccc

SEQ ID NO: 821114 - RNA, 19 nt, Artificial Sequence
  Description of Artificial Sequence: Synthetic oligonucleotide
  Sense strand starting at position 2342 of SEQ ID NO: 587824
ccauauuucuaagagaagu

SEQ ID NO: 821115 - RNA, 19 nt, Artificial Sequence
  Description of Artificial Sequence: Synthetic oligonucleotide
  Antisense strand to SEQ ID NO: 821114
acuucucuuagaaauaugg

SEQ ID NO: 821116 - RNA, 19 nt, Artificial Sequence
  Description of Artificial Sequence: Synthetic oligonucleotide
  Sense strand starting at position 2448 of SEQ ID NO: 587824
ugaaucugguccuuucuaa

SEQ ID NO: 821117 - RNA, 19 nt, Artificial Sequence
  Description of Artificial Sequence: Synthetic oligonucleotide
  Antisense strand to SEQ ID NO: 821116
uuagaaaggaccagauuca

SEQ ID NO: 821118 - RNA, 19 nt, Artificial Sequence
  Description of Artificial Sequence: Synthetic oligonucleotide
  Sense strand starting at position 2479 of SEQ ID NO: 587824
uagugacuacaugguuauu

SEQ ID NO: 821119 - RNA, 19 nt, Artificial Sequence
  Description of Artificial Sequence: Synthetic oligonucleotide
  Antisense strand to SEQ ID NO: 821118
aauaaccauguagucacua

SEQ ID NO: 821120 - RNA, 19 nt, Artificial Sequence
  Description of Artificial Sequence: Synthetic oligonucleotide
  Sense strand starting at position 2737 of SEQ ID NO: 587824
gugaauaauucuguuucug

SEQ ID NO: 821121 - RNA, 19 nt, Artificial Sequence
  Description of Artificial Sequence: Synthetic oligonucleotide
  Antisense strand to SEQ ID NO: 821120
cagaaacagaauuauucac

SEQ ID NO: 821122 - RNA, 19 nt, Artificial Sequence
  Description of Artificial Sequence: Synthetic oligonucleotide
  Sense strand starting at position 2768 of SEQ ID NO: 587824
guuauucuauacccaagua

SEQ ID NO: 821123 - RNA, 19 nt, Artificial Sequence
  Description of Artificial Sequence: Synthetic oligonucleotide
  Antisense strand to SEQ ID NO: 821122
uacuuggguauagaauaac

SEQ ID NO: 821124 - RNA, 19 nt, Artificial Sequence
  Description of Artificial Sequence: Synthetic oligonucleotide
  Sense strand starting at position 2843 of SEQ ID NO: 587824
uuaacucacuugcagagau

SEQ ID NO: 821125 - RNA, 19 nt, Artificial Sequence
  Description of Artificial Sequence: Synthetic oligonucleotide
  Antisense strand to SEQ ID NO: 821124
aucucugcaagugaguuaa

SEQ ID NO: 821126 - RNA, 19 nt, Artificial Sequence
  Description of Artificial Sequence: Synthetic oligonucleotide
  Sense strand starting at position 2853 of SEQ ID NO: 587824
ugcagagaugcuuaguauu

SEQ ID NO: 821127 - RNA, 19 nt, Artificial Sequence
  Description of Artificial Sequence: Synthetic oligonucleotide
  Antisense strand to SEQ ID NO: 821126
aauacuaagcaucucugca

SEQ ID NO: 821128 - RNA, 19 nt, Artificial Sequence
  Description of Artificial Sequence: Synthetic oligonucleotide
  Sense strand starting at position 3126 of SEQ ID NO: 587824
auggguuucuucucaacua

SEQ ID NO: 821129 - RNA, 19 nt, Artificial Sequence
  Description of Artificial Sequence: Synthetic oligonucleotide
  Antisense strand to SEQ ID NO: 821128
uaguugagaagaaacccau

SEQ ID NO: 821130 - RNA, 19 nt, Artificial Sequence
  Description of Artificial Sequence: Synthetic oligonucleotide
  Sense strand starting at position 3127 of SEQ ID NO: 587824
uggguuucuucucaacuaa

SEQ ID NO: 821131 - RNA, 19 nt, Artificial Sequence
  Description of Artificial Sequence: Synthetic oligonucleotide
  Antisense strand to SEQ ID NO: 821130
uuaguugagaagaaaccca

SEQ ID NO: 821132 - RNA, 19 nt, Artificial Sequence
  Description of Artificial Sequence: Synthetic oligonucleotide
  Sense strand starting at position 3788 of SEQ ID NO: 587824
cuauguuccuucccuguga

SEQ ID NO: 821133 - RNA, 19 nt, Artificial Sequence
  Description of Artificial Sequence: Synthetic oligonucleotide
  Antisense strand to SEQ ID NO: 821132
ucacagggaaggaacauag

SEQ ID NO: 821134 - RNA, 19 nt, Artificial Sequence
  Description of Artificial Sequence: Synthetic oligonucleotide
  Sense strand starting at position 3790 of SEQ ID NO: 587824
auguuccuucccugugauu

SEQ ID NO: 821135 - RNA, 19 nt, Artificial Sequence
  Description of Artificial Sequence: Synthetic oligonucleotide
  Antisense strand to SEQ ID NO: 821134
aaucacagggaaggaacau

SEQ ID NO: 821136 - RNA, 19 nt, Artificial Sequence
  Description of Artificial Sequence: Synthetic oligonucleotide
  Sense strand starting at position 3792 of SEQ ID NO: 587824
guuccuucccugugauucu

SEQ ID NO: 821137 - RNA, 19 nt, Artificial Sequence
  Description of Artificial Sequence: Synthetic oligonucleotide
  Antisense strand to SEQ ID NO: 821136
agaaucacagggaaggaac

SEQ ID NO: 821138 - RNA, 19 nt, Artificial Sequence
  Description of Artificial Sequence: Synthetic oligonucleotide
  Sense strand starting at position 3816 of SEQ ID NO: 587824
uuuacauaugugcauacau

SEQ ID NO: 821139 - RNA, 19 nt, Artificial Sequence
  Description of Artificial Sequence: Synthetic oligonucleotide
  Antisense strand to SEQ ID NO: 821138
auguaugcacauauguaaa

SEQ ID NO: 821140 - RNA, 19 nt, Artificial Sequence
  Description of Artificial Sequence: Synthetic oligonucleotide
  Sense strand starting at position 3911 of SEQ ID NO: 587824
cugccaguggccuaaucaa

SEQ ID NO: 821141 - RNA, 19 nt, Artificial Sequence
  Description of Artificial Sequence: Synthetic oligonucleotide
  Antisense strand to SEQ ID NO: 821140
uugauuaggccacuggcag

SEQ ID NO: 821142 - RNA, 19 nt, Artificial Sequence
  Description of Artificial Sequence: Synthetic oligonucleotide
  Sense strand starting at position 3918 of SEQ ID NO: 587824
uggccuaaucaaggguauu

SEQ ID NO: 821143 - RNA, 19 nt, Artificial Sequence
  Description of Artificial Sequence: Synthetic oligonucleotide
  Antisense strand to SEQ ID NO: 821142
aauacccuugauuaggcca

SEQ ID NO: 821144 - RNA, 19 nt, Artificial Sequence
  Description of Artificial Sequence: Synthetic oligonucleotide
  Sense strand starting at position 3967 of SEQ ID NO: 587824
acucgcaaguaacuuuaaa

SEQ ID NO: 821145 - RNA, 19 nt, Artificial Sequence
  Description of Artificial Sequence: Synthetic oligonucleotide
  Antisense strand to SEQ ID NO: 821144
uuuaaaguuacuugcgagu

SEQ ID NO: 821146 - RNA, 19 nt, Artificial Sequence
  Description of Artificial Sequence: Synthetic oligonucleotide
  Sense strand starting at position 4 of SEQ ID NO: 587825
gaaugaauagguuguguug

SEQ ID NO: 821147 - RNA, 19 nt, Artificial Sequence
  Description of Artificial Sequence: Synthetic oligonucleotide
  Antisense strand to SEQ ID NO: 821146
caacacaaccuauucauuc

SEQ ID NO: 821148 - RNA, 19 nt, Artificial Sequence
  Description of Artificial Sequence: Synthetic oligonucleotide
  Sense strand starting at position 174 of SEQ ID NO: 587825
auacacgucaaguguagaa

SEQ ID NO: 821149 - RNA, 19 nt, Artificial Sequence
  Description of Artificial Sequence: Synthetic oligonucleotide
  Antisense strand to SEQ ID NO: 821148
uucuacacuugacguguau

SEQ ID NO: 821150 - RNA, 19 nt, Artificial Sequence
  Description of Artificial Sequence: Synthetic oligonucleotide
  Sense strand starting at position 189 of SEQ ID NO: 587825
agaacagugccggacuaau

SEQ ID NO: 821151 - RNA, 19 nt, Artificial Sequence
  Description of Artificial Sequence: Synthetic oligonucleotide
  Antisense strand to SEQ ID NO: 821150
auuaguccggcacuguucu

SEQ ID NO: 821152 - RNA, 19 nt, Artificial Sequence
  Description of Artificial Sequence: Synthetic oligonucleotide
  Sense strand starting at position 458 of SEQ ID NO: 587825
cuuggauagcucuagcuaa

SEQ ID NO: 821153 - RNA, 19 nt, Artificial Sequence
  Description of Artificial Sequence: Synthetic oligonucleotide
  Antisense strand to SEQ ID NO: 821152
uuagcuagagcuauccaag

SEQ ID NO: 821154 - RNA, 19 nt, Artificial Sequence
  Description of Artificial Sequence: Synthetic oligonucleotide
  Sense strand starting at position 757 of SEQ ID NO: 587825
acuaguguaucaguaaauu

SEQ ID NO: 821155 - RNA, 19 nt, Artificial Sequence
  Description of Artificial Sequence: Synthetic oligonucleotide
  Antisense strand to SEQ ID NO: 821154
aauuuacugauacacuagu

SEQ ID NO: 821156 - RNA, 19 nt, Artificial Sequence
  Description of Artificial Sequence: Synthetic oligonucleotide
  Sense strand starting at position 793 of SEQ ID NO: 587825
uugggacacuacuuacuau

SEQ ID NO: 821157 - RNA, 19 nt, Artificial Sequence
  Description of Artificial Sequence: Synthetic oligonucleotide
  Antisense strand to SEQ ID NO: 821156
auaguaaguagugucccaa

SEQ ID NO: 821158 - RNA, 19 nt, Artificial Sequence
  Description of Artificial Sequence: Synthetic oligonucleotide
  Sense strand starting at position 991 of SEQ ID NO: 587825
uuacaauggcauugcugaa

SEQ ID NO: 821159 - RNA, 19 nt, Artificial Sequence
  Description of Artificial Sequence: Synthetic oligonucleotide
  Antisense strand to SEQ ID NO: 821158
uucagcaaugccauuguaa

SEQ ID NO: 821160 - RNA, 19 nt, Artificial Sequence
  Description of Artificial Sequence: Synthetic oligonucleotide
  Sense strand starting at position 1012 of SEQ ID NO: 587825
accagagauugugccuuga

SEQ ID NO: 821161 - RNA, 19 nt, Artificial Sequence
  Description of Artificial Sequence: Synthetic oligonucleotide
  Antisense strand to SEQ ID NO: 821160
ucaaggcacaaucucuggu

SEQ ID NO: 821162 - RNA, 19 nt, Artificial Sequence
  Description of Artificial Sequence: Synthetic oligonucleotide
  Sense strand starting at position 2146 of SEQ ID NO: 587825
cgaguagcuccugcuguuu

SEQ ID NO: 821163 - RNA, 19 nt, Artificial Sequence
  Description of Artificial Sequence: Synthetic oligonucleotide
  Antisense strand to SEQ ID NO: 821162
aaacagcaggagcuacucg

SEQ ID NO: 821164 - RNA, 19 nt, Artificial Sequence
  Description of Artificial Sequence: Synthetic oligonucleotide
  Sense strand starting at position 2195 of SEQ ID NO: 587825
aguggugacuaauuagaug

SEQ ID NO: 821165 - RNA, 19 nt, Artificial Sequence
  Description of Artificial Sequence: Synthetic oligonucleotide
  Antisense strand to SEQ ID NO: 821164
caucuaauuagucaccacu

SEQ ID NO: 821166 - RNA, 19 nt, Artificial Sequence
  Description of Artificial Sequence: Synthetic oligonucleotide
  Sense strand starting at position 2210 of SEQ ID NO: 587825
gaugcagugaguuaggcau

SEQ ID NO: 821167 - RNA, 19 nt, Artificial Sequence
  Description of Artificial Sequence: Synthetic oligonucleotide
  Antisense strand to SEQ ID NO: 821166
augccuaacucacugcauc

SEQ ID NO: 821168 - RNA, 19 nt, Artificial Sequence
  Description of Artificial Sequence: Synthetic oligonucleotide
  Sense strand starting at position 2232 of SEQ ID NO: 587825
agauaaguaaaccgguaaa

SEQ ID NO: 821169 - RNA, 19 nt, Artificial Sequence
  Description of Artificial Sequence: Synthetic oligonucleotide
  Antisense strand to SEQ ID NO: 821168
uuuaccgguuuacuuaucu

SEQ ID NO: 821170 - RNA, 19 nt, Artificial Sequence
  Description of Artificial Sequence: Synthetic oligonucleotide
  Sense strand starting at position 2479 of SEQ ID NO: 587825
gcacaaugaugucuaucaa

SEQ ID NO: 821171 - RNA, 19 nt, Artificial Sequence
  Description of Artificial Sequence: Synthetic oligonucleotide
  Antisense strand to SEQ ID NO: 821170
uugauagacaucauugugc

SEQ ID NO: 821172 - RNA, 19 nt, Artificial Sequence
  Description of Artificial Sequence: Synthetic oligonucleotide
  Sense strand starting at position 2551 of SEQ ID NO: 587825
uacccaguauggcuaagaa

SEQ ID NO: 821173 - RNA, 19 nt, Artificial Sequence
  Description of Artificial Sequence: Synthetic oligonucleotide
  Antisense strand to SEQ ID NO: 821172
uucuuagccauacugggua

SEQ ID NO: 821174 - RNA, 19 nt, Artificial Sequence
  Description of Artificial Sequence: Synthetic oligonucleotide
  Sense strand starting at position 2651 of SEQ ID NO: 587825
agggcaaaguaguuuauaa

SEQ ID NO: 821175 - RNA, 19 nt, Artificial Sequence
  Description of Artificial Sequence: Synthetic oligonucleotide
  Antisense strand to SEQ ID NO: 821174
uuauaaacuacuuugcccu

SEQ ID NO: 821176 - RNA, 19 nt, Artificial Sequence
  Description of Artificial Sequence: Synthetic oligonucleotide
  Sense strand starting at position 2658 of SEQ ID NO: 587825
aguaguuuauaagcaacau

SEQ ID NO: 821177 - RNA, 19 nt, Artificial Sequence
  Description of Artificial Sequence: Synthetic oligonucleotide
  Antisense strand to SEQ ID NO: 821176
auguugcuuauaaacuacu

SEQ ID NO: 821178 - RNA, 19 nt, Artificial Sequence
  Description of Artificial Sequence: Synthetic oligonucleotide
  Sense strand starting at position 2670 of SEQ ID NO: 587825
gcaacauuacaugaugcau

SEQ ID NO: 821179 - RNA, 19 nt, Artificial Sequence
  Description of Artificial Sequence: Synthetic oligonucleotide
  Antisense strand to SEQ ID NO: 821178
augcaucauguaauguugc

SEQ ID NO: 821180 - RNA, 19 nt, Artificial Sequence
  Description of Artificial Sequence: Synthetic oligonucleotide
  Sense strand starting at position 2703 of SEQ ID NO: 587825
aucucuaucccggaaccua

SEQ ID NO: 821181 - RNA, 19 nt, Artificial Sequence
  Description of Artificial Sequence: Synthetic oligonucleotide
  Antisense strand to SEQ ID NO: 821180
uagguuccgggauagagau

SEQ ID NO: 821182 - RNA, 19 nt, Artificial Sequence
  Description of Artificial Sequence: Synthetic oligonucleotide
  Sense strand starting at position 2751 of SEQ ID NO: 587825
ucagaugacugccuuacuu

SEQ ID NO: 821183 - RNA, 19 nt, Artificial Sequence
  Description of Artificial Sequence: Synthetic oligonucleotide
  Antisense strand to SEQ ID NO: 821182
aaguaaggcagucaucuga

SEQ ID NO: 821184 - RNA, 19 nt, Artificial Sequence
  Description of Artificial Sequence: Synthetic oligonucleotide
  Sense strand starting at position 2965 of SEQ ID NO: 587825
acaaguuacuugcuugaua

SEQ ID NO: 821185 - RNA, 19 nt, Artificial Sequence
  Description of Artificial Sequence: Synthetic oligonucleotide
  Antisense strand to SEQ ID NO: 821184
uaucaagcaaguaacuugu

SEQ ID NO: 821186 - RNA, 19 nt, Artificial Sequence
  Description of Artificial Sequence: Synthetic oligonucleotide
  Sense strand starting at position 2967 of SEQ ID NO: 587825
aaguuacuugcuugauaug

SEQ ID NO: 821187 - RNA, 19 nt, Artificial Sequence
  Description of Artificial Sequence: Synthetic oligonucleotide
  Antisense strand to SEQ ID NO: 821186
cauaucaagcaaguaacuu

SEQ ID NO: 821188 - RNA, 19 nt, Artificial Sequence
  Description of Artificial Sequence: Synthetic oligonucleotide
  Sense strand starting at position 2976 of SEQ ID NO: 587825
gcuugauaugcugaaagau

SEQ ID NO: 821189 - RNA, 19 nt, Artificial Sequence
  Description of Artificial Sequence: Synthetic oligonucleotide
  Antisense strand to SEQ ID NO: 821188
aucuuucagcauaucaagc

SEQ ID NO: 821190 - RNA, 19 nt, Artificial Sequence
  Description of Artificial Sequence: Synthetic oligonucleotide
  Sense strand starting at position 3047 of SEQ ID NO: 587825
caugguagauguuuauaug

SEQ ID NO: 821191 - RNA, 19 nt, Artificial Sequence
  Description of Artificial Sequence: Synthetic oligonucleotide
  Antisense strand to SEQ ID NO: 821190
cauauaaacaucuaccaug

SEQ ID NO: 821192 - RNA, 19 nt, Artificial Sequence
  Description of Artificial Sequence: Synthetic oligonucleotide
  Sense strand starting at position 3194 of SEQ ID NO: 587825
aguuaagagguaugggaca

SEQ ID NO: 821193 - RNA, 19 nt, Artificial Sequence
  Description of Artificial Sequence: Synthetic oligonucleotide
  Antisense strand to SEQ ID NO: 821192
ugucccauaccucuuaacu

SEQ ID NO: 821194 - RNA, 19 nt, Artificial Sequence
  Description of Artificial Sequence: Synthetic oligonucleotide
  Sense strand starting at position 3239 of SEQ ID NO: 587825
uggguucucacugacagua

SEQ ID NO: 821195 - RNA, 19 nt, Artificial Sequence
  Description of Artificial Sequence: Synthetic oligonucleotide
  Antisense strand to SEQ ID NO: 821194
uacugucagugagaaccca

SEQ ID NO: 821196 - RNA, 19 nt, Artificial Sequence
  Description of Artificial Sequence: Synthetic oligonucleotide
  Sense strand starting at position 3274 of SEQ ID NO: 587825
gugugaagaaccugaggaa

SEQ ID NO: 821197 - RNA, 19 nt, Artificial Sequence
  Description of Artificial Sequence: Synthetic oligonucleotide
  Antisense strand to SEQ ID NO: 821196
uuccucagguucuucacac

SEQ ID NO: 821198 - RNA, 19 nt, Artificial Sequence
  Description of Artificial Sequence: Synthetic oligonucleotide
  Sense strand starting at position 3289 of SEQ ID NO: 587825
ggaaguggcuagucagaua

SEQ ID NO: 821199 - RNA, 19 nt, Artificial Sequence
  Description of Artificial Sequence: Synthetic oligonucleotide
  Antisense strand to SEQ ID NO: 821198
uaucugacuagccacuucc

SEQ ID NO: 821200 - RNA, 19 nt, Artificial Sequence
  Description of Artificial Sequence: Synthetic oligonucleotide
  Sense strand starting at position 3443 of SEQ ID NO: 587825
agacaagagucagagaaag

SEQ ID NO: 821201 - RNA, 19 nt, Artificial Sequence
  Description of Artificial Sequence: Synthetic oligonucleotide
  Antisense strand to SEQ ID NO: 821200
cuuucucugacucuugucu

SEQ ID NO: 821202 - RNA, 19 nt, Artificial Sequence
  Description of Artificial Sequence: Synthetic oligonucleotide
  Sense strand starting at position 3474 of SEQ ID NO: 587825
cagagccuucuagguauga

SEQ ID NO: 821203 - RNA, 19 nt, Artificial Sequence
  Description of Artificial Sequence: Synthetic oligonucleotide
  Antisense strand to SEQ ID NO: 821202
ucauaccuagaaggcucug

SEQ ID NO: 821204 - RNA, 19 nt, Artificial Sequence
  Description of Artificial Sequence: Synthetic oligonucleotide
  Sense strand starting at position 3475 of SEQ ID NO: 587825
agagccuucuagguaugau

SEQ ID NO: 821205 - RNA, 19 nt, Artificial Sequence
  Description of Artificial Sequence: Synthetic oligonucleotide
  Antisense strand to SEQ ID NO: 821204
aucauaccuagaaggcucu

SEQ ID NO: 821206 - RNA, 19 nt, Artificial Sequence
  Description of Artificial Sequence: Synthetic oligonucleotide
  Sense strand starting at position 3478 of SEQ ID NO: 587825
gccuucuagguaugauaag

SEQ ID NO: 821207 - RNA, 19 nt, Artificial Sequence
  Description of Artificial Sequence: Synthetic oligonucleotide
  Antisense strand to SEQ ID NO: 821206
cuuaucauaccuagaaggc

SEQ ID NO: 821208 - RNA, 19 nt, Artificial Sequence
  Description of Artificial Sequence: Synthetic oligonucleotide
  Sense strand starting at position 3490 of SEQ ID NO: 587825
ugauaaggacuuuguuugu

SEQ ID NO: 821209 - RNA, 19 nt, Artificial Sequence
  Description of Artificial Sequence: Synthetic oligonucleotide
  Antisense strand to SEQ ID NO: 821208
acaaacaaaguccuuauca

SEQ ID NO: 821210 - RNA, 19 nt, Artificial Sequence
  Description of Artificial Sequence: Synthetic oligonucleotide
  Sense strand starting at position 3600 of SEQ ID NO: 587825
auaagaguuccaugguaag

SEQ ID NO: 821211 - RNA, 19 nt, Artificial Sequence
  Description of Artificial Sequence: Synthetic oligonucleotide
  Antisense strand to SEQ ID NO: 821210
cuuaccauggaacucuuau

SEQ ID NO: 821212 - RNA, 19 nt, Artificial Sequence
  Description of Artificial Sequence: Synthetic oligonucleotide
  Sense strand starting at position 3630 of SEQ ID NO: 587825
acuuuagcuguuuagacuu

SEQ ID NO: 821213 - RNA, 19 nt, Artificial Sequence
  Description of Artificial Sequence: Synthetic oligonucleotide
  Antisense strand to SEQ ID NO: 821212
aagucuaaacagcuaaagu

SEQ ID NO: 821214 - RNA, 19 nt, Artificial Sequence
  Description of Artificial Sequence: Synthetic oligonucleotide
  Sense strand starting at position 3644 of SEQ ID NO: 587825
gacuuaggcucauccagau

SEQ ID NO: 821215 - RNA, 19 nt, Artificial Sequence
  Description of Artificial Sequence: Synthetic oligonucleotide
  Antisense strand to SEQ ID NO: 821214
aucuggaugagccuaaguc

SEQ ID NO: 821216 - RNA, 19 nt, Artificial Sequence
  Description of Artificial Sequence: Synthetic oligonucleotide
  Sense strand starting at position 3680 of SEQ ID NO: 587825
cugauagacuuguccuuuc

SEQ ID NO: 821217 - RNA, 19 nt, Artificial Sequence
  Description of Artificial Sequence: Synthetic oligonucleotide
  Antisense strand to SEQ ID NO: 821216
gaaaggacaagucuaucag

SEQ ID NO: 821218 - RNA, 19 nt, Artificial Sequence
  Description of Artificial Sequence: Synthetic oligonucleotide
  Sense strand starting at position 3683 of SEQ ID NO: 587825
auagacuuguccuuucuca

SEQ ID NO: 821219 - RNA, 19 nt, Artificial Sequence
  Description of Artificial Sequence: Synthetic oligonucleotide
  Antisense strand to SEQ ID NO: 821218
ugagaaaggacaagucuau

SEQ ID NO: 821220 - RNA, 19 nt, Artificial Sequence
  Description of Artificial Sequence: Synthetic oligonucleotide
  Sense strand starting at position 3691 of SEQ ID NO: 587825
guccuuucucauuaauguc

SEQ ID NO: 821221 - RNA, 19 nt, Artificial Sequence
  Description of Artificial Sequence: Synthetic oligonucleotide
  Antisense strand to SEQ ID NO: 821220
gacauuaaugagaaaggac

SEQ ID NO: 821222 - RNA, 19 nt, Artificial Sequence
  Description of Artificial Sequence: Synthetic oligonucleotide
  Sense strand starting at position 3713 of SEQ ID NO: 587825
acaacucuguuaguccaau

SEQ ID NO: 821223 - RNA, 19 nt, Artificial Sequence
  Description of Artificial Sequence: Synthetic oligonucleotide
  Antisense strand to SEQ ID NO: 821222
auuggacuaacagaguugu

SEQ ID NO: 821224 - RNA, 19 nt, Artificial Sequence
  Description of Artificial Sequence: Synthetic oligonucleotide
  Sense strand starting at position 3938 of SEQ ID NO: 587825
gugggucacaaaugaguca

SEQ ID NO: 821225 - RNA, 19 nt, Artificial Sequence
  Description of Artificial Sequence: Synthetic oligonucleotide
  Antisense strand to SEQ ID NO: 821224
ugacucauuugugacccac

SEQ ID NO: 821226 - RNA, 19 nt, Artificial Sequence
  Description of Artificial Sequence: Synthetic oligonucleotide
  Sense strand starting at position 74 of SEQ ID NO: 587826
gaauauaaggccuggagua

SEQ ID NO: 821227 - RNA, 19 nt, Artificial Sequence
  Description of Artificial Sequence: Synthetic oligonucleotide
  Antisense strand to SEQ ID NO: 821226
uacuccaggccuuauauuc

SEQ ID NO: 821228 - RNA, 19 nt, Artificial Sequence
  Description of Artificial Sequence: Synthetic oligonucleotide
  Sense strand starting at position 75 of SEQ ID NO: 587826
aauauaaggccuggaguaa

SEQ ID NO: 821229 - RNA, 19 nt, Artificial Sequence
  Description of Artificial Sequence: Synthetic oligonucleotide
  Antisense strand to SEQ ID NO: 821228
uuacuccaggccuuauauu

SEQ ID NO: 821230 - RNA, 19 nt, Artificial Sequence
  Description of Artificial Sequence: Synthetic oligonucleotide
  Sense strand starting at position 123 of SEQ ID NO: 587826
ucuggauuaugauagacaa

SEQ ID NO: 821231 - RNA, 19 nt, Artificial Sequence
  Description of Artificial Sequence: Synthetic oligonucleotide
  Antisense strand to SEQ ID NO: 821230
uugucuaucauaauccaga

SEQ ID NO: 821232 - RNA, 19 nt, Artificial Sequence
  Description of Artificial Sequence: Synthetic oligonucleotide
  Sense strand starting at position 149 of SEQ ID NO: 587826
aaacaagcucuagaagugu

SEQ ID NO: 821233 - RNA, 19 nt, Artificial Sequence
  Description of Artificial Sequence: Synthetic oligonucleotide
  Antisense strand to SEQ ID NO: 821232
acacuucuagagcuuguuu

SEQ ID NO: 821234 - RNA, 19 nt, Artificial Sequence
  Description of Artificial Sequence: Synthetic oligonucleotide
  Sense strand starting at position 274 of SEQ ID NO: 587826
aggaauuuaucugaugcug

SEQ ID NO: 821235 - RNA, 19 nt, Artificial Sequence
  Description of Artificial Sequence: Synthetic oligonucleotide
  Antisense strand to SEQ ID NO: 821234
cagcaucagauaaauuccu

SEQ ID NO: 821236 - RNA, 19 nt, Artificial Sequence
  Description of Artificial Sequence: Synthetic oligonucleotide
  Sense strand starting at position 276 of SEQ ID NO: 587826
gaauuuaucugaugcugga

SEQ ID NO: 821237 - RNA, 19 nt, Artificial Sequence
  Description of Artificial Sequence: Synthetic oligonucleotide
  Antisense strand to SEQ ID NO: 821236
uccagcaucagauaaauuc

SEQ ID NO: 821238 - RNA, 19 nt, Artificial Sequence
  Description of Artificial Sequence: Synthetic oligonucleotide
  Sense strand starting at position 370 of SEQ ID NO: 587826
uguuguaaucauggauguu

SEQ ID NO: 821239 - RNA, 19 nt, Artificial Sequence
  Description of Artificial Sequence: Synthetic oligonucleotide
  Antisense strand to SEQ ID NO: 821238
aacauccaugauuacaaca

SEQ ID NO: 821240 - RNA, 19 nt, Artificial Sequence
  Description of Artificial Sequence: Synthetic oligonucleotide
  Sense strand starting at position 371 of SEQ ID NO: 587826
guuguaaucauggauguua

SEQ ID NO: 821241 - RNA, 19 nt, Artificial Sequence
  Description of Artificial Sequence: Synthetic oligonucleotide
  Antisense strand to SEQ ID NO: 821240
uaacauccaugauuacaac

SEQ ID NO: 821242 - RNA, 19 nt, Artificial Sequence
  Description of Artificial Sequence: Synthetic oligonucleotide
  Sense strand starting at position 373 of SEQ ID NO: 587826
uguaaucauggauguuaac

SEQ ID NO: 821243 - RNA, 19 nt, Artificial Sequence
  Description of Artificial Sequence: Synthetic oligonucleotide
  Antisense strand to SEQ ID NO: 821242
guuaacauccaugauuaca

SEQ ID NO: 821244 - RNA, 19 nt, Artificial Sequence
  Description of Artificial Sequence: Synthetic oligonucleotide
  Sense strand starting at position 404 of SEQ ID NO: 587826
gaaugcugggccuaguuaa

SEQ ID NO: 821245 - RNA, 19 nt, Artificial Sequence
  Description of Artificial Sequence: Synthetic oligonucleotide
  Antisense strand to SEQ ID NO: 821244
uuaacuaggcccagcauuc

SEQ ID NO: 821246 - RNA, 19 nt, Artificial Sequence
  Description of Artificial Sequence: Synthetic oligonucleotide
  Sense strand starting at position 416 of SEQ ID NO: 587826
uaguuaaaucccuguagga

SEQ ID NO: 821247 - RNA, 19 nt, Artificial Sequence
  Description of Artificial Sequence: Synthetic oligonucleotide
  Antisense strand to SEQ ID NO: 821246
uccuacagggauuuaacua

SEQ ID NO: 821248 - RNA, 19 nt, Artificial Sequence
  Description of Artificial Sequence: Synthetic oligonucleotide
  Sense strand starting at position 497 of SEQ ID NO: 587826
guuguaauguucuucugaa

SEQ ID NO: 821249 - RNA, 19 nt, Artificial Sequence
  Description of Artificial Sequence: Synthetic oligonucleotide
  Antisense strand to SEQ ID NO: 821248
uucagaagaacauuacaac

SEQ ID NO: 821250 - RNA, 19 nt, Artificial Sequence
  Description of Artificial Sequence: Synthetic oligonucleotide
  Sense strand starting at position 498 of SEQ ID NO: 587826
uuguaauguucuucugaaa

SEQ ID NO: 821251 - RNA, 19 nt, Artificial Sequence
  Description of Artificial Sequence: Synthetic oligonucleotide
  Antisense strand to SEQ ID NO: 821250
uuucagaagaacauuacaa

SEQ ID NO: 821252 - RNA, 19 nt, Artificial Sequence
  Description of Artificial Sequence: Synthetic oligonucleotide
  Sense strand starting at position 645 of SEQ ID NO: 587826
acuuaaucuucccugugag

SEQ ID NO: 821253 - RNA, 19 nt, Artificial Sequence
  Description of Artificial Sequence: Synthetic oligonucleotide
  Antisense strand to SEQ ID NO: 821252
cucacagggaagauuaagu

SEQ ID NO: 821254 - RNA, 19 nt, Artificial Sequence
  Description of Artificial Sequence: Synthetic oligonucleotide
  Sense strand starting at position 646 of SEQ ID NO: 587826
cuuaaucuucccugugaga

SEQ ID NO: 821255 - RNA, 19 nt, Artificial Sequence
  Description of Artificial Sequence: Synthetic oligonucleotide
  Antisense strand to SEQ ID NO: 821254
ucucacagggaagauuaag

SEQ ID NO: 821256 - RNA, 19 nt, Artificial Sequence
  Description of Artificial Sequence: Synthetic oligonucleotide
  Sense strand starting at position 648 of SEQ ID NO: 587826
uaaucuucccugugagaga

SEQ ID NO: 821257 - RNA, 19 nt, Artificial Sequence
  Description of Artificial Sequence: Synthetic oligonucleotide
  Antisense strand to SEQ ID NO: 821256
ucucucacagggaagauua

SEQ ID NO: 821258 - RNA, 19 nt, Artificial Sequence
  Description of Artificial Sequence: Synthetic oligonucleotide
  Sense strand starting at position 787 of SEQ ID NO: 587826
agcagugcgguccaauaaa

SEQ ID NO: 821259 - RNA, 19 nt, Artificial Sequence
  Description of Artificial Sequence: Synthetic oligonucleotide
  Antisense strand to SEQ ID NO: 821258
uuuauuggaccgcacugcu

SEQ ID NO: 821260 - RNA, 19 nt, Artificial Sequence
  Description of Artificial Sequence: Synthetic oligonucleotide
  Sense strand starting at position 1189 of SEQ ID NO: 587826
gcguuuagaguuaggcagu

SEQ ID NO: 821261 - RNA, 19 nt, Artificial Sequence
  Description of Artificial Sequence: Synthetic oligonucleotide
  Antisense strand to SEQ ID NO: 821260
acugccuaacucuaaacgc

SEQ ID NO: 821262 - RNA, 19 nt, Artificial Sequence
  Description of Artificial Sequence: Synthetic oligonucleotide
  Sense strand starting at position 1192 of SEQ ID NO: 587826
uuuagaguuaggcagugau

SEQ ID NO: 821263 - RNA, 19 nt, Artificial Sequence
  Description of Artificial Sequence: Synthetic oligonucleotide
  Antisense strand to SEQ ID NO: 821262
aucacugccuaacucuaaa

SEQ ID NO: 821264 - RNA, 19 nt, Artificial Sequence
  Description of Artificial Sequence: Synthetic oligonucleotide
  Sense strand starting at position 1268 of SEQ ID NO: 587826
ggguaauggagagaugugu

SEQ ID NO: 821265 - RNA, 19 nt, Artificial Sequence
  Description of Artificial Sequence: Synthetic oligonucleotide
  Antisense strand to SEQ ID NO: 821264
acacaucucuccauuaccc

SEQ ID NO: 821266 - RNA, 19 nt, Artificial Sequence
  Description of Artificial Sequence: Synthetic oligonucleotide
  Sense strand starting at position 1277 of SEQ ID NO: 587826
agagauguguggaggaaug

SEQ ID NO: 821267 - RNA, 19 nt, Artificial Sequence
  Description of Artificial Sequence: Synthetic oligonucleotide
  Antisense strand to SEQ ID NO: 821266
cauuccuccacacaucucu

SEQ ID NO: 821268 - RNA, 19 nt, Artificial Sequence
  Description of Artificial Sequence: Synthetic oligonucleotide
  Sense strand starting at position 2257 of SEQ ID NO: 587826
gcgggugucggauugguua

SEQ ID NO: 821269 - RNA, 19 nt, Artificial Sequence
  Description of Artificial Sequence: Synthetic oligonucleotide
  Antisense strand to SEQ ID NO: 821268
uaaccaauccgacacccgc

SEQ ID NO: 821270 - RNA, 19 nt, Artificial Sequence
  Description of Artificial Sequence: Synthetic oligonucleotide
  Sense strand starting at position 2561 of SEQ ID NO: 587826
cccugucauaguggagcaa

SEQ ID NO: 821271 - RNA, 19 nt, Artificial Sequence
  Description of Artificial Sequence: Synthetic oligonucleotide
  Antisense strand to SEQ ID NO: 821270
uugcuccacuaugacaggg

SEQ ID NO: 821272 - RNA, 19 nt, Artificial Sequence
  Description of Artificial Sequence: Synthetic oligonucleotide
  Sense strand starting at position 2585 of SEQ ID NO: 587826
gguguuuaaccgcuguuau

SEQ ID NO: 821273 - RNA, 19 nt, Artificial Sequence
  Description of Artificial Sequence: Synthetic oligonucleotide
  Antisense strand to SEQ ID NO: 821272
auaacagcgguuaaacacc

SEQ ID NO: 821274 - RNA, 19 nt, Artificial Sequence
  Description of Artificial Sequence: Synthetic oligonucleotide
  Sense strand starting at position 2634 of SEQ ID NO: 587826
uuacuuccauaaguaugua

SEQ ID NO: 821275 - RNA, 19 nt, Artificial Sequence
  Description of Artificial Sequence: Synthetic oligonucleotide
  Antisense strand to SEQ ID NO: 821274
uacauacuuauggaaguaa

SEQ ID NO: 821276 - RNA, 19 nt, Artificial Sequence
  Description of Artificial Sequence: Synthetic oligonucleotide
  Sense strand starting at position 2642 of SEQ ID NO: 587826
auaaguauguaugugcaga

SEQ ID NO: 821277 - RNA, 19 nt, Artificial Sequence
  Description of Artificial Sequence: Synthetic oligonucleotide
  Antisense strand to SEQ ID NO: 821276
ucugcacauacauacuuau

SEQ ID NO: 821278 - RNA, 19 nt, Artificial Sequence
  Description of Artificial Sequence: Synthetic oligonucleotide
  Sense strand starting at position 2644 of SEQ ID NO: 587826
aaguauguaugugcagaga

SEQ ID NO: 821279 - RNA, 19 nt, Artificial Sequence
  Description of Artificial Sequence: Synthetic oligonucleotide
  Antisense strand to SEQ ID NO: 821278
ucucugcacauacauacuu

SEQ ID NO: 821280 - RNA, 19 nt, Artificial Sequence
  Description of Artificial Sequence: Synthetic oligonucleotide
  Sense strand starting at position 2647 of SEQ ID NO: 587826
uauguaugugcagagauug

SEQ ID NO: 821281 - RNA, 19 nt, Artificial Sequence
  Description of Artificial Sequence: Synthetic oligonucleotide
  Antisense strand to SEQ ID NO: 821280
caaucucugcacauacaua

SEQ ID NO: 821282 - RNA, 19 nt, Artificial Sequence
  Description of Artificial Sequence: Synthetic oligonucleotide
  Sense strand starting at position 2727 of SEQ ID NO: 587826
uuauaaaucugggaggaau

SEQ ID NO: 821283 - RNA, 19 nt, Artificial Sequence
  Description of Artificial Sequence: Synthetic oligonucleotide
  Antisense strand to SEQ ID NO: 821282
auuccucccagauuuauaa

SEQ ID NO: 821284 - RNA, 19 nt, Artificial Sequence
  Description of Artificial Sequence: Synthetic oligonucleotide
  Sense strand starting at position 2739 of SEQ ID NO: 587826
gaggaaugcagucaguguu

SEQ ID NO: 821285 - RNA, 19 nt, Artificial Sequence
  Description of Artificial Sequence: Synthetic oligonucleotide
  Antisense strand to SEQ ID NO: 821284
aacacugacugcauuccuc

SEQ ID NO: 821286 - RNA, 19 nt, Artificial Sequence
  Description of Artificial Sequence: Synthetic oligonucleotide
  Sense strand starting at position 2965 of SEQ ID NO: 587826
uuugcauuaccugaaauga

SEQ ID NO: 821287 - RNA, 19 nt, Artificial Sequence
  Description of Artificial Sequence: Synthetic oligonucleotide
  Antisense strand to SEQ ID NO: 821286
ucauuucagguaaugcaaa

SEQ ID NO: 821288 - RNA, 19 nt, Artificial Sequence
  Description of Artificial Sequence: Synthetic oligonucleotide
  Sense strand starting at position 3004 of SEQ ID NO: 587826
acaguagugggagguugua

SEQ ID NO: 821289 - RNA, 19 nt, Artificial Sequence
  Description of Artificial Sequence: Synthetic oligonucleotide
  Antisense strand to SEQ ID NO: 821288
uacaaccucccacuacugu

SEQ ID NO: 821290 - RNA, 19 nt, Artificial Sequence
  Description of Artificial Sequence: Synthetic oligonucleotide
  Sense strand starting at position 3013 of SEQ ID NO: 587826
ggagguuguaaacaauagu

SEQ ID NO: 821291 - RNA, 19 nt, Artificial Sequence
  Description of Artificial Sequence: Synthetic oligonucleotide
  Antisense strand to SEQ ID NO: 821290
acuauuguuuacaaccucc

SEQ ID NO: 821292 - RNA, 19 nt, Artificial Sequence
  Description of Artificial Sequence: Synthetic oligonucleotide
  Sense strand starting at position 3016 of SEQ ID NO: 587826
gguuguaaacaauaguaug

SEQ ID NO: 821293 - RNA, 19 nt, Artificial Sequence
  Description of Artificial Sequence: Synthetic oligonucleotide
  Antisense strand to SEQ ID NO: 821292
cauacuauuguuuacaacc

SEQ ID NO: 821294 - RNA, 19 nt, Artificial Sequence
  Description of Artificial Sequence: Synthetic oligonucleotide
  Sense strand starting at position 3073 of SEQ ID NO: 587826
cuaaacauauggucugaua

SEQ ID NO: 821295 - RNA, 19 nt, Artificial Sequence
  Description of Artificial Sequence: Synthetic oligonucleotide
  Antisense strand to SEQ ID NO: 821294
uaucagaccauauguuuag

SEQ ID NO: 821296 - RNA, 19 nt, Artificial Sequence
  Description of Artificial Sequence: Synthetic oligonucleotide
  Sense strand starting at position 3086 of SEQ ID NO: 587826
cugauacucugugcuuuau

SEQ ID NO: 821297 - RNA, 19 nt, Artificial Sequence
  Description of Artificial Sequence: Synthetic oligonucleotide
  Antisense strand to SEQ ID NO: 821296
auaaagcacagaguaucag

SEQ ID NO: 821298 - RNA, 19 nt, Artificial Sequence
  Description of Artificial Sequence: Synthetic oligonucleotide
  Sense strand starting at position 3097 of SEQ ID NO: 587826
ugcuuuauugcuuaauaag

SEQ ID NO: 821299 - RNA, 19 nt, Artificial Sequence
  Description of Artificial Sequence: Synthetic oligonucleotide
  Antisense strand to SEQ ID NO: 821298
cuuauuaagcaauaaagca

SEQ ID NO: 821300 - RNA, 19 nt, Artificial Sequence
  Description of Artificial Sequence: Synthetic oligonucleotide
  Sense strand starting at position 3591 of SEQ ID NO: 587826
ugaggcagucuuuauagga

SEQ ID NO: 821301 - RNA, 19 nt, Artificial Sequence
  Description of Artificial Sequence: Synthetic oligonucleotide
  Antisense strand to SEQ ID NO: 821300
uccuauaaagacugccuca

SEQ ID NO: 821302 - RNA, 19 nt, Artificial Sequence
  Description of Artificial Sequence: Synthetic oligonucleotide
  Sense strand starting at position 3898 of SEQ ID NO: 587826
agaggccugacauguuuau

SEQ ID NO: 821303 - RNA, 19 nt, Artificial Sequence
  Description of Artificial Sequence: Synthetic oligonucleotide
  Antisense strand to SEQ ID NO: 821302
auaaacaugucaggccucu

SEQ ID NO: 821304 - RNA, 19 nt, Artificial Sequence
  Description of Artificial Sequence: Synthetic oligonucleotide
  Sense strand starting at position 3905 of SEQ ID NO: 587826
ugacauguuuauccaguca

SEQ ID NO: 821305 - RNA, 19 nt, Artificial Sequence
  Description of Artificial Sequence: Synthetic oligonucleotide
  Antisense strand to SEQ ID NO: 821304
ugacuggauaaacauguca

SEQ ID NO: 821306 - RNA, 19 nt, Artificial Sequence
  Description of Artificial Sequence: Synthetic oligonucleotide
  Sense strand starting at position 245 of SEQ ID NO: 587827
gagagauaaccugguaagu

SEQ ID NO: 821307 - RNA, 19 nt, Artificial Sequence
  Description of Artificial Sequence: Synthetic oligonucleotide
  Antisense strand to SEQ ID NO: 821306
acuuaccagguuaucucuc

SEQ ID NO: 821308 - RNA, 19 nt, Artificial Sequence
  Description of Artificial Sequence: Synthetic oligonucleotide
  Sense strand starting at position 307 of SEQ ID NO: 587827
uugaaaguuccuggguuuc

SEQ ID NO: 821309 - RNA, 19 nt, Artificial Sequence
  Description of Artificial Sequence: Synthetic oligonucleotide
  Antisense strand to SEQ ID NO: 821308
gaaacccaggaacuuucaa

SEQ ID NO: 821310 - RNA, 19 nt, Artificial Sequence
  Description of Artificial Sequence: Synthetic oligonucleotide
  Sense strand starting at position 318 of SEQ ID NO: 587827
uggguuucccauuaccuau

SEQ ID NO: 821311 - RNA, 19 nt, Artificial Sequence
  Description of Artificial Sequence: Synthetic oligonucleotide
  Antisense strand to SEQ ID NO: 821310
auagguaaugggaaaccca

SEQ ID NO: 821312 - RNA, 19 nt, Artificial Sequence
  Description of Artificial Sequence: Synthetic oligonucleotide
  Sense strand starting at position 494 of SEQ ID NO: 587827
aagcguaucuuauugagaa

SEQ ID NO: 821313 - RNA, 19 nt, Artificial Sequence
  Description of Artificial Sequence: Synthetic oligonucleotide
  Antisense strand to SEQ ID NO: 821312
uucucaauaagauacgcuu

SEQ ID NO: 821314 - RNA, 19 nt, Artificial Sequence
  Description of Artificial Sequence: Synthetic oligonucleotide
  Sense strand starting at position 525 of SEQ ID NO: 587827
uggagucgccgcucaucua

SEQ ID NO: 821315 - RNA, 19 nt, Artificial Sequence
  Description of Artificial Sequence: Synthetic oligonucleotide
  Antisense strand to SEQ ID NO: 821314
uagaugagcggcgacucca

SEQ ID NO: 821316 - RNA, 19 nt, Artificial Sequence
  Description of Artificial Sequence: Synthetic oligonucleotide
  Sense strand starting at position 597 of SEQ ID NO: 587827
uuugcaaaugcauggauau

SEQ ID NO: 821317 - RNA, 19 nt, Artificial Sequence
  Description of Artificial Sequence: Synthetic oligonucleotide
  Antisense strand to SEQ ID NO: 821316
auauccaugcauuugcaaa

SEQ ID NO: 821318 - RNA, 19 nt, Artificial Sequence
  Description of Artificial Sequence: Synthetic oligonucleotide
  Sense strand starting at position 598 of SEQ ID NO: 587827
uugcaaaugcauggauauu

SEQ ID NO: 821319 - RNA, 19 nt, Artificial Sequence
  Description of Artificial Sequence: Synthetic oligonucleotide
  Antisense strand to SEQ ID NO: 821318
aauauccaugcauuugcaa

SEQ ID NO: 821320 - RNA, 19 nt, Artificial Sequence
  Description of Artificial Sequence: Synthetic oligonucleotide
  Sense strand starting at position 615 of SEQ ID NO: 587827
uugcaaauuguaugaagua

SEQ ID NO: 821321 - RNA, 19 nt, Artificial Sequence
  Description of Artificial Sequence: Synthetic oligonucleotide
  Antisense strand to SEQ ID NO: 821320
uacuucauacaauuugcaa

SEQ ID NO: 821322 - RNA, 19 nt, Artificial Sequence
  Description of Artificial Sequence: Synthetic oligonucleotide
  Sense strand starting at position 1168 of SEQ ID NO: 587827
ccacgagcagucuaauaga

SEQ ID NO: 821323 - RNA, 19 nt, Artificial Sequence
  Description of Artificial Sequence: Synthetic oligonucleotide
  Antisense strand to SEQ ID NO: 821322
ucuauuagacugcucgugg

SEQ ID NO: 821324 - RNA, 19 nt, Artificial Sequence
  Description of Artificial Sequence: Synthetic oligonucleotide
  Sense strand starting at position 1227 of SEQ ID NO: 587827
ugacguuaugcagauacaa

SEQ ID NO: 821325 - RNA, 19 nt, Artificial Sequence
  Description of Artificial Sequence: Synthetic oligonucleotide
  Antisense strand to SEQ ID NO: 821324
uuguaucugcauaacguca

SEQ ID NO: 821326 - RNA, 19 nt, Artificial Sequence
  Description of Artificial Sequence: Synthetic oligonucleotide
  Sense strand starting at position 1292 of SEQ ID NO: 587827
ugaaaucucugcuucugag

SEQ ID NO: 821327 - RNA, 19 nt, Artificial Sequence
  Description of Artificial Sequence: Synthetic oligonucleotide
  Antisense strand to SEQ ID NO: 821326
cucagaagcagagauuuca

SEQ ID NO: 821328 - RNA, 19 nt, Artificial Sequence
  Description of Artificial Sequence: Synthetic oligonucleotide
  Sense strand starting at position 1304 of SEQ ID NO: 587827
uucugagucguagaacuuu

SEQ ID NO: 821329 - RNA, 19 nt, Artificial Sequence
  Description of Artificial Sequence: Synthetic oligonucleotide
  Antisense strand to SEQ ID NO: 821328
aaaguucuacgacucagaa

SEQ ID NO: 821330 - RNA, 19 nt, Artificial Sequence
  Description of Artificial Sequence: Synthetic oligonucleotide
  Sense strand starting at position 1363 of SEQ ID NO: 587827
gccucaagcgcuguuguau

SEQ ID NO: 821331 - RNA, 19 nt, Artificial Sequence
  Description of Artificial Sequence: Synthetic oligonucleotide
  Antisense strand to SEQ ID NO: 821330
auacaacagcgcuugaggc

SEQ ID NO: 821332 - RNA, 19 nt, Artificial Sequence
  Description of Artificial Sequence: Synthetic oligonucleotide
  Sense strand starting at position 2032 of SEQ ID NO: 587827
cccgauugggugggacuua

SEQ ID NO: 821333 - RNA, 19 nt, Artificial Sequence
  Description of Artificial Sequence: Synthetic oligonucleotide
  Antisense strand to SEQ ID NO: 821332
uaagucccacccaaucggg

SEQ ID NO: 821334 - RNA, 19 nt, Artificial Sequence
  Description of Artificial Sequence: Synthetic oligonucleotide
  Sense strand starting at position 2041 of SEQ ID NO: 587827
gugggacuuaauggacuuu

SEQ ID NO: 821335 - RNA, 19 nt, Artificial Sequence
  Description of Artificial Sequence: Synthetic oligonucleotide
  Antisense strand to SEQ ID NO: 821334
aaaguccauuaagucccac

SEQ ID NO: 821336 - RNA, 19 nt, Artificial Sequence
  Description of Artificial Sequence: Synthetic oligonucleotide
  Sense strand starting at position 2148 of SEQ ID NO: 587827
augguuugggcacaaggau

SEQ ID NO: 821337 - RNA, 19 nt, Artificial Sequence
  Description of Artificial Sequence: Synthetic oligonucleotide
  Antisense strand to SEQ ID NO: 821336
auccuugugcccaaaccau

SEQ ID NO: 821338 - RNA, 19 nt, Artificial Sequence
  Description of Artificial Sequence: Synthetic oligonucleotide
  Sense strand starting at position 2162 of SEQ ID NO: 587827
aggauucgucgccagaaua

SEQ ID NO: 821339 - RNA, 19 nt, Artificial Sequence
  Description of Artificial Sequence: Synthetic oligonucleotide
  Antisense strand to SEQ ID NO: 821338
uauucuggcgacgaauccu

SEQ ID NO: 821340 - RNA, 19 nt, Artificial Sequence
  Description of Artificial Sequence: Synthetic oligonucleotide
  Sense strand starting at position 2182 of SEQ ID NO: 587827
aacugaaagcucggaaaua

SEQ ID NO: 821341 - RNA, 19 nt, Artificial Sequence
  Description of Artificial Sequence: Synthetic oligonucleotide
  Antisense strand to SEQ ID NO: 821340
uauuuccgagcuuucaguu

SEQ ID NO: 821342 - RNA, 19 nt, Artificial Sequence
  Description of Artificial Sequence: Synthetic oligonucleotide
  Sense strand starting at position 2193 of SEQ ID NO: 587827
cggaaauagacccgagaau

SEQ ID NO: 821343 - RNA, 19 nt, Artificial Sequence
  Description of Artificial Sequence: Synthetic oligonucleotide
  Antisense strand to SEQ ID NO: 821342
auucucgggucuauuuccg

SEQ ID NO: 821344 - RNA, 19 nt, Artificial Sequence
  Description of Artificial Sequence: Synthetic oligonucleotide
  Sense strand starting at position 2205 of SEQ ID NO: 587827
cgagaauacaaguaugcca

SEQ ID NO: 821345 - RNA, 19 nt, Artificial Sequence
  Description of Artificial Sequence: Synthetic oligonucleotide
  Antisense strand to SEQ ID NO: 821344
uggcauacuuguauucucg

SEQ ID NO: 821346 - RNA, 19 nt, Artificial Sequence
  Description of Artificial Sequence: Synthetic oligonucleotide
  Sense strand starting at position 2267 of SEQ ID NO: 587827
gauugaaucuugguacuag

SEQ ID NO: 821347 - RNA, 19 nt, Artificial Sequence
  Description of Artificial Sequence: Synthetic oligonucleotide
  Antisense strand to SEQ ID NO: 821346
cuaguaccaagauucaauc

SEQ ID NO: 821348 - RNA, 19 nt, Artificial Sequence
  Description of Artificial Sequence: Synthetic oligonucleotide
  Sense strand starting at position 2315 of SEQ ID NO: 587827
agaauuauguugcccaaca

SEQ ID NO: 821349 - RNA, 19 nt, Artificial Sequence
  Description of Artificial Sequence: Synthetic oligonucleotide
  Antisense strand to SEQ ID NO: 821348
uguugggcaacauaauucu

SEQ ID NO: 821350 - RNA, 19 nt, Artificial Sequence
  Description of Artificial Sequence: Synthetic oligonucleotide
  Sense strand starting at position 2341 of SEQ ID NO: 587827
gggaaagucucagucucuu

SEQ ID NO: 821351 - RNA, 19 nt, Artificial Sequence
  Description of Artificial Sequence: Synthetic oligonucleotide
  Antisense strand to SEQ ID NO: 821350
aagagacugagacuuuccc

SEQ ID NO: 821352 - RNA, 19 nt, Artificial Sequence
  Description of Artificial Sequence: Synthetic oligonucleotide
  Sense strand starting at position 2467 of SEQ ID NO: 587827
ggauacugaugcccuugaa

SEQ ID NO: 821353 - RNA, 19 nt, Artificial Sequence
  Description of Artificial Sequence: Synthetic oligonucleotide
  Antisense strand to SEQ ID NO: 821352
uucaagggcaucaguaucc

SEQ ID NO: 821354 - RNA, 19 nt, Artificial Sequence
  Description of Artificial Sequence: Synthetic oligonucleotide
  Sense strand starting at position 2562 of SEQ ID NO: 587827
uacuuacucgagcaaagua

SEQ ID NO: 821355 - RNA, 19 nt, Artificial Sequence
  Description of Artificial Sequence: Synthetic oligonucleotide
  Antisense strand to SEQ ID NO: 821354
uacuuugcucgaguaagua

SEQ ID NO: 821356 - RNA, 19 nt, Artificial Sequence
  Description of Artificial Sequence: Synthetic oligonucleotide
  Sense strand starting at position 2779 of SEQ ID NO: 587827
guugcauuucuaugguacu

SEQ ID NO: 821357 - RNA, 19 nt, Artificial Sequence
  Description of Artificial Sequence: Synthetic oligonucleotide
  Antisense strand to SEQ ID NO: 821356
aguaccauagaaaugcaac

SEQ ID NO: 821358 - RNA, 19 nt, Artificial Sequence
  Description of Artificial Sequence: Synthetic oligonucleotide
  Sense strand starting at position 2813 of SEQ ID NO: 587827
ggaauuaauacauagucgu

SEQ ID NO: 821359 - RNA, 19 nt, Artificial Sequence
  Description of Artificial Sequence: Synthetic oligonucleotide
  Antisense strand to SEQ ID NO: 821358
acgacuauguauuaauucc

SEQ ID NO: 821360 - RNA, 19 nt, Artificial Sequence
  Description of Artificial Sequence: Synthetic oligonucleotide
  Sense strand starting at position 2840 of SEQ ID NO: 587827
uccgaacuaccuugugaag

SEQ ID NO: 821361 - RNA, 19 nt, Artificial Sequence
  Description of Artificial Sequence: Synthetic oligonucleotide
  Antisense strand to SEQ ID NO: 821360
cuucacaagguaguucgga

SEQ ID NO: 821362 - RNA, 19 nt, Artificial Sequence
  Description of Artificial Sequence: Synthetic oligonucleotide
  Sense strand starting at position 2865 of SEQ ID NO: 587827
guaucccagguuuacaaau

SEQ ID NO: 821363 - RNA, 19 nt, Artificial Sequence
  Description of Artificial Sequence: Synthetic oligonucleotide
  Antisense strand to SEQ ID NO: 821362
auuuguaaaccugggauac

SEQ ID NO: 821364 - RNA, 19 nt, Artificial Sequence
  Description of Artificial Sequence: Synthetic oligonucleotide
  Sense strand starting at position 2940 of SEQ ID NO: 587827
aggaauccaugucuuucua

SEQ ID NO: 821365 - RNA, 19 nt, Artificial Sequence
  Description of Artificial Sequence: Synthetic oligonucleotide
  Antisense strand to SEQ ID NO: 821364
uagaaagacauggauuccu

SEQ ID NO: 821366 - RNA, 19 nt, Artificial Sequence
  Description of Artificial Sequence: Synthetic oligonucleotide
  Sense strand starting at position 3032 of SEQ ID NO: 587827
aggauuaugucuuuaaagu

SEQ ID NO: 821367 - RNA, 19 nt, Artificial Sequence
  Description of Artificial Sequence: Synthetic oligonucleotide
  Antisense strand to SEQ ID NO: 821366
acuuuaaagacauaauccu

SEQ ID NO: 821368 - RNA, 19 nt, Artificial Sequence
  Description of Artificial Sequence: Synthetic oligonucleotide
  Sense strand starting at position 3033 of SEQ ID NO: 587827
ggauuaugucuuuaaaguc

SEQ ID NO: 821369 - RNA, 19 nt, Artificial Sequence
  Description of Artificial Sequence: Synthetic oligonucleotide
  Antisense strand to SEQ ID NO: 821368
gacuuuaaagacauaaucc

SEQ ID NO: 821370 - RNA, 19 nt, Artificial Sequence
  Description of Artificial Sequence: Synthetic oligonucleotide
  Sense strand starting at position 3040 of SEQ ID NO: 587827
gucuuuaaagucuaucuuu

SEQ ID NO: 821371 - RNA, 19 nt, Artificial Sequence
  Description of Artificial Sequence: Synthetic oligonucleotide
  Antisense strand to SEQ ID NO: 821370
aaagauagacuuuaaagac

SEQ ID NO: 821372 - RNA, 19 nt, Artificial Sequence
  Description of Artificial Sequence: Synthetic oligonucleotide
  Sense strand starting at position 3214 of SEQ ID NO: 587827
uucugauaucucugcuaga

SEQ ID NO: 821373 - RNA, 19 nt, Artificial Sequence
  Description of Artificial Sequence: Synthetic oligonucleotide
  Antisense strand to SEQ ID NO: 821372
ucuagcagagauaucagaa

SEQ ID NO: 821374 - RNA, 19 nt, Artificial Sequence
  Description of Artificial Sequence: Synthetic oligonucleotide
  Sense strand starting at position 3215 of SEQ ID NO: 587827
ucugauaucucugcuagag

SEQ ID NO: 821375 - RNA, 19 nt, Artificial Sequence
  Description of Artificial Sequence: Synthetic oligonucleotide
  Antisense strand to SEQ ID NO: 821374
cucuagcagagauaucaga

SEQ ID NO: 821376 - RNA, 19 nt, Artificial Sequence
  Description of Artificial Sequence: Synthetic oligonucleotide
  Sense strand starting at position 3219 of SEQ ID NO: 587827
auaucucugcuagagugaa

SEQ ID NO: 821377 - RNA, 19 nt, Artificial Sequence
  Description of Artificial Sequence: Synthetic oligonucleotide
  Antisense strand to SEQ ID NO: 821376
uucacucuagcagagauau

SEQ ID NO: 821378 - RNA, 19 nt, Artificial Sequence
  Description of Artificial Sequence: Synthetic oligonucleotide
  Sense strand starting at position 3482 of SEQ ID NO: 587827
uuagucccaguuuaauuau

SEQ ID NO: 821379 - RNA, 19 nt, Artificial Sequence
  Description of Artificial Sequence: Synthetic oligonucleotide
  Antisense strand to SEQ ID NO: 821378
auaauuaaacugggacuaa

SEQ ID NO: 821380 - RNA, 19 nt, Artificial Sequence
  Description of Artificial Sequence: Synthetic oligonucleotide
  Sense strand starting at position 3485 of SEQ ID NO: 587827
gucccaguuuaauuaucaa

SEQ ID NO: 821381 - RNA, 19 nt, Artificial Sequence
  Description of Artificial Sequence: Synthetic oligonucleotide
  Antisense strand to SEQ ID NO: 821380
uugauaauuaaacugggac

SEQ ID NO: 821382 - RNA, 19 nt, Artificial Sequence
  Description of Artificial Sequence: Synthetic oligonucleotide
  Sense strand starting at position 3628 of SEQ ID NO: 587827
ugcauuuguuauguuucua

SEQ ID NO: 821383 - RNA, 19 nt, Artificial Sequence
  Description of Artificial Sequence: Synthetic oligonucleotide
  Antisense strand to SEQ ID NO: 821382
uagaaacauaacaaaugca

SEQ ID NO: 821384 - RNA, 19 nt, Artificial Sequence
  Description of Artificial Sequence: Synthetic oligonucleotide
  Sense strand starting at position 3807 of SEQ ID NO: 587827
agccuuggccaauaucuga

SEQ ID NO: 821385 - RNA, 19 nt, Artificial Sequence
  Description of Artificial Sequence: Synthetic oligonucleotide
  Antisense strand to SEQ ID NO: 821384
ucagauauuggccaaggcu

SEQ ID NO: 821386 - RNA, 19 nt, Artificial Sequence
  Description of Artificial Sequence: Synthetic oligonucleotide
  Sense strand starting at position 8 of SEQ ID NO: 587828
acgggaaucuuucccagau

SEQ ID NO: 821387 - RNA, 19 nt, Artificial Sequence
  Description of Artificial Sequence: Synthetic oligonucleotide
  Antisense strand to SEQ ID NO: 821386
aucugggaaagauucccgu

SEQ ID NO: 821388 - RNA, 19 nt, Artificial Sequence
  Description of Artificial Sequence: Synthetic oligonucleotide
  Sense strand starting at position 9 of SEQ ID NO: 587828
cgggaaucuuucccagaug

SEQ ID NO: 821389 - RNA, 19 nt, Artificial Sequence
  Description of Artificial Sequence: Synthetic oligonucleotide
  Antisense strand to SEQ ID NO: 821388
caucugggaaagauucccg

SEQ ID NO: 821390 - RNA, 19 nt, Artificial Sequence
  Description of Artificial Sequence: Synthetic oligonucleotide
  Sense strand starting at position 164 of SEQ ID NO: 587828
ggguauacaugcuacccaa

SEQ ID NO: 821391 - RNA, 19 nt, Artificial Sequence
  Description of Artificial Sequence: Synthetic oligonucleotide
  Antisense strand to SEQ ID NO: 821390
uuggguagcauguauaccc

SEQ ID NO: 821392 - RNA, 19 nt, Artificial Sequence
  Description of Artificial Sequence: Synthetic oligonucleotide
  Sense strand starting at position 230 of SEQ ID NO: 587828
gcaggagucuacucuaaag

SEQ ID NO: 821393 - RNA, 19 nt, Artificial Sequence
  Description of Artificial Sequence: Synthetic oligonucleotide
  Antisense strand to SEQ ID NO: 821392
cuuuagaguagacuccugc

SEQ ID NO: 821394 - RNA, 19 nt, Artificial Sequence
  Description of Artificial Sequence: Synthetic oligonucleotide
  Sense strand starting at position 278 of SEQ ID NO: 587828
gcuugccauacugagagau

SEQ ID NO: 821395 - RNA, 19 nt, Artificial Sequence
  Description of Artificial Sequence: Synthetic oligonucleotide
  Antisense strand to SEQ ID NO: 821394
aucucucaguauggcaagc

SEQ ID NO: 821396 - RNA, 19 nt, Artificial Sequence
  Description of Artificial Sequence: Synthetic oligonucleotide
  Sense strand starting at position 280 of SEQ ID NO: 587828
uugccauacugagagauaa

SEQ ID NO: 821397 - RNA, 19 nt, Artificial Sequence
  Description of Artificial Sequence: Synthetic oligonucleotide
  Antisense strand to SEQ ID NO: 821396
uuaucucucaguauggcaa

SEQ ID NO: 821398 - RNA, 19 nt, Artificial Sequence
  Description of Artificial Sequence: Synthetic oligonucleotide
  Sense strand starting at position 400 of SEQ ID NO: 587828
ggcgauuaguauccaaggu

SEQ ID NO: 821399 - RNA, 19 nt, Artificial Sequence
  Description of Artificial Sequence: Synthetic oligonucleotide
  Antisense strand to SEQ ID NO: 821398
accuuggauacuaaucgcc

SEQ ID NO: 821400 - RNA, 19 nt, Artificial Sequence
  Description of Artificial Sequence: Synthetic oligonucleotide
  Sense strand starting at position 401 of SEQ ID NO: 587828
gcgauuaguauccaagguu

SEQ ID NO: 821401 - RNA, 19 nt, Artificial Sequence
  Description of Artificial Sequence: Synthetic oligonucleotide
  Antisense strand to SEQ ID NO: 821400
aaccuuggauacuaaucgc

SEQ ID NO: 821402 - RNA, 19 nt, Artificial Sequence
  Description of Artificial Sequence: Synthetic oligonucleotide
  Sense strand starting at position 452 of SEQ ID NO: 587828
cagguagcucgcugaggaa

SEQ ID NO: 821403 - RNA, 19 nt, Artificial Sequence
  Description of Artificial Sequence: Synthetic oligonucleotide
  Antisense strand to SEQ ID NO: 821402
uuccucagcgagcuaccug

SEQ ID NO: 821404 - RNA, 19 nt, Artificial Sequence
  Description of Artificial Sequence: Synthetic oligonucleotide
  Sense strand starting at position 526 of SEQ ID NO: 587828
ugaacuaacuuagaagcau

SEQ ID NO: 821405 - RNA, 19 nt, Artificial Sequence
  Description of Artificial Sequence: Synthetic oligonucleotide
  Antisense strand to SEQ ID NO: 821404
augcuucuaaguuaguuca

SEQ ID NO: 821406 - RNA, 19 nt, Artificial Sequence
  Description of Artificial Sequence: Synthetic oligonucleotide
  Sense strand starting at position 631 of SEQ ID NO: 587828
cuggccuuguggccagaaa

SEQ ID NO: 821407 - RNA, 19 nt, Artificial Sequence
  Description of Artificial Sequence: Synthetic oligonucleotide
  Antisense strand to SEQ ID NO: 821406
uuucuggccacaaggccag

SEQ ID NO: 821408 - RNA, 19 nt, Artificial Sequence
  Description of Artificial Sequence: Synthetic oligonucleotide
  Sense strand starting at position 699 of SEQ ID NO: 587828
agcucucugcgaggguuua

SEQ ID NO: 821409 - RNA, 19 nt, Artificial Sequence
  Description of Artificial Sequence: Synthetic oligonucleotide
  Antisense strand to SEQ ID NO: 821408
uaaacccucgcagagagcu

SEQ ID NO: 821410 - RNA, 19 nt, Artificial Sequence
  Description of Artificial Sequence: Synthetic oligonucleotide
  Sense strand starting at position 700 of SEQ ID NO: 587828
gcucucugcgaggguuuau

SEQ ID NO: 821411 - RNA, 19 nt, Artificial Sequence
  Description of Artificial Sequence: Synthetic oligonucleotide
  Antisense strand to SEQ ID NO: 821410
auaaacccucgcagagagc

SEQ ID NO: 821412 - RNA, 19 nt, Artificial Sequence
  Description of Artificial Sequence: Synthetic oligonucleotide
  Sense strand starting at position 1182 of SEQ ID NO: 587828
uugagcucccucuaggaga

SEQ ID NO: 821413 - RNA, 19 nt, Artificial Sequence
  Description of Artificial Sequence: Synthetic oligonucleotide
  Antisense strand to SEQ ID NO: 821412
ucuccuagagggagcucaa

SEQ ID NO: 821414 - RNA, 19 nt, Artificial Sequence
  Description of Artificial Sequence: Synthetic oligonucleotide
  Sense strand starting at position 1460 of SEQ ID NO: 587828
ggagaaacuugguucccga

SEQ ID NO: 821415 - RNA, 19 nt, Artificial Sequence
  Description of Artificial Sequence: Synthetic oligonucleotide
  Antisense strand to SEQ ID NO: 821414
ucgggaaccaaguuucucc

SEQ ID NO: 821416 - RNA, 19 nt, Artificial Sequence
  Description of Artificial Sequence: Synthetic oligonucleotide
  Sense strand starting at position 1581 of SEQ ID NO: 587828
cuggaaugggugcaucaau

SEQ ID NO: 821417 - RNA, 19 nt, Artificial Sequence
  Description of Artificial Sequence: Synthetic oligonucleotide
  Antisense strand to SEQ ID NO: 821416
auugaugcacccauuccag

SEQ ID NO: 821418 - RNA, 19 nt, Artificial Sequence
  Description of Artificial Sequence: Synthetic oligonucleotide
  Sense strand starting at position 2205 of SEQ ID NO: 587828
aaacuucggucugcagaga

SEQ ID NO: 821419 - RNA, 19 nt, Artificial Sequence
  Description of Artificial Sequence: Synthetic oligonucleotide
  Antisense strand to SEQ ID NO: 821418
ucucugcagaccgaaguuu

SEQ ID NO: 821420 - RNA, 19 nt, Artificial Sequence
  Description of Artificial Sequence: Synthetic oligonucleotide
  Sense strand starting at position 2317 of SEQ ID NO: 587828
gccuacagaucuguuauuu

SEQ ID NO: 821421 - RNA, 19 nt, Artificial Sequence
  Description of Artificial Sequence: Synthetic oligonucleotide
  Antisense strand to SEQ ID NO: 821420
aaauaacagaucuguaggc

SEQ ID NO: 821422 - RNA, 19 nt, Artificial Sequence
  Description of Artificial Sequence: Synthetic oligonucleotide
  Sense strand starting at position 2355 of SEQ ID NO: 587828
ggcagagucugccucuauc

SEQ ID NO: 821423 - RNA, 19 nt, Artificial Sequence
  Description of Artificial Sequence: Synthetic oligonucleotide
  Antisense strand to SEQ ID NO: 821422
gauagaggcagacucugcc

SEQ ID NO: 821424 - RNA, 19 nt, Artificial Sequence
  Description of Artificial Sequence: Synthetic oligonucleotide
  Sense strand starting at position 2974 of SEQ ID NO: 587828
uggccauucugauucuagu

SEQ ID NO: 821425 - RNA, 19 nt, Artificial Sequence
  Description of Artificial Sequence: Synthetic oligonucleotide
  Antisense strand to SEQ ID NO: 821424
acuagaaucagaauggcca

SEQ ID NO: 821426 - RNA, 19 nt, Artificial Sequence
  Description of Artificial Sequence: Synthetic oligonucleotide
  Sense strand starting at position 2980 of SEQ ID NO: 587828
uucugauucuagucuauag

SEQ ID NO: 821427 - RNA, 19 nt, Artificial Sequence
  Description of Artificial Sequence: Synthetic oligonucleotide
  Antisense strand to SEQ ID NO: 821426
cuauagacuagaaucagaa

SEQ ID NO: 821428 - RNA, 19 nt, Artificial Sequence
  Description of Artificial Sequence: Synthetic oligonucleotide
  Sense strand starting at position 3023 of SEQ ID NO: 587828
ucacuccuauguuugagau

SEQ ID NO: 821429 - RNA, 19 nt, Artificial Sequence
  Description of Artificial Sequence: Synthetic oligonucleotide
  Antisense strand to SEQ ID NO: 821428
aucucaaacauaggaguga

SEQ ID NO: 821430 - RNA, 19 nt, Artificial Sequence
  Description of Artificial Sequence: Synthetic oligonucleotide
  Sense strand starting at position 3024 of SEQ ID NO: 587828
cacuccuauguuugagaug

SEQ ID NO: 821431 - RNA, 19 nt, Artificial Sequence
  Description of Artificial Sequence: Synthetic oligonucleotide
  Antisense strand to SEQ ID NO: 821430
caucucaaacauaggagug

SEQ ID NO: 821432 - RNA, 19 nt, Artificial Sequence
  Description of Artificial Sequence: Synthetic oligonucleotide
  Sense strand starting at position 3027 of SEQ ID NO: 587828
uccuauguuugagauguaa

SEQ ID NO: 821433 - RNA, 19 nt, Artificial Sequence
  Description of Artificial Sequence: Synthetic oligonucleotide
  Antisense strand to SEQ ID NO: 821432
uuacaucucaaacauagga

SEQ ID NO: 821434 - RNA, 19 nt, Artificial Sequence
  Description of Artificial Sequence: Synthetic oligonucleotide
  Sense strand starting at position 3146 of SEQ ID NO: 587828
uucucaugcggcuauugaa

SEQ ID NO: 821435 - RNA, 19 nt, Artificial Sequence
  Description of Artificial Sequence: Synthetic oligonucleotide
  Antisense strand to SEQ ID NO: 821434
uucaauagccgcaugagaa

SEQ ID NO: 821436 - RNA, 19 nt, Artificial Sequence
  Description of Artificial Sequence: Synthetic oligonucleotide
  Sense strand starting at position 3164 of SEQ ID NO: 587828
aagaaacagugcucugauu

SEQ ID NO: 821437 - RNA, 19 nt, Artificial Sequence
  Description of Artificial Sequence: Synthetic oligonucleotide
  Antisense strand to SEQ ID NO: 821436
aaucagagcacuguuucuu

SEQ ID NO: 821438 - RNA, 19 nt, Artificial Sequence
  Description of Artificial Sequence: Synthetic oligonucleotide
  Sense strand starting at position 3206 of SEQ ID NO: 587828
ggucacaauuaucucugua

SEQ ID NO: 821439 - RNA, 19 nt, Artificial Sequence
  Description of Artificial Sequence: Synthetic oligonucleotide
  Antisense strand to SEQ ID NO: 821438
uacagagauaauugugacc

SEQ ID NO: 821440 - RNA, 19 nt, Artificial Sequence
  Description of Artificial Sequence: Synthetic oligonucleotide
  Sense strand starting at position 3259 of SEQ ID NO: 587828
guuuguuggucuccagugu

SEQ ID NO: 821441 - RNA, 19 nt, Artificial Sequence
  Description of Artificial Sequence: Synthetic oligonucleotide
  Antisense strand to SEQ ID NO: 821440
acacuggagaccaacaaac

SEQ ID NO: 821442 - RNA, 19 nt, Artificial Sequence
  Description of Artificial Sequence: Synthetic oligonucleotide
  Sense strand starting at position 3263 of SEQ ID NO: 587828
guuggucuccaguguuuac

SEQ ID NO: 821443 - RNA, 19 nt, Artificial Sequence
  Description of Artificial Sequence: Synthetic oligonucleotide
  Antisense strand to SEQ ID NO: 821442
guaaacacuggagaccaac

SEQ ID NO: 821444 - RNA, 19 nt, Artificial Sequence
  Description of Artificial Sequence: Synthetic oligonucleotide
  Sense strand starting at position 3266 of SEQ ID NO: 587828
ggucuccaguguuuacuga

SEQ ID NO: 821445 - RNA, 19 nt, Artificial Sequence
  Description of Artificial Sequence: Synthetic oligonucleotide
  Antisense strand to SEQ ID NO: 821444
ucaguaaacacuggagacc

SEQ ID NO: 821446 - RNA, 19 nt, Artificial Sequence
  Description of Artificial Sequence: Synthetic oligonucleotide
  Sense strand starting at position 3267 of SEQ ID NO: 587828
gucuccaguguuuacugaa

SEQ ID NO: 821447 - RNA, 19 nt, Artificial Sequence
  Description of Artificial Sequence: Synthetic oligonucleotide
  Antisense strand to SEQ ID NO: 821446
uucaguaaacacuggagac

SEQ ID NO: 821448 - RNA, 19 nt, Artificial Sequence
  Description of Artificial Sequence: Synthetic oligonucleotide
  Sense strand starting at position 3274 of SEQ ID NO: 587828
guguuuacugaauaaaguu

SEQ ID NO: 821449 - RNA, 19 nt, Artificial Sequence
  Description of Artificial Sequence: Synthetic oligonucleotide
  Antisense strand to SEQ ID NO: 821448
aacuuuauucaguaaacac

SEQ ID NO: 821450 - RNA, 19 nt, Artificial Sequence
  Description of Artificial Sequence: Synthetic oligonucleotide
  Sense strand starting at position 3326 of SEQ ID NO: 587828
agucuagacucacuccuau

SEQ ID NO: 821451 - RNA, 19 nt, Artificial Sequence
  Description of Artificial Sequence: Synthetic oligonucleotide
  Antisense strand to SEQ ID NO: 821450
auaggagugagucuagacu

SEQ ID NO: 821452 - RNA, 19 nt, Artificial Sequence
  Description of Artificial Sequence: Synthetic oligonucleotide
  Sense strand starting at position 3505 of SEQ ID NO: 587828
gggagaaucacuggaguuc

SEQ ID NO: 821453 - RNA, 19 nt, Artificial Sequence
  Description of Artificial Sequence: Synthetic oligonucleotide
  Antisense strand to SEQ ID NO: 821452
gaacuccagugauucuccc

SEQ ID NO: 821454 - RNA, 19 nt, Artificial Sequence
  Description of Artificial Sequence: Synthetic oligonucleotide
  Sense strand starting at position 3522 of SEQ ID NO: 587828
ucgagaagucgaggaugca

SEQ ID NO: 821455 - RNA, 19 nt, Artificial Sequence
  Description of Artificial Sequence: Synthetic oligonucleotide
  Antisense strand to SEQ ID NO: 821454
ugcauccucgacuucucga

SEQ ID NO: 821456 - RNA, 19 nt, Artificial Sequence
  Description of Artificial Sequence: Synthetic oligonucleotide
  Sense strand starting at position 3588 of SEQ ID NO: 587828
gaaugagacuacucuguuu

SEQ ID NO: 821457 - RNA, 19 nt, Artificial Sequence
  Description of Artificial Sequence: Synthetic oligonucleotide
  Antisense strand to SEQ ID NO: 821456
aaacagaguagucucauuc

SEQ ID NO: 821458 - RNA, 19 nt, Artificial Sequence
  Description of Artificial Sequence: Synthetic oligonucleotide
  Sense strand starting at position 3647 of SEQ ID NO: 587828
agucuagccuuauuuguuu

SEQ ID NO: 821459 - RNA, 19 nt, Artificial Sequence
  Description of Artificial Sequence: Synthetic oligonucleotide
  Antisense strand to SEQ ID NO: 821458
aaacaaauaaggcuagacu

SEQ ID NO: 821460 - RNA, 19 nt, Artificial Sequence
  Description of Artificial Sequence: Synthetic oligonucleotide
  Sense strand starting at position 3729 of SEQ ID NO: 587828
uguuguuacucuuccuuga

SEQ ID NO: 821461 - RNA, 19 nt, Artificial Sequence
  Description of Artificial Sequence: Synthetic oligonucleotide
  Antisense strand to SEQ ID NO: 821460
ucaaggaagaguaacaaca

SEQ ID NO: 821462 - RNA, 19 nt, Artificial Sequence
  Description of Artificial Sequence: Synthetic oligonucleotide
  Sense strand starting at position 3746 of SEQ ID NO: 587828
gaacauaggcuguguauau

SEQ ID NO: 821463 - RNA, 19 nt, Artificial Sequence
  Description of Artificial Sequence: Synthetic oligonucleotide
  Antisense strand to SEQ ID NO: 821462
auauacacagccuauguuc

SEQ ID NO: 821464 - RNA, 19 nt, Artificial Sequence
  Description of Artificial Sequence: Synthetic oligonucleotide
  Sense strand starting at position 3747 of SEQ ID NO: 587828
aacauaggcuguguauauu

SEQ ID NO: 821465 - RNA, 19 nt, Artificial Sequence
  Description of Artificial Sequence: Synthetic oligonucleotide
  Antisense strand to SEQ ID NO: 821464
aauauacacagccuauguu

SEQ ID NO: 821466 - RNA, 19 nt, Artificial Sequence
  Description of Artificial Sequence: Synthetic oligonucleotide
  Sense strand starting at position 1 of SEQ ID NO: 587829
guuaucaugcuguaagaau

SEQ ID NO: 821467 - RNA, 19 nt, Artificial Sequence
  Description of Artificial Sequence: Synthetic oligonucleotide
  Antisense strand to SEQ ID NO: 821466
auucuuacagcaugauaac

SEQ ID NO: 821468 - RNA, 19 nt, Artificial Sequence
  Description of Artificial Sequence: Synthetic oligonucleotide
  Sense strand starting at position 39 of SEQ ID NO: 587829
cuguuucugggaugaacau

SEQ ID NO: 821469 - RNA, 19 nt, Artificial Sequence
  Description of Artificial Sequence: Synthetic oligonucleotide
  Antisense strand to SEQ ID NO: 821468
auguucaucccagaaacag

SEQ ID NO: 821470 - RNA, 19 nt, Artificial Sequence
  Description of Artificial Sequence: Synthetic oligonucleotide
  Sense strand starting at position 92 of SEQ ID NO: 587829
acaaauuauggugguggua

SEQ ID NO: 821471 - RNA, 19 nt, Artificial Sequence
  Description of Artificial Sequence: Synthetic oligonucleotide
  Antisense strand to SEQ ID NO: 821470
uaccaccaccauaauuugu

SEQ ID NO: 821472 - RNA, 19 nt, Artificial Sequence
  Description of Artificial Sequence: Synthetic oligonucleotide
  Sense strand starting at position 128 of SEQ ID NO: 587829
guaggaaaggcuggaauua

SEQ ID NO: 821473 - RNA, 19 nt, Artificial Sequence
  Description of Artificial Sequence: Synthetic oligonucleotide
  Antisense strand to SEQ ID NO: 821472
uaauuccagccuuuccuac

SEQ ID NO: 821474 - RNA, 19 nt, Artificial Sequence
  Description of Artificial Sequence: Synthetic oligonucleotide
  Sense strand starting at position 252 of SEQ ID NO: 587829
gcagcuguuagggaggaaa

SEQ ID NO: 821475 - RNA, 19 nt, Artificial Sequence
  Description of Artificial Sequence: Synthetic oligonucleotide
  Antisense strand to SEQ ID NO: 821474
uuuccucccuaacagcugc

SEQ ID NO: 821476 - RNA, 19 nt, Artificial Sequence
  Description of Artificial Sequence: Synthetic oligonucleotide
  Sense strand starting at position 254 of SEQ ID NO: 587829
agcuguuagggaggaaagu

SEQ ID NO: 821477 - RNA, 19 nt, Artificial Sequence
  Description of Artificial Sequence: Synthetic oligonucleotide
  Antisense strand to SEQ ID NO: 821476
acuuuccucccuaacagcu

SEQ ID NO: 821478 - RNA, 19 nt, Artificial Sequence
  Description of Artificial Sequence: Synthetic oligonucleotide
  Sense strand starting at position 255 of SEQ ID NO: 587829
gcuguuagggaggaaagua

SEQ ID NO: 821479 - RNA, 19 nt, Artificial Sequence
  Description of Artificial Sequence: Synthetic oligonucleotide
  Antisense strand to SEQ ID NO: 821478
uacuuuccucccuaacagc

SEQ ID NO: 821480 - RNA, 19 nt, Artificial Sequence
  Description of Artificial Sequence: Synthetic oligonucleotide
  Sense strand starting at position 415 of SEQ ID NO: 587829
auguuugaagguuagguua

SEQ ID NO: 821481 - RNA, 19 nt, Artificial Sequence
  Description of Artificial Sequence: Synthetic oligonucleotide
  Antisense strand to SEQ ID NO: 821480
uaaccuaaccuucaaacau

SEQ ID NO: 821482 - RNA, 19 nt, Artificial Sequence
  Description of Artificial Sequence: Synthetic oligonucleotide
  Sense strand starting at position 418 of SEQ ID NO: 587829
uuugaagguuagguuagau

SEQ ID NO: 821483 - RNA, 19 nt, Artificial Sequence
  Description of Artificial Sequence: Synthetic oligonucleotide
  Antisense strand to SEQ ID NO: 821482
aucuaaccuaaccuucaaa

SEQ ID NO: 821484 - RNA, 19 nt, Artificial Sequence
  Description of Artificial Sequence: Synthetic oligonucleotide
  Sense strand starting at position 575 of SEQ ID NO: 587829
ucagaaaggcuugguaaag

SEQ ID NO: 821485 - RNA, 19 nt, Artificial Sequence
  Description of Artificial Sequence: Synthetic oligonucleotide
  Antisense strand to SEQ ID NO: 821484
cuuuaccaagccuuucuga

SEQ ID NO: 821486 - RNA, 19 nt, Artificial Sequence
  Description of Artificial Sequence: Synthetic oligonucleotide
  Sense strand starting at position 576 of SEQ ID NO: 587829
cagaaaggcuugguaaaga

SEQ ID NO: 821487 - RNA, 19 nt, Artificial Sequence
  Description of Artificial Sequence: Synthetic oligonucleotide
  Antisense strand to SEQ ID NO: 821486
ucuuuaccaagccuuucug

SEQ ID NO: 821488 - RNA, 19 nt, Artificial Sequence
  Description of Artificial Sequence: Synthetic oligonucleotide
  Sense strand starting at position 820 of SEQ ID NO: 587829
ucagaagucucuuuggcaa

SEQ ID NO: 821489 - RNA, 19 nt, Artificial Sequence
  Description of Artificial Sequence: Synthetic oligonucleotide
  Antisense strand to SEQ ID NO: 821488
uugccaaagagacuucuga

SEQ ID NO: 821490 - RNA, 19 nt, Artificial Sequence
  Description of Artificial Sequence: Synthetic oligonucleotide
  Sense strand starting at position 823 of SEQ ID NO: 587829
gaagucucuuuggcaaaug

SEQ ID NO: 821491 - RNA, 19 nt, Artificial Sequence
  Description of Artificial Sequence: Synthetic oligonucleotide
  Antisense strand to SEQ ID NO: 821490
cauuugccaaagagacuuc

SEQ ID NO: 821492 - RNA, 19 nt, Artificial Sequence
  Description of Artificial Sequence: Synthetic oligonucleotide
  Sense strand starting at position 1050 of SEQ ID NO: 587829
auacaaguacucggcauuu

SEQ ID NO: 821493 - RNA, 19 nt, Artificial Sequence
  Description of Artificial Sequence: Synthetic oligonucleotide
  Antisense strand to SEQ ID NO: 821492
aaaugccgaguacuuguau

SEQ ID NO: 821494 - RNA, 19 nt, Artificial Sequence
  Description of Artificial Sequence: Synthetic oligonucleotide
  Sense strand starting at position 1056 of SEQ ID NO: 587829
guacucggcauuugguaau

SEQ ID NO: 821495 - RNA, 19 nt, Artificial Sequence
  Description of Artificial Sequence: Synthetic oligonucleotide
  Antisense strand to SEQ ID NO: 821494
auuaccaaaugccgaguac

SEQ ID NO: 821496 - RNA, 19 nt, Artificial Sequence
  Description of Artificial Sequence: Synthetic oligonucleotide
  Sense strand starting at position 1149 of SEQ ID NO: 587829
uuucgaaggcugucgcaua

SEQ ID NO: 821497 - RNA, 19 nt, Artificial Sequence
  Description of Artificial Sequence: Synthetic oligonucleotide
  Antisense strand to SEQ ID NO: 821496
uaugcgacagccuucgaaa

SEQ ID NO: 821498 - RNA, 19 nt, Artificial Sequence
  Description of Artificial Sequence: Synthetic oligonucleotide
  Sense strand starting at position 1171 of SEQ ID NO: 587829
cgcgguaagccaguacuca

SEQ ID NO: 821499 - RNA, 19 nt, Artificial Sequence
  Description of Artificial Sequence: Synthetic oligonucleotide
  Antisense strand to SEQ ID NO: 821498
ugaguacuggcuuaccgcg

SEQ ID NO: 821500 - RNA, 19 nt, Artificial Sequence
  Description of Artificial Sequence: Synthetic oligonucleotide
  Sense strand starting at position 1343 of SEQ ID NO: 587829
cgacccuuugagggaugaa

SEQ ID NO: 821501 - RNA, 19 nt, Artificial Sequence
  Description of Artificial Sequence: Synthetic oligonucleotide
  Antisense strand to SEQ ID NO: 821500
uucaucccucaaagggucg

SEQ ID NO: 821502 - RNA, 19 nt, Artificial Sequence
  Description of Artificial Sequence: Synthetic oligonucleotide
  Sense strand starting at position 1352 of SEQ ID NO: 587829
gagggaugaaacuguaguu

SEQ ID NO: 821503 - RNA, 19 nt, Artificial Sequence
  Description of Artificial Sequence: Synthetic oligonucleotide
  Antisense strand to SEQ ID NO: 821502
aacuacaguuucaucccuc

SEQ ID NO: 821504 - RNA, 19 nt, Artificial Sequence
  Description of Artificial Sequence: Synthetic oligonucleotide
  Sense strand starting at position 2236 of SEQ ID NO: 587829
cgcagauucggcuuagcga

SEQ ID NO: 821505 - RNA, 19 nt, Artificial Sequence
  Description of Artificial Sequence: Synthetic oligonucleotide
  Antisense strand to SEQ ID NO: 821504
ucgcuaagccgaaucugcg

SEQ ID NO: 821506 - RNA, 19 nt, Artificial Sequence
  Description of Artificial Sequence: Synthetic oligonucleotide
  Sense strand starting at position 2296 of SEQ ID NO: 587829
auuagagcccauuaaacgu

SEQ ID NO: 821507 - RNA, 19 nt, Artificial Sequence
  Description of Artificial Sequence: Synthetic oligonucleotide
  Antisense strand to SEQ ID NO: 821506
acguuuaaugggcucuaau

SEQ ID NO: 821508 - RNA, 19 nt, Artificial Sequence
  Description of Artificial Sequence: Synthetic oligonucleotide
  Sense strand starting at position 2307 of SEQ ID NO: 587829
uuaaacguugcauaaacau

SEQ ID NO: 821509 - RNA, 19 nt, Artificial Sequence
  Description of Artificial Sequence: Synthetic oligonucleotide
  Antisense strand to SEQ ID NO: 821508
auguuuaugcaacguuuaa

SEQ ID NO: 821510 - RNA, 19 nt, Artificial Sequence
  Description of Artificial Sequence: Synthetic oligonucleotide
  Sense strand starting at position 2684 of SEQ ID NO: 587829
guaaguacaccuggacagu

SEQ ID NO: 821511 - RNA, 19 nt, Artificial Sequence
  Description of Artificial Sequence: Synthetic oligonucleotide
  Antisense strand to SEQ ID NO: 821510
acuguccagguguacuuac

SEQ ID NO: 821512 - RNA, 19 nt, Artificial Sequence
  Description of Artificial Sequence: Synthetic oligonucleotide
  Sense strand starting at position 2753 of SEQ ID NO: 587829
auaugaucuggcuaucuuu

SEQ ID NO: 821513 - RNA, 19 nt, Artificial Sequence
  Description of Artificial Sequence: Synthetic oligonucleotide
  Antisense strand to SEQ ID NO: 821512
aaagauagccagaucauau

SEQ ID NO: 821514 - RNA, 19 nt, Artificial Sequence
  Description of Artificial Sequence: Synthetic oligonucleotide
  Sense strand starting at position 2837 of SEQ ID NO: 587829
cuagcuauccuagguuaaa

SEQ ID NO: 821515 - RNA, 19 nt, Artificial Sequence
  Description of Artificial Sequence: Synthetic oligonucleotide
  Antisense strand to SEQ ID NO: 821514
uuuaaccuaggauagcuag

SEQ ID NO: 821516 - RNA, 19 nt, Artificial Sequence
  Description of Artificial Sequence: Synthetic oligonucleotide
  Sense strand starting at position 2838 of SEQ ID NO: 587829
uagcuauccuagguuaaag

SEQ ID NO: 821517 - RNA, 19 nt, Artificial Sequence
  Description of Artificial Sequence: Synthetic oligonucleotide
  Antisense strand to SEQ ID NO: 821516
cuuuaaccuaggauagcua

SEQ ID NO: 821518 - RNA, 19 nt, Artificial Sequence
  Description of Artificial Sequence: Synthetic oligonucleotide
  Sense strand starting at position 2947 of SEQ ID NO: 587829
guggcuauccuuuaucaag

SEQ ID NO: 821519 - RNA, 19 nt, Artificial Sequence
  Description of Artificial Sequence: Synthetic oligonucleotide
  Antisense strand to SEQ ID NO: 821518
cuugauaaaggauagccac

SEQ ID NO: 821520 - RNA, 19 nt, Artificial Sequence
  Description of Artificial Sequence: Synthetic oligonucleotide
  Sense strand starting at position 2949 of SEQ ID NO: 587829
ggcuauccuuuaucaagau

SEQ ID NO: 821521 - RNA, 19 nt, Artificial Sequence
  Description of Artificial Sequence: Synthetic oligonucleotide
  Antisense strand to SEQ ID NO: 821520
aucuugauaaaggauagcc

SEQ ID NO: 821522 - RNA, 19 nt, Artificial Sequence
  Description of Artificial Sequence: Synthetic oligonucleotide
  Sense strand starting at position 2982 of SEQ ID NO: 587829
ggaggauuauuagucacau

SEQ ID NO: 821523 - RNA, 19 nt, Artificial Sequence
  Description of Artificial Sequence: Synthetic oligonucleotide
  Antisense strand to SEQ ID NO: 821522
augugacuaauaauccucc

SEQ ID NO: 821524 - RNA, 19 nt, Artificial Sequence
  Description of Artificial Sequence: Synthetic oligonucleotide
  Sense strand starting at position 2983 of SEQ ID NO: 587829
gaggauuauuagucacauu

SEQ ID NO: 821525 - RNA, 19 nt, Artificial Sequence
  Description of Artificial Sequence: Synthetic oligonucleotide
  Antisense strand to SEQ ID NO: 821524
aaugugacuaauaauccuc

SEQ ID NO: 821526 - RNA, 19 nt, Artificial Sequence
  Description of Artificial Sequence: Synthetic oligonucleotide
  Sense strand starting at position 3150 of SEQ ID NO: 587829
uuaucuacugcuuaaugga

SEQ ID NO: 821527 - RNA, 19 nt, Artificial Sequence
  Description of Artificial Sequence: Synthetic oligonucleotide
  Antisense strand to SEQ ID NO: 821526
uccauuaagcaguagauaa

SEQ ID NO: 821528 - RNA, 19 nt, Artificial Sequence
  Description of Artificial Sequence: Synthetic oligonucleotide
  Sense strand starting at position 3256 of SEQ ID NO: 587829
agacuuagguaaguuacaa

SEQ ID NO: 821529 - RNA, 19 nt, Artificial Sequence
  Description of Artificial Sequence: Synthetic oligonucleotide
  Antisense strand to SEQ ID NO: 821528
uuguaacuuaccuaagucu

SEQ ID NO: 821530 - RNA, 19 nt, Artificial Sequence
  Description of Artificial Sequence: Synthetic oligonucleotide
  Sense strand starting at position 3329 of SEQ ID NO: 587829
gauaguacgagucagaacu

SEQ ID NO: 821531 - RNA, 19 nt, Artificial Sequence
  Description of Artificial Sequence: Synthetic oligonucleotide
  Antisense strand to SEQ ID NO: 821530
aguucugacucguacuauc

SEQ ID NO: 821532 - RNA, 19 nt, Artificial Sequence
  Description of Artificial Sequence: Synthetic oligonucleotide
  Sense strand starting at position 3484 of SEQ ID NO: 587829
uguaacugucaucauccua

SEQ ID NO: 821533 - RNA, 19 nt, Artificial Sequence
  Description of Artificial Sequence: Synthetic oligonucleotide
  Antisense strand to SEQ ID NO: 821532
uaggaugaugacaguuaca

SEQ ID NO: 821534 - RNA, 19 nt, Artificial Sequence
  Description of Artificial Sequence: Synthetic oligonucleotide
  Sense strand starting at position 3529 of SEQ ID NO: 587829
cgguuauuggaauauccuu

SEQ ID NO: 821535 - RNA, 19 nt, Artificial Sequence
  Description of Artificial Sequence: Synthetic oligonucleotide
  Antisense strand to SEQ ID NO: 821534
aaggauauuccaauaaccg

SEQ ID NO: 821536 - RNA, 19 nt, Artificial Sequence
  Description of Artificial Sequence: Synthetic oligonucleotide
  Sense strand starting at position 3535 of SEQ ID NO: 587829
uuggaauauccuuauuacg

SEQ ID NO: 821537 - RNA, 19 nt, Artificial Sequence
  Description of Artificial Sequence: Synthetic oligonucleotide
  Antisense strand to SEQ ID NO: 821536
cguaauaaggauauuccaa

SEQ ID NO: 821538 - RNA, 19 nt, Artificial Sequence
  Description of Artificial Sequence: Synthetic oligonucleotide
  Sense strand starting at position 3537 of SEQ ID NO: 587829
ggaauauccuuauuacgac

SEQ ID NO: 821539 - RNA, 19 nt, Artificial Sequence
  Description of Artificial Sequence: Synthetic oligonucleotide
  Antisense strand to SEQ ID NO: 821538
gucguaauaaggauauucc

SEQ ID NO: 821540 - RNA, 19 nt, Artificial Sequence
  Description of Artificial Sequence: Synthetic oligonucleotide
  Sense strand starting at position 3625 of SEQ ID NO: 587829
uaaccuugugguuaugaca

SEQ ID NO: 821541 - RNA, 19 nt, Artificial Sequence
  Description of Artificial Sequence: Synthetic oligonucleotide
  Antisense strand to SEQ ID NO: 821540
ugucauaaccacaagguua

SEQ ID NO: 821542 - RNA, 19 nt, Artificial Sequence
  Description of Artificial Sequence: Synthetic oligonucleotide
  Sense strand starting at position 3764 of SEQ ID NO: 587829
cugauugcacuguaaagca

SEQ ID NO: 821543 - RNA, 19 nt, Artificial Sequence
  Description of Artificial Sequence: Synthetic oligonucleotide
  Antisense strand to SEQ ID NO: 821542
ugcuuuacagugcaaucag

SEQ ID NO: 821544 - RNA, 19 nt, Artificial Sequence
  Description of Artificial Sequence: Synthetic oligonucleotide
  Sense strand starting at position 3849 of SEQ ID NO: 587829
ggagauaggugaguacuau

SEQ ID NO: 821545 - RNA, 19 nt, Artificial Sequence
  Description of Artificial Sequence: Synthetic oligonucleotide
  Antisense strand to SEQ ID NO: 821544
auaguacucaccuaucucc

SEQ ID NO: 821546 - RNA, 19 nt, Artificial Sequence
  Description of Artificial Sequence: Synthetic oligonucleotide
  Sense strand starting at position 127 of SEQ ID NO: 587830
ggccacguauguguaauuu

SEQ ID NO: 821547 - RNA, 19 nt, Artificial Sequence
  Description of Artificial Sequence: Synthetic oligonucleotide
  Antisense strand to SEQ ID NO: 821546
aaauuacacauacguggcc

SEQ ID NO: 821548 - RNA, 19 nt, Artificial Sequence
  Description of Artificial Sequence: Synthetic oligonucleotide
  Sense strand starting at position 131 of SEQ ID NO: 587830
acguauguguaauuucuaa

SEQ ID NO: 821549 - RNA, 19 nt, Artificial Sequence
  Description of Artificial Sequence: Synthetic oligonucleotide
  Antisense strand to SEQ ID NO: 821548
uuagaaauuacacauacgu

SEQ ID NO: 821550 - RNA, 19 nt, Artificial Sequence
  Description of Artificial Sequence: Synthetic oligonucleotide
  Sense strand starting at position 135 of SEQ ID NO: 587830
auguguaauuucuaaaggu

SEQ ID NO: 821551 - RNA, 19 nt, Artificial Sequence
  Description of Artificial Sequence: Synthetic oligonucleotide
  Antisense strand to SEQ ID NO: 821550
accuuuagaaauuacacau

SEQ ID NO: 821552 - RNA, 19 nt, Artificial Sequence
  Description of Artificial Sequence: Synthetic oligonucleotide
  Sense strand starting at position 270 of SEQ ID NO: 587830
agugguacucuguaaggca

SEQ ID NO: 821553 - RNA, 19 nt, Artificial Sequence
  Description of Artificial Sequence: Synthetic oligonucleotide
  Antisense strand to SEQ ID NO: 821552
ugccuuacagaguaccacu

SEQ ID NO: 821554 - RNA, 19 nt, Artificial Sequence
  Description of Artificial Sequence: Synthetic oligonucleotide
  Sense strand starting at position 717 of SEQ ID NO: 587830
uugggaaguuagcuuuguu

SEQ ID NO: 821555 - RNA, 19 nt, Artificial Sequence
  Description of Artificial Sequence: Synthetic oligonucleotide
  Antisense strand to SEQ ID NO: 821554
aacaaagcuaacuucccaa

SEQ ID NO: 821556 - RNA, 19 nt, Artificial Sequence
  Description of Artificial Sequence: Synthetic oligonucleotide
  Sense strand starting at position 759 of SEQ ID NO: 587830
uugggugguaguuaugcau

SEQ ID NO: 821557 - RNA, 19 nt, Artificial Sequence
  Description of Artificial Sequence: Synthetic oligonucleotide
  Antisense strand to SEQ ID NO: 821556
augcauaacuaccacccaa

SEQ ID NO: 821558 - RNA, 19 nt, Artificial Sequence
  Description of Artificial Sequence: Synthetic oligonucleotide
  Sense strand starting at position 787 of SEQ ID NO: 587830
aucgacaauucucuaagga

SEQ ID NO: 821559 - RNA, 19 nt, Artificial Sequence
  Description of Artificial Sequence: Synthetic oligonucleotide
  Antisense strand to SEQ ID NO: 821558
uccuuagagaauugucgau

SEQ ID NO: 821560 - RNA, 19 nt, Artificial Sequence
  Description of Artificial Sequence: Synthetic oligonucleotide
  Sense strand starting at position 812 of SEQ ID NO: 587830
agugcauguccuggaaauu

SEQ ID NO: 821561 - RNA, 19 nt, Artificial Sequence
  Description of Artificial Sequence: Synthetic oligonucleotide
  Antisense strand to SEQ ID NO: 821560
aauuuccaggacaugcacu

SEQ ID NO: 821562 - RNA, 19 nt, Artificial Sequence
  Description of Artificial Sequence: Synthetic oligonucleotide
  Sense strand starting at position 813 of SEQ ID NO: 587830
gugcauguccuggaaauuc

SEQ ID NO: 821563 - RNA, 19 nt, Artificial Sequence
  Description of Artificial Sequence: Synthetic oligonucleotide
  Antisense strand to SEQ ID NO: 821562
gaauuuccaggacaugcac

SEQ ID NO: 821564 - RNA, 19 nt, Artificial Sequence
  Description of Artificial Sequence: Synthetic oligonucleotide
  Sense strand starting at position 852 of SEQ ID NO: 587830
ccagguacacuagaauguu

SEQ ID NO: 821565 - RNA, 19 nt, Artificial Sequence
  Description of Artificial Sequence: Synthetic oligonucleotide
  Antisense strand to SEQ ID NO: 821564
aacauucuaguguaccugg

SEQ ID NO: 821566 - RNA, 19 nt, Artificial Sequence
  Description of Artificial Sequence: Synthetic oligonucleotide
  Sense strand starting at position 855 of SEQ ID NO: 587830
gguacacuagaauguuuau

SEQ ID NO: 821567 - RNA, 19 nt, Artificial Sequence
  Description of Artificial Sequence: Synthetic oligonucleotide
  Antisense strand to SEQ ID NO: 821566
auaaacauucuaguguacc

SEQ ID NO: 821568 - RNA, 19 nt, Artificial Sequence
  Description of Artificial Sequence: Synthetic oligonucleotide
  Sense strand starting at position 864 of SEQ ID NO: 587830
gaauguuuauagccauguu

SEQ ID NO: 821569 - RNA, 19 nt, Artificial Sequence
  Description of Artificial Sequence: Synthetic oligonucleotide
  Antisense strand to SEQ ID NO: 821568
aacauggcuauaaacauuc

SEQ ID NO: 821570 - RNA, 19 nt, Artificial Sequence
  Description of Artificial Sequence: Synthetic oligonucleotide
  Sense strand starting at position 1268 of SEQ ID NO: 587830
gcguaugcuauaucuguua

SEQ ID NO: 821571 - RNA, 19 nt, Artificial Sequence
  Description of Artificial Sequence: Synthetic oligonucleotide
  Antisense strand to SEQ ID NO: 821570
uaacagauauagcauacgc

SEQ ID NO: 821572 - RNA, 19 nt, Artificial Sequence
  Description of Artificial Sequence: Synthetic oligonucleotide
  Sense strand starting at position 1310 of SEQ ID NO: 587830
acagauucgugccucuaaa

SEQ ID NO: 821573 - RNA, 19 nt, Artificial Sequence
  Description of Artificial Sequence: Synthetic oligonucleotide
  Antisense strand to SEQ ID NO: 821572
uuuagaggcacgaaucugu

SEQ ID NO: 821574 - RNA, 19 nt, Artificial Sequence
  Description of Artificial Sequence: Synthetic oligonucleotide
  Sense strand starting at position 1332 of SEQ ID NO: 587830
guggaagcuccagaacgau

SEQ ID NO: 821575 - RNA, 19 nt, Artificial Sequence
  Description of Artificial Sequence: Synthetic oligonucleotide
  Antisense strand to SEQ ID NO: 821574
aucguucuggagcuuccac

SEQ ID NO: 821576 - RNA, 19 nt, Artificial Sequence
  Description of Artificial Sequence: Synthetic oligonucleotide
  Sense strand starting at position 1344 of SEQ ID NO: 587830
gaacgauccgccucgccau

SEQ ID NO: 821577 - RNA, 19 nt, Artificial Sequence
  Description of Artificial Sequence: Synthetic oligonucleotide
  Antisense strand to SEQ ID NO: 821576
auggcgaggcggaucguuc

SEQ ID NO: 821578 - RNA, 19 nt, Artificial Sequence
  Description of Artificial Sequence: Synthetic oligonucleotide
  Sense strand starting at position 1456 of SEQ ID NO: 587830
uaaggagaguucucagggu

SEQ ID NO: 821579 - RNA, 19 nt, Artificial Sequence
  Description of Artificial Sequence: Synthetic oligonucleotide
  Antisense strand to SEQ ID NO: 821578
acccugagaacucuccuua

SEQ ID NO: 821580 - RNA, 19 nt, Artificial Sequence
  Description of Artificial Sequence: Synthetic oligonucleotide
  Sense strand starting at position 2965 of SEQ ID NO: 587830
cgggcagacguuuaaagga

SEQ ID NO: 821581 - RNA, 19 nt, Artificial Sequence
  Description of Artificial Sequence: Synthetic oligonucleotide
  Antisense strand to SEQ ID NO: 821580
uccuuuaaacgucugcccg

SEQ ID NO: 821582 - RNA, 19 nt, Artificial Sequence
  Description of Artificial Sequence: Synthetic oligonucleotide
  Sense strand starting at position 2967 of SEQ ID NO: 587830
ggcagacguuuaaaggagu

SEQ ID NO: 821583 - RNA, 19 nt, Artificial Sequence
  Description of Artificial Sequence: Synthetic oligonucleotide
  Antisense strand to SEQ ID NO: 821582
acuccuuuaaacgucugcc

SEQ ID NO: 821584 - RNA, 19 nt, Artificial Sequence
  Description of Artificial Sequence: Synthetic oligonucleotide
  Sense strand starting at position 3031 of SEQ ID NO: 587830
gacagagucgugggauucu

SEQ ID NO: 821585 - RNA, 19 nt, Artificial Sequence
  Description of Artificial Sequence: Synthetic oligonucleotide
  Antisense strand to SEQ ID NO: 821584
agaaucccacgacucuguc

SEQ ID NO: 821586 - RNA, 19 nt, Artificial Sequence
  Description of Artificial Sequence: Synthetic oligonucleotide
  Sense strand starting at position 3274 of SEQ ID NO: 587830
cauugcugagaauguuaau

SEQ ID NO: 821587 - RNA, 19 nt, Artificial Sequence
  Description of Artificial Sequence: Synthetic oligonucleotide
  Antisense strand to SEQ ID NO: 821586
auuaacauucucagcaaug

SEQ ID NO: 821588 - RNA, 19 nt, Artificial Sequence
  Description of Artificial Sequence: Synthetic oligonucleotide
  Sense strand starting at position 3301 of SEQ ID NO: 587830
uacggauguguuuaugaag

SEQ ID NO: 821589 - RNA, 19 nt, Artificial Sequence
  Description of Artificial Sequence: Synthetic oligonucleotide
  Antisense strand to SEQ ID NO: 821588
cuucauaaacacauccgua

SEQ ID NO: 821590 - RNA, 19 nt, Artificial Sequence
  Description of Artificial Sequence: Synthetic oligonucleotide
  Sense strand starting at position 3307 of SEQ ID NO: 587830
uguguuuaugaaggcuacu

SEQ ID NO: 821591 - RNA, 19 nt, Artificial Sequence
  Description of Artificial Sequence: Synthetic oligonucleotide
  Antisense strand to SEQ ID NO: 821590
aguagccuucauaaacaca

SEQ ID NO: 821592 - RNA, 19 nt, Artificial Sequence
  Description of Artificial Sequence: Synthetic oligonucleotide
  Sense strand starting at position 3310 of SEQ ID NO: 587830
guuuaugaaggcuacuaca

SEQ ID NO: 821593 - RNA, 19 nt, Artificial Sequence
  Description of Artificial Sequence: Synthetic oligonucleotide
  Antisense strand to SEQ ID NO: 821592
uguaguagccuucauaaac

SEQ ID NO: 821594 - RNA, 19 nt, Artificial Sequence
  Description of Artificial Sequence: Synthetic oligonucleotide
  Sense strand starting at position 3367 of SEQ ID NO: 587830
gagaaauucucuuuagcgg

SEQ ID NO: 821595 - RNA, 19 nt, Artificial Sequence
  Description of Artificial Sequence: Synthetic oligonucleotide
  Antisense strand to SEQ ID NO: 821594
ccgcuaaagagaauuucuc

SEQ ID NO: 821596 - RNA, 19 nt, Artificial Sequence
  Description of Artificial Sequence: Synthetic oligonucleotide
  Sense strand starting at position 3368 of SEQ ID NO: 587830
agaaauucucuuuagcggu

SEQ ID NO: 821597 - RNA, 19 nt, Artificial Sequence
  Description of Artificial Sequence: Synthetic oligonucleotide
  Antisense strand to SEQ ID NO: 821596
accgcuaaagagaauuucu

SEQ ID NO: 821598 - RNA, 19 nt, Artificial Sequence
  Description of Artificial Sequence: Synthetic oligonucleotide
  Sense strand starting at position 3402 of SEQ ID NO: 587830
ucaggaucccuggagugua

SEQ ID NO: 821599 - RNA, 19 nt, Artificial Sequence
  Description of Artificial Sequence: Synthetic oligonucleotide
  Antisense strand to SEQ ID NO: 821598
uacacuccagggauccuga

SEQ ID NO: 821600 - RNA, 19 nt, Artificial Sequence
  Description of Artificial Sequence: Synthetic oligonucleotide
  Sense strand starting at position 3464 of SEQ ID NO: 587830
gaaguauugccuuacguug

SEQ ID NO: 821601 - RNA, 19 nt, Artificial Sequence
  Description of Artificial Sequence: Synthetic oligonucleotide
  Antisense strand to SEQ ID NO: 821600
caacguaaggcaauacuuc

SEQ ID NO: 821602 - RNA, 19 nt, Artificial Sequence
  Description of Artificial Sequence: Synthetic oligonucleotide
  Sense strand starting at position 3527 of SEQ ID NO: 587830
uggcuacgucacgaaucaa

SEQ ID NO: 821603 - RNA, 19 nt, Artificial Sequence
  Description of Artificial Sequence: Synthetic oligonucleotide
  Antisense strand to SEQ ID NO: 821602
uugauucgugacguagcca

SEQ ID NO: 821604 - RNA, 19 nt, Artificial Sequence
  Description of Artificial Sequence: Synthetic oligonucleotide
  Sense strand starting at position 3582 of SEQ ID NO: 587830
uagccaguugcauaucaga

SEQ ID NO: 821605 - RNA, 19 nt, Artificial Sequence
  Description of Artificial Sequence: Synthetic oligonucleotide
  Antisense strand to SEQ ID NO: 821604
ucugauaugcaacuggcua

SEQ ID NO: 821606 - RNA, 19 nt, Artificial Sequence
  Description of Artificial Sequence: Synthetic oligonucleotide
  Sense strand starting at position 3609 of SEQ ID NO: 587830
gggauuucagaucguuagc

SEQ ID NO: 821607 - RNA, 19 nt, Artificial Sequence
  Description of Artificial Sequence: Synthetic oligonucleotide
  Antisense strand to SEQ ID NO: 821606
gcuaacgaucugaaauccc

SEQ ID NO: 821608 - RNA, 19 nt, Artificial Sequence
  Description of Artificial Sequence: Synthetic oligonucleotide
  Sense strand starting at position 3618 of SEQ ID NO: 587830
gaucguuagcaguaguaug

SEQ ID NO: 821609 - RNA, 19 nt, Artificial Sequence
  Description of Artificial Sequence: Synthetic oligonucleotide
  Antisense strand to SEQ ID NO: 821608
cauacuacugcuaacgauc

SEQ ID NO: 821610 - RNA, 19 nt, Artificial Sequence
  Description of Artificial Sequence: Synthetic oligonucleotide
  Sense strand starting at position 3620 of SEQ ID NO: 587830
ucguuagcaguaguaugua

SEQ ID NO: 821611 - RNA, 19 nt, Artificial Sequence
  Description of Artificial Sequence: Synthetic oligonucleotide
  Antisense strand to SEQ ID NO: 821610
uacauacuacugcuaacga

SEQ ID NO: 821612 - RNA, 19 nt, Artificial Sequence
  Description of Artificial Sequence: Synthetic oligonucleotide
  Sense strand starting at position 3665 of SEQ ID NO: 587830
gaguucucccuccaggcaa

SEQ ID NO: 821613 - RNA, 19 nt, Artificial Sequence
  Description of Artificial Sequence: Synthetic oligonucleotide
  Antisense strand to SEQ ID NO: 821612
uugccuggagggagaacuc

SEQ ID NO: 821614 - RNA, 19 nt, Artificial Sequence
  Description of Artificial Sequence: Synthetic oligonucleotide
  Sense strand starting at position 3719 of SEQ ID NO: 587830
gaagacugguaaguuguau

SEQ ID NO: 821615 - RNA, 19 nt, Artificial Sequence
  Description of Artificial Sequence: Synthetic oligonucleotide
  Antisense strand to SEQ ID NO: 821614
auacaacuuaccagucuuc

SEQ ID NO: 821616 - RNA, 19 nt, Artificial Sequence
  Description of Artificial Sequence: Synthetic oligonucleotide
  Sense strand starting at position 3746 of SEQ ID NO: 587830
ugagguuucugacuaggca

SEQ ID NO: 821617 - RNA, 19 nt, Artificial Sequence
  Description of Artificial Sequence: Synthetic oligonucleotide
  Antisense strand to SEQ ID NO: 821616
ugccuagucagaaaccuca

SEQ ID NO: 821618 - RNA, 19 nt, Artificial Sequence
  Description of Artificial Sequence: Synthetic oligonucleotide
  Sense strand starting at position 3813 of SEQ ID NO: 587830
aggaauagauuuggcagaa

SEQ ID NO: 821619 - RNA, 19 nt, Artificial Sequence
  Description of Artificial Sequence: Synthetic oligonucleotide
  Antisense strand to SEQ ID NO: 821618
uucugccaaaucuauuccu

SEQ ID NO: 821620 - RNA, 19 nt, Artificial Sequence
  Description of Artificial Sequence: Synthetic oligonucleotide
  Sense strand starting at position 3831 of SEQ ID NO: 587830
aucuguacaucuguaaaca

SEQ ID NO: 821621 - RNA, 19 nt, Artificial Sequence
  Description of Artificial Sequence: Synthetic oligonucleotide
  Antisense strand to SEQ ID NO: 821620
uguuuacagauguacagau

SEQ ID NO: 821622 - RNA, 19 nt, Artificial Sequence
  Description of Artificial Sequence: Synthetic oligonucleotide
  Sense strand starting at position 3832 of SEQ ID NO: 587830
ucuguacaucuguaaacag

SEQ ID NO: 821623 - RNA, 19 nt, Artificial Sequence
  Description of Artificial Sequence: Synthetic oligonucleotide
  Antisense strand to SEQ ID NO: 821622
cuguuuacagauguacaga

SEQ ID NO: 821624 - RNA, 19 nt, Artificial Sequence
  Description of Artificial Sequence: Synthetic oligonucleotide
  Sense strand starting at position 3889 of SEQ ID NO: 587830
gcaaguagugcuucccuuu

SEQ ID NO: 821625 - RNA, 19 nt, Artificial Sequence
  Description of Artificial Sequence: Synthetic oligonucleotide
  Antisense strand to SEQ ID NO: 821624
aaagggaagcacuacuugc

SEQ ID NO: 821626 - RNA, 19 nt, Artificial Sequence
  Description of Artificial Sequence: Synthetic oligonucleotide
  Sense strand starting at position 19 of SEQ ID NO: 587831
accauuucuugugugcuaa

SEQ ID NO: 821627 - RNA, 19 nt, Artificial Sequence
  Description of Artificial Sequence: Synthetic oligonucleotide
  Antisense strand to SEQ ID NO: 821626
uuagcacacaagaaauggu

SEQ ID NO: 821628 - RNA, 19 nt, Artificial Sequence
  Description of Artificial Sequence: Synthetic oligonucleotide
  Sense strand starting at position 20 of SEQ ID NO: 587831
ccauuucuugugugcuaau

SEQ ID NO: 821629 - RNA, 19 nt, Artificial Sequence
  Description of Artificial Sequence: Synthetic oligonucleotide
  Antisense strand to SEQ ID NO: 821628
auuagcacacaagaaaugg

SEQ ID NO: 821630 - RNA, 19 nt, Artificial Sequence
  Description of Artificial Sequence: Synthetic oligonucleotide
  Sense strand starting at position 70 of SEQ ID NO: 587831
gaaggcaggcaguauuaau

SEQ ID NO: 821631 - RNA, 19 nt, Artificial Sequence
  Description of Artificial Sequence: Synthetic oligonucleotide
  Antisense strand to SEQ ID NO: 821630
auuaauacugccugccuuc

SEQ ID NO: 821632 - RNA, 19 nt, Artificial Sequence
  Description of Artificial Sequence: Synthetic oligonucleotide
  Sense strand starting at position 137 of SEQ ID NO: 587831
gaggguaaggcucgauaaa

SEQ ID NO: 821633 - RNA, 19 nt, Artificial Sequence
  Description of Artificial Sequence: Synthetic oligonucleotide
  Antisense strand to SEQ ID NO: 821632
uuuaucgagccuuacccuc

SEQ ID NO: 821634 - RNA, 19 nt, Artificial Sequence
  Description of Artificial Sequence: Synthetic oligonucleotide
  Sense strand starting at position 138 of SEQ ID NO: 587831
aggguaaggcucgauaaac

SEQ ID NO: 821635 - RNA, 19 nt, Artificial Sequence
  Description of Artificial Sequence: Synthetic oligonucleotide
  Antisense strand to SEQ ID NO: 821634
guuuaucgagccuuacccu

SEQ ID NO: 821636 - RNA, 19 nt, Artificial Sequence
  Description of Artificial Sequence: Synthetic oligonucleotide
  Sense strand starting at position 158 of SEQ ID NO: 587831
gcugacaaggcugauauga

SEQ ID NO: 821637 - RNA, 19 nt, Artificial Sequence
  Description of Artificial Sequence: Synthetic oligonucleotide
  Antisense strand to SEQ ID NO: 821636
ucauaucagccuugucagc

SEQ ID NO: 821638 - RNA, 19 nt, Artificial Sequence
  Description of Artificial Sequence: Synthetic oligonucleotide
  Sense strand starting at position 168 of SEQ ID NO: 587831
cugauaugaugaccaaguu

SEQ ID NO: 821639 - RNA, 19 nt, Artificial Sequence
  Description of Artificial Sequence: Synthetic oligonucleotide
  Antisense strand to SEQ ID NO: 821638
aacuuggucaucauaucag

SEQ ID NO: 821640 - RNA, 19 nt, Artificial Sequence
  Description of Artificial Sequence: Synthetic oligonucleotide
  Sense strand starting at position 178 of SEQ ID NO: 587831
gaccaaguucuugggcaau

SEQ ID NO: 821641 - RNA, 19 nt, Artificial Sequence
  Description of Artificial Sequence: Synthetic oligonucleotide
  Antisense strand to SEQ ID NO: 821640
auugcccaagaacuugguc

SEQ ID NO: 821642 - RNA, 19 nt, Artificial Sequence
  Description of Artificial Sequence: Synthetic oligonucleotide
  Sense strand starting at position 574 of SEQ ID NO: 587831
aagagacggucuuuagaua

SEQ ID NO: 821643 - RNA, 19 nt, Artificial Sequence
  Description of Artificial Sequence: Synthetic oligonucleotide
  Antisense strand to SEQ ID NO: 821642
uaucuaaagaccgucucuu

SEQ ID NO: 821644 - RNA, 19 nt, Artificial Sequence
  Description of Artificial Sequence: Synthetic oligonucleotide
  Sense strand starting at position 586 of SEQ ID NO: 587831
uuagauaaguccuuugaca

SEQ ID NO: 821645 - RNA, 19 nt, Artificial Sequence
  Description of Artificial Sequence: Synthetic oligonucleotide
  Antisense strand to SEQ ID NO: 821644
ugucaaaggacuuaucuaa

SEQ ID NO: 821646 - RNA, 19 nt, Artificial Sequence
  Description of Artificial Sequence: Synthetic oligonucleotide
  Sense strand starting at position 588 of SEQ ID NO: 587831
agauaaguccuuugacauc

SEQ ID NO: 821647 - RNA, 19 nt, Artificial Sequence
  Description of Artificial Sequence: Synthetic oligonucleotide
  Antisense strand to SEQ ID NO: 821646
gaugucaaaggacuuaucu

SEQ ID NO: 821648 - RNA, 19 nt, Artificial Sequence
  Description of Artificial Sequence: Synthetic oligonucleotide
  Sense strand starting at position 594 of SEQ ID NO: 587831
guccuuugacaucagcuau

SEQ ID NO: 821649 - RNA, 19 nt, Artificial Sequence
  Description of Artificial Sequence: Synthetic oligonucleotide
  Antisense strand to SEQ ID NO: 821648
auagcugaugucaaaggac

SEQ ID NO: 821650 - RNA, 19 nt, Artificial Sequence
  Description of Artificial Sequence: Synthetic oligonucleotide
  Sense strand starting at position 692 of SEQ ID NO: 587831
cagucuaggcaccaagaua

SEQ ID NO: 821651 - RNA, 19 nt, Artificial Sequence
  Description of Artificial Sequence: Synthetic oligonucleotide
  Antisense strand to SEQ ID NO: 821650
uaucuuggugccuagacug

SEQ ID NO: 821652 - RNA, 19 nt, Artificial Sequence
  Description of Artificial Sequence: Synthetic oligonucleotide
  Sense strand starting at position 708 of SEQ ID NO: 587831
auaagcuaauggguagaua

SEQ ID NO: 821653 - RNA, 19 nt, Artificial Sequence
  Description of Artificial Sequence: Synthetic oligonucleotide
  Antisense strand to SEQ ID NO: 821652
uaucuacccauuagcuuau

SEQ ID NO: 821654 - RNA, 19 nt, Artificial Sequence
  Description of Artificial Sequence: Synthetic oligonucleotide
  Sense strand starting at position 1657 of SEQ ID NO: 587831
acggcugauugggcaaaga

SEQ ID NO: 821655 - RNA, 19 nt, Artificial Sequence
  Description of Artificial Sequence: Synthetic oligonucleotide
  Antisense strand to SEQ ID NO: 821654
ucuuugcccaaucagccgu

SEQ ID NO: 821656 - RNA, 19 nt, Artificial Sequence
  Description of Artificial Sequence: Synthetic oligonucleotide
  Sense strand starting at position 1770 of SEQ ID NO: 587831
uccagauucucccuuugga

SEQ ID NO: 821657 - RNA, 19 nt, Artificial Sequence
  Description of Artificial Sequence: Synthetic oligonucleotide
  Antisense strand to SEQ ID NO: 821656
uccaaagggagaaucugga

SEQ ID NO: 821658 - RNA, 19 nt, Artificial Sequence
  Description of Artificial Sequence: Synthetic oligonucleotide
  Sense strand starting at position 1773 of SEQ ID NO: 587831
agauucucccuuuggagaa

SEQ ID NO: 821659 - RNA, 19 nt, Artificial Sequence
  Description of Artificial Sequence: Synthetic oligonucleotide
  Antisense strand to SEQ ID NO: 821658
uucuccaaagggagaaucu

SEQ ID NO: 821660 - RNA, 19 nt, Artificial Sequence
  Description of Artificial Sequence: Synthetic oligonucleotide
  Sense strand starting at position 1880 of SEQ ID NO: 587831
cagauauuaccaugagcag

SEQ ID NO: 821661 - RNA, 19 nt, Artificial Sequence
  Description of Artificial Sequence: Synthetic oligonucleotide
  Antisense strand to SEQ ID NO: 821660
cugcucaugguaauaucug

SEQ ID NO: 821662 - RNA, 19 nt, Artificial Sequence
  Description of Artificial Sequence: Synthetic oligonucleotide
  Sense strand starting at position 1965 of SEQ ID NO: 587831
ggcagugccaaugagagaa

SEQ ID NO: 821663 - RNA, 19 nt, Artificial Sequence
  Description of Artificial Sequence: Synthetic oligonucleotide
  Antisense strand to SEQ ID NO: 821662
uucucucauuggcacugcc

SEQ ID NO: 821664 - RNA, 19 nt, Artificial Sequence
  Description of Artificial Sequence: Synthetic oligonucleotide
  Sense strand starting at position 2055 of SEQ ID NO: 587831
cggaauucucaacaaugca

SEQ ID NO: 821665 - RNA, 19 nt, Artificial Sequence
  Description of Artificial Sequence: Synthetic oligonucleotide
  Antisense strand to SEQ ID NO: 821664
ugcauuguugagaauuccg

SEQ ID NO: 821666 - RNA, 19 nt, Artificial Sequence
  Description of Artificial Sequence: Synthetic oligonucleotide
  Sense strand starting at position 2238 of SEQ ID NO: 587831
uaacucaucgcugagguga

SEQ ID NO: 821667 - RNA, 19 nt, Artificial Sequence
  Description of Artificial Sequence: Synthetic oligonucleotide
  Antisense strand to SEQ ID NO: 821666
ucaccucagcgaugaguua

SEQ ID NO: 821668 - RNA, 19 nt, Artificial Sequence
  Description of Artificial Sequence: Synthetic oligonucleotide
  Sense strand starting at position 2265 of SEQ ID NO: 587831
ugcugaaguccugagguaa

SEQ ID NO: 821669 - RNA, 19 nt, Artificial Sequence
  Description of Artificial Sequence: Synthetic oligonucleotide
  Antisense strand to SEQ ID NO: 821668
uuaccucaggacuucagca

SEQ ID NO: 821670 - RNA, 19 nt, Artificial Sequence
  Description of Artificial Sequence: Synthetic oligonucleotide
  Sense strand starting at position 2871 of SEQ ID NO: 587831
augcauuucuuguuuacuu

SEQ ID NO: 821671 - RNA, 19 nt, Artificial Sequence
  Description of Artificial Sequence: Synthetic oligonucleotide
  Antisense strand to SEQ ID NO: 821670
aaguaaacaagaaaugcau

SEQ ID NO: 821672 - RNA, 19 nt, Artificial Sequence
  Description of Artificial Sequence: Synthetic oligonucleotide
  Sense strand starting at position 2872 of SEQ ID NO: 587831
ugcauuucuuguuuacuuu

SEQ ID NO: 821673 - RNA, 19 nt, Artificial Sequence
  Description of Artificial Sequence: Synthetic oligonucleotide
  Antisense strand to SEQ ID NO: 821672
aaaguaaacaagaaaugca

SEQ ID NO: 821674 - RNA, 19 nt, Artificial Sequence
  Description of Artificial Sequence: Synthetic oligonucleotide
  Sense strand starting at position 2932 of SEQ ID NO: 587831
aguaaucucugguucugag

SEQ ID NO: 821675 - RNA, 19 nt, Artificial Sequence
  Description of Artificial Sequence: Synthetic oligonucleotide
  Antisense strand to SEQ ID NO: 821674
cucagaaccagagauuacu

SEQ ID NO: 821676 - RNA, 19 nt, Artificial Sequence
  Description of Artificial Sequence: Synthetic oligonucleotide
  Sense strand starting at position 3169 of SEQ ID NO: 587831
ugguuacuuuacccucaua

SEQ ID NO: 821677 - RNA, 19 nt, Artificial Sequence
  Description of Artificial Sequence: Synthetic oligonucleotide
  Antisense strand to SEQ ID NO: 821676
uaugaggguaaaguaacca

SEQ ID NO: 821678 - RNA, 19 nt, Artificial Sequence
  Description of Artificial Sequence: Synthetic oligonucleotide
  Sense strand starting at position 3291 of SEQ ID NO: 587831
ugucucucagaauaugauu

SEQ ID NO: 821679 - RNA, 19 nt, Artificial Sequence
  Description of Artificial Sequence: Synthetic oligonucleotide
  Antisense strand to SEQ ID NO: 821678
aaucauauucugagagaca

SEQ ID NO: 821680 - RNA, 19 nt, Artificial Sequence
  Description of Artificial Sequence: Synthetic oligonucleotide
  Sense strand starting at position 3312 of SEQ ID NO: 587831
cucaguuugggccaaguga

SEQ ID NO: 821681 - RNA, 19 nt, Artificial Sequence
  Description of Artificial Sequence: Synthetic oligonucleotide
  Antisense strand to SEQ ID NO: 821680
ucacuuggcccaaacugag

SEQ ID NO: 821682 - RNA, 19 nt, Artificial Sequence
  Description of Artificial Sequence: Synthetic oligonucleotide
  Sense strand starting at position 3342 of SEQ ID NO: 587831
caaauuagcuggucagaga

SEQ ID NO: 821683 - RNA, 19 nt, Artificial Sequence
  Description of Artificial Sequence: Synthetic oligonucleotide
  Antisense strand to SEQ ID NO: 821682
ucucugaccagcuaauuug

SEQ ID NO: 821684 - RNA, 19 nt, Artificial Sequence
  Description of Artificial Sequence: Synthetic oligonucleotide
  Sense strand starting at position 3383 of SEQ ID NO: 587831
uaaggaauguccuuccagu

SEQ ID NO: 821685 - RNA, 19 nt, Artificial Sequence
  Description of Artificial Sequence: Synthetic oligonucleotide
  Antisense strand to SEQ ID NO: 821684
acuggaaggacauuccuua

SEQ ID NO: 821686 - RNA, 19 nt, Artificial Sequence
  Description of Artificial Sequence: Synthetic oligonucleotide
  Sense strand starting at position 3413 of SEQ ID NO: 587831
uaggcucuccaaggagauu

SEQ ID NO: 821687 - RNA, 19 nt, Artificial Sequence
  Description of Artificial Sequence: Synthetic oligonucleotide
  Antisense strand to SEQ ID NO: 821686
aaucuccuuggagagccua

SEQ ID NO: 821688 - RNA, 19 nt, Artificial Sequence
  Description of Artificial Sequence: Synthetic oligonucleotide
  Sense strand starting at position 3439 of SEQ ID NO: 587831
gggugaaaugacuggcauu

SEQ ID NO: 821689 - RNA, 19 nt, Artificial Sequence
  Description of Artificial Sequence: Synthetic oligonucleotide
  Antisense strand to SEQ ID NO: 821688
aaugccagucauuucaccc

SEQ ID NO: 821690 - RNA, 19 nt, Artificial Sequence
  Description of Artificial Sequence: Synthetic oligonucleotide
  Sense strand starting at position 3465 of SEQ ID NO: 587831
gagcgaaauuucugaauuu

SEQ ID NO: 821691 - RNA, 19 nt, Artificial Sequence
  Description of Artificial Sequence: Synthetic oligonucleotide
  Antisense strand to SEQ ID NO: 821690
aaauucagaaauuucgcuc

SEQ ID NO: 821692 - RNA, 19 nt, Artificial Sequence
  Description of Artificial Sequence: Synthetic oligonucleotide
  Sense strand starting at position 3466 of SEQ ID NO: 587831
agcgaaauuucugaauuuc

SEQ ID NO: 821693 - RNA, 19 nt, Artificial Sequence
  Description of Artificial Sequence: Synthetic oligonucleotide
  Antisense strand to SEQ ID NO: 821692
gaaauucagaaauuucgcu

SEQ ID NO: 821694 - RNA, 19 nt, Artificial Sequence
  Description of Artificial Sequence: Synthetic oligonucleotide
  Sense strand starting at position 3487 of SEQ ID NO: 587831
agcugugauagguaaugua

SEQ ID NO: 821695 - RNA, 19 nt, Artificial Sequence
  Description of Artificial Sequence: Synthetic oligonucleotide
  Antisense strand to SEQ ID NO: 821694
uacauuaccuaucacagcu

SEQ ID NO: 821696 - RNA, 19 nt, Artificial Sequence
  Description of Artificial Sequence: Synthetic oligonucleotide
  Sense strand starting at position 3577 of SEQ ID NO: 587831
uuguuuguuggugauauua

SEQ ID NO: 821697 - RNA, 19 nt, Artificial Sequence
  Description of Artificial Sequence: Synthetic oligonucleotide
  Antisense strand to SEQ ID NO: 821696
uaauaucaccaacaaacaa

SEQ ID NO: 821698 - RNA, 19 nt, Artificial Sequence
  Description of Artificial Sequence: Synthetic oligonucleotide
  Sense strand starting at position 3585 of SEQ ID NO: 587831
uggugauauuaccuaucag

SEQ ID NO: 821699 - RNA, 19 nt, Artificial Sequence
  Description of Artificial Sequence: Synthetic oligonucleotide
  Antisense strand to SEQ ID NO: 821698
cugauagguaauaucacca

SEQ ID NO: 821700 - RNA, 19 nt, Artificial Sequence
  Description of Artificial Sequence: Synthetic oligonucleotide
  Sense strand starting at position 3602 of SEQ ID NO: 587831
agcaccuggaguuagauua

SEQ ID NO: 821701 - RNA, 19 nt, Artificial Sequence
  Description of Artificial Sequence: Synthetic oligonucleotide
  Antisense strand to SEQ ID NO: 821700
uaaucuaacuccaggugcu

SEQ ID NO: 821702 - RNA, 19 nt, Artificial Sequence
  Description of Artificial Sequence: Synthetic oligonucleotide
  Sense strand starting at position 3609 of SEQ ID NO: 587831
ggaguuagauuaucuaguc

SEQ ID NO: 821703 - RNA, 19 nt, Artificial Sequence
  Description of Artificial Sequence: Synthetic oligonucleotide
  Antisense strand to SEQ ID NO: 821702
gacuagauaaucuaacucc

SEQ ID NO: 821704 - RNA, 19 nt, Artificial Sequence
  Description of Artificial Sequence: Synthetic oligonucleotide
  Sense strand starting at position 3610 of SEQ ID NO: 587831
gaguuagauuaucuagucu

SEQ ID NO: 821705 - RNA, 19 nt, Artificial Sequence
  Description of Artificial Sequence: Synthetic oligonucleotide
  Antisense strand to SEQ ID NO: 821704
agacuagauaaucuaacuc

SEQ ID NO: 821706 - RNA, 19 nt, Artificial Sequence
  Description of Artificial Sequence: Synthetic oligonucleotide
  Sense strand starting at position 403 of SEQ ID NO: 587832
acaaucauucuaggucagu

SEQ ID NO: 821707 - RNA, 19 nt, Artificial Sequence
  Description of Artificial Sequence: Synthetic oligonucleotide
  Antisense strand to SEQ ID NO: 821706
acugaccuagaaugauugu

SEQ ID NO: 821708 - RNA, 19 nt, Artificial Sequence
  Description of Artificial Sequence: Synthetic oligonucleotide
  Sense strand starting at position 409 of SEQ ID NO: 587832
auucuaggucaguaacuau

SEQ ID NO: 821709 - RNA, 19 nt, Artificial Sequence
  Description of Artificial Sequence: Synthetic oligonucleotide
  Antisense strand to SEQ ID NO: 821708
auaguuacugaccuagaau

SEQ ID NO: 821710 - RNA, 19 nt, Artificial Sequence
  Description of Artificial Sequence: Synthetic oligonucleotide
  Sense strand starting at position 412 of SEQ ID NO: 587832
cuaggucaguaacuauaaa

SEQ ID NO: 821711 - RNA, 19 nt, Artificial Sequence
  Description of Artificial Sequence: Synthetic oligonucleotide
  Antisense strand to SEQ ID NO: 821710
uuuauaguuacugaccuag

SEQ ID NO: 821712 - RNA, 19 nt, Artificial Sequence
  Description of Artificial Sequence: Synthetic oligonucleotide
  Sense strand starting at position 549 of SEQ ID NO: 587832
aaaggagaucaguguaugu

SEQ ID NO: 821713 - RNA, 19 nt, Artificial Sequence
  Description of Artificial Sequence: Synthetic oligonucleotide
  Antisense strand to SEQ ID NO: 821712
acauacacugaucuccuuu

SEQ ID NO: 821714 - RNA, 19 nt, Artificial Sequence
  Description of Artificial Sequence: Synthetic oligonucleotide
  Sense strand starting at position 551 of SEQ ID NO: 587832
aggagaucaguguaugugu

SEQ ID NO: 821715 - RNA, 19 nt, Artificial Sequence
  Description of Artificial Sequence: Synthetic oligonucleotide
  Antisense strand to SEQ ID NO: 821714
acacauacacugaucuccu

SEQ ID NO: 821716 - RNA, 19 nt, Artificial Sequence
  Description of Artificial Sequence: Synthetic oligonucleotide
  Sense strand starting at position 598 of SEQ ID NO: 587832
aucacagucucauugaaag

SEQ ID NO: 821717 - RNA, 19 nt, Artificial Sequence
  Description of Artificial Sequence: Synthetic oligonucleotide
  Antisense strand to SEQ ID NO: 821716
cuuucaaugagacugugau

SEQ ID NO: 821718 - RNA, 19 nt, Artificial Sequence
  Description of Artificial Sequence: Synthetic oligonucleotide
  Sense strand starting at position 641 of SEQ ID NO: 587832
ggagguaaaggagguguua

SEQ ID NO: 821719 - RNA, 19 nt, Artificial Sequence
  Description of Artificial Sequence: Synthetic oligonucleotide
  Antisense strand to SEQ ID NO: 821718
uaacaccuccuuuaccucc

SEQ ID NO: 821720 - RNA, 19 nt, Artificial Sequence
  Description of Artificial Sequence: Synthetic oligonucleotide
  Sense strand starting at position 656 of SEQ ID NO: 587832
guuagcuauguggaaaucu

SEQ ID NO: 821721 - RNA, 19 nt, Artificial Sequence
  Description of Artificial Sequence: Synthetic oligonucleotide
  Antisense strand to SEQ ID NO: 821720
agauuuccacauagcuaac

SEQ ID NO: 821722 - RNA, 19 nt, Artificial Sequence
  Description of Artificial Sequence: Synthetic oligonucleotide
  Sense strand starting at position 736 of SEQ ID NO: 587832
ugguaugcucaaggaauag

SEQ ID NO: 821723 - RNA, 19 nt, Artificial Sequence
  Description of Artificial Sequence: Synthetic oligonucleotide
  Antisense strand to SEQ ID NO: 821722
cuauuccuugagcauacca

SEQ ID NO: 821724 - RNA, 19 nt, Artificial Sequence
  Description of Artificial Sequence: Synthetic oligonucleotide
  Sense strand starting at position 792 of SEQ ID NO: 587832
ggcaaagacuaucugagau

SEQ ID NO: 821725 - RNA, 19 nt, Artificial Sequence
  Description of Artificial Sequence: Synthetic oligonucleotide
  Antisense strand to SEQ ID NO: 821724
aucucagauagucuuugcc

SEQ ID NO: 821726 - RNA, 19 nt, Artificial Sequence
  Description of Artificial Sequence: Synthetic oligonucleotide
  Sense strand starting at position 880 of SEQ ID NO: 587832
agggaaacuuggguuucua

SEQ ID NO: 821727 - RNA, 19 nt, Artificial Sequence
  Description of Artificial Sequence: Synthetic oligonucleotide
  Antisense strand to SEQ ID NO: 821726
uagaaacccaaguuucccu

SEQ ID NO: 821728 - RNA, 19 nt, Artificial Sequence
  Description of Artificial Sequence: Synthetic oligonucleotide
  Sense strand starting at position 890 of SEQ ID NO: 587832
ggguuucuaaagugacaga

SEQ ID NO: 821729 - RNA, 19 nt, Artificial Sequence
  Description of Artificial Sequence: Synthetic oligonucleotide
  Antisense strand to SEQ ID NO: 821728
ucugucacuuuagaaaccc

SEQ ID NO: 821730 - RNA, 19 nt, Artificial Sequence
  Description of Artificial Sequence: Synthetic oligonucleotide
  Sense strand starting at position 965 of SEQ ID NO: 587832
gguauuaaggaugguagca

SEQ ID NO: 821731 - RNA, 19 nt, Artificial Sequence
  Description of Artificial Sequence: Synthetic oligonucleotide
  Antisense strand to SEQ ID NO: 821730
ugcuaccauccuuaauacc

SEQ ID NO: 821732 - RNA, 19 nt, Artificial Sequence
  Description of Artificial Sequence: Synthetic oligonucleotide
  Sense strand starting at position 1021 of SEQ ID NO: 587832
gaaagaugacgauggcaca

SEQ ID NO: 821733 - RNA, 19 nt, Artificial Sequence
  Description of Artificial Sequence: Synthetic oligonucleotide
  Antisense strand to SEQ ID NO: 821732
ugugccaucgucaucuuuc

SEQ ID NO: 821734 - RNA, 19 nt, Artificial Sequence
  Description of Artificial Sequence: Synthetic oligonucleotide
  Sense strand starting at position 1047 of SEQ ID NO: 587832
agguguugaggacauguuu

SEQ ID NO: 821735 - RNA, 19 nt, Artificial Sequence
  Description of Artificial Sequence: Synthetic oligonucleotide
  Antisense strand to SEQ ID NO: 821734
aaacauguccucaacaccu

SEQ ID NO: 821736 - RNA, 19 nt, Artificial Sequence
  Description of Artificial Sequence: Synthetic oligonucleotide
  Sense strand starting at position 1111 of SEQ ID NO: 587832
uggccugauuaaucagaag

SEQ ID NO: 821737 - RNA, 19 nt, Artificial Sequence
  Description of Artificial Sequence: Synthetic oligonucleotide
  Antisense strand to SEQ ID NO: 821736
cuucugauuaaucaggcca

SEQ ID NO: 821738 - RNA, 19 nt, Artificial Sequence
  Description of Artificial Sequence: Synthetic oligonucleotide
  Sense strand starting at position 1233 of SEQ ID NO: 587832
ucuuauaccuagguggaga

SEQ ID NO: 821739 - RNA, 19 nt, Artificial Sequence
  Description of Artificial Sequence: Synthetic oligonucleotide
  Antisense strand to SEQ ID NO: 821738
ucuccaccuagguauaaga

SEQ ID NO: 821740 - RNA, 19 nt, Artificial Sequence
  Description of Artificial Sequence: Synthetic oligonucleotide
  Sense strand starting at position 1234 of SEQ ID NO: 587832
cuuauaccuagguggagau

SEQ ID NO: 821741 - RNA, 19 nt, Artificial Sequence
  Description of Artificial Sequence: Synthetic oligonucleotide
  Antisense strand to SEQ ID NO: 821740
aucuccaccuagguauaag

SEQ ID NO: 821742 - RNA, 19 nt, Artificial Sequence
  Description of Artificial Sequence: Synthetic oligonucleotide
  Sense strand starting at position 1238 of SEQ ID NO: 587832
uaccuagguggagauguau

SEQ ID NO: 821743 - RNA, 19 nt, Artificial Sequence
  Description of Artificial Sequence: Synthetic oligonucleotide
  Antisense strand to SEQ ID NO: 821742
auacaucuccaccuaggua

SEQ ID NO: 821744 - RNA, 19 nt, Artificial Sequence
  Description of Artificial Sequence: Synthetic oligonucleotide
  Sense strand starting at position 1269 of SEQ ID NO: 587832
guuugacaagcccagagau

SEQ ID NO: 821745 - RNA, 19 nt, Artificial Sequence
  Description of Artificial Sequence: Synthetic oligonucleotide
  Antisense strand to SEQ ID NO: 821744
aucucugggcuugucaaac

SEQ ID NO: 821746 - RNA, 19 nt, Artificial Sequence
  Description of Artificial Sequence: Synthetic oligonucleotide
  Sense strand starting at position 1296 of SEQ ID NO: 587832
aaguaaagccuagagaugu

SEQ ID NO: 821747 - RNA, 19 nt, Artificial Sequence
  Description of Artificial Sequence: Synthetic oligonucleotide
  Antisense strand to SEQ ID NO: 821746
acaucucuaggcuuuacuu

SEQ ID NO: 821748 - RNA, 19 nt, Artificial Sequence
  Description of Artificial Sequence: Synthetic oligonucleotide
  Sense strand starting at position 1330 of SEQ ID NO: 587832
uguuauuuggaugguaugu

SEQ ID NO: 821749 - RNA, 19 nt, Artificial Sequence
  Description of Artificial Sequence: Synthetic oligonucleotide
  Antisense strand to SEQ ID NO: 821748
acauaccauccaaauaaca

SEQ ID NO: 821750 - RNA, 19 nt, Artificial Sequence
  Description of Artificial Sequence: Synthetic oligonucleotide
  Sense strand starting at position 1354 of SEQ ID NO: 587832
cgugaacacagaugaaauc

SEQ ID NO: 821751 - RNA, 19 nt, Artificial Sequence
  Description of Artificial Sequence: Synthetic oligonucleotide
  Antisense strand to SEQ ID NO: 821750
gauuucaucuguguucacg

SEQ ID NO: 821752 - RNA, 19 nt, Artificial Sequence
  Description of Artificial Sequence: Synthetic oligonucleotide
  Sense strand starting at position 1400 of SEQ ID NO: 587832
gaaugaggucuguagcauc

SEQ ID NO: 821753 - RNA, 19 nt, Artificial Sequence
  Description of Artificial Sequence: Synthetic oligonucleotide
  Antisense strand to SEQ ID NO: 821752
gaugcuacagaccucauuc

SEQ ID NO: 821754 - RNA, 19 nt, Artificial Sequence
  Description of Artificial Sequence: Synthetic oligonucleotide
  Sense strand starting at position 1411 of SEQ ID NO: 587832
guagcaucccaacauuaag

SEQ ID NO: 821755 - RNA, 19 nt, Artificial Sequence
  Description of Artificial Sequence: Synthetic oligonucleotide
  Antisense strand to SEQ ID NO: 821754
cuuaauguugggaugcuac

SEQ ID NO: 821756 - RNA, 19 nt, Artificial Sequence
  Description of Artificial Sequence: Synthetic oligonucleotide
  Sense strand starting at position 1709 of SEQ ID NO: 587832
ugauauuucucagaauuag

SEQ ID NO: 821757 - RNA, 19 nt, Artificial Sequence
  Description of Artificial Sequence: Synthetic oligonucleotide
  Antisense strand to SEQ ID NO: 821756
cuaauucugagaaauauca

SEQ ID NO: 821758 - RNA, 19 nt, Artificial Sequence
  Description of Artificial Sequence: Synthetic oligonucleotide
  Sense strand starting at position 1737 of SEQ ID NO: 587832
gaaagagcuguuuagucuc

SEQ ID NO: 821759 - RNA, 19 nt, Artificial Sequence
  Description of Artificial Sequence: Synthetic oligonucleotide
  Antisense strand to SEQ ID NO: 821758
gagacuaaacagcucuuuc

SEQ ID NO: 821760 - RNA, 19 nt, Artificial Sequence
  Description of Artificial Sequence: Synthetic oligonucleotide
  Sense strand starting at position 1748 of SEQ ID NO: 587832
uuagucucugaucaucaua

SEQ ID NO: 821761 - RNA, 19 nt, Artificial Sequence
  Description of Artificial Sequence: Synthetic oligonucleotide
  Antisense strand to SEQ ID NO: 821760
uaugaugaucagagacuaa

SEQ ID NO: 821762 - RNA, 19 nt, Artificial Sequence
  Description of Artificial Sequence: Synthetic oligonucleotide
  Sense strand starting at position 1751 of SEQ ID NO: 587832
gucucugaucaucauagca

SEQ ID NO: 821763 - RNA, 19 nt, Artificial Sequence
  Description of Artificial Sequence: Synthetic oligonucleotide
  Antisense strand to SEQ ID NO: 821762
ugcuaugaugaucagagac

SEQ ID NO: 821764 - RNA, 19 nt, Artificial Sequence
  Description of Artificial Sequence: Synthetic oligonucleotide
  Sense strand starting at position 1863 of SEQ ID NO: 587832
caaacugguuggcuuaaga

SEQ ID NO: 821765 - RNA, 19 nt, Artificial Sequence
  Description of Artificial Sequence: Synthetic oligonucleotide
  Antisense strand to SEQ ID NO: 821764
ucuuaagccaaccaguuug

SEQ ID NO: 821766 - RNA, 19 nt, Artificial Sequence
  Description of Artificial Sequence: Synthetic oligonucleotide
  Sense strand starting at position 1873 of SEQ ID NO: 587832
ggcuuaagacaauggacau

SEQ ID NO: 821767 - RNA, 19 nt, Artificial Sequence
  Description of Artificial Sequence: Synthetic oligonucleotide
  Antisense strand to SEQ ID NO: 821766
auguccauugucuuaagcc

SEQ ID NO: 821768 - RNA, 19 nt, Artificial Sequence
  Description of Artificial Sequence: Synthetic oligonucleotide
  Sense strand starting at position 1959 of SEQ ID NO: 587832
gggagaauguguccuuuga

SEQ ID NO: 821769 - RNA, 19 nt, Artificial Sequence
  Description of Artificial Sequence: Synthetic oligonucleotide
  Antisense strand to SEQ ID NO: 821768
ucaaaggacacauucuccc

SEQ ID NO: 821770 - RNA, 19 nt, Artificial Sequence
  Description of Artificial Sequence: Synthetic oligonucleotide
  Sense strand starting at position 2114 of SEQ ID NO: 587832
agacacuugucacuugauu

SEQ ID NO: 821771 - RNA, 19 nt, Artificial Sequence
  Description of Artificial Sequence: Synthetic oligonucleotide
  Antisense strand to SEQ ID NO: 821770
aaucaagugacaagugucu

SEQ ID NO: 821772 - RNA, 19 nt, Artificial Sequence
  Description of Artificial Sequence: Synthetic oligonucleotide
  Sense strand starting at position 2351 of SEQ ID NO: 587832
auauuuaacguuugugcau

SEQ ID NO: 821773 - RNA, 19 nt, Artificial Sequence
  Description of Artificial Sequence: Synthetic oligonucleotide
  Antisense strand to SEQ ID NO: 821772
augcacaaacguuaaauau

SEQ ID NO: 821774 - RNA, 19 nt, Artificial Sequence
  Description of Artificial Sequence: Synthetic oligonucleotide
  Sense strand starting at position 2352 of SEQ ID NO: 587832
uauuuaacguuugugcaua

SEQ ID NO: 821775 - RNA, 19 nt, Artificial Sequence
  Description of Artificial Sequence: Synthetic oligonucleotide
  Antisense strand to SEQ ID NO: 821774
uaugcacaaacguuaaaua

SEQ ID NO: 821776 - RNA, 19 nt, Artificial Sequence
  Description of Artificial Sequence: Synthetic oligonucleotide
  Sense strand starting at position 2986 of SEQ ID NO: 587832
agucaccaugccugacaaa

SEQ ID NO: 821777 - RNA, 19 nt, Artificial Sequence
  Description of Artificial Sequence: Synthetic oligonucleotide
  Antisense strand to SEQ ID NO: 821776
uuugucaggcauggugacu

SEQ ID NO: 821778 - RNA, 19 nt, Artificial Sequence
  Description of Artificial Sequence: Synthetic oligonucleotide
  Sense strand starting at position 3023 of SEQ ID NO: 587832
ggguauggcuauaaggaga

SEQ ID NO: 821779 - RNA, 19 nt, Artificial Sequence
  Description of Artificial Sequence: Synthetic oligonucleotide
  Antisense strand to SEQ ID NO: 821778
ucuccuuauagccauaccc

SEQ ID NO: 821780 - RNA, 19 nt, Artificial Sequence
  Description of Artificial Sequence: Synthetic oligonucleotide
  Sense strand starting at position 3050 of SEQ ID NO: 587832
ugauauggcuauguauaca

SEQ ID NO: 821781 - RNA, 19 nt, Artificial Sequence
  Description of Artificial Sequence: Synthetic oligonucleotide
  Antisense strand to SEQ ID NO: 821780
uguauacauagccauauca

SEQ ID NO: 821782 - RNA, 19 nt, Artificial Sequence
  Description of Artificial Sequence: Synthetic oligonucleotide
  Sense strand starting at position 3133 of SEQ ID NO: 587832
gucauuguacuauauacau

SEQ ID NO: 821783 - RNA, 19 nt, Artificial Sequence
  Description of Artificial Sequence: Synthetic oligonucleotide
  Antisense strand to SEQ ID NO: 821782
auguauauaguacaaugac

SEQ ID NO: 821784 - RNA, 19 nt, Artificial Sequence
  Description of Artificial Sequence: Synthetic oligonucleotide
  Sense strand starting at position 3471 of SEQ ID NO: 587832
uacugauuccaauguggga

SEQ ID NO: 821785 - RNA, 19 nt, Artificial Sequence
  Description of Artificial Sequence: Synthetic oligonucleotide
  Antisense strand to SEQ ID NO: 821784
ucccacauuggaaucagua

SEQ ID NO: 821786 - RNA, 19 nt, Artificial Sequence
  Description of Artificial Sequence: Synthetic oligonucleotide
  Sense strand starting at position 39 of SEQ ID NO: 587833
acaccuugcgaugacauua

SEQ ID NO: 821787 - RNA, 19 nt, Artificial Sequence
  Description of Artificial Sequence: Synthetic oligonucleotide
  Antisense strand to SEQ ID NO: 821786
uaaugucaucgcaaggugu

SEQ ID NO: 821788 - RNA, 19 nt, Artificial Sequence
  Description of Artificial Sequence: Synthetic oligonucleotide
  Sense strand starting at position 125 of SEQ ID NO: 587833
gaacauuaagcagggcauu

SEQ ID NO: 821789 - RNA, 19 nt, Artificial Sequence
  Description of Artificial Sequence: Synthetic oligonucleotide
  Antisense strand to SEQ ID NO: 821788
aaugcccugcuuaauguuc

SEQ ID NO: 821790 - RNA, 19 nt, Artificial Sequence
  Description of Artificial Sequence: Synthetic oligonucleotide
  Sense strand starting at position 318 of SEQ ID NO: 587833
gucaguguuaaagaagcaa

SEQ ID NO: 821791 - RNA, 19 nt, Artificial Sequence
  Description of Artificial Sequence: Synthetic oligonucleotide
  Antisense strand to SEQ ID NO: 821790
uugcuucuuuaacacugac

SEQ ID NO: 821792 - RNA, 19 nt, Artificial Sequence
  Description of Artificial Sequence: Synthetic oligonucleotide
  Sense strand starting at position 388 of SEQ ID NO: 587833
uguauuaagacggguaaug

SEQ ID NO: 821793 - RNA, 19 nt, Artificial Sequence
  Description of Artificial Sequence: Synthetic oligonucleotide
  Antisense strand to SEQ ID NO: 821792
cauuacccgucuuaauaca

SEQ ID NO: 821794 - RNA, 19 nt, Artificial Sequence
  Description of Artificial Sequence: Synthetic oligonucleotide
  Sense strand starting at position 428 of SEQ ID NO: 587833
aaggcaaaccgucagacuu

SEQ ID NO: 821795 - RNA, 19 nt, Artificial Sequence
  Description of Artificial Sequence: Synthetic oligonucleotide
  Antisense strand to SEQ ID NO: 821794
aagucugacgguuugccuu

SEQ ID NO: 821796 - RNA, 19 nt, Artificial Sequence
  Description of Artificial Sequence: Synthetic oligonucleotide
  Sense strand starting at position 573 of SEQ ID NO: 587833
aaaggaaagggcugcuuua

SEQ ID NO: 821797 - RNA, 19 nt, Artificial Sequence
  Description of Artificial Sequence: Synthetic oligonucleotide
  Antisense strand to SEQ ID NO: 821796
uaaagcagcccuuuccuuu

SEQ ID NO: 821798 - RNA, 19 nt, Artificial Sequence
  Description of Artificial Sequence: Synthetic oligonucleotide
  Sense strand starting at position 632 of SEQ ID NO: 587833
gccaacaucuagguuugaa

SEQ ID NO: 821799 - RNA, 19 nt, Artificial Sequence
  Description of Artificial Sequence: Synthetic oligonucleotide
  Antisense strand to SEQ ID NO: 821798
uucaaaccuagauguuggc

SEQ ID NO: 821800 - RNA, 19 nt, Artificial Sequence
  Description of Artificial Sequence: Synthetic oligonucleotide
  Sense strand starting at position 758 of SEQ ID NO: 587833
uuauaucuccaagggucaa

SEQ ID NO: 821801 - RNA, 19 nt, Artificial Sequence
  Description of Artificial Sequence: Synthetic oligonucleotide
  Antisense strand to SEQ ID NO: 821800
uugacccuuggagauauaa

SEQ ID NO: 821802 - RNA, 19 nt, Artificial Sequence
  Description of Artificial Sequence: Synthetic oligonucleotide
  Sense strand starting at position 1124 of SEQ ID NO: 587833
ggacuaaccuuccuccgaa

SEQ ID NO: 821803 - RNA, 19 nt, Artificial Sequence
  Description of Artificial Sequence: Synthetic oligonucleotide
  Antisense strand to SEQ ID NO: 821802
uucggaggaagguuagucc

SEQ ID NO: 821804 - RNA, 19 nt, Artificial Sequence
  Description of Artificial Sequence: Synthetic oligonucleotide
  Sense strand starting at position 1185 of SEQ ID NO: 587833
ggcgaugucccggcuccaa

SEQ ID NO: 821805 - RNA, 19 nt, Artificial Sequence
  Description of Artificial Sequence: Synthetic oligonucleotide
  Antisense strand to SEQ ID NO: 821804
uuggagccgggacaucgcc

SEQ ID NO: 821806 - RNA, 19 nt, Artificial Sequence
  Description of Artificial Sequence: Synthetic oligonucleotide
  Sense strand starting at position 1230 of SEQ ID NO: 587833
cccguuagagccgauuuca

SEQ ID NO: 821807 - RNA, 19 nt, Artificial Sequence
  Description of Artificial Sequence: Synthetic oligonucleotide
  Antisense strand to SEQ ID NO: 821806
ugaaaucggcucuaacggg

SEQ ID NO: 821808 - RNA, 19 nt, Artificial Sequence
  Description of Artificial Sequence: Synthetic oligonucleotide
  Sense strand starting at position 1345 of SEQ ID NO: 587833
cgccucggcccgucauaau

SEQ ID NO: 821809 - RNA, 19 nt, Artificial Sequence
  Description of Artificial Sequence: Synthetic oligonucleotide
  Antisense strand to SEQ ID NO: 821808
auuaugacgggccgaggcg

SEQ ID NO: 821810 - RNA, 19 nt, Artificial Sequence
  Description of Artificial Sequence: Synthetic oligonucleotide
  Sense strand starting at position 2334 of SEQ ID NO: 587833
gcaguuugcccggcauuau

SEQ ID NO: 821811 - RNA, 19 nt, Artificial Sequence
  Description of Artificial Sequence: Synthetic oligonucleotide
  Antisense strand to SEQ ID NO: 821810
auaaugccgggcaaacugc

SEQ ID NO: 821812 - RNA, 19 nt, Artificial Sequence
  Description of Artificial Sequence: Synthetic oligonucleotide
  Sense strand starting at position 2434 of SEQ ID NO: 587833
gaggaaauguccuuuccca

SEQ ID NO: 821813 - RNA, 19 nt, Artificial Sequence
  Description of Artificial Sequence: Synthetic oligonucleotide
  Antisense strand to SEQ ID NO: 821812
ugggaaaggacauuuccuc

SEQ ID NO: 821814 - RNA, 19 nt, Artificial Sequence
  Description of Artificial Sequence: Synthetic oligonucleotide
  Sense strand starting at position 2559 of SEQ ID NO: 587833
uuuggagaguaucuuccau

SEQ ID NO: 821815 - RNA, 19 nt, Artificial Sequence
  Description of Artificial Sequence: Synthetic oligonucleotide
  Antisense strand to SEQ ID NO: 821814
auggaagauacucuccaaa

SEQ ID NO: 821816 - RNA, 19 nt, Artificial Sequence
  Description of Artificial Sequence: Synthetic oligonucleotide
  Sense strand starting at position 2561 of SEQ ID NO: 587833
uggagaguaucuuccauuc

SEQ ID NO: 821817 - RNA, 19 nt, Artificial Sequence
  Description of Artificial Sequence: Synthetic oligonucleotide
  Antisense strand to SEQ ID NO: 821816
gaauggaagauacucucca

SEQ ID NO: 821818 - RNA, 19 nt, Artificial Sequence
  Description of Artificial Sequence: Synthetic oligonucleotide
  Sense strand starting at position 2613 of SEQ ID NO: 587833
gcagucaaguaaucagaau

SEQ ID NO: 821819 - RNA, 19 nt, Artificial Sequence
  Description of Artificial Sequence: Synthetic oligonucleotide
  Antisense strand to SEQ ID NO: 821818
auucugauuacuugacugc

SEQ ID NO: 821820 - RNA, 19 nt, Artificial Sequence
  Description of Artificial Sequence: Synthetic oligonucleotide
  Sense strand starting at position 2748 of SEQ ID NO: 587833
ugguauucuuaguugaaua

SEQ ID NO: 821821 - RNA, 19 nt, Artificial Sequence
  Description of Artificial Sequence: Synthetic oligonucleotide
  Antisense strand to SEQ ID NO: 821820
uauucaacuaagaauacca

SEQ ID NO: 821822 - RNA, 19 nt, Artificial Sequence
  Description of Artificial Sequence: Synthetic oligonucleotide
  Sense strand starting at position 2790 of SEQ ID NO: 587833
gcauuuccuccugguuuau

SEQ ID NO: 821823 - RNA, 19 nt, Artificial Sequence
  Description of Artificial Sequence: Synthetic oligonucleotide
  Antisense strand to SEQ ID NO: 821822
auaaaccaggaggaaaugc

SEQ ID NO: 821824 - RNA, 19 nt, Artificial Sequence
  Description of Artificial Sequence: Synthetic oligonucleotide
  Sense strand starting at position 2844 of SEQ ID NO: 587833
cugagaaacgaaugugaua

SEQ ID NO: 821825 - RNA, 19 nt, Artificial Sequence
  Description of Artificial Sequence: Synthetic oligonucleotide
  Antisense strand to SEQ ID NO: 821824
uaucacauucguuucucag

SEQ ID NO: 821826 - RNA, 19 nt, Artificial Sequence
  Description of Artificial Sequence: Synthetic oligonucleotide
  Sense strand starting at position 2931 of SEQ ID NO: 587833
uagugugucuguguaauuu

SEQ ID NO: 821827 - RNA, 19 nt, Artificial Sequence
  Description of Artificial Sequence: Synthetic oligonucleotide
  Antisense strand to SEQ ID NO: 821826
aaauuacacagacacacua

SEQ ID NO: 821828 - RNA, 19 nt, Artificial Sequence
  Description of Artificial Sequence: Synthetic oligonucleotide
  Sense strand starting at position 2935 of SEQ ID NO: 587833
gugucuguguaauuuaaau

SEQ ID NO: 821829 - RNA, 19 nt, Artificial Sequence
  Description of Artificial Sequence: Synthetic oligonucleotide
  Antisense strand to SEQ ID NO: 821828
auuuaaauuacacagacac

SEQ ID NO: 821830 - RNA, 19 nt, Artificial Sequence
  Description of Artificial Sequence: Synthetic oligonucleotide
  Sense strand starting at position 3002 of SEQ ID NO: 587833
uugguaacccaguaaaugu

SEQ ID NO: 821831 - RNA, 19 nt, Artificial Sequence
  Description of Artificial Sequence: Synthetic oligonucleotide
  Antisense strand to SEQ ID NO: 821830
acauuuacuggguuaccaa

SEQ ID NO: 821832 - RNA, 19 nt, Artificial Sequence
  Description of Artificial Sequence: Synthetic oligonucleotide
  Sense strand starting at position 3009 of SEQ ID NO: 587833
cccaguaaauguuuaccaa

SEQ ID NO: 821833 - RNA, 19 nt, Artificial Sequence
  Description of Artificial Sequence: Synthetic oligonucleotide
  Antisense strand to SEQ ID NO: 821832
uugguaaacauuuacuggg

SEQ ID NO: 821834 - RNA, 19 nt, Artificial Sequence
  Description of Artificial Sequence: Synthetic oligonucleotide
  Sense strand starting at position 3010 of SEQ ID NO: 587833
ccaguaaauguuuaccaau

SEQ ID NO: 821835 - RNA, 19 nt, Artificial Sequence
  Description of Artificial Sequence: Synthetic oligonucleotide
  Antisense strand to SEQ ID NO: 821834
auugguaaacauuuacugg

SEQ ID NO: 821836 - RNA, 19 nt, Artificial Sequence
  Description of Artificial Sequence: Synthetic oligonucleotide
  Sense strand starting at position 3076 of SEQ ID NO: 587833
ucgaaucuuaaaggaagua

SEQ ID NO: 821837 - RNA, 19 nt, Artificial Sequence
  Description of Artificial Sequence: Synthetic oligonucleotide
  Antisense strand to SEQ ID NO: 821836
uacuuccuuuaagauucga

SEQ ID NO: 821838 - RNA, 19 nt, Artificial Sequence
  Description of Artificial Sequence: Synthetic oligonucleotide
  Sense strand starting at position 3089 of SEQ ID NO: 587833
gaaguaauuauggguaugu

SEQ ID NO: 821839 - RNA, 19 nt, Artificial Sequence
  Description of Artificial Sequence: Synthetic oligonucleotide
  Antisense strand to SEQ ID NO: 821838
acauacccauaauuacuuc

SEQ ID NO: 821840 - RNA, 19 nt, Artificial Sequence
  Description of Artificial Sequence: Synthetic oligonucleotide
  Sense strand starting at position 3090 of SEQ ID NO: 587833
aaguaauuauggguauguu

SEQ ID NO: 821841 - RNA, 19 nt, Artificial Sequence
  Description of Artificial Sequence: Synthetic oligonucleotide
  Antisense strand to SEQ ID NO: 821840
aacauacccauaauuacuu

SEQ ID NO: 821842 - RNA, 19 nt, Artificial Sequence
  Description of Artificial Sequence: Synthetic oligonucleotide
  Sense strand starting at position 3091 of SEQ ID NO: 587833
aguaauuauggguauguuu

SEQ ID NO: 821843 - RNA, 19 nt, Artificial Sequence
  Description of Artificial Sequence: Synthetic oligonucleotide
  Antisense strand to SEQ ID NO: 821842
aaacauacccauaauuacu

SEQ ID NO: 821844 - RNA, 19 nt, Artificial Sequence
  Description of Artificial Sequence: Synthetic oligonucleotide
  Sense strand starting at position 3170 of SEQ ID NO: 587833
agcgacuuuacauauggga

SEQ ID NO: 821845 - RNA, 19 nt, Artificial Sequence
  Description of Artificial Sequence: Synthetic oligonucleotide
  Antisense strand to SEQ ID NO: 821844
ucccauauguaaagucgcu

SEQ ID NO: 821846 - RNA, 19 nt, Artificial Sequence
  Description of Artificial Sequence: Synthetic oligonucleotide
  Sense strand starting at position 3172 of SEQ ID NO: 587833
cgacuuuacauaugggaug

SEQ ID NO: 821847 - RNA, 19 nt, Artificial Sequence
  Description of Artificial Sequence: Synthetic oligonucleotide
  Antisense strand to SEQ ID NO: 821846
caucccauauguaaagucg

SEQ ID NO: 821848 - RNA, 19 nt, Artificial Sequence
  Description of Artificial Sequence: Synthetic oligonucleotide
  Sense strand starting at position 3177 of SEQ ID NO: 587833
uuacauaugggaugcuuua

SEQ ID NO: 821849 - RNA, 19 nt, Artificial Sequence
  Description of Artificial Sequence: Synthetic oligonucleotide
  Antisense strand to SEQ ID NO: 821848
uaaagcaucccauauguaa

SEQ ID NO: 821850 - RNA, 19 nt, Artificial Sequence
  Description of Artificial Sequence: Synthetic oligonucleotide
  Sense strand starting at position 3188 of SEQ ID NO: 587833
augcuuuaagccuacagau

SEQ ID NO: 821851 - RNA, 19 nt, Artificial Sequence
  Description of Artificial Sequence: Synthetic oligonucleotide
  Antisense strand to SEQ ID NO: 821850
aucuguaggcuuaaagcau

SEQ ID NO: 821852 - RNA, 19 nt, Artificial Sequence
  Description of Artificial Sequence: Synthetic oligonucleotide
  Sense strand starting at position 3190 of SEQ ID NO: 587833
gcuuuaagccuacagauag

SEQ ID NO: 821853 - RNA, 19 nt, Artificial Sequence
  Description of Artificial Sequence: Synthetic oligonucleotide
  Antisense strand to SEQ ID NO: 821852
cuaucuguaggcuuaaagc

SEQ ID NO: 821854 - RNA, 19 nt, Artificial Sequence
  Description of Artificial Sequence: Synthetic oligonucleotide
  Sense strand starting at position 3211 of SEQ ID NO: 587833
caagaauaguaaguuaagu

SEQ ID NO: 821855 - RNA, 19 nt, Artificial Sequence
  Description of Artificial Sequence: Synthetic oligonucleotide
  Antisense strand to SEQ ID NO: 821854
acuuaacuuacuauucuug

SEQ ID NO: 821856 - RNA, 19 nt, Artificial Sequence
  Description of Artificial Sequence: Synthetic oligonucleotide
  Sense strand starting at position 3651 of SEQ ID NO: 587833
agaagcugugcggaaugaa

SEQ ID NO: 821857 - RNA, 19 nt, Artificial Sequence
  Description of Artificial Sequence: Synthetic oligonucleotide
  Antisense strand to SEQ ID NO: 821856
uucauuccgcacagcuucu

SEQ ID NO: 821858 - RNA, 19 nt, Artificial Sequence
  Description of Artificial Sequence: Synthetic oligonucleotide
  Sense strand starting at position 3683 of SEQ ID NO: 587833
ucuguacaacgguaauauu

SEQ ID NO: 821859 - RNA, 19 nt, Artificial Sequence
  Description of Artificial Sequence: Synthetic oligonucleotide
  Antisense strand to SEQ ID NO: 821858
aauauuaccguuguacaga

SEQ ID NO: 821860 - RNA, 19 nt, Artificial Sequence
  Description of Artificial Sequence: Synthetic oligonucleotide
  Sense strand starting at position 3816 of SEQ ID NO: 587833
cuugaauuccuagaggcac

SEQ ID NO: 821861 - RNA, 19 nt, Artificial Sequence
  Description of Artificial Sequence: Synthetic oligonucleotide
  Antisense strand to SEQ ID NO: 821860
gugccucuaggaauucaag

SEQ ID NO: 821862 - RNA, 19 nt, Artificial Sequence
  Description of Artificial Sequence: Synthetic oligonucleotide
  Sense strand starting at position 3908 of SEQ ID NO: 587833
gccagaaaccuaggauugu

SEQ ID NO: 821863 - RNA, 19 nt, Artificial Sequence
  Description of Artificial Sequence: Synthetic oligonucleotide
  Antisense strand to SEQ ID NO: 821862
acaauccuagguuucuggc

SEQ ID NO: 821864 - RNA, 19 nt, Artificial Sequence
  Description of Artificial Sequence: Synthetic oligonucleotide
  Sense strand starting at position 3972 of SEQ ID NO: 587833
ccaaguccuguuuauuaua

SEQ ID NO: 821865 - RNA, 19 nt, Artificial Sequence
  Description of Artificial Sequence: Synthetic oligonucleotide
  Antisense strand to SEQ ID NO: 821864
uauaauaaacaggacuugg

SEQ ID NO: 821866 - RNA, 19 nt, Artificial Sequence
  Description of Artificial Sequence: Synthetic oligonucleotide
  Sense strand starting at position 86 of SEQ ID NO: 587834
gucuuaagagccuaugaua

SEQ ID NO: 821867 - RNA, 19 nt, Artificial Sequence
  Description of Artificial Sequence: Synthetic oligonucleotide
  Antisense strand to SEQ ID NO: 821866
uaucauaggcucuuaagac

SEQ ID NO: 821868 - RNA, 19 nt, Artificial Sequence
  Description of Artificial Sequence: Synthetic oligonucleotide
  Sense strand starting at position 192 of SEQ ID NO: 587834
ugucaucauuuggaaagag

SEQ ID NO: 821869 - RNA, 19 nt, Artificial Sequence
  Description of Artificial Sequence: Synthetic oligonucleotide
  Antisense strand to SEQ ID NO: 821868
cucuuuccaaaugaugaca

SEQ ID NO: 821870 - RNA, 19 nt, Artificial Sequence
  Description of Artificial Sequence: Synthetic oligonucleotide
  Sense strand starting at position 219 of SEQ ID NO: 587834
ccaaguauuucugaaggaa

SEQ ID NO: 821871 - RNA, 19 nt, Artificial Sequence
  Description of Artificial Sequence: Synthetic oligonucleotide
  Antisense strand to SEQ ID NO: 821870
uuccuucagaaauacuugg

SEQ ID NO: 821872 - RNA, 19 nt, Artificial Sequence
  Description of Artificial Sequence: Synthetic oligonucleotide
  Sense strand starting at position 278 of SEQ ID NO: 587834
uacagaguccaugggaagu

SEQ ID NO: 821873 - RNA, 19 nt, Artificial Sequence
  Description of Artificial Sequence: Synthetic oligonucleotide
  Antisense strand to SEQ ID NO: 821872
acuucccauggacucugua

SEQ ID NO: 821874 - RNA, 19 nt, Artificial Sequence
  Description of Artificial Sequence: Synthetic oligonucleotide
  Sense strand starting at position 301 of SEQ ID NO: 587834
agaguaacucaauagcuca

SEQ ID NO: 821875 - RNA, 19 nt, Artificial Sequence
  Description of Artificial Sequence: Synthetic oligonucleotide
  Antisense strand to SEQ ID NO: 821874
ugagcuauugaguuacucu

SEQ ID NO: 821876 - RNA, 19 nt, Artificial Sequence
  Description of Artificial Sequence: Synthetic oligonucleotide
  Sense strand starting at position 423 of SEQ ID NO: 587834
agaggagagucuguguaaa

SEQ ID NO: 821877 - RNA, 19 nt, Artificial Sequence
  Description of Artificial Sequence: Synthetic oligonucleotide
  Antisense strand to SEQ ID NO: 821876
uuuacacagacucuccucu

SEQ ID NO: 821878 - RNA, 19 nt, Artificial Sequence
  Description of Artificial Sequence: Synthetic oligonucleotide
  Sense strand starting at position 622 of SEQ ID NO: 587834
auguuagcugugcuccauu

SEQ ID NO: 821879 - RNA, 19 nt, Artificial Sequence
  Description of Artificial Sequence: Synthetic oligonucleotide
  Antisense strand to SEQ ID NO: 821878
aauggagcacagcuaacau

SEQ ID NO: 821880 - RNA, 19 nt, Artificial Sequence
  Description of Artificial Sequence: Synthetic oligonucleotide
  Sense strand starting at position 732 of SEQ ID NO: 587834
ccuuuaaauuuggaauaag

SEQ ID NO: 821881 - RNA, 19 nt, Artificial Sequence
  Description of Artificial Sequence: Synthetic oligonucleotide
  Antisense strand to SEQ ID NO: 821880
cuuauuccaaauuuaaagg

SEQ ID NO: 821882 - RNA, 19 nt, Artificial Sequence
  Description of Artificial Sequence: Synthetic oligonucleotide
  Sense strand starting at position 804 of SEQ ID NO: 587834
augguugaauucucccaga

SEQ ID NO: 821883 - RNA, 19 nt, Artificial Sequence
  Description of Artificial Sequence: Synthetic oligonucleotide
  Antisense strand to SEQ ID NO: 821882
ucugggagaauucaaccau

SEQ ID NO: 821884 - RNA, 19 nt, Artificial Sequence
  Description of Artificial Sequence: Synthetic oligonucleotide
  Sense strand starting at position 809 of SEQ ID NO: 587834
ugaauucucccagaaguuu

SEQ ID NO: 821885 - RNA, 19 nt, Artificial Sequence
  Description of Artificial Sequence: Synthetic oligonucleotide
  Antisense strand to SEQ ID NO: 821884
aaacuucugggagaauuca

SEQ ID NO: 821886 - RNA, 19 nt, Artificial Sequence
  Description of Artificial Sequence: Synthetic oligonucleotide
  Sense strand starting at position 820 of SEQ ID NO: 587834
agaaguuuaggcugaagaa

SEQ ID NO: 821887 - RNA, 19 nt, Artificial Sequence
  Description of Artificial Sequence: Synthetic oligonucleotide
  Antisense strand to SEQ ID NO: 821886
uucuucagccuaaacuucu

SEQ ID NO: 821888 - RNA, 19 nt, Artificial Sequence
  Description of Artificial Sequence: Synthetic oligonucleotide
  Sense strand starting at position 893 of SEQ ID NO: 587834
accagugacuuccuuauau

SEQ ID NO: 821889 - RNA, 19 nt, Artificial Sequence
  Description of Artificial Sequence: Synthetic oligonucleotide
  Antisense strand to SEQ ID NO: 821888
auauaaggaagucacuggu

SEQ ID NO: 821890 - RNA, 19 nt, Artificial Sequence
  Description of Artificial Sequence: Synthetic oligonucleotide
  Sense strand starting at position 916 of SEQ ID NO: 587834
caaggaagcugguuuacaa

SEQ ID NO: 821891 - RNA, 19 nt, Artificial Sequence
  Description of Artificial Sequence: Synthetic oligonucleotide
  Antisense strand to SEQ ID NO: 821890
uuguaaaccagcuuccuug

SEQ ID NO: 821892 - RNA, 19 nt, Artificial Sequence
  Description of Artificial Sequence: Synthetic oligonucleotide
  Sense strand starting at position 1006 of SEQ ID NO: 587834
agagacucuuuauugccua

SEQ ID NO: 821893 - RNA, 19 nt, Artificial Sequence
  Description of Artificial Sequence: Synthetic oligonucleotide
  Antisense strand to SEQ ID NO: 821892
uaggcaauaaagagucucu

SEQ ID NO: 821894 - RNA, 19 nt, Artificial Sequence
  Description of Artificial Sequence: Synthetic oligonucleotide
  Sense strand starting at position 1252 of SEQ ID NO: 587834
agaguuacaugcgucauuu

SEQ ID NO: 821895 - RNA, 19 nt, Artificial Sequence
  Description of Artificial Sequence: Synthetic oligonucleotide
  Antisense strand to SEQ ID NO: 821894
aaaugacgcauguaacucu

SEQ ID NO: 821896 - RNA, 19 nt, Artificial Sequence
  Description of Artificial Sequence: Synthetic oligonucleotide
  Sense strand starting at position 1561 of SEQ ID NO: 587834
ugccuagaugucuauaaga

SEQ ID NO: 821897 - RNA, 19 nt, Artificial Sequence
  Description of Artificial Sequence: Synthetic oligonucleotide
  Antisense strand to SEQ ID NO: 821896
ucuuauagacaucuaggca

SEQ ID NO: 821898 - RNA, 19 nt, Artificial Sequence
  Description of Artificial Sequence: Synthetic oligonucleotide
  Sense strand starting at position 1645 of SEQ ID NO: 587834
uugauuuccugauacugaa

SEQ ID NO: 821899 - RNA, 19 nt, Artificial Sequence
  Description of Artificial Sequence: Synthetic oligonucleotide
  Antisense strand to SEQ ID NO: 821898
uucaguaucaggaaaucaa

SEQ ID NO: 821900 - RNA, 19 nt, Artificial Sequence
  Description of Artificial Sequence: Synthetic oligonucleotide
  Sense strand starting at position 1993 of SEQ ID NO: 587834
caguauguccagcaaggga

SEQ ID NO: 821901 - RNA, 19 nt, Artificial Sequence
  Description of Artificial Sequence: Synthetic oligonucleotide
  Antisense strand to SEQ ID NO: 821900
ucccuugcuggacauacug

SEQ ID NO: 821902 - RNA, 19 nt, Artificial Sequence
  Description of Artificial Sequence: Synthetic oligonucleotide
  Sense strand starting at position 2042 of SEQ ID NO: 587834
ugaugcuaaucaccagaca

SEQ ID NO: 821903 - RNA, 19 nt, Artificial Sequence
  Description of Artificial Sequence: Synthetic oligonucleotide
  Antisense strand to SEQ ID NO: 821902
ugucuggugauuagcauca

SEQ ID NO: 821904 - RNA, 19 nt, Artificial Sequence
  Description of Artificial Sequence: Synthetic oligonucleotide
  Sense strand starting at position 2106 of SEQ ID NO: 587834
gcaugcucugcaguuguga

SEQ ID NO: 821905 - RNA, 19 nt, Artificial Sequence
  Description of Artificial Sequence: Synthetic oligonucleotide
  Antisense strand to SEQ ID NO: 821904
ucacaacugcagagcaugc

SEQ ID NO: 821906 - RNA, 19 nt, Artificial Sequence
  Description of Artificial Sequence: Synthetic oligonucleotide
  Sense strand starting at position 2120 of SEQ ID NO: 587834
ugugaaaucuuccucauga

SEQ ID NO: 821907 - RNA, 19 nt, Artificial Sequence
  Description of Artificial Sequence: Synthetic oligonucleotide
  Antisense strand to SEQ ID NO: 821906
ucaugaggaagauuucaca

SEQ ID NO: 821908 - RNA, 19 nt, Artificial Sequence
  Description of Artificial Sequence: Synthetic oligonucleotide
  Sense strand starting at position 2121 of SEQ ID NO: 587834
gugaaaucuuccucaugaa

SEQ ID NO: 821909 - RNA, 19 nt, Artificial Sequence
  Description of Artificial Sequence: Synthetic oligonucleotide
  Antisense strand to SEQ ID NO: 821908
uucaugaggaagauuucac

SEQ ID NO: 821910 - RNA, 19 nt, Artificial Sequence
  Description of Artificial Sequence: Synthetic oligonucleotide
  Sense strand starting at position 2241 of SEQ ID NO: 587834
uauuuauguuaacaggaga

SEQ ID NO: 821911 - RNA, 19 nt, Artificial Sequence
  Description of Artificial Sequence: Synthetic oligonucleotide
  Antisense strand to SEQ ID NO: 821910
ucuccuguuaacauaaaua

SEQ ID NO: 821912 - RNA, 19 nt, Artificial Sequence
  Description of Artificial Sequence: Synthetic oligonucleotide
  Sense strand starting at position 2252 of SEQ ID NO: 587834
acaggagaaaguuguuauu

SEQ ID NO: 821913 - RNA, 19 nt, Artificial Sequence
  Description of Artificial Sequence: Synthetic oligonucleotide
  Antisense strand to SEQ ID NO: 821912
aauaacaacuuucuccugu

SEQ ID NO: 821914 - RNA, 19 nt, Artificial Sequence
  Description of Artificial Sequence: Synthetic oligonucleotide
  Sense strand starting at position 2254 of SEQ ID NO: 587834
aggagaaaguuguuauugu

SEQ ID NO: 821915 - RNA, 19 nt, Artificial Sequence
  Description of Artificial Sequence: Synthetic oligonucleotide
  Antisense strand to SEQ ID NO: 821914
acaauaacaacuuucuccu

SEQ ID NO: 821916 - RNA, 19 nt, Artificial Sequence
  Description of Artificial Sequence: Synthetic oligonucleotide
  Sense strand starting at position 2334 of SEQ ID NO: 587834
ugcuccugguaaucauuua

SEQ ID NO: 821917 - RNA, 19 nt, Artificial Sequence
  Description of Artificial Sequence: Synthetic oligonucleotide
  Antisense strand to SEQ ID NO: 821916
uaaaugauuaccaggagca

SEQ ID NO: 821918 - RNA, 19 nt, Artificial Sequence
  Description of Artificial Sequence: Synthetic oligonucleotide
  Sense strand starting at position 2416 of SEQ ID NO: 587834
uucugaaaugacugugaac

SEQ ID NO: 821919 - RNA, 19 nt, Artificial Sequence
  Description of Artificial Sequence: Synthetic oligonucleotide
  Antisense strand to SEQ ID NO: 821918
guucacagucauuucagaa

SEQ ID NO: 821920 - RNA, 19 nt, Artificial Sequence
  Description of Artificial Sequence: Synthetic oligonucleotide
  Sense strand starting at position 2899 of SEQ ID NO: 587834
gaaagagugagguguagau

SEQ ID NO: 821921 - RNA, 19 nt, Artificial Sequence
  Description of Artificial Sequence: Synthetic oligonucleotide
  Antisense strand to SEQ ID NO: 821920
aucuacaccucacucuuuc

SEQ ID NO: 821922 - RNA, 19 nt, Artificial Sequence
  Description of Artificial Sequence: Synthetic oligonucleotide
  Sense strand starting at position 2989 of SEQ ID NO: 587834
gcuauuaaaucaguaagga

SEQ ID NO: 821923 - RNA, 19 nt, Artificial Sequence
  Description of Artificial Sequence: Synthetic oligonucleotide
  Antisense strand to SEQ ID NO: 821922
uccuuacugauuuaauagc

SEQ ID NO: 821924 - RNA, 19 nt, Artificial Sequence
  Description of Artificial Sequence: Synthetic oligonucleotide
  Sense strand starting at position 3023 of SEQ ID NO: 587834
gguagcaauaggcaugaau

SEQ ID NO: 821925 - RNA, 19 nt, Artificial Sequence
  Description of Artificial Sequence: Synthetic oligonucleotide
  Antisense strand to SEQ ID NO: 821924
auucaugccuauugcuacc

SEQ ID NO: 821926 - RNA, 19 nt, Artificial Sequence
  Description of Artificial Sequence: Synthetic oligonucleotide
  Sense strand starting at position 3025 of SEQ ID NO: 587834
uagcaauaggcaugaauug

SEQ ID NO: 821927 - RNA, 19 nt, Artificial Sequence
  Description of Artificial Sequence: Synthetic oligonucleotide
  Antisense strand to SEQ ID NO: 821926
caauucaugccuauugcua

SEQ ID NO: 821928 - RNA, 19 nt, Artificial Sequence
  Description of Artificial Sequence: Synthetic oligonucleotide
  Sense strand starting at position 3037 of SEQ ID NO: 587834
ugaauuguaucauuaccag

SEQ ID NO: 821929 - RNA, 19 nt, Artificial Sequence
  Description of Artificial Sequence: Synthetic oligonucleotide
  Antisense strand to SEQ ID NO: 821928
cugguaaugauacaauuca

SEQ ID NO: 821930 - RNA, 19 nt, Artificial Sequence
  Description of Artificial Sequence: Synthetic oligonucleotide
  Sense strand starting at position 3104 of SEQ ID NO: 587834
gccauuaaauagcuaagga

SEQ ID NO: 821931 - RNA, 19 nt, Artificial Sequence
  Description of Artificial Sequence: Synthetic oligonucleotide
  Antisense strand to SEQ ID NO: 821930
uccuuagcuauuuaauggc

SEQ ID NO: 821932 - RNA, 19 nt, Artificial Sequence
  Description of Artificial Sequence: Synthetic oligonucleotide
  Sense strand starting at position 3127 of SEQ ID NO: 587834
ugcagcauuucucuugacu

SEQ ID NO: 821933 - RNA, 19 nt, Artificial Sequence
  Description of Artificial Sequence: Synthetic oligonucleotide
  Antisense strand to SEQ ID NO: 821932
agucaagagaaaugcugca

SEQ ID NO: 821934 - RNA, 19 nt, Artificial Sequence
  Description of Artificial Sequence: Synthetic oligonucleotide
  Sense strand starting at position 3546 of SEQ ID NO: 587834
cuugaaggugcacaugaau

SEQ ID NO: 821935 - RNA, 19 nt, Artificial Sequence
  Description of Artificial Sequence: Synthetic oligonucleotide
  Antisense strand to SEQ ID NO: 821934
auucaugugcaccuucaag

SEQ ID NO: 821936 - RNA, 19 nt, Artificial Sequence
  Description of Artificial Sequence: Synthetic oligonucleotide
  Sense strand starting at position 3669 of SEQ ID NO: 587834
uuugauaagugagucuaag

SEQ ID NO: 821937 - RNA, 19 nt, Artificial Sequence
  Description of Artificial Sequence: Synthetic oligonucleotide
  Antisense strand to SEQ ID NO: 821936
cuuagacucacuuaucaaa

SEQ ID NO: 821938 - RNA, 19 nt, Artificial Sequence
  Description of Artificial Sequence: Synthetic oligonucleotide
  Sense strand starting at position 3723 of SEQ ID NO: 587834
ggcuucuucccugagaaug

SEQ ID NO: 821939 - RNA, 19 nt, Artificial Sequence
  Description of Artificial Sequence: Synthetic oligonucleotide
  Antisense strand to SEQ ID NO: 821938
cauucucagggaagaagcc

SEQ ID NO: 821940 - RNA, 19 nt, Artificial Sequence
  Description of Artificial Sequence: Synthetic oligonucleotide
  Sense strand starting at position 3759 of SEQ ID NO: 587834
cucugagauuaccuguaug

SEQ ID NO: 821941 - RNA, 19 nt, Artificial Sequence
  Description of Artificial Sequence: Synthetic oligonucleotide
  Antisense strand to SEQ ID NO: 821940
cauacagguaaucucagag

SEQ ID NO: 821942 - RNA, 19 nt, Artificial Sequence
  Description of Artificial Sequence: Synthetic oligonucleotide
  Sense strand starting at position 3762 of SEQ ID NO: 587834
ugagauuaccuguauguca

SEQ ID NO: 821943 - RNA, 19 nt, Artificial Sequence
  Description of Artificial Sequence: Synthetic oligonucleotide
  Antisense strand to SEQ ID NO: 821942
ugacauacagguaaucuca

SEQ ID NO: 821944 - RNA, 19 nt, Artificial Sequence
  Description of Artificial Sequence: Synthetic oligonucleotide
  Sense strand starting at position 3830 of SEQ ID NO: 587834
gaugacaggagugguguua

SEQ ID NO: 821945 - RNA, 19 nt, Artificial Sequence
  Description of Artificial Sequence: Synthetic oligonucleotide
  Antisense strand to SEQ ID NO: 821944
uaacaccacuccugucauc

SEQ ID NO: 821946 - RNA, 19 nt, Artificial Sequence
  Description of Artificial Sequence: Synthetic oligonucleotide
  Sense strand starting at position 123 of SEQ ID NO: 587835
guuacagggacggguuauu

SEQ ID NO: 821947 - RNA, 19 nt, Artificial Sequence
  Description of Artificial Sequence: Synthetic oligonucleotide
  Antisense strand to SEQ ID NO: 821946
aauaacccgucccuguaac

SEQ ID NO: 821948 - RNA, 19 nt, Artificial Sequence
  Description of Artificial Sequence: Synthetic oligonucleotide
  Sense strand starting at position 137 of SEQ ID NO: 587835
uuauuuaacuuggagcuga

SEQ ID NO: 821949 - RNA, 19 nt, Artificial Sequence
  Description of Artificial Sequence: Synthetic oligonucleotide
  Antisense strand to SEQ ID NO: 821948
ucagcuccaaguuaaauaa

SEQ ID NO: 821950 - RNA, 19 nt, Artificial Sequence
  Description of Artificial Sequence: Synthetic oligonucleotide
  Sense strand starting at position 150 of SEQ ID NO: 587835
agcugagaaagcuguugaa

SEQ ID NO: 821951 - RNA, 19 nt, Artificial Sequence
  Description of Artificial Sequence: Synthetic oligonucleotide
  Antisense strand to SEQ ID NO: 821950
uucaacagcuuucucagcu

SEQ ID NO: 821952 - RNA, 19 nt, Artificial Sequence
  Description of Artificial Sequence: Synthetic oligonucleotide
  Sense strand starting at position 205 of SEQ ID NO: 587835
aaggcuuguuuaguccaga

SEQ ID NO: 821953 - RNA, 19 nt, Artificial Sequence
  Description of Artificial Sequence: Synthetic oligonucleotide
  Antisense strand to SEQ ID NO: 821952
ucuggacuaaacaagccuu

SEQ ID NO: 821954 - RNA, 19 nt, Artificial Sequence
  Description of Artificial Sequence: Synthetic oligonucleotide
  Sense strand starting at position 636 of SEQ ID NO: 587835
ccugucugaggucacuaua

SEQ ID NO: 821955 - RNA, 19 nt, Artificial Sequence
  Description of Artificial Sequence: Synthetic oligonucleotide
  Antisense strand to SEQ ID NO: 821954
uauagugaccucagacagg

SEQ ID NO: 821956 - RNA, 19 nt, Artificial Sequence
  Description of Artificial Sequence: Synthetic oligonucleotide
  Sense strand starting at position 639 of SEQ ID NO: 587835
gucugaggucacuauaauu

SEQ ID NO: 821957 - RNA, 19 nt, Artificial Sequence
  Description of Artificial Sequence: Synthetic oligonucleotide
  Antisense strand to SEQ ID NO: 821956
aauuauagugaccucagac

SEQ ID NO: 821958 - RNA, 19 nt, Artificial Sequence
  Description of Artificial Sequence: Synthetic oligonucleotide
  Sense strand starting at position 670 of SEQ ID NO: 587835
ucuggaagauguuuauaua

SEQ ID NO: 821959 - RNA, 19 nt, Artificial Sequence
  Description of Artificial Sequence: Synthetic oligonucleotide
  Antisense strand to SEQ ID NO: 821958
uauauaaacaucuuccaga

SEQ ID NO: 821960 - RNA, 19 nt, Artificial Sequence
  Description of Artificial Sequence: Synthetic oligonucleotide
  Sense strand starting at position 737 of SEQ ID NO: 587835
uguucucacugucugagau

SEQ ID NO: 821961 - RNA, 19 nt, Artificial Sequence
  Description of Artificial Sequence: Synthetic oligonucleotide
  Antisense strand to SEQ ID NO: 821960
aucucagacagugagaaca

SEQ ID NO: 821962 - RNA, 19 nt, Artificial Sequence
  Description of Artificial Sequence: Synthetic oligonucleotide
  Sense strand starting at position 738 of SEQ ID NO: 587835
guucucacugucugagaug

SEQ ID NO: 821963 - RNA, 19 nt, Artificial Sequence
  Description of Artificial Sequence: Synthetic oligonucleotide
  Antisense strand to SEQ ID NO: 821962
caucucagacagugagaac

SEQ ID NO: 821964 - RNA, 19 nt, Artificial Sequence
  Description of Artificial Sequence: Synthetic oligonucleotide
  Sense strand starting at position 1292 of SEQ ID NO: 587835
ugcccugggucuucagaga

SEQ ID NO: 821965 - RNA, 19 nt, Artificial Sequence
  Description of Artificial Sequence: Synthetic oligonucleotide
  Antisense strand to SEQ ID NO: 821964
ucucugaagacccagggca

SEQ ID NO: 821966 - RNA, 19 nt, Artificial Sequence
  Description of Artificial Sequence: Synthetic oligonucleotide
  Sense strand starting at position 1317 of SEQ ID NO: 587835
aagucucgguccucuaaga

SEQ ID NO: 821967 - RNA, 19 nt, Artificial Sequence
  Description of Artificial Sequence: Synthetic oligonucleotide
  Antisense strand to SEQ ID NO: 821966
ucuuagaggaccgagacuu

SEQ ID NO: 821968 - RNA, 19 nt, Artificial Sequence
  Description of Artificial Sequence: Synthetic oligonucleotide
  Sense strand starting at position 1542 of SEQ ID NO: 587835
cuguaaaucaacgagcaga

SEQ ID NO: 821969 - RNA, 19 nt, Artificial Sequence
  Description of Artificial Sequence: Synthetic oligonucleotide
  Antisense strand to SEQ ID NO: 821968
ucugcucguugauuuacag

SEQ ID NO: 821970 - RNA, 19 nt, Artificial Sequence
  Description of Artificial Sequence: Synthetic oligonucleotide
  Sense strand starting at position 1581 of SEQ ID NO: 587835
cguguuuaaacaugaucug

SEQ ID NO: 821971 - RNA, 19 nt, Artificial Sequence
  Description of Artificial Sequence: Synthetic oligonucleotide
  Antisense strand to SEQ ID NO: 821970
cagaucauguuuaaacacg

SEQ ID NO: 821972 - RNA, 19 nt, Artificial Sequence
  Description of Artificial Sequence: Synthetic oligonucleotide
  Sense strand starting at position 1841 of SEQ ID NO: 587835
acguccuuuggaggaaagu

SEQ ID NO: 821973 - RNA, 19 nt, Artificial Sequence
  Description of Artificial Sequence: Synthetic oligonucleotide
  Antisense strand to SEQ ID NO: 821972
acuuuccuccaaaggacgu

SEQ ID NO: 821974 - RNA, 19 nt, Artificial Sequence
  Description of Artificial Sequence: Synthetic oligonucleotide
  Sense strand starting at position 2113 of SEQ ID NO: 587835
gccaucugcagagaggaua

SEQ ID NO: 821975 - RNA, 19 nt, Artificial Sequence
  Description of Artificial Sequence: Synthetic oligonucleotide
  Antisense strand to SEQ ID NO: 821974
uauccucucugcagauggc

SEQ ID NO: 821976 - RNA, 19 nt, Artificial Sequence
  Description of Artificial Sequence: Synthetic oligonucleotide
  Sense strand starting at position 2125 of SEQ ID NO: 587835
gaggauaauuagcuuaaug

SEQ ID NO: 821977 - RNA, 19 nt, Artificial Sequence
  Description of Artificial Sequence: Synthetic oligonucleotide
  Antisense strand to SEQ ID NO: 821976
cauuaagcuaauuauccuc

SEQ ID NO: 821978 - RNA, 19 nt, Artificial Sequence
  Description of Artificial Sequence: Synthetic oligonucleotide
  Sense strand starting at position 2177 of SEQ ID NO: 587835
aggguacacuugucaagac

SEQ ID NO: 821979 - RNA, 19 nt, Artificial Sequence
  Description of Artificial Sequence: Synthetic oligonucleotide
  Antisense strand to SEQ ID NO: 821978
gucuugacaaguguacccu

SEQ ID NO: 821980 - RNA, 19 nt, Artificial Sequence
  Description of Artificial Sequence: Synthetic oligonucleotide
  Sense strand starting at position 2184 of SEQ ID NO: 587835
acuugucaagacuguuaaa

SEQ ID NO: 821981 - RNA, 19 nt, Artificial Sequence
  Description of Artificial Sequence: Synthetic oligonucleotide
  Antisense strand to SEQ ID NO: 821980
uuuaacagucuugacaagu

SEQ ID NO: 821982 - RNA, 19 nt, Artificial Sequence
  Description of Artificial Sequence: Synthetic oligonucleotide
  Sense strand starting at position 2665 of SEQ ID NO: 587835
agaauacacuuguuuaagu

SEQ ID NO: 821983 - RNA, 19 nt, Artificial Sequence
  Description of Artificial Sequence: Synthetic oligonucleotide
  Antisense strand to SEQ ID NO: 821982
acuuaaacaaguguauucu

SEQ ID NO: 821984 - RNA, 19 nt, Artificial Sequence
  Description of Artificial Sequence: Synthetic oligonucleotide
  Sense strand starting at position 2729 of SEQ ID NO: 587835
gcaguuuccucccuggaaa

SEQ ID NO: 821985 - RNA, 19 nt, Artificial Sequence
  Description of Artificial Sequence: Synthetic oligonucleotide
  Antisense strand to SEQ ID NO: 821984
uuuccagggaggaaacugc

SEQ ID NO: 821986 - RNA, 19 nt, Artificial Sequence
  Description of Artificial Sequence: Synthetic oligonucleotide
  Sense strand starting at position 2732 of SEQ ID NO: 587835
guuuccucccuggaaauua

SEQ ID NO: 821987 - RNA, 19 nt, Artificial Sequence
  Description of Artificial Sequence: Synthetic oligonucleotide
  Antisense strand to SEQ ID NO: 821986
uaauuuccagggaggaaac

SEQ ID NO: 821988 - RNA, 19 nt, Artificial Sequence
  Description of Artificial Sequence: Synthetic oligonucleotide
  Sense strand starting at position 2793 of SEQ ID NO: 587835
guguguugccaucaagagg

SEQ ID NO: 821989 - RNA, 19 nt, Artificial Sequence
  Description of Artificial Sequence: Synthetic oligonucleotide
  Antisense strand to SEQ ID NO: 821988
ccucuugauggcaacacac

SEQ ID NO: 821990 - RNA, 19 nt, Artificial Sequence
  Description of Artificial Sequence: Synthetic oligonucleotide
  Sense strand starting at position 2810 of SEQ ID NO: 587835
ggcgaagauuuaguguaug

SEQ ID NO: 821991 - RNA, 19 nt, Artificial Sequence
  Description of Artificial Sequence: Synthetic oligonucleotide
  Antisense strand to SEQ ID NO: 821990
cauacacuaaaucuucgcc

SEQ ID NO: 821992 - RNA, 19 nt, Artificial Sequence
  Description of Artificial Sequence: Synthetic oligonucleotide
  Sense strand starting at position 2815 of SEQ ID NO: 587835
agauuuaguguauguguag

SEQ ID NO: 821993 - RNA, 19 nt, Artificial Sequence
  Description of Artificial Sequence: Synthetic oligonucleotide
  Antisense strand to SEQ ID NO: 821992
cuacacauacacuaaaucu

SEQ ID NO: 821994 - RNA, 19 nt, Artificial Sequence
  Description of Artificial Sequence: Synthetic oligonucleotide
  Sense strand starting at position 2816 of SEQ ID NO: 587835
gauuuaguguauguguagu

SEQ ID NO: 821995 - RNA, 19 nt, Artificial Sequence
  Description of Artificial Sequence: Synthetic oligonucleotide
  Antisense strand to SEQ ID NO: 821994
acuacacauacacuaaauc

SEQ ID NO: 821996 - RNA, 19 nt, Artificial Sequence
  Description of Artificial Sequence: Synthetic oligonucleotide
  Sense strand starting at position 2835 of SEQ ID NO: 587835
ccgcauugaacugaucagu

SEQ ID NO: 821997 - RNA, 19 nt, Artificial Sequence
  Description of Artificial Sequence: Synthetic oligonucleotide
  Antisense strand to SEQ ID NO: 821996
acugaucaguucaaugcgg

SEQ ID NO: 821998 - RNA, 19 nt, Artificial Sequence
  Description of Artificial Sequence: Synthetic oligonucleotide
  Sense strand starting at position 2904 of SEQ ID NO: 587835
gucagucccagugaucaga

SEQ ID NO: 821999 - RNA, 19 nt, Artificial Sequence
  Description of Artificial Sequence: Synthetic oligonucleotide
  Antisense strand to SEQ ID NO: 821998
ucugaucacugggacugac

SEQ ID NO: 822000 - RNA, 19 nt, Artificial Sequence
  Description of Artificial Sequence: Synthetic oligonucleotide
  Sense strand starting at position 3002 of SEQ ID NO: 587835
gcauaagcaucgucaaaca

SEQ ID NO: 822001 - RNA, 19 nt, Artificial Sequence
  Description of Artificial Sequence: Synthetic oligonucleotide
  Antisense strand to SEQ ID NO: 822000
uguuugacgaugcuuaugc

SEQ ID NO: 822002 - RNA, 19 nt, Artificial Sequence
  Description of Artificial Sequence: Synthetic oligonucleotide
  Sense strand starting at position 3012 of SEQ ID NO: 587835
cgucaaacacaguagugau

SEQ ID NO: 822003 - RNA, 19 nt, Artificial Sequence
  Description of Artificial Sequence: Synthetic oligonucleotide
  Antisense strand to SEQ ID NO: 822002
aucacuacuguguuugacg

SEQ ID NO: 822004 - RNA, 19 nt, Artificial Sequence
  Description of Artificial Sequence: Synthetic oligonucleotide
  Sense strand starting at position 3019 of SEQ ID NO: 587835
cacaguagugaucagccaa

SEQ ID NO: 822005 - RNA, 19 nt, Artificial Sequence
  Description of Artificial Sequence: Synthetic oligonucleotide
  Antisense strand to SEQ ID NO: 822004
uuggcugaucacuacugug

SEQ ID NO: 822006 - RNA, 19 nt, Artificial Sequence
  Description of Artificial Sequence: Synthetic oligonucleotide
  Sense strand starting at position 3449 of SEQ ID NO: 587835
gcucccuuaccucgaagaa

SEQ ID NO: 822007 - RNA, 19 nt, Artificial Sequence
  Description of Artificial Sequence: Synthetic oligonucleotide
  Antisense strand to SEQ ID NO: 822006
uucuucgagguaagggagc

SEQ ID NO: 822008 - RNA, 19 nt, Artificial Sequence
  Description of Artificial Sequence: Synthetic oligonucleotide
  Sense strand starting at position 3450 of SEQ ID NO: 587835
cucccuuaccucgaagaau

SEQ ID NO: 822009 - RNA, 19 nt, Artificial Sequence
  Description of Artificial Sequence: Synthetic oligonucleotide
  Antisense strand to SEQ ID NO: 822008
auucuucgagguaagggag

SEQ ID NO: 822010 - RNA, 19 nt, Artificial Sequence
  Description of Artificial Sequence: Synthetic oligonucleotide
  Sense strand starting at position 3492 of SEQ ID NO: 587835
uugugaguugcauagucaa

SEQ ID NO: 822011 - RNA, 19 nt, Artificial Sequence
  Description of Artificial Sequence: Synthetic oligonucleotide
  Antisense strand to SEQ ID NO: 822010
uugacuaugcaacucacaa

SEQ ID NO: 822012 - RNA, 19 nt, Artificial Sequence
  Description of Artificial Sequence: Synthetic oligonucleotide
  Sense strand starting at position 3495 of SEQ ID NO: 587835
ugaguugcauagucaaaua

SEQ ID NO: 822013 - RNA, 19 nt, Artificial Sequence
  Description of Artificial Sequence: Synthetic oligonucleotide
  Antisense strand to SEQ ID NO: 822012
uauuugacuaugcaacuca

SEQ ID NO: 822014 - RNA, 19 nt, Artificial Sequence
  Description of Artificial Sequence: Synthetic oligonucleotide
  Sense strand starting at position 3588 of SEQ ID NO: 587835
cucagaggucuuuguacca

SEQ ID NO: 822015 - RNA, 19 nt, Artificial Sequence
  Description of Artificial Sequence: Synthetic oligonucleotide
  Antisense strand to SEQ ID NO: 822014
ugguacaaagaccucugag

SEQ ID NO: 822016 - RNA, 19 nt, Artificial Sequence
  Description of Artificial Sequence: Synthetic oligonucleotide
  Sense strand starting at position 3624 of SEQ ID NO: 587835
ggcucaauguuucccaaau

SEQ ID NO: 822017 - RNA, 19 nt, Artificial Sequence
  Description of Artificial Sequence: Synthetic oligonucleotide
  Antisense strand to SEQ ID NO: 822016
auuugggaaacauugagcc

SEQ ID NO: 822018 - RNA, 19 nt, Artificial Sequence
  Description of Artificial Sequence: Synthetic oligonucleotide
  Sense strand starting at position 3670 of SEQ ID NO: 587835
gccacuacugaauaugcaa

SEQ ID NO: 822019 - RNA, 19 nt, Artificial Sequence
  Description of Artificial Sequence: Synthetic oligonucleotide
  Antisense strand to SEQ ID NO: 822018
uugcauauucaguaguggc

SEQ ID NO: 822020 - RNA, 19 nt, Artificial Sequence
  Description of Artificial Sequence: Synthetic oligonucleotide
  Sense strand starting at position 3799 of SEQ ID NO: 587835
augcaaagugacuauuauu

SEQ ID NO: 822021 - RNA, 19 nt, Artificial Sequence
  Description of Artificial Sequence: Synthetic oligonucleotide
  Antisense strand to SEQ ID NO: 822020
aauaauagucacuuugcau

SEQ ID NO: 822022 - RNA, 19 nt, Artificial Sequence
  Description of Artificial Sequence: Synthetic oligonucleotide
  Sense strand starting at position 3923 of SEQ ID NO: 587835
agcagaauaucugugcaug

SEQ ID NO: 822023 - RNA, 19 nt, Artificial Sequence
  Description of Artificial Sequence: Synthetic oligonucleotide
  Antisense strand to SEQ ID NO: 822022
caugcacagauauucugcu

SEQ ID NO: 822024 - RNA, 19 nt, Artificial Sequence
  Description of Artificial Sequence: Synthetic oligonucleotide
  Sense strand starting at position 3924 of SEQ ID NO: 587835
gcagaauaucugugcauga

SEQ ID NO: 822025 - RNA, 19 nt, Artificial Sequence
  Description of Artificial Sequence: Synthetic oligonucleotide
  Antisense strand to SEQ ID NO: 822024
ucaugcacagauauucugc

SEQ ID NO: 822026 - RNA, 19 nt, Artificial Sequence
  Description of Artificial Sequence: Synthetic oligonucleotide
  Sense strand starting at position 113 of SEQ ID NO: 587836
agcgucaaauuaguagaua

SEQ ID NO: 822027 - RNA, 19 nt, Artificial Sequence
  Description of Artificial Sequence: Synthetic oligonucleotide
  Antisense strand to SEQ ID NO: 822026
uaucuacuaauuugacgcu

SEQ ID NO: 822028 - RNA, 19 nt, Artificial Sequence
  Description of Artificial Sequence: Synthetic oligonucleotide
  Sense strand starting at position 202 of SEQ ID NO: 587836
gcaauagugcuacaaugua

SEQ ID NO: 822029 - RNA, 19 nt, Artificial Sequence
  Description of Artificial Sequence: Synthetic oligonucleotide
  Antisense strand to SEQ ID NO: 822028
uacauuguagcacuauugc

SEQ ID NO: 822030 - RNA, 19 nt, Artificial Sequence
  Description of Artificial Sequence: Synthetic oligonucleotide
  Sense strand starting at position 770 of SEQ ID NO: 587836
gcuuaugcaucaccacaga

SEQ ID NO: 822031 - RNA, 19 nt, Artificial Sequence
  Description of Artificial Sequence: Synthetic oligonucleotide
  Antisense strand to SEQ ID NO: 822030
ucuguggugaugcauaagc

SEQ ID NO: 822032 - RNA, 19 nt, Artificial Sequence
  Description of Artificial Sequence: Synthetic oligonucleotide
  Sense strand starting at position 803 of SEQ ID NO: 587836
agcuuauacucugcaaggu

SEQ ID NO: 822033 - RNA, 19 nt, Artificial Sequence
  Description of Artificial Sequence: Synthetic oligonucleotide
  Antisense strand to SEQ ID NO: 822032
accuugcagaguauaagcu

SEQ ID NO: 822034 - RNA, 19 nt, Artificial Sequence
  Description of Artificial Sequence: Synthetic oligonucleotide
  Sense strand starting at position 823 of SEQ ID NO: 587836
caaguuuguuuggcuuauu

SEQ ID NO: 822035 - RNA, 19 nt, Artificial Sequence
  Description of Artificial Sequence: Synthetic oligonucleotide
  Antisense strand to SEQ ID NO: 822034
aauaagccaaacaaacuug

SEQ ID NO: 822036 - RNA, 19 nt, Artificial Sequence
  Description of Artificial Sequence: Synthetic oligonucleotide
  Sense strand starting at position 824 of SEQ ID NO: 587836
aaguuuguuuggcuuauuu

SEQ ID NO: 822037 - RNA, 19 nt, Artificial Sequence
  Description of Artificial Sequence: Synthetic oligonucleotide
  Antisense strand to SEQ ID NO: 822036
aaauaagccaaacaaacuu

SEQ ID NO: 822038 - RNA, 19 nt, Artificial Sequence
  Description of Artificial Sequence: Synthetic oligonucleotide
  Sense strand starting at position 826 of SEQ ID NO: 587836
guuuguuuggcuuauuuac

SEQ ID NO: 822039 - RNA, 19 nt, Artificial Sequence
  Description of Artificial Sequence: Synthetic oligonucleotide
  Antisense strand to SEQ ID NO: 822038
guaaauaagccaaacaaac

SEQ ID NO: 822040 - RNA, 19 nt, Artificial Sequence
  Description of Artificial Sequence: Synthetic oligonucleotide
  Sense strand starting at position 828 of SEQ ID NO: 587836
uuguuuggcuuauuuacaa

SEQ ID NO: 822041 - RNA, 19 nt, Artificial Sequence
  Description of Artificial Sequence: Synthetic oligonucleotide
  Antisense strand to SEQ ID NO: 822040
uuguaaauaagccaaacaa

SEQ ID NO: 822042 - RNA, 19 nt, Artificial Sequence
  Description of Artificial Sequence: Synthetic oligonucleotide
  Sense strand starting at position 873 of SEQ ID NO: 587836
gugagucaagcauaaaucu

SEQ ID NO: 822043 - RNA, 19 nt, Artificial Sequence
  Description of Artificial Sequence: Synthetic oligonucleotide
  Antisense strand to SEQ ID NO: 822042
agauuuaugcuugacucac

SEQ ID NO: 822044 - RNA, 19 nt, Artificial Sequence
  Description of Artificial Sequence: Synthetic oligonucleotide
  Sense strand starting at position 911 of SEQ ID NO: 587836
cgggcuaaacuaggugauu

SEQ ID NO: 822045 - RNA, 19 nt, Artificial Sequence
  Description of Artificial Sequence: Synthetic oligonucleotide
  Antisense strand to SEQ ID NO: 822044
aaucaccuaguuuagcccg

SEQ ID NO: 822046 - RNA, 19 nt, Artificial Sequence
  Description of Artificial Sequence: Synthetic oligonucleotide
  Sense strand starting at position 913 of SEQ ID NO: 587836
ggcuaaacuaggugauucu

SEQ ID NO: 822047 - RNA, 19 nt, Artificial Sequence
  Description of Artificial Sequence: Synthetic oligonucleotide
  Antisense strand to SEQ ID NO: 822046
agaaucaccuaguuuagcc

SEQ ID NO: 822048 - RNA, 19 nt, Artificial Sequence
  Description of Artificial Sequence: Synthetic oligonucleotide
  Sense strand starting at position 914 of SEQ ID NO: 587836
gcuaaacuaggugauucua

SEQ ID NO: 822049 - RNA, 19 nt, Artificial Sequence
  Description of Artificial Sequence: Synthetic oligonucleotide
  Antisense strand to SEQ ID NO: 822048
uagaaucaccuaguuuagc

SEQ ID NO: 822050 - RNA, 19 nt, Artificial Sequence
  Description of Artificial Sequence: Synthetic oligonucleotide
  Sense strand starting at position 927 of SEQ ID NO: 587836
auucuaugauagccugcaa

SEQ ID NO: 822051 - RNA, 19 nt, Artificial Sequence
  Description of Artificial Sequence: Synthetic oligonucleotide
  Antisense strand to SEQ ID NO: 822050
uugcaggcuaucauagaau

SEQ ID NO: 822052 - RNA, 19 nt, Artificial Sequence
  Description of Artificial Sequence: Synthetic oligonucleotide
  Sense strand starting at position 1088 of SEQ ID NO: 587836
cuguguuuccauuaaaccu

SEQ ID NO: 822053 - RNA, 19 nt, Artificial Sequence
  Description of Artificial Sequence: Synthetic oligonucleotide
  Antisense strand to SEQ ID NO: 822052
agguuuaauggaaacacag

SEQ ID NO: 822054 - RNA, 19 nt, Artificial Sequence
  Description of Artificial Sequence: Synthetic oligonucleotide
  Sense strand starting at position 1095 of SEQ ID NO: 587836
uccauuaaaccucgauguu

SEQ ID NO: 822055 - RNA, 19 nt, Artificial Sequence
  Description of Artificial Sequence: Synthetic oligonucleotide
  Antisense strand to SEQ ID NO: 822054
aacaucgagguuuaaugga

SEQ ID NO: 822056 - RNA, 19 nt, Artificial Sequence
  Description of Artificial Sequence: Synthetic oligonucleotide
  Sense strand starting at position 1096 of SEQ ID NO: 587836
ccauuaaaccucgauguuc

SEQ ID NO: 822057 - RNA, 19 nt, Artificial Sequence
  Description of Artificial Sequence: Synthetic oligonucleotide
  Antisense strand to SEQ ID NO: 822056
gaacaucgagguuuaaugg

SEQ ID NO: 822058 - RNA, 19 nt, Artificial Sequence
  Description of Artificial Sequence: Synthetic oligonucleotide
  Sense strand starting at position 1252 of SEQ ID NO: 587836
aguguucgaguucauggua

SEQ ID NO: 822059 - RNA, 19 nt, Artificial Sequence
  Description of Artificial Sequence: Synthetic oligonucleotide
  Antisense strand to SEQ ID NO: 822058
uaccaugaacucgaacacu

SEQ ID NO: 822060 - RNA, 19 nt, Artificial Sequence
  Description of Artificial Sequence: Synthetic oligonucleotide
  Sense strand starting at position 1266 of SEQ ID NO: 587836
ugguacucagauuacaagu

SEQ ID NO: 822061 - RNA, 19 nt, Artificial Sequence
  Description of Artificial Sequence: Synthetic oligonucleotide
  Antisense strand to SEQ ID NO: 822060
acuuguaaucugaguacca

SEQ ID NO: 822062 - RNA, 19 nt, Artificial Sequence
  Description of Artificial Sequence: Synthetic oligonucleotide
  Sense strand starting at position 1294 of SEQ ID NO: 587836
uguauauucguucacgaug

SEQ ID NO: 822063 - RNA, 19 nt, Artificial Sequence
  Description of Artificial Sequence: Synthetic oligonucleotide
  Antisense strand to SEQ ID NO: 822062
caucgugaacgaauauaca

SEQ ID NO: 822064 - RNA, 19 nt, Artificial Sequence
  Description of Artificial Sequence: Synthetic oligonucleotide
  Sense strand starting at position 1343 of SEQ ID NO: 587836
cuucgauuaccucaaagcu

SEQ ID NO: 822065 - RNA, 19 nt, Artificial Sequence
  Description of Artificial Sequence: Synthetic oligonucleotide
  Antisense strand to SEQ ID NO: 822064
agcuuugagguaaucgaag

SEQ ID NO: 822066 - RNA, 19 nt, Artificial Sequence
  Description of Artificial Sequence: Synthetic oligonucleotide
  Sense strand starting at position 1361 of SEQ ID NO: 587836
ugggcaguuguuagcgaga

SEQ ID NO: 822067 - RNA, 19 nt, Artificial Sequence
  Description of Artificial Sequence: Synthetic oligonucleotide
  Antisense strand to SEQ ID NO: 822066
ucucgcuaacaacugccca

SEQ ID NO: 822068 - RNA, 19 nt, Artificial Sequence
  Description of Artificial Sequence: Synthetic oligonucleotide
  Sense strand starting at position 1362 of SEQ ID NO: 587836
gggcaguuguuagcgagaa

SEQ ID NO: 822069 - RNA, 19 nt, Artificial Sequence
  Description of Artificial Sequence: Synthetic oligonucleotide
  Antisense strand to SEQ ID NO: 822068
uucucgcuaacaacugccc

SEQ ID NO: 822070 - RNA, 19 nt, Artificial Sequence
  Description of Artificial Sequence: Synthetic oligonucleotide
  Sense strand starting at position 1364 of SEQ ID NO: 587836
gcaguuguuagcgagaaug

SEQ ID NO: 822071 - RNA, 19 nt, Artificial Sequence
  Description of Artificial Sequence: Synthetic oligonucleotide
  Antisense strand to SEQ ID NO: 822070
cauucucgcuaacaacugc

SEQ ID NO: 822072 - RNA, 19 nt, Artificial Sequence
  Description of Artificial Sequence: Synthetic oligonucleotide
  Sense strand starting at position 1366 of SEQ ID NO: 587836
aguuguuagcgagaaugac

SEQ ID NO: 822073 - RNA, 19 nt, Artificial Sequence
  Description of Artificial Sequence: Synthetic oligonucleotide
  Antisense strand to SEQ ID NO: 822072
gucauucucgcuaacaacu

SEQ ID NO: 822074 - RNA, 19 nt, Artificial Sequence
  Description of Artificial Sequence: Synthetic oligonucleotide
  Sense strand starting at position 1390 of SEQ ID NO: 587836
ucgcuuugccuugucugau

SEQ ID NO: 822075 - RNA, 19 nt, Artificial Sequence
  Description of Artificial Sequence: Synthetic oligonucleotide
  Antisense strand to SEQ ID NO: 822074
aucagacaaggcaaagcga

SEQ ID NO: 822076 - RNA, 19 nt, Artificial Sequence
  Description of Artificial Sequence: Synthetic oligonucleotide
  Sense strand starting at position 1459 of SEQ ID NO: 587836
cgaguuggagccuagaguu

SEQ ID NO: 822077 - RNA, 19 nt, Artificial Sequence
  Description of Artificial Sequence: Synthetic oligonucleotide
  Antisense strand to SEQ ID NO: 822076
aacucuaggcuccaacucg

SEQ ID NO: 822078 - RNA, 19 nt, Artificial Sequence
  Description of Artificial Sequence: Synthetic oligonucleotide
  Sense strand starting at position 1478 of SEQ ID NO: 587836
gaucgacuccagcgacuuu

SEQ ID NO: 822079 - RNA, 19 nt, Artificial Sequence
  Description of Artificial Sequence: Synthetic oligonucleotide
  Antisense strand to SEQ ID NO: 822078
aaagucgcuggagucgauc

SEQ ID NO: 822080 - RNA, 19 nt, Artificial Sequence
  Description of Artificial Sequence: Synthetic oligonucleotide
  Sense strand starting at position 1706 of SEQ ID NO: 587836
aagacaucucuccacguga

SEQ ID NO: 822081 - RNA, 19 nt, Artificial Sequence
  Description of Artificial Sequence: Synthetic oligonucleotide
  Antisense strand to SEQ ID NO: 822080
ucacguggagagaugucuu

SEQ ID NO: 822082 - RNA, 19 nt, Artificial Sequence
  Description of Artificial Sequence: Synthetic oligonucleotide
  Sense strand starting at position 1708 of SEQ ID NO: 587836
gacaucucuccacgugaau

SEQ ID NO: 822083 - RNA, 19 nt, Artificial Sequence
  Description of Artificial Sequence: Synthetic oligonucleotide
  Antisense strand to SEQ ID NO: 822082
auucacguggagagauguc

SEQ ID NO: 822084 - RNA, 19 nt, Artificial Sequence
  Description of Artificial Sequence: Synthetic oligonucleotide
  Sense strand starting at position 2113 of SEQ ID NO: 587836
ggcugcucauaccuuuaau

SEQ ID NO: 822085 - RNA, 19 nt, Artificial Sequence
  Description of Artificial Sequence: Synthetic oligonucleotide
  Antisense strand to SEQ ID NO: 822084
auuaaagguaugagcagcc

SEQ ID NO: 822086 - RNA, 19 nt, Artificial Sequence
  Description of Artificial Sequence: Synthetic oligonucleotide
  Sense strand starting at position 2495 of SEQ ID NO: 587836
gcgagcugcggucuaacua

SEQ ID NO: 822087 - RNA, 19 nt, Artificial Sequence
  Description of Artificial Sequence: Synthetic oligonucleotide
  Antisense strand to SEQ ID NO: 822086
uaguuagaccgcagcucgc

SEQ ID NO: 822088 - RNA, 19 nt, Artificial Sequence
  Description of Artificial Sequence: Synthetic oligonucleotide
  Sense strand starting at position 2496 of SEQ ID NO: 587836
cgagcugcggucuaacuaa

SEQ ID NO: 822089 - RNA, 19 nt, Artificial Sequence
  Description of Artificial Sequence: Synthetic oligonucleotide
  Antisense strand to SEQ ID NO: 822088
uuaguuagaccgcagcucg

SEQ ID NO: 822090 - RNA, 19 nt, Artificial Sequence
  Description of Artificial Sequence: Synthetic oligonucleotide
  Sense strand starting at position 2697 of SEQ ID NO: 587836
uacucuccgcuugguagaa

SEQ ID NO: 822091 - RNA, 19 nt, Artificial Sequence
  Description of Artificial Sequence: Synthetic oligonucleotide
  Antisense strand to SEQ ID NO: 822090
uucuaccaagcggagagua

SEQ ID NO: 822092 - RNA, 19 nt, Artificial Sequence
  Description of Artificial Sequence: Synthetic oligonucleotide
  Sense strand starting at position 2812 of SEQ ID NO: 587836
uguguuagcgugaacuugu

SEQ ID NO: 822093 - RNA, 19 nt, Artificial Sequence
  Description of Artificial Sequence: Synthetic oligonucleotide
  Antisense strand to SEQ ID NO: 822092
acaaguucacgcuaacaca

SEQ ID NO: 822094 - RNA, 19 nt, Artificial Sequence
  Description of Artificial Sequence: Synthetic oligonucleotide
  Sense strand starting at position 2823 of SEQ ID NO: 587836
gaacuugugagccgaguuu

SEQ ID NO: 822095 - RNA, 19 nt, Artificial Sequence
  Description of Artificial Sequence: Synthetic oligonucleotide
  Antisense strand to SEQ ID NO: 822094
aaacucggcucacaaguuc

SEQ ID NO: 822096 - RNA, 19 nt, Artificial Sequence
  Description of Artificial Sequence: Synthetic oligonucleotide
  Sense strand starting at position 2899 of SEQ ID NO: 587836
uggaucuugguauaaaugu

SEQ ID NO: 822097 - RNA, 19 nt, Artificial Sequence
  Description of Artificial Sequence: Synthetic oligonucleotide
  Antisense strand to SEQ ID NO: 822096
acauuuauaccaagaucca

SEQ ID NO: 822098 - RNA, 19 nt, Artificial Sequence
  Description of Artificial Sequence: Synthetic oligonucleotide
  Sense strand starting at position 2906 of SEQ ID NO: 587836
ugguauaaauguccagaga

SEQ ID NO: 822099 - RNA, 19 nt, Artificial Sequence
  Description of Artificial Sequence: Synthetic oligonucleotide
  Antisense strand to SEQ ID NO: 822098
ucucuggacauuuauacca

SEQ ID NO: 822100 - RNA, 19 nt, Artificial Sequence
  Description of Artificial Sequence: Synthetic oligonucleotide
  Sense strand starting at position 2933 of SEQ ID NO: 587836
ugaagauauuaggcgcuga

SEQ ID NO: 822101 - RNA, 19 nt, Artificial Sequence
  Description of Artificial Sequence: Synthetic oligonucleotide
  Antisense strand to SEQ ID NO: 822100
ucagcgccuaauaucuuca

SEQ ID NO: 822102 - RNA, 19 nt, Artificial Sequence
  Description of Artificial Sequence: Synthetic oligonucleotide
  Sense strand starting at position 2934 of SEQ ID NO: 587836
gaagauauuaggcgcugaa

SEQ ID NO: 822103 - RNA, 19 nt, Artificial Sequence
  Description of Artificial Sequence: Synthetic oligonucleotide
  Antisense strand to SEQ ID NO: 822102
uucagcgccuaauaucuuc

SEQ ID NO: 822104 - RNA, 19 nt, Artificial Sequence
  Description of Artificial Sequence: Synthetic oligonucleotide
  Sense strand starting at position 3038 of SEQ ID NO: 587836
cgugcuguaccaggaauca

SEQ ID NO: 822105 - RNA, 19 nt, Artificial Sequence
  Description of Artificial Sequence: Synthetic oligonucleotide
  Antisense strand to SEQ ID NO: 822104
ugauuccugguacagcacg

SEQ ID NO: 822106 - RNA, 19 nt, Artificial Sequence
  Description of Artificial Sequence: Synthetic oligonucleotide
  Sense strand starting at position 52 of SEQ ID NO: 587837
uaaggugaccacuguuaaa

SEQ ID NO: 822107 - RNA, 19 nt, Artificial Sequence
  Description of Artificial Sequence: Synthetic oligonucleotide
  Antisense strand to SEQ ID NO: 822106
uuuaacaguggucaccuua

SEQ ID NO: 822108 - RNA, 19 nt, Artificial Sequence
  Description of Artificial Sequence: Synthetic oligonucleotide
  Sense strand starting at position 260 of SEQ ID NO: 587837
ggcucacuccauugauacu

SEQ ID NO: 822109 - RNA, 19 nt, Artificial Sequence
  Description of Artificial Sequence: Synthetic oligonucleotide
  Antisense strand to SEQ ID NO: 822108
aguaucaauggagugagcc

SEQ ID NO: 822110 - RNA, 19 nt, Artificial Sequence
  Description of Artificial Sequence: Synthetic oligonucleotide
  Sense strand starting at position 269 of SEQ ID NO: 587837
cauugauacuguggugaaa

SEQ ID NO: 822111 - RNA, 19 nt, Artificial Sequence
  Description of Artificial Sequence: Synthetic oligonucleotide
  Antisense strand to SEQ ID NO: 822110
uuucaccacaguaucaaug

SEQ ID NO: 822112 - RNA, 19 nt, Artificial Sequence
  Description of Artificial Sequence: Synthetic oligonucleotide
  Sense strand starting at position 377 of SEQ ID NO: 587837
ggaauccucucauguuaca

SEQ ID NO: 822113 - RNA, 19 nt, Artificial Sequence
  Description of Artificial Sequence: Synthetic oligonucleotide
  Antisense strand to SEQ ID NO: 822112
uguaacaugagaggauucc

SEQ ID NO: 822114 - RNA, 19 nt, Artificial Sequence
  Description of Artificial Sequence: Synthetic oligonucleotide
  Sense strand starting at position 405 of SEQ ID NO: 587837
ucuguauucuauuaagaga

SEQ ID NO: 822115 - RNA, 19 nt, Artificial Sequence
  Description of Artificial Sequence: Synthetic oligonucleotide
  Antisense strand to SEQ ID NO: 822114
ucucuuaauagaauacaga

SEQ ID NO: 822116 - RNA, 19 nt, Artificial Sequence
  Description of Artificial Sequence: Synthetic oligonucleotide
  Sense strand starting at position 439 of SEQ ID NO: 587837
gggaacauggcuugcaacu

SEQ ID NO: 822117 - RNA, 19 nt, Artificial Sequence
  Description of Artificial Sequence: Synthetic oligonucleotide
  Antisense strand to SEQ ID NO: 822116
aguugcaagccauguuccc

SEQ ID NO: 822118 - RNA, 19 nt, Artificial Sequence
  Description of Artificial Sequence: Synthetic oligonucleotide
  Sense strand starting at position 506 of SEQ ID NO: 587837
uuguuacuccgguguuuca

SEQ ID NO: 822119 - RNA, 19 nt, Artificial Sequence
  Description of Artificial Sequence: Synthetic oligonucleotide
  Antisense strand to SEQ ID NO: 822118
ugaaacaccggaguaacaa

SEQ ID NO: 822120 - RNA, 19 nt, Artificial Sequence
  Description of Artificial Sequence: Synthetic oligonucleotide
  Sense strand starting at position 537 of SEQ ID NO: 587837
ccagaaguaaugugaaggu

SEQ ID NO: 822121 - RNA, 19 nt, Artificial Sequence
  Description of Artificial Sequence: Synthetic oligonucleotide
  Antisense strand to SEQ ID NO: 822120
accuucacauuacuucugg

SEQ ID NO: 822122 - RNA, 19 nt, Artificial Sequence
  Description of Artificial Sequence: Synthetic oligonucleotide
  Sense strand starting at position 604 of SEQ ID NO: 587837
cccucugauucugaugaca

SEQ ID NO: 822123 - RNA, 19 nt, Artificial Sequence
  Description of Artificial Sequence: Synthetic oligonucleotide
  Antisense strand to SEQ ID NO: 822122
ugucaucagaaucagaggg

SEQ ID NO: 822124 - RNA, 19 nt, Artificial Sequence
  Description of Artificial Sequence: Synthetic oligonucleotide
  Sense strand starting at position 934 of SEQ ID NO: 587837
uuagguagcuaagcaauua

SEQ ID NO: 822125 - RNA, 19 nt, Artificial Sequence
  Description of Artificial Sequence: Synthetic oligonucleotide
  Antisense strand to SEQ ID NO: 822124
uaauugcuuagcuaccuaa

SEQ ID NO: 822126 - RNA, 19 nt, Artificial Sequence
  Description of Artificial Sequence: Synthetic oligonucleotide
  Sense strand starting at position 946 of SEQ ID NO: 587837
gcaauuacucaguacaguu

SEQ ID NO: 822127 - RNA, 19 nt, Artificial Sequence
  Description of Artificial Sequence: Synthetic oligonucleotide
  Antisense strand to SEQ ID NO: 822126
aacuguacugaguaauugc

SEQ ID NO: 822128 - RNA, 19 nt, Artificial Sequence
  Description of Artificial Sequence: Synthetic oligonucleotide
  Sense strand starting at position 966 of SEQ ID NO: 587837
ggaaguaaaucuugccaag

SEQ ID NO: 822129 - RNA, 19 nt, Artificial Sequence
  Description of Artificial Sequence: Synthetic oligonucleotide
  Antisense strand to SEQ ID NO: 822128
cuuggcaagauuuacuucc

SEQ ID NO: 822130 - RNA, 19 nt, Artificial Sequence
  Description of Artificial Sequence: Synthetic oligonucleotide
  Sense strand starting at position 969 of SEQ ID NO: 587837
aguaaaucuugccaagaac

SEQ ID NO: 822131 - RNA, 19 nt, Artificial Sequence
  Description of Artificial Sequence: Synthetic oligonucleotide
  Antisense strand to SEQ ID NO: 822130
guucuuggcaagauuuacu

SEQ ID NO: 822132 - RNA, 19 nt, Artificial Sequence
  Description of Artificial Sequence: Synthetic oligonucleotide
  Sense strand starting at position 1203 of SEQ ID NO: 587837
agcucacagcgcuguauua

SEQ ID NO: 822133 - RNA, 19 nt, Artificial Sequence
  Description of Artificial Sequence: Synthetic oligonucleotide
  Antisense strand to SEQ ID NO: 822132
uaauacagcgcugugagcu

SEQ ID NO: 822134 - RNA, 19 nt, Artificial Sequence
  Description of Artificial Sequence: Synthetic oligonucleotide
  Sense strand starting at position 1216 of SEQ ID NO: 587837
guauuacucccguacugag

SEQ ID NO: 822135 - RNA, 19 nt, Artificial Sequence
  Description of Artificial Sequence: Synthetic oligonucleotide
  Antisense strand to SEQ ID NO: 822134
cucaguacgggaguaauac

SEQ ID NO: 822136 - RNA, 19 nt, Artificial Sequence
  Description of Artificial Sequence: Synthetic oligonucleotide
  Sense strand starting at position 1226 of SEQ ID NO: 587837
cguacugagcaguguuguu

SEQ ID NO: 822137 - RNA, 19 nt, Artificial Sequence
  Description of Artificial Sequence: Synthetic oligonucleotide
  Antisense strand to SEQ ID NO: 822136
aacaacacugcucaguacg

SEQ ID NO: 822138 - RNA, 19 nt, Artificial Sequence
  Description of Artificial Sequence: Synthetic oligonucleotide
  Sense strand starting at position 1231 of SEQ ID NO: 587837
ugagcaguguuguuuacca

SEQ ID NO: 822139 - RNA, 19 nt, Artificial Sequence
  Description of Artificial Sequence: Synthetic oligonucleotide
  Antisense strand to SEQ ID NO: 822138
ugguaaacaacacugcuca

SEQ ID NO: 822140 - RNA, 19 nt, Artificial Sequence
  Description of Artificial Sequence: Synthetic oligonucleotide
  Sense strand starting at position 1233 of SEQ ID NO: 587837
agcaguguuguuuaccaga

SEQ ID NO: 822141 - RNA, 19 nt, Artificial Sequence
  Description of Artificial Sequence: Synthetic oligonucleotide
  Antisense strand to SEQ ID NO: 822140
ucugguaaacaacacugcu

SEQ ID NO: 822142 - RNA, 19 nt, Artificial Sequence
  Description of Artificial Sequence: Synthetic oligonucleotide
  Sense strand starting at position 1235 of SEQ ID NO: 587837
caguguuguuuaccagaaa

SEQ ID NO: 822143 - RNA, 19 nt, Artificial Sequence
  Description of Artificial Sequence: Synthetic oligonucleotide
  Antisense strand to SEQ ID NO: 822142
uuucugguaaacaacacug

SEQ ID NO: 822144 - RNA, 19 nt, Artificial Sequence
  Description of Artificial Sequence: Synthetic oligonucleotide
  Sense strand starting at position 1236 of SEQ ID NO: 587837
aguguuguuuaccagaaau

SEQ ID NO: 822145 - RNA, 19 nt, Artificial Sequence
  Description of Artificial Sequence: Synthetic oligonucleotide
  Antisense strand to SEQ ID NO: 822144
auuucugguaaacaacacu

SEQ ID NO: 822146 - RNA, 19 nt, Artificial Sequence
  Description of Artificial Sequence: Synthetic oligonucleotide
  Sense strand starting at position 1248 of SEQ ID NO: 587837
cagaaaugcugucacugac

SEQ ID NO: 822147 - RNA, 19 nt, Artificial Sequence
  Description of Artificial Sequence: Synthetic oligonucleotide
  Antisense strand to SEQ ID NO: 822146
gucagugacagcauuucug

SEQ ID NO: 822148 - RNA, 19 nt, Artificial Sequence
  Description of Artificial Sequence: Synthetic oligonucleotide
  Sense strand starting at position 1263 of SEQ ID NO: 587837
ugacuuuagucacuaguaa

SEQ ID NO: 822149 - RNA, 19 nt, Artificial Sequence
  Description of Artificial Sequence: Synthetic oligonucleotide
  Antisense strand to SEQ ID NO: 822148
uuacuagugacuaaaguca

SEQ ID NO: 822150 - RNA, 19 nt, Artificial Sequence
  Description of Artificial Sequence: Synthetic oligonucleotide
  Sense strand starting at position 1267 of SEQ ID NO: 587837
uuuagucacuaguaacuuu

SEQ ID NO: 822151 - RNA, 19 nt, Artificial Sequence
  Description of Artificial Sequence: Synthetic oligonucleotide
  Antisense strand to SEQ ID NO: 822150
aaaguuacuagugacuaaa

SEQ ID NO: 822152 - RNA, 19 nt, Artificial Sequence
  Description of Artificial Sequence: Synthetic oligonucleotide
  Sense strand starting at position 1302 of SEQ ID NO: 587837
uacaguguacgaugcauau

SEQ ID NO: 822153 - RNA, 19 nt, Artificial Sequence
  Description of Artificial Sequence: Synthetic oligonucleotide
  Antisense strand to SEQ ID NO: 822152
auaugcaucguacacugua

SEQ ID NO: 822154 - RNA, 19 nt, Artificial Sequence
  Description of Artificial Sequence: Synthetic oligonucleotide
  Sense strand starting at position 1378 of SEQ ID NO: 587837
ugacaauagcaauacguuu

SEQ ID NO: 822155 - RNA, 19 nt, Artificial Sequence
  Description of Artificial Sequence: Synthetic oligonucleotide
  Antisense strand to SEQ ID NO: 822154
aaacguauugcuauuguca

SEQ ID NO: 822156 - RNA, 19 nt, Artificial Sequence
  Description of Artificial Sequence: Synthetic oligonucleotide
  Sense strand starting at position 1422 of SEQ ID NO: 587837
gccuccgacgacuaauuaa

SEQ ID NO: 822157 - RNA, 19 nt, Artificial Sequence
  Description of Artificial Sequence: Synthetic oligonucleotide
  Antisense strand to SEQ ID NO: 822156
uuaauuagucgucggaggc

SEQ ID NO: 822158 - RNA, 19 nt, Artificial Sequence
  Description of Artificial Sequence: Synthetic oligonucleotide
  Sense strand starting at position 1518 of SEQ ID NO: 587837
ccgagacuuuaagcgcaaa

SEQ ID NO: 822159 - RNA, 19 nt, Artificial Sequence
  Description of Artificial Sequence: Synthetic oligonucleotide
  Antisense strand to SEQ ID NO: 822158
uuugcgcuuaaagucucgg

SEQ ID NO: 822160 - RNA, 19 nt, Artificial Sequence
  Description of Artificial Sequence: Synthetic oligonucleotide
  Sense strand starting at position 1910 of SEQ ID NO: 587837
aguaucuggcucuggagau

SEQ ID NO: 822161 - RNA, 19 nt, Artificial Sequence
  Description of Artificial Sequence: Synthetic oligonucleotide
  Antisense strand to SEQ ID NO: 822160
aucuccagagccagauacu

SEQ ID NO: 822162 - RNA, 19 nt, Artificial Sequence
  Description of Artificial Sequence: Synthetic oligonucleotide
  Sense strand starting at position 2010 of SEQ ID NO: 587837
augcguacuguccacuuaa

SEQ ID NO: 822163 - RNA, 19 nt, Artificial Sequence
  Description of Artificial Sequence: Synthetic oligonucleotide
  Antisense strand to SEQ ID NO: 822162
uuaaguggacaguacgcau

SEQ ID NO: 822164 - RNA, 19 nt, Artificial Sequence
  Description of Artificial Sequence: Synthetic oligonucleotide
  Sense strand starting at position 2023 of SEQ ID NO: 587837
acuuaaagacuucgcgaga

SEQ ID NO: 822165 - RNA, 19 nt, Artificial Sequence
  Description of Artificial Sequence: Synthetic oligonucleotide
  Antisense strand to SEQ ID NO: 822164
ucucgcgaagucuuuaagu

SEQ ID NO: 822166 - RNA, 19 nt, Artificial Sequence
  Description of Artificial Sequence: Synthetic oligonucleotide
  Sense strand starting at position 2026 of SEQ ID NO: 587837
uaaagacuucgcgagagaa

SEQ ID NO: 822167 - RNA, 19 nt, Artificial Sequence
  Description of Artificial Sequence: Synthetic oligonucleotide
  Antisense strand to SEQ ID NO: 822166
uucucucgcgaagucuuua

SEQ ID NO: 822168 - RNA, 19 nt, Artificial Sequence
  Description of Artificial Sequence: Synthetic oligonucleotide
  Sense strand starting at position 2050 of SEQ ID NO: 587837
acgacucauaggugucuua

SEQ ID NO: 822169 - RNA, 19 nt, Artificial Sequence
  Description of Artificial Sequence: Synthetic oligonucleotide
  Antisense strand to SEQ ID NO: 822168
uaagacaccuaugagucgu

SEQ ID NO: 822170 - RNA, 19 nt, Artificial Sequence
  Description of Artificial Sequence: Synthetic oligonucleotide
  Sense strand starting at position 2053 of SEQ ID NO: 587837
acucauaggugucuuagaa

SEQ ID NO: 822171 - RNA, 19 nt, Artificial Sequence
  Description of Artificial Sequence: Synthetic oligonucleotide
  Antisense strand to SEQ ID NO: 822170
uucuaagacaccuaugagu

SEQ ID NO: 822172 - RNA, 19 nt, Artificial Sequence
  Description of Artificial Sequence: Synthetic oligonucleotide
  Sense strand starting at position 2057 of SEQ ID NO: 587837
auaggugucuuagaauaag

SEQ ID NO: 822173 - RNA, 19 nt, Artificial Sequence
  Description of Artificial Sequence: Synthetic oligonucleotide
  Antisense strand to SEQ ID NO: 822172
cuuauucuaagacaccuau

SEQ ID NO: 822174 - RNA, 19 nt, Artificial Sequence
  Description of Artificial Sequence: Synthetic oligonucleotide
  Sense strand starting at position 2142 of SEQ ID NO: 587837
ucaacaaacuuucggguaa

SEQ ID NO: 822175 - RNA, 19 nt, Artificial Sequence
  Description of Artificial Sequence: Synthetic oligonucleotide
  Antisense strand to SEQ ID NO: 822174
uuacccgaaaguuuguuga

SEQ ID NO: 822176 - RNA, 19 nt, Artificial Sequence
  Description of Artificial Sequence: Synthetic oligonucleotide
  Sense strand starting at position 2508 of SEQ ID NO: 587837
gcgguagucgcagacuaca

SEQ ID NO: 822177 - RNA, 19 nt, Artificial Sequence
  Description of Artificial Sequence: Synthetic oligonucleotide
  Antisense strand to SEQ ID NO: 822176
uguagucugcgacuaccgc

SEQ ID NO: 822178 - RNA, 19 nt, Artificial Sequence
  Description of Artificial Sequence: Synthetic oligonucleotide
  Sense strand starting at position 2611 of SEQ ID NO: 587837
ucuggagugcucuagcuua

SEQ ID NO: 822179 - RNA, 19 nt, Artificial Sequence
  Description of Artificial Sequence: Synthetic oligonucleotide
  Antisense strand to SEQ ID NO: 822178
uaagcuagagcacuccaga

SEQ ID NO: 822180 - RNA, 19 nt, Artificial Sequence
  Description of Artificial Sequence: Synthetic oligonucleotide
  Sense strand starting at position 2616 of SEQ ID NO: 587837
agugcucuagcuuacgaaa

SEQ ID NO: 822181 - RNA, 19 nt, Artificial Sequence
  Description of Artificial Sequence: Synthetic oligonucleotide
  Antisense strand to SEQ ID NO: 822180
uuucguaagcuagagcacu

SEQ ID NO: 822182 - RNA, 19 nt, Artificial Sequence
  Description of Artificial Sequence: Synthetic oligonucleotide
  Sense strand starting at position 3962 of SEQ ID NO: 587837
gggagcauuguugggucaa

SEQ ID NO: 822183 - RNA, 19 nt, Artificial Sequence
  Description of Artificial Sequence: Synthetic oligonucleotide
  Antisense strand to SEQ ID NO: 822182
uugacccaacaaugcuccc

SEQ ID NO: 822184 - RNA, 19 nt, Artificial Sequence
  Description of Artificial Sequence: Synthetic oligonucleotide
  Sense strand starting at position 3963 of SEQ ID NO: 587837
ggagcauuguugggucaag

SEQ ID NO: 822185 - RNA, 19 nt, Artificial Sequence
  Description of Artificial Sequence: Synthetic oligonucleotide
  Antisense strand to SEQ ID NO: 822184
cuugacccaacaaugcucc

SEQ ID NO: 822186 - RNA, 19 nt, Artificial Sequence
  Description of Artificial Sequence: Synthetic oligonucleotide
  Sense strand starting at position 9 of SEQ ID NO: 587838
ucaagauggguuugucaau

SEQ ID NO: 822187 - RNA, 19 nt, Artificial Sequence
  Description of Artificial Sequence: Synthetic oligonucleotide
  Antisense strand to SEQ ID NO: 822186
auugacaaacccaucuuga

SEQ ID NO: 822188 - RNA, 19 nt, Artificial Sequence
  Description of Artificial Sequence: Synthetic oligonucleotide
  Sense strand starting at position 336 of SEQ ID NO: 587838
cacucaaccugacguaaga

SEQ ID NO: 822189 - RNA, 19 nt, Artificial Sequence
  Description of Artificial Sequence: Synthetic oligonucleotide
  Antisense strand to SEQ ID NO: 822188
ucuuacgucagguugagug

SEQ ID NO: 822190 - RNA, 19 nt, Artificial Sequence
  Description of Artificial Sequence: Synthetic oligonucleotide
  Sense strand starting at position 380 of SEQ ID NO: 587838
agcuuuacuuauuccagga

SEQ ID NO: 822191 - RNA, 19 nt, Artificial Sequence
  Description of Artificial Sequence: Synthetic oligonucleotide
  Antisense strand to SEQ ID NO: 822190
uccuggaauaaguaaagcu

SEQ ID NO: 822192 - RNA, 19 nt, Artificial Sequence
  Description of Artificial Sequence: Synthetic oligonucleotide
  Sense strand starting at position 449 of SEQ ID NO: 587838
ccaagauguucccaaacag

SEQ ID NO: 822193 - RNA, 19 nt, Artificial Sequence
  Description of Artificial Sequence: Synthetic oligonucleotide
  Antisense strand to SEQ ID NO: 822192
cuguuugggaacaucuugg

SEQ ID NO: 822194 - RNA, 19 nt, Artificial Sequence
  Description of Artificial Sequence: Synthetic oligonucleotide
  Sense strand starting at position 511 of SEQ ID NO: 587838
guaggcgucuuugagaaag

SEQ ID NO: 822195 - RNA, 19 nt, Artificial Sequence
  Description of Artificial Sequence: Synthetic oligonucleotide
  Antisense strand to SEQ ID NO: 822194
cuuucucaaagacgccuac

SEQ ID NO: 822196 - RNA, 19 nt, Artificial Sequence
  Description of Artificial Sequence: Synthetic oligonucleotide
  Sense strand starting at position 671 of SEQ ID NO: 587838
uacuguugugccuguugua

SEQ ID NO: 822197 - RNA, 19 nt, Artificial Sequence
  Description of Artificial Sequence: Synthetic oligonucleotide
  Antisense strand to SEQ ID NO: 822196
uacaacaggcacaacagua

SEQ ID NO: 822198 - RNA, 19 nt, Artificial Sequence
  Description of Artificial Sequence: Synthetic oligonucleotide
  Sense strand starting at position 678 of SEQ ID NO: 587838
gugccuguuguacagugau

SEQ ID NO: 822199 - RNA, 19 nt, Artificial Sequence
  Description of Artificial Sequence: Synthetic oligonucleotide
  Antisense strand to SEQ ID NO: 822198
aucacuguacaacaggcac

SEQ ID NO: 822200 - RNA, 19 nt, Artificial Sequence
  Description of Artificial Sequence: Synthetic oligonucleotide
  Sense strand starting at position 757 of SEQ ID NO: 587838
aaucgaauuccagggacca

SEQ ID NO: 822201 - RNA, 19 nt, Artificial Sequence
  Description of Artificial Sequence: Synthetic oligonucleotide
  Antisense strand to SEQ ID NO: 822200
uggucccuggaauucgauu

SEQ ID NO: 822202 - RNA, 19 nt, Artificial Sequence
  Description of Artificial Sequence: Synthetic oligonucleotide
  Sense strand starting at position 758 of SEQ ID NO: 587838
aucgaauuccagggaccaa

SEQ ID NO: 822203 - RNA, 19 nt, Artificial Sequence
  Description of Artificial Sequence: Synthetic oligonucleotide
  Antisense strand to SEQ ID NO: 822202
uuggucccuggaauucgau

SEQ ID NO: 822204 - RNA, 19 nt, Artificial Sequence
  Description of Artificial Sequence: Synthetic oligonucleotide
  Sense strand starting at position 835 of SEQ ID NO: 587838
ucaacugcugccugauacu

SEQ ID NO: 822205 - RNA, 19 nt, Artificial Sequence
  Description of Artificial Sequence: Synthetic oligonucleotide
  Antisense strand to SEQ ID NO: 822204
aguaucaggcagcaguuga

SEQ ID NO: 822206 - RNA, 19 nt, Artificial Sequence
  Description of Artificial Sequence: Synthetic oligonucleotide
  Sense strand starting at position 867 of SEQ ID NO: 587838
ucuguuggcugaggagaua

SEQ ID NO: 822207 - RNA, 19 nt, Artificial Sequence
  Description of Artificial Sequence: Synthetic oligonucleotide
  Antisense strand to SEQ ID NO: 822206
uaucuccucagccaacaga

SEQ ID NO: 822208 - RNA, 19 nt, Artificial Sequence
  Description of Artificial Sequence: Synthetic oligonucleotide
  Sense strand starting at position 941 of SEQ ID NO: 587838
gggagauaacgguggcaua

SEQ ID NO: 822209 - RNA, 19 nt, Artificial Sequence
  Description of Artificial Sequence: Synthetic oligonucleotide
  Antisense strand to SEQ ID NO: 822208
uaugccaccguuaucuccc

SEQ ID NO: 822210 - RNA, 19 nt, Artificial Sequence
  Description of Artificial Sequence: Synthetic oligonucleotide
  Sense strand starting at position 1099 of SEQ ID NO: 587838
ccgucagcacaguaagaaa

SEQ ID NO: 822211 - RNA, 19 nt, Artificial Sequence
  Description of Artificial Sequence: Synthetic oligonucleotide
  Antisense strand to SEQ ID NO: 822210
uuucuuacugugcugacgg

SEQ ID NO: 822212 - RNA, 19 nt, Artificial Sequence
  Description of Artificial Sequence: Synthetic oligonucleotide
  Sense strand starting at position 1283 of SEQ ID NO: 587838
gacguuaacuccucaggca

SEQ ID NO: 822213 - RNA, 19 nt, Artificial Sequence
  Description of Artificial Sequence: Synthetic oligonucleotide
  Antisense strand to SEQ ID NO: 822212
ugccugaggaguuaacguc

SEQ ID NO: 822214 - RNA, 19 nt, Artificial Sequence
  Description of Artificial Sequence: Synthetic oligonucleotide
  Sense strand starting at position 1284 of SEQ ID NO: 587838
acguuaacuccucaggcaa

SEQ ID NO: 822215 - RNA, 19 nt, Artificial Sequence
  Description of Artificial Sequence: Synthetic oligonucleotide
  Antisense strand to SEQ ID NO: 822214
uugccugaggaguuaacgu

SEQ ID NO: 822216 - RNA, 19 nt, Artificial Sequence
  Description of Artificial Sequence: Synthetic oligonucleotide
  Sense strand starting at position 1352 of SEQ ID NO: 587838
cccuucuugccgcaauaca

SEQ ID NO: 822217 - RNA, 19 nt, Artificial Sequence
  Description of Artificial Sequence: Synthetic oligonucleotide
  Antisense strand to SEQ ID NO: 822216
uguauugcggcaagaaggg

SEQ ID NO: 822218 - RNA, 19 nt, Artificial Sequence
  Description of Artificial Sequence: Synthetic oligonucleotide
  Sense strand starting at position 1421 of SEQ ID NO: 587838
uucuuaaaccgauacggau

SEQ ID NO: 822219 - RNA, 19 nt, Artificial Sequence
  Description of Artificial Sequence: Synthetic oligonucleotide
  Antisense strand to SEQ ID NO: 822218
auccguaucgguuuaagaa

SEQ ID NO: 822220 - RNA, 19 nt, Artificial Sequence
  Description of Artificial Sequence: Synthetic oligonucleotide
  Sense strand starting at position 1574 of SEQ ID NO: 587838
ugacgaugcccuugaugua

SEQ ID NO: 822221 - RNA, 19 nt, Artificial Sequence
  Description of Artificial Sequence: Synthetic oligonucleotide
  Antisense strand to SEQ ID NO: 822220
uacaucaagggcaucguca

SEQ ID NO: 822222 - RNA, 19 nt, Artificial Sequence
  Description of Artificial Sequence: Synthetic oligonucleotide
  Sense strand starting at position 2255 of SEQ ID NO: 587838
gcgccaagugguugaguga

SEQ ID NO: 822223 - RNA, 19 nt, Artificial Sequence
  Description of Artificial Sequence: Synthetic oligonucleotide
  Antisense strand to SEQ ID NO: 822222
ucacucaaccacuuggcgc

SEQ ID NO: 822224 - RNA, 19 nt, Artificial Sequence
  Description of Artificial Sequence: Synthetic oligonucleotide
  Sense strand starting at position 2264 of SEQ ID NO: 587838
gguugagugaccuguccag

SEQ ID NO: 822225 - RNA, 19 nt, Artificial Sequence
  Description of Artificial Sequence: Synthetic oligonucleotide
  Antisense strand to SEQ ID NO: 822224
cuggacaggucacucaacc

SEQ ID NO: 822226 - RNA, 19 nt, Artificial Sequence
  Description of Artificial Sequence: Synthetic oligonucleotide
  Sense strand starting at position 2430 of SEQ ID NO: 587838
augguuugcagguggcaaa

SEQ ID NO: 822227 - RNA, 19 nt, Artificial Sequence
  Description of Artificial Sequence: Synthetic oligonucleotide
  Antisense strand to SEQ ID NO: 822226
uuugccaccugcaaaccau

SEQ ID NO: 822228 - RNA, 19 nt, Artificial Sequence
  Description of Artificial Sequence: Synthetic oligonucleotide
  Sense strand starting at position 2450 of SEQ ID NO: 587838
guccgucucccugaugaac

SEQ ID NO: 822229 - RNA, 19 nt, Artificial Sequence
  Description of Artificial Sequence: Synthetic oligonucleotide
  Antisense strand to SEQ ID NO: 822228
guucaucagggagacggac

SEQ ID NO: 822230 - RNA, 19 nt, Artificial Sequence
  Description of Artificial Sequence: Synthetic oligonucleotide
  Sense strand starting at position 2649 of SEQ ID NO: 587838
ugcggaguggacgaauaau

SEQ ID NO: 822231 - RNA, 19 nt, Artificial Sequence
  Description of Artificial Sequence: Synthetic oligonucleotide
  Antisense strand to SEQ ID NO: 822230
auuauucguccacuccgca

SEQ ID NO: 822232 - RNA, 19 nt, Artificial Sequence
  Description of Artificial Sequence: Synthetic oligonucleotide
  Sense strand starting at position 3046 of SEQ ID NO: 587838
caggguugacaucgugaga

SEQ ID NO: 822233 - RNA, 19 nt, Artificial Sequence
  Description of Artificial Sequence: Synthetic oligonucleotide
  Antisense strand to SEQ ID NO: 822232
ucucacgaugucaacccug

SEQ ID NO: 822234 - RNA, 19 nt, Artificial Sequence
  Description of Artificial Sequence: Synthetic oligonucleotide
  Sense strand starting at position 3048 of SEQ ID NO: 587838
ggguugacaucgugagaag

SEQ ID NO: 822235 - RNA, 19 nt, Artificial Sequence
  Description of Artificial Sequence: Synthetic oligonucleotide
  Antisense strand to SEQ ID NO: 822234
cuucucacgaugucaaccc

SEQ ID NO: 822236 - RNA, 19 nt, Artificial Sequence
  Description of Artificial Sequence: Synthetic oligonucleotide
  Sense strand starting at position 3307 of SEQ ID NO: 587838
uccgucacuccugaacaaa

SEQ ID NO: 822237 - RNA, 19 nt, Artificial Sequence
  Description of Artificial Sequence: Synthetic oligonucleotide
  Antisense strand to SEQ ID NO: 822236
uuuguucaggagugacgga

SEQ ID NO: 822238 - RNA, 19 nt, Artificial Sequence
  Description of Artificial Sequence: Synthetic oligonucleotide
  Sense strand starting at position 3350 of SEQ ID NO: 587838
gagaguugggugcgggaua

SEQ ID NO: 822239 - RNA, 19 nt, Artificial Sequence
  Description of Artificial Sequence: Synthetic oligonucleotide
  Antisense strand to SEQ ID NO: 822238
uaucccgcacccaacucuc

SEQ ID NO: 822240 - RNA, 19 nt, Artificial Sequence
  Description of Artificial Sequence: Synthetic oligonucleotide
  Sense strand starting at position 3373 of SEQ ID NO: 587838
ugagaagagugcuuggaca

SEQ ID NO: 822241 - RNA, 19 nt, Artificial Sequence
  Description of Artificial Sequence: Synthetic oligonucleotide
  Antisense strand to SEQ ID NO: 822240
uguccaagcacucuucuca

SEQ ID NO: 822242 - RNA, 19 nt, Artificial Sequence
  Description of Artificial Sequence: Synthetic oligonucleotide
  Sense strand starting at position 3375 of SEQ ID NO: 587838
agaagagugcuuggacaca

SEQ ID NO: 822243 - RNA, 19 nt, Artificial Sequence
  Description of Artificial Sequence: Synthetic oligonucleotide
  Antisense strand to SEQ ID NO: 822242
uguguccaagcacucuucu

SEQ ID NO: 822244 - RNA, 19 nt, Artificial Sequence
  Description of Artificial Sequence: Synthetic oligonucleotide
  Sense strand starting at position 3422 of SEQ ID NO: 587838
acgggucucugggaugaga

SEQ ID NO: 822245 - RNA, 19 nt, Artificial Sequence
  Description of Artificial Sequence: Synthetic oligonucleotide
  Antisense strand to SEQ ID NO: 822244
ucucaucccagagacccgu

SEQ ID NO: 822246 - RNA, 19 nt, Artificial Sequence
  Description of Artificial Sequence: Synthetic oligonucleotide
  Sense strand starting at position 3424 of SEQ ID NO: 587838
gggucucugggaugagaug

SEQ ID NO: 822247 - RNA, 19 nt, Artificial Sequence
  Description of Artificial Sequence: Synthetic oligonucleotide
  Antisense strand to SEQ ID NO: 822246
caucucaucccagagaccc

SEQ ID NO: 822248 - RNA, 19 nt, Artificial Sequence
  Description of Artificial Sequence: Synthetic oligonucleotide
  Sense strand starting at position 3484 of SEQ ID NO: 587838
ccgcuuuaaggcuggaaga

SEQ ID NO: 822249 - RNA, 19 nt, Artificial Sequence
  Description of Artificial Sequence: Synthetic oligonucleotide
  Antisense strand to SEQ ID NO: 822248
ucuuccagccuuaaagcgg

SEQ ID NO: 822250 - RNA, 19 nt, Artificial Sequence
  Description of Artificial Sequence: Synthetic oligonucleotide
  Sense strand starting at position 3486 of SEQ ID NO: 587838
gcuuuaaggcuggaagaga

SEQ ID NO: 822251 - RNA, 19 nt, Artificial Sequence
  Description of Artificial Sequence: Synthetic oligonucleotide
  Antisense strand to SEQ ID NO: 822250
ucucuuccagccuuaaagc

SEQ ID NO: 822252 - RNA, 19 nt, Artificial Sequence
  Description of Artificial Sequence: Synthetic oligonucleotide
  Sense strand starting at position 3609 of SEQ ID NO: 587838
gcaguucugggucacuuga

SEQ ID NO: 822253 - RNA, 19 nt, Artificial Sequence
  Description of Artificial Sequence: Synthetic oligonucleotide
  Antisense strand to SEQ ID NO: 822252
ucaagugacccagaacugc

SEQ ID NO: 822254 - RNA, 19 nt, Artificial Sequence
  Description of Artificial Sequence: Synthetic oligonucleotide
  Sense strand starting at position 3611 of SEQ ID NO: 587838
aguucugggucacuugaca

SEQ ID NO: 822255 - RNA, 19 nt, Artificial Sequence
  Description of Artificial Sequence: Synthetic oligonucleotide
  Antisense strand to SEQ ID NO: 822254
ugucaagugacccagaacu

SEQ ID NO: 822256 - RNA, 19 nt, Artificial Sequence
  Description of Artificial Sequence: Synthetic oligonucleotide
  Sense strand starting at position 3693 of SEQ ID NO: 587838
ucuuucuuaggccaggauu

SEQ ID NO: 822257 - RNA, 19 nt, Artificial Sequence
  Description of Artificial Sequence: Synthetic oligonucleotide
  Antisense strand to SEQ ID NO: 822256
aauccuggccuaagaaaga

SEQ ID NO: 822258 - RNA, 19 nt, Artificial Sequence
  Description of Artificial Sequence: Synthetic oligonucleotide
  Sense strand starting at position 3696 of SEQ ID NO: 587838
uucuuaggccaggauuagu

SEQ ID NO: 822259 - RNA, 19 nt, Artificial Sequence
  Description of Artificial Sequence: Synthetic oligonucleotide
  Antisense strand to SEQ ID NO: 822258
acuaauccuggccuaagaa

SEQ ID NO: 822260 - RNA, 19 nt, Artificial Sequence
  Description of Artificial Sequence: Synthetic oligonucleotide
  Sense strand starting at position 3906 of SEQ ID NO: 587838
uccagacuagccugaucaa

SEQ ID NO: 822261 - RNA, 19 nt, Artificial Sequence
  Description of Artificial Sequence: Synthetic oligonucleotide
  Antisense strand to SEQ ID NO: 822260
uugaucaggcuagucugga

SEQ ID NO: 822262 - RNA, 19 nt, Artificial Sequence
  Description of Artificial Sequence: Synthetic oligonucleotide
  Sense strand starting at position 3907 of SEQ ID NO: 587838
ccagacuagccugaucaau

SEQ ID NO: 822263 - RNA, 19 nt, Artificial Sequence
  Description of Artificial Sequence: Synthetic oligonucleotide
  Antisense strand to SEQ ID NO: 822262
auugaucaggcuagucugg

SEQ ID NO: 822264 - RNA, 19 nt, Artificial Sequence
  Description of Artificial Sequence: Synthetic oligonucleotide
  Sense strand starting at position 3916 of SEQ ID NO: 587838
ccugaucaauauggacaaa

SEQ ID NO: 822265 - RNA, 19 nt, Artificial Sequence
  Description of Artificial Sequence: Synthetic oligonucleotide
  Antisense strand to SEQ ID NO: 822264
uuuguccauauugaucagg

SEQ ID NO: 822266 - RNA, 19 nt, Artificial Sequence
  Description of Artificial Sequence: Synthetic oligonucleotide
  Sense strand starting at position 85 of SEQ ID NO: 587839
ucaagauggguuugucaau

SEQ ID NO: 822267 - RNA, 19 nt, Artificial Sequence
  Description of Artificial Sequence: Synthetic oligonucleotide
  Antisense strand to SEQ ID NO: 822266
auugacaaacccaucuuga

SEQ ID NO: 822268 - RNA, 19 nt, Artificial Sequence
  Description of Artificial Sequence: Synthetic oligonucleotide
  Sense strand starting at position 412 of SEQ ID NO: 587839
cacucaaccugacguaaga

SEQ ID NO: 822269 - RNA, 19 nt, Artificial Sequence
  Description of Artificial Sequence: Synthetic oligonucleotide
  Antisense strand to SEQ ID NO: 822268
ucuuacgucagguugagug

SEQ ID NO: 822270 - RNA, 19 nt, Artificial Sequence
  Description of Artificial Sequence: Synthetic oligonucleotide
  Sense strand starting at position 456 of SEQ ID NO: 587839
agcuuuacuuauuccagga

SEQ ID NO: 822271 - RNA, 19 nt, Artificial Sequence
  Description of Artificial Sequence: Synthetic oligonucleotide
  Antisense strand to SEQ ID NO: 822270
uccuggaauaaguaaagcu

SEQ ID NO: 822272 - RNA, 19 nt, Artificial Sequence
  Description of Artificial Sequence: Synthetic oligonucleotide
  Sense strand starting at position 525 of SEQ ID NO: 587839
ccaagauguucccaaacag

SEQ ID NO: 822273 - RNA, 19 nt, Artificial Sequence
  Description of Artificial Sequence: Synthetic oligonucleotide
  Antisense strand to SEQ ID NO: 822272
cuguuugggaacaucuugg

SEQ ID NO: 822274 - RNA, 19 nt, Artificial Sequence
  Description of Artificial Sequence: Synthetic oligonucleotide
  Sense strand starting at position 587 of SEQ ID NO: 587839
guaggcgucuuugagaaag

SEQ ID NO: 822275 - RNA, 19 nt, Artificial Sequence
  Description of Artificial Sequence: Synthetic oligonucleotide
  Antisense strand to SEQ ID NO: 822274
cuuucucaaagacgccuac

SEQ ID NO: 822276 - RNA, 19 nt, Artificial Sequence
  Description of Artificial Sequence: Synthetic oligonucleotide
  Sense strand starting at position 747 of SEQ ID NO: 587839
uacuguugugccuguugua

SEQ ID NO: 822277 - RNA, 19 nt, Artificial Sequence
  Description of Artificial Sequence: Synthetic oligonucleotide
  Antisense strand to SEQ ID NO: 822276
uacaacaggcacaacagua

SEQ ID NO: 822278 - RNA, 19 nt, Artificial Sequence
  Description of Artificial Sequence: Synthetic oligonucleotide
  Sense strand starting at position 754 of SEQ ID NO: 587839
gugccuguuguacagugau

SEQ ID NO: 822279 - RNA, 19 nt, Artificial Sequence
  Description of Artificial Sequence: Synthetic oligonucleotide
  Antisense strand to SEQ ID NO: 822278
aucacuguacaacaggcac

SEQ ID NO: 822280 - RNA, 19 nt, Artificial Sequence
  Description of Artificial Sequence: Synthetic oligonucleotide
  Sense strand starting at position 833 of SEQ ID NO: 587839
aaucgaauuccagggacca

SEQ ID NO: 822281 - RNA, 19 nt, Artificial Sequence
  Description of Artificial Sequence: Synthetic oligonucleotide
  Antisense strand to SEQ ID NO: 822280
uggucccuggaauucgauu

SEQ ID NO: 822282 - RNA, 19 nt, Artificial Sequence
  Description of Artificial Sequence: Synthetic oligonucleotide
  Sense strand starting at position 834 of SEQ ID NO: 587839
aucgaauuccagggaccaa

SEQ ID NO: 822283 - RNA, 19 nt, Artificial Sequence
  Description of Artificial Sequence: Synthetic oligonucleotide
  Antisense strand to SEQ ID NO: 822282
uuggucccuggaauucgau

SEQ ID NO: 822284 - RNA, 19 nt, Artificial Sequence
  Description of Artificial Sequence: Synthetic oligonucleotide
  Sense strand starting at position 911 of SEQ ID NO: 587839
ucaacugcugccugauacu

SEQ ID NO: 822285 - RNA, 19 nt, Artificial Sequence
  Description of Artificial Sequence: Synthetic oligonucleotide
  Antisense strand to SEQ ID NO: 822284
aguaucaggcagcaguuga

SEQ ID NO: 822286 - RNA, 19 nt, Artificial Sequence
  Description of Artificial Sequence: Synthetic oligonucleotide
  Sense strand starting at position 943 of SEQ ID NO: 587839
ucuguuggcugaggagaua

SEQ ID NO: 822287 - RNA, 19 nt, Artificial Sequence
  Description of Artificial Sequence: Synthetic oligonucleotide
  Antisense strand to SEQ ID NO: 822286
uaucuccucagccaacaga

SEQ ID NO: 822288 - RNA, 19 nt, Artificial Sequence
  Description of Artificial Sequence: Synthetic oligonucleotide
  Sense strand starting at position 1017 of SEQ ID NO: 587839
gggagauaacgguggcaua

SEQ ID NO: 822289 - RNA, 19 nt, Artificial Sequence
  Description of Artificial Sequence: Synthetic oligonucleotide
  Antisense strand to SEQ ID NO: 822288
uaugccaccguuaucuccc

SEQ ID NO: 822290 - RNA, 19 nt, Artificial Sequence
  Description of Artificial Sequence: Synthetic oligonucleotide
  Sense strand starting at position 1125 of SEQ ID NO: 587839
ggagcacauugccaauguu

SEQ ID NO: 822291 - RNA, 19 nt, Artificial Sequence
  Description of Artificial Sequence: Synthetic oligonucleotide
  Antisense strand to SEQ ID NO: 822290
aacauuggcaaugugcucc

SEQ ID NO: 822292 - RNA, 19 nt, Artificial Sequence
  Description of Artificial Sequence: Synthetic oligonucleotide
  Sense strand starting at position 1175 of SEQ ID NO: 587839
ccgucagcacaguaagaaa

SEQ ID NO: 822293 - RNA, 19 nt, Artificial Sequence
  Description of Artificial Sequence: Synthetic oligonucleotide
  Antisense strand to SEQ ID NO: 822292
uuucuuacugugcugacgg

SEQ ID NO: 822294 - RNA, 19 nt, Artificial Sequence
  Description of Artificial Sequence: Synthetic oligonucleotide
  Sense strand starting at position 1359 of SEQ ID NO: 587839
gacguuaacuccucaggca

SEQ ID NO: 822295 - RNA, 19 nt, Artificial Sequence
  Description of Artificial Sequence: Synthetic oligonucleotide
  Antisense strand to SEQ ID NO: 822294
ugccugaggaguuaacguc

SEQ ID NO: 822296 - RNA, 19 nt, Artificial Sequence
  Description of Artificial Sequence: Synthetic oligonucleotide
  Sense strand starting at position 1360 of SEQ ID NO: 587839
acguuaacuccucaggcaa

SEQ ID NO: 822297 - RNA, 19 nt, Artificial Sequence
  Description of Artificial Sequence: Synthetic oligonucleotide
  Antisense strand to SEQ ID NO: 822296
uugccugaggaguuaacgu

SEQ ID NO: 822298 - RNA, 19 nt, Artificial Sequence
  Description of Artificial Sequence: Synthetic oligonucleotide
  Sense strand starting at position 1428 of SEQ ID NO: 587839
cccuucuugccgcaauaca

SEQ ID NO: 822299 - RNA, 19 nt, Artificial Sequence
  Description of Artificial Sequence: Synthetic oligonucleotide
  Antisense strand to SEQ ID NO: 822298
uguauugcggcaagaaggg

SEQ ID NO: 822300 - RNA, 19 nt, Artificial Sequence
  Description of Artificial Sequence: Synthetic oligonucleotide
  Sense strand starting at position 1497 of SEQ ID NO: 587839
uucuuaaaccgauacggau

SEQ ID NO: 822301 - RNA, 19 nt, Artificial Sequence
  Description of Artificial Sequence: Synthetic oligonucleotide
  Antisense strand to SEQ ID NO: 822300
auccguaucgguuuaagaa

SEQ ID NO: 822302 - RNA, 19 nt, Artificial Sequence
  Description of Artificial Sequence: Synthetic oligonucleotide
  Sense strand starting at position 1650 of SEQ ID NO: 587839
ugacgaugcccuugaugua

SEQ ID NO: 822303 - RNA, 19 nt, Artificial Sequence
  Description of Artificial Sequence: Synthetic oligonucleotide
  Antisense strand to SEQ ID NO: 822302
uacaucaagggcaucguca

SEQ ID NO: 822304 - RNA, 19 nt, Artificial Sequence
  Description of Artificial Sequence: Synthetic oligonucleotide
  Sense strand starting at position 2331 of SEQ ID NO: 587839
gcgccaagugguugaguga

SEQ ID NO: 822305 - RNA, 19 nt, Artificial Sequence
  Description of Artificial Sequence: Synthetic oligonucleotide
  Antisense strand to SEQ ID NO: 822304
ucacucaaccacuuggcgc

SEQ ID NO: 822306 - RNA, 19 nt, Artificial Sequence
  Description of Artificial Sequence: Synthetic oligonucleotide
  Sense strand starting at position 2340 of SEQ ID NO: 587839
gguugagugaccuguccag

SEQ ID NO: 822307 - RNA, 19 nt, Artificial Sequence
  Description of Artificial Sequence: Synthetic oligonucleotide
  Antisense strand to SEQ ID NO: 822306
cuggacaggucacucaacc

SEQ ID NO: 822308 - RNA, 19 nt, Artificial Sequence
  Description of Artificial Sequence: Synthetic oligonucleotide
  Sense strand starting at position 2506 of SEQ ID NO: 587839
augguuugcagguggcaaa

SEQ ID NO: 822309 - RNA, 19 nt, Artificial Sequence
  Description of Artificial Sequence: Synthetic oligonucleotide
  Antisense strand to SEQ ID NO: 822308
uuugccaccugcaaaccau

SEQ ID NO: 822310 - RNA, 19 nt, Artificial Sequence
  Description of Artificial Sequence: Synthetic oligonucleotide
  Sense strand starting at position 2526 of SEQ ID NO: 587839
guccgucucccugaugaac

SEQ ID NO: 822311 - RNA, 19 nt, Artificial Sequence
  Description of Artificial Sequence: Synthetic oligonucleotide
  Antisense strand to SEQ ID NO: 822310
guucaucagggagacggac

SEQ ID NO: 822312 - RNA, 19 nt, Artificial Sequence
  Description of Artificial Sequence: Synthetic oligonucleotide
  Sense strand starting at position 2725 of SEQ ID NO: 587839
ugcggaguggacgaauaau

SEQ ID NO: 822313 - RNA, 19 nt, Artificial Sequence
  Description of Artificial Sequence: Synthetic oligonucleotide
  Antisense strand to SEQ ID NO: 822312
auuauucguccacuccgca

SEQ ID NO: 822314 - RNA, 19 nt, Artificial Sequence
  Description of Artificial Sequence: Synthetic oligonucleotide
  Sense strand starting at position 3122 of SEQ ID NO: 587839
caggguugacaucgugaga

SEQ ID NO: 822315 - RNA, 19 nt, Artificial Sequence
  Description of Artificial Sequence: Synthetic oligonucleotide
  Antisense strand to SEQ ID NO: 822314
ucucacgaugucaacccug

SEQ ID NO: 822316 - RNA, 19 nt, Artificial Sequence
  Description of Artificial Sequence: Synthetic oligonucleotide
  Sense strand starting at position 3124 of SEQ ID NO: 587839
ggguugacaucgugagaag

SEQ ID NO: 822317 - RNA, 19 nt, Artificial Sequence
  Description of Artificial Sequence: Synthetic oligonucleotide
  Antisense strand to SEQ ID NO: 822316
cuucucacgaugucaaccc

SEQ ID NO: 822318 - RNA, 19 nt, Artificial Sequence
  Description of Artificial Sequence: Synthetic oligonucleotide
  Sense strand starting at position 3383 of SEQ ID NO: 587839
uccgucacuccugaacaaa

SEQ ID NO: 822319 - RNA, 19 nt, Artificial Sequence
  Description of Artificial Sequence: Synthetic oligonucleotide
  Antisense strand to SEQ ID NO: 822318
uuuguucaggagugacgga

SEQ ID NO: 822320 - RNA, 19 nt, Artificial Sequence
  Description of Artificial Sequence: Synthetic oligonucleotide
  Sense strand starting at position 3426 of SEQ ID NO: 587839
gagaguugggugcgggaua

SEQ ID NO: 822321 - RNA, 19 nt, Artificial Sequence
  Description of Artificial Sequence: Synthetic oligonucleotide
  Antisense strand to SEQ ID NO: 822320
uaucccgcacccaacucuc

SEQ ID NO: 822322 - RNA, 19 nt, Artificial Sequence
  Description of Artificial Sequence: Synthetic oligonucleotide
  Sense strand starting at position 3449 of SEQ ID NO: 587839
ugagaagagugcuuggaca

SEQ ID NO: 822323 - RNA, 19 nt, Artificial Sequence
  Description of Artificial Sequence: Synthetic oligonucleotide
  Antisense strand to SEQ ID NO: 822322
uguccaagcacucuucuca

SEQ ID NO: 822324 - RNA, 19 nt, Artificial Sequence
  Description of Artificial Sequence: Synthetic oligonucleotide
  Sense strand starting at position 3451 of SEQ ID NO: 587839
agaagagugcuuggacaca

SEQ ID NO: 822325 - RNA, 19 nt, Artificial Sequence
  Description of Artificial Sequence: Synthetic oligonucleotide
  Antisense strand to SEQ ID NO: 822324
uguguccaagcacucuucu

SEQ ID NO: 822326 - RNA, 19 nt, Artificial Sequence
  Description of Artificial Sequence: Synthetic oligonucleotide
  Sense strand starting at position 3498 of SEQ ID NO: 587839
acgggucucugggaugaga

SEQ ID NO: 822327 - RNA, 19 nt, Artificial Sequence
  Description of Artificial Sequence: Synthetic oligonucleotide
  Antisense strand to SEQ ID NO: 822326
ucucaucccagagacccgu

SEQ ID NO: 822328 - RNA, 19 nt, Artificial Sequence
  Description of Artificial Sequence: Synthetic oligonucleotide
  Sense strand starting at position 3500 of SEQ ID NO: 587839
gggucucugggaugagaug

SEQ ID NO: 822329 - RNA, 19 nt, Artificial Sequence
  Description of Artificial Sequence: Synthetic oligonucleotide
  Antisense strand to SEQ ID NO: 822328
caucucaucccagagaccc

SEQ ID NO: 822330 - RNA, 19 nt, Artificial Sequence
  Description of Artificial Sequence: Synthetic oligonucleotide
  Sense strand starting at position 3560 of SEQ ID NO: 587839
ccgcuuuaaggcuggaaga

SEQ ID NO: 822331 - RNA, 19 nt, Artificial Sequence
  Description of Artificial Sequence: Synthetic oligonucleotide
  Antisense strand to SEQ ID NO: 822330
ucuuccagccuuaaagcgg

SEQ ID NO: 822332 - RNA, 19 nt, Artificial Sequence
  Description of Artificial Sequence: Synthetic oligonucleotide
  Sense strand starting at position 3562 of SEQ ID NO: 587839
gcuuuaaggcuggaagaga

SEQ ID NO: 822333 - RNA, 19 nt, Artificial Sequence
  Description of Artificial Sequence: Synthetic oligonucleotide
  Antisense strand to SEQ ID NO: 822332
ucucuuccagccuuaaagc

SEQ ID NO: 822334 - RNA, 19 nt, Artificial Sequence
  Description of Artificial Sequence: Synthetic oligonucleotide
  Sense strand starting at position 3685 of SEQ ID NO: 587839
gcaguucugggucacuuga

SEQ ID NO: 822335 - RNA, 19 nt, Artificial Sequence
  Description of Artificial Sequence: Synthetic oligonucleotide
  Antisense strand to SEQ ID NO: 822334
ucaagugacccagaacugc

SEQ ID NO: 822336 - RNA, 19 nt, Artificial Sequence
  Description of Artificial Sequence: Synthetic oligonucleotide
  Sense strand starting at position 3687 of SEQ ID NO: 587839
aguucugggucacuugaca

SEQ ID NO: 822337 - RNA, 19 nt, Artificial Sequence
  Description of Artificial Sequence: Synthetic oligonucleotide
  Antisense strand to SEQ ID NO: 822336
ugucaagugacccagaacu

SEQ ID NO: 822338 - RNA, 19 nt, Artificial Sequence
  Description of Artificial Sequence: Synthetic oligonucleotide
  Sense strand starting at position 3769 of SEQ ID NO: 587839
ucuuucuuaggccaggauu

SEQ ID NO: 822339 - RNA, 19 nt, Artificial Sequence
  Description of Artificial Sequence: Synthetic oligonucleotide
  Antisense strand to SEQ ID NO: 822338
aauccuggccuaagaaaga

SEQ ID NO: 822340 - RNA, 19 nt, Artificial Sequence
  Description of Artificial Sequence: Synthetic oligonucleotide
  Sense strand starting at position 3772 of SEQ ID NO: 587839
uucuuaggccaggauuagu

SEQ ID NO: 822341 - RNA, 19 nt, Artificial Sequence
  Description of Artificial Sequence: Synthetic oligonucleotide
  Antisense strand to SEQ ID NO: 822340
acuaauccuggccuaagaa

SEQ ID NO: 822342 - RNA, 19 nt, Artificial Sequence
  Description of Artificial Sequence: Synthetic oligonucleotide
  Sense strand starting at position 3982 of SEQ ID NO: 587839
uccagacuagccugaucaa

SEQ ID NO: 822343 - RNA, 19 nt, Artificial Sequence
  Description of Artificial Sequence: Synthetic oligonucleotide
  Antisense strand to SEQ ID NO: 822342
uugaucaggcuagucugga

SEQ ID NO: 822344 - RNA, 19 nt, Artificial Sequence
  Description of Artificial Sequence: Synthetic oligonucleotide
  Sense strand starting at position 3983 of SEQ ID NO: 587839
ccagacuagccugaucaau

SEQ ID NO: 822345 - RNA, 19 nt, Artificial Sequence
  Description of Artificial Sequence: Synthetic oligonucleotide
  Antisense strand to SEQ ID NO: 822344
auugaucaggcuagucugg

SEQ ID NO: 822346 - RNA, 19 nt, Artificial Sequence
  Description of Artificial Sequence: Synthetic oligonucleotide
  Sense strand starting at position 111 of SEQ ID NO: 587840
ggacguuaaacuugguuaa

SEQ ID NO: 822347 - RNA, 19 nt, Artificial Sequence
  Description of Artificial Sequence: Synthetic oligonucleotide
  Antisense strand to SEQ ID NO: 822346
uuaaccaaguuuaacgucc

SEQ ID NO: 822348 - RNA, 19 nt, Artificial Sequence
  Description of Artificial Sequence: Synthetic oligonucleotide
  Sense strand starting at position 114 of SEQ ID NO: 587840
cguuaaacuugguuaauuu

SEQ ID NO: 822349 - RNA, 19 nt, Artificial Sequence
  Description of Artificial Sequence: Synthetic oligonucleotide
  Antisense strand to SEQ ID NO: 822348
aaauuaaccaaguuuaacg

SEQ ID NO: 822350 - RNA, 19 nt, Artificial Sequence
  Description of Artificial Sequence: Synthetic oligonucleotide
  Sense strand starting at position 246 of SEQ ID NO: 587840
uuaucuagaguaugccaaa

SEQ ID NO: 822351 - RNA, 19 nt, Artificial Sequence
  Description of Artificial Sequence: Synthetic oligonucleotide
  Antisense strand to SEQ ID NO: 822350
uuuggcauacucuagauaa

SEQ ID NO: 822352 - RNA, 19 nt, Artificial Sequence
  Description of Artificial Sequence: Synthetic oligonucleotide
  Sense strand starting at position 272 of SEQ ID NO: 587840
acugccaguguccaauaaa

SEQ ID NO: 822353 - RNA, 19 nt, Artificial Sequence
  Description of Artificial Sequence: Synthetic oligonucleotide
  Antisense strand to SEQ ID NO: 822352
uuuauuggacacuggcagu

SEQ ID NO: 822354 - RNA, 19 nt, Artificial Sequence
  Description of Artificial Sequence: Synthetic oligonucleotide
  Sense strand starting at position 302 of SEQ ID NO: 587840
cucacauauuauguaguua

SEQ ID NO: 822355 - RNA, 19 nt, Artificial Sequence
  Description of Artificial Sequence: Synthetic oligonucleotide
  Antisense strand to SEQ ID NO: 822354
uaacuacauaauaugugag

SEQ ID NO: 822356 - RNA, 19 nt, Artificial Sequence
  Description of Artificial Sequence: Synthetic oligonucleotide
  Sense strand starting at position 307 of SEQ ID NO: 587840
auauuauguaguuaacgga

SEQ ID NO: 822357 - RNA, 19 nt, Artificial Sequence
  Description of Artificial Sequence: Synthetic oligonucleotide
  Antisense strand to SEQ ID NO: 822356
uccguuaacuacauaauau

SEQ ID NO: 822358 - RNA, 19 nt, Artificial Sequence
  Description of Artificial Sequence: Synthetic oligonucleotide
  Sense strand starting at position 472 of SEQ ID NO: 587840
guuaacaacuggucaucaa

SEQ ID NO: 822359 - RNA, 19 nt, Artificial Sequence
  Description of Artificial Sequence: Synthetic oligonucleotide
  Antisense strand to SEQ ID NO: 822358
uugaugaccaguuguuaac

SEQ ID NO: 822360 - RNA, 19 nt, Artificial Sequence
  Description of Artificial Sequence: Synthetic oligonucleotide
  Sense strand starting at position 681 of SEQ ID NO: 587840
auucucaaagucuguaaca

SEQ ID NO: 822361 - RNA, 19 nt, Artificial Sequence
  Description of Artificial Sequence: Synthetic oligonucleotide
  Antisense strand to SEQ ID NO: 822360
uguuacagacuuugagaau

SEQ ID NO: 822362 - RNA, 19 nt, Artificial Sequence
  Description of Artificial Sequence: Synthetic oligonucleotide
  Sense strand starting at position 823 of SEQ ID NO: 587840
ucagguaccauggguugaa

SEQ ID NO: 822363 - RNA, 19 nt, Artificial Sequence
  Description of Artificial Sequence: Synthetic oligonucleotide
  Antisense strand to SEQ ID NO: 822362
uucaacccaugguaccuga

SEQ ID NO: 822364 - RNA, 19 nt, Artificial Sequence
  Description of Artificial Sequence: Synthetic oligonucleotide
  Sense strand starting at position 824 of SEQ ID NO: 587840
cagguaccauggguugaaa

SEQ ID NO: 822365 - RNA, 19 nt, Artificial Sequence
  Description of Artificial Sequence: Synthetic oligonucleotide
  Antisense strand to SEQ ID NO: 822364
uuucaacccaugguaccug

SEQ ID NO: 822366 - RNA, 19 nt, Artificial Sequence
  Description of Artificial Sequence: Synthetic oligonucleotide
  Sense strand starting at position 881 of SEQ ID NO: 587840
uagagcuugcgccuguuaa

SEQ ID NO: 822367 - RNA, 19 nt, Artificial Sequence
  Description of Artificial Sequence: Synthetic oligonucleotide
  Antisense strand to SEQ ID NO: 822366
uuaacaggcgcaagcucua

SEQ ID NO: 822368 - RNA, 19 nt, Artificial Sequence
  Description of Artificial Sequence: Synthetic oligonucleotide
  Sense strand starting at position 991 of SEQ ID NO: 587840
uucuaugugcguuuguaga

SEQ ID NO: 822369 - RNA, 19 nt, Artificial Sequence
  Description of Artificial Sequence: Synthetic oligonucleotide
  Antisense strand to SEQ ID NO: 822368
ucuacaaacgcacauagaa

SEQ ID NO: 822370 - RNA, 19 nt, Artificial Sequence
  Description of Artificial Sequence: Synthetic oligonucleotide
  Sense strand starting at position 1035 of SEQ ID NO: 587840
agccgaacuccuuaaagaa

SEQ ID NO: 822371 - RNA, 19 nt, Artificial Sequence
  Description of Artificial Sequence: Synthetic oligonucleotide
  Antisense strand to SEQ ID NO: 822370
uucuuuaaggaguucggcu

SEQ ID NO: 822372 - RNA, 19 nt, Artificial Sequence
  Description of Artificial Sequence: Synthetic oligonucleotide
  Sense strand starting at position 1206 of SEQ ID NO: 587840
cucucaguauaaucgaaac

SEQ ID NO: 822373 - RNA, 19 nt, Artificial Sequence
  Description of Artificial Sequence: Synthetic oligonucleotide
  Antisense strand to SEQ ID NO: 822372
guuucgauuauacugagag

SEQ ID NO: 822374 - RNA, 19 nt, Artificial Sequence
  Description of Artificial Sequence: Synthetic oligonucleotide
  Sense strand starting at position 1417 of SEQ ID NO: 587840
cgaguaaagcucgucgcuu

SEQ ID NO: 822375 - RNA, 19 nt, Artificial Sequence
  Description of Artificial Sequence: Synthetic oligonucleotide
  Antisense strand to SEQ ID NO: 822374
aagcgacgagcuuuacucg

SEQ ID NO: 822376 - RNA, 19 nt, Artificial Sequence
  Description of Artificial Sequence: Synthetic oligonucleotide
  Sense strand starting at position 1993 of SEQ ID NO: 587840
ggaaauaucccgggcccua

SEQ ID NO: 822377 - RNA, 19 nt, Artificial Sequence
  Description of Artificial Sequence: Synthetic oligonucleotide
  Antisense strand to SEQ ID NO: 822376
uagggcccgggauauuucc

SEQ ID NO: 822378 - RNA, 19 nt, Artificial Sequence
  Description of Artificial Sequence: Synthetic oligonucleotide
  Sense strand starting at position 2174 of SEQ ID NO: 587840
cugagaaacuccucugucu

SEQ ID NO: 822379 - RNA, 19 nt, Artificial Sequence
  Description of Artificial Sequence: Synthetic oligonucleotide
  Antisense strand to SEQ ID NO: 822378
agacagaggaguuucucag

SEQ ID NO: 822380 - RNA, 19 nt, Artificial Sequence
  Description of Artificial Sequence: Synthetic oligonucleotide
  Sense strand starting at position 2284 of SEQ ID NO: 587840
gcucucugaggaugaggua

SEQ ID NO: 822381 - RNA, 19 nt, Artificial Sequence
  Description of Artificial Sequence: Synthetic oligonucleotide
  Antisense strand to SEQ ID NO: 822380
uaccucauccucagagagc

SEQ ID NO: 822382 - RNA, 19 nt, Artificial Sequence
  Description of Artificial Sequence: Synthetic oligonucleotide
  Sense strand starting at position 2320 of SEQ ID NO: 587840
ugacaugagcauuggcaga

SEQ ID NO: 822383 - RNA, 19 nt, Artificial Sequence
  Description of Artificial Sequence: Synthetic oligonucleotide
  Antisense strand to SEQ ID NO: 822382
ucugccaaugcucauguca

SEQ ID NO: 822384 - RNA, 19 nt, Artificial Sequence
  Description of Artificial Sequence: Synthetic oligonucleotide
  Sense strand starting at position 2322 of SEQ ID NO: 587840
acaugagcauuggcagaaa

SEQ ID NO: 822385 - RNA, 19 nt, Artificial Sequence
  Description of Artificial Sequence: Synthetic oligonucleotide
  Antisense strand to SEQ ID NO: 822384
uuucugccaaugcucaugu

SEQ ID NO: 822386 - RNA, 19 nt, Artificial Sequence
  Description of Artificial Sequence: Synthetic oligonucleotide
  Sense strand starting at position 2345 of SEQ ID NO: 587840
ucucguaaucuggauaacu

SEQ ID NO: 822387 - RNA, 19 nt, Artificial Sequence
  Description of Artificial Sequence: Synthetic oligonucleotide
  Antisense strand to SEQ ID NO: 822386
aguuauccagauuacgaga

SEQ ID NO: 822388 - RNA, 19 nt, Artificial Sequence
  Description of Artificial Sequence: Synthetic oligonucleotide
  Sense strand starting at position 2347 of SEQ ID NO: 587840
ucguaaucuggauaacuua

SEQ ID NO: 822389 - RNA, 19 nt, Artificial Sequence
  Description of Artificial Sequence: Synthetic oligonucleotide
  Antisense strand to SEQ ID NO: 822388
uaaguuauccagauuacga

SEQ ID NO: 822390 - RNA, 19 nt, Artificial Sequence
  Description of Artificial Sequence: Synthetic oligonucleotide
  Sense strand starting at position 2355 of SEQ ID NO: 587840
uggauaacuuacguuagaa

SEQ ID NO: 822391 - RNA, 19 nt, Artificial Sequence
  Description of Artificial Sequence: Synthetic oligonucleotide
  Antisense strand to SEQ ID NO: 822390
uucuaacguaaguuaucca

SEQ ID NO: 822392 - RNA, 19 nt, Artificial Sequence
  Description of Artificial Sequence: Synthetic oligonucleotide
  Sense strand starting at position 2357 of SEQ ID NO: 587840
gauaacuuacguuagaauu

SEQ ID NO: 822393 - RNA, 19 nt, Artificial Sequence
  Description of Artificial Sequence: Synthetic oligonucleotide
  Antisense strand to SEQ ID NO: 822392
aauucuaacguaaguuauc

SEQ ID NO: 822394 - RNA, 19 nt, Artificial Sequence
  Description of Artificial Sequence: Synthetic oligonucleotide
  Sense strand starting at position 2363 of SEQ ID NO: 587840
uuacguuagaauuaguaag

SEQ ID NO: 822395 - RNA, 19 nt, Artificial Sequence
  Description of Artificial Sequence: Synthetic oligonucleotide
  Antisense strand to SEQ ID NO: 822394
cuuacuaauucuaacguaa

SEQ ID NO: 822396 - RNA, 19 nt, Artificial Sequence
  Description of Artificial Sequence: Synthetic oligonucleotide
  Sense strand starting at position 2369 of SEQ ID NO: 587840
uagaauuaguaagcaguua

SEQ ID NO: 822397 - RNA, 19 nt, Artificial Sequence
  Description of Artificial Sequence: Synthetic oligonucleotide
  Antisense strand to SEQ ID NO: 822396
uaacugcuuacuaauucua

SEQ ID NO: 822398 - RNA, 19 nt, Artificial Sequence
  Description of Artificial Sequence: Synthetic oligonucleotide
  Sense strand starting at position 2397 of SEQ ID NO: 587840
gccugaaacguccuguugu

SEQ ID NO: 822399 - RNA, 19 nt, Artificial Sequence
  Description of Artificial Sequence: Synthetic oligonucleotide
  Antisense strand to SEQ ID NO: 822398
acaacaggacguuucaggc

SEQ ID NO: 822400 - RNA, 19 nt, Artificial Sequence
  Description of Artificial Sequence: Synthetic oligonucleotide
  Sense strand starting at position 2588 of SEQ ID NO: 587840
cuccuuucuguuggauaaa

SEQ ID NO: 822401 - RNA, 19 nt, Artificial Sequence
  Description of Artificial Sequence: Synthetic oligonucleotide
  Antisense strand to SEQ ID NO: 822400
uuuauccaacagaaaggag

SEQ ID NO: 822402 - RNA, 19 nt, Artificial Sequence
  Description of Artificial Sequence: Synthetic oligonucleotide
  Sense strand starting at position 2660 of SEQ ID NO: 587840
ucacauaagugaccaagua

SEQ ID NO: 822403 - RNA, 19 nt, Artificial Sequence
  Description of Artificial Sequence: Synthetic oligonucleotide
  Antisense strand to SEQ ID NO: 822402
uacuuggucacuuauguga

SEQ ID NO: 822404 - RNA, 19 nt, Artificial Sequence
  Description of Artificial Sequence: Synthetic oligonucleotide
  Sense strand starting at position 2762 of SEQ ID NO: 587840
gggcuaaauacguggaaau

SEQ ID NO: 822405 - RNA, 19 nt, Artificial Sequence
  Description of Artificial Sequence: Synthetic oligonucleotide
  Antisense strand to SEQ ID NO: 822404
auuuccacguauuuagccc

SEQ ID NO: 822406 - RNA, 19 nt, Artificial Sequence
  Description of Artificial Sequence: Synthetic oligonucleotide
  Sense strand starting at position 2763 of SEQ ID NO: 587840
ggcuaaauacguggaaauc

SEQ ID NO: 822407 - RNA, 19 nt, Artificial Sequence
  Description of Artificial Sequence: Synthetic oligonucleotide
  Antisense strand to SEQ ID NO: 822406
gauuuccacguauuuagcc

SEQ ID NO: 822408 - RNA, 19 nt, Artificial Sequence
  Description of Artificial Sequence: Synthetic oligonucleotide
  Sense strand starting at position 2764 of SEQ ID NO: 587840
gcuaaauacguggaaauca

SEQ ID NO: 822409 - RNA, 19 nt, Artificial Sequence
  Description of Artificial Sequence: Synthetic oligonucleotide
  Antisense strand to SEQ ID NO: 822408
ugauuuccacguauuuagc

SEQ ID NO: 822410 - RNA, 19 nt, Artificial Sequence
  Description of Artificial Sequence: Synthetic oligonucleotide
  Sense strand starting at position 2772 of SEQ ID NO: 587840
cguggaaaucacugagaug

SEQ ID NO: 822411 - RNA, 19 nt, Artificial Sequence
  Description of Artificial Sequence: Synthetic oligonucleotide
  Antisense strand to SEQ ID NO: 822410
caucucagugauuuccacg

SEQ ID NO: 822412 - RNA, 19 nt, Artificial Sequence
  Description of Artificial Sequence: Synthetic oligonucleotide
  Sense strand starting at position 2846 of SEQ ID NO: 587840
gaagcucugagccgaaaga

SEQ ID NO: 822413 - RNA, 19 nt, Artificial Sequence
  Description of Artificial Sequence: Synthetic oligonucleotide
  Antisense strand to SEQ ID NO: 822412
ucuuucggcucagagcuuc

SEQ ID NO: 822414 - RNA, 19 nt, Artificial Sequence
  Description of Artificial Sequence: Synthetic oligonucleotide
  Sense strand starting at position 2872 of SEQ ID NO: 587840
gcucaaacacucugaaaug

SEQ ID NO: 822415 - RNA, 19 nt, Artificial Sequence
  Description of Artificial Sequence: Synthetic oligonucleotide
  Antisense strand to SEQ ID NO: 822414
cauuucagaguguuugagc

SEQ ID NO: 822416 - RNA, 19 nt, Artificial Sequence
  Description of Artificial Sequence: Synthetic oligonucleotide
  Sense strand starting at position 3265 of SEQ ID NO: 587840
ggacucuuucuugagguuu

SEQ ID NO: 822417 - RNA, 19 nt, Artificial Sequence
  Description of Artificial Sequence: Synthetic oligonucleotide
  Antisense strand to SEQ ID NO: 822416
aaaccucaagaaagagucc

SEQ ID NO: 822418 - RNA, 19 nt, Artificial Sequence
  Description of Artificial Sequence: Synthetic oligonucleotide
  Sense strand starting at position 3300 of SEQ ID NO: 587840
guaggaaauuauguuugaa

SEQ ID NO: 822419 - RNA, 19 nt, Artificial Sequence
  Description of Artificial Sequence: Synthetic oligonucleotide
  Antisense strand to SEQ ID NO: 822418
uucaaacauaauuuccuac

SEQ ID NO: 822420 - RNA, 19 nt, Artificial Sequence
  Description of Artificial Sequence: Synthetic oligonucleotide
  Sense strand starting at position 3347 of SEQ ID NO: 587840
uuuggugauaauuggaaca

SEQ ID NO: 822421 - RNA, 19 nt, Artificial Sequence
  Description of Artificial Sequence: Synthetic oligonucleotide
  Antisense strand to SEQ ID NO: 822420
uguuccaauuaucaccaaa

SEQ ID NO: 822422 - RNA, 19 nt, Artificial Sequence
  Description of Artificial Sequence: Synthetic oligonucleotide
  Sense strand starting at position 3813 of SEQ ID NO: 587840
uguaaauacucucuuagua

SEQ ID NO: 822423 - RNA, 19 nt, Artificial Sequence
  Description of Artificial Sequence: Synthetic oligonucleotide
  Antisense strand to SEQ ID NO: 822422
uacuaagagaguauuuaca

SEQ ID NO: 822424 - RNA, 19 nt, Artificial Sequence
  Description of Artificial Sequence: Synthetic oligonucleotide
  Sense strand starting at position 3902 of SEQ ID NO: 587840
agagguuuaacuuauuggu

SEQ ID NO: 822425 - RNA, 19 nt, Artificial Sequence
  Description of Artificial Sequence: Synthetic oligonucleotide
  Antisense strand to SEQ ID NO: 822424
accaauaaguuaaaccucu

SEQ ID NO: 822426 - RNA, 19 nt, Artificial Sequence
  Description of Artificial Sequence: Synthetic oligonucleotide
  Sense strand starting at position 6 of SEQ ID NO: 587841
ggaagacaugccugggcau

SEQ ID NO: 822427 - RNA, 19 nt, Artificial Sequence
  Description of Artificial Sequence: Synthetic oligonucleotide
  Antisense strand to SEQ ID NO: 822426
augcccaggcaugucuucc

SEQ ID NO: 822428 - RNA, 19 nt, Artificial Sequence
  Description of Artificial Sequence: Synthetic oligonucleotide
  Sense strand starting at position 193 of SEQ ID NO: 587841
gucauacacuacuuguaag

SEQ ID NO: 822429 - RNA, 19 nt, Artificial Sequence
  Description of Artificial Sequence: Synthetic oligonucleotide
  Antisense strand to SEQ ID NO: 822428
cuuacaaguaguguaugac

SEQ ID NO: 822430 - RNA, 19 nt, Artificial Sequence
  Description of Artificial Sequence: Synthetic oligonucleotide
  Sense strand starting at position 354 of SEQ ID NO: 587841
acaauagacuaugaauuag

SEQ ID NO: 822431 - RNA, 19 nt, Artificial Sequence
  Description of Artificial Sequence: Synthetic oligonucleotide
  Antisense strand to SEQ ID NO: 822430
cuaauucauagucuauugu

SEQ ID NO: 822432 - RNA, 19 nt, Artificial Sequence
  Description of Artificial Sequence: Synthetic oligonucleotide
  Sense strand starting at position 390 of SEQ ID NO: 587841
cugagaaauugacaauaac

SEQ ID NO: 822433 - RNA, 19 nt, Artificial Sequence
  Description of Artificial Sequence: Synthetic oligonucleotide
  Antisense strand to SEQ ID NO: 822432
guuauugucaauuucucag

SEQ ID NO: 822434 - RNA, 19 nt, Artificial Sequence
  Description of Artificial Sequence: Synthetic oligonucleotide
  Sense strand starting at position 485 of SEQ ID NO: 587841
cuucuagucuaucuaugga

SEQ ID NO: 822435 - RNA, 19 nt, Artificial Sequence
  Description of Artificial Sequence: Synthetic oligonucleotide
  Antisense strand to SEQ ID NO: 822434
uccauagauagacuagaag

SEQ ID NO: 822436 - RNA, 19 nt, Artificial Sequence
  Description of Artificial Sequence: Synthetic oligonucleotide
  Sense strand starting at position 665 of SEQ ID NO: 587841
ugaugcaggucuccuauua

SEQ ID NO: 822437 - RNA, 19 nt, Artificial Sequence
  Description of Artificial Sequence: Synthetic oligonucleotide
  Antisense strand to SEQ ID NO: 822436
uaauaggagaccugcauca

SEQ ID NO: 822438 - RNA, 19 nt, Artificial Sequence
  Description of Artificial Sequence: Synthetic oligonucleotide
  Sense strand starting at position 795 of SEQ ID NO: 587841
gggucuguaucauugagau

SEQ ID NO: 822439 - RNA, 19 nt, Artificial Sequence
  Description of Artificial Sequence: Synthetic oligonucleotide
  Antisense strand to SEQ ID NO: 822438
aucucaaugauacagaccc

SEQ ID NO: 822440 - RNA, 19 nt, Artificial Sequence
  Description of Artificial Sequence: Synthetic oligonucleotide
  Sense strand starting at position 797 of SEQ ID NO: 587841
gucuguaucauugagauag

SEQ ID NO: 822441 - RNA, 19 nt, Artificial Sequence
  Description of Artificial Sequence: Synthetic oligonucleotide
  Antisense strand to SEQ ID NO: 822440
cuaucucaaugauacagac

SEQ ID NO: 822442 - RNA, 19 nt, Artificial Sequence
  Description of Artificial Sequence: Synthetic oligonucleotide
  Sense strand starting at position 830 of SEQ ID NO: 587841
auguaauauccagguguua

SEQ ID NO: 822443 - RNA, 19 nt, Artificial Sequence
  Description of Artificial Sequence: Synthetic oligonucleotide
  Antisense strand to SEQ ID NO: 822442
uaacaccuggauauuacau

SEQ ID NO: 822444 - RNA, 19 nt, Artificial Sequence
  Description of Artificial Sequence: Synthetic oligonucleotide
  Sense strand starting at position 832 of SEQ ID NO: 587841
guaauauccagguguuaag

SEQ ID NO: 822445 - RNA, 19 nt, Artificial Sequence
  Description of Artificial Sequence: Synthetic oligonucleotide
  Antisense strand to SEQ ID NO: 822444
cuuaacaccuggauauuac

SEQ ID NO: 822446 - RNA, 19 nt, Artificial Sequence
  Description of Artificial Sequence: Synthetic oligonucleotide
  Sense strand starting at position 841 of SEQ ID NO: 587841
agguguuaagccugaauca

SEQ ID NO: 822447 - RNA, 19 nt, Artificial Sequence
  Description of Artificial Sequence: Synthetic oligonucleotide
  Antisense strand to SEQ ID NO: 822446
ugauucaggcuuaacaccu

SEQ ID NO: 822448 - RNA, 19 nt, Artificial Sequence
  Description of Artificial Sequence: Synthetic oligonucleotide
  Sense strand starting at position 842 of SEQ ID NO: 587841
gguguuaagccugaaucac

SEQ ID NO: 822449 - RNA, 19 nt, Artificial Sequence
  Description of Artificial Sequence: Synthetic oligonucleotide
  Antisense strand to SEQ ID NO: 822448
gugauucaggcuuaacacc

SEQ ID NO: 822450 - RNA, 19 nt, Artificial Sequence
  Description of Artificial Sequence: Synthetic oligonucleotide
  Sense strand starting at position 959 of SEQ ID NO: 587841
gagggauauuuacaguuag

SEQ ID NO: 822451 - RNA, 19 nt, Artificial Sequence
  Description of Artificial Sequence: Synthetic oligonucleotide
  Antisense strand to SEQ ID NO: 822450
cuaacuguaaauaucccuc

SEQ ID NO: 822452 - RNA, 19 nt, Artificial Sequence
  Description of Artificial Sequence: Synthetic oligonucleotide
  Sense strand starting at position 1312 of SEQ ID NO: 587841
ugaacaacuugggcuuauu

SEQ ID NO: 822453 - RNA, 19 nt, Artificial Sequence
  Description of Artificial Sequence: Synthetic oligonucleotide
  Antisense strand to SEQ ID NO: 822452
aauaagcccaaguuguuca

SEQ ID NO: 822454 - RNA, 19 nt, Artificial Sequence
  Description of Artificial Sequence: Synthetic oligonucleotide
  Sense strand starting at position 1344 of SEQ ID NO: 587841
uuucguggcacuuugcaua

SEQ ID NO: 822455 - RNA, 19 nt, Artificial Sequence
  Description of Artificial Sequence: Synthetic oligonucleotide
  Antisense strand to SEQ ID NO: 822454
uaugcaaagugccacgaaa

SEQ ID NO: 822456 - RNA, 19 nt, Artificial Sequence
  Description of Artificial Sequence: Synthetic oligonucleotide
  Sense strand starting at position 2404 of SEQ ID NO: 587841
aagggauuaucccugucuc

SEQ ID NO: 822457 - RNA, 19 nt, Artificial Sequence
  Description of Artificial Sequence: Synthetic oligonucleotide
  Antisense strand to SEQ ID NO: 822456
gagacagggauaaucccuu

SEQ ID NO: 822458 - RNA, 19 nt, Artificial Sequence
  Description of Artificial Sequence: Synthetic oligonucleotide
  Sense strand starting at position 2586 of SEQ ID NO: 587841
ccggcuuuccacugaggga

SEQ ID NO: 822459 - RNA, 19 nt, Artificial Sequence
  Description of Artificial Sequence: Synthetic oligonucleotide
  Antisense strand to SEQ ID NO: 822458
ucccucaguggaaagccgg

SEQ ID NO: 822460 - RNA, 19 nt, Artificial Sequence
  Description of Artificial Sequence: Synthetic oligonucleotide
  Sense strand starting at position 2968 of SEQ ID NO: 587841
caaacacuucgcuagggaa

SEQ ID NO: 822461 - RNA, 19 nt, Artificial Sequence
  Description of Artificial Sequence: Synthetic oligonucleotide
  Antisense strand to SEQ ID NO: 822460
uucccuagcgaaguguuug

SEQ ID NO: 822462 - RNA, 19 nt, Artificial Sequence
  Description of Artificial Sequence: Synthetic oligonucleotide
  Sense strand starting at position 2993 of SEQ ID NO: 587841
ggcugguuucgugcguaaa

SEQ ID NO: 822463 - RNA, 19 nt, Artificial Sequence
  Description of Artificial Sequence: Synthetic oligonucleotide
  Antisense strand to SEQ ID NO: 822462
uuuacgcacgaaaccagcc

SEQ ID NO: 822464 - RNA, 19 nt, Artificial Sequence
  Description of Artificial Sequence: Synthetic oligonucleotide
  Sense strand starting at position 3176 of SEQ ID NO: 587841
uuguuuaaguaguuugaag

SEQ ID NO: 822465 - RNA, 19 nt, Artificial Sequence
  Description of Artificial Sequence: Synthetic oligonucleotide
  Antisense strand to SEQ ID NO: 822464
cuucaaacuacuuaaacaa

SEQ ID NO: 822466 - RNA, 19 nt, Artificial Sequence
  Description of Artificial Sequence: Synthetic oligonucleotide
  Sense strand starting at position 3184 of SEQ ID NO: 587841
guaguuugaagcugaaaga

SEQ ID NO: 822467 - RNA, 19 nt, Artificial Sequence
  Description of Artificial Sequence: Synthetic oligonucleotide
  Antisense strand to SEQ ID NO: 822466
ucuuucagcuucaaacuac

SEQ ID NO: 822468 - RNA, 19 nt, Artificial Sequence
  Description of Artificial Sequence: Synthetic oligonucleotide
  Sense strand starting at position 3209 of SEQ ID NO: 587841
ggaucuugccaugaccuga

SEQ ID NO: 822469 - RNA, 19 nt, Artificial Sequence
  Description of Artificial Sequence: Synthetic oligonucleotide
  Antisense strand to SEQ ID NO: 822468
ucaggucauggcaagaucc

SEQ ID NO: 822470 - RNA, 19 nt, Artificial Sequence
  Description of Artificial Sequence: Synthetic oligonucleotide
  Sense strand starting at position 3338 of SEQ ID NO: 587841
gguagacagucuuucuuaa

SEQ ID NO: 822471 - RNA, 19 nt, Artificial Sequence
  Description of Artificial Sequence: Synthetic oligonucleotide
  Antisense strand to SEQ ID NO: 822470
uuaagaaagacugucuacc

SEQ ID NO: 822472 - RNA, 19 nt, Artificial Sequence
  Description of Artificial Sequence: Synthetic oligonucleotide
  Sense strand starting at position 3369 of SEQ ID NO: 587841
gggucaaaugcugagugaa

SEQ ID NO: 822473 - RNA, 19 nt, Artificial Sequence
  Description of Artificial Sequence: Synthetic oligonucleotide
  Antisense strand to SEQ ID NO: 822472
uucacucagcauuugaccc

SEQ ID NO: 822474 - RNA, 19 nt, Artificial Sequence
  Description of Artificial Sequence: Synthetic oligonucleotide
  Sense strand starting at position 3371 of SEQ ID NO: 587841
gucaaaugcugagugaaau

SEQ ID NO: 822475 - RNA, 19 nt, Artificial Sequence
  Description of Artificial Sequence: Synthetic oligonucleotide
  Antisense strand to SEQ ID NO: 822474
auuucacucagcauuugac

SEQ ID NO: 822476 - RNA, 19 nt, Artificial Sequence
  Description of Artificial Sequence: Synthetic oligonucleotide
  Sense strand starting at position 3466 of SEQ ID NO: 587841
cguggcaaauaaucagauu

SEQ ID NO: 822477 - RNA, 19 nt, Artificial Sequence
  Description of Artificial Sequence: Synthetic oligonucleotide
  Antisense strand to SEQ ID NO: 822476
aaucugauuauuugccacg

SEQ ID NO: 822478 - RNA, 19 nt, Artificial Sequence
  Description of Artificial Sequence: Synthetic oligonucleotide
  Sense strand starting at position 3548 of SEQ ID NO: 587841
caugaaugaguuuggugaa

SEQ ID NO: 822479 - RNA, 19 nt, Artificial Sequence
  Description of Artificial Sequence: Synthetic oligonucleotide
  Antisense strand to SEQ ID NO: 822478
uucaccaaacucauucaug

SEQ ID NO: 822480 - RNA, 19 nt, Artificial Sequence
  Description of Artificial Sequence: Synthetic oligonucleotide
  Sense strand starting at position 3573 of SEQ ID NO: 587841
auaucaucaugggcaugaa

SEQ ID NO: 822481 - RNA, 19 nt, Artificial Sequence
  Description of Artificial Sequence: Synthetic oligonucleotide
  Antisense strand to SEQ ID NO: 822480
uucaugcccaugaugauau

SEQ ID NO: 822482 - RNA, 19 nt, Artificial Sequence
  Description of Artificial Sequence: Synthetic oligonucleotide
  Sense strand starting at position 3576 of SEQ ID NO: 587841
ucaucaugggcaugaauuc

SEQ ID NO: 822483 - RNA, 19 nt, Artificial Sequence
  Description of Artificial Sequence: Synthetic oligonucleotide
  Antisense strand to SEQ ID NO: 822482
gaauucaugcccaugauga

SEQ ID NO: 822484 - RNA, 19 nt, Artificial Sequence
  Description of Artificial Sequence: Synthetic oligonucleotide
  Sense strand starting at position 3616 of SEQ ID NO: 587841
augcuaccuugggucaauu

SEQ ID NO: 822485 - RNA, 19 nt, Artificial Sequence
  Description of Artificial Sequence: Synthetic oligonucleotide
  Antisense strand to SEQ ID NO: 822484
aauugacccaagguagcau

SEQ ID NO: 822486 - RNA, 19 nt, Artificial Sequence
  Description of Artificial Sequence: Synthetic oligonucleotide
  Sense strand starting at position 3618 of SEQ ID NO: 587841
gcuaccuugggucaauuaa

SEQ ID NO: 822487 - RNA, 19 nt, Artificial Sequence
  Description of Artificial Sequence: Synthetic oligonucleotide
  Antisense strand to SEQ ID NO: 822486
uuaauugacccaagguagc

SEQ ID NO: 822488 - RNA, 19 nt, Artificial Sequence
  Description of Artificial Sequence: Synthetic oligonucleotide
  Sense strand starting at position 3661 of SEQ ID NO: 587841
ucuacaggauaagaauaau

SEQ ID NO: 822489 - RNA, 19 nt, Artificial Sequence
  Description of Artificial Sequence: Synthetic oligonucleotide
  Antisense strand to SEQ ID NO: 822488
auuauucuuauccuguaga

SEQ ID NO: 822490 - RNA, 19 nt, Artificial Sequence
  Description of Artificial Sequence: Synthetic oligonucleotide
  Sense strand starting at position 3694 of SEQ ID NO: 587841
aagguuguugugugaauuu

SEQ ID NO: 822491 - RNA, 19 nt, Artificial Sequence
  Description of Artificial Sequence: Synthetic oligonucleotide
  Antisense strand to SEQ ID NO: 822490
aaauucacacaacaaccuu

SEQ ID NO: 822492 - RNA, 19 nt, Artificial Sequence
  Description of Artificial Sequence: Synthetic oligonucleotide
  Sense strand starting at position 3745 of SEQ ID NO: 587841
gugggaaauuaccuugaug

SEQ ID NO: 822493 - RNA, 19 nt, Artificial Sequence
  Description of Artificial Sequence: Synthetic oligonucleotide
  Antisense strand to SEQ ID NO: 822492
caucaagguaauuucccac

SEQ ID NO: 822494 - RNA, 19 nt, Artificial Sequence
  Description of Artificial Sequence: Synthetic oligonucleotide
  Sense strand starting at position 3747 of SEQ ID NO: 587841
gggaaauuaccuugaugca

SEQ ID NO: 822495 - RNA, 19 nt, Artificial Sequence
  Description of Artificial Sequence: Synthetic oligonucleotide
  Antisense strand to SEQ ID NO: 822494
ugcaucaagguaauuuccc

SEQ ID NO: 822496 - RNA, 19 nt, Artificial Sequence
  Description of Artificial Sequence: Synthetic oligonucleotide
  Sense strand starting at position 3845 of SEQ ID NO: 587841
aauugagaugccugaguca

SEQ ID NO: 822497 - RNA, 19 nt, Artificial Sequence
  Description of Artificial Sequence: Synthetic oligonucleotide
  Antisense strand to SEQ ID NO: 822496
ugacucaggcaucucaauu

SEQ ID NO: 822498 - RNA, 19 nt, Artificial Sequence
  Description of Artificial Sequence: Synthetic oligonucleotide
  Sense strand starting at position 3956 of SEQ ID NO: 587841
aguaaugugucauuacuga

SEQ ID NO: 822499 - RNA, 19 nt, Artificial Sequence
  Description of Artificial Sequence: Synthetic oligonucleotide
  Antisense strand to SEQ ID NO: 822498
ucaguaaugacacauuacu

SEQ ID NO: 822500 - RNA, 19 nt, Artificial Sequence
  Description of Artificial Sequence: Synthetic oligonucleotide
  Sense strand starting at position 3970 of SEQ ID NO: 587841
acugaaagauugccuuaca

SEQ ID NO: 822501 - RNA, 19 nt, Artificial Sequence
  Description of Artificial Sequence: Synthetic oligonucleotide
  Antisense strand to SEQ ID NO: 822500
uguaaggcaaucuuucagu

SEQ ID NO: 822502 - RNA, 19 nt, Artificial Sequence
  Description of Artificial Sequence: Synthetic oligonucleotide
  Sense strand starting at position 3971 of SEQ ID NO: 587841
cugaaagauugccuuacau

SEQ ID NO: 822503 - RNA, 19 nt, Artificial Sequence
  Description of Artificial Sequence: Synthetic oligonucleotide
  Antisense strand to SEQ ID NO: 822502
auguaaggcaaucuuucag

SEQ ID NO: 822504 - RNA, 19 nt, Artificial Sequence
  Description of Artificial Sequence: Synthetic oligonucleotide
  Sense strand starting at position 3973 of SEQ ID NO: 587841
gaaagauugccuuacaugu

SEQ ID NO: 822505 - RNA, 19 nt, Artificial Sequence
  Description of Artificial Sequence: Synthetic oligonucleotide
  Antisense strand to SEQ ID NO: 822504
acauguaaggcaaucuuuc

SEQ ID NO: 822506 - RNA, 19 nt, Artificial Sequence
  Description of Artificial Sequence: Synthetic oligonucleotide
  Sense strand starting at position 67 of SEQ ID NO: 587842
acaauagacuaugaauuag

SEQ ID NO: 822507 - RNA, 19 nt, Artificial Sequence
  Description of Artificial Sequence: Synthetic oligonucleotide
  Antisense strand to SEQ ID NO: 822506
cuaauucauagucuauugu

SEQ ID NO: 822508 - RNA, 19 nt, Artificial Sequence
  Description of Artificial Sequence: Synthetic oligonucleotide
  Sense strand starting at position 103 of SEQ ID NO: 587842
cugagaaauugacaauaac

SEQ ID NO: 822509 - RNA, 19 nt, Artificial Sequence
  Description of Artificial Sequence: Synthetic oligonucleotide
  Antisense strand to SEQ ID NO: 822508
guuauugucaauuucucag

SEQ ID NO: 822510 - RNA, 19 nt, Artificial Sequence
  Description of Artificial Sequence: Synthetic oligonucleotide
  Sense strand starting at position 198 of SEQ ID NO: 587842
cuucuagucuaucuaugga

SEQ ID NO: 822511 - RNA, 19 nt, Artificial Sequence
  Description of Artificial Sequence: Synthetic oligonucleotide
  Antisense strand to SEQ ID NO: 822510
uccauagauagacuagaag

SEQ ID NO: 822512 - RNA, 19 nt, Artificial Sequence
  Description of Artificial Sequence: Synthetic oligonucleotide
  Sense strand starting at position 378 of SEQ ID NO: 587842
ugaugcaggucuccuauua

SEQ ID NO: 822513 - RNA, 19 nt, Artificial Sequence
  Description of Artificial Sequence: Synthetic oligonucleotide
  Antisense strand to SEQ ID NO: 822512
uaauaggagaccugcauca

SEQ ID NO: 822514 - RNA, 19 nt, Artificial Sequence
  Description of Artificial Sequence: Synthetic oligonucleotide
  Sense strand starting at position 508 of SEQ ID NO: 587842
gggucuguaucauugagau

SEQ ID NO: 822515 - RNA, 19 nt, Artificial Sequence
  Description of Artificial Sequence: Synthetic oligonucleotide
  Antisense strand to SEQ ID NO: 822514
aucucaaugauacagaccc

SEQ ID NO: 822516 - RNA, 19 nt, Artificial Sequence
  Description of Artificial Sequence: Synthetic oligonucleotide
  Sense strand starting at position 510 of SEQ ID NO: 587842
gucuguaucauugagauag

SEQ ID NO: 822517 - RNA, 19 nt, Artificial Sequence
  Description of Artificial Sequence: Synthetic oligonucleotide
  Antisense strand to SEQ ID NO: 822516
cuaucucaaugauacagac

SEQ ID NO: 822518 - RNA, 19 nt, Artificial Sequence
  Description of Artificial Sequence: Synthetic oligonucleotide
  Sense strand starting at position 543 of SEQ ID NO: 587842
auguaauauccagguguua

SEQ ID NO: 822519 - RNA, 19 nt, Artificial Sequence
  Description of Artificial Sequence: Synthetic oligonucleotide
  Antisense strand to SEQ ID NO: 822518
uaacaccuggauauuacau

SEQ ID NO: 822520 - RNA, 19 nt, Artificial Sequence
  Description of Artificial Sequence: Synthetic oligonucleotide
  Sense strand starting at position 545 of SEQ ID NO: 587842
guaauauccagguguuaag

SEQ ID NO: 822521 - RNA, 19 nt, Artificial Sequence
  Description of Artificial Sequence: Synthetic oligonucleotide
  Antisense strand to SEQ ID NO: 822520
cuuaacaccuggauauuac

SEQ ID NO: 822522 - RNA, 19 nt, Artificial Sequence
  Description of Artificial Sequence: Synthetic oligonucleotide
  Sense strand starting at position 554 of SEQ ID NO: 587842
agguguuaagccugaauca

SEQ ID NO: 822523 - RNA, 19 nt, Artificial Sequence
  Description of Artificial Sequence: Synthetic oligonucleotide
  Antisense strand to SEQ ID NO: 822522
ugauucaggcuuaacaccu

SEQ ID NO: 822524 - RNA, 19 nt, Artificial Sequence
  Description of Artificial Sequence: Synthetic oligonucleotide
  Sense strand starting at position 555 of SEQ ID NO: 587842
gguguuaagccugaaucac

SEQ ID NO: 822525 - RNA, 19 nt, Artificial Sequence
  Description of Artificial Sequence: Synthetic oligonucleotide
  Antisense strand to SEQ ID NO: 822524
gugauucaggcuuaacacc

SEQ ID NO: 822526 - RNA, 19 nt, Artificial Sequence
  Description of Artificial Sequence: Synthetic oligonucleotide
  Sense strand starting at position 672 of SEQ ID NO: 587842
gagggauauuuacaguuag

SEQ ID NO: 822527 - RNA, 19 nt, Artificial Sequence
  Description of Artificial Sequence: Synthetic oligonucleotide
  Antisense strand to SEQ ID NO: 822526
cuaacuguaaauaucccuc

SEQ ID NO: 822528 - RNA, 19 nt, Artificial Sequence
  Description of Artificial Sequence: Synthetic oligonucleotide
  Sense strand starting at position 1025 of SEQ ID NO: 587842
ugaacaacuugggcuuauu

SEQ ID NO: 822529 - RNA, 19 nt, Artificial Sequence
  Description of Artificial Sequence: Synthetic oligonucleotide
  Antisense strand to SEQ ID NO: 822528
aauaagcccaaguuguuca

SEQ ID NO: 822530 - RNA, 19 nt, Artificial Sequence
  Description of Artificial Sequence: Synthetic oligonucleotide
  Sense strand starting at position 1057 of SEQ ID NO: 587842
uuucguggcacuuugcaua

SEQ ID NO: 822531 - RNA, 19 nt, Artificial Sequence
  Description of Artificial Sequence: Synthetic oligonucleotide
  Antisense strand to SEQ ID NO: 822530
uaugcaaagugccacgaaa

SEQ ID NO: 822532 - RNA, 19 nt, Artificial Sequence
  Description of Artificial Sequence: Synthetic oligonucleotide
  Sense strand starting at position 2117 of SEQ ID NO: 587842
aagggauuaucccugucuc

SEQ ID NO: 822533 - RNA, 19 nt, Artificial Sequence
  Description of Artificial Sequence: Synthetic oligonucleotide
  Antisense strand to SEQ ID NO: 822532
gagacagggauaaucccuu

SEQ ID NO: 822534 - RNA, 19 nt, Artificial Sequence
  Description of Artificial Sequence: Synthetic oligonucleotide
  Sense strand starting at position 2299 of SEQ ID NO: 587842
ccggcuuuccacugaggga

SEQ ID NO: 822535 - RNA, 19 nt, Artificial Sequence
  Description of Artificial Sequence: Synthetic oligonucleotide
  Antisense strand to SEQ ID NO: 822534
ucccucaguggaaagccgg

SEQ ID NO: 822536 - RNA, 19 nt, Artificial Sequence
  Description of Artificial Sequence: Synthetic oligonucleotide
  Sense strand starting at position 2681 of SEQ ID NO: 587842
caaacacuucgcuagggaa

SEQ ID NO: 822537 - RNA, 19 nt, Artificial Sequence
  Description of Artificial Sequence: Synthetic oligonucleotide
  Antisense strand to SEQ ID NO: 822536
uucccuagcgaaguguuug

SEQ ID NO: 822538 - RNA, 19 nt, Artificial Sequence
  Description of Artificial Sequence: Synthetic oligonucleotide
  Sense strand starting at position 2706 of SEQ ID NO: 587842
ggcugguuucgugcguaaa

SEQ ID NO: 822539 - RNA, 19 nt, Artificial Sequence
  Description of Artificial Sequence: Synthetic oligonucleotide
  Antisense strand to SEQ ID NO: 822538
uuuacgcacgaaaccagcc

SEQ ID NO: 822540 - RNA, 19 nt, Artificial Sequence
  Description of Artificial Sequence: Synthetic oligonucleotide
  Sense strand starting at position 2889 of SEQ ID NO: 587842
uuguuuaaguaguuugaag

SEQ ID NO: 822541 - RNA, 19 nt, Artificial Sequence
  Description of Artificial Sequence: Synthetic oligonucleotide
  Antisense strand to SEQ ID NO: 822540
cuucaaacuacuuaaacaa

SEQ ID NO: 822542 - RNA, 19 nt, Artificial Sequence
  Description of Artificial Sequence: Synthetic oligonucleotide
  Sense strand starting at position 2897 of SEQ ID NO: 587842
guaguuugaagcugaaaga

SEQ ID NO: 822543 - RNA, 19 nt, Artificial Sequence
  Description of Artificial Sequence: Synthetic oligonucleotide
  Antisense strand to SEQ ID NO: 822542
ucuuucagcuucaaacuac

SEQ ID NO: 822544 - RNA, 19 nt, Artificial Sequence
  Description of Artificial Sequence: Synthetic oligonucleotide
  Sense strand starting at position 2922 of SEQ ID NO: 587842
ggaucuugccaugaccuga

SEQ ID NO: 822545 - RNA, 19 nt, Artificial Sequence
  Description of Artificial Sequence: Synthetic oligonucleotide
  Antisense strand to SEQ ID NO: 822544
ucaggucauggcaagaucc

SEQ ID NO: 822546 - RNA, 19 nt, Artificial Sequence
  Description of Artificial Sequence: Synthetic oligonucleotide
  Sense strand starting at position 3051 of SEQ ID NO: 587842
gguagacagucuuucuuaa

SEQ ID NO: 822547 - RNA, 19 nt, Artificial Sequence
  Description of Artificial Sequence: Synthetic oligonucleotide
  Antisense strand to SEQ ID NO: 822546
uuaagaaagacugucuacc

SEQ ID NO: 822548 - RNA, 19 nt, Artificial Sequence
  Description of Artificial Sequence: Synthetic oligonucleotide
  Sense strand starting at position 3082 of SEQ ID NO: 587842
gggucaaaugcugagugaa

SEQ ID NO: 822549 - RNA, 19 nt, Artificial Sequence
  Description of Artificial Sequence: Synthetic oligonucleotide
  Antisense strand to SEQ ID NO: 822548
uucacucagcauuugaccc

SEQ ID NO: 822550 - RNA, 19 nt, Artificial Sequence
  Description of Artificial Sequence: Synthetic oligonucleotide
  Sense strand starting at position 3084 of SEQ ID NO: 587842
gucaaaugcugagugaaau

SEQ ID NO: 822551 - RNA, 19 nt, Artificial Sequence
  Description of Artificial Sequence: Synthetic oligonucleotide
  Antisense strand to SEQ ID NO: 822550
auuucacucagcauuugac

SEQ ID NO: 822552 - RNA, 19 nt, Artificial Sequence
  Description of Artificial Sequence: Synthetic oligonucleotide
  Sense strand starting at position 3179 of SEQ ID NO: 587842
cguggcaaauaaucagauu

SEQ ID NO: 822553 - RNA, 19 nt, Artificial Sequence
  Description of Artificial Sequence: Synthetic oligonucleotide
  Antisense strand to SEQ ID NO: 822552
aaucugauuauuugccacg

SEQ ID NO: 822554 - RNA, 19 nt, Artificial Sequence
  Description of Artificial Sequence: Synthetic oligonucleotide
  Sense strand starting at position 3230 of SEQ ID NO: 587842
gggcaucacguuuagguau

SEQ ID NO: 822555 - RNA, 19 nt, Artificial Sequence
  Description of Artificial Sequence: Synthetic oligonucleotide
  Antisense strand to SEQ ID NO: 822554
auaccuaaacgugaugccc

SEQ ID NO: 822556 - RNA, 19 nt, Artificial Sequence
  Description of Artificial Sequence: Synthetic oligonucleotide
  Sense strand starting at position 3261 of SEQ ID NO: 587842
caugaaugaguuuggugaa

SEQ ID NO: 822557 - RNA, 19 nt, Artificial Sequence
  Description of Artificial Sequence: Synthetic oligonucleotide
  Antisense strand to SEQ ID NO: 822556
uucaccaaacucauucaug

SEQ ID NO: 822558 - RNA, 19 nt, Artificial Sequence
  Description of Artificial Sequence: Synthetic oligonucleotide
  Sense strand starting at position 3286 of SEQ ID NO: 587842
auaucaucaugggcaugaa

SEQ ID NO: 822559 - RNA, 19 nt, Artificial Sequence
  Description of Artificial Sequence: Synthetic oligonucleotide
  Antisense strand to SEQ ID NO: 822558
uucaugcccaugaugauau

SEQ ID NO: 822560 - RNA, 19 nt, Artificial Sequence
  Description of Artificial Sequence: Synthetic oligonucleotide
  Sense strand starting at position 3289 of SEQ ID NO: 587842
ucaucaugggcaugaauuc

SEQ ID NO: 822561 - RNA, 19 nt, Artificial Sequence
  Description of Artificial Sequence: Synthetic oligonucleotide
  Antisense strand to SEQ ID NO: 822560
gaauucaugcccaugauga

SEQ ID NO: 822562 - RNA, 19 nt, Artificial Sequence
  Description of Artificial Sequence: Synthetic oligonucleotide
  Sense strand starting at position 3329 of SEQ ID NO: 587842
augcuaccuugggucaauu

SEQ ID NO: 822563 - RNA, 19 nt, Artificial Sequence
  Description of Artificial Sequence: Synthetic oligonucleotide
  Antisense strand to SEQ ID NO: 822562
aauugacccaagguagcau

SEQ ID NO: 822564 - RNA, 19 nt, Artificial Sequence
  Description of Artificial Sequence: Synthetic oligonucleotide
  Sense strand starting at position 3331 of SEQ ID NO: 587842
gcuaccuugggucaauuaa

SEQ ID NO: 822565 - RNA, 19 nt, Artificial Sequence
  Description of Artificial Sequence: Synthetic oligonucleotide
  Antisense strand to SEQ ID NO: 822564
uuaauugacccaagguagc

SEQ ID NO: 822566 - RNA, 19 nt, Artificial Sequence
  Description of Artificial Sequence: Synthetic oligonucleotide
  Sense strand starting at position 3374 of SEQ ID NO: 587842
ucuacaggauaagaauaau

SEQ ID NO: 822567 - RNA, 19 nt, Artificial Sequence
  Description of Artificial Sequence: Synthetic oligonucleotide
  Antisense strand to SEQ ID NO: 822566
auuauucuuauccuguaga

SEQ ID NO: 822568 - RNA, 19 nt, Artificial Sequence
  Description of Artificial Sequence: Synthetic oligonucleotide
  Sense strand starting at position 3407 of SEQ ID NO: 587842
aagguuguugugugaauuu

SEQ ID NO: 822569 - RNA, 19 nt, Artificial Sequence
  Description of Artificial Sequence: Synthetic oligonucleotide
  Antisense strand to SEQ ID NO: 822568
aaauucacacaacaaccuu

SEQ ID NO: 822570 - RNA, 19 nt, Artificial Sequence
  Description of Artificial Sequence: Synthetic oligonucleotide
  Sense strand starting at position 3458 of SEQ ID NO: 587842
gugggaaauuaccuugaug

SEQ ID NO: 822571 - RNA, 19 nt, Artificial Sequence
  Description of Artificial Sequence: Synthetic oligonucleotide
  Antisense strand to SEQ ID NO: 822570
caucaagguaauuucccac

SEQ ID NO: 822572 - RNA, 19 nt, Artificial Sequence
  Description of Artificial Sequence: Synthetic oligonucleotide
  Sense strand starting at position 3460 of SEQ ID NO: 587842
gggaaauuaccuugaugca

SEQ ID NO: 822573 - RNA, 19 nt, Artificial Sequence
  Description of Artificial Sequence: Synthetic oligonucleotide
  Antisense strand to SEQ ID NO: 822572
ugcaucaagguaauuuccc

SEQ ID NO: 822574 - RNA, 19 nt, Artificial Sequence
  Description of Artificial Sequence: Synthetic oligonucleotide
  Sense strand starting at position 3558 of SEQ ID NO: 587842
aauugagaugccugaguca

SEQ ID NO: 822575 - RNA, 19 nt, Artificial Sequence
  Description of Artificial Sequence: Synthetic oligonucleotide
  Antisense strand to SEQ ID NO: 822574
ugacucaggcaucucaauu

SEQ ID NO: 822576 - RNA, 19 nt, Artificial Sequence
  Description of Artificial Sequence: Synthetic oligonucleotide
  Sense strand starting at position 3669 of SEQ ID NO: 587842
aguaaugugucauuacuga

SEQ ID NO: 822577 - RNA, 19 nt, Artificial Sequence
  Description of Artificial Sequence: Synthetic oligonucleotide
  Antisense strand to SEQ ID NO: 822576
ucaguaaugacacauuacu

SEQ ID NO: 822578 - RNA, 19 nt, Artificial Sequence
  Description of Artificial Sequence: Synthetic oligonucleotide
  Sense strand starting at position 3683 of SEQ ID NO: 587842
acugaaagauugccuuaca

SEQ ID NO: 822579 - RNA, 19 nt, Artificial Sequence
  Description of Artificial Sequence: Synthetic oligonucleotide
  Antisense strand to SEQ ID NO: 822578
uguaaggcaaucuuucagu

SEQ ID NO: 822580 - RNA, 19 nt, Artificial Sequence
  Description of Artificial Sequence: Synthetic oligonucleotide
  Sense strand starting at position 3684 of SEQ ID NO: 587842
cugaaagauugccuuacau

SEQ ID NO: 822581 - RNA, 19 nt, Artificial Sequence
  Description of Artificial Sequence: Synthetic oligonucleotide
  Antisense strand to SEQ ID NO: 822580
auguaaggcaaucuuucag

SEQ ID NO: 822582 - RNA, 19 nt, Artificial Sequence
  Description of Artificial Sequence: Synthetic oligonucleotide
  Sense strand starting at position 3686 of SEQ ID NO: 587842
gaaagauugccuuacaugu

SEQ ID NO: 822583 - RNA, 19 nt, Artificial Sequence
  Description of Artificial Sequence: Synthetic oligonucleotide
  Antisense strand to SEQ ID NO: 822582
acauguaaggcaaucuuuc

SEQ ID NO: 822584 - RNA, 19 nt, Artificial Sequence
  Description of Artificial Sequence: Synthetic oligonucleotide
  Sense strand starting at position 3701 of SEQ ID NO: 587842
auguaauagccacguacaa

SEQ ID NO: 822585 - RNA, 19 nt, Artificial Sequence
  Description of Artificial Sequence: Synthetic oligonucleotide
  Antisense strand to SEQ ID NO: 822584
uuguacguggcuauuacau

SEQ ID NO: 822586 - RNA, 19 nt, Artificial Sequence
  Description of Artificial Sequence: Synthetic oligonucleotide
  Sense strand starting at position 239 of SEQ ID NO: 587843
guaccagguauccagguaa

SEQ ID NO: 822587 - RNA, 19 nt, Artificial Sequence
  Description of Artificial Sequence: Synthetic oligonucleotide
  Antisense strand to SEQ ID NO: 822586
uuaccuggauaccugguac

SEQ ID NO: 822588 - RNA, 19 nt, Artificial Sequence
  Description of Artificial Sequence: Synthetic oligonucleotide
  Sense strand starting at position 276 of SEQ ID NO: 587843
ucuacccaguagucagaaa

SEQ ID NO: 822589 - RNA, 19 nt, Artificial Sequence
  Description of Artificial Sequence: Synthetic oligonucleotide
  Antisense strand to SEQ ID NO: 822588
uuucugacuacuggguaga

SEQ ID NO: 822590 - RNA, 19 nt, Artificial Sequence
  Description of Artificial Sequence: Synthetic oligonucleotide
  Sense strand starting at position 2085 of SEQ ID NO: 587843
gcgguauggagagaugaug

SEQ ID NO: 822591 - RNA, 19 nt, Artificial Sequence
  Description of Artificial Sequence: Synthetic oligonucleotide
  Antisense strand to SEQ ID NO: 822590
caucaucucuccauaccgc

SEQ ID NO: 822592 - RNA, 19 nt, Artificial Sequence
  Description of Artificial Sequence: Synthetic oligonucleotide
  Sense strand starting at position 2093 of SEQ ID NO: 587843
gagagaugaugggauuaga

SEQ ID NO: 822593 - RNA, 19 nt, Artificial Sequence
  Description of Artificial Sequence: Synthetic oligonucleotide
  Antisense strand to SEQ ID NO: 822592
ucuaaucccaucaucucuc

SEQ ID NO: 822594 - RNA, 19 nt, Artificial Sequence
  Description of Artificial Sequence: Synthetic oligonucleotide
  Sense strand starting at position 2191 of SEQ ID NO: 587843
ggacuacgauucccaggau

SEQ ID NO: 822595 - RNA, 19 nt, Artificial Sequence
  Description of Artificial Sequence: Synthetic oligonucleotide
  Antisense strand to SEQ ID NO: 822594
auccugggaaucguagucc

SEQ ID NO: 822596 - RNA, 19 nt, Artificial Sequence
  Description of Artificial Sequence: Synthetic oligonucleotide
  Sense strand starting at position 2469 of SEQ ID NO: 587843
guacaaauuccugggacug

SEQ ID NO: 822597 - RNA, 19 nt, Artificial Sequence
  Description of Artificial Sequence: Synthetic oligonucleotide
  Antisense strand to SEQ ID NO: 822596
cagucccaggaauuuguac

SEQ ID NO: 822598 - RNA, 19 nt, Artificial Sequence
  Description of Artificial Sequence: Synthetic oligonucleotide
  Sense strand starting at position 2541 of SEQ ID NO: 587843
uugugaagauguuuagaca

SEQ ID NO: 822599 - RNA, 19 nt, Artificial Sequence
  Description of Artificial Sequence: Synthetic oligonucleotide
  Antisense strand to SEQ ID NO: 822598
ugucuaaacaucuucacaa

SEQ ID NO: 822600 - RNA, 19 nt, Artificial Sequence
  Description of Artificial Sequence: Synthetic oligonucleotide
  Sense strand starting at position 2776 of SEQ ID NO: 587843
ggauucugcaguuacagaa

SEQ ID NO: 822601 - RNA, 19 nt, Artificial Sequence
  Description of Artificial Sequence: Synthetic oligonucleotide
  Antisense strand to SEQ ID NO: 822600
uucuguaacugcagaaucc

SEQ ID NO: 822602 - RNA, 19 nt, Artificial Sequence
  Description of Artificial Sequence: Synthetic oligonucleotide
  Sense strand starting at position 2812 of SEQ ID NO: 587843
aaucuaguacagugcugaa

SEQ ID NO: 822603 - RNA, 19 nt, Artificial Sequence
  Description of Artificial Sequence: Synthetic oligonucleotide
  Antisense strand to SEQ ID NO: 822602
uucagcacuguacuagauu

SEQ ID NO: 822604 - RNA, 19 nt, Artificial Sequence
  Description of Artificial Sequence: Synthetic oligonucleotide
  Sense strand starting at position 2816 of SEQ ID NO: 587843
uaguacagugcugaaacua

SEQ ID NO: 822605 - RNA, 19 nt, Artificial Sequence
  Description of Artificial Sequence: Synthetic oligonucleotide
  Antisense strand to SEQ ID NO: 822604
uaguuucagcacuguacua

SEQ ID NO: 822606 - RNA, 19 nt, Artificial Sequence
  Description of Artificial Sequence: Synthetic oligonucleotide
  Sense strand starting at position 2925 of SEQ ID NO: 587843
aggccugcgagauaaugau

SEQ ID NO: 822607 - RNA, 19 nt, Artificial Sequence
  Description of Artificial Sequence: Synthetic oligonucleotide
  Antisense strand to SEQ ID NO: 822606
aucauuaucucgcaggccu

SEQ ID NO: 822608 - RNA, 19 nt, Artificial Sequence
  Description of Artificial Sequence: Synthetic oligonucleotide
  Sense strand starting at position 2950 of SEQ ID NO: 587843
acuuccuagggugguuaua

SEQ ID NO: 822609 - RNA, 19 nt, Artificial Sequence
  Description of Artificial Sequence: Synthetic oligonucleotide
  Antisense strand to SEQ ID NO: 822608
uauaaccacccuaggaagu

SEQ ID NO: 822610 - RNA, 19 nt, Artificial Sequence
  Description of Artificial Sequence: Synthetic oligonucleotide
  Sense strand starting at position 2977 of SEQ ID NO: 587843
gaguuaauaucguccaagg

SEQ ID NO: 822611 - RNA, 19 nt, Artificial Sequence
  Description of Artificial Sequence: Synthetic oligonucleotide
  Antisense strand to SEQ ID NO: 822610
ccuuggacgauauuaacuc

SEQ ID NO: 822612 - RNA, 19 nt, Artificial Sequence
  Description of Artificial Sequence: Synthetic oligonucleotide
  Sense strand starting at position 2979 of SEQ ID NO: 587843
guuaauaucguccaaggga

SEQ ID NO: 822613 - RNA, 19 nt, Artificial Sequence
  Description of Artificial Sequence: Synthetic oligonucleotide
  Antisense strand to SEQ ID NO: 822612
ucccuuggacgauauuaac

SEQ ID NO: 822614 - RNA, 19 nt, Artificial Sequence
  Description of Artificial Sequence: Synthetic oligonucleotide
  Sense strand starting at position 3095 of SEQ ID NO: 587843
caugguguuaaguaugagu

SEQ ID NO: 822615 - RNA, 19 nt, Artificial Sequence
  Description of Artificial Sequence: Synthetic oligonucleotide
  Antisense strand to SEQ ID NO: 822614
acucauacuuaacaccaug

SEQ ID NO: 822616 - RNA, 19 nt, Artificial Sequence
  Description of Artificial Sequence: Synthetic oligonucleotide
  Sense strand starting at position 3100 of SEQ ID NO: 587843
uguuaaguaugagucaaac

SEQ ID NO: 822617 - RNA, 19 nt, Artificial Sequence
  Description of Artificial Sequence: Synthetic oligonucleotide
  Antisense strand to SEQ ID NO: 822616
guuugacucauacuuaaca

SEQ ID NO: 822618 - RNA, 19 nt, Artificial Sequence
  Description of Artificial Sequence: Synthetic oligonucleotide
  Sense strand starting at position 3129 of SEQ ID NO: 587843
cagguaucaggucaccauu

SEQ ID NO: 822619 - RNA, 19 nt, Artificial Sequence
  Description of Artificial Sequence: Synthetic oligonucleotide
  Antisense strand to SEQ ID NO: 822618
aauggugaccugauaccug

SEQ ID NO: 822620 - RNA, 19 nt, Artificial Sequence
  Description of Artificial Sequence: Synthetic oligonucleotide
  Sense strand starting at position 3132 of SEQ ID NO: 587843
guaucaggucaccauuacu

SEQ ID NO: 822621 - RNA, 19 nt, Artificial Sequence
  Description of Artificial Sequence: Synthetic oligonucleotide
  Antisense strand to SEQ ID NO: 822620
aguaauggugaccugauac

SEQ ID NO: 822622 - RNA, 19 nt, Artificial Sequence
  Description of Artificial Sequence: Synthetic oligonucleotide
  Sense strand starting at position 3155 of SEQ ID NO: 587843
gaggauguuugaucuaagc

SEQ ID NO: 822623 - RNA, 19 nt, Artificial Sequence
  Description of Artificial Sequence: Synthetic oligonucleotide
  Antisense strand to SEQ ID NO: 822622
gcuuagaucaaacauccuc

SEQ ID NO: 822624 - RNA, 19 nt, Artificial Sequence
  Description of Artificial Sequence: Synthetic oligonucleotide
  Sense strand starting at position 3157 of SEQ ID NO: 587843
ggauguuugaucuaagccu

SEQ ID NO: 822625 - RNA, 19 nt, Artificial Sequence
  Description of Artificial Sequence: Synthetic oligonucleotide
  Antisense strand to SEQ ID NO: 822624
aggcuuagaucaaacaucc

SEQ ID NO: 822626 - RNA, 19 nt, Artificial Sequence
  Description of Artificial Sequence: Synthetic oligonucleotide
  Sense strand starting at position 3204 of SEQ ID NO: 587843
uaguuacugcuacauggua

SEQ ID NO: 822627 - RNA, 19 nt, Artificial Sequence
  Description of Artificial Sequence: Synthetic oligonucleotide
  Antisense strand to SEQ ID NO: 822626
uaccauguagcaguaacua

SEQ ID NO: 822628 - RNA, 19 nt, Artificial Sequence
  Description of Artificial Sequence: Synthetic oligonucleotide
  Sense strand starting at position 3220 of SEQ ID NO: 587843
guaagaacucaguaugugu

SEQ ID NO: 822629 - RNA, 19 nt, Artificial Sequence
  Description of Artificial Sequence: Synthetic oligonucleotide
  Antisense strand to SEQ ID NO: 822628
acacauacugaguucuuac

SEQ ID NO: 822630 - RNA, 19 nt, Artificial Sequence
  Description of Artificial Sequence: Synthetic oligonucleotide
  Sense strand starting at position 3222 of SEQ ID NO: 587843
aagaacucaguauguguua

SEQ ID NO: 822631 - RNA, 19 nt, Artificial Sequence
  Description of Artificial Sequence: Synthetic oligonucleotide
  Antisense strand to SEQ ID NO: 822630
uaacacauacugaguucuu

SEQ ID NO: 822632 - RNA, 19 nt, Artificial Sequence
  Description of Artificial Sequence: Synthetic oligonucleotide
  Sense strand starting at position 3307 of SEQ ID NO: 587843
agggcucagagaggugaaa

SEQ ID NO: 822633 - RNA, 19 nt, Artificial Sequence
  Description of Artificial Sequence: Synthetic oligonucleotide
  Antisense strand to SEQ ID NO: 822632
uuucaccucucugagcccu

SEQ ID NO: 822634 - RNA, 19 nt, Artificial Sequence
  Description of Artificial Sequence: Synthetic oligonucleotide
  Sense strand starting at position 3332 of SEQ ID NO: 587843
aucuaaaguuaugcaguua

SEQ ID NO: 822635 - RNA, 19 nt, Artificial Sequence
  Description of Artificial Sequence: Synthetic oligonucleotide
  Antisense strand to SEQ ID NO: 822634
uaacugcauaacuuuagau

SEQ ID NO: 822636 - RNA, 19 nt, Artificial Sequence
  Description of Artificial Sequence: Synthetic oligonucleotide
  Sense strand starting at position 3367 of SEQ ID NO: 587843
gagauaucuuaacucuggu

SEQ ID NO: 822637 - RNA, 19 nt, Artificial Sequence
  Description of Artificial Sequence: Synthetic oligonucleotide
  Antisense strand to SEQ ID NO: 822636
accagaguuaagauaucuc

SEQ ID NO: 822638 - RNA, 19 nt, Artificial Sequence
  Description of Artificial Sequence: Synthetic oligonucleotide
  Sense strand starting at position 3397 of SEQ ID NO: 587843
agaucuauucucugcaaug

SEQ ID NO: 822639 - RNA, 19 nt, Artificial Sequence
  Description of Artificial Sequence: Synthetic oligonucleotide
  Antisense strand to SEQ ID NO: 822638
cauugcagagaauagaucu

SEQ ID NO: 822640 - RNA, 19 nt, Artificial Sequence
  Description of Artificial Sequence: Synthetic oligonucleotide
  Sense strand starting at position 3505 of SEQ ID NO: 587843
ggccucacucuagauguaa

SEQ ID NO: 822641 - RNA, 19 nt, Artificial Sequence
  Description of Artificial Sequence: Synthetic oligonucleotide
  Antisense strand to SEQ ID NO: 822640
uuacaucuagagugaggcc

SEQ ID NO: 822642 - RNA, 19 nt, Artificial Sequence
  Description of Artificial Sequence: Synthetic oligonucleotide
  Sense strand starting at position 3542 of SEQ ID NO: 587843
uuaauaagaucuguaggug

SEQ ID NO: 822643 - RNA, 19 nt, Artificial Sequence
  Description of Artificial Sequence: Synthetic oligonucleotide
  Antisense strand to SEQ ID NO: 822642
caccuacagaucuuauuaa

SEQ ID NO: 822644 - RNA, 19 nt, Artificial Sequence
  Description of Artificial Sequence: Synthetic oligonucleotide
  Sense strand starting at position 3545 of SEQ ID NO: 587843
auaagaucuguaggugacu

SEQ ID NO: 822645 - RNA, 19 nt, Artificial Sequence
  Description of Artificial Sequence: Synthetic oligonucleotide
  Antisense strand to SEQ ID NO: 822644
agucaccuacagaucuuau

SEQ ID NO: 822646 - RNA, 19 nt, Artificial Sequence
  Description of Artificial Sequence: Synthetic oligonucleotide
  Sense strand starting at position 3546 of SEQ ID NO: 587843
uaagaucuguaggugacua

SEQ ID NO: 822647 - RNA, 19 nt, Artificial Sequence
  Description of Artificial Sequence: Synthetic oligonucleotide
  Antisense strand to SEQ ID NO: 822646
uagucaccuacagaucuua

SEQ ID NO: 822648 - RNA, 19 nt, Artificial Sequence
  Description of Artificial Sequence: Synthetic oligonucleotide
  Sense strand starting at position 3556 of SEQ ID NO: 587843
aggugacuaggauguacau

SEQ ID NO: 822649 - RNA, 19 nt, Artificial Sequence
  Description of Artificial Sequence: Synthetic oligonucleotide
  Antisense strand to SEQ ID NO: 822648
auguacauccuagucaccu

SEQ ID NO: 822650 - RNA, 19 nt, Artificial Sequence
  Description of Artificial Sequence: Synthetic oligonucleotide
  Sense strand starting at position 3634 of SEQ ID NO: 587843
gggccagguuuauccuaga

SEQ ID NO: 822651 - RNA, 19 nt, Artificial Sequence
  Description of Artificial Sequence: Synthetic oligonucleotide
  Antisense strand to SEQ ID NO: 822650
ucuaggauaaaccuggccc

SEQ ID NO: 822652 - RNA, 19 nt, Artificial Sequence
  Description of Artificial Sequence: Synthetic oligonucleotide
  Sense strand starting at position 3807 of SEQ ID NO: 587843
gcaucaaggcuuuaacauc

SEQ ID NO: 822653 - RNA, 19 nt, Artificial Sequence
  Description of Artificial Sequence: Synthetic oligonucleotide
  Antisense strand to SEQ ID NO: 822652
gauguuaaagccuugaugc

SEQ ID NO: 822654 - RNA, 19 nt, Artificial Sequence
  Description of Artificial Sequence: Synthetic oligonucleotide
  Sense strand starting at position 3813 of SEQ ID NO: 587843
aggcuuuaacaucagucau

SEQ ID NO: 822655 - RNA, 19 nt, Artificial Sequence
  Description of Artificial Sequence: Synthetic oligonucleotide
  Antisense strand to SEQ ID NO: 822654
augacugauguuaaagccu

SEQ ID NO: 822656 - RNA, 19 nt, Artificial Sequence
  Description of Artificial Sequence: Synthetic oligonucleotide
  Sense strand starting at position 3873 of SEQ ID NO: 587843
ugccuugagccuuaaaccu

SEQ ID NO: 822657 - RNA, 19 nt, Artificial Sequence
  Description of Artificial Sequence: Synthetic oligonucleotide
  Antisense strand to SEQ ID NO: 822656
agguuuaaggcucaaggca

SEQ ID NO: 822658 - RNA, 19 nt, Artificial Sequence
  Description of Artificial Sequence: Synthetic oligonucleotide
  Sense strand starting at position 3881 of SEQ ID NO: 587843
gccuuaaaccuuugggauu

SEQ ID NO: 822659 - RNA, 19 nt, Artificial Sequence
  Description of Artificial Sequence: Synthetic oligonucleotide
  Antisense strand to SEQ ID NO: 822658
aaucccaaagguuuaaggc

SEQ ID NO: 822660 - RNA, 19 nt, Artificial Sequence
  Description of Artificial Sequence: Synthetic oligonucleotide
  Sense strand starting at position 3908 of SEQ ID NO: 587843
gagagaguugaguguauug

SEQ ID NO: 822661 - RNA, 19 nt, Artificial Sequence
  Description of Artificial Sequence: Synthetic oligonucleotide
  Antisense strand to SEQ ID NO: 822660
caauacacucaacucucuc

SEQ ID NO: 822662 - RNA, 19 nt, Artificial Sequence
  Description of Artificial Sequence: Synthetic oligonucleotide
  Sense strand starting at position 3910 of SEQ ID NO: 587843
gagaguugaguguauugau

SEQ ID NO: 822663 - RNA, 19 nt, Artificial Sequence
  Description of Artificial Sequence: Synthetic oligonucleotide
  Antisense strand to SEQ ID NO: 822662
aucaauacacucaacucuc

SEQ ID NO: 822664 - RNA, 19 nt, Artificial Sequence
  Description of Artificial Sequence: Synthetic oligonucleotide
  Sense strand starting at position 3922 of SEQ ID NO: 587843
uauugauaugacugcuaug

SEQ ID NO: 822665 - RNA, 19 nt, Artificial Sequence
  Description of Artificial Sequence: Synthetic oligonucleotide
  Antisense strand to SEQ ID NO: 822664
cauagcagucauaucaaua

SEQ ID NO: 822666 - RNA, 19 nt, Artificial Sequence
  Description of Artificial Sequence: Synthetic oligonucleotide
  Sense strand starting at position 101 of SEQ ID NO: 587844
uucggaaaguccuccucaa

SEQ ID NO: 822667 - RNA, 19 nt, Artificial Sequence
  Description of Artificial Sequence: Synthetic oligonucleotide
  Antisense strand to SEQ ID NO: 822666
uugaggaggacuuuccgaa

SEQ ID NO: 822668 - RNA, 19 nt, Artificial Sequence
  Description of Artificial Sequence: Synthetic oligonucleotide
  Sense strand starting at position 173 of SEQ ID NO: 587844
cacagaucgagugagaugu

SEQ ID NO: 822669 - RNA, 19 nt, Artificial Sequence
  Description of Artificial Sequence: Synthetic oligonucleotide
  Antisense strand to SEQ ID NO: 822668
acaucucacucgaucugug

SEQ ID NO: 822670 - RNA, 19 nt, Artificial Sequence
  Description of Artificial Sequence: Synthetic oligonucleotide
  Sense strand starting at position 177 of SEQ ID NO: 587844
gaucgagugagauguuuac

SEQ ID NO: 822671 - RNA, 19 nt, Artificial Sequence
  Description of Artificial Sequence: Synthetic oligonucleotide
  Antisense strand to SEQ ID NO: 822670
guaaacaucucacucgauc

SEQ ID NO: 822672 - RNA, 19 nt, Artificial Sequence
  Description of Artificial Sequence: Synthetic oligonucleotide
  Sense strand starting at position 181 of SEQ ID NO: 587844
gagugagauguuuacaucu

SEQ ID NO: 822673 - RNA, 19 nt, Artificial Sequence
  Description of Artificial Sequence: Synthetic oligonucleotide
  Antisense strand to SEQ ID NO: 822672
agauguaaacaucucacuc

SEQ ID NO: 822674 - RNA, 19 nt, Artificial Sequence
  Description of Artificial Sequence: Synthetic oligonucleotide
  Sense strand starting at position 253 of SEQ ID NO: 587844
guccaaagugccgaaugaa

SEQ ID NO: 822675 - RNA, 19 nt, Artificial Sequence
  Description of Artificial Sequence: Synthetic oligonucleotide
  Antisense strand to SEQ ID NO: 822674
uucauucggcacuuuggac

SEQ ID NO: 822676 - RNA, 19 nt, Artificial Sequence
  Description of Artificial Sequence: Synthetic oligonucleotide
  Sense strand starting at position 256 of SEQ ID NO: 587844
caaagugccgaaugaaaua

SEQ ID NO: 822677 - RNA, 19 nt, Artificial Sequence
  Description of Artificial Sequence: Synthetic oligonucleotide
  Antisense strand to SEQ ID NO: 822676
uauuucauucggcacuuug

SEQ ID NO: 822678 - RNA, 19 nt, Artificial Sequence
  Description of Artificial Sequence: Synthetic oligonucleotide
  Sense strand starting at position 346 of SEQ ID NO: 587844
uggugagugguuuauguuu

SEQ ID NO: 822679 - RNA, 19 nt, Artificial Sequence
  Description of Artificial Sequence: Synthetic oligonucleotide
  Antisense strand to SEQ ID NO: 822678
aaacauaaaccacucacca

SEQ ID NO: 822680 - RNA, 19 nt, Artificial Sequence
  Description of Artificial Sequence: Synthetic oligonucleotide
  Sense strand starting at position 351 of SEQ ID NO: 587844
agugguuuauguuuaaauc

SEQ ID NO: 822681 - RNA, 19 nt, Artificial Sequence
  Description of Artificial Sequence: Synthetic oligonucleotide
  Antisense strand to SEQ ID NO: 822680
gauuuaaacauaaaccacu

SEQ ID NO: 822682 - RNA, 19 nt, Artificial Sequence
  Description of Artificial Sequence: Synthetic oligonucleotide
  Sense strand starting at position 459 of SEQ ID NO: 587844
cgcacuaaaucugcaggaa

SEQ ID NO: 822683 - RNA, 19 nt, Artificial Sequence
  Description of Artificial Sequence: Synthetic oligonucleotide
  Antisense strand to SEQ ID NO: 822682
uuccugcagauuuagugcg

SEQ ID NO: 822684 - RNA, 19 nt, Artificial Sequence
  Description of Artificial Sequence: Synthetic oligonucleotide
  Sense strand starting at position 698 of SEQ ID NO: 587844
gggaauugcugcuuaauuc

SEQ ID NO: 822685 - RNA, 19 nt, Artificial Sequence
  Description of Artificial Sequence: Synthetic oligonucleotide
  Antisense strand to SEQ ID NO: 822684
gaauuaagcagcaauuccc

SEQ ID NO: 822686 - RNA, 19 nt, Artificial Sequence
  Description of Artificial Sequence: Synthetic oligonucleotide
  Sense strand starting at position 753 of SEQ ID NO: 587844
gagaucuauguuggccuuu

SEQ ID NO: 822687 - RNA, 19 nt, Artificial Sequence
  Description of Artificial Sequence: Synthetic oligonucleotide
  Antisense strand to SEQ ID NO: 822686
aaaggccaacauagaucuc

SEQ ID NO: 822688 - RNA, 19 nt, Artificial Sequence
  Description of Artificial Sequence: Synthetic oligonucleotide
  Sense strand starting at position 864 of SEQ ID NO: 587844
acacuaugcuaggucaagu

SEQ ID NO: 822689 - RNA, 19 nt, Artificial Sequence
  Description of Artificial Sequence: Synthetic oligonucleotide
  Antisense strand to SEQ ID NO: 822688
acuugaccuagcauagugu

SEQ ID NO: 822690 - RNA, 19 nt, Artificial Sequence
  Description of Artificial Sequence: Synthetic oligonucleotide
  Sense strand starting at position 1571 of SEQ ID NO: 587844
aguucagcgcgaucagcau

SEQ ID NO: 822691 - RNA, 19 nt, Artificial Sequence
  Description of Artificial Sequence: Synthetic oligonucleotide
  Antisense strand to SEQ ID NO: 822690
augcugaucgcgcugaacu

SEQ ID NO: 822692 - RNA, 19 nt, Artificial Sequence
  Description of Artificial Sequence: Synthetic oligonucleotide
  Sense strand starting at position 1785 of SEQ ID NO: 587844
aggugauuauaaucaguga

SEQ ID NO: 822693 - RNA, 19 nt, Artificial Sequence
  Description of Artificial Sequence: Synthetic oligonucleotide
  Antisense strand to SEQ ID NO: 822692
ucacugauuauaaucaccu

SEQ ID NO: 822694 - RNA, 19 nt, Artificial Sequence
  Description of Artificial Sequence: Synthetic oligonucleotide
  Sense strand starting at position 2325 of SEQ ID NO: 587844
uucuuuccgagcuguagaa

SEQ ID NO: 822695 - RNA, 19 nt, Artificial Sequence
  Description of Artificial Sequence: Synthetic oligonucleotide
  Antisense strand to SEQ ID NO: 822694
uucuacagcucggaaagaa

SEQ ID NO: 822696 - RNA, 19 nt, Artificial Sequence
  Description of Artificial Sequence: Synthetic oligonucleotide
  Sense strand starting at position 2367 of SEQ ID NO: 587844
aagugauccgaagggaugu

SEQ ID NO: 822697 - RNA, 19 nt, Artificial Sequence
  Description of Artificial Sequence: Synthetic oligonucleotide
  Antisense strand to SEQ ID NO: 822696
acaucccuucggaucacuu

SEQ ID NO: 822698 - RNA, 19 nt, Artificial Sequence
  Description of Artificial Sequence: Synthetic oligonucleotide
  Sense strand starting at position 2392 of SEQ ID NO: 587844
cgcacuuuccgauggagau

SEQ ID NO: 822699 - RNA, 19 nt, Artificial Sequence
  Description of Artificial Sequence: Synthetic oligonucleotide
  Antisense strand to SEQ ID NO: 822698
aucuccaucggaaagugcg

SEQ ID NO: 822700 - RNA, 19 nt, Artificial Sequence
  Description of Artificial Sequence: Synthetic oligonucleotide
  Sense strand starting at position 2393 of SEQ ID NO: 587844
gcacuuuccgauggagaug

SEQ ID NO: 822701 - RNA, 19 nt, Artificial Sequence
  Description of Artificial Sequence: Synthetic oligonucleotide
  Antisense strand to SEQ ID NO: 822700
caucuccaucggaaagugc

SEQ ID NO: 822702 - RNA, 19 nt, Artificial Sequence
  Description of Artificial Sequence: Synthetic oligonucleotide
  Sense strand starting at position 2487 of SEQ ID NO: 587844
cggaguuccuggguccuaa

SEQ ID NO: 822703 - RNA, 19 nt, Artificial Sequence
  Description of Artificial Sequence: Synthetic oligonucleotide
  Antisense strand to SEQ ID NO: 822702
uuaggacccaggaacuccg

SEQ ID NO: 822704 - RNA, 19 nt, Artificial Sequence
  Description of Artificial Sequence: Synthetic oligonucleotide
  Sense strand starting at position 2499 of SEQ ID NO: 587844
guccuaaagccagaaacgu

SEQ ID NO: 822705 - RNA, 19 nt, Artificial Sequence
  Description of Artificial Sequence: Synthetic oligonucleotide
  Antisense strand to SEQ ID NO: 822704
acguuucuggcuuuaggac

SEQ ID NO: 822706 - RNA, 19 nt, Artificial Sequence
  Description of Artificial Sequence: Synthetic oligonucleotide
  Sense strand starting at position 2724 of SEQ ID NO: 587844
aaccuuucugcagggagau

SEQ ID NO: 822707 - RNA, 19 nt, Artificial Sequence
  Description of Artificial Sequence: Synthetic oligonucleotide
  Antisense strand to SEQ ID NO: 822706
aucucccugcagaaagguu

SEQ ID NO: 822708 - RNA, 19 nt, Artificial Sequence
  Description of Artificial Sequence: Synthetic oligonucleotide
  Sense strand starting at position 2881 of SEQ ID NO: 587844
ugaggagugaaauggguau

SEQ ID NO: 822709 - RNA, 19 nt, Artificial Sequence
  Description of Artificial Sequence: Synthetic oligonucleotide
  Antisense strand to SEQ ID NO: 822708
auacccauuucacuccuca

SEQ ID NO: 822710 - RNA, 19 nt, Artificial Sequence
  Description of Artificial Sequence: Synthetic oligonucleotide
  Sense strand starting at position 2894 of SEQ ID NO: 587844
ggguauucccaacagcuuu

SEQ ID NO: 822711 - RNA, 19 nt, Artificial Sequence
  Description of Artificial Sequence: Synthetic oligonucleotide
  Antisense strand to SEQ ID NO: 822710
aaagcuguugggaauaccc

SEQ ID NO: 822712 - RNA, 19 nt, Artificial Sequence
  Description of Artificial Sequence: Synthetic oligonucleotide
  Sense strand starting at position 2979 of SEQ ID NO: 587844
gccugaagugcugaagaag

SEQ ID NO: 822713 - RNA, 19 nt, Artificial Sequence
  Description of Artificial Sequence: Synthetic oligonucleotide
  Antisense strand to SEQ ID NO: 822712
cuucuucagcacuucaggc

SEQ ID NO: 822714 - RNA, 19 nt, Artificial Sequence
  Description of Artificial Sequence: Synthetic oligonucleotide
  Sense strand starting at position 3186 of SEQ ID NO: 587844
ggugaaaucuguccugcau

SEQ ID NO: 822715 - RNA, 19 nt, Artificial Sequence
  Description of Artificial Sequence: Synthetic oligonucleotide
  Antisense strand to SEQ ID NO: 822714
augcaggacagauuucacc

SEQ ID NO: 822716 - RNA, 19 nt, Artificial Sequence
  Description of Artificial Sequence: Synthetic oligonucleotide
  Sense strand starting at position 3273 of SEQ ID NO: 587844
caguaugaaugucuauaga

SEQ ID NO: 822717 - RNA, 19 nt, Artificial Sequence
  Description of Artificial Sequence: Synthetic oligonucleotide
  Antisense strand to SEQ ID NO: 822716
ucuauagacauucauacug

SEQ ID NO: 822718 - RNA, 19 nt, Artificial Sequence
  Description of Artificial Sequence: Synthetic oligonucleotide
  Sense strand starting at position 3375 of SEQ ID NO: 587844
ucagaaauuugaugacuua

SEQ ID NO: 822719 - RNA, 19 nt, Artificial Sequence
  Description of Artificial Sequence: Synthetic oligonucleotide
  Antisense strand to SEQ ID NO: 822718
uaagucaucaaauuucuga

SEQ ID NO: 822720 - RNA, 19 nt, Artificial Sequence
  Description of Artificial Sequence: Synthetic oligonucleotide
  Sense strand starting at position 3490 of SEQ ID NO: 587844
agugguauuuaugugcuaa

SEQ ID NO: 822721 - RNA, 19 nt, Artificial Sequence
  Description of Artificial Sequence: Synthetic oligonucleotide
  Antisense strand to SEQ ID NO: 822720
uuagcacauaaauaccacu

SEQ ID NO: 822722 - RNA, 19 nt, Artificial Sequence
  Description of Artificial Sequence: Synthetic oligonucleotide
  Sense strand starting at position 3491 of SEQ ID NO: 587844
gugguauuuaugugcuaag

SEQ ID NO: 822723 - RNA, 19 nt, Artificial Sequence
  Description of Artificial Sequence: Synthetic oligonucleotide
  Antisense strand to SEQ ID NO: 822722
cuuagcacauaaauaccac

SEQ ID NO: 822724 - RNA, 19 nt, Artificial Sequence
  Description of Artificial Sequence: Synthetic oligonucleotide
  Sense strand starting at position 3494 of SEQ ID NO: 587844
guauuuaugugcuaagaau

SEQ ID NO: 822725 - RNA, 19 nt, Artificial Sequence
  Description of Artificial Sequence: Synthetic oligonucleotide
  Antisense strand to SEQ ID NO: 822724
auucuuagcacauaaauac

SEQ ID NO: 822726 - RNA, 19 nt, Artificial Sequence
  Description of Artificial Sequence: Synthetic oligonucleotide
  Sense strand starting at position 3514 of SEQ ID NO: 587844
ucagcaguaugccuuugau

SEQ ID NO: 822727 - RNA, 19 nt, Artificial Sequence
  Description of Artificial Sequence: Synthetic oligonucleotide
  Antisense strand to SEQ ID NO: 822726
aucaaaggcauacugcuga

SEQ ID NO: 822728 - RNA, 19 nt, Artificial Sequence
  Description of Artificial Sequence: Synthetic oligonucleotide
  Sense strand starting at position 3527 of SEQ ID NO: 587844
uuugaugcaugccugagaa

SEQ ID NO: 822729 - RNA, 19 nt, Artificial Sequence
  Description of Artificial Sequence: Synthetic oligonucleotide
  Antisense strand to SEQ ID NO: 822728
uucucaggcaugcaucaaa

SEQ ID NO: 822730 - RNA, 19 nt, Artificial Sequence
  Description of Artificial Sequence: Synthetic oligonucleotide
  Sense strand starting at position 3529 of SEQ ID NO: 587844
ugaugcaugccugagaaca

SEQ ID NO: 822731 - RNA, 19 nt, Artificial Sequence
  Description of Artificial Sequence: Synthetic oligonucleotide
  Antisense strand to SEQ ID NO: 822730
uguucucaggcaugcauca

SEQ ID NO: 822732 - RNA, 19 nt, Artificial Sequence
  Description of Artificial Sequence: Synthetic oligonucleotide
  Sense strand starting at position 3551 of SEQ ID NO: 587844
aaguaaaucugaguugagg

SEQ ID NO: 822733 - RNA, 19 nt, Artificial Sequence
  Description of Artificial Sequence: Synthetic oligonucleotide
  Antisense strand to SEQ ID NO: 822732
ccucaacucagauuuacuu

SEQ ID NO: 822734 - RNA, 19 nt, Artificial Sequence
  Description of Artificial Sequence: Synthetic oligonucleotide
  Sense strand starting at position 3553 of SEQ ID NO: 587844
guaaaucugaguugagguc

SEQ ID NO: 822735 - RNA, 19 nt, Artificial Sequence
  Description of Artificial Sequence: Synthetic oligonucleotide
  Antisense strand to SEQ ID NO: 822734
gaccucaacucagauuuac

SEQ ID NO: 822736 - RNA, 19 nt, Artificial Sequence
  Description of Artificial Sequence: Synthetic oligonucleotide
  Sense strand starting at position 3737 of SEQ ID NO: 587844
caguguuuggcauaacuug

SEQ ID NO: 822737 - RNA, 19 nt, Artificial Sequence
  Description of Artificial Sequence: Synthetic oligonucleotide
  Antisense strand to SEQ ID NO: 822736
caaguuaugccaaacacug

SEQ ID NO: 822738 - RNA, 19 nt, Artificial Sequence
  Description of Artificial Sequence: Synthetic oligonucleotide
  Sense strand starting at position 3745 of SEQ ID NO: 587844
ggcauaacuugauauuucu

SEQ ID NO: 822739 - RNA, 19 nt, Artificial Sequence
  Description of Artificial Sequence: Synthetic oligonucleotide
  Antisense strand to SEQ ID NO: 822738
agaaauaucaaguuaugcc

SEQ ID NO: 822740 - RNA, 19 nt, Artificial Sequence
  Description of Artificial Sequence: Synthetic oligonucleotide
  Sense strand starting at position 3887 of SEQ ID NO: 587844
aaggaagucuucccuaagu

SEQ ID NO: 822741 - RNA, 19 nt, Artificial Sequence
  Description of Artificial Sequence: Synthetic oligonucleotide
  Antisense strand to SEQ ID NO: 822740
acuuagggaagacuuccuu

SEQ ID NO: 822742 - RNA, 19 nt, Artificial Sequence
  Description of Artificial Sequence: Synthetic oligonucleotide
  Sense strand starting at position 3889 of SEQ ID NO: 587844
ggaagucuucccuaaguaa

SEQ ID NO: 822743 - RNA, 19 nt, Artificial Sequence
  Description of Artificial Sequence: Synthetic oligonucleotide
  Antisense strand to SEQ ID NO: 822742
uuacuuagggaagacuucc

SEQ ID NO: 822744 - RNA, 19 nt, Artificial Sequence
  Description of Artificial Sequence: Synthetic oligonucleotide
  Sense strand starting at position 3921 of SEQ ID NO: 587844
cuugcaaagcuuugagauc

SEQ ID NO: 822745 - RNA, 19 nt, Artificial Sequence
  Description of Artificial Sequence: Synthetic oligonucleotide
  Antisense strand to SEQ ID NO: 822744
gaucucaaagcuuugcaag

SEQ ID NO: 822746 - RNA, 19 nt, Artificial Sequence
  Description of Artificial Sequence: Synthetic oligonucleotide
  Sense strand starting at position 216 of SEQ ID NO: 587845
gggaauugcugcuuaauuc

SEQ ID NO: 822747 - RNA, 19 nt, Artificial Sequence
  Description of Artificial Sequence: Synthetic oligonucleotide
  Antisense strand to SEQ ID NO: 822746
gaauuaagcagcaauuccc

SEQ ID NO: 822748 - RNA, 19 nt, Artificial Sequence
  Description of Artificial Sequence: Synthetic oligonucleotide
  Sense strand starting at position 271 of SEQ ID NO: 587845
gagaucuauguuggccuuu

SEQ ID NO: 822749 - RNA, 19 nt, Artificial Sequence
  Description of Artificial Sequence: Synthetic oligonucleotide
  Antisense strand to SEQ ID NO: 822748
aaaggccaacauagaucuc

SEQ ID NO: 822750 - RNA, 19 nt, Artificial Sequence
  Description of Artificial Sequence: Synthetic oligonucleotide
  Sense strand starting at position 382 of SEQ ID NO: 587845
acacuaugcuaggucaagu

SEQ ID NO: 822751 - RNA, 19 nt, Artificial Sequence
  Description of Artificial Sequence: Synthetic oligonucleotide
  Antisense strand to SEQ ID NO: 822750
acuugaccuagcauagugu

SEQ ID NO: 822752 - RNA, 19 nt, Artificial Sequence
  Description of Artificial Sequence: Synthetic oligonucleotide
  Sense strand starting at position 1089 of SEQ ID NO: 587845
aguucagcgcgaucagcau

SEQ ID NO: 822753 - RNA, 19 nt, Artificial Sequence
  Description of Artificial Sequence: Synthetic oligonucleotide
  Antisense strand to SEQ ID NO: 822752
augcugaucgcgcugaacu

SEQ ID NO: 822754 - RNA, 19 nt, Artificial Sequence
  Description of Artificial Sequence: Synthetic oligonucleotide
  Sense strand starting at position 1303 of SEQ ID NO: 587845
aggugauuauaaucaguga

SEQ ID NO: 822755 - RNA, 19 nt, Artificial Sequence
  Description of Artificial Sequence: Synthetic oligonucleotide
  Antisense strand to SEQ ID NO: 822754
ucacugauuauaaucaccu

SEQ ID NO: 822756 - RNA, 19 nt, Artificial Sequence
  Description of Artificial Sequence: Synthetic oligonucleotide
  Sense strand starting at position 1885 of SEQ ID NO: 587845
aagugauccgaagggaugu

SEQ ID NO: 822757 - RNA, 19 nt, Artificial Sequence
  Description of Artificial Sequence: Synthetic oligonucleotide
  Antisense strand to SEQ ID NO: 822756
acaucccuucggaucacuu

SEQ ID NO: 822758 - RNA, 19 nt, Artificial Sequence
  Description of Artificial Sequence: Synthetic oligonucleotide
  Sense strand starting at position 1911 of SEQ ID NO: 587845
gcacuuuccgauggagaug

SEQ ID NO: 822759 - RNA, 19 nt, Artificial Sequence
  Description of Artificial Sequence: Synthetic oligonucleotide
  Antisense strand to SEQ ID NO: 822758
caucuccaucggaaagugc

SEQ ID NO: 822760 - RNA, 19 nt, Artificial Sequence
  Description of Artificial Sequence: Synthetic oligonucleotide
  Sense strand starting at position 2005 of SEQ ID NO: 587845
cggaguuccuggguccuaa

SEQ ID NO: 822761 - RNA, 19 nt, Artificial Sequence
  Description of Artificial Sequence: Synthetic oligonucleotide
  Antisense strand to SEQ ID NO: 822760
uuaggacccaggaacuccg

SEQ ID NO: 822762 - RNA, 19 nt, Artificial Sequence
  Description of Artificial Sequence: Synthetic oligonucleotide
  Sense strand starting at position 2017 of SEQ ID NO: 587845
guccuaaagccagaaacgu

SEQ ID NO: 822763 - RNA, 19 nt, Artificial Sequence
  Description of Artificial Sequence: Synthetic oligonucleotide
  Antisense strand to SEQ ID NO: 822762
acguuucuggcuuuaggac

SEQ ID NO: 822764 - RNA, 19 nt, Artificial Sequence
  Description of Artificial Sequence: Synthetic oligonucleotide
  Sense strand starting at position 2242 of SEQ ID NO: 587845
aaccuuucugcagggagau

SEQ ID NO: 822765 - RNA, 19 nt, Artificial Sequence
  Description of Artificial Sequence: Synthetic oligonucleotide
  Antisense strand to SEQ ID NO: 822764
aucucccugcagaaagguu

SEQ ID NO: 822766 - RNA, 19 nt, Artificial Sequence
  Description of Artificial Sequence: Synthetic oligonucleotide
  Sense strand starting at position 2399 of SEQ ID NO: 587845
ugaggagugaaauggguau

SEQ ID NO: 822767 - RNA, 19 nt, Artificial Sequence
  Description of Artificial Sequence: Synthetic oligonucleotide
  Antisense strand to SEQ ID NO: 822766
auacccauuucacuccuca

SEQ ID NO: 822768 - RNA, 19 nt, Artificial Sequence
  Description of Artificial Sequence: Synthetic oligonucleotide
  Sense strand starting at position 2412 of SEQ ID NO: 587845
ggguauucccaacagcuuu

SEQ ID NO: 822769 - RNA, 19 nt, Artificial Sequence
  Description of Artificial Sequence: Synthetic oligonucleotide
  Antisense strand to SEQ ID NO: 822768
aaagcuguugggaauaccc

SEQ ID NO: 822770 - RNA, 19 nt, Artificial Sequence
  Description of Artificial Sequence: Synthetic oligonucleotide
  Sense strand starting at position 2497 of SEQ ID NO: 587845
gccugaagugcugaagaag

SEQ ID NO: 822771 - RNA, 19 nt, Artificial Sequence
  Description of Artificial Sequence: Synthetic oligonucleotide
  Antisense strand to SEQ ID NO: 822770
cuucuucagcacuucaggc

SEQ ID NO: 822772 - RNA, 19 nt, Artificial Sequence
  Description of Artificial Sequence: Synthetic oligonucleotide
  Sense strand starting at position 2704 of SEQ ID NO: 587845
ggugaaaucuguccugcau

SEQ ID NO: 822773 - RNA, 19 nt, Artificial Sequence
  Description of Artificial Sequence: Synthetic oligonucleotide
  Antisense strand to SEQ ID NO: 822772
augcaggacagauuucacc

SEQ ID NO: 822774 - RNA, 19 nt, Artificial Sequence
  Description of Artificial Sequence: Synthetic oligonucleotide
  Sense strand starting at position 2791 of SEQ ID NO: 587845
caguaugaaugucuauaga

SEQ ID NO: 822775 - RNA, 19 nt, Artificial Sequence
  Description of Artificial Sequence: Synthetic oligonucleotide
  Antisense strand to SEQ ID NO: 822774
ucuauagacauucauacug

SEQ ID NO: 822776 - RNA, 19 nt, Artificial Sequence
  Description of Artificial Sequence: Synthetic oligonucleotide
  Sense strand starting at position 2893 of SEQ ID NO: 587845
ucagaaauuugaugacuua

SEQ ID NO: 822777 - RNA, 19 nt, Artificial Sequence
  Description of Artificial Sequence: Synthetic oligonucleotide
  Antisense strand to SEQ ID NO: 822776
uaagucaucaaauuucuga

SEQ ID NO: 822778 - RNA, 19 nt, Artificial Sequence
  Description of Artificial Sequence: Synthetic oligonucleotide
  Sense strand starting at position 3008 of SEQ ID NO: 587845
agugguauuuaugugcuaa

SEQ ID NO: 822779 - RNA, 19 nt, Artificial Sequence
  Description of Artificial Sequence: Synthetic oligonucleotide
  Antisense strand to SEQ ID NO: 822778
uuagcacauaaauaccacu

SEQ ID NO: 822780 - RNA, 19 nt, Artificial Sequence
  Description of Artificial Sequence: Synthetic oligonucleotide
  Sense strand starting at position 3009 of SEQ ID NO: 587845
gugguauuuaugugcuaag

SEQ ID NO: 822781 - RNA, 19 nt, Artificial Sequence
  Description of Artificial Sequence: Synthetic oligonucleotide
  Antisense strand to SEQ ID NO: 822780
cuuagcacauaaauaccac

SEQ ID NO: 822782 - RNA, 19 nt, Artificial Sequence
  Description of Artificial Sequence: Synthetic oligonucleotide
  Sense strand starting at position 3045 of SEQ ID NO: 587845
uuugaugcaugccugagaa

SEQ ID NO: 822783 - RNA, 19 nt, Artificial Sequence
  Description of Artificial Sequence: Synthetic oligonucleotide
  Antisense strand to SEQ ID NO: 822782
uucucaggcaugcaucaaa

SEQ ID NO: 822784 - RNA, 19 nt, Artificial Sequence
  Description of Artificial Sequence: Synthetic oligonucleotide
  Sense strand starting at position 3047 of SEQ ID NO: 587845
ugaugcaugccugagaaca

SEQ ID NO: 822785 - RNA, 19 nt, Artificial Sequence
  Description of Artificial Sequence: Synthetic oligonucleotide
  Antisense strand to SEQ ID NO: 822784
uguucucaggcaugcauca

SEQ ID NO: 822786 - RNA, 19 nt, Artificial Sequence
  Description of Artificial Sequence: Synthetic oligonucleotide
  Sense strand starting at position 3069 of SEQ ID NO: 587845
aaguaaaucugaguugagg

SEQ ID NO: 822787 - RNA, 19 nt, Artificial Sequence
  Description of Artificial Sequence: Synthetic oligonucleotide
  Antisense strand to SEQ ID NO: 822786
ccucaacucagauuuacuu

SEQ ID NO: 822788 - RNA, 19 nt, Artificial Sequence
  Description of Artificial Sequence: Synthetic oligonucleotide
  Sense strand starting at position 3071 of SEQ ID NO: 587845
guaaaucugaguugagguc

SEQ ID NO: 822789 - RNA, 19 nt, Artificial Sequence
  Description of Artificial Sequence: Synthetic oligonucleotide
  Antisense strand to SEQ ID NO: 822788
gaccucaacucagauuuac

SEQ ID NO: 822790 - RNA, 19 nt, Artificial Sequence
  Description of Artificial Sequence: Synthetic oligonucleotide
  Sense strand starting at position 3255 of SEQ ID NO: 587845
caguguuuggcauaacuug

SEQ ID NO: 822791 - RNA, 19 nt, Artificial Sequence
  Description of Artificial Sequence: Synthetic oligonucleotide
  Antisense strand to SEQ ID NO: 822790
caaguuaugccaaacacug

SEQ ID NO: 822792 - RNA, 19 nt, Artificial Sequence
  Description of Artificial Sequence: Synthetic oligonucleotide
  Sense strand starting at position 3263 of SEQ ID NO: 587845
ggcauaacuugauauuucu

SEQ ID NO: 822793 - RNA, 19 nt, Artificial Sequence
  Description of Artificial Sequence: Synthetic oligonucleotide
  Antisense strand to SEQ ID NO: 822792
agaaauaucaaguuaugcc

SEQ ID NO: 822794 - RNA, 19 nt, Artificial Sequence
  Description of Artificial Sequence: Synthetic oligonucleotide
  Sense strand starting at position 3405 of SEQ ID NO: 587845
aaggaagucuucccuaagu

SEQ ID NO: 822795 - RNA, 19 nt, Artificial Sequence
  Description of Artificial Sequence: Synthetic oligonucleotide
  Antisense strand to SEQ ID NO: 822794
acuuagggaagacuuccuu

SEQ ID NO: 822796 - RNA, 19 nt, Artificial Sequence
  Description of Artificial Sequence: Synthetic oligonucleotide
  Sense strand starting at position 3407 of SEQ ID NO: 587845
ggaagucuucccuaaguaa

SEQ ID NO: 822797 - RNA, 19 nt, Artificial Sequence
  Description of Artificial Sequence: Synthetic oligonucleotide
  Antisense strand to SEQ ID NO: 822796
uuacuuagggaagacuucc

SEQ ID NO: 822798 - RNA, 19 nt, Artificial Sequence
  Description of Artificial Sequence: Synthetic oligonucleotide
  Sense strand starting at position 3439 of SEQ ID NO: 587845
cuugcaaagcuuugagauc

SEQ ID NO: 822799 - RNA, 19 nt, Artificial Sequence
  Description of Artificial Sequence: Synthetic oligonucleotide
  Antisense strand to SEQ ID NO: 822798
gaucucaaagcuuugcaag

SEQ ID NO: 822800 - RNA, 19 nt, Artificial Sequence
  Description of Artificial Sequence: Synthetic oligonucleotide
  Sense strand starting at position 3552 of SEQ ID NO: 587845
gcgucacuuugggcaauuu

SEQ ID NO: 822801 - RNA, 19 nt, Artificial Sequence
  Description of Artificial Sequence: Synthetic oligonucleotide
  Antisense strand to SEQ ID NO: 822800
aaauugcccaaagugacgc

SEQ ID NO: 822802 - RNA, 19 nt, Artificial Sequence
  Description of Artificial Sequence: Synthetic oligonucleotide
  Sense strand starting at position 3657 of SEQ ID NO: 587845
uucuauuuguacuaggaag

SEQ ID NO: 822803 - RNA, 19 nt, Artificial Sequence
  Description of Artificial Sequence: Synthetic oligonucleotide
  Antisense strand to SEQ ID NO: 822802
cuuccuaguacaaauagaa

SEQ ID NO: 822804 - RNA, 19 nt, Artificial Sequence
  Description of Artificial Sequence: Synthetic oligonucleotide
  Sense strand starting at position 3668 of SEQ ID NO: 587845
cuaggaaguuugcuauggu

SEQ ID NO: 822805 - RNA, 19 nt, Artificial Sequence
  Description of Artificial Sequence: Synthetic oligonucleotide
  Antisense strand to SEQ ID NO: 822804
accauagcaaacuuccuag

SEQ ID NO: 822806 - RNA, 19 nt, Artificial Sequence
  Description of Artificial Sequence: Synthetic oligonucleotide
  Sense strand starting at position 3671 of SEQ ID NO: 587845
ggaaguuugcuaugguauc

SEQ ID NO: 822807 - RNA, 19 nt, Artificial Sequence
  Description of Artificial Sequence: Synthetic oligonucleotide
  Antisense strand to SEQ ID NO: 822806
gauaccauagcaaacuucc

SEQ ID NO: 822808 - RNA, 19 nt, Artificial Sequence
  Description of Artificial Sequence: Synthetic oligonucleotide
  Sense strand starting at position 3681 of SEQ ID NO: 587845
uaugguaucuaaccagugu

SEQ ID NO: 822809 - RNA, 19 nt, Artificial Sequence
  Description of Artificial Sequence: Synthetic oligonucleotide
  Antisense strand to SEQ ID NO: 822808
acacugguuagauaccaua

SEQ ID NO: 822810 - RNA, 19 nt, Artificial Sequence
  Description of Artificial Sequence: Synthetic oligonucleotide
  Sense strand starting at position 3682 of SEQ ID NO: 587845
augguaucuaaccagugua

SEQ ID NO: 822811 - RNA, 19 nt, Artificial Sequence
  Description of Artificial Sequence: Synthetic oligonucleotide
  Antisense strand to SEQ ID NO: 822810
uacacugguuagauaccau

SEQ ID NO: 822812 - RNA, 19 nt, Artificial Sequence
  Description of Artificial Sequence: Synthetic oligonucleotide
  Sense strand starting at position 3701 of SEQ ID NO: 587845
agggcaaacucaucaguga

SEQ ID NO: 822813 - RNA, 19 nt, Artificial Sequence
  Description of Artificial Sequence: Synthetic oligonucleotide
  Antisense strand to SEQ ID NO: 822812
ucacugaugaguuugcccu

SEQ ID NO: 822814 - RNA, 19 nt, Artificial Sequence
  Description of Artificial Sequence: Synthetic oligonucleotide
  Sense strand starting at position 3702 of SEQ ID NO: 587845
gggcaaacucaucagugau

SEQ ID NO: 822815 - RNA, 19 nt, Artificial Sequence
  Description of Artificial Sequence: Synthetic oligonucleotide
  Antisense strand to SEQ ID NO: 822814
aucacugaugaguuugccc

SEQ ID NO: 822816 - RNA, 19 nt, Artificial Sequence
  Description of Artificial Sequence: Synthetic oligonucleotide
  Sense strand starting at position 3720 of SEQ ID NO: 587845
uggguucuuuguguagaaa

SEQ ID NO: 822817 - RNA, 19 nt, Artificial Sequence
  Description of Artificial Sequence: Synthetic oligonucleotide
  Antisense strand to SEQ ID NO: 822816
uuucuacacaaagaaccca

SEQ ID NO: 822818 - RNA, 19 nt, Artificial Sequence
  Description of Artificial Sequence: Synthetic oligonucleotide
  Sense strand starting at position 3721 of SEQ ID NO: 587845
ggguucuuuguguagaaag

SEQ ID NO: 822819 - RNA, 19 nt, Artificial Sequence
  Description of Artificial Sequence: Synthetic oligonucleotide
  Antisense strand to SEQ ID NO: 822818
cuuucuacacaaagaaccc

SEQ ID NO: 822820 - RNA, 19 nt, Artificial Sequence
  Description of Artificial Sequence: Synthetic oligonucleotide
  Sense strand starting at position 3723 of SEQ ID NO: 587845
guucuuuguguagaaagaa

SEQ ID NO: 822821 - RNA, 19 nt, Artificial Sequence
  Description of Artificial Sequence: Synthetic oligonucleotide
  Antisense strand to SEQ ID NO: 822820
uucuuucuacacaaagaac

SEQ ID NO: 822822 - RNA, 19 nt, Artificial Sequence
  Description of Artificial Sequence: Synthetic oligonucleotide
  Sense strand starting at position 3923 of SEQ ID NO: 587845
aguaccacuucuguagaaa

SEQ ID NO: 822823 - RNA, 19 nt, Artificial Sequence
  Description of Artificial Sequence: Synthetic oligonucleotide
  Antisense strand to SEQ ID NO: 822822
uuucuacagaagugguacu

SEQ ID NO: 822824 - RNA, 19 nt, Artificial Sequence
  Description of Artificial Sequence: Synthetic oligonucleotide
  Sense strand starting at position 3945 of SEQ ID NO: 587845
gguuaauguguuuaguaag

SEQ ID NO: 822825 - RNA, 19 nt, Artificial Sequence
  Description of Artificial Sequence: Synthetic oligonucleotide
  Antisense strand to SEQ ID NO: 822824
cuuacuaaacacauuaacc

SEQ ID NO: 822826 - RNA, 19 nt, Artificial Sequence
  Description of Artificial Sequence: Synthetic oligonucleotide
  Sense strand starting at position 80 of SEQ ID NO: 587846
gcaacaaacuggucaccua

SEQ ID NO: 822827 - RNA, 19 nt, Artificial Sequence
  Description of Artificial Sequence: Synthetic oligonucleotide
  Antisense strand to SEQ ID NO: 822826
uaggugaccaguuuguugc

SEQ ID NO: 822828 - RNA, 19 nt, Artificial Sequence
  Description of Artificial Sequence: Synthetic oligonucleotide
  Sense strand starting at position 176 of SEQ ID NO: 587846
augcaagaucuauggcuag

SEQ ID NO: 822829 - RNA, 19 nt, Artificial Sequence
  Description of Artificial Sequence: Synthetic oligonucleotide
  Antisense strand to SEQ ID NO: 822828
cuagccauagaucuugcau

SEQ ID NO: 822830 - RNA, 19 nt, Artificial Sequence
  Description of Artificial Sequence: Synthetic oligonucleotide
  Sense strand starting at position 308 of SEQ ID NO: 587846
gcucuacccuuucugaaag

SEQ ID NO: 822831 - RNA, 19 nt, Artificial Sequence
  Description of Artificial Sequence: Synthetic oligonucleotide
  Antisense strand to SEQ ID NO: 822830
cuuucagaaaggguagagc

SEQ ID NO: 822832 - RNA, 19 nt, Artificial Sequence
  Description of Artificial Sequence: Synthetic oligonucleotide
  Sense strand starting at position 346 of SEQ ID NO: 587846
cauucugucugggugauaa

SEQ ID NO: 822833 - RNA, 19 nt, Artificial Sequence
  Description of Artificial Sequence: Synthetic oligonucleotide
  Antisense strand to SEQ ID NO: 822832
uuaucacccagacagaaug

SEQ ID NO: 822834 - RNA, 19 nt, Artificial Sequence
  Description of Artificial Sequence: Synthetic oligonucleotide
  Sense strand starting at position 414 of SEQ ID NO: 587846
ccaguuggucugugaauuu

SEQ ID NO: 822835 - RNA, 19 nt, Artificial Sequence
  Description of Artificial Sequence: Synthetic oligonucleotide
  Antisense strand to SEQ ID NO: 822834
aaauucacagaccaacugg

SEQ ID NO: 822836 - RNA, 19 nt, Artificial Sequence
  Description of Artificial Sequence: Synthetic oligonucleotide
  Sense strand starting at position 469 of SEQ ID NO: 587846
cugaaaugucaauauguuc

SEQ ID NO: 822837 - RNA, 19 nt, Artificial Sequence
  Description of Artificial Sequence: Synthetic oligonucleotide
  Antisense strand to SEQ ID NO: 822836
gaacauauugacauuucag

SEQ ID NO: 822838 - RNA, 19 nt, Artificial Sequence
  Description of Artificial Sequence: Synthetic oligonucleotide
  Sense strand starting at position 855 of SEQ ID NO: 587846
ugaguugagccauacuaua

SEQ ID NO: 822839 - RNA, 19 nt, Artificial Sequence
  Description of Artificial Sequence: Synthetic oligonucleotide
  Antisense strand to SEQ ID NO: 822838
uauaguauggcucaacuca

SEQ ID NO: 822840 - RNA, 19 nt, Artificial Sequence
  Description of Artificial Sequence: Synthetic oligonucleotide
  Sense strand starting at position 1264 of SEQ ID NO: 587846
gcguccagucaauaaauaa

SEQ ID NO: 822841 - RNA, 19 nt, Artificial Sequence
  Description of Artificial Sequence: Synthetic oligonucleotide
  Antisense strand to SEQ ID NO: 822840
uuauuuauugacuggacgc

SEQ ID NO: 822842 - RNA, 19 nt, Artificial Sequence
  Description of Artificial Sequence: Synthetic oligonucleotide
  Sense strand starting at position 1380 of SEQ ID NO: 587846
gaguccugucuggauagca

SEQ ID NO: 822843 - RNA, 19 nt, Artificial Sequence
  Description of Artificial Sequence: Synthetic oligonucleotide
  Antisense strand to SEQ ID NO: 822842
ugcuauccagacaggacuc

SEQ ID NO: 822844 - RNA, 19 nt, Artificial Sequence
  Description of Artificial Sequence: Synthetic oligonucleotide
  Sense strand starting at position 1745 of SEQ ID NO: 587846
cgcggcuuuguauucauua

SEQ ID NO: 822845 - RNA, 19 nt, Artificial Sequence
  Description of Artificial Sequence: Synthetic oligonucleotide
  Antisense strand to SEQ ID NO: 822844
uaaugaauacaaagccgcg

SEQ ID NO: 822846 - RNA, 19 nt, Artificial Sequence
  Description of Artificial Sequence: Synthetic oligonucleotide
  Sense strand starting at position 1863 of SEQ ID NO: 587846
gugcaucagggugauuaca

SEQ ID NO: 822847 - RNA, 19 nt, Artificial Sequence
  Description of Artificial Sequence: Synthetic oligonucleotide
  Antisense strand to SEQ ID NO: 822846
uguaaucacccugaugcac

SEQ ID NO: 822848 - RNA, 19 nt, Artificial Sequence
  Description of Artificial Sequence: Synthetic oligonucleotide
  Sense strand starting at position 1865 of SEQ ID NO: 587846
gcaucagggugauuacaau

SEQ ID NO: 822849 - RNA, 19 nt, Artificial Sequence
  Description of Artificial Sequence: Synthetic oligonucleotide
  Antisense strand to SEQ ID NO: 822848
auuguaaucacccugaugc

SEQ ID NO: 822850 - RNA, 19 nt, Artificial Sequence
  Description of Artificial Sequence: Synthetic oligonucleotide
  Sense strand starting at position 1871 of SEQ ID NO: 587846
gggugauuacaauaucagc

SEQ ID NO: 822851 - RNA, 19 nt, Artificial Sequence
  Description of Artificial Sequence: Synthetic oligonucleotide
  Antisense strand to SEQ ID NO: 822850
gcugauauuguaaucaccc

SEQ ID NO: 822852 - RNA, 19 nt, Artificial Sequence
  Description of Artificial Sequence: Synthetic oligonucleotide
  Sense strand starting at position 2094 of SEQ ID NO: 587846
uaaggcuaucugggaauga

SEQ ID NO: 822853 - RNA, 19 nt, Artificial Sequence
  Description of Artificial Sequence: Synthetic oligonucleotide
  Antisense strand to SEQ ID NO: 822852
ucauucccagauagccuua

SEQ ID NO: 822854 - RNA, 19 nt, Artificial Sequence
  Description of Artificial Sequence: Synthetic oligonucleotide
  Sense strand starting at position 2120 of SEQ ID NO: 587846
gcuagaagucgccugcaug

SEQ ID NO: 822855 - RNA, 19 nt, Artificial Sequence
  Description of Artificial Sequence: Synthetic oligonucleotide
  Antisense strand to SEQ ID NO: 822854
caugcaggcgacuucuagc

SEQ ID NO: 822856 - RNA, 19 nt, Artificial Sequence
  Description of Artificial Sequence: Synthetic oligonucleotide
  Sense strand starting at position 2183 of SEQ ID NO: 587846
acuguauuucccugcucca

SEQ ID NO: 822857 - RNA, 19 nt, Artificial Sequence
  Description of Artificial Sequence: Synthetic oligonucleotide
  Antisense strand to SEQ ID NO: 822856
uggagcagggaaauacagu

SEQ ID NO: 822858 - RNA, 19 nt, Artificial Sequence
  Description of Artificial Sequence: Synthetic oligonucleotide
  Sense strand starting at position 2210 of SEQ ID NO: 587846
cuggaacauguucgagauu

SEQ ID NO: 822859 - RNA, 19 nt, Artificial Sequence
  Description of Artificial Sequence: Synthetic oligonucleotide
  Antisense strand to SEQ ID NO: 822858
aaucucgaacauguuccag

SEQ ID NO: 822860 - RNA, 19 nt, Artificial Sequence
  Description of Artificial Sequence: Synthetic oligonucleotide
  Sense strand starting at position 2213 of SEQ ID NO: 587846
gaacauguucgagauucug

SEQ ID NO: 822861 - RNA, 19 nt, Artificial Sequence
  Description of Artificial Sequence: Synthetic oligonucleotide
  Antisense strand to SEQ ID NO: 822860
cagaaucucgaacauguuc

SEQ ID NO: 822862 - RNA, 19 nt, Artificial Sequence
  Description of Artificial Sequence: Synthetic oligonucleotide
  Sense strand starting at position 2224 of SEQ ID NO: 587846
agauucugucaaggucaga

SEQ ID NO: 822863 - RNA, 19 nt, Artificial Sequence
  Description of Artificial Sequence: Synthetic oligonucleotide
  Antisense strand to SEQ ID NO: 822862
ucugaccuugacagaaucu

SEQ ID NO: 822864 - RNA, 19 nt, Artificial Sequence
  Description of Artificial Sequence: Synthetic oligonucleotide
  Sense strand starting at position 2336 of SEQ ID NO: 587846
gagucuauagagcaguuaa

SEQ ID NO: 822865 - RNA, 19 nt, Artificial Sequence
  Description of Artificial Sequence: Synthetic oligonucleotide
  Antisense strand to SEQ ID NO: 822864
uuaacugcucuauagacuc

SEQ ID NO: 822866 - RNA, 19 nt, Artificial Sequence
  Description of Artificial Sequence: Synthetic oligonucleotide
  Sense strand starting at position 2533 of SEQ ID NO: 587846
gaacacuugugauugguag

SEQ ID NO: 822867 - RNA, 19 nt, Artificial Sequence
  Description of Artificial Sequence: Synthetic oligonucleotide
  Antisense strand to SEQ ID NO: 822866
cuaccaaucacaaguguuc

SEQ ID NO: 822868 - RNA, 19 nt, Artificial Sequence
  Description of Artificial Sequence: Synthetic oligonucleotide
  Sense strand starting at position 2601 of SEQ ID NO: 587846
ggaggaggcuccuuaugug

SEQ ID NO: 822869 - RNA, 19 nt, Artificial Sequence
  Description of Artificial Sequence: Synthetic oligonucleotide
  Antisense strand to SEQ ID NO: 822868
cacauaaggagccuccucc

SEQ ID NO: 822870 - RNA, 19 nt, Artificial Sequence
  Description of Artificial Sequence: Synthetic oligonucleotide
  Sense strand starting at position 2664 of SEQ ID NO: 587846
caaucaaucucggcuugag

SEQ ID NO: 822871 - RNA, 19 nt, Artificial Sequence
  Description of Artificial Sequence: Synthetic oligonucleotide
  Antisense strand to SEQ ID NO: 822870
cucaagccgagauugauug

SEQ ID NO: 822872 - RNA, 19 nt, Artificial Sequence
  Description of Artificial Sequence: Synthetic oligonucleotide
  Sense strand starting at position 2869 of SEQ ID NO: 587846
ugaucagcuccuuaaugga

SEQ ID NO: 822873 - RNA, 19 nt, Artificial Sequence
  Description of Artificial Sequence: Synthetic oligonucleotide
  Antisense strand to SEQ ID NO: 822872
uccauuaaggagcugauca

SEQ ID NO: 822874 - RNA, 19 nt, Artificial Sequence
  Description of Artificial Sequence: Synthetic oligonucleotide
  Sense strand starting at position 2877 of SEQ ID NO: 587846
uccuuaauggagugcagau

SEQ ID NO: 822875 - RNA, 19 nt, Artificial Sequence
  Description of Artificial Sequence: Synthetic oligonucleotide
  Antisense strand to SEQ ID NO: 822874
aucugcacuccauuaagga

SEQ ID NO: 822876 - RNA, 19 nt, Artificial Sequence
  Description of Artificial Sequence: Synthetic oligonucleotide
  Sense strand starting at position 2930 of SEQ ID NO: 587846
ggaaguauuugguugugcu

SEQ ID NO: 822877 - RNA, 19 nt, Artificial Sequence
  Description of Artificial Sequence: Synthetic oligonucleotide
  Antisense strand to SEQ ID NO: 822876
agcacaaccaaauacuucc

SEQ ID NO: 822878 - RNA, 19 nt, Artificial Sequence
  Description of Artificial Sequence: Synthetic oligonucleotide
  Sense strand starting at position 2931 of SEQ ID NO: 587846
gaaguauuugguugugcug

SEQ ID NO: 822879 - RNA, 19 nt, Artificial Sequence
  Description of Artificial Sequence: Synthetic oligonucleotide
  Antisense strand to SEQ ID NO: 822878
cagcacaaccaaauacuuc

SEQ ID NO: 822880 - RNA, 19 nt, Artificial Sequence
  Description of Artificial Sequence: Synthetic oligonucleotide
  Sense strand starting at position 2940 of SEQ ID NO: 587846
gguugugcuguguuucaag

SEQ ID NO: 822881 - RNA, 19 nt, Artificial Sequence
  Description of Artificial Sequence: Synthetic oligonucleotide
  Antisense strand to SEQ ID NO: 822880
cuugaaacacagcacaacc

SEQ ID NO: 822882 - RNA, 19 nt, Artificial Sequence
  Description of Artificial Sequence: Synthetic oligonucleotide
  Sense strand starting at position 2960 of SEQ ID NO: 587846
cacugaagcuugguuaaga

SEQ ID NO: 822883 - RNA, 19 nt, Artificial Sequence
  Description of Artificial Sequence: Synthetic oligonucleotide
  Antisense strand to SEQ ID NO: 822882
ucuuaaccaagcuucagug

SEQ ID NO: 822884 - RNA, 19 nt, Artificial Sequence
  Description of Artificial Sequence: Synthetic oligonucleotide
  Sense strand starting at position 2961 of SEQ ID NO: 587846
acugaagcuugguuaagaa

SEQ ID NO: 822885 - RNA, 19 nt, Artificial Sequence
  Description of Artificial Sequence: Synthetic oligonucleotide
  Antisense strand to SEQ ID NO: 822884
uucuuaaccaagcuucagu

SEQ ID NO: 822886 - RNA, 19 nt, Artificial Sequence
  Description of Artificial Sequence: Synthetic oligonucleotide
  Sense strand starting at position 3001 of SEQ ID NO: 587846
gugaguucagaaugaagga

SEQ ID NO: 822887 - RNA, 19 nt, Artificial Sequence
  Description of Artificial Sequence: Synthetic oligonucleotide
  Antisense strand to SEQ ID NO: 822886
uccuucauucugaacucac

SEQ ID NO: 822888 - RNA, 19 nt, Artificial Sequence
  Description of Artificial Sequence: Synthetic oligonucleotide
  Sense strand starting at position 3142 of SEQ ID NO: 587846
uaaggcuagugaguagaaa

SEQ ID NO: 822889 - RNA, 19 nt, Artificial Sequence
  Description of Artificial Sequence: Synthetic oligonucleotide
  Antisense strand to SEQ ID NO: 822888
uuucuacucacuagccuua

SEQ ID NO: 822890 - RNA, 19 nt, Artificial Sequence
  Description of Artificial Sequence: Synthetic oligonucleotide
  Sense strand starting at position 3234 of SEQ ID NO: 587846
ggagaagcauuguuuaauc

SEQ ID NO: 822891 - RNA, 19 nt, Artificial Sequence
  Description of Artificial Sequence: Synthetic oligonucleotide
  Antisense strand to SEQ ID NO: 822890
gauuaaacaaugcuucucc

SEQ ID NO: 822892 - RNA, 19 nt, Artificial Sequence
  Description of Artificial Sequence: Synthetic oligonucleotide
  Sense strand starting at position 3449 of SEQ ID NO: 587846
ucaugcaaugaaugucaga

SEQ ID NO: 822893 - RNA, 19 nt, Artificial Sequence
  Description of Artificial Sequence: Synthetic oligonucleotide
  Antisense strand to SEQ ID NO: 822892
ucugacauucauugcauga

SEQ ID NO: 822894 - RNA, 19 nt, Artificial Sequence
  Description of Artificial Sequence: Synthetic oligonucleotide
  Sense strand starting at position 3492 of SEQ ID NO: 587846
ccaguaauccaauaacgug

SEQ ID NO: 822895 - RNA, 19 nt, Artificial Sequence
  Description of Artificial Sequence: Synthetic oligonucleotide
  Antisense strand to SEQ ID NO: 822894
cacguuauuggauuacugg

SEQ ID NO: 822896 - RNA, 19 nt, Artificial Sequence
  Description of Artificial Sequence: Synthetic oligonucleotide
  Sense strand starting at position 3523 of SEQ ID NO: 587846
guaucacugagacgagaac

SEQ ID NO: 822897 - RNA, 19 nt, Artificial Sequence
  Description of Artificial Sequence: Synthetic oligonucleotide
  Antisense strand to SEQ ID NO: 822896
guucucgucucagugauac

SEQ ID NO: 822898 - RNA, 19 nt, Artificial Sequence
  Description of Artificial Sequence: Synthetic oligonucleotide
  Sense strand starting at position 3649 of SEQ ID NO: 587846
gugagcuuuaaauggguga

SEQ ID NO: 822899 - RNA, 19 nt, Artificial Sequence
  Description of Artificial Sequence: Synthetic oligonucleotide
  Antisense strand to SEQ ID NO: 822898
ucacccauuuaaagcucac

SEQ ID NO: 822900 - RNA, 19 nt, Artificial Sequence
  Description of Artificial Sequence: Synthetic oligonucleotide
  Sense strand starting at position 3650 of SEQ ID NO: 587846
ugagcuuuaaaugggugaa

SEQ ID NO: 822901 - RNA, 19 nt, Artificial Sequence
  Description of Artificial Sequence: Synthetic oligonucleotide
  Antisense strand to SEQ ID NO: 822900
uucacccauuuaaagcuca

SEQ ID NO: 822902 - RNA, 19 nt, Artificial Sequence
  Description of Artificial Sequence: Synthetic oligonucleotide
  Sense strand starting at position 3829 of SEQ ID NO: 587846
uuaguuagaucagcuugga

SEQ ID NO: 822903 - RNA, 19 nt, Artificial Sequence
  Description of Artificial Sequence: Synthetic oligonucleotide
  Antisense strand to SEQ ID NO: 822902
uccaagcugaucuaacuaa

SEQ ID NO: 822904 - RNA, 19 nt, Artificial Sequence
  Description of Artificial Sequence: Synthetic oligonucleotide
  Sense strand starting at position 3832 of SEQ ID NO: 587846
guuagaucagcuuggacac

SEQ ID NO: 822905 - RNA, 19 nt, Artificial Sequence
  Description of Artificial Sequence: Synthetic oligonucleotide
  Antisense strand to SEQ ID NO: 822904
guguccaagcugaucuaac

SEQ ID NO: 822906 - RNA, 19 nt, Artificial Sequence
  Description of Artificial Sequence: Synthetic oligonucleotide
  Sense strand starting at position 282 of SEQ ID NO: 587847
ucuuaaaguccaggcuaga

SEQ ID NO: 822907 - RNA, 19 nt, Artificial Sequence
  Description of Artificial Sequence: Synthetic oligonucleotide
  Antisense strand to SEQ ID NO: 822906
ucuagccuggacuuuaaga

SEQ ID NO: 822908 - RNA, 19 nt, Artificial Sequence
  Description of Artificial Sequence: Synthetic oligonucleotide
  Sense strand starting at position 434 of SEQ ID NO: 587847
uuucuuugaguaugugaau

SEQ ID NO: 822909 - RNA, 19 nt, Artificial Sequence
  Description of Artificial Sequence: Synthetic oligonucleotide
  Antisense strand to SEQ ID NO: 822908
auucacauacucaaagaaa

SEQ ID NO: 822910 - RNA, 19 nt, Artificial Sequence
  Description of Artificial Sequence: Synthetic oligonucleotide
  Sense strand starting at position 435 of SEQ ID NO: 587847
uucuuugaguaugugaauu

SEQ ID NO: 822911 - RNA, 19 nt, Artificial Sequence
  Description of Artificial Sequence: Synthetic oligonucleotide
  Antisense strand to SEQ ID NO: 822910
aauucacauacucaaagaa

SEQ ID NO: 822912 - RNA, 19 nt, Artificial Sequence
  Description of Artificial Sequence: Synthetic oligonucleotide
  Sense strand starting at position 449 of SEQ ID NO: 587847
gaauucuagugugcuauaa

SEQ ID NO: 822913 - RNA, 19 nt, Artificial Sequence
  Description of Artificial Sequence: Synthetic oligonucleotide
  Antisense strand to SEQ ID NO: 822912
uuauagcacacuagaauuc

SEQ ID NO: 822914 - RNA, 19 nt, Artificial Sequence
  Description of Artificial Sequence: Synthetic oligonucleotide
  Sense strand starting at position 458 of SEQ ID NO: 587847
ugugcuauaaugugagaau

SEQ ID NO: 822915 - RNA, 19 nt, Artificial Sequence
  Description of Artificial Sequence: Synthetic oligonucleotide
  Antisense strand to SEQ ID NO: 822914
auucucacauuauagcaca

SEQ ID NO: 822916 - RNA, 19 nt, Artificial Sequence
  Description of Artificial Sequence: Synthetic oligonucleotide
  Sense strand starting at position 832 of SEQ ID NO: 587847
acuaaauuguagcuaugga

SEQ ID NO: 822917 - RNA, 19 nt, Artificial Sequence
  Description of Artificial Sequence: Synthetic oligonucleotide
  Antisense strand to SEQ ID NO: 822916
uccauagcuacaauuuagu

SEQ ID NO: 822918 - RNA, 19 nt, Artificial Sequence
  Description of Artificial Sequence: Synthetic oligonucleotide
  Sense strand starting at position 862 of SEQ ID NO: 587847
ggcuaacauccaugucuaa

SEQ ID NO: 822919 - RNA, 19 nt, Artificial Sequence
  Description of Artificial Sequence: Synthetic oligonucleotide
  Antisense strand to SEQ ID NO: 822918
uuagacauggauguuagcc

SEQ ID NO: 822920 - RNA, 19 nt, Artificial Sequence
  Description of Artificial Sequence: Synthetic oligonucleotide
  Sense strand starting at position 907 of SEQ ID NO: 587847
agguuaaugcagcagaauu

SEQ ID NO: 822921 - RNA, 19 nt, Artificial Sequence
  Description of Artificial Sequence: Synthetic oligonucleotide
  Antisense strand to SEQ ID NO: 822920
aauucugcugcauuaaccu

SEQ ID NO: 822922 - RNA, 19 nt, Artificial Sequence
  Description of Artificial Sequence: Synthetic oligonucleotide
  Sense strand starting at position 1069 of SEQ ID NO: 587847
ggcccuaaucuauaauuag

SEQ ID NO: 822923 - RNA, 19 nt, Artificial Sequence
  Description of Artificial Sequence: Synthetic oligonucleotide
  Antisense strand to SEQ ID NO: 822922
cuaauuauagauuagggcc

SEQ ID NO: 822924 - RNA, 19 nt, Artificial Sequence
  Description of Artificial Sequence: Synthetic oligonucleotide
  Sense strand starting at position 1131 of SEQ ID NO: 587847
cuggaaauggugcaaagua

SEQ ID NO: 822925 - RNA, 19 nt, Artificial Sequence
  Description of Artificial Sequence: Synthetic oligonucleotide
  Antisense strand to SEQ ID NO: 822924
uacuuugcaccauuuccag

SEQ ID NO: 822926 - RNA, 19 nt, Artificial Sequence
  Description of Artificial Sequence: Synthetic oligonucleotide
  Sense strand starting at position 1219 of SEQ ID NO: 587847
ugaacuaauguuugcuuua

SEQ ID NO: 822927 - RNA, 19 nt, Artificial Sequence
  Description of Artificial Sequence: Synthetic oligonucleotide
  Antisense strand to SEQ ID NO: 822926
uaaagcaaacauuaguuca

SEQ ID NO: 822928 - RNA, 19 nt, Artificial Sequence
  Description of Artificial Sequence: Synthetic oligonucleotide
  Sense strand starting at position 1279 of SEQ ID NO: 587847
uauauuaauggcuguggaa

SEQ ID NO: 822929 - RNA, 19 nt, Artificial Sequence
  Description of Artificial Sequence: Synthetic oligonucleotide
  Antisense strand to SEQ ID NO: 822928
uuccacagccauuaauaua

SEQ ID NO: 822930 - RNA, 19 nt, Artificial Sequence
  Description of Artificial Sequence: Synthetic oligonucleotide
  Sense strand starting at position 1308 of SEQ ID NO: 587847
guuggaaggugucucuaga

SEQ ID NO: 822931 - RNA, 19 nt, Artificial Sequence
  Description of Artificial Sequence: Synthetic oligonucleotide
  Antisense strand to SEQ ID NO: 822930
ucuagagacaccuuccaac

SEQ ID NO: 822932 - RNA, 19 nt, Artificial Sequence
  Description of Artificial Sequence: Synthetic oligonucleotide
  Sense strand starting at position 1332 of SEQ ID NO: 587847
auaaauagcuuauucugga

SEQ ID NO: 822933 - RNA, 19 nt, Artificial Sequence
  Description of Artificial Sequence: Synthetic oligonucleotide
  Antisense strand to SEQ ID NO: 822932
uccagaauaagcuauuuau

SEQ ID NO: 822934 - RNA, 19 nt, Artificial Sequence
  Description of Artificial Sequence: Synthetic oligonucleotide
  Sense strand starting at position 1366 of SEQ ID NO: 587847
gacagauaauacuuagguu

SEQ ID NO: 822935 - RNA, 19 nt, Artificial Sequence
  Description of Artificial Sequence: Synthetic oligonucleotide
  Antisense strand to SEQ ID NO: 822934
aaccuaaguauuaucuguc

SEQ ID NO: 822936 - RNA, 19 nt, Artificial Sequence
  Description of Artificial Sequence: Synthetic oligonucleotide
  Sense strand starting at position 1578 of SEQ ID NO: 587847
aggauauguuaacuuaguu

SEQ ID NO: 822937 - RNA, 19 nt, Artificial Sequence
  Description of Artificial Sequence: Synthetic oligonucleotide
  Antisense strand to SEQ ID NO: 822936
aacuaaguuaacauauccu

SEQ ID NO: 822938 - RNA, 19 nt, Artificial Sequence
  Description of Artificial Sequence: Synthetic oligonucleotide
  Sense strand starting at position 1776 of SEQ ID NO: 587847
ucaauaaagucuguggauc

SEQ ID NO: 822939 - RNA, 19 nt, Artificial Sequence
  Description of Artificial Sequence: Synthetic oligonucleotide
  Antisense strand to SEQ ID NO: 822938
gauccacagacuuuauuga

SEQ ID NO: 822940 - RNA, 19 nt, Artificial Sequence
  Description of Artificial Sequence: Synthetic oligonucleotide
  Sense strand starting at position 1777 of SEQ ID NO: 587847
caauaaagucuguggauca

SEQ ID NO: 822941 - RNA, 19 nt, Artificial Sequence
  Description of Artificial Sequence: Synthetic oligonucleotide
  Antisense strand to SEQ ID NO: 822940
ugauccacagacuuuauug

SEQ ID NO: 822942 - RNA, 19 nt, Artificial Sequence
  Description of Artificial Sequence: Synthetic oligonucleotide
  Sense strand starting at position 1782 of SEQ ID NO: 587847
aagucuguggaucacuaua

SEQ ID NO: 822943 - RNA, 19 nt, Artificial Sequence
  Description of Artificial Sequence: Synthetic oligonucleotide
  Antisense strand to SEQ ID NO: 822942
uauagugauccacagacuu

SEQ ID NO: 822944 - RNA, 19 nt, Artificial Sequence
  Description of Artificial Sequence: Synthetic oligonucleotide
  Sense strand starting at position 1804 of SEQ ID NO: 587847
ugaauaagguguccauaaa

SEQ ID NO: 822945 - RNA, 19 nt, Artificial Sequence
  Description of Artificial Sequence: Synthetic oligonucleotide
  Antisense strand to SEQ ID NO: 822944
uuuauggacaccuuauuca

SEQ ID NO: 822946 - RNA, 19 nt, Artificial Sequence
  Description of Artificial Sequence: Synthetic oligonucleotide
  Sense strand starting at position 1892 of SEQ ID NO: 587847
aguaauagacuccggcaaa

SEQ ID NO: 822947 - RNA, 19 nt, Artificial Sequence
  Description of Artificial Sequence: Synthetic oligonucleotide
  Antisense strand to SEQ ID NO: 822946
uuugccggagucuauuacu

SEQ ID NO: 822948 - RNA, 19 nt, Artificial Sequence
  Description of Artificial Sequence: Synthetic oligonucleotide
  Sense strand starting at position 2010 of SEQ ID NO: 587847
ugaagaaggcuuugcauuc

SEQ ID NO: 822949 - RNA, 19 nt, Artificial Sequence
  Description of Artificial Sequence: Synthetic oligonucleotide
  Antisense strand to SEQ ID NO: 822948
gaaugcaaagccuucuuca

SEQ ID NO: 822950 - RNA, 19 nt, Artificial Sequence
  Description of Artificial Sequence: Synthetic oligonucleotide
  Sense strand starting at position 2077 of SEQ ID NO: 587847
gacagugaagaauguccua

SEQ ID NO: 822951 - RNA, 19 nt, Artificial Sequence
  Description of Artificial Sequence: Synthetic oligonucleotide
  Antisense strand to SEQ ID NO: 822950
uaggacauucuucacuguc

SEQ ID NO: 822952 - RNA, 19 nt, Artificial Sequence
  Description of Artificial Sequence: Synthetic oligonucleotide
  Sense strand starting at position 2129 of SEQ ID NO: 587847
agcauuucuuucuugugau

SEQ ID NO: 822953 - RNA, 19 nt, Artificial Sequence
  Description of Artificial Sequence: Synthetic oligonucleotide
  Antisense strand to SEQ ID NO: 822952
aucacaagaaagaaaugcu

SEQ ID NO: 822954 - RNA, 19 nt, Artificial Sequence
  Description of Artificial Sequence: Synthetic oligonucleotide
  Sense strand starting at position 2571 of SEQ ID NO: 587847
cuuugaguuguacaaacau

SEQ ID NO: 822955 - RNA, 19 nt, Artificial Sequence
  Description of Artificial Sequence: Synthetic oligonucleotide
  Antisense strand to SEQ ID NO: 822954
auguuuguacaacucaaag

SEQ ID NO: 822956 - RNA, 19 nt, Artificial Sequence
  Description of Artificial Sequence: Synthetic oligonucleotide
  Sense strand starting at position 2789 of SEQ ID NO: 587847
uuaugcacccaguauaaga

SEQ ID NO: 822957 - RNA, 19 nt, Artificial Sequence
  Description of Artificial Sequence: Synthetic oligonucleotide
  Antisense strand to SEQ ID NO: 822956
ucuuauacugggugcauaa

SEQ ID NO: 822958 - RNA, 19 nt, Artificial Sequence
  Description of Artificial Sequence: Synthetic oligonucleotide
  Sense strand starting at position 2800 of SEQ ID NO: 587847
guauaagacugauugguug

SEQ ID NO: 822959 - RNA, 19 nt, Artificial Sequence
  Description of Artificial Sequence: Synthetic oligonucleotide
  Antisense strand to SEQ ID NO: 822958
caaccaaucagucuuauac

SEQ ID NO: 822960 - RNA, 19 nt, Artificial Sequence
  Description of Artificial Sequence: Synthetic oligonucleotide
  Sense strand starting at position 2802 of SEQ ID NO: 587847
auaagacugauugguuguu

SEQ ID NO: 822961 - RNA, 19 nt, Artificial Sequence
  Description of Artificial Sequence: Synthetic oligonucleotide
  Antisense strand to SEQ ID NO: 822960
aacaaccaaucagucuuau

SEQ ID NO: 822962 - RNA, 19 nt, Artificial Sequence
  Description of Artificial Sequence: Synthetic oligonucleotide
  Sense strand starting at position 2958 of SEQ ID NO: 587847
gauuacuauugggugagau

SEQ ID NO: 822963 - RNA, 19 nt, Artificial Sequence
  Description of Artificial Sequence: Synthetic oligonucleotide
  Antisense strand to SEQ ID NO: 822962
aucucacccaauaguaauc

SEQ ID NO: 822964 - RNA, 19 nt, Artificial Sequence
  Description of Artificial Sequence: Synthetic oligonucleotide
  Sense strand starting at position 2959 of SEQ ID NO: 587847
auuacuauugggugagauu

SEQ ID NO: 822965 - RNA, 19 nt, Artificial Sequence
  Description of Artificial Sequence: Synthetic oligonucleotide
  Antisense strand to SEQ ID NO: 822964
aaucucacccaauaguaau

SEQ ID NO: 822966 - RNA, 19 nt, Artificial Sequence
  Description of Artificial Sequence: Synthetic oligonucleotide
  Sense strand starting at position 2978 of SEQ ID NO: 587847
gucagacuucucugaaaca

SEQ ID NO: 822967 - RNA, 19 nt, Artificial Sequence
  Description of Artificial Sequence: Synthetic oligonucleotide
  Antisense strand to SEQ ID NO: 822966
uguuucagagaagucugac

SEQ ID NO: 822968 - RNA, 19 nt, Artificial Sequence
  Description of Artificial Sequence: Synthetic oligonucleotide
  Sense strand starting at position 3124 of SEQ ID NO: 587847
auuugcuucuguguauaca

SEQ ID NO: 822969 - RNA, 19 nt, Artificial Sequence
  Description of Artificial Sequence: Synthetic oligonucleotide
  Antisense strand to SEQ ID NO: 822968
uguauacacagaagcaaau

SEQ ID NO: 822970 - RNA, 19 nt, Artificial Sequence
  Description of Artificial Sequence: Synthetic oligonucleotide
  Sense strand starting at position 3172 of SEQ ID NO: 587847
gggcuauguuaguuuaaga

SEQ ID NO: 822971 - RNA, 19 nt, Artificial Sequence
  Description of Artificial Sequence: Synthetic oligonucleotide
  Antisense strand to SEQ ID NO: 822970
ucuuaaacuaacauagccc

SEQ ID NO: 822972 - RNA, 19 nt, Artificial Sequence
  Description of Artificial Sequence: Synthetic oligonucleotide
  Sense strand starting at position 3190 of SEQ ID NO: 587847
aaacaaugguguuugguga

SEQ ID NO: 822973 - RNA, 19 nt, Artificial Sequence
  Description of Artificial Sequence: Synthetic oligonucleotide
  Antisense strand to SEQ ID NO: 822972
ucaccaaacaccauuguuu

SEQ ID NO: 822974 - RNA, 19 nt, Artificial Sequence
  Description of Artificial Sequence: Synthetic oligonucleotide
  Sense strand starting at position 3316 of SEQ ID NO: 587847
ccguuuaucacagagaagc

SEQ ID NO: 822975 - RNA, 19 nt, Artificial Sequence
  Description of Artificial Sequence: Synthetic oligonucleotide
  Antisense strand to SEQ ID NO: 822974
gcuucucugugauaaacgg

SEQ ID NO: 822976 - RNA, 19 nt, Artificial Sequence
  Description of Artificial Sequence: Synthetic oligonucleotide
  Sense strand starting at position 3324 of SEQ ID NO: 587847
cacagagaagcuggucaau

SEQ ID NO: 822977 - RNA, 19 nt, Artificial Sequence
  Description of Artificial Sequence: Synthetic oligonucleotide
  Antisense strand to SEQ ID NO: 822976
auugaccagcuucucugug

SEQ ID NO: 822978 - RNA, 19 nt, Artificial Sequence
  Description of Artificial Sequence: Synthetic oligonucleotide
  Sense strand starting at position 3526 of SEQ ID NO: 587847
aggaaugcuuuggucagaa

SEQ ID NO: 822979 - RNA, 19 nt, Artificial Sequence
  Description of Artificial Sequence: Synthetic oligonucleotide
  Antisense strand to SEQ ID NO: 822978
uucugaccaaagcauuccu

SEQ ID NO: 822980 - RNA, 19 nt, Artificial Sequence
  Description of Artificial Sequence: Synthetic oligonucleotide
  Sense strand starting at position 3528 of SEQ ID NO: 587847
gaaugcuuuggucagaaac

SEQ ID NO: 822981 - RNA, 19 nt, Artificial Sequence
  Description of Artificial Sequence: Synthetic oligonucleotide
  Antisense strand to SEQ ID NO: 822980
guuucugaccaaagcauuc

SEQ ID NO: 822982 - RNA, 19 nt, Artificial Sequence
  Description of Artificial Sequence: Synthetic oligonucleotide
  Sense strand starting at position 3605 of SEQ ID NO: 587847
aggcucugggcagauuaau

SEQ ID NO: 822983 - RNA, 19 nt, Artificial Sequence
  Description of Artificial Sequence: Synthetic oligonucleotide
  Antisense strand to SEQ ID NO: 822982
auuaaucugcccagagccu

SEQ ID NO: 822984 - RNA, 19 nt, Artificial Sequence
  Description of Artificial Sequence: Synthetic oligonucleotide
  Sense strand starting at position 3651 of SEQ ID NO: 587847
gggccucagaguuacauua

SEQ ID NO: 822985 - RNA, 19 nt, Artificial Sequence
  Description of Artificial Sequence: Synthetic oligonucleotide
  Antisense strand to SEQ ID NO: 822984
uaauguaacucugaggccc

SEQ ID NO: 822986 - RNA, 19 nt, Artificial Sequence
  Description of Artificial Sequence: Synthetic oligonucleotide
  Sense strand starting at position 139 of SEQ ID NO: 587848
aaaugugugaaaggguaaa

SEQ ID NO: 822987 - RNA, 19 nt, Artificial Sequence
  Description of Artificial Sequence: Synthetic oligonucleotide
  Antisense strand to SEQ ID NO: 822986
uuuacccuuucacacauuu

SEQ ID NO: 822988 - RNA, 19 nt, Artificial Sequence
  Description of Artificial Sequence: Synthetic oligonucleotide
  Sense strand starting at position 179 of SEQ ID NO: 587848
uuaguauuucucugccuuu

SEQ ID NO: 822989 - RNA, 19 nt, Artificial Sequence
  Description of Artificial Sequence: Synthetic oligonucleotide
  Antisense strand to SEQ ID NO: 822988
aaaggcagagaaauacuaa

SEQ ID NO: 822990 - RNA, 19 nt, Artificial Sequence
  Description of Artificial Sequence: Synthetic oligonucleotide
  Sense strand starting at position 190 of SEQ ID NO: 587848
cugccuuugcuugaaauac

SEQ ID NO: 822991 - RNA, 19 nt, Artificial Sequence
  Description of Artificial Sequence: Synthetic oligonucleotide
  Antisense strand to SEQ ID NO: 822990
guauuucaagcaaaggcag

SEQ ID NO: 822992 - RNA, 19 nt, Artificial Sequence
  Description of Artificial Sequence: Synthetic oligonucleotide
  Sense strand starting at position 264 of SEQ ID NO: 587848
acaucucacuuuguauuga

SEQ ID NO: 822993 - RNA, 19 nt, Artificial Sequence
  Description of Artificial Sequence: Synthetic oligonucleotide
  Antisense strand to SEQ ID NO: 822992
ucaauacaaagugagaugu

SEQ ID NO: 822994 - RNA, 19 nt, Artificial Sequence
  Description of Artificial Sequence: Synthetic oligonucleotide
  Sense strand starting at position 472 of SEQ ID NO: 587848
gcaacaaacuggucaccua

SEQ ID NO: 822995 - RNA, 19 nt, Artificial Sequence
  Description of Artificial Sequence: Synthetic oligonucleotide
  Antisense strand to SEQ ID NO: 822994
uaggugaccaguuuguugc

SEQ ID NO: 822996 - RNA, 19 nt, Artificial Sequence
  Description of Artificial Sequence: Synthetic oligonucleotide
  Sense strand starting at position 568 of SEQ ID NO: 587848
augcaagaucuauggcuag

SEQ ID NO: 822997 - RNA, 19 nt, Artificial Sequence
  Description of Artificial Sequence: Synthetic oligonucleotide
  Antisense strand to SEQ ID NO: 822996
cuagccauagaucuugcau

SEQ ID NO: 822998 - RNA, 19 nt, Artificial Sequence
  Description of Artificial Sequence: Synthetic oligonucleotide
  Sense strand starting at position 700 of SEQ ID NO: 587848
gcucuacccuuucugaaag

SEQ ID NO: 822999 - RNA, 19 nt, Artificial Sequence
  Description of Artificial Sequence: Synthetic oligonucleotide
  Antisense strand to SEQ ID NO: 822998
cuuucagaaaggguagagc

SEQ ID NO: 823000 - RNA, 19 nt, Artificial Sequence
  Description of Artificial Sequence: Synthetic oligonucleotide
  Sense strand starting at position 738 of SEQ ID NO: 587848
cauucugucugggugauaa

SEQ ID NO: 823001 - RNA, 19 nt, Artificial Sequence
  Description of Artificial Sequence: Synthetic oligonucleotide
  Antisense strand to SEQ ID NO: 823000
uuaucacccagacagaaug

SEQ ID NO: 823002 - RNA, 19 nt, Artificial Sequence
  Description of Artificial Sequence: Synthetic oligonucleotide
  Sense strand starting at position 806 of SEQ ID NO: 587848
ccaguuggucugugaauuu

SEQ ID NO: 823003 - RNA, 19 nt, Artificial Sequence
  Description of Artificial Sequence: Synthetic oligonucleotide
  Antisense strand to SEQ ID NO: 823002
aaauucacagaccaacugg

SEQ ID NO: 823004 - RNA, 19 nt, Artificial Sequence
  Description of Artificial Sequence: Synthetic oligonucleotide
  Sense strand starting at position 861 of SEQ ID NO: 587848
cugaaaugucaauauguuc

SEQ ID NO: 823005 - RNA, 19 nt, Artificial Sequence
  Description of Artificial Sequence: Synthetic oligonucleotide
  Antisense strand to SEQ ID NO: 823004
gaacauauugacauuucag

SEQ ID NO: 823006 - RNA, 19 nt, Artificial Sequence
  Description of Artificial Sequence: Synthetic oligonucleotide
  Sense strand starting at position 1247 of SEQ ID NO: 587848
ugaguugagccauacuaua

SEQ ID NO: 823007 - RNA, 19 nt, Artificial Sequence
  Description of Artificial Sequence: Synthetic oligonucleotide
  Antisense strand to SEQ ID NO: 823006
uauaguauggcucaacuca

SEQ ID NO: 823008 - RNA, 19 nt, Artificial Sequence
  Description of Artificial Sequence: Synthetic oligonucleotide
  Sense strand starting at position 1656 of SEQ ID NO: 587848
gcguccagucaauaaauaa

SEQ ID NO: 823009 - RNA, 19 nt, Artificial Sequence
  Description of Artificial Sequence: Synthetic oligonucleotide
  Antisense strand to SEQ ID NO: 823008
uuauuuauugacuggacgc

SEQ ID NO: 823010 - RNA, 19 nt, Artificial Sequence
  Description of Artificial Sequence: Synthetic oligonucleotide
  Sense strand starting at position 1772 of SEQ ID NO: 587848
gaguccugucuggauagca

SEQ ID NO: 823011 - RNA, 19 nt, Artificial Sequence
  Description of Artificial Sequence: Synthetic oligonucleotide
  Antisense strand to SEQ ID NO: 823010
ugcuauccagacaggacuc

SEQ ID NO: 823012 - RNA, 19 nt, Artificial Sequence
  Description of Artificial Sequence: Synthetic oligonucleotide
  Sense strand starting at position 2137 of SEQ ID NO: 587848
cgcggcuuuguauucauua

SEQ ID NO: 823013 - RNA, 19 nt, Artificial Sequence
  Description of Artificial Sequence: Synthetic oligonucleotide
  Antisense strand to SEQ ID NO: 823012
uaaugaauacaaagccgcg

SEQ ID NO: 823014 - RNA, 19 nt, Artificial Sequence
  Description of Artificial Sequence: Synthetic oligonucleotide
  Sense strand starting at position 2255 of SEQ ID NO: 587848
gugcaucagggugauuaca

SEQ ID NO: 823015 - RNA, 19 nt, Artificial Sequence
  Description of Artificial Sequence: Synthetic oligonucleotide
  Antisense strand to SEQ ID NO: 823014
uguaaucacccugaugcac

SEQ ID NO: 823016 - RNA, 19 nt, Artificial Sequence
  Description of Artificial Sequence: Synthetic oligonucleotide
  Sense strand starting at position 2257 of SEQ ID NO: 587848
gcaucagggugauuacaau

SEQ ID NO: 823017 - RNA, 19 nt, Artificial Sequence
  Description of Artificial Sequence: Synthetic oligonucleotide
  Antisense strand to SEQ ID NO: 823016
auuguaaucacccugaugc

SEQ ID NO: 823018 - RNA, 19 nt, Artificial Sequence
  Description of Artificial Sequence: Synthetic oligonucleotide
  Sense strand starting at position 2263 of SEQ ID NO: 587848
gggugauuacaauaucagc

SEQ ID NO: 823019 - RNA, 19 nt, Artificial Sequence
  Description of Artificial Sequence: Synthetic oligonucleotide
  Antisense strand to SEQ ID NO: 823018
gcugauauuguaaucaccc

SEQ ID NO: 823020 - RNA, 19 nt, Artificial Sequence
  Description of Artificial Sequence: Synthetic oligonucleotide
  Sense strand starting at position 2486 of SEQ ID NO: 587848
uaaggcuaucugggaauga

SEQ ID NO: 823021 - RNA, 19 nt, Artificial Sequence
  Description of Artificial Sequence: Synthetic oligonucleotide
  Antisense strand to SEQ ID NO: 823020
ucauucccagauagccuua

SEQ ID NO: 823022 - RNA, 19 nt, Artificial Sequence
  Description of Artificial Sequence: Synthetic oligonucleotide
  Sense strand starting at position 2512 of SEQ ID NO: 587848
gcuagaagucgccugcaug

SEQ ID NO: 823023 - RNA, 19 nt, Artificial Sequence
  Description of Artificial Sequence: Synthetic oligonucleotide
  Antisense strand to SEQ ID NO: 823022
caugcaggcgacuucuagc

SEQ ID NO: 823024 - RNA, 19 nt, Artificial Sequence
  Description of Artificial Sequence: Synthetic oligonucleotide
  Sense strand starting at position 2575 of SEQ ID NO: 587848
acuguauuucccugcucca

SEQ ID NO: 823025 - RNA, 19 nt, Artificial Sequence
  Description of Artificial Sequence: Synthetic oligonucleotide
  Antisense strand to SEQ ID NO: 823024
uggagcagggaaauacagu

SEQ ID NO: 823026 - RNA, 19 nt, Artificial Sequence
  Description of Artificial Sequence: Synthetic oligonucleotide
  Sense strand starting at position 2602 of SEQ ID NO: 587848
cuggaacauguucgagauu

SEQ ID NO: 823027 - RNA, 19 nt, Artificial Sequence
  Description of Artificial Sequence: Synthetic oligonucleotide
  Antisense strand to SEQ ID NO: 823026
aaucucgaacauguuccag

SEQ ID NO: 823028 - RNA, 19 nt, Artificial Sequence
  Description of Artificial Sequence: Synthetic oligonucleotide
  Sense strand starting at position 2605 of SEQ ID NO: 587848
gaacauguucgagauucug

SEQ ID NO: 823029 - RNA, 19 nt, Artificial Sequence
  Description of Artificial Sequence: Synthetic oligonucleotide
  Antisense strand to SEQ ID NO: 823028
cagaaucucgaacauguuc

SEQ ID NO: 823030 - RNA, 19 nt, Artificial Sequence
  Description of Artificial Sequence: Synthetic oligonucleotide
  Sense strand starting at position 2616 of SEQ ID NO: 587848
agauucugucaaggucaga

SEQ ID NO: 823031 - RNA, 19 nt, Artificial Sequence
  Description of Artificial Sequence: Synthetic oligonucleotide
  Antisense strand to SEQ ID NO: 823030
ucugaccuugacagaaucu

SEQ ID NO: 823032 - RNA, 19 nt, Artificial Sequence
  Description of Artificial Sequence: Synthetic oligonucleotide
  Sense strand starting at position 2728 of SEQ ID NO: 587848
gagucuauagagcaguuaa

SEQ ID NO: 823033 - RNA, 19 nt, Artificial Sequence
  Description of Artificial Sequence: Synthetic oligonucleotide
  Antisense strand to SEQ ID NO: 823032
uuaacugcucuauagacuc

SEQ ID NO: 823034 - RNA, 19 nt, Artificial Sequence
  Description of Artificial Sequence: Synthetic oligonucleotide
  Sense strand starting at position 2925 of SEQ ID NO: 587848
gaacacuugugauugguag

SEQ ID NO: 823035 - RNA, 19 nt, Artificial Sequence
  Description of Artificial Sequence: Synthetic oligonucleotide
  Antisense strand to SEQ ID NO: 823034
cuaccaaucacaaguguuc

SEQ ID NO: 823036 - RNA, 19 nt, Artificial Sequence
  Description of Artificial Sequence: Synthetic oligonucleotide
  Sense strand starting at position 2993 of SEQ ID NO: 587848
ggaggaggcuccuuaugug

SEQ ID NO: 823037 - RNA, 19 nt, Artificial Sequence
  Description of Artificial Sequence: Synthetic oligonucleotide
  Antisense strand to SEQ ID NO: 823036
cacauaaggagccuccucc

SEQ ID NO: 823038 - RNA, 19 nt, Artificial Sequence
  Description of Artificial Sequence: Synthetic oligonucleotide
  Sense strand starting at position 3056 of SEQ ID NO: 587848
caaucaaucucggcuugag

SEQ ID NO: 823039 - RNA, 19 nt, Artificial Sequence
  Description of Artificial Sequence: Synthetic oligonucleotide
  Antisense strand to SEQ ID NO: 823038
cucaagccgagauugauug

SEQ ID NO: 823040 - RNA, 19 nt, Artificial Sequence
  Description of Artificial Sequence: Synthetic oligonucleotide
  Sense strand starting at position 3261 of SEQ ID NO: 587848
ugaucagcuccuuaaugga

SEQ ID NO: 823041 - RNA, 19 nt, Artificial Sequence
  Description of Artificial Sequence: Synthetic oligonucleotide
  Antisense strand to SEQ ID NO: 823040
uccauuaaggagcugauca

SEQ ID NO: 823042 - RNA, 19 nt, Artificial Sequence
  Description of Artificial Sequence: Synthetic oligonucleotide
  Sense strand starting at position 3269 of SEQ ID NO: 587848
uccuuaauggagugcagau

SEQ ID NO: 823043 - RNA, 19 nt, Artificial Sequence
  Description of Artificial Sequence: Synthetic oligonucleotide
  Antisense strand to SEQ ID NO: 823042
aucugcacuccauuaagga

SEQ ID NO: 823044 - RNA, 19 nt, Artificial Sequence
  Description of Artificial Sequence: Synthetic oligonucleotide
  Sense strand starting at position 3322 of SEQ ID NO: 587848
ggaaguauuugguugugcu

SEQ ID NO: 823045 - RNA, 19 nt, Artificial Sequence
  Description of Artificial Sequence: Synthetic oligonucleotide
  Antisense strand to SEQ ID NO: 823044
agcacaaccaaauacuucc

SEQ ID NO: 823046 - RNA, 19 nt, Artificial Sequence
  Description of Artificial Sequence: Synthetic oligonucleotide
  Sense strand starting at position 3323 of SEQ ID NO: 587848
gaaguauuugguugugcug

SEQ ID NO: 823047 - RNA, 19 nt, Artificial Sequence
  Description of Artificial Sequence: Synthetic oligonucleotide
  Antisense strand to SEQ ID NO: 823046
cagcacaaccaaauacuuc

SEQ ID NO: 823048 - RNA, 19 nt, Artificial Sequence
  Description of Artificial Sequence: Synthetic oligonucleotide
  Sense strand starting at position 3332 of SEQ ID NO: 587848
gguugugcuguguuucaag

SEQ ID NO: 823049 - RNA, 19 nt, Artificial Sequence
  Description of Artificial Sequence: Synthetic oligonucleotide
  Antisense strand to SEQ ID NO: 823048
cuugaaacacagcacaacc

SEQ ID NO: 823050 - RNA, 19 nt, Artificial Sequence
  Description of Artificial Sequence: Synthetic oligonucleotide
  Sense strand starting at position 3352 of SEQ ID NO: 587848
cacugaagcuugguuaaga

SEQ ID NO: 823051 - RNA, 19 nt, Artificial Sequence
  Description of Artificial Sequence: Synthetic oligonucleotide
  Antisense strand to SEQ ID NO: 823050
ucuuaaccaagcuucagug

SEQ ID NO: 823052 - RNA, 19 nt, Artificial Sequence
  Description of Artificial Sequence: Synthetic oligonucleotide
  Sense strand starting at position 3353 of SEQ ID NO: 587848
acugaagcuugguuaagaa

SEQ ID NO: 823053 - RNA, 19 nt, Artificial Sequence
  Description of Artificial Sequence: Synthetic oligonucleotide
  Antisense strand to SEQ ID NO: 823052
uucuuaaccaagcuucagu

SEQ ID NO: 823054 - RNA, 19 nt, Artificial Sequence
  Description of Artificial Sequence: Synthetic oligonucleotide
  Sense strand starting at position 3393 of SEQ ID NO: 587848
gugaguucagaaugaagga

SEQ ID NO: 823055 - RNA, 19 nt, Artificial Sequence
  Description of Artificial Sequence: Synthetic oligonucleotide
  Antisense strand to SEQ ID NO: 823054
uccuucauucugaacucac

SEQ ID NO: 823056 - RNA, 19 nt, Artificial Sequence
  Description of Artificial Sequence: Synthetic oligonucleotide
  Sense strand starting at position 3534 of SEQ ID NO: 587848
uaaggcuagugaguagaaa

SEQ ID NO: 823057 - RNA, 19 nt, Artificial Sequence
  Description of Artificial Sequence: Synthetic oligonucleotide
  Antisense strand to SEQ ID NO: 823056
uuucuacucacuagccuua

SEQ ID NO: 823058 - RNA, 19 nt, Artificial Sequence
  Description of Artificial Sequence: Synthetic oligonucleotide
  Sense strand starting at position 3626 of SEQ ID NO: 587848
ggagaagcauuguuuaauc

SEQ ID NO: 823059 - RNA, 19 nt, Artificial Sequence
  Description of Artificial Sequence: Synthetic oligonucleotide
  Antisense strand to SEQ ID NO: 823058
gauuaaacaaugcuucucc

SEQ ID NO: 823060 - RNA, 19 nt, Artificial Sequence
  Description of Artificial Sequence: Synthetic oligonucleotide
  Sense strand starting at position 3841 of SEQ ID NO: 587848
ucaugcaaugaaugucaga

SEQ ID NO: 823061 - RNA, 19 nt, Artificial Sequence
  Description of Artificial Sequence: Synthetic oligonucleotide
  Antisense strand to SEQ ID NO: 823060
ucugacauucauugcauga

SEQ ID NO: 823062 - RNA, 19 nt, Artificial Sequence
  Description of Artificial Sequence: Synthetic oligonucleotide
  Sense strand starting at position 3884 of SEQ ID NO: 587848
ccaguaauccaauaacgug

SEQ ID NO: 823063 - RNA, 19 nt, Artificial Sequence
  Description of Artificial Sequence: Synthetic oligonucleotide
  Antisense strand to SEQ ID NO: 823062
cacguuauuggauuacugg

SEQ ID NO: 823064 - RNA, 19 nt, Artificial Sequence
  Description of Artificial Sequence: Synthetic oligonucleotide
  Sense strand starting at position 3915 of SEQ ID NO: 587848
guaucacugagacgagaac

SEQ ID NO: 823065 - RNA, 19 nt, Artificial Sequence
  Description of Artificial Sequence: Synthetic oligonucleotide
  Antisense strand to SEQ ID NO: 823064
guucucgucucagugauac

SEQ ID NO: 823066 - RNA, 19 nt, Artificial Sequence
  Description of Artificial Sequence: Synthetic oligonucleotide
  Sense strand starting at position 67 of SEQ ID NO: 587849
aggcucugggcagauuaau

SEQ ID NO: 823067 - RNA, 19 nt, Artificial Sequence
  Description of Artificial Sequence: Synthetic oligonucleotide
  Antisense strand to SEQ ID NO: 823066
auuaaucugcccagagccu

SEQ ID NO: 823068 - RNA, 19 nt, Artificial Sequence
  Description of Artificial Sequence: Synthetic oligonucleotide
  Sense strand starting at position 113 of SEQ ID NO: 587849
gggccucagaguuacauua

SEQ ID NO: 823069 - RNA, 19 nt, Artificial Sequence
  Description of Artificial Sequence: Synthetic oligonucleotide
  Antisense strand to SEQ ID NO: 823068
uaauguaacucugaggccc

SEQ ID NO: 823070 - RNA, 19 nt, Artificial Sequence
  Description of Artificial Sequence: Synthetic oligonucleotide
  Sense strand starting at position 462 of SEQ ID NO: 587849
uccuacuucccggaaucau

SEQ ID NO: 823071 - RNA, 19 nt, Artificial Sequence
  Description of Artificial Sequence: Synthetic oligonucleotide
  Antisense strand to SEQ ID NO: 823070
augauuccgggaaguagga

SEQ ID NO: 823072 - RNA, 19 nt, Artificial Sequence
  Description of Artificial Sequence: Synthetic oligonucleotide
  Sense strand starting at position 574 of SEQ ID NO: 587849
gccguauuugcucaaagca

SEQ ID NO: 823073 - RNA, 19 nt, Artificial Sequence
  Description of Artificial Sequence: Synthetic oligonucleotide
  Antisense strand to SEQ ID NO: 823072
ugcuuugagcaaauacggc

SEQ ID NO: 823074 - RNA, 19 nt, Artificial Sequence
  Description of Artificial Sequence: Synthetic oligonucleotide
  Sense strand starting at position 745 of SEQ ID NO: 587849
aaaggaauuauccggacgu

SEQ ID NO: 823075 - RNA, 19 nt, Artificial Sequence
  Description of Artificial Sequence: Synthetic oligonucleotide
  Antisense strand to SEQ ID NO: 823074
acguccggauaauuccuuu

SEQ ID NO: 823076 - RNA, 19 nt, Artificial Sequence
  Description of Artificial Sequence: Synthetic oligonucleotide
  Sense strand starting at position 1131 of SEQ ID NO: 587849
acuccuuagggcuaaguuu

SEQ ID NO: 823077 - RNA, 19 nt, Artificial Sequence
  Description of Artificial Sequence: Synthetic oligonucleotide
  Antisense strand to SEQ ID NO: 823076
aaacuuagcccuaaggagu

SEQ ID NO: 823078 - RNA, 19 nt, Artificial Sequence
  Description of Artificial Sequence: Synthetic oligonucleotide
  Sense strand starting at position 1477 of SEQ ID NO: 587849
guaguccuacccuaauuga

SEQ ID NO: 823079 - RNA, 19 nt, Artificial Sequence
  Description of Artificial Sequence: Synthetic oligonucleotide
  Antisense strand to SEQ ID NO: 823078
ucaauuaggguaggacuac

SEQ ID NO: 823080 - RNA, 19 nt, Artificial Sequence
  Description of Artificial Sequence: Synthetic oligonucleotide
  Sense strand starting at position 1486 of SEQ ID NO: 587849
cccuaauugagcgacaagu

SEQ ID NO: 823081 - RNA, 19 nt, Artificial Sequence
  Description of Artificial Sequence: Synthetic oligonucleotide
  Antisense strand to SEQ ID NO: 823080
acuugucgcucaauuaggg

SEQ ID NO: 823082 - RNA, 19 nt, Artificial Sequence
  Description of Artificial Sequence: Synthetic oligonucleotide
  Sense strand starting at position 1512 of SEQ ID NO: 587849
ggagccucgcggucgaaua

SEQ ID NO: 823083 - RNA, 19 nt, Artificial Sequence
  Description of Artificial Sequence: Synthetic oligonucleotide
  Antisense strand to SEQ ID NO: 823082
uauucgaccgcgaggcucc

SEQ ID NO: 823084 - RNA, 19 nt, Artificial Sequence
  Description of Artificial Sequence: Synthetic oligonucleotide
  Sense strand starting at position 1522 of SEQ ID NO: 587849
ggucgaauaauccaaacga

SEQ ID NO: 823085 - RNA, 19 nt, Artificial Sequence
  Description of Artificial Sequence: Synthetic oligonucleotide
  Antisense strand to SEQ ID NO: 823084
ucguuuggauuauucgacc

SEQ ID NO: 823086 - RNA, 19 nt, Artificial Sequence
  Description of Artificial Sequence: Synthetic oligonucleotide
  Sense strand starting at position 1547 of SEQ ID NO: 587849
cggucaucggaacaguaau

SEQ ID NO: 823087 - RNA, 19 nt, Artificial Sequence
  Description of Artificial Sequence: Synthetic oligonucleotide
  Antisense strand to SEQ ID NO: 823086
auuacuguuccgaugaccg

SEQ ID NO: 823088 - RNA, 19 nt, Artificial Sequence
  Description of Artificial Sequence: Synthetic oligonucleotide
  Sense strand starting at position 1553 of SEQ ID NO: 587849
ucggaacaguaauuaauaa

SEQ ID NO: 823089 - RNA, 19 nt, Artificial Sequence
  Description of Artificial Sequence: Synthetic oligonucleotide
  Antisense strand to SEQ ID NO: 823088
uuauuaauuacuguuccga

SEQ ID NO: 823090 - RNA, 19 nt, Artificial Sequence
  Description of Artificial Sequence: Synthetic oligonucleotide
  Sense strand starting at position 1983 of SEQ ID NO: 587849
guggcagacaaaugugaug

SEQ ID NO: 823091 - RNA, 19 nt, Artificial Sequence
  Description of Artificial Sequence: Synthetic oligonucleotide
  Antisense strand to SEQ ID NO: 823090
caucacauuugucugccac

SEQ ID NO: 823092 - RNA, 19 nt, Artificial Sequence
  Description of Artificial Sequence: Synthetic oligonucleotide
  Sense strand starting at position 2311 of SEQ ID NO: 587849
ggaggucaaguauauguua

SEQ ID NO: 823093 - RNA, 19 nt, Artificial Sequence
  Description of Artificial Sequence: Synthetic oligonucleotide
  Antisense strand to SEQ ID NO: 823092
uaacauauacuugaccucc

SEQ ID NO: 823094 - RNA, 19 nt, Artificial Sequence
  Description of Artificial Sequence: Synthetic oligonucleotide
  Sense strand starting at position 2314 of SEQ ID NO: 587849
ggucaaguauauguuaaca

SEQ ID NO: 823095 - RNA, 19 nt, Artificial Sequence
  Description of Artificial Sequence: Synthetic oligonucleotide
  Antisense strand to SEQ ID NO: 823094
uguuaacauauacuugacc

SEQ ID NO: 823096 - RNA, 19 nt, Artificial Sequence
  Description of Artificial Sequence: Synthetic oligonucleotide
  Sense strand starting at position 2541 of SEQ ID NO: 587849
ucucaucacuggcugaaga

SEQ ID NO: 823097 - RNA, 19 nt, Artificial Sequence
  Description of Artificial Sequence: Synthetic oligonucleotide
  Antisense strand to SEQ ID NO: 823096
ucuucagccagugaugaga

SEQ ID NO: 823098 - RNA, 19 nt, Artificial Sequence
  Description of Artificial Sequence: Synthetic oligonucleotide
  Sense strand starting at position 2556 of SEQ ID NO: 587849
aagagacagcucugcuaga

SEQ ID NO: 823099 - RNA, 19 nt, Artificial Sequence
  Description of Artificial Sequence: Synthetic oligonucleotide
  Antisense strand to SEQ ID NO: 823098
ucuagcagagcugucucuu

SEQ ID NO: 823100 - RNA, 19 nt, Artificial Sequence
  Description of Artificial Sequence: Synthetic oligonucleotide
  Sense strand starting at position 2557 of SEQ ID NO: 587849
agagacagcucugcuagaa

SEQ ID NO: 823101 - RNA, 19 nt, Artificial Sequence
  Description of Artificial Sequence: Synthetic oligonucleotide
  Antisense strand to SEQ ID NO: 823100
uucuagcagagcugucucu

SEQ ID NO: 823102 - RNA, 19 nt, Artificial Sequence
  Description of Artificial Sequence: Synthetic oligonucleotide
  Sense strand starting at position 2561 of SEQ ID NO: 587849
acagcucugcuagaaauca

SEQ ID NO: 823103 - RNA, 19 nt, Artificial Sequence
  Description of Artificial Sequence: Synthetic oligonucleotide
  Antisense strand to SEQ ID NO: 823102
ugauuucuagcagagcugu

SEQ ID NO: 823104 - RNA, 19 nt, Artificial Sequence
  Description of Artificial Sequence: Synthetic oligonucleotide
  Sense strand starting at position 2631 of SEQ ID NO: 587849
cugacuauuugcuuucgca

SEQ ID NO: 823105 - RNA, 19 nt, Artificial Sequence
  Description of Artificial Sequence: Synthetic oligonucleotide
  Antisense strand to SEQ ID NO: 823104
ugcgaaagcaaauagucag

SEQ ID NO: 823106 - RNA, 19 nt, Artificial Sequence
  Description of Artificial Sequence: Synthetic oligonucleotide
  Sense strand starting at position 2649 of SEQ ID NO: 587849
auuagauaauagccuuaga

SEQ ID NO: 823107 - RNA, 19 nt, Artificial Sequence
  Description of Artificial Sequence: Synthetic oligonucleotide
  Antisense strand to SEQ ID NO: 823106
ucuaaggcuauuaucuaau

SEQ ID NO: 823108 - RNA, 19 nt, Artificial Sequence
  Description of Artificial Sequence: Synthetic oligonucleotide
  Sense strand starting at position 2851 of SEQ ID NO: 587849
uccagauauuuccagagua

SEQ ID NO: 823109 - RNA, 19 nt, Artificial Sequence
  Description of Artificial Sequence: Synthetic oligonucleotide
  Antisense strand to SEQ ID NO: 823108
uacucuggaaauaucugga

SEQ ID NO: 823110 - RNA, 19 nt, Artificial Sequence
  Description of Artificial Sequence: Synthetic oligonucleotide
  Sense strand starting at position 2871 of SEQ ID NO: 587849
auaaauaaucucggugaag

SEQ ID NO: 823111 - RNA, 19 nt, Artificial Sequence
  Description of Artificial Sequence: Synthetic oligonucleotide
  Antisense strand to SEQ ID NO: 823110
cuucaccgagauuauuuau

SEQ ID NO: 823112 - RNA, 19 nt, Artificial Sequence
  Description of Artificial Sequence: Synthetic oligonucleotide
  Sense strand starting at position 2872 of SEQ ID NO: 587849
uaaauaaucucggugaaga

SEQ ID NO: 823113 - RNA, 19 nt, Artificial Sequence
  Description of Artificial Sequence: Synthetic oligonucleotide
  Antisense strand to SEQ ID NO: 823112
ucuucaccgagauuauuua

SEQ ID NO: 823114 - RNA, 19 nt, Artificial Sequence
  Description of Artificial Sequence: Synthetic oligonucleotide
  Sense strand starting at position 2873 of SEQ ID NO: 587849
aaauaaucucggugaagag

SEQ ID NO: 823115 - RNA, 19 nt, Artificial Sequence
  Description of Artificial Sequence: Synthetic oligonucleotide
  Antisense strand to SEQ ID NO: 823114
cucuucaccgagauuauuu

SEQ ID NO: 823116 - RNA, 19 nt, Artificial Sequence
  Description of Artificial Sequence: Synthetic oligonucleotide
  Sense strand starting at position 2963 of SEQ ID NO: 587849
aucagauaauggcuugcaa

SEQ ID NO: 823117 - RNA, 19 nt, Artificial Sequence
  Description of Artificial Sequence: Synthetic oligonucleotide
  Antisense strand to SEQ ID NO: 823116
uugcaagccauuaucugau

SEQ ID NO: 823118 - RNA, 19 nt, Artificial Sequence
  Description of Artificial Sequence: Synthetic oligonucleotide
  Sense strand starting at position 2965 of SEQ ID NO: 587849
cagauaauggcuugcaaug

SEQ ID NO: 823119 - RNA, 19 nt, Artificial Sequence
  Description of Artificial Sequence: Synthetic oligonucleotide
  Antisense strand to SEQ ID NO: 823118
cauugcaagccauuaucug

SEQ ID NO: 823120 - RNA, 19 nt, Artificial Sequence
  Description of Artificial Sequence: Synthetic oligonucleotide
  Sense strand starting at position 2970 of SEQ ID NO: 587849
aauggcuugcaaugauaag

SEQ ID NO: 823121 - RNA, 19 nt, Artificial Sequence
  Description of Artificial Sequence: Synthetic oligonucleotide
  Antisense strand to SEQ ID NO: 823120
cuuaucauugcaagccauu

SEQ ID NO: 823122 - RNA, 19 nt, Artificial Sequence
  Description of Artificial Sequence: Synthetic oligonucleotide
  Sense strand starting at position 2971 of SEQ ID NO: 587849
auggcuugcaaugauaagu

SEQ ID NO: 823123 - RNA, 19 nt, Artificial Sequence
  Description of Artificial Sequence: Synthetic oligonucleotide
  Antisense strand to SEQ ID NO: 823122
acuuaucauugcaagccau

SEQ ID NO: 823124 - RNA, 19 nt, Artificial Sequence
  Description of Artificial Sequence: Synthetic oligonucleotide
  Sense strand starting at position 3097 of SEQ ID NO: 587849
agccuaaaucaauguaaga

SEQ ID NO: 823125 - RNA, 19 nt, Artificial Sequence
  Description of Artificial Sequence: Synthetic oligonucleotide
  Antisense strand to SEQ ID NO: 823124
ucuuacauugauuuaggcu

SEQ ID NO: 823126 - RNA, 19 nt, Artificial Sequence
  Description of Artificial Sequence: Synthetic oligonucleotide
  Sense strand starting at position 3107 of SEQ ID NO: 587849
aauguaagauguccugaau

SEQ ID NO: 823127 - RNA, 19 nt, Artificial Sequence
  Description of Artificial Sequence: Synthetic oligonucleotide
  Antisense strand to SEQ ID NO: 823126
auucaggacaucuuacauu

SEQ ID NO: 823128 - RNA, 19 nt, Artificial Sequence
  Description of Artificial Sequence: Synthetic oligonucleotide
  Sense strand starting at position 3110 of SEQ ID NO: 587849
guaagauguccugaauacg

SEQ ID NO: 823129 - RNA, 19 nt, Artificial Sequence
  Description of Artificial Sequence: Synthetic oligonucleotide
  Antisense strand to SEQ ID NO: 823128
cguauucaggacaucuuac

SEQ ID NO: 823130 - RNA, 19 nt, Artificial Sequence
  Description of Artificial Sequence: Synthetic oligonucleotide
  Sense strand starting at position 3192 of SEQ ID NO: 587849
gcaguugagaacugaugag

SEQ ID NO: 823131 - RNA, 19 nt, Artificial Sequence
  Description of Artificial Sequence: Synthetic oligonucleotide
  Antisense strand to SEQ ID NO: 823130
cucaucaguucucaacugc

SEQ ID NO: 823132 - RNA, 19 nt, Artificial Sequence
  Description of Artificial Sequence: Synthetic oligonucleotide
  Sense strand starting at position 3430 of SEQ ID NO: 587849
auguuaagucuugguauuu

SEQ ID NO: 823133 - RNA, 19 nt, Artificial Sequence
  Description of Artificial Sequence: Synthetic oligonucleotide
  Antisense strand to SEQ ID NO: 823132
aaauaccaagacuuaacau

SEQ ID NO: 823134 - RNA, 19 nt, Artificial Sequence
  Description of Artificial Sequence: Synthetic oligonucleotide
  Sense strand starting at position 3431 of SEQ ID NO: 587849
uguuaagucuugguauuug

SEQ ID NO: 823135 - RNA, 19 nt, Artificial Sequence
  Description of Artificial Sequence: Synthetic oligonucleotide
  Antisense strand to SEQ ID NO: 823134
caaauaccaagacuuaaca

SEQ ID NO: 823136 - RNA, 19 nt, Artificial Sequence
  Description of Artificial Sequence: Synthetic oligonucleotide
  Sense strand starting at position 3442 of SEQ ID NO: 587849
gguauuugauauuaugaug

SEQ ID NO: 823137 - RNA, 19 nt, Artificial Sequence
  Description of Artificial Sequence: Synthetic oligonucleotide
  Antisense strand to SEQ ID NO: 823136
caucauaauaucaaauacc

SEQ ID NO: 823138 - RNA, 19 nt, Artificial Sequence
  Description of Artificial Sequence: Synthetic oligonucleotide
  Sense strand starting at position 3730 of SEQ ID NO: 587849
uuggauucuggaggcauau

SEQ ID NO: 823139 - RNA, 19 nt, Artificial Sequence
  Description of Artificial Sequence: Synthetic oligonucleotide
  Antisense strand to SEQ ID NO: 823138
auaugccuccagaauccaa

SEQ ID NO: 823140 - RNA, 19 nt, Artificial Sequence
  Description of Artificial Sequence: Synthetic oligonucleotide
  Sense strand starting at position 3736 of SEQ ID NO: 587849
ucuggaggcauauagucau

SEQ ID NO: 823141 - RNA, 19 nt, Artificial Sequence
  Description of Artificial Sequence: Synthetic oligonucleotide
  Antisense strand to SEQ ID NO: 823140
augacuauaugccuccaga

SEQ ID NO: 823142 - RNA, 19 nt, Artificial Sequence
  Description of Artificial Sequence: Synthetic oligonucleotide
  Sense strand starting at position 3739 of SEQ ID NO: 587849
ggaggcauauagucaucuu

SEQ ID NO: 823143 - RNA, 19 nt, Artificial Sequence
  Description of Artificial Sequence: Synthetic oligonucleotide
  Antisense strand to SEQ ID NO: 823142
aagaugacuauaugccucc

SEQ ID NO: 823144 - RNA, 19 nt, Artificial Sequence
  Description of Artificial Sequence: Synthetic oligonucleotide
  Sense strand starting at position 3788 of SEQ ID NO: 587849
caggaaugauucuugugaa

SEQ ID NO: 823145 - RNA, 19 nt, Artificial Sequence
  Description of Artificial Sequence: Synthetic oligonucleotide
  Antisense strand to SEQ ID NO: 823144
uucacaagaaucauuccug

SEQ ID NO: 823146 - RNA, 19 nt, Artificial Sequence
  Description of Artificial Sequence: Synthetic oligonucleotide
  Sense strand starting at position 97 of SEQ ID NO: 587850
aaauaagggugcuuugaag

SEQ ID NO: 823147 - RNA, 19 nt, Artificial Sequence
  Description of Artificial Sequence: Synthetic oligonucleotide
  Antisense strand to SEQ ID NO: 823146
cuucaaagcacccuuauuu

SEQ ID NO: 823148 - RNA, 19 nt, Artificial Sequence
  Description of Artificial Sequence: Synthetic oligonucleotide
  Sense strand starting at position 108 of SEQ ID NO: 587850
cuuugaagcuuaguuuaaa

SEQ ID NO: 823149 - RNA, 19 nt, Artificial Sequence
  Description of Artificial Sequence: Synthetic oligonucleotide
  Antisense strand to SEQ ID NO: 823148
uuuaaacuaagcuucaaag

SEQ ID NO: 823150 - RNA, 19 nt, Artificial Sequence
  Description of Artificial Sequence: Synthetic oligonucleotide
  Sense strand starting at position 131 of SEQ ID NO: 587850
ugcaauuagcuagaaguag

SEQ ID NO: 823151 - RNA, 19 nt, Artificial Sequence
  Description of Artificial Sequence: Synthetic oligonucleotide
  Antisense strand to SEQ ID NO: 823150
cuacuucuagcuaauugca

SEQ ID NO: 823152 - RNA, 19 nt, Artificial Sequence
  Description of Artificial Sequence: Synthetic oligonucleotide
  Sense strand starting at position 187 of SEQ ID NO: 587850
cacaaauggcuuugguuua

SEQ ID NO: 823153 - RNA, 19 nt, Artificial Sequence
  Description of Artificial Sequence: Synthetic oligonucleotide
  Antisense strand to SEQ ID NO: 823152
uaaaccaaagccauuugug

SEQ ID NO: 823154 - RNA, 19 nt, Artificial Sequence
  Description of Artificial Sequence: Synthetic oligonucleotide
  Sense strand starting at position 320 of SEQ ID NO: 587850
ucagauaaaugugcucaau

SEQ ID NO: 823155 - RNA, 19 nt, Artificial Sequence
  Description of Artificial Sequence: Synthetic oligonucleotide
  Antisense strand to SEQ ID NO: 823154
auugagcacauuuaucuga

SEQ ID NO: 823156 - RNA, 19 nt, Artificial Sequence
  Description of Artificial Sequence: Synthetic oligonucleotide
  Sense strand starting at position 322 of SEQ ID NO: 587850
agauaaaugugcucaauau

SEQ ID NO: 823157 - RNA, 19 nt, Artificial Sequence
  Description of Artificial Sequence: Synthetic oligonucleotide
  Antisense strand to SEQ ID NO: 823156
auauugagcacauuuaucu

SEQ ID NO: 823158 - RNA, 19 nt, Artificial Sequence
  Description of Artificial Sequence: Synthetic oligonucleotide
  Sense strand starting at position 413 of SEQ ID NO: 587850
aguugcauggugcauauaa

SEQ ID NO: 823159 - RNA, 19 nt, Artificial Sequence
  Description of Artificial Sequence: Synthetic oligonucleotide
  Antisense strand to SEQ ID NO: 823158
uuauaugcaccaugcaacu

SEQ ID NO: 823160 - RNA, 19 nt, Artificial Sequence
  Description of Artificial Sequence: Synthetic oligonucleotide
  Sense strand starting at position 415 of SEQ ID NO: 587850
uugcauggugcauauaaau

SEQ ID NO: 823161 - RNA, 19 nt, Artificial Sequence
  Description of Artificial Sequence: Synthetic oligonucleotide
  Antisense strand to SEQ ID NO: 823160
auuuauaugcaccaugcaa

SEQ ID NO: 823162 - RNA, 19 nt, Artificial Sequence
  Description of Artificial Sequence: Synthetic oligonucleotide
  Sense strand starting at position 858 of SEQ ID NO: 587850
uuuagacaguucuugagaa

SEQ ID NO: 823163 - RNA, 19 nt, Artificial Sequence
  Description of Artificial Sequence: Synthetic oligonucleotide
  Antisense strand to SEQ ID NO: 823162
uucucaagaacugucuaaa

SEQ ID NO: 823164 - RNA, 19 nt, Artificial Sequence
  Description of Artificial Sequence: Synthetic oligonucleotide
  Sense strand starting at position 992 of SEQ ID NO: 587850
gcacuaaauuuccaggaca

SEQ ID NO: 823165 - RNA, 19 nt, Artificial Sequence
  Description of Artificial Sequence: Synthetic oligonucleotide
  Antisense strand to SEQ ID NO: 823164
uguccuggaaauuuagugc

SEQ ID NO: 823166 - RNA, 19 nt, Artificial Sequence
  Description of Artificial Sequence: Synthetic oligonucleotide
  Sense strand starting at position 1102 of SEQ ID NO: 587850
acugaaauuccuuguaguu

SEQ ID NO: 823167 - RNA, 19 nt, Artificial Sequence
  Description of Artificial Sequence: Synthetic oligonucleotide
  Antisense strand to SEQ ID NO: 823166
aacuacaaggaauuucagu

SEQ ID NO: 823168 - RNA, 19 nt, Artificial Sequence
  Description of Artificial Sequence: Synthetic oligonucleotide
  Sense strand starting at position 1177 of SEQ ID NO: 587850
aggauucugccauaaucug

SEQ ID NO: 823169 - RNA, 19 nt, Artificial Sequence
  Description of Artificial Sequence: Synthetic oligonucleotide
  Antisense strand to SEQ ID NO: 823168
cagauuauggcagaauccu

SEQ ID NO: 823170 - RNA, 19 nt, Artificial Sequence
  Description of Artificial Sequence: Synthetic oligonucleotide
  Sense strand starting at position 1297 of SEQ ID NO: 587850
aguaaauuacuccgacaaa

SEQ ID NO: 823171 - RNA, 19 nt, Artificial Sequence
  Description of Artificial Sequence: Synthetic oligonucleotide
  Antisense strand to SEQ ID NO: 823170
uuugucggaguaauuuacu

SEQ ID NO: 823172 - RNA, 19 nt, Artificial Sequence
  Description of Artificial Sequence: Synthetic oligonucleotide
  Sense strand starting at position 1403 of SEQ ID NO: 587850
uaucaagaucuuugugguu

SEQ ID NO: 823173 - RNA, 19 nt, Artificial Sequence
  Description of Artificial Sequence: Synthetic oligonucleotide
  Antisense strand to SEQ ID NO: 823172
aaccacaaagaucuugaua

SEQ ID NO: 823174 - RNA, 19 nt, Artificial Sequence
  Description of Artificial Sequence: Synthetic oligonucleotide
  Sense strand starting at position 1571 of SEQ ID NO: 587850
gggcuaacucaccaggcau

SEQ ID NO: 823175 - RNA, 19 nt, Artificial Sequence
  Description of Artificial Sequence: Synthetic oligonucleotide
  Antisense strand to SEQ ID NO: 823174
augccuggugaguuagccc

SEQ ID NO: 823176 - RNA, 19 nt, Artificial Sequence
  Description of Artificial Sequence: Synthetic oligonucleotide
  Sense strand starting at position 1785 of SEQ ID NO: 587850
uugcacuuggagcagaaau

SEQ ID NO: 823177 - RNA, 19 nt, Artificial Sequence
  Description of Artificial Sequence: Synthetic oligonucleotide
  Antisense strand to SEQ ID NO: 823176
auuucugcuccaagugcaa

SEQ ID NO: 823178 - RNA, 19 nt, Artificial Sequence
  Description of Artificial Sequence: Synthetic oligonucleotide
  Sense strand starting at position 1787 of SEQ ID NO: 587850
gcacuuggagcagaaaugu

SEQ ID NO: 823179 - RNA, 19 nt, Artificial Sequence
  Description of Artificial Sequence: Synthetic oligonucleotide
  Antisense strand to SEQ ID NO: 823178
acauuucugcuccaagugc

SEQ ID NO: 823180 - RNA, 19 nt, Artificial Sequence
  Description of Artificial Sequence: Synthetic oligonucleotide
  Sense strand starting at position 1796 of SEQ ID NO: 587850
gcagaaauguggaggauga

SEQ ID NO: 823181 - RNA, 19 nt, Artificial Sequence
  Description of Artificial Sequence: Synthetic oligonucleotide
  Antisense strand to SEQ ID NO: 823180
ucauccuccacauuucugc

SEQ ID NO: 823182 - RNA, 19 nt, Artificial Sequence
  Description of Artificial Sequence: Synthetic oligonucleotide
  Sense strand starting at position 1847 of SEQ ID NO: 587850
ucucuuuaggcagaacaau

SEQ ID NO: 823183 - RNA, 19 nt, Artificial Sequence
  Description of Artificial Sequence: Synthetic oligonucleotide
  Antisense strand to SEQ ID NO: 823182
auuguucugccuaaagaga

SEQ ID NO: 823184 - RNA, 19 nt, Artificial Sequence
  Description of Artificial Sequence: Synthetic oligonucleotide
  Sense strand starting at position 2274 of SEQ ID NO: 587850
ucagcuucucaguaguaug

SEQ ID NO: 823185 - RNA, 19 nt, Artificial Sequence
  Description of Artificial Sequence: Synthetic oligonucleotide
  Antisense strand to SEQ ID NO: 823184
cauacuacugagaagcuga

SEQ ID NO: 823186 - RNA, 19 nt, Artificial Sequence
  Description of Artificial Sequence: Synthetic oligonucleotide
  Sense strand starting at position 2373 of SEQ ID NO: 587850
guugauaugcuccaaacau

SEQ ID NO: 823187 - RNA, 19 nt, Artificial Sequence
  Description of Artificial Sequence: Synthetic oligonucleotide
  Antisense strand to SEQ ID NO: 823186
auguuuggagcauaucaac

SEQ ID NO: 823188 - RNA, 19 nt, Artificial Sequence
  Description of Artificial Sequence: Synthetic oligonucleotide
  Sense strand starting at position 2407 of SEQ ID NO: 587850
cucuaccuugcauagagau

SEQ ID NO: 823189 - RNA, 19 nt, Artificial Sequence
  Description of Artificial Sequence: Synthetic oligonucleotide
  Antisense strand to SEQ ID NO: 823188
aucucuaugcaagguagag

SEQ ID NO: 823190 - RNA, 19 nt, Artificial Sequence
  Description of Artificial Sequence: Synthetic oligonucleotide
  Sense strand starting at position 2420 of SEQ ID NO: 587850
agagauccaugggagauaa

SEQ ID NO: 823191 - RNA, 19 nt, Artificial Sequence
  Description of Artificial Sequence: Synthetic oligonucleotide
  Antisense strand to SEQ ID NO: 823190
uuaucucccauggaucucu

SEQ ID NO: 823192 - RNA, 19 nt, Artificial Sequence
  Description of Artificial Sequence: Synthetic oligonucleotide
  Sense strand starting at position 2575 of SEQ ID NO: 587850
ccuauuaagcuuuaaugga

SEQ ID NO: 823193 - RNA, 19 nt, Artificial Sequence
  Description of Artificial Sequence: Synthetic oligonucleotide
  Antisense strand to SEQ ID NO: 823192
uccauuaaagcuuaauagg

SEQ ID NO: 823194 - RNA, 19 nt, Artificial Sequence
  Description of Artificial Sequence: Synthetic oligonucleotide
  Sense strand starting at position 2610 of SEQ ID NO: 587850
acuagaagccuuuguuaua

SEQ ID NO: 823195 - RNA, 19 nt, Artificial Sequence
  Description of Artificial Sequence: Synthetic oligonucleotide
  Antisense strand to SEQ ID NO: 823194
uauaacaaaggcuucuagu

SEQ ID NO: 823196 - RNA, 19 nt, Artificial Sequence
  Description of Artificial Sequence: Synthetic oligonucleotide
  Sense strand starting at position 2611 of SEQ ID NO: 587850
cuagaagccuuuguuauag

SEQ ID NO: 823197 - RNA, 19 nt, Artificial Sequence
  Description of Artificial Sequence: Synthetic oligonucleotide
  Antisense strand to SEQ ID NO: 823196
cuauaacaaaggcuucuag

SEQ ID NO: 823198 - RNA, 19 nt, Artificial Sequence
  Description of Artificial Sequence: Synthetic oligonucleotide
  Sense strand starting at position 2623 of SEQ ID NO: 587850
guuauagugcuuuaucuaa

SEQ ID NO: 823199 - RNA, 19 nt, Artificial Sequence
  Description of Artificial Sequence: Synthetic oligonucleotide
  Antisense strand to SEQ ID NO: 823198
uuagauaaagcacuauaac

SEQ ID NO: 823200 - RNA, 19 nt, Artificial Sequence
  Description of Artificial Sequence: Synthetic oligonucleotide
  Sense strand starting at position 2949 of SEQ ID NO: 587850
cugcaagcucaaugaacau

SEQ ID NO: 823201 - RNA, 19 nt, Artificial Sequence
  Description of Artificial Sequence: Synthetic oligonucleotide
  Antisense strand to SEQ ID NO: 823200
auguucauugagcuugcag

SEQ ID NO: 823202 - RNA, 19 nt, Artificial Sequence
  Description of Artificial Sequence: Synthetic oligonucleotide
  Sense strand starting at position 3113 of SEQ ID NO: 587850
aggcaauaacucugacuuc

SEQ ID NO: 823203 - RNA, 19 nt, Artificial Sequence
  Description of Artificial Sequence: Synthetic oligonucleotide
  Antisense strand to SEQ ID NO: 823202
gaagucagaguuauugccu

SEQ ID NO: 823204 - RNA, 19 nt, Artificial Sequence
  Description of Artificial Sequence: Synthetic oligonucleotide
  Sense strand starting at position 3230 of SEQ ID NO: 587850
cuugauaaacagugucaau

SEQ ID NO: 823205 - RNA, 19 nt, Artificial Sequence
  Description of Artificial Sequence: Synthetic oligonucleotide
  Antisense strand to SEQ ID NO: 823204
auugacacuguuuaucaag

SEQ ID NO: 823206 - RNA, 19 nt, Artificial Sequence
  Description of Artificial Sequence: Synthetic oligonucleotide
  Sense strand starting at position 3374 of SEQ ID NO: 587850
cuguucugucacuaauagu

SEQ ID NO: 823207 - RNA, 19 nt, Artificial Sequence
  Description of Artificial Sequence: Synthetic oligonucleotide
  Antisense strand to SEQ ID NO: 823206
acuauuagugacagaacag

SEQ ID NO: 823208 - RNA, 19 nt, Artificial Sequence
  Description of Artificial Sequence: Synthetic oligonucleotide
  Sense strand starting at position 3451 of SEQ ID NO: 587850
uaaugagguucucuguaau

SEQ ID NO: 823209 - RNA, 19 nt, Artificial Sequence
  Description of Artificial Sequence: Synthetic oligonucleotide
  Antisense strand to SEQ ID NO: 823208
auuacagagaaccucauua

SEQ ID NO: 823210 - RNA, 19 nt, Artificial Sequence
  Description of Artificial Sequence: Synthetic oligonucleotide
  Sense strand starting at position 3454 of SEQ ID NO: 587850
ugagguucucuguaaugga

SEQ ID NO: 823211 - RNA, 19 nt, Artificial Sequence
  Description of Artificial Sequence: Synthetic oligonucleotide
  Antisense strand to SEQ ID NO: 823210
uccauuacagagaaccuca

SEQ ID NO: 823212 - RNA, 19 nt, Artificial Sequence
  Description of Artificial Sequence: Synthetic oligonucleotide
  Sense strand starting at position 3520 of SEQ ID NO: 587850
cuuuauagcaggcaugagu

SEQ ID NO: 823213 - RNA, 19 nt, Artificial Sequence
  Description of Artificial Sequence: Synthetic oligonucleotide
  Antisense strand to SEQ ID NO: 823212
acucaugccugcuauaaag

SEQ ID NO: 823214 - RNA, 19 nt, Artificial Sequence
  Description of Artificial Sequence: Synthetic oligonucleotide
  Sense strand starting at position 3528 of SEQ ID NO: 587850
caggcaugagugugauaau

SEQ ID NO: 823215 - RNA, 19 nt, Artificial Sequence
  Description of Artificial Sequence: Synthetic oligonucleotide
  Antisense strand to SEQ ID NO: 823214
auuaucacacucaugccug

SEQ ID NO: 823216 - RNA, 19 nt, Artificial Sequence
  Description of Artificial Sequence: Synthetic oligonucleotide
  Sense strand starting at position 3723 of SEQ ID NO: 587850
caucaauaugcauggugaa

SEQ ID NO: 823217 - RNA, 19 nt, Artificial Sequence
  Description of Artificial Sequence: Synthetic oligonucleotide
  Antisense strand to SEQ ID NO: 823216
uucaccaugcauauugaug

SEQ ID NO: 823218 - RNA, 19 nt, Artificial Sequence
  Description of Artificial Sequence: Synthetic oligonucleotide
  Sense strand starting at position 3724 of SEQ ID NO: 587850
aucaauaugcauggugaau

SEQ ID NO: 823219 - RNA, 19 nt, Artificial Sequence
  Description of Artificial Sequence: Synthetic oligonucleotide
  Antisense strand to SEQ ID NO: 823218
auucaccaugcauauugau

SEQ ID NO: 823220 - RNA, 19 nt, Artificial Sequence
  Description of Artificial Sequence: Synthetic oligonucleotide
  Sense strand starting at position 3823 of SEQ ID NO: 587850
ucuuaauaucgguacacug

SEQ ID NO: 823221 - RNA, 19 nt, Artificial Sequence
  Description of Artificial Sequence: Synthetic oligonucleotide
  Antisense strand to SEQ ID NO: 823220
caguguaccgauauuaaga

SEQ ID NO: 823222 - RNA, 19 nt, Artificial Sequence
  Description of Artificial Sequence: Synthetic oligonucleotide
  Sense strand starting at position 3929 of SEQ ID NO: 587850
cuguuaucugacuacagua

SEQ ID NO: 823223 - RNA, 19 nt, Artificial Sequence
  Description of Artificial Sequence: Synthetic oligonucleotide
  Antisense strand to SEQ ID NO: 823222
uacuguagucagauaacag

SEQ ID NO: 823224 - RNA, 19 nt, Artificial Sequence
  Description of Artificial Sequence: Synthetic oligonucleotide
  Sense strand starting at position 3931 of SEQ ID NO: 587850
guuaucugacuacaguaau

SEQ ID NO: 823225 - RNA, 19 nt, Artificial Sequence
  Description of Artificial Sequence: Synthetic oligonucleotide
  Antisense strand to SEQ ID NO: 823224
auuacuguagucagauaac

SEQ ID NO: 823226 - RNA, 19 nt, Artificial Sequence
  Description of Artificial Sequence: Synthetic oligonucleotide
  Sense strand starting at position 87 of SEQ ID NO: 587851
agaccauguuaugcuuaaa

SEQ ID NO: 823227 - RNA, 19 nt, Artificial Sequence
  Description of Artificial Sequence: Synthetic oligonucleotide
  Antisense strand to SEQ ID NO: 823226
uuuaagcauaacauggucu

SEQ ID NO: 823228 - RNA, 19 nt, Artificial Sequence
  Description of Artificial Sequence: Synthetic oligonucleotide
  Sense strand starting at position 138 of SEQ ID NO: 587851
ugucacaacugaguaucau

SEQ ID NO: 823229 - RNA, 19 nt, Artificial Sequence
  Description of Artificial Sequence: Synthetic oligonucleotide
  Antisense strand to SEQ ID NO: 823228
augauacucaguugugaca

SEQ ID NO: 823230 - RNA, 19 nt, Artificial Sequence
  Description of Artificial Sequence: Synthetic oligonucleotide
  Sense strand starting at position 139 of SEQ ID NO: 587851
gucacaacugaguaucaua

SEQ ID NO: 823231 - RNA, 19 nt, Artificial Sequence
  Description of Artificial Sequence: Synthetic oligonucleotide
  Antisense strand to SEQ ID NO: 823230
uaugauacucaguugugac

SEQ ID NO: 823232 - RNA, 19 nt, Artificial Sequence
  Description of Artificial Sequence: Synthetic oligonucleotide
  Sense strand starting at position 150 of SEQ ID NO: 587851
guaucauaauaaccuguca

SEQ ID NO: 823233 - RNA, 19 nt, Artificial Sequence
  Description of Artificial Sequence: Synthetic oligonucleotide
  Antisense strand to SEQ ID NO: 823232
ugacagguuauuaugauac

SEQ ID NO: 823234 - RNA, 19 nt, Artificial Sequence
  Description of Artificial Sequence: Synthetic oligonucleotide
  Sense strand starting at position 246 of SEQ ID NO: 587851
auaagaugacacgguuaca

SEQ ID NO: 823235 - RNA, 19 nt, Artificial Sequence
  Description of Artificial Sequence: Synthetic oligonucleotide
  Antisense strand to SEQ ID NO: 823234
uguaaccgugucaucuuau

SEQ ID NO: 823236 - RNA, 19 nt, Artificial Sequence
  Description of Artificial Sequence: Synthetic oligonucleotide
  Sense strand starting at position 333 of SEQ ID NO: 587851
gcauaaacagccugagaug

SEQ ID NO: 823237 - RNA, 19 nt, Artificial Sequence
  Description of Artificial Sequence: Synthetic oligonucleotide
  Antisense strand to SEQ ID NO: 823236
caucucaggcuguuuaugc

SEQ ID NO: 823238 - RNA, 19 nt, Artificial Sequence
  Description of Artificial Sequence: Synthetic oligonucleotide
  Sense strand starting at position 500 of SEQ ID NO: 587851
ccaggacuuugagauuuau

SEQ ID NO: 823239 - RNA, 19 nt, Artificial Sequence
  Description of Artificial Sequence: Synthetic oligonucleotide
  Antisense strand to SEQ ID NO: 823238
auaaaucucaaaguccugg

SEQ ID NO: 823240 - RNA, 19 nt, Artificial Sequence
  Description of Artificial Sequence: Synthetic oligonucleotide
  Sense strand starting at position 658 of SEQ ID NO: 587851
gcaggaauggaguaaaguu

SEQ ID NO: 823241 - RNA, 19 nt, Artificial Sequence
  Description of Artificial Sequence: Synthetic oligonucleotide
  Antisense strand to SEQ ID NO: 823240
aacuuuacuccauuccugc

SEQ ID NO: 823242 - RNA, 19 nt, Artificial Sequence
  Description of Artificial Sequence: Synthetic oligonucleotide
  Sense strand starting at position 1188 of SEQ ID NO: 587851
ccaagucaugcugaacaaa

SEQ ID NO: 823243 - RNA, 19 nt, Artificial Sequence
  Description of Artificial Sequence: Synthetic oligonucleotide
  Antisense strand to SEQ ID NO: 823242
uuuguucagcaugacuugg

SEQ ID NO: 823244 - RNA, 19 nt, Artificial Sequence
  Description of Artificial Sequence: Synthetic oligonucleotide
  Sense strand starting at position 1191 of SEQ ID NO: 587851
agucaugcugaacaaacua

SEQ ID NO: 823245 - RNA, 19 nt, Artificial Sequence
  Description of Artificial Sequence: Synthetic oligonucleotide
  Antisense strand to SEQ ID NO: 823244
uaguuuguucagcaugacu

SEQ ID NO: 823246 - RNA, 19 nt, Artificial Sequence
  Description of Artificial Sequence: Synthetic oligonucleotide
  Sense strand starting at position 1239 of SEQ ID NO: 587851
agaaguuacagugguaaca

SEQ ID NO: 823247 - RNA, 19 nt, Artificial Sequence
  Description of Artificial Sequence: Synthetic oligonucleotide
  Antisense strand to SEQ ID NO: 823246
uguuaccacuguaacuucu

SEQ ID NO: 823248 - RNA, 19 nt, Artificial Sequence
  Description of Artificial Sequence: Synthetic oligonucleotide
  Sense strand starting at position 1248 of SEQ ID NO: 587851
agugguaacaacuggaauu

SEQ ID NO: 823249 - RNA, 19 nt, Artificial Sequence
  Description of Artificial Sequence: Synthetic oligonucleotide
  Antisense strand to SEQ ID NO: 823248
aauuccaguuguuaccacu

SEQ ID NO: 823250 - RNA, 19 nt, Artificial Sequence
  Description of Artificial Sequence: Synthetic oligonucleotide
  Sense strand starting at position 1249 of SEQ ID NO: 587851
gugguaacaacuggaauua

SEQ ID NO: 823251 - RNA, 19 nt, Artificial Sequence
  Description of Artificial Sequence: Synthetic oligonucleotide
  Antisense strand to SEQ ID NO: 823250
uaauuccaguuguuaccac

SEQ ID NO: 823252 - RNA, 19 nt, Artificial Sequence
  Description of Artificial Sequence: Synthetic oligonucleotide
  Sense strand starting at position 1363 of SEQ ID NO: 587851
agaccuaagcuaugauacu

SEQ ID NO: 823253 - RNA, 19 nt, Artificial Sequence
  Description of Artificial Sequence: Synthetic oligonucleotide
  Antisense strand to SEQ ID NO: 823252
aguaucauagcuuaggucu

SEQ ID NO: 823254 - RNA, 19 nt, Artificial Sequence
  Description of Artificial Sequence: Synthetic oligonucleotide
  Sense strand starting at position 1527 of SEQ ID NO: 587851
gccugaaaugacuacuuac

SEQ ID NO: 823255 - RNA, 19 nt, Artificial Sequence
  Description of Artificial Sequence: Synthetic oligonucleotide
  Antisense strand to SEQ ID NO: 823254
guaaguagucauuucaggc

SEQ ID NO: 823256 - RNA, 19 nt, Artificial Sequence
  Description of Artificial Sequence: Synthetic oligonucleotide
  Sense strand starting at position 1812 of SEQ ID NO: 587851
ucuacugacguuuaaauca

SEQ ID NO: 823257 - RNA, 19 nt, Artificial Sequence
  Description of Artificial Sequence: Synthetic oligonucleotide
  Antisense strand to SEQ ID NO: 823256
ugauuuaaacgucaguaga

SEQ ID NO: 823258 - RNA, 19 nt, Artificial Sequence
  Description of Artificial Sequence: Synthetic oligonucleotide
  Sense strand starting at position 1817 of SEQ ID NO: 587851
ugacguuuaaaucaggauu

SEQ ID NO: 823259 - RNA, 19 nt, Artificial Sequence
  Description of Artificial Sequence: Synthetic oligonucleotide
  Antisense strand to SEQ ID NO: 823258
aauccugauuuaaacguca

SEQ ID NO: 823260 - RNA, 19 nt, Artificial Sequence
  Description of Artificial Sequence: Synthetic oligonucleotide
  Sense strand starting at position 1992 of SEQ ID NO: 587851
auguuagcaagagguagaa

SEQ ID NO: 823261 - RNA, 19 nt, Artificial Sequence
  Description of Artificial Sequence: Synthetic oligonucleotide
  Antisense strand to SEQ ID NO: 823260
uucuaccucuugcuaacau

SEQ ID NO: 823262 - RNA, 19 nt, Artificial Sequence
  Description of Artificial Sequence: Synthetic oligonucleotide
  Sense strand starting at position 2087 of SEQ ID NO: 587851
aggugagauacugguagga

SEQ ID NO: 823263 - RNA, 19 nt, Artificial Sequence
  Description of Artificial Sequence: Synthetic oligonucleotide
  Antisense strand to SEQ ID NO: 823262
uccuaccaguaucucaccu

SEQ ID NO: 823264 - RNA, 19 nt, Artificial Sequence
  Description of Artificial Sequence: Synthetic oligonucleotide
  Sense strand starting at position 2176 of SEQ ID NO: 587851
gaugaaauagguuaucguc

SEQ ID NO: 823265 - RNA, 19 nt, Artificial Sequence
  Description of Artificial Sequence: Synthetic oligonucleotide
  Antisense strand to SEQ ID NO: 823264
gacgauaaccuauuucauc

SEQ ID NO: 823266 - RNA, 19 nt, Artificial Sequence
  Description of Artificial Sequence: Synthetic oligonucleotide
  Sense strand starting at position 2244 of SEQ ID NO: 587851
acugcuacauaggugaaau

SEQ ID NO: 823267 - RNA, 19 nt, Artificial Sequence
  Description of Artificial Sequence: Synthetic oligonucleotide
  Antisense strand to SEQ ID NO: 823266
auuucaccuauguagcagu

SEQ ID NO: 823268 - RNA, 19 nt, Artificial Sequence
  Description of Artificial Sequence: Synthetic oligonucleotide
  Sense strand starting at position 2245 of SEQ ID NO: 587851
cugcuacauaggugaaaug

SEQ ID NO: 823269 - RNA, 19 nt, Artificial Sequence
  Description of Artificial Sequence: Synthetic oligonucleotide
  Antisense strand to SEQ ID NO: 823268
cauuucaccuauguagcag

SEQ ID NO: 823270 - RNA, 19 nt, Artificial Sequence
  Description of Artificial Sequence: Synthetic oligonucleotide
  Sense strand starting at position 2252 of SEQ ID NO: 587851
auaggugaaauguguuaua

SEQ ID NO: 823271 - RNA, 19 nt, Artificial Sequence
  Description of Artificial Sequence: Synthetic oligonucleotide
  Antisense strand to SEQ ID NO: 823270
uauaacacauuucaccuau

SEQ ID NO: 823272 - RNA, 19 nt, Artificial Sequence
  Description of Artificial Sequence: Synthetic oligonucleotide
  Sense strand starting at position 2263 of SEQ ID NO: 587851
guguuauacaaugaaguga

SEQ ID NO: 823273 - RNA, 19 nt, Artificial Sequence
  Description of Artificial Sequence: Synthetic oligonucleotide
  Antisense strand to SEQ ID NO: 823272
ucacuucauuguauaacac

SEQ ID NO: 823274 - RNA, 19 nt, Artificial Sequence
  Description of Artificial Sequence: Synthetic oligonucleotide
  Sense strand starting at position 2405 of SEQ ID NO: 587851
agaacuagacacugcuaau

SEQ ID NO: 823275 - RNA, 19 nt, Artificial Sequence
  Description of Artificial Sequence: Synthetic oligonucleotide
  Antisense strand to SEQ ID NO: 823274
auuagcagugucuaguucu

SEQ ID NO: 823276 - RNA, 19 nt, Artificial Sequence
  Description of Artificial Sequence: Synthetic oligonucleotide
  Sense strand starting at position 2435 of SEQ ID NO: 587851
gaguauguggcagauauga

SEQ ID NO: 823277 - RNA, 19 nt, Artificial Sequence
  Description of Artificial Sequence: Synthetic oligonucleotide
  Antisense strand to SEQ ID NO: 823276
ucauaucugccacauacuc

SEQ ID NO: 823278 - RNA, 19 nt, Artificial Sequence
  Description of Artificial Sequence: Synthetic oligonucleotide
  Sense strand starting at position 2437 of SEQ ID NO: 587851
guauguggcagauaugaag

SEQ ID NO: 823279 - RNA, 19 nt, Artificial Sequence
  Description of Artificial Sequence: Synthetic oligonucleotide
  Antisense strand to SEQ ID NO: 823278
cuucauaucugccacauac

SEQ ID NO: 823280 - RNA, 19 nt, Artificial Sequence
  Description of Artificial Sequence: Synthetic oligonucleotide
  Sense strand starting at position 2492 of SEQ ID NO: 587851
ucagaacugcuguaaguau

SEQ ID NO: 823281 - RNA, 19 nt, Artificial Sequence
  Description of Artificial Sequence: Synthetic oligonucleotide
  Antisense strand to SEQ ID NO: 823280
auacuuacagcaguucuga

SEQ ID NO: 823282 - RNA, 19 nt, Artificial Sequence
  Description of Artificial Sequence: Synthetic oligonucleotide
  Sense strand starting at position 2701 of SEQ ID NO: 587851
gcauuugcacgaugagcua

SEQ ID NO: 823283 - RNA, 19 nt, Artificial Sequence
  Description of Artificial Sequence: Synthetic oligonucleotide
  Antisense strand to SEQ ID NO: 823282
uagcucaucgugcaaaugc

SEQ ID NO: 823284 - RNA, 19 nt, Artificial Sequence
  Description of Artificial Sequence: Synthetic oligonucleotide
  Sense strand starting at position 2719 of SEQ ID NO: 587851
agucaacagcaguaucaga

SEQ ID NO: 823285 - RNA, 19 nt, Artificial Sequence
  Description of Artificial Sequence: Synthetic oligonucleotide
  Antisense strand to SEQ ID NO: 823284
ucugauacugcuguugacu

SEQ ID NO: 823286 - RNA, 19 nt, Artificial Sequence
  Description of Artificial Sequence: Synthetic oligonucleotide
  Sense strand starting at position 2912 of SEQ ID NO: 587851
auguuauaauaaccacagu

SEQ ID NO: 823287 - RNA, 19 nt, Artificial Sequence
  Description of Artificial Sequence: Synthetic oligonucleotide
  Antisense strand to SEQ ID NO: 823286
acugugguuauuauaacau

SEQ ID NO: 823288 - RNA, 19 nt, Artificial Sequence
  Description of Artificial Sequence: Synthetic oligonucleotide
  Sense strand starting at position 3182 of SEQ ID NO: 587851
augaguuaacagcaauauc

SEQ ID NO: 823289 - RNA, 19 nt, Artificial Sequence
  Description of Artificial Sequence: Synthetic oligonucleotide
  Antisense strand to SEQ ID NO: 823288
gauauugcuguuaacucau

SEQ ID NO: 823290 - RNA, 19 nt, Artificial Sequence
  Description of Artificial Sequence: Synthetic oligonucleotide
  Sense strand starting at position 3220 of SEQ ID NO: 587851
cuauacuucuggcugaaua

SEQ ID NO: 823291 - RNA, 19 nt, Artificial Sequence
  Description of Artificial Sequence: Synthetic oligonucleotide
  Antisense strand to SEQ ID NO: 823290
uauucagccagaaguauag

SEQ ID NO: 823292 - RNA, 19 nt, Artificial Sequence
  Description of Artificial Sequence: Synthetic oligonucleotide
  Sense strand starting at position 3222 of SEQ ID NO: 587851
auacuucuggcugaauaac

SEQ ID NO: 823293 - RNA, 19 nt, Artificial Sequence
  Description of Artificial Sequence: Synthetic oligonucleotide
  Antisense strand to SEQ ID NO: 823292
guuauucagccagaaguau

SEQ ID NO: 823294 - RNA, 19 nt, Artificial Sequence
  Description of Artificial Sequence: Synthetic oligonucleotide
  Sense strand starting at position 3241 of SEQ ID NO: 587851
aacggaugucccuauagug

SEQ ID NO: 823295 - RNA, 19 nt, Artificial Sequence
  Description of Artificial Sequence: Synthetic oligonucleotide
  Antisense strand to SEQ ID NO: 823294
cacuauagggacauccguu

SEQ ID NO: 823296 - RNA, 19 nt, Artificial Sequence
  Description of Artificial Sequence: Synthetic oligonucleotide
  Sense strand starting at position 3265 of SEQ ID NO: 587851
aaguguucugagugaaagg

SEQ ID NO: 823297 - RNA, 19 nt, Artificial Sequence
  Description of Artificial Sequence: Synthetic oligonucleotide
  Antisense strand to SEQ ID NO: 823296
ccuuucacucagaacacuu

SEQ ID NO: 823298 - RNA, 19 nt, Artificial Sequence
  Description of Artificial Sequence: Synthetic oligonucleotide
  Sense strand starting at position 3266 of SEQ ID NO: 587851
aguguucugagugaaagga

SEQ ID NO: 823299 - RNA, 19 nt, Artificial Sequence
  Description of Artificial Sequence: Synthetic oligonucleotide
  Antisense strand to SEQ ID NO: 823298
uccuuucacucagaacacu

SEQ ID NO: 823300 - RNA, 19 nt, Artificial Sequence
  Description of Artificial Sequence: Synthetic oligonucleotide
  Sense strand starting at position 3359 of SEQ ID NO: 587851
guaagucacuuauucuaga

SEQ ID NO: 823301 - RNA, 19 nt, Artificial Sequence
  Description of Artificial Sequence: Synthetic oligonucleotide
  Antisense strand to SEQ ID NO: 823300
ucuagaauaagugacuuac

SEQ ID NO: 823302 - RNA, 19 nt, Artificial Sequence
  Description of Artificial Sequence: Synthetic oligonucleotide
  Sense strand starting at position 3839 of SEQ ID NO: 587851
gggaguaaguuacccucaa

SEQ ID NO: 823303 - RNA, 19 nt, Artificial Sequence
  Description of Artificial Sequence: Synthetic oligonucleotide
  Antisense strand to SEQ ID NO: 823302
uugaggguaacuuacuccc

SEQ ID NO: 823304 - RNA, 19 nt, Artificial Sequence
  Description of Artificial Sequence: Synthetic oligonucleotide
  Sense strand starting at position 3840 of SEQ ID NO: 587851
ggaguaaguuacccucaac

SEQ ID NO: 823305 - RNA, 19 nt, Artificial Sequence
  Description of Artificial Sequence: Synthetic oligonucleotide
  Antisense strand to SEQ ID NO: 823304
guugaggguaacuuacucc

SEQ ID NO: 823306 - RNA, 19 nt, Artificial Sequence
  Description of Artificial Sequence: Synthetic oligonucleotide
  Sense strand starting at position 23 of SEQ ID NO: 587852
uugagaccucauugugauu

SEQ ID NO: 823307 - RNA, 19 nt, Artificial Sequence
  Description of Artificial Sequence: Synthetic oligonucleotide
  Antisense strand to SEQ ID NO: 823306
aaucacaaugaggucucaa

SEQ ID NO: 823308 - RNA, 19 nt, Artificial Sequence
  Description of Artificial Sequence: Synthetic oligonucleotide
  Sense strand starting at position 299 of SEQ ID NO: 587852
gagagaucauaaucagugu

SEQ ID NO: 823309 - RNA, 19 nt, Artificial Sequence
  Description of Artificial Sequence: Synthetic oligonucleotide
  Antisense strand to SEQ ID NO: 823308
acacugauuaugaucucuc

SEQ ID NO: 823310 - RNA, 19 nt, Artificial Sequence
  Description of Artificial Sequence: Synthetic oligonucleotide
  Sense strand starting at position 308 of SEQ ID NO: 587852
uaaucagugucaccugaug

SEQ ID NO: 823311 - RNA, 19 nt, Artificial Sequence
  Description of Artificial Sequence: Synthetic oligonucleotide
  Antisense strand to SEQ ID NO: 823310
caucaggugacacugauua

SEQ ID NO: 823312 - RNA, 19 nt, Artificial Sequence
  Description of Artificial Sequence: Synthetic oligonucleotide
  Sense strand starting at position 317 of SEQ ID NO: 587852
ucaccugaugggugacaua

SEQ ID NO: 823313 - RNA, 19 nt, Artificial Sequence
  Description of Artificial Sequence: Synthetic oligonucleotide
  Antisense strand to SEQ ID NO: 823312
uaugucacccaucagguga

SEQ ID NO: 823314 - RNA, 19 nt, Artificial Sequence
  Description of Artificial Sequence: Synthetic oligonucleotide
  Sense strand starting at position 422 of SEQ ID NO: 587852
aucugaagucuugacuauc

SEQ ID NO: 823315 - RNA, 19 nt, Artificial Sequence
  Description of Artificial Sequence: Synthetic oligonucleotide
  Antisense strand to SEQ ID NO: 823314
gauagucaagacuucagau

SEQ ID NO: 823316 - RNA, 19 nt, Artificial Sequence
  Description of Artificial Sequence: Synthetic oligonucleotide
  Sense strand starting at position 688 of SEQ ID NO: 587852
gguuguuaagacagucguu

SEQ ID NO: 823317 - RNA, 19 nt, Artificial Sequence
  Description of Artificial Sequence: Synthetic oligonucleotide
  Antisense strand to SEQ ID NO: 823316
aacgacugucuuaacaacc

SEQ ID NO: 823318 - RNA, 19 nt, Artificial Sequence
  Description of Artificial Sequence: Synthetic oligonucleotide
  Sense strand starting at position 693 of SEQ ID NO: 587852
uuaagacagucguuauaag

SEQ ID NO: 823319 - RNA, 19 nt, Artificial Sequence
  Description of Artificial Sequence: Synthetic oligonucleotide
  Antisense strand to SEQ ID NO: 823318
cuuauaacgacugucuuaa

SEQ ID NO: 823320 - RNA, 19 nt, Artificial Sequence
  Description of Artificial Sequence: Synthetic oligonucleotide
  Sense strand starting at position 1051 of SEQ ID NO: 587852
aaggaaguuuguguuccaa

SEQ ID NO: 823321 - RNA, 19 nt, Artificial Sequence
  Description of Artificial Sequence: Synthetic oligonucleotide
  Antisense strand to SEQ ID NO: 823320
uuggaacacaaacuuccuu

SEQ ID NO: 823322 - RNA, 19 nt, Artificial Sequence
  Description of Artificial Sequence: Synthetic oligonucleotide
  Sense strand starting at position 1053 of SEQ ID NO: 587852
ggaaguuuguguuccaagg

SEQ ID NO: 823323 - RNA, 19 nt, Artificial Sequence
  Description of Artificial Sequence: Synthetic oligonucleotide
  Antisense strand to SEQ ID NO: 823322
ccuuggaacacaaacuucc

SEQ ID NO: 823324 - RNA, 19 nt, Artificial Sequence
  Description of Artificial Sequence: Synthetic oligonucleotide
  Sense strand starting at position 1947 of SEQ ID NO: 587852
ucucgcuuucgccuaaaua

SEQ ID NO: 823325 - RNA, 19 nt, Artificial Sequence
  Description of Artificial Sequence: Synthetic oligonucleotide
  Antisense strand to SEQ ID NO: 823324
uauuuaggcgaaagcgaga

SEQ ID NO: 823326 - RNA, 19 nt, Artificial Sequence
  Description of Artificial Sequence: Synthetic oligonucleotide
  Sense strand starting at position 2310 of SEQ ID NO: 587852
agaguagggacccgugauu

SEQ ID NO: 823327 - RNA, 19 nt, Artificial Sequence
  Description of Artificial Sequence: Synthetic oligonucleotide
  Antisense strand to SEQ ID NO: 823326
aaucacgggucccuacucu

SEQ ID NO: 823328 - RNA, 19 nt, Artificial Sequence
  Description of Artificial Sequence: Synthetic oligonucleotide
  Sense strand starting at position 2576 of SEQ ID NO: 587852
cccugagauguauggguuu

SEQ ID NO: 823329 - RNA, 19 nt, Artificial Sequence
  Description of Artificial Sequence: Synthetic oligonucleotide
  Antisense strand to SEQ ID NO: 823328
aaacccauacaucucaggg

SEQ ID NO: 823330 - RNA, 19 nt, Artificial Sequence
  Description of Artificial Sequence: Synthetic oligonucleotide
  Sense strand starting at position 2600 of SEQ ID NO: 587852
gggaauuccgacgguugau

SEQ ID NO: 823331 - RNA, 19 nt, Artificial Sequence
  Description of Artificial Sequence: Synthetic oligonucleotide
  Antisense strand to SEQ ID NO: 823330
aucaaccgucggaauuccc

SEQ ID NO: 823332 - RNA, 19 nt, Artificial Sequence
  Description of Artificial Sequence: Synthetic oligonucleotide
  Sense strand starting at position 2619 of SEQ ID NO: 587852
acaguugucuuauccuaca

SEQ ID NO: 823333 - RNA, 19 nt, Artificial Sequence
  Description of Artificial Sequence: Synthetic oligonucleotide
  Antisense strand to SEQ ID NO: 823332
uguaggauaagacaacugu

SEQ ID NO: 823334 - RNA, 19 nt, Artificial Sequence
  Description of Artificial Sequence: Synthetic oligonucleotide
  Sense strand starting at position 2641 of SEQ ID NO: 587852
ugguucagguggcuaaaua

SEQ ID NO: 823335 - RNA, 19 nt, Artificial Sequence
  Description of Artificial Sequence: Synthetic oligonucleotide
  Antisense strand to SEQ ID NO: 823334
uauuuagccaccugaacca

SEQ ID NO: 823336 - RNA, 19 nt, Artificial Sequence
  Description of Artificial Sequence: Synthetic oligonucleotide
  Sense strand starting at position 2841 of SEQ ID NO: 587852
ugugauagggccuaauaau

SEQ ID NO: 823337 - RNA, 19 nt, Artificial Sequence
  Description of Artificial Sequence: Synthetic oligonucleotide
  Antisense strand to SEQ ID NO: 823336
auuauuaggcccuaucaca

SEQ ID NO: 823338 - RNA, 19 nt, Artificial Sequence
  Description of Artificial Sequence: Synthetic oligonucleotide
  Sense strand starting at position 2858 of SEQ ID NO: 587852
auuaacagugccugagaau

SEQ ID NO: 823339 - RNA, 19 nt, Artificial Sequence
  Description of Artificial Sequence: Synthetic oligonucleotide
  Antisense strand to SEQ ID NO: 823338
auucucaggcacuguuaau

SEQ ID NO: 823340 - RNA, 19 nt, Artificial Sequence
  Description of Artificial Sequence: Synthetic oligonucleotide
  Sense strand starting at position 2859 of SEQ ID NO: 587852
uuaacagugccugagaauc

SEQ ID NO: 823341 - RNA, 19 nt, Artificial Sequence
  Description of Artificial Sequence: Synthetic oligonucleotide
  Antisense strand to SEQ ID NO: 823340
gauucucaggcacuguuaa

SEQ ID NO: 823342 - RNA, 19 nt, Artificial Sequence
  Description of Artificial Sequence: Synthetic oligonucleotide
  Sense strand starting at position 2923 of SEQ ID NO: 587852
ggaugcuauaagcagacau

SEQ ID NO: 823343 - RNA, 19 nt, Artificial Sequence
  Description of Artificial Sequence: Synthetic oligonucleotide
  Antisense strand to SEQ ID NO: 823342
augucugcuuauagcaucc

SEQ ID NO: 823344 - RNA, 19 nt, Artificial Sequence
  Description of Artificial Sequence: Synthetic oligonucleotide
  Sense strand starting at position 2925 of SEQ ID NO: 587852
augcuauaagcagacauga

SEQ ID NO: 823345 - RNA, 19 nt, Artificial Sequence
  Description of Artificial Sequence: Synthetic oligonucleotide
  Antisense strand to SEQ ID NO: 823344
ucaugucugcuuauagcau

SEQ ID NO: 823346 - RNA, 19 nt, Artificial Sequence
  Description of Artificial Sequence: Synthetic oligonucleotide
  Sense strand starting at position 2946 of SEQ ID NO: 587852
augggaaucacguggauag

SEQ ID NO: 823347 - RNA, 19 nt, Artificial Sequence
  Description of Artificial Sequence: Synthetic oligonucleotide
  Antisense strand to SEQ ID NO: 823346
cuauccacgugauucccau

SEQ ID NO: 823348 - RNA, 19 nt, Artificial Sequence
  Description of Artificial Sequence: Synthetic oligonucleotide
  Sense strand starting at position 2950 of SEQ ID NO: 587852
gaaucacguggauagcaau

SEQ ID NO: 823349 - RNA, 19 nt, Artificial Sequence
  Description of Artificial Sequence: Synthetic oligonucleotide
  Antisense strand to SEQ ID NO: 823348
auugcuauccacgugauuc

SEQ ID NO: 823350 - RNA, 19 nt, Artificial Sequence
  Description of Artificial Sequence: Synthetic oligonucleotide
  Sense strand starting at position 2956 of SEQ ID NO: 587852
cguggauagcaauacaauu

SEQ ID NO: 823351 - RNA, 19 nt, Artificial Sequence
  Description of Artificial Sequence: Synthetic oligonucleotide
  Antisense strand to SEQ ID NO: 823350
aauuguauugcuauccacg

SEQ ID NO: 823352 - RNA, 19 nt, Artificial Sequence
  Description of Artificial Sequence: Synthetic oligonucleotide
  Sense strand starting at position 3055 of SEQ ID NO: 587852
agggaauagccucgggaau

SEQ ID NO: 823353 - RNA, 19 nt, Artificial Sequence
  Description of Artificial Sequence: Synthetic oligonucleotide
  Antisense strand to SEQ ID NO: 823352
auucccgaggcuauucccu

SEQ ID NO: 823354 - RNA, 19 nt, Artificial Sequence
  Description of Artificial Sequence: Synthetic oligonucleotide
  Sense strand starting at position 3056 of SEQ ID NO: 587852
gggaauagccucgggaaua

SEQ ID NO: 823355 - RNA, 19 nt, Artificial Sequence
  Description of Artificial Sequence: Synthetic oligonucleotide
  Antisense strand to SEQ ID NO: 823354
uauucccgaggcuauuccc

SEQ ID NO: 823356 - RNA, 19 nt, Artificial Sequence
  Description of Artificial Sequence: Synthetic oligonucleotide
  Sense strand starting at position 3067 of SEQ ID NO: 587852
cgggaauaaaucuggcuca

SEQ ID NO: 823357 - RNA, 19 nt, Artificial Sequence
  Description of Artificial Sequence: Synthetic oligonucleotide
  Antisense strand to SEQ ID NO: 823356
ugagccagauuuauucccg

SEQ ID NO: 823358 - RNA, 19 nt, Artificial Sequence
  Description of Artificial Sequence: Synthetic oligonucleotide
  Sense strand starting at position 3083 of SEQ ID NO: 587852
ucaagacuggauugacuuu

SEQ ID NO: 823359 - RNA, 19 nt, Artificial Sequence
  Description of Artificial Sequence: Synthetic oligonucleotide
  Antisense strand to SEQ ID NO: 823358
aaagucaauccagucuuga

SEQ ID NO: 823360 - RNA, 19 nt, Artificial Sequence
  Description of Artificial Sequence: Synthetic oligonucleotide
  Sense strand starting at position 3194 of SEQ ID NO: 587852
aucggauucuucccaugau

SEQ ID NO: 823361 - RNA, 19 nt, Artificial Sequence
  Description of Artificial Sequence: Synthetic oligonucleotide
  Antisense strand to SEQ ID NO: 823360
aucaugggaagaauccgau

SEQ ID NO: 823362 - RNA, 19 nt, Artificial Sequence
  Description of Artificial Sequence: Synthetic oligonucleotide
  Sense strand starting at position 3234 of SEQ ID NO: 587852
ugucuuggucaucagcaaa

SEQ ID NO: 823363 - RNA, 19 nt, Artificial Sequence
  Description of Artificial Sequence: Synthetic oligonucleotide
  Antisense strand to SEQ ID NO: 823362
uuugcugaugaccaagaca

SEQ ID NO: 823364 - RNA, 19 nt, Artificial Sequence
  Description of Artificial Sequence: Synthetic oligonucleotide
  Sense strand starting at position 3307 of SEQ ID NO: 587852
uguuguucuggucacuaau

SEQ ID NO: 823365 - RNA, 19 nt, Artificial Sequence
  Description of Artificial Sequence: Synthetic oligonucleotide
  Antisense strand to SEQ ID NO: 823364
auuagugaccagaacaaca

SEQ ID NO: 823366 - RNA, 19 nt, Artificial Sequence
  Description of Artificial Sequence: Synthetic oligonucleotide
  Sense strand starting at position 3425 of SEQ ID NO: 587852
cuuuaauucugaguccaug

SEQ ID NO: 823367 - RNA, 19 nt, Artificial Sequence
  Description of Artificial Sequence: Synthetic oligonucleotide
  Antisense strand to SEQ ID NO: 823366
cauggacucagaauuaaag

SEQ ID NO: 823368 - RNA, 19 nt, Artificial Sequence
  Description of Artificial Sequence: Synthetic oligonucleotide
  Sense strand starting at position 3440 of SEQ ID NO: 587852
cauggagcuguguacaagu

SEQ ID NO: 823369 - RNA, 19 nt, Artificial Sequence
  Description of Artificial Sequence: Synthetic oligonucleotide
  Antisense strand to SEQ ID NO: 823368
acuuguacacagcuccaug

SEQ ID NO: 823370 - RNA, 19 nt, Artificial Sequence
  Description of Artificial Sequence: Synthetic oligonucleotide
  Sense strand starting at position 3508 of SEQ ID NO: 587852
agacauaauuuccauggga

SEQ ID NO: 823371 - RNA, 19 nt, Artificial Sequence
  Description of Artificial Sequence: Synthetic oligonucleotide
  Antisense strand to SEQ ID NO: 823370
ucccauggaaauuaugucu

SEQ ID NO: 823372 - RNA, 19 nt, Artificial Sequence
  Description of Artificial Sequence: Synthetic oligonucleotide
  Sense strand starting at position 3578 of SEQ ID NO: 587852
aacugaaauccaggugcuu

SEQ ID NO: 823373 - RNA, 19 nt, Artificial Sequence
  Description of Artificial Sequence: Synthetic oligonucleotide
  Antisense strand to SEQ ID NO: 823372
aagcaccuggauuucaguu

SEQ ID NO: 823374 - RNA, 19 nt, Artificial Sequence
  Description of Artificial Sequence: Synthetic oligonucleotide
  Sense strand starting at position 3782 of SEQ ID NO: 587852
gguagaggcacucagguuu

SEQ ID NO: 823375 - RNA, 19 nt, Artificial Sequence
  Description of Artificial Sequence: Synthetic oligonucleotide
  Antisense strand to SEQ ID NO: 823374
aaaccugagugccucuacc

SEQ ID NO: 823376 - RNA, 19 nt, Artificial Sequence
  Description of Artificial Sequence: Synthetic oligonucleotide
  Sense strand starting at position 3823 of SEQ ID NO: 587852
gucuucauugagggugaaa

SEQ ID NO: 823377 - RNA, 19 nt, Artificial Sequence
  Description of Artificial Sequence: Synthetic oligonucleotide
  Antisense strand to SEQ ID NO: 823376
uuucacccucaaugaagac

SEQ ID NO: 823378 - RNA, 19 nt, Artificial Sequence
  Description of Artificial Sequence: Synthetic oligonucleotide
  Sense strand starting at position 3864 of SEQ ID NO: 587852
uuuaaauaucugggugaua

SEQ ID NO: 823379 - RNA, 19 nt, Artificial Sequence
  Description of Artificial Sequence: Synthetic oligonucleotide
  Antisense strand to SEQ ID NO: 823378
uaucacccagauauuuaaa

SEQ ID NO: 823380 - RNA, 19 nt, Artificial Sequence
  Description of Artificial Sequence: Synthetic oligonucleotide
  Sense strand starting at position 3866 of SEQ ID NO: 587852
uaaauaucugggugauaua

SEQ ID NO: 823381 - RNA, 19 nt, Artificial Sequence
  Description of Artificial Sequence: Synthetic oligonucleotide
  Antisense strand to SEQ ID NO: 823380
uauaucacccagauauuua

SEQ ID NO: 823382 - RNA, 19 nt, Artificial Sequence
  Description of Artificial Sequence: Synthetic oligonucleotide
  Sense strand starting at position 3898 of SEQ ID NO: 587852
cauugaaaucugugguuaa

SEQ ID NO: 823383 - RNA, 19 nt, Artificial Sequence
  Description of Artificial Sequence: Synthetic oligonucleotide
  Antisense strand to SEQ ID NO: 823382
uuaaccacagauuucaaug

SEQ ID NO: 823384 - RNA, 19 nt, Artificial Sequence
  Description of Artificial Sequence: Synthetic oligonucleotide
  Sense strand starting at position 3954 of SEQ ID NO: 587852
cccagugaugugcauucua

SEQ ID NO: 823385 - RNA, 19 nt, Artificial Sequence
  Description of Artificial Sequence: Synthetic oligonucleotide
  Antisense strand to SEQ ID NO: 823384
uagaaugcacaucacuggg

SEQ ID NO: 823386 - RNA, 19 nt, Artificial Sequence
  Description of Artificial Sequence: Synthetic oligonucleotide
  Sense strand starting at position 25 of SEQ ID NO: 587853
cuuuguguuccagaacaau

SEQ ID NO: 823387 - RNA, 19 nt, Artificial Sequence
  Description of Artificial Sequence: Synthetic oligonucleotide
  Antisense strand to SEQ ID NO: 823386
auuguucuggaacacaaag

SEQ ID NO: 823388 - RNA, 19 nt, Artificial Sequence
  Description of Artificial Sequence: Synthetic oligonucleotide
  Sense strand starting at position 28 of SEQ ID NO: 587853
uguguuccagaacaauagu

SEQ ID NO: 823389 - RNA, 19 nt, Artificial Sequence
  Description of Artificial Sequence: Synthetic oligonucleotide
  Antisense strand to SEQ ID NO: 823388
acuauuguucuggaacaca

SEQ ID NO: 823390 - RNA, 19 nt, Artificial Sequence
  Description of Artificial Sequence: Synthetic oligonucleotide
  Sense strand starting at position 215 of SEQ ID NO: 587853
uuguaauucugaucaaguc

SEQ ID NO: 823391 - RNA, 19 nt, Artificial Sequence
  Description of Artificial Sequence: Synthetic oligonucleotide
  Antisense strand to SEQ ID NO: 823390
gacuugaucagaauuacaa

SEQ ID NO: 823392 - RNA, 19 nt, Artificial Sequence
  Description of Artificial Sequence: Synthetic oligonucleotide
  Sense strand starting at position 216 of SEQ ID NO: 587853
uguaauucugaucaagucu

SEQ ID NO: 823393 - RNA, 19 nt, Artificial Sequence
  Description of Artificial Sequence: Synthetic oligonucleotide
  Antisense strand to SEQ ID NO: 823392
agacuugaucagaauuaca

SEQ ID NO: 823394 - RNA, 19 nt, Artificial Sequence
  Description of Artificial Sequence: Synthetic oligonucleotide
  Sense strand starting at position 330 of SEQ ID NO: 587853
ucaaaugacuacucaacgu

SEQ ID NO: 823395 - RNA, 19 nt, Artificial Sequence
  Description of Artificial Sequence: Synthetic oligonucleotide
  Antisense strand to SEQ ID NO: 823394
acguugaguagucauuuga

SEQ ID NO: 823396 - RNA, 19 nt, Artificial Sequence
  Description of Artificial Sequence: Synthetic oligonucleotide
  Sense strand starting at position 334 of SEQ ID NO: 587853
augacuacucaacgugaug

SEQ ID NO: 823397 - RNA, 19 nt, Artificial Sequence
  Description of Artificial Sequence: Synthetic oligonucleotide
  Antisense strand to SEQ ID NO: 823396
caucacguugaguagucau

SEQ ID NO: 823398 - RNA, 19 nt, Artificial Sequence
  Description of Artificial Sequence: Synthetic oligonucleotide
  Sense strand starting at position 387 of SEQ ID NO: 587853
auguaagaauaggcuauua

SEQ ID NO: 823399 - RNA, 19 nt, Artificial Sequence
  Description of Artificial Sequence: Synthetic oligonucleotide
  Antisense strand to SEQ ID NO: 823398
uaauagccuauucuuacau

SEQ ID NO: 823400 - RNA, 19 nt, Artificial Sequence
  Description of Artificial Sequence: Synthetic oligonucleotide
  Sense strand starting at position 392 of SEQ ID NO: 587853
agaauaggcuauuauagaa

SEQ ID NO: 823401 - RNA, 19 nt, Artificial Sequence
  Description of Artificial Sequence: Synthetic oligonucleotide
  Antisense strand to SEQ ID NO: 823400
uucuauaauagccuauucu

SEQ ID NO: 823402 - RNA, 19 nt, Artificial Sequence
  Description of Artificial Sequence: Synthetic oligonucleotide
  Sense strand starting at position 422 of SEQ ID NO: 587853
gcuuaaauucgacaaugca

SEQ ID NO: 823403 - RNA, 19 nt, Artificial Sequence
  Description of Artificial Sequence: Synthetic oligonucleotide
  Antisense strand to SEQ ID NO: 823402
ugcauugucgaauuuaagc

SEQ ID NO: 823404 - RNA, 19 nt, Artificial Sequence
  Description of Artificial Sequence: Synthetic oligonucleotide
  Sense strand starting at position 485 of SEQ ID NO: 587853
ccaucuuuacuucgcaaag

SEQ ID NO: 823405 - RNA, 19 nt, Artificial Sequence
  Description of Artificial Sequence: Synthetic oligonucleotide
  Antisense strand to SEQ ID NO: 823404
cuuugcgaaguaaagaugg

SEQ ID NO: 823406 - RNA, 19 nt, Artificial Sequence
  Description of Artificial Sequence: Synthetic oligonucleotide
  Sense strand starting at position 554 of SEQ ID NO: 587853
aacagcaugcgucauuuau

SEQ ID NO: 823407 - RNA, 19 nt, Artificial Sequence
  Description of Artificial Sequence: Synthetic oligonucleotide
  Antisense strand to SEQ ID NO: 823406
auaaaugacgcaugcuguu

SEQ ID NO: 823408 - RNA, 19 nt, Artificial Sequence
  Description of Artificial Sequence: Synthetic oligonucleotide
  Sense strand starting at position 556 of SEQ ID NO: 587853
cagcaugcgucauuuauua

SEQ ID NO: 823409 - RNA, 19 nt, Artificial Sequence
  Description of Artificial Sequence: Synthetic oligonucleotide
  Antisense strand to SEQ ID NO: 823408
uaauaaaugacgcaugcug

SEQ ID NO: 823410 - RNA, 19 nt, Artificial Sequence
  Description of Artificial Sequence: Synthetic oligonucleotide
  Sense strand starting at position 560 of SEQ ID NO: 587853
augcgucauuuauuacaug

SEQ ID NO: 823411 - RNA, 19 nt, Artificial Sequence
  Description of Artificial Sequence: Synthetic oligonucleotide
  Antisense strand to SEQ ID NO: 823410
cauguaauaaaugacgcau

SEQ ID NO: 823412 - RNA, 19 nt, Artificial Sequence
  Description of Artificial Sequence: Synthetic oligonucleotide
  Sense strand starting at position 563 of SEQ ID NO: 587853
cgucauuuauuacauggaa

SEQ ID NO: 823413 - RNA, 19 nt, Artificial Sequence
  Description of Artificial Sequence: Synthetic oligonucleotide
  Antisense strand to SEQ ID NO: 823412
uuccauguaauaaaugacg

SEQ ID NO: 823414 - RNA, 19 nt, Artificial Sequence
  Description of Artificial Sequence: Synthetic oligonucleotide
  Sense strand starting at position 619 of SEQ ID NO: 587853
guauuaauugcacggaaua

SEQ ID NO: 823415 - RNA, 19 nt, Artificial Sequence
  Description of Artificial Sequence: Synthetic oligonucleotide
  Antisense strand to SEQ ID NO: 823414
uauuccgugcaauuaauac

SEQ ID NO: 823416 - RNA, 19 nt, Artificial Sequence
  Description of Artificial Sequence: Synthetic oligonucleotide
  Sense strand starting at position 759 of SEQ ID NO: 587853
aauucuucucuacggugaa

SEQ ID NO: 823417 - RNA, 19 nt, Artificial Sequence
  Description of Artificial Sequence: Synthetic oligonucleotide
  Antisense strand to SEQ ID NO: 823416
uucaccguagagaagaauu

SEQ ID NO: 823418 - RNA, 19 nt, Artificial Sequence
  Description of Artificial Sequence: Synthetic oligonucleotide
  Sense strand starting at position 804 of SEQ ID NO: 587853
cgauguacaucacugcaau

SEQ ID NO: 823419 - RNA, 19 nt, Artificial Sequence
  Description of Artificial Sequence: Synthetic oligonucleotide
  Antisense strand to SEQ ID NO: 823418
auugcagugauguacaucg

SEQ ID NO: 823420 - RNA, 19 nt, Artificial Sequence
  Description of Artificial Sequence: Synthetic oligonucleotide
  Sense strand starting at position 814 of SEQ ID NO: 587853
cacugcaaucgucagauaa

SEQ ID NO: 823421 - RNA, 19 nt, Artificial Sequence
  Description of Artificial Sequence: Synthetic oligonucleotide
  Antisense strand to SEQ ID NO: 823420
uuaucugacgauugcagug

SEQ ID NO: 823422 - RNA, 19 nt, Artificial Sequence
  Description of Artificial Sequence: Synthetic oligonucleotide
  Sense strand starting at position 818 of SEQ ID NO: 587853
gcaaucgucagauaagagg

SEQ ID NO: 823423 - RNA, 19 nt, Artificial Sequence
  Description of Artificial Sequence: Synthetic oligonucleotide
  Antisense strand to SEQ ID NO: 823422
ccucuuaucugacgauugc

SEQ ID NO: 823424 - RNA, 19 nt, Artificial Sequence
  Description of Artificial Sequence: Synthetic oligonucleotide
  Sense strand starting at position 1320 of SEQ ID NO: 587853
uguccagcucuccaguuau

SEQ ID NO: 823425 - RNA, 19 nt, Artificial Sequence
  Description of Artificial Sequence: Synthetic oligonucleotide
  Antisense strand to SEQ ID NO: 823424
auaacuggagagcuggaca

SEQ ID NO: 823426 - RNA, 19 nt, Artificial Sequence
  Description of Artificial Sequence: Synthetic oligonucleotide
  Sense strand starting at position 2171 of SEQ ID NO: 587853
ugcaguuugagaggcugaa

SEQ ID NO: 823427 - RNA, 19 nt, Artificial Sequence
  Description of Artificial Sequence: Synthetic oligonucleotide
  Antisense strand to SEQ ID NO: 823426
uucagccucucaaacugca

SEQ ID NO: 823428 - RNA, 19 nt, Artificial Sequence
  Description of Artificial Sequence: Synthetic oligonucleotide
  Sense strand starting at position 2192 of SEQ ID NO: 587853
cgucacgacgcgaaaucua

SEQ ID NO: 823429 - RNA, 19 nt, Artificial Sequence
  Description of Artificial Sequence: Synthetic oligonucleotide
  Antisense strand to SEQ ID NO: 823428
uagauuucgcgucgugacg

SEQ ID NO: 823430 - RNA, 19 nt, Artificial Sequence
  Description of Artificial Sequence: Synthetic oligonucleotide
  Sense strand starting at position 2197 of SEQ ID NO: 587853
cgacgcgaaaucuaagaaa

SEQ ID NO: 823431 - RNA, 19 nt, Artificial Sequence
  Description of Artificial Sequence: Synthetic oligonucleotide
  Antisense strand to SEQ ID NO: 823430
uuucuuagauuucgcgucg

SEQ ID NO: 823432 - RNA, 19 nt, Artificial Sequence
  Description of Artificial Sequence: Synthetic oligonucleotide
  Sense strand starting at position 2318 of SEQ ID NO: 587853
caugguuaguguucuauga

SEQ ID NO: 823433 - RNA, 19 nt, Artificial Sequence
  Description of Artificial Sequence: Synthetic oligonucleotide
  Antisense strand to SEQ ID NO: 823432
ucauagaacacuaaccaug

SEQ ID NO: 823434 - RNA, 19 nt, Artificial Sequence
  Description of Artificial Sequence: Synthetic oligonucleotide
  Sense strand starting at position 2329 of SEQ ID NO: 587853
uucuaugacugguugcuaa

SEQ ID NO: 823435 - RNA, 19 nt, Artificial Sequence
  Description of Artificial Sequence: Synthetic oligonucleotide
  Antisense strand to SEQ ID NO: 823434
uuagcaaccagucauagaa

SEQ ID NO: 823436 - RNA, 19 nt, Artificial Sequence
  Description of Artificial Sequence: Synthetic oligonucleotide
  Sense strand starting at position 2332 of SEQ ID NO: 587853
uaugacugguugcuaaaua

SEQ ID NO: 823437 - RNA, 19 nt, Artificial Sequence
  Description of Artificial Sequence: Synthetic oligonucleotide
  Antisense strand to SEQ ID NO: 823436
uauuuagcaaccagucaua

SEQ ID NO: 823438 - RNA, 19 nt, Artificial Sequence
  Description of Artificial Sequence: Synthetic oligonucleotide
  Sense strand starting at position 2379 of SEQ ID NO: 587853
ggaaauacauugucugguu

SEQ ID NO: 823439 - RNA, 19 nt, Artificial Sequence
  Description of Artificial Sequence: Synthetic oligonucleotide
  Antisense strand to SEQ ID NO: 823438
aaccagacaauguauuucc

SEQ ID NO: 823440 - RNA, 19 nt, Artificial Sequence
  Description of Artificial Sequence: Synthetic oligonucleotide
  Sense strand starting at position 2380 of SEQ ID NO: 587853
gaaauacauugucugguuu

SEQ ID NO: 823441 - RNA, 19 nt, Artificial Sequence
  Description of Artificial Sequence: Synthetic oligonucleotide
  Antisense strand to SEQ ID NO: 823440
aaaccagacaauguauuuc

SEQ ID NO: 823442 - RNA, 19 nt, Artificial Sequence
  Description of Artificial Sequence: Synthetic oligonucleotide
  Sense strand starting at position 2745 of SEQ ID NO: 587853
gggugauauaauggagccu

SEQ ID NO: 823443 - RNA, 19 nt, Artificial Sequence
  Description of Artificial Sequence: Synthetic oligonucleotide
  Antisense strand to SEQ ID NO: 823442
aggcuccauuauaucaccc

SEQ ID NO: 823444 - RNA, 19 nt, Artificial Sequence
  Description of Artificial Sequence: Synthetic oligonucleotide
  Sense strand starting at position 2835 of SEQ ID NO: 587853
gaacuagccguacaaagau

SEQ ID NO: 823445 - RNA, 19 nt, Artificial Sequence
  Description of Artificial Sequence: Synthetic oligonucleotide
  Antisense strand to SEQ ID NO: 823444
aucuuuguacggcuaguuc

SEQ ID NO: 823446 - RNA, 19 nt, Artificial Sequence
  Description of Artificial Sequence: Synthetic oligonucleotide
  Sense strand starting at position 2905 of SEQ ID NO: 587853
uuguguuucgaggaagagu

SEQ ID NO: 823447 - RNA, 19 nt, Artificial Sequence
  Description of Artificial Sequence: Synthetic oligonucleotide
  Antisense strand to SEQ ID NO: 823446
acucuuccucgaaacacaa

SEQ ID NO: 823448 - RNA, 19 nt, Artificial Sequence
  Description of Artificial Sequence: Synthetic oligonucleotide
  Sense strand starting at position 2908 of SEQ ID NO: 587853
uguuucgaggaagaguuau

SEQ ID NO: 823449 - RNA, 19 nt, Artificial Sequence
  Description of Artificial Sequence: Synthetic oligonucleotide
  Antisense strand to SEQ ID NO: 823448
auaacucuuccucgaaaca

SEQ ID NO: 823450 - RNA, 19 nt, Artificial Sequence
  Description of Artificial Sequence: Synthetic oligonucleotide
  Sense strand starting at position 2922 of SEQ ID NO: 587853
guuauuuggucagauccua

SEQ ID NO: 823451 - RNA, 19 nt, Artificial Sequence
  Description of Artificial Sequence: Synthetic oligonucleotide
  Antisense strand to SEQ ID NO: 823450
uaggaucugaccaaauaac

SEQ ID NO: 823452 - RNA, 19 nt, Artificial Sequence
  Description of Artificial Sequence: Synthetic oligonucleotide
  Sense strand starting at position 3107 of SEQ ID NO: 587853
gccugaggucaggacuuua

SEQ ID NO: 823453 - RNA, 19 nt, Artificial Sequence
  Description of Artificial Sequence: Synthetic oligonucleotide
  Antisense strand to SEQ ID NO: 823452
uaaaguccugaccucaggc

SEQ ID NO: 823454 - RNA, 19 nt, Artificial Sequence
  Description of Artificial Sequence: Synthetic oligonucleotide
  Sense strand starting at position 3401 of SEQ ID NO: 587853
acuuuauguuuaccagauu

SEQ ID NO: 823455 - RNA, 19 nt, Artificial Sequence
  Description of Artificial Sequence: Synthetic oligonucleotide
  Antisense strand to SEQ ID NO: 823454
aaucugguaaacauaaagu

SEQ ID NO: 823456 - RNA, 19 nt, Artificial Sequence
  Description of Artificial Sequence: Synthetic oligonucleotide
  Sense strand starting at position 3412 of SEQ ID NO: 587853
accagauuauuauauugag

SEQ ID NO: 823457 - RNA, 19 nt, Artificial Sequence
  Description of Artificial Sequence: Synthetic oligonucleotide
  Antisense strand to SEQ ID NO: 823456
cucaauauaauaaucuggu

SEQ ID NO: 823458 - RNA, 19 nt, Artificial Sequence
  Description of Artificial Sequence: Synthetic oligonucleotide
  Sense strand starting at position 3458 of SEQ ID NO: 587853
caggcacuguuaucaguau

SEQ ID NO: 823459 - RNA, 19 nt, Artificial Sequence
  Description of Artificial Sequence: Synthetic oligonucleotide
  Antisense strand to SEQ ID NO: 823458
auacugauaacagugccug

SEQ ID NO: 823460 - RNA, 19 nt, Artificial Sequence
  Description of Artificial Sequence: Synthetic oligonucleotide
  Sense strand starting at position 3747 of SEQ ID NO: 587853
agguaaauuugguaguuau

SEQ ID NO: 823461 - RNA, 19 nt, Artificial Sequence
  Description of Artificial Sequence: Synthetic oligonucleotide
  Antisense strand to SEQ ID NO: 823460
auaacuaccaaauuuaccu

SEQ ID NO: 823462 - RNA, 19 nt, Artificial Sequence
  Description of Artificial Sequence: Synthetic oligonucleotide
  Sense strand starting at position 3754 of SEQ ID NO: 587853
uuugguaguuauguuguaa

SEQ ID NO: 823463 - RNA, 19 nt, Artificial Sequence
  Description of Artificial Sequence: Synthetic oligonucleotide
  Antisense strand to SEQ ID NO: 823462
uuacaacauaacuaccaaa

SEQ ID NO: 823464 - RNA, 19 nt, Artificial Sequence
  Description of Artificial Sequence: Synthetic oligonucleotide
  Sense strand starting at position 3783 of SEQ ID NO: 587853
agcauuuaaugucaugaug

SEQ ID NO: 823465 - RNA, 19 nt, Artificial Sequence
  Description of Artificial Sequence: Synthetic oligonucleotide
  Antisense strand to SEQ ID NO: 823464
caucaugacauuaaaugcu

SEQ ID NO: 823466 - RNA, 19 nt, Artificial Sequence
  Description of Artificial Sequence: Synthetic oligonucleotide
  Sense strand starting at position 8 of SEQ ID NO: 587854
ccuugaauuccuugggucu

SEQ ID NO: 823467 - RNA, 19 nt, Artificial Sequence
  Description of Artificial Sequence: Synthetic oligonucleotide
  Antisense strand to SEQ ID NO: 823466
agacccaaggaauucaagg

SEQ ID NO: 823468 - RNA, 19 nt, Artificial Sequence
  Description of Artificial Sequence: Synthetic oligonucleotide
  Sense strand starting at position 9 of SEQ ID NO: 587854
cuugaauuccuugggucuu

SEQ ID NO: 823469 - RNA, 19 nt, Artificial Sequence
  Description of Artificial Sequence: Synthetic oligonucleotide
  Antisense strand to SEQ ID NO: 823468
aagacccaaggaauucaag

SEQ ID NO: 823470 - RNA, 19 nt, Artificial Sequence
  Description of Artificial Sequence: Synthetic oligonucleotide
  Sense strand starting at position 44 of SEQ ID NO: 587854
aggucagcuccuggaucaa

SEQ ID NO: 823471 - RNA, 19 nt, Artificial Sequence
  Description of Artificial Sequence: Synthetic oligonucleotide
  Antisense strand to SEQ ID NO: 823470
uugauccaggagcugaccu

SEQ ID NO: 823472 - RNA, 19 nt, Artificial Sequence
  Description of Artificial Sequence: Synthetic oligonucleotide
  Sense strand starting at position 187 of SEQ ID NO: 587854
ggacauuagcugggucaca

SEQ ID NO: 823473 - RNA, 19 nt, Artificial Sequence
  Description of Artificial Sequence: Synthetic oligonucleotide
  Antisense strand to SEQ ID NO: 823472
ugugacccagcuaaugucc

SEQ ID NO: 823474 - RNA, 19 nt, Artificial Sequence
  Description of Artificial Sequence: Synthetic oligonucleotide
  Sense strand starting at position 254 of SEQ ID NO: 587854
gaggcuuugcuugaguuau

SEQ ID NO: 823475 - RNA, 19 nt, Artificial Sequence
  Description of Artificial Sequence: Synthetic oligonucleotide
  Antisense strand to SEQ ID NO: 823474
auaacucaagcaaagccuc

SEQ ID NO: 823476 - RNA, 19 nt, Artificial Sequence
  Description of Artificial Sequence: Synthetic oligonucleotide
  Sense strand starting at position 262 of SEQ ID NO: 587854
gcuugaguuaugcagggaa

SEQ ID NO: 823477 - RNA, 19 nt, Artificial Sequence
  Description of Artificial Sequence: Synthetic oligonucleotide
  Antisense strand to SEQ ID NO: 823476
uucccugcauaacucaagc

SEQ ID NO: 823478 - RNA, 19 nt, Artificial Sequence
  Description of Artificial Sequence: Synthetic oligonucleotide
  Sense strand starting at position 264 of SEQ ID NO: 587854
uugaguuaugcagggaaau

SEQ ID NO: 823479 - RNA, 19 nt, Artificial Sequence
  Description of Artificial Sequence: Synthetic oligonucleotide
  Antisense strand to SEQ ID NO: 823478
auuucccugcauaacucaa

SEQ ID NO: 823480 - RNA, 19 nt, Artificial Sequence
  Description of Artificial Sequence: Synthetic oligonucleotide
  Sense strand starting at position 265 of SEQ ID NO: 587854
ugaguuaugcagggaaaug

SEQ ID NO: 823481 - RNA, 19 nt, Artificial Sequence
  Description of Artificial Sequence: Synthetic oligonucleotide
  Antisense strand to SEQ ID NO: 823480
cauuucccugcauaacuca

SEQ ID NO: 823482 - RNA, 19 nt, Artificial Sequence
  Description of Artificial Sequence: Synthetic oligonucleotide
  Sense strand starting at position 276 of SEQ ID NO: 587854
gggaaaugaggccgacagu

SEQ ID NO: 823483 - RNA, 19 nt, Artificial Sequence
  Description of Artificial Sequence: Synthetic oligonucleotide
  Antisense strand to SEQ ID NO: 823482
acugucggccucauuuccc

SEQ ID NO: 823484 - RNA, 19 nt, Artificial Sequence
  Description of Artificial Sequence: Synthetic oligonucleotide
  Sense strand starting at position 277 of SEQ ID NO: 587854
ggaaaugaggccgacaguu

SEQ ID NO: 823485 - RNA, 19 nt, Artificial Sequence
  Description of Artificial Sequence: Synthetic oligonucleotide
  Antisense strand to SEQ ID NO: 823484
aacugucggccucauuucc

SEQ ID NO: 823486 - RNA, 19 nt, Artificial Sequence
  Description of Artificial Sequence: Synthetic oligonucleotide
  Sense strand starting at position 279 of SEQ ID NO: 587854
aaaugaggccgacaguuua

SEQ ID NO: 823487 - RNA, 19 nt, Artificial Sequence
  Description of Artificial Sequence: Synthetic oligonucleotide
  Antisense strand to SEQ ID NO: 823486
uaaacugucggccucauuu

SEQ ID NO: 823488 - RNA, 19 nt, Artificial Sequence
  Description of Artificial Sequence: Synthetic oligonucleotide
  Sense strand starting at position 459 of SEQ ID NO: 587854
acagguaaaucauuagcuu

SEQ ID NO: 823489 - RNA, 19 nt, Artificial Sequence
  Description of Artificial Sequence: Synthetic oligonucleotide
  Antisense strand to SEQ ID NO: 823488
aagcuaaugauuuaccugu

SEQ ID NO: 823490 - RNA, 19 nt, Artificial Sequence
  Description of Artificial Sequence: Synthetic oligonucleotide
  Sense strand starting at position 653 of SEQ ID NO: 587854
cgggauccuucagcucgaa

SEQ ID NO: 823491 - RNA, 19 nt, Artificial Sequence
  Description of Artificial Sequence: Synthetic oligonucleotide
  Antisense strand to SEQ ID NO: 823490
uucgagcugaaggaucccg

SEQ ID NO: 823492 - RNA, 19 nt, Artificial Sequence
  Description of Artificial Sequence: Synthetic oligonucleotide
  Sense strand starting at position 853 of SEQ ID NO: 587854
gagauacugugggaaauuu

SEQ ID NO: 823493 - RNA, 19 nt, Artificial Sequence
  Description of Artificial Sequence: Synthetic oligonucleotide
  Antisense strand to SEQ ID NO: 823492
aaauuucccacaguaucuc

SEQ ID NO: 823494 - RNA, 19 nt, Artificial Sequence
  Description of Artificial Sequence: Synthetic oligonucleotide
  Sense strand starting at position 946 of SEQ ID NO: 587854
ugucaugcuguacagagaa

SEQ ID NO: 823495 - RNA, 19 nt, Artificial Sequence
  Description of Artificial Sequence: Synthetic oligonucleotide
  Antisense strand to SEQ ID NO: 823494
uucucuguacagcaugaca

SEQ ID NO: 823496 - RNA, 19 nt, Artificial Sequence
  Description of Artificial Sequence: Synthetic oligonucleotide
  Sense strand starting at position 987 of SEQ ID NO: 587854
guacaccuccuaggagaaa

SEQ ID NO: 823497 - RNA, 19 nt, Artificial Sequence
  Description of Artificial Sequence: Synthetic oligonucleotide
  Antisense strand to SEQ ID NO: 823496
uuucuccuaggagguguac

SEQ ID NO: 823498 - RNA, 19 nt, Artificial Sequence
  Description of Artificial Sequence: Synthetic oligonucleotide
  Sense strand starting at position 999 of SEQ ID NO: 587854
ggagaaagaggcuguucua

SEQ ID NO: 823499 - RNA, 19 nt, Artificial Sequence
  Description of Artificial Sequence: Synthetic oligonucleotide
  Antisense strand to SEQ ID NO: 823498
uagaacagccucuuucucc

SEQ ID NO: 823500 - RNA, 19 nt, Artificial Sequence
  Description of Artificial Sequence: Synthetic oligonucleotide
  Sense strand starting at position 1002 of SEQ ID NO: 587854
gaaagaggcuguucuacau

SEQ ID NO: 823501 - RNA, 19 nt, Artificial Sequence
  Description of Artificial Sequence: Synthetic oligonucleotide
  Antisense strand to SEQ ID NO: 823500
auguagaacagccucuuuc

SEQ ID NO: 823502 - RNA, 19 nt, Artificial Sequence
  Description of Artificial Sequence: Synthetic oligonucleotide
  Sense strand starting at position 1061 of SEQ ID NO: 587854
ccuugcucuccagaagaaa

SEQ ID NO: 823503 - RNA, 19 nt, Artificial Sequence
  Description of Artificial Sequence: Synthetic oligonucleotide
  Antisense strand to SEQ ID NO: 823502
uuucuucuggagagcaagg

SEQ ID NO: 823504 - RNA, 19 nt, Artificial Sequence
  Description of Artificial Sequence: Synthetic oligonucleotide
  Sense strand starting at position 1271 of SEQ ID NO: 587854
gaguuucugagucggagau

SEQ ID NO: 823505 - RNA, 19 nt, Artificial Sequence
  Description of Artificial Sequence: Synthetic oligonucleotide
  Antisense strand to SEQ ID NO: 823504
aucuccgacucagaaacuc

SEQ ID NO: 823506 - RNA, 19 nt, Artificial Sequence
  Description of Artificial Sequence: Synthetic oligonucleotide
  Sense strand starting at position 1272 of SEQ ID NO: 587854
aguuucugagucggagauu

SEQ ID NO: 823507 - RNA, 19 nt, Artificial Sequence
  Description of Artificial Sequence: Synthetic oligonucleotide
  Antisense strand to SEQ ID NO: 823506
aaucuccgacucagaaacu

SEQ ID NO: 823508 - RNA, 19 nt, Artificial Sequence
  Description of Artificial Sequence: Synthetic oligonucleotide
  Sense strand starting at position 1306 of SEQ ID NO: 587854
cuuccaucccgcuggagaa

SEQ ID NO: 823509 - RNA, 19 nt, Artificial Sequence
  Description of Artificial Sequence: Synthetic oligonucleotide
  Antisense strand to SEQ ID NO: 823508
uucuccagcgggauggaag

SEQ ID NO: 823510 - RNA, 19 nt, Artificial Sequence
  Description of Artificial Sequence: Synthetic oligonucleotide
  Sense strand starting at position 1375 of SEQ ID NO: 587854
gggacacuucgaugucuag

SEQ ID NO: 823511 - RNA, 19 nt, Artificial Sequence
  Description of Artificial Sequence: Synthetic oligonucleotide
  Antisense strand to SEQ ID NO: 823510
cuagacaucgaaguguccc

SEQ ID NO: 823512 - RNA, 19 nt, Artificial Sequence
  Description of Artificial Sequence: Synthetic oligonucleotide
  Sense strand starting at position 1495 of SEQ ID NO: 587854
gacugagguccuuggcaca

SEQ ID NO: 823513 - RNA, 19 nt, Artificial Sequence
  Description of Artificial Sequence: Synthetic oligonucleotide
  Antisense strand to SEQ ID NO: 823512
ugugccaaggaccucaguc

SEQ ID NO: 823514 - RNA, 19 nt, Artificial Sequence
  Description of Artificial Sequence: Synthetic oligonucleotide
  Sense strand starting at position 2198 of SEQ ID NO: 587854
gccacauuuccuggcucua

SEQ ID NO: 823515 - RNA, 19 nt, Artificial Sequence
  Description of Artificial Sequence: Synthetic oligonucleotide
  Antisense strand to SEQ ID NO: 823514
uagagccaggaaauguggc

SEQ ID NO: 823516 - RNA, 19 nt, Artificial Sequence
  Description of Artificial Sequence: Synthetic oligonucleotide
  Sense strand starting at position 2513 of SEQ ID NO: 587854
gaggcaauuugugaauggu

SEQ ID NO: 823517 - RNA, 19 nt, Artificial Sequence
  Description of Artificial Sequence: Synthetic oligonucleotide
  Antisense strand to SEQ ID NO: 823516
accauucacaaauugccuc

SEQ ID NO: 823518 - RNA, 19 nt, Artificial Sequence
  Description of Artificial Sequence: Synthetic oligonucleotide
  Sense strand starting at position 2521 of SEQ ID NO: 587854
uugugaauggugggaagaa

SEQ ID NO: 823519 - RNA, 19 nt, Artificial Sequence
  Description of Artificial Sequence: Synthetic oligonucleotide
  Antisense strand to SEQ ID NO: 823518
uucuucccaccauucacaa

SEQ ID NO: 823520 - RNA, 19 nt, Artificial Sequence
  Description of Artificial Sequence: Synthetic oligonucleotide
  Sense strand starting at position 2946 of SEQ ID NO: 587854
agugaaacaauacgguaau

SEQ ID NO: 823521 - RNA, 19 nt, Artificial Sequence
  Description of Artificial Sequence: Synthetic oligonucleotide
  Antisense strand to SEQ ID NO: 823520
auuaccguauuguuucacu

SEQ ID NO: 823522 - RNA, 19 nt, Artificial Sequence
  Description of Artificial Sequence: Synthetic oligonucleotide
  Sense strand starting at position 3054 of SEQ ID NO: 587854
uggagacuguaaucuuauu

SEQ ID NO: 823523 - RNA, 19 nt, Artificial Sequence
  Description of Artificial Sequence: Synthetic oligonucleotide
  Antisense strand to SEQ ID NO: 823522
aauaagauuacagucucca

SEQ ID NO: 823524 - RNA, 19 nt, Artificial Sequence
  Description of Artificial Sequence: Synthetic oligonucleotide
  Sense strand starting at position 3140 of SEQ ID NO: 587854
aauucucaacguugagauu

SEQ ID NO: 823525 - RNA, 19 nt, Artificial Sequence
  Description of Artificial Sequence: Synthetic oligonucleotide
  Antisense strand to SEQ ID NO: 823524
aaucucaacguugagaauu

SEQ ID NO: 823526 - RNA, 19 nt, Artificial Sequence
  Description of Artificial Sequence: Synthetic oligonucleotide
  Sense strand starting at position 3173 of SEQ ID NO: 587854
agguaagucucucuuacuu

SEQ ID NO: 823527 - RNA, 19 nt, Artificial Sequence
  Description of Artificial Sequence: Synthetic oligonucleotide
  Antisense strand to SEQ ID NO: 823526
aaguaagagagacuuaccu

SEQ ID NO: 823528 - RNA, 19 nt, Artificial Sequence
  Description of Artificial Sequence: Synthetic oligonucleotide
  Sense strand starting at position 3314 of SEQ ID NO: 587854
uuucccaugucacagauuu

SEQ ID NO: 823529 - RNA, 19 nt, Artificial Sequence
  Description of Artificial Sequence: Synthetic oligonucleotide
  Antisense strand to SEQ ID NO: 823528
aaaucugugacaugggaaa

SEQ ID NO: 823530 - RNA, 19 nt, Artificial Sequence
  Description of Artificial Sequence: Synthetic oligonucleotide
  Sense strand starting at position 3388 of SEQ ID NO: 587854
ggcugucugcuuuauagaa

SEQ ID NO: 823531 - RNA, 19 nt, Artificial Sequence
  Description of Artificial Sequence: Synthetic oligonucleotide
  Antisense strand to SEQ ID NO: 823530
uucuauaaagcagacagcc

SEQ ID NO: 823532 - RNA, 19 nt, Artificial Sequence
  Description of Artificial Sequence: Synthetic oligonucleotide
  Sense strand starting at position 3404 of SEQ ID NO: 587854
gaacgccuuuaggcagaua

SEQ ID NO: 823533 - RNA, 19 nt, Artificial Sequence
  Description of Artificial Sequence: Synthetic oligonucleotide
  Antisense strand to SEQ ID NO: 823532
uaucugccuaaaggcguuc

SEQ ID NO: 823534 - RNA, 19 nt, Artificial Sequence
  Description of Artificial Sequence: Synthetic oligonucleotide
  Sense strand starting at position 3407 of SEQ ID NO: 587854
cgccuuuaggcagauacuu

SEQ ID NO: 823535 - RNA, 19 nt, Artificial Sequence
  Description of Artificial Sequence: Synthetic oligonucleotide
  Antisense strand to SEQ ID NO: 823534
aaguaucugccuaaaggcg

SEQ ID NO: 823536 - RNA, 19 nt, Artificial Sequence
  Description of Artificial Sequence: Synthetic oligonucleotide
  Sense strand starting at position 3428 of SEQ ID NO: 587854
uuuguaaugccauaagaau

SEQ ID NO: 823537 - RNA, 19 nt, Artificial Sequence
  Description of Artificial Sequence: Synthetic oligonucleotide
  Antisense strand to SEQ ID NO: 823536
auucuuauggcauuacaaa

SEQ ID NO: 823538 - RNA, 19 nt, Artificial Sequence
  Description of Artificial Sequence: Synthetic oligonucleotide
  Sense strand starting at position 3455 of SEQ ID NO: 587854
guuccagaaagauguaaag

SEQ ID NO: 823539 - RNA, 19 nt, Artificial Sequence
  Description of Artificial Sequence: Synthetic oligonucleotide
  Antisense strand to SEQ ID NO: 823538
cuuuacaucuuucuggaac

SEQ ID NO: 823540 - RNA, 19 nt, Artificial Sequence
  Description of Artificial Sequence: Synthetic oligonucleotide
  Sense strand starting at position 3476 of SEQ ID NO: 587854
aaaugauccgccgacaagu

SEQ ID NO: 823541 - RNA, 19 nt, Artificial Sequence
  Description of Artificial Sequence: Synthetic oligonucleotide
  Antisense strand to SEQ ID NO: 823540
acuugucggcggaucauuu

SEQ ID NO: 823542 - RNA, 19 nt, Artificial Sequence
  Description of Artificial Sequence: Synthetic oligonucleotide
  Sense strand starting at position 3700 of SEQ ID NO: 587854
agauuuagcuuccagaauu

SEQ ID NO: 823543 - RNA, 19 nt, Artificial Sequence
  Description of Artificial Sequence: Synthetic oligonucleotide
  Antisense strand to SEQ ID NO: 823542
aauucuggaagcuaaaucu

SEQ ID NO: 823544 - RNA, 19 nt, Artificial Sequence
  Description of Artificial Sequence: Synthetic oligonucleotide
  Sense strand starting at position 3833 of SEQ ID NO: 587854
gcgaugugagugggaacua

SEQ ID NO: 823545 - RNA, 19 nt, Artificial Sequence
  Description of Artificial Sequence: Synthetic oligonucleotide
  Antisense strand to SEQ ID NO: 823544
uaguucccacucacaucgc

SEQ ID NO: 823546 - RNA, 19 nt, Artificial Sequence
  Description of Artificial Sequence: Synthetic oligonucleotide
  Sense strand starting at position 1 of SEQ ID NO: 587855
cucccuagggcugauuaua

SEQ ID NO: 823547 - RNA, 19 nt, Artificial Sequence
  Description of Artificial Sequence: Synthetic oligonucleotide
  Antisense strand to SEQ ID NO: 823546
uauaaucagcccuagggag

SEQ ID NO: 823548 - RNA, 19 nt, Artificial Sequence
  Description of Artificial Sequence: Synthetic oligonucleotide
  Sense strand starting at position 176 of SEQ ID NO: 587855
ugugauuuguaacaacuca

SEQ ID NO: 823549 - RNA, 19 nt, Artificial Sequence
  Description of Artificial Sequence: Synthetic oligonucleotide
  Antisense strand to SEQ ID NO: 823548
ugaguuguuacaaaucaca

SEQ ID NO: 823550 - RNA, 19 nt, Artificial Sequence
  Description of Artificial Sequence: Synthetic oligonucleotide
  Sense strand starting at position 317 of SEQ ID NO: 587855
guggaucaaggcuguaauc

SEQ ID NO: 823551 - RNA, 19 nt, Artificial Sequence
  Description of Artificial Sequence: Synthetic oligonucleotide
  Antisense strand to SEQ ID NO: 823550
gauuacagccuugauccac

SEQ ID NO: 823552 - RNA, 19 nt, Artificial Sequence
  Description of Artificial Sequence: Synthetic oligonucleotide
  Sense strand starting at position 572 of SEQ ID NO: 587855
gcaacagauugagucccua

SEQ ID NO: 823553 - RNA, 19 nt, Artificial Sequence
  Description of Artificial Sequence: Synthetic oligonucleotide
  Antisense strand to SEQ ID NO: 823552
uagggacucaaucuguugc

SEQ ID NO: 823554 - RNA, 19 nt, Artificial Sequence
  Description of Artificial Sequence: Synthetic oligonucleotide
  Sense strand starting at position 639 of SEQ ID NO: 587855
gcaccugcagagcauuaaa

SEQ ID NO: 823555 - RNA, 19 nt, Artificial Sequence
  Description of Artificial Sequence: Synthetic oligonucleotide
  Antisense strand to SEQ ID NO: 823554
uuuaaugcucugcaggugc

SEQ ID NO: 823556 - RNA, 19 nt, Artificial Sequence
  Description of Artificial Sequence: Synthetic oligonucleotide
  Sense strand starting at position 755 of SEQ ID NO: 587855
gcugcauccagucagaagu

SEQ ID NO: 823557 - RNA, 19 nt, Artificial Sequence
  Description of Artificial Sequence: Synthetic oligonucleotide
  Antisense strand to SEQ ID NO: 823556
acuucugacuggaugcagc

SEQ ID NO: 823558 - RNA, 19 nt, Artificial Sequence
  Description of Artificial Sequence: Synthetic oligonucleotide
  Sense strand starting at position 807 of SEQ ID NO: 587855
caggccauucuuuguauga

SEQ ID NO: 823559 - RNA, 19 nt, Artificial Sequence
  Description of Artificial Sequence: Synthetic oligonucleotide
  Antisense strand to SEQ ID NO: 823558
ucauacaaagaauggccug

SEQ ID NO: 823560 - RNA, 19 nt, Artificial Sequence
  Description of Artificial Sequence: Synthetic oligonucleotide
  Sense strand starting at position 811 of SEQ ID NO: 587855
ccauucuuuguaugagaga

SEQ ID NO: 823561 - RNA, 19 nt, Artificial Sequence
  Description of Artificial Sequence: Synthetic oligonucleotide
  Antisense strand to SEQ ID NO: 823560
ucucucauacaaagaaugg

SEQ ID NO: 823562 - RNA, 19 nt, Artificial Sequence
  Description of Artificial Sequence: Synthetic oligonucleotide
  Sense strand starting at position 917 of SEQ ID NO: 587855
gguugagagcccuguagau

SEQ ID NO: 823563 - RNA, 19 nt, Artificial Sequence
  Description of Artificial Sequence: Synthetic oligonucleotide
  Antisense strand to SEQ ID NO: 823562
aucuacagggcucucaacc

SEQ ID NO: 823564 - RNA, 19 nt, Artificial Sequence
  Description of Artificial Sequence: Synthetic oligonucleotide
  Sense strand starting at position 919 of SEQ ID NO: 587855
uugagagcccuguagauga

SEQ ID NO: 823565 - RNA, 19 nt, Artificial Sequence
  Description of Artificial Sequence: Synthetic oligonucleotide
  Antisense strand to SEQ ID NO: 823564
ucaucuacagggcucucaa

SEQ ID NO: 823566 - RNA, 19 nt, Artificial Sequence
  Description of Artificial Sequence: Synthetic oligonucleotide
  Sense strand starting at position 926 of SEQ ID NO: 587855
cccuguagaugaucucaaa

SEQ ID NO: 823567 - RNA, 19 nt, Artificial Sequence
  Description of Artificial Sequence: Synthetic oligonucleotide
  Antisense strand to SEQ ID NO: 823566
uuugagaucaucuacaggg

SEQ ID NO: 823568 - RNA, 19 nt, Artificial Sequence
  Description of Artificial Sequence: Synthetic oligonucleotide
  Sense strand starting at position 1025 of SEQ ID NO: 587855
guguuacaggaggauuacu

SEQ ID NO: 823569 - RNA, 19 nt, Artificial Sequence
  Description of Artificial Sequence: Synthetic oligonucleotide
  Antisense strand to SEQ ID NO: 823568
aguaauccuccuguaacac

SEQ ID NO: 823570 - RNA, 19 nt, Artificial Sequence
  Description of Artificial Sequence: Synthetic oligonucleotide
  Sense strand starting at position 1078 of SEQ ID NO: 587855
gguucccugccucaugaga

SEQ ID NO: 823571 - RNA, 19 nt, Artificial Sequence
  Description of Artificial Sequence: Synthetic oligonucleotide
  Antisense strand to SEQ ID NO: 823570
ucucaugaggcagggaacc

SEQ ID NO: 823572 - RNA, 19 nt, Artificial Sequence
  Description of Artificial Sequence: Synthetic oligonucleotide
  Sense strand starting at position 1191 of SEQ ID NO: 587855
gaucaugucugguucuuau

SEQ ID NO: 823573 - RNA, 19 nt, Artificial Sequence
  Description of Artificial Sequence: Synthetic oligonucleotide
  Antisense strand to SEQ ID NO: 823572
auaagaaccagacaugauc

SEQ ID NO: 823574 - RNA, 19 nt, Artificial Sequence
  Description of Artificial Sequence: Synthetic oligonucleotide
  Sense strand starting at position 1505 of SEQ ID NO: 587855
uuuacacugcuggaaaguu

SEQ ID NO: 823575 - RNA, 19 nt, Artificial Sequence
  Description of Artificial Sequence: Synthetic oligonucleotide
  Antisense strand to SEQ ID NO: 823574
aacuuuccagcaguguaaa

SEQ ID NO: 823576 - RNA, 19 nt, Artificial Sequence
  Description of Artificial Sequence: Synthetic oligonucleotide
  Sense strand starting at position 1516 of SEQ ID NO: 587855
ggaaaguugggcuggugau

SEQ ID NO: 823577 - RNA, 19 nt, Artificial Sequence
  Description of Artificial Sequence: Synthetic oligonucleotide
  Antisense strand to SEQ ID NO: 823576
aucaccagcccaacuuucc

SEQ ID NO: 823578 - RNA, 19 nt, Artificial Sequence
  Description of Artificial Sequence: Synthetic oligonucleotide
  Sense strand starting at position 1563 of SEQ ID NO: 587855
ucagaaacuucucuggauu

SEQ ID NO: 823579 - RNA, 19 nt, Artificial Sequence
  Description of Artificial Sequence: Synthetic oligonucleotide
  Antisense strand to SEQ ID NO: 823578
aauccagagaaguuucuga

SEQ ID NO: 823580 - RNA, 19 nt, Artificial Sequence
  Description of Artificial Sequence: Synthetic oligonucleotide
  Sense strand starting at position 2287 of SEQ ID NO: 587855
agaucaacuuccuugguau

SEQ ID NO: 823581 - RNA, 19 nt, Artificial Sequence
  Description of Artificial Sequence: Synthetic oligonucleotide
  Antisense strand to SEQ ID NO: 823580
auaccaaggaaguugaucu

SEQ ID NO: 823582 - RNA, 19 nt, Artificial Sequence
  Description of Artificial Sequence: Synthetic oligonucleotide
  Sense strand starting at position 2465 of SEQ ID NO: 587855
gggagagcuccuugaucuu

SEQ ID NO: 823583 - RNA, 19 nt, Artificial Sequence
  Description of Artificial Sequence: Synthetic oligonucleotide
  Antisense strand to SEQ ID NO: 823582
aagaucaaggagcucuccc

SEQ ID NO: 823584 - RNA, 19 nt, Artificial Sequence
  Description of Artificial Sequence: Synthetic oligonucleotide
  Sense strand starting at position 2468 of SEQ ID NO: 587855
agagcuccuugaucuuagu

SEQ ID NO: 823585 - RNA, 19 nt, Artificial Sequence
  Description of Artificial Sequence: Synthetic oligonucleotide
  Antisense strand to SEQ ID NO: 823584
acuaagaucaaggagcucu

SEQ ID NO: 823586 - RNA, 19 nt, Artificial Sequence
  Description of Artificial Sequence: Synthetic oligonucleotide
  Sense strand starting at position 2759 of SEQ ID NO: 587855
gagaauugggccuggagug

SEQ ID NO: 823587 - RNA, 19 nt, Artificial Sequence
  Description of Artificial Sequence: Synthetic oligonucleotide
  Antisense strand to SEQ ID NO: 823586
cacuccaggcccaauucuc

SEQ ID NO: 823588 - RNA, 19 nt, Artificial Sequence
  Description of Artificial Sequence: Synthetic oligonucleotide
  Sense strand starting at position 2777 of SEQ ID NO: 587855
gcgccacauucugugauuu

SEQ ID NO: 823589 - RNA, 19 nt, Artificial Sequence
  Description of Artificial Sequence: Synthetic oligonucleotide
  Antisense strand to SEQ ID NO: 823588
aaaucacagaauguggcgc

SEQ ID NO: 823590 - RNA, 19 nt, Artificial Sequence
  Description of Artificial Sequence: Synthetic oligonucleotide
  Sense strand starting at position 2778 of SEQ ID NO: 587855
cgccacauucugugauuua

SEQ ID NO: 823591 - RNA, 19 nt, Artificial Sequence
  Description of Artificial Sequence: Synthetic oligonucleotide
  Antisense strand to SEQ ID NO: 823590
uaaaucacagaauguggcg

SEQ ID NO: 823592 - RNA, 19 nt, Artificial Sequence
  Description of Artificial Sequence: Synthetic oligonucleotide
  Sense strand starting at position 3162 of SEQ ID NO: 587855
gggaguugagacuggucau

SEQ ID NO: 823593 - RNA, 19 nt, Artificial Sequence
  Description of Artificial Sequence: Synthetic oligonucleotide
  Antisense strand to SEQ ID NO: 823592
augaccagucucaacuccc

SEQ ID NO: 823594 - RNA, 19 nt, Artificial Sequence
  Description of Artificial Sequence: Synthetic oligonucleotide
  Sense strand starting at position 3163 of SEQ ID NO: 587855
ggaguugagacuggucaua

SEQ ID NO: 823595 - RNA, 19 nt, Artificial Sequence
  Description of Artificial Sequence: Synthetic oligonucleotide
  Antisense strand to SEQ ID NO: 823594
uaugaccagucucaacucc

SEQ ID NO: 823596 - RNA, 19 nt, Artificial Sequence
  Description of Artificial Sequence: Synthetic oligonucleotide
  Sense strand starting at position 3165 of SEQ ID NO: 587855
aguugagacuggucauaag

SEQ ID NO: 823597 - RNA, 19 nt, Artificial Sequence
  Description of Artificial Sequence: Synthetic oligonucleotide
  Antisense strand to SEQ ID NO: 823596
cuuaugaccagucucaacu

SEQ ID NO: 823598 - RNA, 19 nt, Artificial Sequence
  Description of Artificial Sequence: Synthetic oligonucleotide
  Sense strand starting at position 3438 of SEQ ID NO: 587855
agggaaguagaguggucua

SEQ ID NO: 823599 - RNA, 19 nt, Artificial Sequence
  Description of Artificial Sequence: Synthetic oligonucleotide
  Antisense strand to SEQ ID NO: 823598
uagaccacucuacuucccu

SEQ ID NO: 823600 - RNA, 19 nt, Artificial Sequence
  Description of Artificial Sequence: Synthetic oligonucleotide
  Sense strand starting at position 3441 of SEQ ID NO: 587855
gaaguagaguggucuaagc

SEQ ID NO: 823601 - RNA, 19 nt, Artificial Sequence
  Description of Artificial Sequence: Synthetic oligonucleotide
  Antisense strand to SEQ ID NO: 823600
gcuuagaccacucuacuuc

SEQ ID NO: 823602 - RNA, 19 nt, Artificial Sequence
  Description of Artificial Sequence: Synthetic oligonucleotide
  Sense strand starting at position 3443 of SEQ ID NO: 587855
aguagaguggucuaagcca

SEQ ID NO: 823603 - RNA, 19 nt, Artificial Sequence
  Description of Artificial Sequence: Synthetic oligonucleotide
  Antisense strand to SEQ ID NO: 823602
uggcuuagaccacucuacu

SEQ ID NO: 823604 - RNA, 19 nt, Artificial Sequence
  Description of Artificial Sequence: Synthetic oligonucleotide
  Sense strand starting at position 3517 of SEQ ID NO: 587855
aauguagucugagcuaaug

SEQ ID NO: 823605 - RNA, 19 nt, Artificial Sequence
  Description of Artificial Sequence: Synthetic oligonucleotide
  Antisense strand to SEQ ID NO: 823604
cauuagcucagacuacauu

SEQ ID NO: 823606 - RNA, 19 nt, Artificial Sequence
  Description of Artificial Sequence: Synthetic oligonucleotide
  Sense strand starting at position 3519 of SEQ ID NO: 587855
uguagucugagcuaauggu

SEQ ID NO: 823607 - RNA, 19 nt, Artificial Sequence
  Description of Artificial Sequence: Synthetic oligonucleotide
  Antisense strand to SEQ ID NO: 823606
accauuagcucagacuaca

SEQ ID NO: 823608 - RNA, 19 nt, Artificial Sequence
  Description of Artificial Sequence: Synthetic oligonucleotide
  Sense strand starting at position 3523 of SEQ ID NO: 587855
gucugagcuaaugguauuu

SEQ ID NO: 823609 - RNA, 19 nt, Artificial Sequence
  Description of Artificial Sequence: Synthetic oligonucleotide
  Antisense strand to SEQ ID NO: 823608
aaauaccauuagcucagac

SEQ ID NO: 823610 - RNA, 19 nt, Artificial Sequence
  Description of Artificial Sequence: Synthetic oligonucleotide
  Sense strand starting at position 3567 of SEQ ID NO: 587855
caggguuagcaugauccaa

SEQ ID NO: 823611 - RNA, 19 nt, Artificial Sequence
  Description of Artificial Sequence: Synthetic oligonucleotide
  Antisense strand to SEQ ID NO: 823610
uuggaucaugcuaacccug

SEQ ID NO: 823612 - RNA, 19 nt, Artificial Sequence
  Description of Artificial Sequence: Synthetic oligonucleotide
  Sense strand starting at position 3598 of SEQ ID NO: 587855
uuggcucuccgacauugaa

SEQ ID NO: 823613 - RNA, 19 nt, Artificial Sequence
  Description of Artificial Sequence: Synthetic oligonucleotide
  Antisense strand to SEQ ID NO: 823612
uucaaugucggagagccaa

SEQ ID NO: 823614 - RNA, 19 nt, Artificial Sequence
  Description of Artificial Sequence: Synthetic oligonucleotide
  Sense strand starting at position 3658 of SEQ ID NO: 587855
gucucaccaguuugagaug

SEQ ID NO: 823615 - RNA, 19 nt, Artificial Sequence
  Description of Artificial Sequence: Synthetic oligonucleotide
  Antisense strand to SEQ ID NO: 823614
caucucaaacuggugagac

SEQ ID NO: 823616 - RNA, 19 nt, Artificial Sequence
  Description of Artificial Sequence: Synthetic oligonucleotide
  Sense strand starting at position 3712 of SEQ ID NO: 587855
aagagaucauuaccauggu

SEQ ID NO: 823617 - RNA, 19 nt, Artificial Sequence
  Description of Artificial Sequence: Synthetic oligonucleotide
  Antisense strand to SEQ ID NO: 823616
accaugguaaugaucucuu

SEQ ID NO: 823618 - RNA, 19 nt, Artificial Sequence
  Description of Artificial Sequence: Synthetic oligonucleotide
  Sense strand starting at position 3750 of SEQ ID NO: 587855
uaaaguagugaaugaaggu

SEQ ID NO: 823619 - RNA, 19 nt, Artificial Sequence
  Description of Artificial Sequence: Synthetic oligonucleotide
  Antisense strand to SEQ ID NO: 823618
accuucauucacuacuuua

SEQ ID NO: 823620 - RNA, 19 nt, Artificial Sequence
  Description of Artificial Sequence: Synthetic oligonucleotide
  Sense strand starting at position 3757 of SEQ ID NO: 587855
gugaaugaagguuaaguuu

SEQ ID NO: 823621 - RNA, 19 nt, Artificial Sequence
  Description of Artificial Sequence: Synthetic oligonucleotide
  Antisense strand to SEQ ID NO: 823620
aaacuuaaccuucauucac

SEQ ID NO: 823622 - RNA, 19 nt, Artificial Sequence
  Description of Artificial Sequence: Synthetic oligonucleotide
  Sense strand starting at position 3912 of SEQ ID NO: 587855
augguuucgcuacaaggga

SEQ ID NO: 823623 - RNA, 19 nt, Artificial Sequence
  Description of Artificial Sequence: Synthetic oligonucleotide
  Antisense strand to SEQ ID NO: 823622
ucccuuguagcgaaaccau

SEQ ID NO: 823624 - RNA, 19 nt, Artificial Sequence
  Description of Artificial Sequence: Synthetic oligonucleotide
  Sense strand starting at position 3975 of SEQ ID NO: 587855
uggccagucugguuaggaa

SEQ ID NO: 823625 - RNA, 19 nt, Artificial Sequence
  Description of Artificial Sequence: Synthetic oligonucleotide
  Antisense strand to SEQ ID NO: 823624
uuccuaaccagacuggcca

SEQ ID NO: 823626 - RNA, 19 nt, Artificial Sequence
  Description of Artificial Sequence: Synthetic oligonucleotide
  Sense strand starting at position 214 of SEQ ID NO: 587856
ccuggcucucugcaggaau

SEQ ID NO: 823627 - RNA, 19 nt, Artificial Sequence
  Description of Artificial Sequence: Synthetic oligonucleotide
  Antisense strand to SEQ ID NO: 823626
auuccugcagagagccagg

SEQ ID NO: 823628 - RNA, 19 nt, Artificial Sequence
  Description of Artificial Sequence: Synthetic oligonucleotide
  Sense strand starting at position 386 of SEQ ID NO: 587856
ugagccucccgugagauaa

SEQ ID NO: 823629 - RNA, 19 nt, Artificial Sequence
  Description of Artificial Sequence: Synthetic oligonucleotide
  Antisense strand to SEQ ID NO: 823628
uuaucucacgggaggcuca

SEQ ID NO: 823630 - RNA, 19 nt, Artificial Sequence
  Description of Artificial Sequence: Synthetic oligonucleotide
  Sense strand starting at position 410 of SEQ ID NO: 587856
guggcaugacuuuaugaac

SEQ ID NO: 823631 - RNA, 19 nt, Artificial Sequence
  Description of Artificial Sequence: Synthetic oligonucleotide
  Antisense strand to SEQ ID NO: 823630
guucauaaagucaugccac

SEQ ID NO: 823632 - RNA, 19 nt, Artificial Sequence
  Description of Artificial Sequence: Synthetic oligonucleotide
  Sense strand starting at position 560 of SEQ ID NO: 587856
aaacaaagcuguuugaagu

SEQ ID NO: 823633 - RNA, 19 nt, Artificial Sequence
  Description of Artificial Sequence: Synthetic oligonucleotide
  Antisense strand to SEQ ID NO: 823632
acuucaaacagcuuuguuu

SEQ ID NO: 823634 - RNA, 19 nt, Artificial Sequence
  Description of Artificial Sequence: Synthetic oligonucleotide
  Sense strand starting at position 561 of SEQ ID NO: 587856
aacaaagcuguuugaaguu

SEQ ID NO: 823635 - RNA, 19 nt, Artificial Sequence
  Description of Artificial Sequence: Synthetic oligonucleotide
  Antisense strand to SEQ ID NO: 823634
aacuucaaacagcuuuguu

SEQ ID NO: 823636 - RNA, 19 nt, Artificial Sequence
  Description of Artificial Sequence: Synthetic oligonucleotide
  Sense strand starting at position 605 of SEQ ID NO: 587856
gcacucuagggcugauauc

SEQ ID NO: 823637 - RNA, 19 nt, Artificial Sequence
  Description of Artificial Sequence: Synthetic oligonucleotide
  Antisense strand to SEQ ID NO: 823636
gauaucagcccuagagugc

SEQ ID NO: 823638 - RNA, 19 nt, Artificial Sequence
  Description of Artificial Sequence: Synthetic oligonucleotide
  Sense strand starting at position 606 of SEQ ID NO: 587856
cacucuagggcugauauca

SEQ ID NO: 823639 - RNA, 19 nt, Artificial Sequence
  Description of Artificial Sequence: Synthetic oligonucleotide
  Antisense strand to SEQ ID NO: 823638
ugauaucagcccuagagug

SEQ ID NO: 823640 - RNA, 19 nt, Artificial Sequence
  Description of Artificial Sequence: Synthetic oligonucleotide
  Sense strand starting at position 638 of SEQ ID NO: 587856
ucaauccuucucuggagau

SEQ ID NO: 823641 - RNA, 19 nt, Artificial Sequence
  Description of Artificial Sequence: Synthetic oligonucleotide
  Antisense strand to SEQ ID NO: 823640
aucuccagagaaggauuga

SEQ ID NO: 823642 - RNA, 19 nt, Artificial Sequence
  Description of Artificial Sequence: Synthetic oligonucleotide
  Sense strand starting at position 717 of SEQ ID NO: 587856
aagucaguuucucugggua

SEQ ID NO: 823643 - RNA, 19 nt, Artificial Sequence
  Description of Artificial Sequence: Synthetic oligonucleotide
  Antisense strand to SEQ ID NO: 823642
uacccagagaaacugacuu

SEQ ID NO: 823644 - RNA, 19 nt, Artificial Sequence
  Description of Artificial Sequence: Synthetic oligonucleotide
  Sense strand starting at position 876 of SEQ ID NO: 587856
cucuaacuguacuuaguua

SEQ ID NO: 823645 - RNA, 19 nt, Artificial Sequence
  Description of Artificial Sequence: Synthetic oligonucleotide
  Antisense strand to SEQ ID NO: 823644
uaacuaaguacaguuagag

SEQ ID NO: 823646 - RNA, 19 nt, Artificial Sequence
  Description of Artificial Sequence: Synthetic oligonucleotide
  Sense strand starting at position 884 of SEQ ID NO: 587856
guacuuaguuaagcuaaau

SEQ ID NO: 823647 - RNA, 19 nt, Artificial Sequence
  Description of Artificial Sequence: Synthetic oligonucleotide
  Antisense strand to SEQ ID NO: 823646
auuuagcuuaacuaaguac

SEQ ID NO: 823648 - RNA, 19 nt, Artificial Sequence
  Description of Artificial Sequence: Synthetic oligonucleotide
  Sense strand starting at position 1116 of SEQ ID NO: 587856
ugagcugugacaugaguca

SEQ ID NO: 823649 - RNA, 19 nt, Artificial Sequence
  Description of Artificial Sequence: Synthetic oligonucleotide
  Antisense strand to SEQ ID NO: 823648
ugacucaugucacagcuca

SEQ ID NO: 823650 - RNA, 19 nt, Artificial Sequence
  Description of Artificial Sequence: Synthetic oligonucleotide
  Sense strand starting at position 1125 of SEQ ID NO: 587856
acaugagucagguggagua

SEQ ID NO: 823651 - RNA, 19 nt, Artificial Sequence
  Description of Artificial Sequence: Synthetic oligonucleotide
  Antisense strand to SEQ ID NO: 823650
uacuccaccugacucaugu

SEQ ID NO: 823652 - RNA, 19 nt, Artificial Sequence
  Description of Artificial Sequence: Synthetic oligonucleotide
  Sense strand starting at position 1282 of SEQ ID NO: 587856
aggcucuaggucugaaguu

SEQ ID NO: 823653 - RNA, 19 nt, Artificial Sequence
  Description of Artificial Sequence: Synthetic oligonucleotide
  Antisense strand to SEQ ID NO: 823652
aacuucagaccuagagccu

SEQ ID NO: 823654 - RNA, 19 nt, Artificial Sequence
  Description of Artificial Sequence: Synthetic oligonucleotide
  Sense strand starting at position 1291 of SEQ ID NO: 587856
gucugaaguuucccaaacu

SEQ ID NO: 823655 - RNA, 19 nt, Artificial Sequence
  Description of Artificial Sequence: Synthetic oligonucleotide
  Antisense strand to SEQ ID NO: 823654
aguuugggaaacuucagac

SEQ ID NO: 823656 - RNA, 19 nt, Artificial Sequence
  Description of Artificial Sequence: Synthetic oligonucleotide
  Sense strand starting at position 1345 of SEQ ID NO: 587856
uccagcugucuuugagaca

SEQ ID NO: 823657 - RNA, 19 nt, Artificial Sequence
  Description of Artificial Sequence: Synthetic oligonucleotide
  Antisense strand to SEQ ID NO: 823656
ugucucaaagacagcugga

SEQ ID NO: 823658 - RNA, 19 nt, Artificial Sequence
  Description of Artificial Sequence: Synthetic oligonucleotide
  Sense strand starting at position 1361 of SEQ ID NO: 587856
acagcaugcccaggagaua

SEQ ID NO: 823659 - RNA, 19 nt, Artificial Sequence
  Description of Artificial Sequence: Synthetic oligonucleotide
  Antisense strand to SEQ ID NO: 823658
uaucuccugggcaugcugu

SEQ ID NO: 823660 - RNA, 19 nt, Artificial Sequence
  Description of Artificial Sequence: Synthetic oligonucleotide
  Sense strand starting at position 1770 of SEQ ID NO: 587856
cuagguacugccugagaug

SEQ ID NO: 823661 - RNA, 19 nt, Artificial Sequence
  Description of Artificial Sequence: Synthetic oligonucleotide
  Antisense strand to SEQ ID NO: 823660
caucucaggcaguaccuag

SEQ ID NO: 823662 - RNA, 19 nt, Artificial Sequence
  Description of Artificial Sequence: Synthetic oligonucleotide
  Sense strand starting at position 2089 of SEQ ID NO: 587856
acagaauuggcauggcuca

SEQ ID NO: 823663 - RNA, 19 nt, Artificial Sequence
  Description of Artificial Sequence: Synthetic oligonucleotide
  Antisense strand to SEQ ID NO: 823662
ugagccaugccaauucugu

SEQ ID NO: 823664 - RNA, 19 nt, Artificial Sequence
  Description of Artificial Sequence: Synthetic oligonucleotide
  Sense strand starting at position 2090 of SEQ ID NO: 587856
cagaauuggcauggcucaa

SEQ ID NO: 823665 - RNA, 19 nt, Artificial Sequence
  Description of Artificial Sequence: Synthetic oligonucleotide
  Antisense strand to SEQ ID NO: 823664
uugagccaugccaauucug

SEQ ID NO: 823666 - RNA, 19 nt, Artificial Sequence
  Description of Artificial Sequence: Synthetic oligonucleotide
  Sense strand starting at position 2355 of SEQ ID NO: 587856
uccuaaaccugagcaugau

SEQ ID NO: 823667 - RNA, 19 nt, Artificial Sequence
  Description of Artificial Sequence: Synthetic oligonucleotide
  Antisense strand to SEQ ID NO: 823666
aucaugcucagguuuagga

SEQ ID NO: 823668 - RNA, 19 nt, Artificial Sequence
  Description of Artificial Sequence: Synthetic oligonucleotide
  Sense strand starting at position 2356 of SEQ ID NO: 587856
ccuaaaccugagcaugauu

SEQ ID NO: 823669 - RNA, 19 nt, Artificial Sequence
  Description of Artificial Sequence: Synthetic oligonucleotide
  Antisense strand to SEQ ID NO: 823668
aaucaugcucagguuuagg

SEQ ID NO: 823670 - RNA, 19 nt, Artificial Sequence
  Description of Artificial Sequence: Synthetic oligonucleotide
  Sense strand starting at position 2361 of SEQ ID NO: 587856
accugagcaugauugcuua

SEQ ID NO: 823671 - RNA, 19 nt, Artificial Sequence
  Description of Artificial Sequence: Synthetic oligonucleotide
  Antisense strand to SEQ ID NO: 823670
uaagcaaucaugcucaggu

SEQ ID NO: 823672 - RNA, 19 nt, Artificial Sequence
  Description of Artificial Sequence: Synthetic oligonucleotide
  Sense strand starting at position 2369 of SEQ ID NO: 587856
augauugcuuacguuugaa

SEQ ID NO: 823673 - RNA, 19 nt, Artificial Sequence
  Description of Artificial Sequence: Synthetic oligonucleotide
  Antisense strand to SEQ ID NO: 823672
uucaaacguaagcaaucau

SEQ ID NO: 823674 - RNA, 19 nt, Artificial Sequence
  Description of Artificial Sequence: Synthetic oligonucleotide
  Sense strand starting at position 2546 of SEQ ID NO: 587856
gcaaucuaaccauauguga

SEQ ID NO: 823675 - RNA, 19 nt, Artificial Sequence
  Description of Artificial Sequence: Synthetic oligonucleotide
  Antisense strand to SEQ ID NO: 823674
ucacauaugguuagauugc

SEQ ID NO: 823676 - RNA, 19 nt, Artificial Sequence
  Description of Artificial Sequence: Synthetic oligonucleotide
  Sense strand starting at position 2580 of SEQ ID NO: 587856
ucagauugaggugguagua

SEQ ID NO: 823677 - RNA, 19 nt, Artificial Sequence
  Description of Artificial Sequence: Synthetic oligonucleotide
  Antisense strand to SEQ ID NO: 823676
uacuaccaccucaaucuga

SEQ ID NO: 823678 - RNA, 19 nt, Artificial Sequence
  Description of Artificial Sequence: Synthetic oligonucleotide
  Sense strand starting at position 2645 of SEQ ID NO: 587856
agaguuaggcuaugcagau

SEQ ID NO: 823679 - RNA, 19 nt, Artificial Sequence
  Description of Artificial Sequence: Synthetic oligonucleotide
  Antisense strand to SEQ ID NO: 823678
aucugcauagccuaacucu

SEQ ID NO: 823680 - RNA, 19 nt, Artificial Sequence
  Description of Artificial Sequence: Synthetic oligonucleotide
  Sense strand starting at position 2749 of SEQ ID NO: 587856
ucaggcuucguacaugaaa

SEQ ID NO: 823681 - RNA, 19 nt, Artificial Sequence
  Description of Artificial Sequence: Synthetic oligonucleotide
  Antisense strand to SEQ ID NO: 823680
uuucauguacgaagccuga

SEQ ID NO: 823682 - RNA, 19 nt, Artificial Sequence
  Description of Artificial Sequence: Synthetic oligonucleotide
  Sense strand starting at position 3096 of SEQ ID NO: 587856
agggucuuguagccaguaa

SEQ ID NO: 823683 - RNA, 19 nt, Artificial Sequence
  Description of Artificial Sequence: Synthetic oligonucleotide
  Antisense strand to SEQ ID NO: 823682
uuacuggcuacaagacccu

SEQ ID NO: 823684 - RNA, 19 nt, Artificial Sequence
  Description of Artificial Sequence: Synthetic oligonucleotide
  Sense strand starting at position 3232 of SEQ ID NO: 587856
ccaacauuccuaggaaugu

SEQ ID NO: 823685 - RNA, 19 nt, Artificial Sequence
  Description of Artificial Sequence: Synthetic oligonucleotide
  Antisense strand to SEQ ID NO: 823684
acauuccuaggaauguugg

SEQ ID NO: 823686 - RNA, 19 nt, Artificial Sequence
  Description of Artificial Sequence: Synthetic oligonucleotide
  Sense strand starting at position 3529 of SEQ ID NO: 587856
ccuaaagagauguguaugu

SEQ ID NO: 823687 - RNA, 19 nt, Artificial Sequence
  Description of Artificial Sequence: Synthetic oligonucleotide
  Antisense strand to SEQ ID NO: 823686
acauacacaucucuuuagg

SEQ ID NO: 823688 - RNA, 19 nt, Artificial Sequence
  Description of Artificial Sequence: Synthetic oligonucleotide
  Sense strand starting at position 3531 of SEQ ID NO: 587856
uaaagagauguguauguua

SEQ ID NO: 823689 - RNA, 19 nt, Artificial Sequence
  Description of Artificial Sequence: Synthetic oligonucleotide
  Antisense strand to SEQ ID NO: 823688
uaacauacacaucucuuua

SEQ ID NO: 823690 - RNA, 19 nt, Artificial Sequence
  Description of Artificial Sequence: Synthetic oligonucleotide
  Sense strand starting at position 3534 of SEQ ID NO: 587856
agagauguguauguuagca

SEQ ID NO: 823691 - RNA, 19 nt, Artificial Sequence
  Description of Artificial Sequence: Synthetic oligonucleotide
  Antisense strand to SEQ ID NO: 823690
ugcuaacauacacaucucu

SEQ ID NO: 823692 - RNA, 19 nt, Artificial Sequence
  Description of Artificial Sequence: Synthetic oligonucleotide
  Sense strand starting at position 3538 of SEQ ID NO: 587856
auguguauguuagcaagaa

SEQ ID NO: 823693 - RNA, 19 nt, Artificial Sequence
  Description of Artificial Sequence: Synthetic oligonucleotide
  Antisense strand to SEQ ID NO: 823692
uucuugcuaacauacacau

SEQ ID NO: 823694 - RNA, 19 nt, Artificial Sequence
  Description of Artificial Sequence: Synthetic oligonucleotide
  Sense strand starting at position 3542 of SEQ ID NO: 587856
guauguuagcaagaaaugu

SEQ ID NO: 823695 - RNA, 19 nt, Artificial Sequence
  Description of Artificial Sequence: Synthetic oligonucleotide
  Antisense strand to SEQ ID NO: 823694
acauuucuugcuaacauac

SEQ ID NO: 823696 - RNA, 19 nt, Artificial Sequence
  Description of Artificial Sequence: Synthetic oligonucleotide
  Sense strand starting at position 3546 of SEQ ID NO: 587856
guuagcaagaaauguggua

SEQ ID NO: 823697 - RNA, 19 nt, Artificial Sequence
  Description of Artificial Sequence: Synthetic oligonucleotide
  Antisense strand to SEQ ID NO: 823696
uaccacauuucuugcuaac

SEQ ID NO: 823698 - RNA, 19 nt, Artificial Sequence
  Description of Artificial Sequence: Synthetic oligonucleotide
  Sense strand starting at position 3548 of SEQ ID NO: 587856
uagcaagaaaugugguagu

SEQ ID NO: 823699 - RNA, 19 nt, Artificial Sequence
  Description of Artificial Sequence: Synthetic oligonucleotide
  Antisense strand to SEQ ID NO: 823698
acuaccacauuucuugcua

SEQ ID NO: 823700 - RNA, 19 nt, Artificial Sequence
  Description of Artificial Sequence: Synthetic oligonucleotide
  Sense strand starting at position 3602 of SEQ ID NO: 587856
ucuuuauugcaacaguguu

SEQ ID NO: 823701 - RNA, 19 nt, Artificial Sequence
  Description of Artificial Sequence: Synthetic oligonucleotide
  Antisense strand to SEQ ID NO: 823700
aacacuguugcaauaaaga

SEQ ID NO: 823702 - RNA, 19 nt, Artificial Sequence
  Description of Artificial Sequence: Synthetic oligonucleotide
  Sense strand starting at position 3658 of SEQ ID NO: 587856
auguauuugggaugccgua

SEQ ID NO: 823703 - RNA, 19 nt, Artificial Sequence
  Description of Artificial Sequence: Synthetic oligonucleotide
  Antisense strand to SEQ ID NO: 823702
uacggcaucccaaauacau

SEQ ID NO: 823704 - RNA, 19 nt, Artificial Sequence
  Description of Artificial Sequence: Synthetic oligonucleotide
  Sense strand starting at position 3795 of SEQ ID NO: 587856
gcgugauaggcacauacca

SEQ ID NO: 823705 - RNA, 19 nt, Artificial Sequence
  Description of Artificial Sequence: Synthetic oligonucleotide
  Antisense strand to SEQ ID NO: 823704
ugguaugugccuaucacgc

SEQ ID NO: 823706 - RNA, 19 nt, Artificial Sequence
  Description of Artificial Sequence: Synthetic oligonucleotide
  Sense strand starting at position 464 of SEQ ID NO: 587857
ccgcgaucuccagagccuu

SEQ ID NO: 823707 - RNA, 19 nt, Artificial Sequence
  Description of Artificial Sequence: Synthetic oligonucleotide
  Antisense strand to SEQ ID NO: 823706
aaggcucuggagaucgcgg

SEQ ID NO: 823708 - RNA, 19 nt, Artificial Sequence
  Description of Artificial Sequence: Synthetic oligonucleotide
  Sense strand starting at position 488 of SEQ ID NO: 587857
acuugaugcucuccgggau

SEQ ID NO: 823709 - RNA, 19 nt, Artificial Sequence
  Description of Artificial Sequence: Synthetic oligonucleotide
  Antisense strand to SEQ ID NO: 823708
aucccggagagcaucaagu

SEQ ID NO: 823710 - RNA, 19 nt, Artificial Sequence
  Description of Artificial Sequence: Synthetic oligonucleotide
  Sense strand starting at position 500 of SEQ ID NO: 587857
ccgggaucucagggauauc

SEQ ID NO: 823711 - RNA, 19 nt, Artificial Sequence
  Description of Artificial Sequence: Synthetic oligonucleotide
  Antisense strand to SEQ ID NO: 823710
gauaucccugagaucccgg

SEQ ID NO: 823712 - RNA, 19 nt, Artificial Sequence
  Description of Artificial Sequence: Synthetic oligonucleotide
  Sense strand starting at position 510 of SEQ ID NO: 587857
agggauaucugucacagag

SEQ ID NO: 823713 - RNA, 19 nt, Artificial Sequence
  Description of Artificial Sequence: Synthetic oligonucleotide
  Antisense strand to SEQ ID NO: 823712
cucugugacagauaucccu

SEQ ID NO: 823714 - RNA, 19 nt, Artificial Sequence
  Description of Artificial Sequence: Synthetic oligonucleotide
  Sense strand starting at position 804 of SEQ ID NO: 587857
acacgugagugucacaagu

SEQ ID NO: 823715 - RNA, 19 nt, Artificial Sequence
  Description of Artificial Sequence: Synthetic oligonucleotide
  Antisense strand to SEQ ID NO: 823714
acuugugacacucacgugu

SEQ ID NO: 823716 - RNA, 19 nt, Artificial Sequence
  Description of Artificial Sequence: Synthetic oligonucleotide
  Sense strand starting at position 806 of SEQ ID NO: 587857
acgugagugucacaaguca

SEQ ID NO: 823717 - RNA, 19 nt, Artificial Sequence
  Description of Artificial Sequence: Synthetic oligonucleotide
  Antisense strand to SEQ ID NO: 823716
ugacuugugacacucacgu

SEQ ID NO: 823718 - RNA, 19 nt, Artificial Sequence
  Description of Artificial Sequence: Synthetic oligonucleotide
  Sense strand starting at position 1243 of SEQ ID NO: 587857
ggucacauucuuugggaca

SEQ ID NO: 823719 - RNA, 19 nt, Artificial Sequence
  Description of Artificial Sequence: Synthetic oligonucleotide
  Antisense strand to SEQ ID NO: 823718
ugucccaaagaaugugacc

SEQ ID NO: 823720 - RNA, 19 nt, Artificial Sequence
  Description of Artificial Sequence: Synthetic oligonucleotide
  Sense strand starting at position 1505 of SEQ ID NO: 587857
ccaagaagcuaguacucau

SEQ ID NO: 823721 - RNA, 19 nt, Artificial Sequence
  Description of Artificial Sequence: Synthetic oligonucleotide
  Antisense strand to SEQ ID NO: 823720
augaguacuagcuucuugg

SEQ ID NO: 823722 - RNA, 19 nt, Artificial Sequence
  Description of Artificial Sequence: Synthetic oligonucleotide
  Sense strand starting at position 1975 of SEQ ID NO: 587857
gcgggaugcacuugagcau

SEQ ID NO: 823723 - RNA, 19 nt, Artificial Sequence
  Description of Artificial Sequence: Synthetic oligonucleotide
  Antisense strand to SEQ ID NO: 823722
augcucaagugcaucccgc

SEQ ID NO: 823724 - RNA, 19 nt, Artificial Sequence
  Description of Artificial Sequence: Synthetic oligonucleotide
  Sense strand starting at position 2212 of SEQ ID NO: 587857
gucucagacucuuaggaag

SEQ ID NO: 823725 - RNA, 19 nt, Artificial Sequence
  Description of Artificial Sequence: Synthetic oligonucleotide
  Antisense strand to SEQ ID NO: 823724
cuuccuaagagucugagac

SEQ ID NO: 823726 - RNA, 19 nt, Artificial Sequence
  Description of Artificial Sequence: Synthetic oligonucleotide
  Sense strand starting at position 2589 of SEQ ID NO: 587857
gcggcauuuggccacgaau

SEQ ID NO: 823727 - RNA, 19 nt, Artificial Sequence
  Description of Artificial Sequence: Synthetic oligonucleotide
  Antisense strand to SEQ ID NO: 823726
auucguggccaaaugccgc

SEQ ID NO: 823728 - RNA, 19 nt, Artificial Sequence
  Description of Artificial Sequence: Synthetic oligonucleotide
  Sense strand starting at position 2591 of SEQ ID NO: 587857
ggcauuuggccacgaaucu

SEQ ID NO: 823729 - RNA, 19 nt, Artificial Sequence
  Description of Artificial Sequence: Synthetic oligonucleotide
  Antisense strand to SEQ ID NO: 823728
agauucguggccaaaugcc

SEQ ID NO: 823730 - RNA, 19 nt, Artificial Sequence
  Description of Artificial Sequence: Synthetic oligonucleotide
  Sense strand starting at position 3146 of SEQ ID NO: 587857
cagagaggucacuguuauc

SEQ ID NO: 823731 - RNA, 19 nt, Artificial Sequence
  Description of Artificial Sequence: Synthetic oligonucleotide
  Antisense strand to SEQ ID NO: 823730
gauaacagugaccucucug

SEQ ID NO: 823732 - RNA, 19 nt, Artificial Sequence
  Description of Artificial Sequence: Synthetic oligonucleotide
  Sense strand starting at position 3149 of SEQ ID NO: 587857
agaggucacuguuaucaaa

SEQ ID NO: 823733 - RNA, 19 nt, Artificial Sequence
  Description of Artificial Sequence: Synthetic oligonucleotide
  Antisense strand to SEQ ID NO: 823732
uuugauaacagugaccucu

SEQ ID NO: 823734 - RNA, 19 nt, Artificial Sequence
  Description of Artificial Sequence: Synthetic oligonucleotide
  Sense strand starting at position 3230 of SEQ ID NO: 587857
ccuggauggccuuaugagu

SEQ ID NO: 823735 - RNA, 19 nt, Artificial Sequence
  Description of Artificial Sequence: Synthetic oligonucleotide
  Antisense strand to SEQ ID NO: 823734
acucauaaggccauccagg

SEQ ID NO: 823736 - RNA, 19 nt, Artificial Sequence
  Description of Artificial Sequence: Synthetic oligonucleotide
  Sense strand starting at position 3241 of SEQ ID NO: 587857
uuaugagucucagaggcua

SEQ ID NO: 823737 - RNA, 19 nt, Artificial Sequence
  Description of Artificial Sequence: Synthetic oligonucleotide
  Antisense strand to SEQ ID NO: 823736
uagccucugagacucauaa

SEQ ID NO: 823738 - RNA, 19 nt, Artificial Sequence
  Description of Artificial Sequence: Synthetic oligonucleotide
  Sense strand starting at position 3308 of SEQ ID NO: 587857
cgccuuguuucucuuggua

SEQ ID NO: 823739 - RNA, 19 nt, Artificial Sequence
  Description of Artificial Sequence: Synthetic oligonucleotide
  Antisense strand to SEQ ID NO: 823738
uaccaagagaaacaaggcg

SEQ ID NO: 823740 - RNA, 19 nt, Artificial Sequence
  Description of Artificial Sequence: Synthetic oligonucleotide
  Sense strand starting at position 3310 of SEQ ID NO: 587857
ccuuguuucucuugguaga

SEQ ID NO: 823741 - RNA, 19 nt, Artificial Sequence
  Description of Artificial Sequence: Synthetic oligonucleotide
  Antisense strand to SEQ ID NO: 823740
ucuaccaagagaaacaagg

SEQ ID NO: 823742 - RNA, 19 nt, Artificial Sequence
  Description of Artificial Sequence: Synthetic oligonucleotide
  Sense strand starting at position 3311 of SEQ ID NO: 587857
cuuguuucucuugguagau

SEQ ID NO: 823743 - RNA, 19 nt, Artificial Sequence
  Description of Artificial Sequence: Synthetic oligonucleotide
  Antisense strand to SEQ ID NO: 823742
aucuaccaagagaaacaag

SEQ ID NO: 823744 - RNA, 19 nt, Artificial Sequence
  Description of Artificial Sequence: Synthetic oligonucleotide
  Sense strand starting at position 3312 of SEQ ID NO: 587857
uuguuucucuugguagaug

SEQ ID NO: 823745 - RNA, 19 nt, Artificial Sequence
  Description of Artificial Sequence: Synthetic oligonucleotide
  Antisense strand to SEQ ID NO: 823744
caucuaccaagagaaacaa

SEQ ID NO: 823746 - RNA, 19 nt, Artificial Sequence
  Description of Artificial Sequence: Synthetic oligonucleotide
  Sense strand starting at position 3313 of SEQ ID NO: 587857
uguuucucuugguagauga

SEQ ID NO: 823747 - RNA, 19 nt, Artificial Sequence
  Description of Artificial Sequence: Synthetic oligonucleotide
  Antisense strand to SEQ ID NO: 823746
ucaucuaccaagagaaaca

SEQ ID NO: 823748 - RNA, 19 nt, Artificial Sequence
  Description of Artificial Sequence: Synthetic oligonucleotide
  Sense strand starting at position 3380 of SEQ ID NO: 587857
cuuccaggucaucaucgau

SEQ ID NO: 823749 - RNA, 19 nt, Artificial Sequence
  Description of Artificial Sequence: Synthetic oligonucleotide
  Antisense strand to SEQ ID NO: 823748
aucgaugaugaccuggaag

SEQ ID NO: 823750 - RNA, 19 nt, Artificial Sequence
  Description of Artificial Sequence: Synthetic oligonucleotide
  Sense strand starting at position 3386 of SEQ ID NO: 587857
ggucaucaucgauguccuu

SEQ ID NO: 823751 - RNA, 19 nt, Artificial Sequence
  Description of Artificial Sequence: Synthetic oligonucleotide
  Antisense strand to SEQ ID NO: 823750
aaggacaucgaugaugacc

SEQ ID NO: 823752 - RNA, 19 nt, Artificial Sequence
  Description of Artificial Sequence: Synthetic oligonucleotide
  Sense strand starting at position 3413 of SEQ ID NO: 587857
ccauguugcgcagaaccau

SEQ ID NO: 823753 - RNA, 19 nt, Artificial Sequence
  Description of Artificial Sequence: Synthetic oligonucleotide
  Antisense strand to SEQ ID NO: 823752
augguucugcgcaacaugg

SEQ ID NO: 823754 - RNA, 19 nt, Artificial Sequence
  Description of Artificial Sequence: Synthetic oligonucleotide
  Sense strand starting at position 3422 of SEQ ID NO: 587857
gcagaaccaucacuguaga

SEQ ID NO: 823755 - RNA, 19 nt, Artificial Sequence
  Description of Artificial Sequence: Synthetic oligonucleotide
  Antisense strand to SEQ ID NO: 823754
ucuacagugaugguucugc

SEQ ID NO: 823756 - RNA, 19 nt, Artificial Sequence
  Description of Artificial Sequence: Synthetic oligonucleotide
  Sense strand starting at position 3620 of SEQ ID NO: 587857
gccgcucugacucgggaaa

SEQ ID NO: 823757 - RNA, 19 nt, Artificial Sequence
  Description of Artificial Sequence: Synthetic oligonucleotide
  Antisense strand to SEQ ID NO: 823756
uuucccgagucagagcggc

SEQ ID NO: 823758 - RNA, 19 nt, Artificial Sequence
  Description of Artificial Sequence: Synthetic oligonucleotide
  Sense strand starting at position 3622 of SEQ ID NO: 587857
cgcucugacucgggaaaca

SEQ ID NO: 823759 - RNA, 19 nt, Artificial Sequence
  Description of Artificial Sequence: Synthetic oligonucleotide
  Antisense strand to SEQ ID NO: 823758
uguuucccgagucagagcg

SEQ ID NO: 823760 - RNA, 19 nt, Artificial Sequence
  Description of Artificial Sequence: Synthetic oligonucleotide
  Sense strand starting at position 3852 of SEQ ID NO: 587857
gaggguugugcccagacca

SEQ ID NO: 823761 - RNA, 19 nt, Artificial Sequence
  Description of Artificial Sequence: Synthetic oligonucleotide
  Antisense strand to SEQ ID NO: 823760
uggucugggcacaacccuc

SEQ ID NO: 823762 - RNA, 19 nt, Artificial Sequence
  Description of Artificial Sequence: Synthetic oligonucleotide
  Sense strand starting at position 3939 of SEQ ID NO: 587857
acuuaagacucaccuguga

SEQ ID NO: 823763 - RNA, 19 nt, Artificial Sequence
  Description of Artificial Sequence: Synthetic oligonucleotide
  Antisense strand to SEQ ID NO: 823762
ucacaggugagucuuaagu

SEQ ID NO: 823764 - RNA, 19 nt, Artificial Sequence
  Description of Artificial Sequence: Synthetic oligonucleotide
  Sense strand starting at position 3944 of SEQ ID NO: 587857
agacucaccugugaugacu

SEQ ID NO: 823765 - RNA, 19 nt, Artificial Sequence
  Description of Artificial Sequence: Synthetic oligonucleotide
  Antisense strand to SEQ ID NO: 823764
agucaucacaggugagucu

SEQ ID NO: 823766 - RNA, 19 nt, Artificial Sequence
  Description of Artificial Sequence: Synthetic oligonucleotide
  Sense strand starting at position 856 of SEQ ID NO: 587858
cacugaugugccgaacuca

SEQ ID NO: 823767 - RNA, 19 nt, Artificial Sequence
  Description of Artificial Sequence: Synthetic oligonucleotide
  Antisense strand to SEQ ID NO: 823766
ugaguucggcacaucagug

SEQ ID NO: 823768 - RNA, 19 nt, Artificial Sequence
  Description of Artificial Sequence: Synthetic oligonucleotide
  Sense strand starting at position 1138 of SEQ ID NO: 587858
gacaguuguccuugaacuu

SEQ ID NO: 823769 - RNA, 19 nt, Artificial Sequence
  Description of Artificial Sequence: Synthetic oligonucleotide
  Antisense strand to SEQ ID NO: 823768
aaguucaaggacaacuguc

SEQ ID NO: 823770 - RNA, 19 nt, Artificial Sequence
  Description of Artificial Sequence: Synthetic oligonucleotide
  Sense strand starting at position 1364 of SEQ ID NO: 587858
gcagguguccuggugcagu

SEQ ID NO: 823771 - RNA, 19 nt, Artificial Sequence
  Description of Artificial Sequence: Synthetic oligonucleotide
  Antisense strand to SEQ ID NO: 823770
acugcaccaggacaccugc

SEQ ID NO: 823772 - RNA, 19 nt, Artificial Sequence
  Description of Artificial Sequence: Synthetic oligonucleotide
  Sense strand starting at position 1515 of SEQ ID NO: 587858
ccaugugugcguuugggua

SEQ ID NO: 823773 - RNA, 19 nt, Artificial Sequence
  Description of Artificial Sequence: Synthetic oligonucleotide
  Antisense strand to SEQ ID NO: 823772
uacccaaacgcacacaugg

SEQ ID NO: 823774 - RNA, 19 nt, Artificial Sequence
  Description of Artificial Sequence: Synthetic oligonucleotide
  Sense strand starting at position 1840 of SEQ ID NO: 587858
aagagaacgcgucaaguuu

SEQ ID NO: 823775 - RNA, 19 nt, Artificial Sequence
  Description of Artificial Sequence: Synthetic oligonucleotide
  Antisense strand to SEQ ID NO: 823774
aaacuugacgcguucucuu

SEQ ID NO: 823776 - RNA, 19 nt, Artificial Sequence
  Description of Artificial Sequence: Synthetic oligonucleotide
  Sense strand starting at position 1849 of SEQ ID NO: 587858
cgucaaguuugaccuucuu

SEQ ID NO: 823777 - RNA, 19 nt, Artificial Sequence
  Description of Artificial Sequence: Synthetic oligonucleotide
  Antisense strand to SEQ ID NO: 823776
aagaaggucaaacuugacg

SEQ ID NO: 823778 - RNA, 19 nt, Artificial Sequence
  Description of Artificial Sequence: Synthetic oligonucleotide
  Sense strand starting at position 1858 of SEQ ID NO: 587858
ugaccuucuugaccaggaa

SEQ ID NO: 823779 - RNA, 19 nt, Artificial Sequence
  Description of Artificial Sequence: Synthetic oligonucleotide
  Antisense strand to SEQ ID NO: 823778
uuccuggucaagaagguca

SEQ ID NO: 823780 - RNA, 19 nt, Artificial Sequence
  Description of Artificial Sequence: Synthetic oligonucleotide
  Sense strand starting at position 2559 of SEQ ID NO: 587858
cugggaggcuugcuuuauu

SEQ ID NO: 823781 - RNA, 19 nt, Artificial Sequence
  Description of Artificial Sequence: Synthetic oligonucleotide
  Antisense strand to SEQ ID NO: 823780
aauaaagcaagccucccag

SEQ ID NO: 823782 - RNA, 19 nt, Artificial Sequence
  Description of Artificial Sequence: Synthetic oligonucleotide
  Sense strand starting at position 2562 of SEQ ID NO: 587858
ggaggcuugcuuuauuguu

SEQ ID NO: 823783 - RNA, 19 nt, Artificial Sequence
  Description of Artificial Sequence: Synthetic oligonucleotide
  Antisense strand to SEQ ID NO: 823782
aacaauaaagcaagccucc

SEQ ID NO: 823784 - RNA, 19 nt, Artificial Sequence
  Description of Artificial Sequence: Synthetic oligonucleotide
  Sense strand starting at position 3338 of SEQ ID NO: 587858
acgacccugcuccagaaau

SEQ ID NO: 823785 - RNA, 19 nt, Artificial Sequence
  Description of Artificial Sequence: Synthetic oligonucleotide
  Antisense strand to SEQ ID NO: 823784
auuucuggagcagggucgu

SEQ ID NO: 823786 - RNA, 19 nt, Artificial Sequence
  Description of Artificial Sequence: Synthetic oligonucleotide
  Sense strand starting at position 3348 of SEQ ID NO: 587858
uccagaaauucugcugcuu

SEQ ID NO: 823787 - RNA, 19 nt, Artificial Sequence
  Description of Artificial Sequence: Synthetic oligonucleotide
  Antisense strand to SEQ ID NO: 823786
aagcagcagaauuucugga

SEQ ID NO: 823788 - RNA, 19 nt, Artificial Sequence
  Description of Artificial Sequence: Synthetic oligonucleotide
  Sense strand starting at position 70 of SEQ ID NO: 587859
ccuccauauuuggaagaua

SEQ ID NO: 823789 - RNA, 19 nt, Artificial Sequence
  Description of Artificial Sequence: Synthetic oligonucleotide
  Antisense strand to SEQ ID NO: 823788
uaucuuccaaauauggagg

SEQ ID NO: 823790 - RNA, 19 nt, Artificial Sequence
  Description of Artificial Sequence: Synthetic oligonucleotide
  Sense strand starting at position 677 of SEQ ID NO: 587859
gcgugcugucuggagagga

SEQ ID NO: 823791 - RNA, 19 nt, Artificial Sequence
  Description of Artificial Sequence: Synthetic oligonucleotide
  Antisense strand to SEQ ID NO: 823790
uccucuccagacagcacgc

SEQ ID NO: 823792 - RNA, 19 nt, Artificial Sequence
  Description of Artificial Sequence: Synthetic oligonucleotide
  Sense strand starting at position 678 of SEQ ID NO: 587859
cgugcugucuggagaggaa

SEQ ID NO: 823793 - RNA, 19 nt, Artificial Sequence
  Description of Artificial Sequence: Synthetic oligonucleotide
  Antisense strand to SEQ ID NO: 823792
uuccucuccagacagcacg

SEQ ID NO: 823794 - RNA, 19 nt, Artificial Sequence
  Description of Artificial Sequence: Synthetic oligonucleotide
  Sense strand starting at position 1238 of SEQ ID NO: 587859
ccggcaggccuguguuaca

SEQ ID NO: 823795 - RNA, 19 nt, Artificial Sequence
  Description of Artificial Sequence: Synthetic oligonucleotide
  Antisense strand to SEQ ID NO: 823794
uguaacacaggccugccgg

SEQ ID NO: 823796 - RNA, 19 nt, Artificial Sequence
  Description of Artificial Sequence: Synthetic oligonucleotide
  Sense strand starting at position 2313 of SEQ ID NO: 587859
cgcuucugggcuguaguua

SEQ ID NO: 823797 - RNA, 19 nt, Artificial Sequence
  Description of Artificial Sequence: Synthetic oligonucleotide
  Antisense strand to SEQ ID NO: 823796
uaacuacagcccagaagcg

SEQ ID NO: 823798 - RNA, 19 nt, Artificial Sequence
  Description of Artificial Sequence: Synthetic oligonucleotide
  Sense strand starting at position 3603 of SEQ ID NO: 587859
uggaccaguuccuggacaa

SEQ ID NO: 823799 - RNA, 19 nt, Artificial Sequence
  Description of Artificial Sequence: Synthetic oligonucleotide
  Antisense strand to SEQ ID NO: 823798
uuguccaggaacuggucca

SEQ ID NO: 823800 - RNA, 19 nt, Artificial Sequence
  Description of Artificial Sequence: Synthetic oligonucleotide
  Sense strand starting at position 3604 of SEQ ID NO: 587859
ggaccaguuccuggacaag

SEQ ID NO: 823801 - RNA, 19 nt, Artificial Sequence
  Description of Artificial Sequence: Synthetic oligonucleotide
  Antisense strand to SEQ ID NO: 823800
cuuguccaggaacuggucc

SEQ ID NO: 823802 - RNA, 19 nt, Artificial Sequence
  Description of Artificial Sequence: Synthetic oligonucleotide
  Sense strand starting at position 73 of SEQ ID NO: 587860
acguuauuaaauggcaaag

SEQ ID NO: 823803 - RNA, 19 nt, Artificial Sequence
  Description of Artificial Sequence: Synthetic oligonucleotide
  Antisense strand to SEQ ID NO: 823802
cuuugccauuuaauaacgu

SEQ ID NO: 823804 - RNA, 19 nt, Artificial Sequence
  Description of Artificial Sequence: Synthetic oligonucleotide
  Sense strand starting at position 254 of SEQ ID NO: 587860
ggaggcaguucccuuuaga

SEQ ID NO: 823805 - RNA, 19 nt, Artificial Sequence
  Description of Artificial Sequence: Synthetic oligonucleotide
  Antisense strand to SEQ ID NO: 823804
ucuaaagggaacugccucc

SEQ ID NO: 823806 - RNA, 19 nt, Artificial Sequence
  Description of Artificial Sequence: Synthetic oligonucleotide
  Sense strand starting at position 714 of SEQ ID NO: 587860
cugcgauuccacguagugu

SEQ ID NO: 823807 - RNA, 19 nt, Artificial Sequence
  Description of Artificial Sequence: Synthetic oligonucleotide
  Antisense strand to SEQ ID NO: 823806
acacuacguggaaucgcag

SEQ ID NO: 823808 - RNA, 19 nt, Artificial Sequence
  Description of Artificial Sequence: Synthetic oligonucleotide
  Sense strand starting at position 800 of SEQ ID NO: 587860
acucgcgggucucuuaaau

SEQ ID NO: 823809 - RNA, 19 nt, Artificial Sequence
  Description of Artificial Sequence: Synthetic oligonucleotide
  Antisense strand to SEQ ID NO: 823808
auuuaagagacccgcgagu

SEQ ID NO: 823810 - RNA, 19 nt, Artificial Sequence
  Description of Artificial Sequence: Synthetic oligonucleotide
  Sense strand starting at position 1200 of SEQ ID NO: 587860
ggaucuccgguguauacuu

SEQ ID NO: 823811 - RNA, 19 nt, Artificial Sequence
  Description of Artificial Sequence: Synthetic oligonucleotide
  Antisense strand to SEQ ID NO: 823810
aaguauacaccggagaucc

SEQ ID NO: 823812 - RNA, 19 nt, Artificial Sequence
  Description of Artificial Sequence: Synthetic oligonucleotide
  Sense strand starting at position 2019 of SEQ ID NO: 587860
gugugacucccagauaaac

SEQ ID NO: 823813 - RNA, 19 nt, Artificial Sequence
  Description of Artificial Sequence: Synthetic oligonucleotide
  Antisense strand to SEQ ID NO: 823812
guuuaucugggagucacac

SEQ ID NO: 823814 - RNA, 19 nt, Artificial Sequence
  Description of Artificial Sequence: Synthetic oligonucleotide
  Sense strand starting at position 2040 of SEQ ID NO: 587860
gggagaaauuccuacagga

SEQ ID NO: 823815 - RNA, 19 nt, Artificial Sequence
  Description of Artificial Sequence: Synthetic oligonucleotide
  Antisense strand to SEQ ID NO: 823814
uccuguaggaauuucuccc

SEQ ID NO: 823816 - RNA, 19 nt, Artificial Sequence
  Description of Artificial Sequence: Synthetic oligonucleotide
  Sense strand starting at position 2262 of SEQ ID NO: 587860
gagaacaauuagugaagaa

SEQ ID NO: 823817 - RNA, 19 nt, Artificial Sequence
  Description of Artificial Sequence: Synthetic oligonucleotide
  Antisense strand to SEQ ID NO: 823816
uucuucacuaauuguucuc

SEQ ID NO: 823818 - RNA, 19 nt, Artificial Sequence
  Description of Artificial Sequence: Synthetic oligonucleotide
  Sense strand starting at position 2283 of SEQ ID NO: 587860
gagagacguauguagcuuu

SEQ ID NO: 823819 - RNA, 19 nt, Artificial Sequence
  Description of Artificial Sequence: Synthetic oligonucleotide
  Antisense strand to SEQ ID NO: 823818
aaagcuacauacgucucuc

SEQ ID NO: 823820 - RNA, 19 nt, Artificial Sequence
  Description of Artificial Sequence: Synthetic oligonucleotide
  Sense strand starting at position 2326 of SEQ ID NO: 587860
gaaagaaacugcuuuguga

SEQ ID NO: 823821 - RNA, 19 nt, Artificial Sequence
  Description of Artificial Sequence: Synthetic oligonucleotide
  Antisense strand to SEQ ID NO: 823820
ucacaaagcaguuucuuuc

SEQ ID NO: 823822 - RNA, 19 nt, Artificial Sequence
  Description of Artificial Sequence: Synthetic oligonucleotide
  Sense strand starting at position 2328 of SEQ ID NO: 587860
aagaaacugcuuugugagu

SEQ ID NO: 823823 - RNA, 19 nt, Artificial Sequence
  Description of Artificial Sequence: Synthetic oligonucleotide
  Antisense strand to SEQ ID NO: 823822
acucacaaagcaguuucuu

SEQ ID NO: 823824 - RNA, 19 nt, Artificial Sequence
  Description of Artificial Sequence: Synthetic oligonucleotide
  Sense strand starting at position 2329 of SEQ ID NO: 587860
agaaacugcuuugugaguu

SEQ ID NO: 823825 - RNA, 19 nt, Artificial Sequence
  Description of Artificial Sequence: Synthetic oligonucleotide
  Antisense strand to SEQ ID NO: 823824
aacucacaaagcaguuucu

SEQ ID NO: 823826 - RNA, 19 nt, Artificial Sequence
  Description of Artificial Sequence: Synthetic oligonucleotide
  Sense strand starting at position 2335 of SEQ ID NO: 587860
ugcuuugugaguugaggga

SEQ ID NO: 823827 - RNA, 19 nt, Artificial Sequence
  Description of Artificial Sequence: Synthetic oligonucleotide
  Antisense strand to SEQ ID NO: 823826
ucccucaacucacaaagca

SEQ ID NO: 823828 - RNA, 19 nt, Artificial Sequence
  Description of Artificial Sequence: Synthetic oligonucleotide
  Sense strand starting at position 2457 of SEQ ID NO: 587860
uagugagaguguuucccau

SEQ ID NO: 823829 - RNA, 19 nt, Artificial Sequence
  Description of Artificial Sequence: Synthetic oligonucleotide
  Antisense strand to SEQ ID NO: 823828
augggaaacacucucacua

SEQ ID NO: 823830 - RNA, 19 nt, Artificial Sequence
  Description of Artificial Sequence: Synthetic oligonucleotide
  Sense strand starting at position 2459 of SEQ ID NO: 587860
gugagaguguuucccauuc

SEQ ID NO: 823831 - RNA, 19 nt, Artificial Sequence
  Description of Artificial Sequence: Synthetic oligonucleotide
  Antisense strand to SEQ ID NO: 823830
gaaugggaaacacucucac

SEQ ID NO: 823832 - RNA, 19 nt, Artificial Sequence
  Description of Artificial Sequence: Synthetic oligonucleotide
  Sense strand starting at position 2514 of SEQ ID NO: 587860
gaggaaggauccuguaaac

SEQ ID NO: 823833 - RNA, 19 nt, Artificial Sequence
  Description of Artificial Sequence: Synthetic oligonucleotide
  Antisense strand to SEQ ID NO: 823832
guuuacaggauccuuccuc

SEQ ID NO: 823834 - RNA, 19 nt, Artificial Sequence
  Description of Artificial Sequence: Synthetic oligonucleotide
  Sense strand starting at position 2601 of SEQ ID NO: 587860
aguuuaugccacuaaggcu

SEQ ID NO: 823835 - RNA, 19 nt, Artificial Sequence
  Description of Artificial Sequence: Synthetic oligonucleotide
  Antisense strand to SEQ ID NO: 823834
agccuuaguggcauaaacu

SEQ ID NO: 823836 - RNA, 19 nt, Artificial Sequence
  Description of Artificial Sequence: Synthetic oligonucleotide
  Sense strand starting at position 2636 of SEQ ID NO: 587860
uuagcagauagguguuaac

SEQ ID NO: 823837 - RNA, 19 nt, Artificial Sequence
  Description of Artificial Sequence: Synthetic oligonucleotide
  Antisense strand to SEQ ID NO: 823836
guuaacaccuaucugcuaa

SEQ ID NO: 823838 - RNA, 19 nt, Artificial Sequence
  Description of Artificial Sequence: Synthetic oligonucleotide
  Sense strand starting at position 2653 of SEQ ID NO: 587860
acguuuggaagcuacaaau

SEQ ID NO: 823839 - RNA, 19 nt, Artificial Sequence
  Description of Artificial Sequence: Synthetic oligonucleotide
  Antisense strand to SEQ ID NO: 823838
auuuguagcuuccaaacgu

SEQ ID NO: 823840 - RNA, 19 nt, Artificial Sequence
  Description of Artificial Sequence: Synthetic oligonucleotide
  Sense strand starting at position 2672 of SEQ ID NO: 587860
aggguaauuugaugagaag

SEQ ID NO: 823841 - RNA, 19 nt, Artificial Sequence
  Description of Artificial Sequence: Synthetic oligonucleotide
  Antisense strand to SEQ ID NO: 823840
cuucucaucaaauuacccu

SEQ ID NO: 823842 - RNA, 19 nt, Artificial Sequence
  Description of Artificial Sequence: Synthetic oligonucleotide
  Sense strand starting at position 2675 of SEQ ID NO: 587860
guaauuugaugagaaguug

SEQ ID NO: 823843 - RNA, 19 nt, Artificial Sequence
  Description of Artificial Sequence: Synthetic oligonucleotide
  Antisense strand to SEQ ID NO: 823842
caacuucucaucaaauuac

SEQ ID NO: 823844 - RNA, 19 nt, Artificial Sequence
  Description of Artificial Sequence: Synthetic oligonucleotide
  Sense strand starting at position 2750 of SEQ ID NO: 587860
aguaauucuuaguuugaag

SEQ ID NO: 823845 - RNA, 19 nt, Artificial Sequence
  Description of Artificial Sequence: Synthetic oligonucleotide
  Antisense strand to SEQ ID NO: 823844
cuucaaacuaagaauuacu

SEQ ID NO: 823846 - RNA, 19 nt, Artificial Sequence
  Description of Artificial Sequence: Synthetic oligonucleotide
  Sense strand starting at position 2779 of SEQ ID NO: 587860
acauguauuuccuaaaugg

SEQ ID NO: 823847 - RNA, 19 nt, Artificial Sequence
  Description of Artificial Sequence: Synthetic oligonucleotide
  Antisense strand to SEQ ID NO: 823846
ccauuuaggaaauacaugu

SEQ ID NO: 823848 - RNA, 19 nt, Artificial Sequence
  Description of Artificial Sequence: Synthetic oligonucleotide
  Sense strand starting at position 2796 of SEQ ID NO: 587860
ggaaguagcugacaugaaa

SEQ ID NO: 823849 - RNA, 19 nt, Artificial Sequence
  Description of Artificial Sequence: Synthetic oligonucleotide
  Antisense strand to SEQ ID NO: 823848
uuucaugucagcuacuucc

SEQ ID NO: 823850 - RNA, 19 nt, Artificial Sequence
  Description of Artificial Sequence: Synthetic oligonucleotide
  Sense strand starting at position 2821 of SEQ ID NO: 587860
guuacaaugucuguggcau

SEQ ID NO: 823851 - RNA, 19 nt, Artificial Sequence
  Description of Artificial Sequence: Synthetic oligonucleotide
  Antisense strand to SEQ ID NO: 823850
augccacagacauuguaac

SEQ ID NO: 823852 - RNA, 19 nt, Artificial Sequence
  Description of Artificial Sequence: Synthetic oligonucleotide
  Sense strand starting at position 2822 of SEQ ID NO: 587860
uuacaaugucuguggcaua

SEQ ID NO: 823853 - RNA, 19 nt, Artificial Sequence
  Description of Artificial Sequence: Synthetic oligonucleotide
  Antisense strand to SEQ ID NO: 823852
uaugccacagacauuguaa

SEQ ID NO: 823854 - RNA, 19 nt, Artificial Sequence
  Description of Artificial Sequence: Synthetic oligonucleotide
  Sense strand starting at position 2827 of SEQ ID NO: 587860
augucuguggcauauuaua

SEQ ID NO: 823855 - RNA, 19 nt, Artificial Sequence
  Description of Artificial Sequence: Synthetic oligonucleotide
  Antisense strand to SEQ ID NO: 823854
uauaauaugccacagacau

SEQ ID NO: 823856 - RNA, 19 nt, Artificial Sequence
  Description of Artificial Sequence: Synthetic oligonucleotide
  Sense strand starting at position 2858 of SEQ ID NO: 587860
ugcguauucccuuccaguu

SEQ ID NO: 823857 - RNA, 19 nt, Artificial Sequence
  Description of Artificial Sequence: Synthetic oligonucleotide
  Antisense strand to SEQ ID NO: 823856
aacuggaagggaauacgca

SEQ ID NO: 823858 - RNA, 19 nt, Artificial Sequence
  Description of Artificial Sequence: Synthetic oligonucleotide
  Sense strand starting at position 3034 of SEQ ID NO: 587860
auucucauuccugguacau

SEQ ID NO: 823859 - RNA, 19 nt, Artificial Sequence
  Description of Artificial Sequence: Synthetic oligonucleotide
  Antisense strand to SEQ ID NO: 823858
auguaccaggaaugagaau

SEQ ID NO: 823860 - RNA, 19 nt, Artificial Sequence
  Description of Artificial Sequence: Synthetic oligonucleotide
  Sense strand starting at position 3157 of SEQ ID NO: 587860
auaugaggccaugguaauu

SEQ ID NO: 823861 - RNA, 19 nt, Artificial Sequence
  Description of Artificial Sequence: Synthetic oligonucleotide
  Antisense strand to SEQ ID NO: 823860
aauuaccauggccucauau

SEQ ID NO: 823862 - RNA, 19 nt, Artificial Sequence
  Description of Artificial Sequence: Synthetic oligonucleotide
  Sense strand starting at position 3204 of SEQ ID NO: 587860
gucauacccucagugagaa

SEQ ID NO: 823863 - RNA, 19 nt, Artificial Sequence
  Description of Artificial Sequence: Synthetic oligonucleotide
  Antisense strand to SEQ ID NO: 823862
uucucacugaggguaugac

SEQ ID NO: 823864 - RNA, 19 nt, Artificial Sequence
  Description of Artificial Sequence: Synthetic oligonucleotide
  Sense strand starting at position 3205 of SEQ ID NO: 587860
ucauacccucagugagaau

SEQ ID NO: 823865 - RNA, 19 nt, Artificial Sequence
  Description of Artificial Sequence: Synthetic oligonucleotide
  Antisense strand to SEQ ID NO: 823864
auucucacugaggguauga

SEQ ID NO: 823866 - RNA, 19 nt, Artificial Sequence
  Description of Artificial Sequence: Synthetic oligonucleotide
  Sense strand starting at position 3223 of SEQ ID NO: 587860
uuaaaugucuuaguaaccu

SEQ ID NO: 823867 - RNA, 19 nt, Artificial Sequence
  Description of Artificial Sequence: Synthetic oligonucleotide
  Antisense strand to SEQ ID NO: 823866
agguuacuaagacauuuaa

SEQ ID NO: 823868 - RNA, 19 nt, Artificial Sequence
  Description of Artificial Sequence: Synthetic oligonucleotide
  Sense strand starting at position 3227 of SEQ ID NO: 587860
augucuuaguaaccuauua

SEQ ID NO: 823869 - RNA, 19 nt, Artificial Sequence
  Description of Artificial Sequence: Synthetic oligonucleotide
  Antisense strand to SEQ ID NO: 823868
uaauagguuacuaagacau

SEQ ID NO: 823870 - RNA, 19 nt, Artificial Sequence
  Description of Artificial Sequence: Synthetic oligonucleotide
  Sense strand starting at position 3298 of SEQ ID NO: 587860
uggagacacuuauuccuuu

SEQ ID NO: 823871 - RNA, 19 nt, Artificial Sequence
  Description of Artificial Sequence: Synthetic oligonucleotide
  Antisense strand to SEQ ID NO: 823870
aaaggaauaagugucucca

SEQ ID NO: 823872 - RNA, 19 nt, Artificial Sequence
  Description of Artificial Sequence: Synthetic oligonucleotide
  Sense strand starting at position 3451 of SEQ ID NO: 587860
guaacaucagaugaugcuu

SEQ ID NO: 823873 - RNA, 19 nt, Artificial Sequence
  Description of Artificial Sequence: Synthetic oligonucleotide
  Antisense strand to SEQ ID NO: 823872
aagcaucaucugauguuac

SEQ ID NO: 823874 - RNA, 19 nt, Artificial Sequence
  Description of Artificial Sequence: Synthetic oligonucleotide
  Sense strand starting at position 3456 of SEQ ID NO: 587860
aucagaugaugcuucugau

SEQ ID NO: 823875 - RNA, 19 nt, Artificial Sequence
  Description of Artificial Sequence: Synthetic oligonucleotide
  Antisense strand to SEQ ID NO: 823874
aucagaagcaucaucugau

SEQ ID NO: 823876 - RNA, 19 nt, Artificial Sequence
  Description of Artificial Sequence: Synthetic oligonucleotide
  Sense strand starting at position 3462 of SEQ ID NO: 587860
ugaugcuucugauuccaca

SEQ ID NO: 823877 - RNA, 19 nt, Artificial Sequence
  Description of Artificial Sequence: Synthetic oligonucleotide
  Antisense strand to SEQ ID NO: 823876
uguggaaucagaagcauca

SEQ ID NO: 823878 - RNA, 19 nt, Artificial Sequence
  Description of Artificial Sequence: Synthetic oligonucleotide
  Sense strand starting at position 3863 of SEQ ID NO: 587860
guggguugaagagguucau

SEQ ID NO: 823879 - RNA, 19 nt, Artificial Sequence
  Description of Artificial Sequence: Synthetic oligonucleotide
  Antisense strand to SEQ ID NO: 823878
augaaccucuucaacccac

SEQ ID NO: 823880 - RNA, 19 nt, Artificial Sequence
  Description of Artificial Sequence: Synthetic oligonucleotide
  Sense strand starting at position 3958 of SEQ ID NO: 587860
ccagcucuguccucauaag

SEQ ID NO: 823881 - RNA, 19 nt, Artificial Sequence
  Description of Artificial Sequence: Synthetic oligonucleotide
  Antisense strand to SEQ ID NO: 823880
cuuaugaggacagagcugg

SEQ ID NO: 823882 - RNA, 19 nt, Artificial Sequence
  Description of Artificial Sequence: Synthetic oligonucleotide
  Sense strand starting at position 24 of SEQ ID NO: 587861
gcuauauaugcugauauua

SEQ ID NO: 823883 - RNA, 19 nt, Artificial Sequence
  Description of Artificial Sequence: Synthetic oligonucleotide
  Antisense strand to SEQ ID NO: 823882
uaauaucagcauauauagc

SEQ ID NO: 823884 - RNA, 19 nt, Artificial Sequence
  Description of Artificial Sequence: Synthetic oligonucleotide
  Sense strand starting at position 136 of SEQ ID NO: 587861
gcaaauacagcuuauaugu

SEQ ID NO: 823885 - RNA, 19 nt, Artificial Sequence
  Description of Artificial Sequence: Synthetic oligonucleotide
  Antisense strand to SEQ ID NO: 823884
acauauaagcuguauuugc

SEQ ID NO: 823886 - RNA, 19 nt, Artificial Sequence
  Description of Artificial Sequence: Synthetic oligonucleotide
  Sense strand starting at position 154 of SEQ ID NO: 587861
uuugccuguguagauauaa

SEQ ID NO: 823887 - RNA, 19 nt, Artificial Sequence
  Description of Artificial Sequence: Synthetic oligonucleotide
  Antisense strand to SEQ ID NO: 823886
uuauaucuacacaggcaaa

SEQ ID NO: 823888 - RNA, 19 nt, Artificial Sequence
  Description of Artificial Sequence: Synthetic oligonucleotide
  Sense strand starting at position 177 of SEQ ID NO: 587861
ugccuagaauaccuaagaa

SEQ ID NO: 823889 - RNA, 19 nt, Artificial Sequence
  Description of Artificial Sequence: Synthetic oligonucleotide
  Antisense strand to SEQ ID NO: 823888
uucuuagguauucuaggca

SEQ ID NO: 823890 - RNA, 19 nt, Artificial Sequence
  Description of Artificial Sequence: Synthetic oligonucleotide
  Sense strand starting at position 218 of SEQ ID NO: 587861
ccagaagacuuguuacuuu

SEQ ID NO: 823891 - RNA, 19 nt, Artificial Sequence
  Description of Artificial Sequence: Synthetic oligonucleotide
  Antisense strand to SEQ ID NO: 823890
aaaguaacaagucuucugg

SEQ ID NO: 823892 - RNA, 19 nt, Artificial Sequence
  Description of Artificial Sequence: Synthetic oligonucleotide
  Sense strand starting at position 262 of SEQ ID NO: 587861
ugagacaagugacuguuua

SEQ ID NO: 823893 - RNA, 19 nt, Artificial Sequence
  Description of Artificial Sequence: Synthetic oligonucleotide
  Antisense strand to SEQ ID NO: 823892
uaaacagucacuugucuca

SEQ ID NO: 823894 - RNA, 19 nt, Artificial Sequence
  Description of Artificial Sequence: Synthetic oligonucleotide
  Sense strand starting at position 263 of SEQ ID NO: 587861
gagacaagugacuguuuac

SEQ ID NO: 823895 - RNA, 19 nt, Artificial Sequence
  Description of Artificial Sequence: Synthetic oligonucleotide
  Antisense strand to SEQ ID NO: 823894
guaaacagucacuugucuc

SEQ ID NO: 823896 - RNA, 19 nt, Artificial Sequence
  Description of Artificial Sequence: Synthetic oligonucleotide
  Sense strand starting at position 266 of SEQ ID NO: 587861
acaagugacuguuuaccua

SEQ ID NO: 823897 - RNA, 19 nt, Artificial Sequence
  Description of Artificial Sequence: Synthetic oligonucleotide
  Antisense strand to SEQ ID NO: 823896
uagguaaacagucacuugu

SEQ ID NO: 823898 - RNA, 19 nt, Artificial Sequence
  Description of Artificial Sequence: Synthetic oligonucleotide
  Sense strand starting at position 270 of SEQ ID NO: 587861
gugacuguuuaccuacuca

SEQ ID NO: 823899 - RNA, 19 nt, Artificial Sequence
  Description of Artificial Sequence: Synthetic oligonucleotide
  Antisense strand to SEQ ID NO: 823898
ugaguagguaaacagucac

SEQ ID NO: 823900 - RNA, 19 nt, Artificial Sequence
  Description of Artificial Sequence: Synthetic oligonucleotide
  Sense strand starting at position 408 of SEQ ID NO: 587861
agaaucucuuggcauuuaa

SEQ ID NO: 823901 - RNA, 19 nt, Artificial Sequence
  Description of Artificial Sequence: Synthetic oligonucleotide
  Antisense strand to SEQ ID NO: 823900
uuaaaugccaagagauucu

SEQ ID NO: 823902 - RNA, 19 nt, Artificial Sequence
  Description of Artificial Sequence: Synthetic oligonucleotide
  Sense strand starting at position 600 of SEQ ID NO: 587861
aguuaaugucuccaaaguu

SEQ ID NO: 823903 - RNA, 19 nt, Artificial Sequence
  Description of Artificial Sequence: Synthetic oligonucleotide
  Antisense strand to SEQ ID NO: 823902
aacuuuggagacauuaacu

SEQ ID NO: 823904 - RNA, 19 nt, Artificial Sequence
  Description of Artificial Sequence: Synthetic oligonucleotide
  Sense strand starting at position 627 of SEQ ID NO: 587861
uuuauaauggagugacuau

SEQ ID NO: 823905 - RNA, 19 nt, Artificial Sequence
  Description of Artificial Sequence: Synthetic oligonucleotide
  Antisense strand to SEQ ID NO: 823904
auagucacuccauuauaaa

SEQ ID NO: 823906 - RNA, 19 nt, Artificial Sequence
  Description of Artificial Sequence: Synthetic oligonucleotide
  Sense strand starting at position 743 of SEQ ID NO: 587861
uagaauuaaguugguaaca

SEQ ID NO: 823907 - RNA, 19 nt, Artificial Sequence
  Description of Artificial Sequence: Synthetic oligonucleotide
  Antisense strand to SEQ ID NO: 823906
uguuaccaacuuaauucua

SEQ ID NO: 823908 - RNA, 19 nt, Artificial Sequence
  Description of Artificial Sequence: Synthetic oligonucleotide
  Sense strand starting at position 951 of SEQ ID NO: 587861
auguuaagaguuugguaag

SEQ ID NO: 823909 - RNA, 19 nt, Artificial Sequence
  Description of Artificial Sequence: Synthetic oligonucleotide
  Antisense strand to SEQ ID NO: 823908
cuuaccaaacucuuaacau

SEQ ID NO: 823910 - RNA, 19 nt, Artificial Sequence
  Description of Artificial Sequence: Synthetic oligonucleotide
  Sense strand starting at position 1019 of SEQ ID NO: 587861
uguguaugugguuauacag

SEQ ID NO: 823911 - RNA, 19 nt, Artificial Sequence
  Description of Artificial Sequence: Synthetic oligonucleotide
  Antisense strand to SEQ ID NO: 823910
cuguauaaccacauacaca

SEQ ID NO: 823912 - RNA, 19 nt, Artificial Sequence
  Description of Artificial Sequence: Synthetic oligonucleotide
  Sense strand starting at position 1174 of SEQ ID NO: 587861
aaaggaaggcucugaguca

SEQ ID NO: 823913 - RNA, 19 nt, Artificial Sequence
  Description of Artificial Sequence: Synthetic oligonucleotide
  Antisense strand to SEQ ID NO: 823912
ugacucagagccuuccuuu

SEQ ID NO: 823914 - RNA, 19 nt, Artificial Sequence
  Description of Artificial Sequence: Synthetic oligonucleotide
  Sense strand starting at position 1181 of SEQ ID NO: 587861
ggcucugagucaucauauc

SEQ ID NO: 823915 - RNA, 19 nt, Artificial Sequence
  Description of Artificial Sequence: Synthetic oligonucleotide
  Antisense strand to SEQ ID NO: 823914
gauaugaugacucagagcc

SEQ ID NO: 823916 - RNA, 19 nt, Artificial Sequence
  Description of Artificial Sequence: Synthetic oligonucleotide
  Sense strand starting at position 1264 of SEQ ID NO: 587861
gguccaacuucuccaggaa

SEQ ID NO: 823917 - RNA, 19 nt, Artificial Sequence
  Description of Artificial Sequence: Synthetic oligonucleotide
  Antisense strand to SEQ ID NO: 823916
uuccuggagaaguuggacc

SEQ ID NO: 823918 - RNA, 19 nt, Artificial Sequence
  Description of Artificial Sequence: Synthetic oligonucleotide
  Sense strand starting at position 1331 of SEQ ID NO: 587861
ggcuucgcccaauaaacaa

SEQ ID NO: 823919 - RNA, 19 nt, Artificial Sequence
  Description of Artificial Sequence: Synthetic oligonucleotide
  Antisense strand to SEQ ID NO: 823918
uuguuuauugggcgaagcc

SEQ ID NO: 823920 - RNA, 19 nt, Artificial Sequence
  Description of Artificial Sequence: Synthetic oligonucleotide
  Sense strand starting at position 1460 of SEQ ID NO: 587861
cuuucuuaugucgagaucu

SEQ ID NO: 823921 - RNA, 19 nt, Artificial Sequence
  Description of Artificial Sequence: Synthetic oligonucleotide
  Antisense strand to SEQ ID NO: 823920
agaucucgacauaagaaag

SEQ ID NO: 823922 - RNA, 19 nt, Artificial Sequence
  Description of Artificial Sequence: Synthetic oligonucleotide
  Sense strand starting at position 1462 of SEQ ID NO: 587861
uucuuaugucgagaucuua

SEQ ID NO: 823923 - RNA, 19 nt, Artificial Sequence
  Description of Artificial Sequence: Synthetic oligonucleotide
  Antisense strand to SEQ ID NO: 823922
uaagaucucgacauaagaa

SEQ ID NO: 823924 - RNA, 19 nt, Artificial Sequence
  Description of Artificial Sequence: Synthetic oligonucleotide
  Sense strand starting at position 2097 of SEQ ID NO: 587861
ccagguauccggcaaagug

SEQ ID NO: 823925 - RNA, 19 nt, Artificial Sequence
  Description of Artificial Sequence: Synthetic oligonucleotide
  Antisense strand to SEQ ID NO: 823924
cacuuugccggauaccugg

SEQ ID NO: 823926 - RNA, 19 nt, Artificial Sequence
  Description of Artificial Sequence: Synthetic oligonucleotide
  Sense strand starting at position 2156 of SEQ ID NO: 587861
gcgguuaugcucccagucu

SEQ ID NO: 823927 - RNA, 19 nt, Artificial Sequence
  Description of Artificial Sequence: Synthetic oligonucleotide
  Antisense strand to SEQ ID NO: 823926
agacugggagcauaaccgc

SEQ ID NO: 823928 - RNA, 19 nt, Artificial Sequence
  Description of Artificial Sequence: Synthetic oligonucleotide
  Sense strand starting at position 2256 of SEQ ID NO: 587861
guucucgucgccuccaauu

SEQ ID NO: 823929 - RNA, 19 nt, Artificial Sequence
  Description of Artificial Sequence: Synthetic oligonucleotide
  Antisense strand to SEQ ID NO: 823928
aauuggaggcgacgagaac

SEQ ID NO: 823930 - RNA, 19 nt, Artificial Sequence
  Description of Artificial Sequence: Synthetic oligonucleotide
  Sense strand starting at position 2357 of SEQ ID NO: 587861
gcuguaccucuccacuaua

SEQ ID NO: 823931 - RNA, 19 nt, Artificial Sequence
  Description of Artificial Sequence: Synthetic oligonucleotide
  Antisense strand to SEQ ID NO: 823930
uauaguggagagguacagc

SEQ ID NO: 823932 - RNA, 19 nt, Artificial Sequence
  Description of Artificial Sequence: Synthetic oligonucleotide
  Sense strand starting at position 2494 of SEQ ID NO: 587861
gcuauugagaguuaggugu

SEQ ID NO: 823933 - RNA, 19 nt, Artificial Sequence
  Description of Artificial Sequence: Synthetic oligonucleotide
  Antisense strand to SEQ ID NO: 823932
acaccuaacucucaauagc

SEQ ID NO: 823934 - RNA, 19 nt, Artificial Sequence
  Description of Artificial Sequence: Synthetic oligonucleotide
  Sense strand starting at position 2682 of SEQ ID NO: 587861
acccaagaguaaucauagu

SEQ ID NO: 823935 - RNA, 19 nt, Artificial Sequence
  Description of Artificial Sequence: Synthetic oligonucleotide
  Antisense strand to SEQ ID NO: 823934
acuaugauuacucuugggu

SEQ ID NO: 823936 - RNA, 19 nt, Artificial Sequence
  Description of Artificial Sequence: Synthetic oligonucleotide
  Sense strand starting at position 2695 of SEQ ID NO: 587861
cauaguuaccacggaauac

SEQ ID NO: 823937 - RNA, 19 nt, Artificial Sequence
  Description of Artificial Sequence: Synthetic oligonucleotide
  Antisense strand to SEQ ID NO: 823936
guauuccgugguaacuaug

SEQ ID NO: 823938 - RNA, 19 nt, Artificial Sequence
  Description of Artificial Sequence: Synthetic oligonucleotide
  Sense strand starting at position 2712 of SEQ ID NO: 587861
acuguagaguccuugacaa

SEQ ID NO: 823939 - RNA, 19 nt, Artificial Sequence
  Description of Artificial Sequence: Synthetic oligonucleotide
  Antisense strand to SEQ ID NO: 823938
uugucaaggacucuacagu

SEQ ID NO: 823940 - RNA, 19 nt, Artificial Sequence
  Description of Artificial Sequence: Synthetic oligonucleotide
  Sense strand starting at position 2744 of SEQ ID NO: 587861
agcaguuuauuucuagcua

SEQ ID NO: 823941 - RNA, 19 nt, Artificial Sequence
  Description of Artificial Sequence: Synthetic oligonucleotide
  Antisense strand to SEQ ID NO: 823940
uagcuagaaauaaacugcu

SEQ ID NO: 823942 - RNA, 19 nt, Artificial Sequence
  Description of Artificial Sequence: Synthetic oligonucleotide
  Sense strand starting at position 2843 of SEQ ID NO: 587861
cuuugcucucaguaagguu

SEQ ID NO: 823943 - RNA, 19 nt, Artificial Sequence
  Description of Artificial Sequence: Synthetic oligonucleotide
  Antisense strand to SEQ ID NO: 823942
aaccuuacugagagcaaag

SEQ ID NO: 823944 - RNA, 19 nt, Artificial Sequence
  Description of Artificial Sequence: Synthetic oligonucleotide
  Sense strand starting at position 2869 of SEQ ID NO: 587861
ggcugaugaaauggacauu

SEQ ID NO: 823945 - RNA, 19 nt, Artificial Sequence
  Description of Artificial Sequence: Synthetic oligonucleotide
  Antisense strand to SEQ ID NO: 823944
aauguccauuucaucagcc

SEQ ID NO: 823946 - RNA, 19 nt, Artificial Sequence
  Description of Artificial Sequence: Synthetic oligonucleotide
  Sense strand starting at position 2943 of SEQ ID NO: 587861
augagaugguuaucuaaca

SEQ ID NO: 823947 - RNA, 19 nt, Artificial Sequence
  Description of Artificial Sequence: Synthetic oligonucleotide
  Antisense strand to SEQ ID NO: 823946
uguuagauaaccaucucau

SEQ ID NO: 823948 - RNA, 19 nt, Artificial Sequence
  Description of Artificial Sequence: Synthetic oligonucleotide
  Sense strand starting at position 2944 of SEQ ID NO: 587861
ugagaugguuaucuaacau

SEQ ID NO: 823949 - RNA, 19 nt, Artificial Sequence
  Description of Artificial Sequence: Synthetic oligonucleotide
  Antisense strand to SEQ ID NO: 823948
auguuagauaaccaucuca

SEQ ID NO: 823950 - RNA, 19 nt, Artificial Sequence
  Description of Artificial Sequence: Synthetic oligonucleotide
  Sense strand starting at position 3023 of SEQ ID NO: 587861
gcaaguuugcaugagcaag

SEQ ID NO: 823951 - RNA, 19 nt, Artificial Sequence
  Description of Artificial Sequence: Synthetic oligonucleotide
  Antisense strand to SEQ ID NO: 823950
cuugcucaugcaaacuugc

SEQ ID NO: 823952 - RNA, 19 nt, Artificial Sequence
  Description of Artificial Sequence: Synthetic oligonucleotide
  Sense strand starting at position 3252 of SEQ ID NO: 587861
ggauuucuguacuaggaau

SEQ ID NO: 823953 - RNA, 19 nt, Artificial Sequence
  Description of Artificial Sequence: Synthetic oligonucleotide
  Antisense strand to SEQ ID NO: 823952
auuccuaguacagaaaucc

SEQ ID NO: 823954 - RNA, 19 nt, Artificial Sequence
  Description of Artificial Sequence: Synthetic oligonucleotide
  Sense strand starting at position 3525 of SEQ ID NO: 587861
aggaguacuugauauuuaa

SEQ ID NO: 823955 - RNA, 19 nt, Artificial Sequence
  Description of Artificial Sequence: Synthetic oligonucleotide
  Antisense strand to SEQ ID NO: 823954
uuaaauaucaaguacuccu

SEQ ID NO: 823956 - RNA, 19 nt, Artificial Sequence
  Description of Artificial Sequence: Synthetic oligonucleotide
  Sense strand starting at position 3546 of SEQ ID NO: 587861
gucaguucugcccaacuua

SEQ ID NO: 823957 - RNA, 19 nt, Artificial Sequence
  Description of Artificial Sequence: Synthetic oligonucleotide
  Antisense strand to SEQ ID NO: 823956
uaaguugggcagaacugac

SEQ ID NO: 823958 - RNA, 19 nt, Artificial Sequence
  Description of Artificial Sequence: Synthetic oligonucleotide
  Sense strand starting at position 3701 of SEQ ID NO: 587861
aagucagaggccuaacagu

SEQ ID NO: 823959 - RNA, 19 nt, Artificial Sequence
  Description of Artificial Sequence: Synthetic oligonucleotide
  Antisense strand to SEQ ID NO: 823958
acuguuaggccucugacuu

SEQ ID NO: 823960 - RNA, 19 nt, Artificial Sequence
  Description of Artificial Sequence: Synthetic oligonucleotide
  Sense strand starting at position 3791 of SEQ ID NO: 587861
aucucugaagucugagaag

SEQ ID NO: 823961 - RNA, 19 nt, Artificial Sequence
  Description of Artificial Sequence: Synthetic oligonucleotide
  Antisense strand to SEQ ID NO: 823960
cuucucagacuucagagau

SEQ ID NO: 823962 - RNA, 19 nt, Artificial Sequence
  Description of Artificial Sequence: Synthetic oligonucleotide
  Sense strand starting at position 98 of SEQ ID NO: 587862
uuggcagaugcuuacuaga

SEQ ID NO: 823963 - RNA, 19 nt, Artificial Sequence
  Description of Artificial Sequence: Synthetic oligonucleotide
  Antisense strand to SEQ ID NO: 823962
ucuaguaagcaucugccaa

SEQ ID NO: 823964 - RNA, 19 nt, Artificial Sequence
  Description of Artificial Sequence: Synthetic oligonucleotide
  Sense strand starting at position 209 of SEQ ID NO: 587862
auuaaaguuuggguuggaa

SEQ ID NO: 823965 - RNA, 19 nt, Artificial Sequence
  Description of Artificial Sequence: Synthetic oligonucleotide
  Antisense strand to SEQ ID NO: 823964
uuccaacccaaacuuuaau

SEQ ID NO: 823966 - RNA, 19 nt, Artificial Sequence
  Description of Artificial Sequence: Synthetic oligonucleotide
  Sense strand starting at position 211 of SEQ ID NO: 587862
uaaaguuuggguuggaauu

SEQ ID NO: 823967 - RNA, 19 nt, Artificial Sequence
  Description of Artificial Sequence: Synthetic oligonucleotide
  Antisense strand to SEQ ID NO: 823966
aauuccaacccaaacuuua

SEQ ID NO: 823968 - RNA, 19 nt, Artificial Sequence
  Description of Artificial Sequence: Synthetic oligonucleotide
  Sense strand starting at position 251 of SEQ ID NO: 587862
ccugcaacuuugguagaaa

SEQ ID NO: 823969 - RNA, 19 nt, Artificial Sequence
  Description of Artificial Sequence: Synthetic oligonucleotide
  Antisense strand to SEQ ID NO: 823968
uuucuaccaaaguugcagg

SEQ ID NO: 823970 - RNA, 19 nt, Artificial Sequence
  Description of Artificial Sequence: Synthetic oligonucleotide
  Sense strand starting at position 316 of SEQ ID NO: 587862
ucuaauagugcauaggaau

SEQ ID NO: 823971 - RNA, 19 nt, Artificial Sequence
  Description of Artificial Sequence: Synthetic oligonucleotide
  Antisense strand to SEQ ID NO: 823970
auuccuaugcacuauuaga

SEQ ID NO: 823972 - RNA, 19 nt, Artificial Sequence
  Description of Artificial Sequence: Synthetic oligonucleotide
  Sense strand starting at position 610 of SEQ ID NO: 587862
gaggccuuucuagaacagu

SEQ ID NO: 823973 - RNA, 19 nt, Artificial Sequence
  Description of Artificial Sequence: Synthetic oligonucleotide
  Antisense strand to SEQ ID NO: 823972
acuguucuagaaaggccuc

SEQ ID NO: 823974 - RNA, 19 nt, Artificial Sequence
  Description of Artificial Sequence: Synthetic oligonucleotide
  Sense strand starting at position 677 of SEQ ID NO: 587862
gguccuguuaagcauauga

SEQ ID NO: 823975 - RNA, 19 nt, Artificial Sequence
  Description of Artificial Sequence: Synthetic oligonucleotide
  Antisense strand to SEQ ID NO: 823974
ucauaugcuuaacaggacc

SEQ ID NO: 823976 - RNA, 19 nt, Artificial Sequence
  Description of Artificial Sequence: Synthetic oligonucleotide
  Sense strand starting at position 679 of SEQ ID NO: 587862
uccuguuaagcauaugaau

SEQ ID NO: 823977 - RNA, 19 nt, Artificial Sequence
  Description of Artificial Sequence: Synthetic oligonucleotide
  Antisense strand to SEQ ID NO: 823976
auucauaugcuuaacagga

SEQ ID NO: 823978 - RNA, 19 nt, Artificial Sequence
  Description of Artificial Sequence: Synthetic oligonucleotide
  Sense strand starting at position 961 of SEQ ID NO: 587862
aucacagcuuggguugaaa

SEQ ID NO: 823979 - RNA, 19 nt, Artificial Sequence
  Description of Artificial Sequence: Synthetic oligonucleotide
  Antisense strand to SEQ ID NO: 823978
uuucaacccaagcugugau

SEQ ID NO: 823980 - RNA, 19 nt, Artificial Sequence
  Description of Artificial Sequence: Synthetic oligonucleotide
  Sense strand starting at position 1603 of SEQ ID NO: 587862
uggaaauucggugguggaa

SEQ ID NO: 823981 - RNA, 19 nt, Artificial Sequence
  Description of Artificial Sequence: Synthetic oligonucleotide
  Antisense strand to SEQ ID NO: 823980
uuccaccaccgaauuucca

SEQ ID NO: 823982 - RNA, 19 nt, Artificial Sequence
  Description of Artificial Sequence: Synthetic oligonucleotide
  Sense strand starting at position 1669 of SEQ ID NO: 587862
uaggcuguacccuagauua

SEQ ID NO: 823983 - RNA, 19 nt, Artificial Sequence
  Description of Artificial Sequence: Synthetic oligonucleotide
  Antisense strand to SEQ ID NO: 823982
uaaucuaggguacagccua

SEQ ID NO: 823984 - RNA, 19 nt, Artificial Sequence
  Description of Artificial Sequence: Synthetic oligonucleotide
  Sense strand starting at position 1671 of SEQ ID NO: 587862
ggcuguacccuagauuauu

SEQ ID NO: 823985 - RNA, 19 nt, Artificial Sequence
  Description of Artificial Sequence: Synthetic oligonucleotide
  Antisense strand to SEQ ID NO: 823984
aauaaucuaggguacagcc

SEQ ID NO: 823986 - RNA, 19 nt, Artificial Sequence
  Description of Artificial Sequence: Synthetic oligonucleotide
  Sense strand starting at position 1874 of SEQ ID NO: 587862
cugacugcuccacauggga

SEQ ID NO: 823987 - RNA, 19 nt, Artificial Sequence
  Description of Artificial Sequence: Synthetic oligonucleotide
  Antisense strand to SEQ ID NO: 823986
ucccauguggagcagucag

SEQ ID NO: 823988 - RNA, 19 nt, Artificial Sequence
  Description of Artificial Sequence: Synthetic oligonucleotide
  Sense strand starting at position 1887 of SEQ ID NO: 587862
augggaucuuaagucaaca

SEQ ID NO: 823989 - RNA, 19 nt, Artificial Sequence
  Description of Artificial Sequence: Synthetic oligonucleotide
  Antisense strand to SEQ ID NO: 823988
uguugacuuaagaucccau

SEQ ID NO: 823990 - RNA, 19 nt, Artificial Sequence
  Description of Artificial Sequence: Synthetic oligonucleotide
  Sense strand starting at position 2031 of SEQ ID NO: 587862
ggaaauuuguucuaacaag

SEQ ID NO: 823991 - RNA, 19 nt, Artificial Sequence
  Description of Artificial Sequence: Synthetic oligonucleotide
  Antisense strand to SEQ ID NO: 823990
cuuguuagaacaaauuucc

SEQ ID NO: 823992 - RNA, 19 nt, Artificial Sequence
  Description of Artificial Sequence: Synthetic oligonucleotide
  Sense strand starting at position 2058 of SEQ ID NO: 587862
gagaaaugaggcuagcgua

SEQ ID NO: 823993 - RNA, 19 nt, Artificial Sequence
  Description of Artificial Sequence: Synthetic oligonucleotide
  Antisense strand to SEQ ID NO: 823992
uacgcuagccucauuucuc

SEQ ID NO: 823994 - RNA, 19 nt, Artificial Sequence
  Description of Artificial Sequence: Synthetic oligonucleotide
  Sense strand starting at position 2138 of SEQ ID NO: 587862
agaagauaacagcgaugau

SEQ ID NO: 823995 - RNA, 19 nt, Artificial Sequence
  Description of Artificial Sequence: Synthetic oligonucleotide
  Antisense strand to SEQ ID NO: 823994
aucaucgcuguuaucuucu

SEQ ID NO: 823996 - RNA, 19 nt, Artificial Sequence
  Description of Artificial Sequence: Synthetic oligonucleotide
  Sense strand starting at position 2141 of SEQ ID NO: 587862
agauaacagcgaugauaua

SEQ ID NO: 823997 - RNA, 19 nt, Artificial Sequence
  Description of Artificial Sequence: Synthetic oligonucleotide
  Antisense strand to SEQ ID NO: 823996
uauaucaucgcuguuaucu

SEQ ID NO: 823998 - RNA, 19 nt, Artificial Sequence
  Description of Artificial Sequence: Synthetic oligonucleotide
  Sense strand starting at position 2150 of SEQ ID NO: 587862
cgaugauauaucugucaag

SEQ ID NO: 823999 - RNA, 19 nt, Artificial Sequence
  Description of Artificial Sequence: Synthetic oligonucleotide
  Antisense strand to SEQ ID NO: 823998
cuugacagauauaucaucg

SEQ ID NO: 824000 - RNA, 19 nt, Artificial Sequence
  Description of Artificial Sequence: Synthetic oligonucleotide
  Sense strand starting at position 2242 of SEQ ID NO: 587862
gcuaauaauagagggugaa

SEQ ID NO: 824001 - RNA, 19 nt, Artificial Sequence
  Description of Artificial Sequence: Synthetic oligonucleotide
  Antisense strand to SEQ ID NO: 824000
uucacccucuauuauuagc

SEQ ID NO: 824002 - RNA, 19 nt, Artificial Sequence
  Description of Artificial Sequence: Synthetic oligonucleotide
  Sense strand starting at position 2329 of SEQ ID NO: 587862
ucaugaugagauuggguuu

SEQ ID NO: 824003 - RNA, 19 nt, Artificial Sequence
  Description of Artificial Sequence: Synthetic oligonucleotide
  Antisense strand to SEQ ID NO: 824002
aaacccaaucucaucauga

SEQ ID NO: 824004 - RNA, 19 nt, Artificial Sequence
  Description of Artificial Sequence: Synthetic oligonucleotide
  Sense strand starting at position 2335 of SEQ ID NO: 587862
ugagauuggguuugaaauu

SEQ ID NO: 824005 - RNA, 19 nt, Artificial Sequence
  Description of Artificial Sequence: Synthetic oligonucleotide
  Antisense strand to SEQ ID NO: 824004
aauuucaaacccaaucuca

SEQ ID NO: 824006 - RNA, 19 nt, Artificial Sequence
  Description of Artificial Sequence: Synthetic oligonucleotide
  Sense strand starting at position 2336 of SEQ ID NO: 587862
gagauuggguuugaaauuu

SEQ ID NO: 824007 - RNA, 19 nt, Artificial Sequence
  Description of Artificial Sequence: Synthetic oligonucleotide
  Antisense strand to SEQ ID NO: 824006
aaauuucaaacccaaucuc

SEQ ID NO: 824008 - RNA, 19 nt, Artificial Sequence
  Description of Artificial Sequence: Synthetic oligonucleotide
  Sense strand starting at position 2446 of SEQ ID NO: 587862
cugcacauuuguucuuuau

SEQ ID NO: 824009 - RNA, 19 nt, Artificial Sequence
  Description of Artificial Sequence: Synthetic oligonucleotide
  Antisense strand to SEQ ID NO: 824008
auaaagaacaaaugugcag

SEQ ID NO: 824010 - RNA, 19 nt, Artificial Sequence
  Description of Artificial Sequence: Synthetic oligonucleotide
  Sense strand starting at position 2454 of SEQ ID NO: 587862
uuguucuuuauuuggguga

SEQ ID NO: 824011 - RNA, 19 nt, Artificial Sequence
  Description of Artificial Sequence: Synthetic oligonucleotide
  Antisense strand to SEQ ID NO: 824010
ucacccaaauaaagaacaa

SEQ ID NO: 824012 - RNA, 19 nt, Artificial Sequence
  Description of Artificial Sequence: Synthetic oligonucleotide
  Sense strand starting at position 2461 of SEQ ID NO: 587862
uuauuugggugacagaaga

SEQ ID NO: 824013 - RNA, 19 nt, Artificial Sequence
  Description of Artificial Sequence: Synthetic oligonucleotide
  Antisense strand to SEQ ID NO: 824012
ucuucugucacccaaauaa

SEQ ID NO: 824014 - RNA, 19 nt, Artificial Sequence
  Description of Artificial Sequence: Synthetic oligonucleotide
  Sense strand starting at position 2580 of SEQ ID NO: 587862
gcgagcuguggcaagcuau

SEQ ID NO: 824015 - RNA, 19 nt, Artificial Sequence
  Description of Artificial Sequence: Synthetic oligonucleotide
  Antisense strand to SEQ ID NO: 824014
auagcuugccacagcucgc

SEQ ID NO: 824016 - RNA, 19 nt, Artificial Sequence
  Description of Artificial Sequence: Synthetic oligonucleotide
  Sense strand starting at position 2611 of SEQ ID NO: 587862
ggaaggugaguggguaaau

SEQ ID NO: 824017 - RNA, 19 nt, Artificial Sequence
  Description of Artificial Sequence: Synthetic oligonucleotide
  Antisense strand to SEQ ID NO: 824016
auuuacccacucaccuucc

SEQ ID NO: 824018 - RNA, 19 nt, Artificial Sequence
  Description of Artificial Sequence: Synthetic oligonucleotide
  Sense strand starting at position 2632 of SEQ ID NO: 587862
gcgugcauugguuucaagu

SEQ ID NO: 824019 - RNA, 19 nt, Artificial Sequence
  Description of Artificial Sequence: Synthetic oligonucleotide
  Antisense strand to SEQ ID NO: 824018
acuugaaaccaaugcacgc

SEQ ID NO: 824020 - RNA, 19 nt, Artificial Sequence
  Description of Artificial Sequence: Synthetic oligonucleotide
  Sense strand starting at position 2633 of SEQ ID NO: 587862
cgugcauugguuucaaguc

SEQ ID NO: 824021 - RNA, 19 nt, Artificial Sequence
  Description of Artificial Sequence: Synthetic oligonucleotide
  Antisense strand to SEQ ID NO: 824020
gacuugaaaccaaugcacg

SEQ ID NO: 824022 - RNA, 19 nt, Artificial Sequence
  Description of Artificial Sequence: Synthetic oligonucleotide
  Sense strand starting at position 2979 of SEQ ID NO: 587862
ggcuucucugagcagaauc

SEQ ID NO: 824023 - RNA, 19 nt, Artificial Sequence
  Description of Artificial Sequence: Synthetic oligonucleotide
  Antisense strand to SEQ ID NO: 824022
gauucugcucagagaagcc

SEQ ID NO: 824024 - RNA, 19 nt, Artificial Sequence
  Description of Artificial Sequence: Synthetic oligonucleotide
  Sense strand starting at position 3046 of SEQ ID NO: 587862
gaaagaaauuuggagcauu

SEQ ID NO: 824025 - RNA, 19 nt, Artificial Sequence
  Description of Artificial Sequence: Synthetic oligonucleotide
  Antisense strand to SEQ ID NO: 824024
aaugcuccaaauuucuuuc

SEQ ID NO: 824026 - RNA, 19 nt, Artificial Sequence
  Description of Artificial Sequence: Synthetic oligonucleotide
  Sense strand starting at position 3054 of SEQ ID NO: 587862
uuuggagcauuauuagaaa

SEQ ID NO: 824027 - RNA, 19 nt, Artificial Sequence
  Description of Artificial Sequence: Synthetic oligonucleotide
  Antisense strand to SEQ ID NO: 824026
uuucuaauaaugcuccaaa

SEQ ID NO: 824028 - RNA, 19 nt, Artificial Sequence
  Description of Artificial Sequence: Synthetic oligonucleotide
  Sense strand starting at position 3283 of SEQ ID NO: 587862
ugugucaugggcuaauaaa

SEQ ID NO: 824029 - RNA, 19 nt, Artificial Sequence
  Description of Artificial Sequence: Synthetic oligonucleotide
  Antisense strand to SEQ ID NO: 824028
uuuauuagcccaugacaca

SEQ ID NO: 824030 - RNA, 19 nt, Artificial Sequence
  Description of Artificial Sequence: Synthetic oligonucleotide
  Sense strand starting at position 3346 of SEQ ID NO: 587862
gggccaaagagaugcauau

SEQ ID NO: 824031 - RNA, 19 nt, Artificial Sequence
  Description of Artificial Sequence: Synthetic oligonucleotide
  Antisense strand to SEQ ID NO: 824030
auaugcaucucuuuggccc

SEQ ID NO: 824032 - RNA, 19 nt, Artificial Sequence
  Description of Artificial Sequence: Synthetic oligonucleotide
  Sense strand starting at position 3480 of SEQ ID NO: 587862
agggauauauccucugacc

SEQ ID NO: 824033 - RNA, 19 nt, Artificial Sequence
  Description of Artificial Sequence: Synthetic oligonucleotide
  Antisense strand to SEQ ID NO: 824032
ggucagaggauauaucccu

SEQ ID NO: 824034 - RNA, 19 nt, Artificial Sequence
  Description of Artificial Sequence: Synthetic oligonucleotide
  Sense strand starting at position 3482 of SEQ ID NO: 587862
ggauauauccucugaccca

SEQ ID NO: 824035 - RNA, 19 nt, Artificial Sequence
  Description of Artificial Sequence: Synthetic oligonucleotide
  Antisense strand to SEQ ID NO: 824034
ugggucagaggauauaucc

SEQ ID NO: 824036 - RNA, 19 nt, Artificial Sequence
  Description of Artificial Sequence: Synthetic oligonucleotide
  Sense strand starting at position 3679 of SEQ ID NO: 587862
gaaguaugugccgauggag

SEQ ID NO: 824037 - RNA, 19 nt, Artificial Sequence
  Description of Artificial Sequence: Synthetic oligonucleotide
  Antisense strand to SEQ ID NO: 824036
cuccaucggcacauacuuc

SEQ ID NO: 824038 - RNA, 19 nt, Artificial Sequence
  Description of Artificial Sequence: Synthetic oligonucleotide
  Sense strand starting at position 3884 of SEQ ID NO: 587862
aauauaguaguggaauguu

SEQ ID NO: 824039 - RNA, 19 nt, Artificial Sequence
  Description of Artificial Sequence: Synthetic oligonucleotide
  Antisense strand to SEQ ID NO: 824038
aacauuccacuacuauauu

SEQ ID NO: 824040 - RNA, 19 nt, Artificial Sequence
  Description of Artificial Sequence: Synthetic oligonucleotide
  Sense strand starting at position 3892 of SEQ ID NO: 587862
aguggaauguugguugaau

SEQ ID NO: 824041 - RNA, 19 nt, Artificial Sequence
  Description of Artificial Sequence: Synthetic oligonucleotide
  Antisense strand to SEQ ID NO: 824040
auucaaccaacauuccacu

SEQ ID NO: 824042 - RNA, 19 nt, Artificial Sequence
  Description of Artificial Sequence: Synthetic oligonucleotide
  Sense strand starting at position 2 of SEQ ID NO: 587863
acacuuuaaggugagcuaa

SEQ ID NO: 824043 - RNA, 19 nt, Artificial Sequence
  Description of Artificial Sequence: Synthetic oligonucleotide
  Antisense strand to SEQ ID NO: 824042
uuagcucaccuuaaagugu

SEQ ID NO: 824044 - RNA, 19 nt, Artificial Sequence
  Description of Artificial Sequence: Synthetic oligonucleotide
  Sense strand starting at position 4 of SEQ ID NO: 587863
acuuuaaggugagcuaagu

SEQ ID NO: 824045 - RNA, 19 nt, Artificial Sequence
  Description of Artificial Sequence: Synthetic oligonucleotide
  Antisense strand to SEQ ID NO: 824044
acuuagcucaccuuaaagu

SEQ ID NO: 824046 - RNA, 19 nt, Artificial Sequence
  Description of Artificial Sequence: Synthetic oligonucleotide
  Sense strand starting at position 190 of SEQ ID NO: 587863
agaagucaggucugugaug

SEQ ID NO: 824047 - RNA, 19 nt, Artificial Sequence
  Description of Artificial Sequence: Synthetic oligonucleotide
  Antisense strand to SEQ ID NO: 824046
caucacagaccugacuucu

SEQ ID NO: 824048 - RNA, 19 nt, Artificial Sequence
  Description of Artificial Sequence: Synthetic oligonucleotide
  Sense strand starting at position 197 of SEQ ID NO: 587863
aggucugugauguguauau

SEQ ID NO: 824049 - RNA, 19 nt, Artificial Sequence
  Description of Artificial Sequence: Synthetic oligonucleotide
  Antisense strand to SEQ ID NO: 824048
auauacacaucacagaccu

SEQ ID NO: 824050 - RNA, 19 nt, Artificial Sequence
  Description of Artificial Sequence: Synthetic oligonucleotide
  Sense strand starting at position 199 of SEQ ID NO: 587863
gucugugauguguauauuu

SEQ ID NO: 824051 - RNA, 19 nt, Artificial Sequence
  Description of Artificial Sequence: Synthetic oligonucleotide
  Antisense strand to SEQ ID NO: 824050
aaauauacacaucacagac

SEQ ID NO: 824052 - RNA, 19 nt, Artificial Sequence
  Description of Artificial Sequence: Synthetic oligonucleotide
  Sense strand starting at position 411 of SEQ ID NO: 587863
uuucuaaugagcugaggau

SEQ ID NO: 824053 - RNA, 19 nt, Artificial Sequence
  Description of Artificial Sequence: Synthetic oligonucleotide
  Antisense strand to SEQ ID NO: 824052
auccucagcucauuagaaa

SEQ ID NO: 824054 - RNA, 19 nt, Artificial Sequence
  Description of Artificial Sequence: Synthetic oligonucleotide
  Sense strand starting at position 586 of SEQ ID NO: 587863
aggcuacuugacugaauga

SEQ ID NO: 824055 - RNA, 19 nt, Artificial Sequence
  Description of Artificial Sequence: Synthetic oligonucleotide
  Antisense strand to SEQ ID NO: 824054
ucauucagucaaguagccu

SEQ ID NO: 824056 - RNA, 19 nt, Artificial Sequence
  Description of Artificial Sequence: Synthetic oligonucleotide
  Sense strand starting at position 732 of SEQ ID NO: 587863
ucccgucucagagguuaaa

SEQ ID NO: 824057 - RNA, 19 nt, Artificial Sequence
  Description of Artificial Sequence: Synthetic oligonucleotide
  Antisense strand to SEQ ID NO: 824056
uuuaaccucugagacggga

SEQ ID NO: 824058 - RNA, 19 nt, Artificial Sequence
  Description of Artificial Sequence: Synthetic oligonucleotide
  Sense strand starting at position 820 of SEQ ID NO: 587863
uuguuucagguaugggaaa

SEQ ID NO: 824059 - RNA, 19 nt, Artificial Sequence
  Description of Artificial Sequence: Synthetic oligonucleotide
  Antisense strand to SEQ ID NO: 824058
uuucccauaccugaaacaa

SEQ ID NO: 824060 - RNA, 19 nt, Artificial Sequence
  Description of Artificial Sequence: Synthetic oligonucleotide
  Sense strand starting at position 959 of SEQ ID NO: 587863
gagcgauaccugggacaga

SEQ ID NO: 824061 - RNA, 19 nt, Artificial Sequence
  Description of Artificial Sequence: Synthetic oligonucleotide
  Antisense strand to SEQ ID NO: 824060
ucugucccagguaucgcuc

SEQ ID NO: 824062 - RNA, 19 nt, Artificial Sequence
  Description of Artificial Sequence: Synthetic oligonucleotide
  Sense strand starting at position 977 of SEQ ID NO: 587863
accagacgcgcuuaggaau

SEQ ID NO: 824063 - RNA, 19 nt, Artificial Sequence
  Description of Artificial Sequence: Synthetic oligonucleotide
  Antisense strand to SEQ ID NO: 824062
auuccuaagcgcgucuggu

SEQ ID NO: 824064 - RNA, 19 nt, Artificial Sequence
  Description of Artificial Sequence: Synthetic oligonucleotide
  Sense strand starting at position 2122 of SEQ ID NO: 587863
gcggguucgguuuacuaga

SEQ ID NO: 824065 - RNA, 19 nt, Artificial Sequence
  Description of Artificial Sequence: Synthetic oligonucleotide
  Antisense strand to SEQ ID NO: 824064
ucuaguaaaccgaacccgc

SEQ ID NO: 824066 - RNA, 19 nt, Artificial Sequence
  Description of Artificial Sequence: Synthetic oligonucleotide
  Sense strand starting at position 2315 of SEQ ID NO: 587863
ccuggaucauacuugcaaa

SEQ ID NO: 824067 - RNA, 19 nt, Artificial Sequence
  Description of Artificial Sequence: Synthetic oligonucleotide
  Antisense strand to SEQ ID NO: 824066
uuugcaaguaugauccagg

SEQ ID NO: 824068 - RNA, 19 nt, Artificial Sequence
  Description of Artificial Sequence: Synthetic oligonucleotide
  Sense strand starting at position 2335 of SEQ ID NO: 587863
ccaugaaauuaugaagacu

SEQ ID NO: 824069 - RNA, 19 nt, Artificial Sequence
  Description of Artificial Sequence: Synthetic oligonucleotide
  Antisense strand to SEQ ID NO: 824068
agucuucauaauuucaugg

SEQ ID NO: 824070 - RNA, 19 nt, Artificial Sequence
  Description of Artificial Sequence: Synthetic oligonucleotide
  Sense strand starting at position 2705 of SEQ ID NO: 587863
acaggugguuucccaacua

SEQ ID NO: 824071 - RNA, 19 nt, Artificial Sequence
  Description of Artificial Sequence: Synthetic oligonucleotide
  Antisense strand to SEQ ID NO: 824070
uaguugggaaaccaccugu

SEQ ID NO: 824072 - RNA, 19 nt, Artificial Sequence
  Description of Artificial Sequence: Synthetic oligonucleotide
  Sense strand starting at position 2747 of SEQ ID NO: 587863
cgagggaggucugcuugua

SEQ ID NO: 824073 - RNA, 19 nt, Artificial Sequence
  Description of Artificial Sequence: Synthetic oligonucleotide
  Antisense strand to SEQ ID NO: 824072
uacaagcagaccucccucg

SEQ ID NO: 824074 - RNA, 19 nt, Artificial Sequence
  Description of Artificial Sequence: Synthetic oligonucleotide
  Sense strand starting at position 2935 of SEQ ID NO: 587863
guauuagcucugggaggac

SEQ ID NO: 824075 - RNA, 19 nt, Artificial Sequence
  Description of Artificial Sequence: Synthetic oligonucleotide
  Antisense strand to SEQ ID NO: 824074
guccucccagagcuaauac

SEQ ID NO: 824076 - RNA, 19 nt, Artificial Sequence
  Description of Artificial Sequence: Synthetic oligonucleotide
  Sense strand starting at position 3030 of SEQ ID NO: 587863
guguuugugguguggaaag

SEQ ID NO: 824077 - RNA, 19 nt, Artificial Sequence
  Description of Artificial Sequence: Synthetic oligonucleotide
  Antisense strand to SEQ ID NO: 824076
cuuuccacaccacaaacac

SEQ ID NO: 824078 - RNA, 19 nt, Artificial Sequence
  Description of Artificial Sequence: Synthetic oligonucleotide
  Sense strand starting at position 3252 of SEQ ID NO: 587863
ccucgaauuccugagaauu

SEQ ID NO: 824079 - RNA, 19 nt, Artificial Sequence
  Description of Artificial Sequence: Synthetic oligonucleotide
  Antisense strand to SEQ ID NO: 824078
aauucucaggaauucgagg

SEQ ID NO: 824080 - RNA, 19 nt, Artificial Sequence
  Description of Artificial Sequence: Synthetic oligonucleotide
  Sense strand starting at position 3260 of SEQ ID NO: 587863
uccugagaauucuucguag

SEQ ID NO: 824081 - RNA, 19 nt, Artificial Sequence
  Description of Artificial Sequence: Synthetic oligonucleotide
  Antisense strand to SEQ ID NO: 824080
cuacgaagaauucucagga

SEQ ID NO: 824082 - RNA, 19 nt, Artificial Sequence
  Description of Artificial Sequence: Synthetic oligonucleotide
  Sense strand starting at position 3262 of SEQ ID NO: 587863
cugagaauucuucguaggu

SEQ ID NO: 824083 - RNA, 19 nt, Artificial Sequence
  Description of Artificial Sequence: Synthetic oligonucleotide
  Antisense strand to SEQ ID NO: 824082
accuacgaagaauucucag

SEQ ID NO: 824084 - RNA, 19 nt, Artificial Sequence
  Description of Artificial Sequence: Synthetic oligonucleotide
  Sense strand starting at position 3263 of SEQ ID NO: 587863
ugagaauucuucguagguu

SEQ ID NO: 824085 - RNA, 19 nt, Artificial Sequence
  Description of Artificial Sequence: Synthetic oligonucleotide
  Antisense strand to SEQ ID NO: 824084
aaccuacgaagaauucuca

SEQ ID NO: 824086 - RNA, 19 nt, Artificial Sequence
  Description of Artificial Sequence: Synthetic oligonucleotide
  Sense strand starting at position 3303 of SEQ ID NO: 587863
aggguuaagcucuggagag

SEQ ID NO: 824087 - RNA, 19 nt, Artificial Sequence
  Description of Artificial Sequence: Synthetic oligonucleotide
  Antisense strand to SEQ ID NO: 824086
cucuccagagcuuaacccu

SEQ ID NO: 824088 - RNA, 19 nt, Artificial Sequence
  Description of Artificial Sequence: Synthetic oligonucleotide
  Sense strand starting at position 3305 of SEQ ID NO: 587863
gguuaagcucuggagagcu

SEQ ID NO: 824089 - RNA, 19 nt, Artificial Sequence
  Description of Artificial Sequence: Synthetic oligonucleotide
  Antisense strand to SEQ ID NO: 824088
agcucuccagagcuuaacc

SEQ ID NO: 824090 - RNA, 19 nt, Artificial Sequence
  Description of Artificial Sequence: Synthetic oligonucleotide
  Sense strand starting at position 3324 of SEQ ID NO: 587863
gggagugagacccggacua

SEQ ID NO: 824091 - RNA, 19 nt, Artificial Sequence
  Description of Artificial Sequence: Synthetic oligonucleotide
  Antisense strand to SEQ ID NO: 824090
uaguccgggucucacuccc

SEQ ID NO: 824092 - RNA, 19 nt, Artificial Sequence
  Description of Artificial Sequence: Synthetic oligonucleotide
  Sense strand starting at position 3326 of SEQ ID NO: 587863
gagugagacccggacuauc

SEQ ID NO: 824093 - RNA, 19 nt, Artificial Sequence
  Description of Artificial Sequence: Synthetic oligonucleotide
  Antisense strand to SEQ ID NO: 824092
gauaguccgggucucacuc

SEQ ID NO: 824094 - RNA, 19 nt, Artificial Sequence
  Description of Artificial Sequence: Synthetic oligonucleotide
  Sense strand starting at position 3336 of SEQ ID NO: 587863
cggacuaucccgggacaga

SEQ ID NO: 824095 - RNA, 19 nt, Artificial Sequence
  Description of Artificial Sequence: Synthetic oligonucleotide
  Antisense strand to SEQ ID NO: 824094
ucugucccgggauaguccg

SEQ ID NO: 824096 - RNA, 19 nt, Artificial Sequence
  Description of Artificial Sequence: Synthetic oligonucleotide
  Sense strand starting at position 3373 of SEQ ID NO: 587863
caugaaguuccuggagucu

SEQ ID NO: 824097 - RNA, 19 nt, Artificial Sequence
  Description of Artificial Sequence: Synthetic oligonucleotide
  Antisense strand to SEQ ID NO: 824096
agacuccaggaacuucaug

SEQ ID NO: 824098 - RNA, 19 nt, Artificial Sequence
  Description of Artificial Sequence: Synthetic oligonucleotide
  Sense strand starting at position 3578 of SEQ ID NO: 587863
cuaauuucuugauggacag

SEQ ID NO: 824099 - RNA, 19 nt, Artificial Sequence
  Description of Artificial Sequence: Synthetic oligonucleotide
  Antisense strand to SEQ ID NO: 824098
cuguccaucaagaaauuag

SEQ ID NO: 824100 - RNA, 19 nt, Artificial Sequence
  Description of Artificial Sequence: Synthetic oligonucleotide
  Sense strand starting at position 3609 of SEQ ID NO: 587863
augacuagaguuugugaag

SEQ ID NO: 824101 - RNA, 19 nt, Artificial Sequence
  Description of Artificial Sequence: Synthetic oligonucleotide
  Antisense strand to SEQ ID NO: 824100
cuucacaaacucuagucau

SEQ ID NO: 824102 - RNA, 19 nt, Artificial Sequence
  Description of Artificial Sequence: Synthetic oligonucleotide
  Sense strand starting at position 3610 of SEQ ID NO: 587863
ugacuagaguuugugaaga

SEQ ID NO: 824103 - RNA, 19 nt, Artificial Sequence
  Description of Artificial Sequence: Synthetic oligonucleotide
  Antisense strand to SEQ ID NO: 824102
ucuucacaaacucuaguca

SEQ ID NO: 824104 - RNA, 19 nt, Artificial Sequence
  Description of Artificial Sequence: Synthetic oligonucleotide
  Sense strand starting at position 3649 of SEQ ID NO: 587863
gcauucgugcccguacaga

SEQ ID NO: 824105 - RNA, 19 nt, Artificial Sequence
  Description of Artificial Sequence: Synthetic oligonucleotide
  Antisense strand to SEQ ID NO: 824104
ucuguacgggcacgaaugc

SEQ ID NO: 824106 - RNA, 19 nt, Artificial Sequence
  Description of Artificial Sequence: Synthetic oligonucleotide
  Sense strand starting at position 3693 of SEQ ID NO: 587863
gaggcuucugcagauggau

SEQ ID NO: 824107 - RNA, 19 nt, Artificial Sequence
  Description of Artificial Sequence: Synthetic oligonucleotide
  Antisense strand to SEQ ID NO: 824106
auccaucugcagaagccuc

SEQ ID NO: 824108 - RNA, 19 nt, Artificial Sequence
  Description of Artificial Sequence: Synthetic oligonucleotide
  Sense strand starting at position 3695 of SEQ ID NO: 587863
ggcuucugcagauggauga

SEQ ID NO: 824109 - RNA, 19 nt, Artificial Sequence
  Description of Artificial Sequence: Synthetic oligonucleotide
  Antisense strand to SEQ ID NO: 824108
ucauccaucugcagaagcc

SEQ ID NO: 824110 - RNA, 19 nt, Artificial Sequence
  Description of Artificial Sequence: Synthetic oligonucleotide
  Sense strand starting at position 3706 of SEQ ID NO: 587863
auggaugacuucucuguca

SEQ ID NO: 824111 - RNA, 19 nt, Artificial Sequence
  Description of Artificial Sequence: Synthetic oligonucleotide
  Antisense strand to SEQ ID NO: 824110
ugacagagaagucauccau

SEQ ID NO: 824112 - RNA, 19 nt, Artificial Sequence
  Description of Artificial Sequence: Synthetic oligonucleotide
  Sense strand starting at position 3708 of SEQ ID NO: 587863
ggaugacuucucugucauu

SEQ ID NO: 824113 - RNA, 19 nt, Artificial Sequence
  Description of Artificial Sequence: Synthetic oligonucleotide
  Antisense strand to SEQ ID NO: 824112
aaugacagagaagucaucc

SEQ ID NO: 824114 - RNA, 19 nt, Artificial Sequence
  Description of Artificial Sequence: Synthetic oligonucleotide
  Sense strand starting at position 3719 of SEQ ID NO: 587863
cugucauuucguggccaau

SEQ ID NO: 824115 - RNA, 19 nt, Artificial Sequence
  Description of Artificial Sequence: Synthetic oligonucleotide
  Antisense strand to SEQ ID NO: 824114
auuggccacgaaaugacag

SEQ ID NO: 824116 - RNA, 19 nt, Artificial Sequence
  Description of Artificial Sequence: Synthetic oligonucleotide
  Sense strand starting at position 3725 of SEQ ID NO: 587863
uuucguggccaauggaaga

SEQ ID NO: 824117 - RNA, 19 nt, Artificial Sequence
  Description of Artificial Sequence: Synthetic oligonucleotide
  Antisense strand to SEQ ID NO: 824116
ucuuccauuggccacgaaa

SEQ ID NO: 824118 - RNA, 19 nt, Artificial Sequence
  Description of Artificial Sequence: Synthetic oligonucleotide
  Sense strand starting at position 3735 of SEQ ID NO: 587863
aauggaagaugccuugaca

SEQ ID NO: 824119 - RNA, 19 nt, Artificial Sequence
  Description of Artificial Sequence: Synthetic oligonucleotide
  Antisense strand to SEQ ID NO: 824118
ugucaaggcaucuuccauu

SEQ ID NO: 824120 - RNA, 19 nt, Artificial Sequence
  Description of Artificial Sequence: Synthetic oligonucleotide
  Sense strand starting at position 3867 of SEQ ID NO: 587863
agacauuccucacagagaa

SEQ ID NO: 824121 - RNA, 19 nt, Artificial Sequence
  Description of Artificial Sequence: Synthetic oligonucleotide
  Antisense strand to SEQ ID NO: 824120
uucucugugaggaaugucu

SEQ ID NO: 824122 - RNA, 19 nt, Artificial Sequence
  Description of Artificial Sequence: Synthetic oligonucleotide
  Sense strand starting at position 26 of SEQ ID NO: 587864
ggaacagugcuuuacaggu

SEQ ID NO: 824123 - RNA, 19 nt, Artificial Sequence
  Description of Artificial Sequence: Synthetic oligonucleotide
  Antisense strand to SEQ ID NO: 824122
accuguaaagcacuguucc

SEQ ID NO: 824124 - RNA, 19 nt, Artificial Sequence
  Description of Artificial Sequence: Synthetic oligonucleotide
  Sense strand starting at position 32 of SEQ ID NO: 587864
gugcuuuacaggugacaaa

SEQ ID NO: 824125 - RNA, 19 nt, Artificial Sequence
  Description of Artificial Sequence: Synthetic oligonucleotide
  Antisense strand to SEQ ID NO: 824124
uuugucaccuguaaagcac

SEQ ID NO: 824126 - RNA, 19 nt, Artificial Sequence
  Description of Artificial Sequence: Synthetic oligonucleotide
  Sense strand starting at position 33 of SEQ ID NO: 587864
ugcuuuacaggugacaaau

SEQ ID NO: 824127 - RNA, 19 nt, Artificial Sequence
  Description of Artificial Sequence: Synthetic oligonucleotide
  Antisense strand to SEQ ID NO: 824126
auuugucaccuguaaagca

SEQ ID NO: 824128 - RNA, 19 nt, Artificial Sequence
  Description of Artificial Sequence: Synthetic oligonucleotide
  Sense strand starting at position 240 of SEQ ID NO: 587864
ggcacagaaugcuggagau

SEQ ID NO: 824129 - RNA, 19 nt, Artificial Sequence
  Description of Artificial Sequence: Synthetic oligonucleotide
  Antisense strand to SEQ ID NO: 824128
aucuccagcauucugugcc

SEQ ID NO: 824130 - RNA, 19 nt, Artificial Sequence
  Description of Artificial Sequence: Synthetic oligonucleotide
  Sense strand starting at position 380 of SEQ ID NO: 587864
agagauggauguggaugaa

SEQ ID NO: 824131 - RNA, 19 nt, Artificial Sequence
  Description of Artificial Sequence: Synthetic oligonucleotide
  Antisense strand to SEQ ID NO: 824130
uucauccacauccaucucu

SEQ ID NO: 824132 - RNA, 19 nt, Artificial Sequence
  Description of Artificial Sequence: Synthetic oligonucleotide
  Sense strand starting at position 418 of SEQ ID NO: 587864
cuagcagagccuugucauu

SEQ ID NO: 824133 - RNA, 19 nt, Artificial Sequence
  Description of Artificial Sequence: Synthetic oligonucleotide
  Antisense strand to SEQ ID NO: 824132
aaugacaaggcucugcuag

SEQ ID NO: 824134 - RNA, 19 nt, Artificial Sequence
  Description of Artificial Sequence: Synthetic oligonucleotide
  Sense strand starting at position 936 of SEQ ID NO: 587864
ucaccaucuccguguguuu

SEQ ID NO: 824135 - RNA, 19 nt, Artificial Sequence
  Description of Artificial Sequence: Synthetic oligonucleotide
  Antisense strand to SEQ ID NO: 824134
aaacacacggagaugguga

SEQ ID NO: 824136 - RNA, 19 nt, Artificial Sequence
  Description of Artificial Sequence: Synthetic oligonucleotide
  Sense strand starting at position 1260 of SEQ ID NO: 587864
ggagguggccuggauucua

SEQ ID NO: 824137 - RNA, 19 nt, Artificial Sequence
  Description of Artificial Sequence: Synthetic oligonucleotide
  Antisense strand to SEQ ID NO: 824136
uagaauccaggccaccucc

SEQ ID NO: 824138 - RNA, 19 nt, Artificial Sequence
  Description of Artificial Sequence: Synthetic oligonucleotide
  Sense strand starting at position 1265 of SEQ ID NO: 587864
uggccuggauucuaacaaa

SEQ ID NO: 824139 - RNA, 19 nt, Artificial Sequence
  Description of Artificial Sequence: Synthetic oligonucleotide
  Antisense strand to SEQ ID NO: 824138
uuuguuagaauccaggcca

SEQ ID NO: 824140 - RNA, 19 nt, Artificial Sequence
  Description of Artificial Sequence: Synthetic oligonucleotide
  Sense strand starting at position 1471 of SEQ ID NO: 587864
gcgagcuccuccuuauucu

SEQ ID NO: 824141 - RNA, 19 nt, Artificial Sequence
  Description of Artificial Sequence: Synthetic oligonucleotide
  Antisense strand to SEQ ID NO: 824140
agaauaaggaggagcucgc

SEQ ID NO: 824142 - RNA, 19 nt, Artificial Sequence
  Description of Artificial Sequence: Synthetic oligonucleotide
  Sense strand starting at position 1640 of SEQ ID NO: 587864
ggcuuaguggucuuggugu

SEQ ID NO: 824143 - RNA, 19 nt, Artificial Sequence
  Description of Artificial Sequence: Synthetic oligonucleotide
  Antisense strand to SEQ ID NO: 824142
acaccaagaccacuaagcc

SEQ ID NO: 824144 - RNA, 19 nt, Artificial Sequence
  Description of Artificial Sequence: Synthetic oligonucleotide
  Sense strand starting at position 1671 of SEQ ID NO: 587864
uuaucacaguccuagguua

SEQ ID NO: 824145 - RNA, 19 nt, Artificial Sequence
  Description of Artificial Sequence: Synthetic oligonucleotide
  Antisense strand to SEQ ID NO: 824144
uaaccuaggacugugauaa

SEQ ID NO: 824146 - RNA, 19 nt, Artificial Sequence
  Description of Artificial Sequence: Synthetic oligonucleotide
  Sense strand starting at position 1673 of SEQ ID NO: 587864
aucacaguccuagguuagu

SEQ ID NO: 824147 - RNA, 19 nt, Artificial Sequence
  Description of Artificial Sequence: Synthetic oligonucleotide
  Antisense strand to SEQ ID NO: 824146
acuaaccuaggacugugau

SEQ ID NO: 824148 - RNA, 19 nt, Artificial Sequence
  Description of Artificial Sequence: Synthetic oligonucleotide
  Sense strand starting at position 1695 of SEQ ID NO: 587864
gugaauggaucuggauaag

SEQ ID NO: 824149 - RNA, 19 nt, Artificial Sequence
  Description of Artificial Sequence: Synthetic oligonucleotide
  Antisense strand to SEQ ID NO: 824148
cuuauccagauccauucac

SEQ ID NO: 824150 - RNA, 19 nt, Artificial Sequence
  Description of Artificial Sequence: Synthetic oligonucleotide
  Sense strand starting at position 2079 of SEQ ID NO: 587864
agagcaaaccugggugagu

SEQ ID NO: 824151 - RNA, 19 nt, Artificial Sequence
  Description of Artificial Sequence: Synthetic oligonucleotide
  Antisense strand to SEQ ID NO: 824150
acucacccagguuugcucu

SEQ ID NO: 824152 - RNA, 19 nt, Artificial Sequence
  Description of Artificial Sequence: Synthetic oligonucleotide
  Sense strand starting at position 2080 of SEQ ID NO: 587864
gagcaaaccugggugaguu

SEQ ID NO: 824153 - RNA, 19 nt, Artificial Sequence
  Description of Artificial Sequence: Synthetic oligonucleotide
  Antisense strand to SEQ ID NO: 824152
aacucacccagguuugcuc

SEQ ID NO: 824154 - RNA, 19 nt, Artificial Sequence
  Description of Artificial Sequence: Synthetic oligonucleotide
  Sense strand starting at position 2090 of SEQ ID NO: 587864
gggugaguugagcaaacuu

SEQ ID NO: 824155 - RNA, 19 nt, Artificial Sequence
  Description of Artificial Sequence: Synthetic oligonucleotide
  Antisense strand to SEQ ID NO: 824154
aaguuugcucaacucaccc

SEQ ID NO: 824156 - RNA, 19 nt, Artificial Sequence
  Description of Artificial Sequence: Synthetic oligonucleotide
  Sense strand starting at position 2318 of SEQ ID NO: 587864
ccuguagacucugagagga

SEQ ID NO: 824157 - RNA, 19 nt, Artificial Sequence
  Description of Artificial Sequence: Synthetic oligonucleotide
  Antisense strand to SEQ ID NO: 824156
uccucucagagucuacagg

SEQ ID NO: 824158 - RNA, 19 nt, Artificial Sequence
  Description of Artificial Sequence: Synthetic oligonucleotide
  Sense strand starting at position 2320 of SEQ ID NO: 587864
uguagacucugagaggacu

SEQ ID NO: 824159 - RNA, 19 nt, Artificial Sequence
  Description of Artificial Sequence: Synthetic oligonucleotide
  Antisense strand to SEQ ID NO: 824158
aguccucucagagucuaca

SEQ ID NO: 824160 - RNA, 19 nt, Artificial Sequence
  Description of Artificial Sequence: Synthetic oligonucleotide
  Sense strand starting at position 2328 of SEQ ID NO: 587864
cugagaggacucugcccaa

SEQ ID NO: 824161 - RNA, 19 nt, Artificial Sequence
  Description of Artificial Sequence: Synthetic oligonucleotide
  Antisense strand to SEQ ID NO: 824160
uugggcagaguccucucag

SEQ ID NO: 824162 - RNA, 19 nt, Artificial Sequence
  Description of Artificial Sequence: Synthetic oligonucleotide
  Sense strand starting at position 2525 of SEQ ID NO: 587864
guggcaagcucuuacucau

SEQ ID NO: 824163 - RNA, 19 nt, Artificial Sequence
  Description of Artificial Sequence: Synthetic oligonucleotide
  Antisense strand to SEQ ID NO: 824162
augaguaagagcuugccac

SEQ ID NO: 824164 - RNA, 19 nt, Artificial Sequence
  Description of Artificial Sequence: Synthetic oligonucleotide
  Sense strand starting at position 2566 of SEQ ID NO: 587864
cugggcuugucugucaauu

SEQ ID NO: 824165 - RNA, 19 nt, Artificial Sequence
  Description of Artificial Sequence: Synthetic oligonucleotide
  Antisense strand to SEQ ID NO: 824164
aauugacagacaagcccag

SEQ ID NO: 824166 - RNA, 19 nt, Artificial Sequence
  Description of Artificial Sequence: Synthetic oligonucleotide
  Sense strand starting at position 2622 of SEQ ID NO: 587864
gcuuucuucugcccggaca

SEQ ID NO: 824167 - RNA, 19 nt, Artificial Sequence
  Description of Artificial Sequence: Synthetic oligonucleotide
  Antisense strand to SEQ ID NO: 824166
uguccgggcagaagaaagc

SEQ ID NO: 824168 - RNA, 19 nt, Artificial Sequence
  Description of Artificial Sequence: Synthetic oligonucleotide
  Sense strand starting at position 2790 of SEQ ID NO: 587864
cccaaauacgaucagcuuu

SEQ ID NO: 824169 - RNA, 19 nt, Artificial Sequence
  Description of Artificial Sequence: Synthetic oligonucleotide
  Antisense strand to SEQ ID NO: 824168
aaagcugaucguauuuggg

SEQ ID NO: 824170 - RNA, 19 nt, Artificial Sequence
  Description of Artificial Sequence: Synthetic oligonucleotide
  Sense strand starting at position 2865 of SEQ ID NO: 587864
cuauguauuuacgagguca

SEQ ID NO: 824171 - RNA, 19 nt, Artificial Sequence
  Description of Artificial Sequence: Synthetic oligonucleotide
  Antisense strand to SEQ ID NO: 824170
ugaccucguaaauacauag

SEQ ID NO: 824172 - RNA, 19 nt, Artificial Sequence
  Description of Artificial Sequence: Synthetic oligonucleotide
  Sense strand starting at position 2876 of SEQ ID NO: 587864
cgaggucaaaucugccaau

SEQ ID NO: 824173 - RNA, 19 nt, Artificial Sequence
  Description of Artificial Sequence: Synthetic oligonucleotide
  Antisense strand to SEQ ID NO: 824172
auuggcagauuugaccucg

SEQ ID NO: 824174 - RNA, 19 nt, Artificial Sequence
  Description of Artificial Sequence: Synthetic oligonucleotide
  Sense strand starting at position 2879 of SEQ ID NO: 587864
ggucaaaucugccaaugac

SEQ ID NO: 824175 - RNA, 19 nt, Artificial Sequence
  Description of Artificial Sequence: Synthetic oligonucleotide
  Antisense strand to SEQ ID NO: 824174
gucauuggcagauuugacc

SEQ ID NO: 824176 - RNA, 19 nt, Artificial Sequence
  Description of Artificial Sequence: Synthetic oligonucleotide
  Sense strand starting at position 2945 of SEQ ID NO: 587864
ccagguggucucuaaaguc

SEQ ID NO: 824177 - RNA, 19 nt, Artificial Sequence
  Description of Artificial Sequence: Synthetic oligonucleotide
  Antisense strand to SEQ ID NO: 824176
gacuuuagagaccaccugg

SEQ ID NO: 824178 - RNA, 19 nt, Artificial Sequence
  Description of Artificial Sequence: Synthetic oligonucleotide
  Sense strand starting at position 2970 of SEQ ID NO: 587864
ccucuaaacucaggugacu

SEQ ID NO: 824179 - RNA, 19 nt, Artificial Sequence
  Description of Artificial Sequence: Synthetic oligonucleotide
  Antisense strand to SEQ ID NO: 824178
agucaccugaguuuagagg

SEQ ID NO: 824180 - RNA, 19 nt, Artificial Sequence
  Description of Artificial Sequence: Synthetic oligonucleotide
  Sense strand starting at position 3609 of SEQ ID NO: 587864
cagagaguguccuaggaca

SEQ ID NO: 824181 - RNA, 19 nt, Artificial Sequence
  Description of Artificial Sequence: Synthetic oligonucleotide
  Antisense strand to SEQ ID NO: 824180
uguccuaggacacucucug

SEQ ID NO: 824182 - RNA, 19 nt, Artificial Sequence
  Description of Artificial Sequence: Synthetic oligonucleotide
  Sense strand starting at position 3611 of SEQ ID NO: 587864
gagaguguccuaggacagu

SEQ ID NO: 824183 - RNA, 19 nt, Artificial Sequence
  Description of Artificial Sequence: Synthetic oligonucleotide
  Antisense strand to SEQ ID NO: 824182
acuguccuaggacacucuc

SEQ ID NO: 824184 - RNA, 19 nt, Artificial Sequence
  Description of Artificial Sequence: Synthetic oligonucleotide
  Sense strand starting at position 3786 of SEQ ID NO: 587864
uggcaacauugggauugau

SEQ ID NO: 824185 - RNA, 19 nt, Artificial Sequence
  Description of Artificial Sequence: Synthetic oligonucleotide
  Antisense strand to SEQ ID NO: 824184
aucaaucccaauguugcca

SEQ ID NO: 824186 - RNA, 19 nt, Artificial Sequence
  Description of Artificial Sequence: Synthetic oligonucleotide
  Sense strand starting at position 3795 of SEQ ID NO: 587864
ugggauugaucggcugacu

SEQ ID NO: 824187 - RNA, 19 nt, Artificial Sequence
  Description of Artificial Sequence: Synthetic oligonucleotide
  Antisense strand to SEQ ID NO: 824186
agucagccgaucaauccca

SEQ ID NO: 824188 - RNA, 19 nt, Artificial Sequence
  Description of Artificial Sequence: Synthetic oligonucleotide
  Sense strand starting at position 3911 of SEQ ID NO: 587864
guuguucucacgugggacu

SEQ ID NO: 824189 - RNA, 19 nt, Artificial Sequence
  Description of Artificial Sequence: Synthetic oligonucleotide
  Antisense strand to SEQ ID NO: 824188
agucccacgugagaacaac

SEQ ID NO: 824190 - RNA, 19 nt, Artificial Sequence
  Description of Artificial Sequence: Synthetic oligonucleotide
  Sense strand starting at position 211 of SEQ ID NO: 587865
ucugaaauaguagaacgua

SEQ ID NO: 824191 - RNA, 19 nt, Artificial Sequence
  Description of Artificial Sequence: Synthetic oligonucleotide
  Antisense strand to SEQ ID NO: 824190
uacguucuacuauuucaga

SEQ ID NO: 824192 - RNA, 19 nt, Artificial Sequence
  Description of Artificial Sequence: Synthetic oligonucleotide
  Sense strand starting at position 774 of SEQ ID NO: 587865
cacgaaguucugggauaaa

SEQ ID NO: 824193 - RNA, 19 nt, Artificial Sequence
  Description of Artificial Sequence: Synthetic oligonucleotide
  Antisense strand to SEQ ID NO: 824192
uuuaucccagaacuucgug

SEQ ID NO: 824194 - RNA, 19 nt, Artificial Sequence
  Description of Artificial Sequence: Synthetic oligonucleotide
  Sense strand starting at position 823 of SEQ ID NO: 587865
cgcgaaucuccgagcggaa

SEQ ID NO: 824195 - RNA, 19 nt, Artificial Sequence
  Description of Artificial Sequence: Synthetic oligonucleotide
  Antisense strand to SEQ ID NO: 824194
uuccgcucggagauucgcg

SEQ ID NO: 824196 - RNA, 19 nt, Artificial Sequence
  Description of Artificial Sequence: Synthetic oligonucleotide
  Sense strand starting at position 1554 of SEQ ID NO: 587865
aagauuuagugacagguga

SEQ ID NO: 824197 - RNA, 19 nt, Artificial Sequence
  Description of Artificial Sequence: Synthetic oligonucleotide
  Antisense strand to SEQ ID NO: 824196
ucaccugucacuaaaucuu

SEQ ID NO: 824198 - RNA, 19 nt, Artificial Sequence
  Description of Artificial Sequence: Synthetic oligonucleotide
  Sense strand starting at position 1593 of SEQ ID NO: 587865
agcugagucgauugaaaca

SEQ ID NO: 824199 - RNA, 19 nt, Artificial Sequence
  Description of Artificial Sequence: Synthetic oligonucleotide
  Antisense strand to SEQ ID NO: 824198
uguuucaaucgacucagcu

SEQ ID NO: 824200 - RNA, 19 nt, Artificial Sequence
  Description of Artificial Sequence: Synthetic oligonucleotide
  Sense strand starting at position 1731 of SEQ ID NO: 587865
agcaucaugcggcaaauuu

SEQ ID NO: 824201 - RNA, 19 nt, Artificial Sequence
  Description of Artificial Sequence: Synthetic oligonucleotide
  Antisense strand to SEQ ID NO: 824200
aaauuugccgcaugaugcu

SEQ ID NO: 824202 - RNA, 19 nt, Artificial Sequence
  Description of Artificial Sequence: Synthetic oligonucleotide
  Sense strand starting at position 1809 of SEQ ID NO: 587865
cuuacucugguagguaauu

SEQ ID NO: 824203 - RNA, 19 nt, Artificial Sequence
  Description of Artificial Sequence: Synthetic oligonucleotide
  Antisense strand to SEQ ID NO: 824202
aauuaccuaccagaguaag

SEQ ID NO: 824204 - RNA, 19 nt, Artificial Sequence
  Description of Artificial Sequence: Synthetic oligonucleotide
  Sense strand starting at position 1819 of SEQ ID NO: 587865
uagguaauuuagcuccagu

SEQ ID NO: 824205 - RNA, 19 nt, Artificial Sequence
  Description of Artificial Sequence: Synthetic oligonucleotide
  Antisense strand to SEQ ID NO: 824204
acuggagcuaaauuaccua

SEQ ID NO: 824206 - RNA, 19 nt, Artificial Sequence
  Description of Artificial Sequence: Synthetic oligonucleotide
  Sense strand starting at position 1842 of SEQ ID NO: 587865
ggcauuagcaaugaucagu

SEQ ID NO: 824207 - RNA, 19 nt, Artificial Sequence
  Description of Artificial Sequence: Synthetic oligonucleotide
  Antisense strand to SEQ ID NO: 824206
acugaucauugcuaaugcc

SEQ ID NO: 824208 - RNA, 19 nt, Artificial Sequence
  Description of Artificial Sequence: Synthetic oligonucleotide
  Sense strand starting at position 1886 of SEQ ID NO: 587865
cgaaguccugcauagacuu

SEQ ID NO: 824209 - RNA, 19 nt, Artificial Sequence
  Description of Artificial Sequence: Synthetic oligonucleotide
  Antisense strand to SEQ ID NO: 824208
aagucuaugcaggacuucg

SEQ ID NO: 824210 - RNA, 19 nt, Artificial Sequence
  Description of Artificial Sequence: Synthetic oligonucleotide
  Sense strand starting at position 1967 of SEQ ID NO: 587865
agggaacguucuccuuuga

SEQ ID NO: 824211 - RNA, 19 nt, Artificial Sequence
  Description of Artificial Sequence: Synthetic oligonucleotide
  Antisense strand to SEQ ID NO: 824210
ucaaaggagaacguucccu

SEQ ID NO: 824212 - RNA, 19 nt, Artificial Sequence
  Description of Artificial Sequence: Synthetic oligonucleotide
  Sense strand starting at position 1978 of SEQ ID NO: 587865
uccuuugaagguuaugcua

SEQ ID NO: 824213 - RNA, 19 nt, Artificial Sequence
  Description of Artificial Sequence: Synthetic oligonucleotide
  Antisense strand to SEQ ID NO: 824212
uagcauaaccuucaaagga

SEQ ID NO: 824214 - RNA, 19 nt, Artificial Sequence
  Description of Artificial Sequence: Synthetic oligonucleotide
  Sense strand starting at position 2231 of SEQ ID NO: 587865
uccggaauccacuagguga

SEQ ID NO: 824215 - RNA, 19 nt, Artificial Sequence
  Description of Artificial Sequence: Synthetic oligonucleotide
  Antisense strand to SEQ ID NO: 824214
ucaccuaguggauuccgga

SEQ ID NO: 824216 - RNA, 19 nt, Artificial Sequence
  Description of Artificial Sequence: Synthetic oligonucleotide
  Sense strand starting at position 2287 of SEQ ID NO: 587865
ccugcagaucugggaggaa

SEQ ID NO: 824217 - RNA, 19 nt, Artificial Sequence
  Description of Artificial Sequence: Synthetic oligonucleotide
  Antisense strand to SEQ ID NO: 824216
uuccucccagaucugcagg

SEQ ID NO: 824218 - RNA, 19 nt, Artificial Sequence
  Description of Artificial Sequence: Synthetic oligonucleotide
  Sense strand starting at position 2290 of SEQ ID NO: 587865
gcagaucugggaggaacau

SEQ ID NO: 824219 - RNA, 19 nt, Artificial Sequence
  Description of Artificial Sequence: Synthetic oligonucleotide
  Antisense strand to SEQ ID NO: 824218
auguuccucccagaucugc

SEQ ID NO: 824220 - RNA, 19 nt, Artificial Sequence
  Description of Artificial Sequence: Synthetic oligonucleotide
  Sense strand starting at position 2313 of SEQ ID NO: 587865
guguguaucacccacaugu

SEQ ID NO: 824221 - RNA, 19 nt, Artificial Sequence
  Description of Artificial Sequence: Synthetic oligonucleotide
  Antisense strand to SEQ ID NO: 824220
acaugugggugauacacac

SEQ ID NO: 824222 - RNA, 19 nt, Artificial Sequence
  Description of Artificial Sequence: Synthetic oligonucleotide
  Sense strand starting at position 2315 of SEQ ID NO: 587865
guguaucacccacauguau

SEQ ID NO: 824223 - RNA, 19 nt, Artificial Sequence
  Description of Artificial Sequence: Synthetic oligonucleotide
  Antisense strand to SEQ ID NO: 824222
auacaugugggugauacac

SEQ ID NO: 824224 - RNA, 19 nt, Artificial Sequence
  Description of Artificial Sequence: Synthetic oligonucleotide
  Sense strand starting at position 2400 of SEQ ID NO: 587865
uauagaaagugacagauaa

SEQ ID NO: 824225 - RNA, 19 nt, Artificial Sequence
  Description of Artificial Sequence: Synthetic oligonucleotide
  Antisense strand to SEQ ID NO: 824224
uuaucugucacuuucuaua

SEQ ID NO: 824226 - RNA, 19 nt, Artificial Sequence
  Description of Artificial Sequence: Synthetic oligonucleotide
  Sense strand starting at position 2427 of SEQ ID NO: 587865
aaggaaauuuccuggaacg

SEQ ID NO: 824227 - RNA, 19 nt, Artificial Sequence
  Description of Artificial Sequence: Synthetic oligonucleotide
  Antisense strand to SEQ ID NO: 824226
cguuccaggaaauuuccuu

SEQ ID NO: 824228 - RNA, 19 nt, Artificial Sequence
  Description of Artificial Sequence: Synthetic oligonucleotide
  Sense strand starting at position 2438 of SEQ ID NO: 587865
cuggaacgaugcuucuuau

SEQ ID NO: 824229 - RNA, 19 nt, Artificial Sequence
  Description of Artificial Sequence: Synthetic oligonucleotide
  Antisense strand to SEQ ID NO: 824228
auaagaagcaucguuccag

SEQ ID NO: 824230 - RNA, 19 nt, Artificial Sequence
  Description of Artificial Sequence: Synthetic oligonucleotide
  Sense strand starting at position 2441 of SEQ ID NO: 587865
gaacgaugcuucuuaugau

SEQ ID NO: 824231 - RNA, 19 nt, Artificial Sequence
  Description of Artificial Sequence: Synthetic oligonucleotide
  Antisense strand to SEQ ID NO: 824230
aucauaagaagcaucguuc

SEQ ID NO: 824232 - RNA, 19 nt, Artificial Sequence
  Description of Artificial Sequence: Synthetic oligonucleotide
  Sense strand starting at position 2500 of SEQ ID NO: 587865
cugacaggucagugcauuu

SEQ ID NO: 824233 - RNA, 19 nt, Artificial Sequence
  Description of Artificial Sequence: Synthetic oligonucleotide
  Antisense strand to SEQ ID NO: 824232
aaaugcacugaccugucag

SEQ ID NO: 824234 - RNA, 19 nt, Artificial Sequence
  Description of Artificial Sequence: Synthetic oligonucleotide
  Sense strand starting at position 2511 of SEQ ID NO: 587865
gugcauuuaacuuguaggu

SEQ ID NO: 824235 - RNA, 19 nt, Artificial Sequence
  Description of Artificial Sequence: Synthetic oligonucleotide
  Antisense strand to SEQ ID NO: 824234
accuacaaguuaaaugcac

SEQ ID NO: 824236 - RNA, 19 nt, Artificial Sequence
  Description of Artificial Sequence: Synthetic oligonucleotide
  Sense strand starting at position 2518 of SEQ ID NO: 587865
uaacuuguagguuguagau

SEQ ID NO: 824237 - RNA, 19 nt, Artificial Sequence
  Description of Artificial Sequence: Synthetic oligonucleotide
  Antisense strand to SEQ ID NO: 824236
aucuacaaccuacaaguua

SEQ ID NO: 824238 - RNA, 19 nt, Artificial Sequence
  Description of Artificial Sequence: Synthetic oligonucleotide
  Sense strand starting at position 2563 of SEQ ID NO: 587865
uuaaaugucucaguguaaa

SEQ ID NO: 824239 - RNA, 19 nt, Artificial Sequence
  Description of Artificial Sequence: Synthetic oligonucleotide
  Antisense strand to SEQ ID NO: 824238
uuuacacugagacauuuaa

SEQ ID NO: 824240 - RNA, 19 nt, Artificial Sequence
  Description of Artificial Sequence: Synthetic oligonucleotide
  Sense strand starting at position 2651 of SEQ ID NO: 587865
guuuacagauuuggaaaca

SEQ ID NO: 824241 - RNA, 19 nt, Artificial Sequence
  Description of Artificial Sequence: Synthetic oligonucleotide
  Antisense strand to SEQ ID NO: 824240
uguuuccaaaucuguaaac

SEQ ID NO: 824242 - RNA, 19 nt, Artificial Sequence
  Description of Artificial Sequence: Synthetic oligonucleotide
  Sense strand starting at position 2662 of SEQ ID NO: 587865
uggaaacagagcuguauaa

SEQ ID NO: 824243 - RNA, 19 nt, Artificial Sequence
  Description of Artificial Sequence: Synthetic oligonucleotide
  Antisense strand to SEQ ID NO: 824242
uuauacagcucuguuucca

SEQ ID NO: 824244 - RNA, 19 nt, Artificial Sequence
  Description of Artificial Sequence: Synthetic oligonucleotide
  Sense strand starting at position 2943 of SEQ ID NO: 587865
ucaggugagucugucagau

SEQ ID NO: 824245 - RNA, 19 nt, Artificial Sequence
  Description of Artificial Sequence: Synthetic oligonucleotide
  Antisense strand to SEQ ID NO: 824244
aucugacagacucaccuga

SEQ ID NO: 824246 - RNA, 19 nt, Artificial Sequence
  Description of Artificial Sequence: Synthetic oligonucleotide
  Sense strand starting at position 2955 of SEQ ID NO: 587865
gucagauauucuccuuuau

SEQ ID NO: 824247 - RNA, 19 nt, Artificial Sequence
  Description of Artificial Sequence: Synthetic oligonucleotide
  Antisense strand to SEQ ID NO: 824246
auaaaggagaauaucugac

SEQ ID NO: 824248 - RNA, 19 nt, Artificial Sequence
  Description of Artificial Sequence: Synthetic oligonucleotide
  Sense strand starting at position 2980 of SEQ ID NO: 587865
gucguagcagcauucuuaa

SEQ ID NO: 824249 - RNA, 19 nt, Artificial Sequence
  Description of Artificial Sequence: Synthetic oligonucleotide
  Antisense strand to SEQ ID NO: 824248
uuaagaaugcugcuacgac

SEQ ID NO: 824250 - RNA, 19 nt, Artificial Sequence
  Description of Artificial Sequence: Synthetic oligonucleotide
  Sense strand starting at position 2983 of SEQ ID NO: 587865
guagcagcauucuuaauuu

SEQ ID NO: 824251 - RNA, 19 nt, Artificial Sequence
  Description of Artificial Sequence: Synthetic oligonucleotide
  Antisense strand to SEQ ID NO: 824250
aaauuaagaaugcugcuac

SEQ ID NO: 824252 - RNA, 19 nt, Artificial Sequence
  Description of Artificial Sequence: Synthetic oligonucleotide
  Sense strand starting at position 3021 of SEQ ID NO: 587865
uguuauuauccguuuguuu

SEQ ID NO: 824253 - RNA, 19 nt, Artificial Sequence
  Description of Artificial Sequence: Synthetic oligonucleotide
  Antisense strand to SEQ ID NO: 824252
aaacaaacggauaauaaca

SEQ ID NO: 824254 - RNA, 19 nt, Artificial Sequence
  Description of Artificial Sequence: Synthetic oligonucleotide
  Sense strand starting at position 3040 of SEQ ID NO: 587865
guuugacuccuccaauaga

SEQ ID NO: 824255 - RNA, 19 nt, Artificial Sequence
  Description of Artificial Sequence: Synthetic oligonucleotide
  Antisense strand to SEQ ID NO: 824254
ucuauuggaggagucaaac

SEQ ID NO: 824256 - RNA, 19 nt, Artificial Sequence
  Description of Artificial Sequence: Synthetic oligonucleotide
  Sense strand starting at position 3134 of SEQ ID NO: 587865
cacaaaugugcauggaaca

SEQ ID NO: 824257 - RNA, 19 nt, Artificial Sequence
  Description of Artificial Sequence: Synthetic oligonucleotide
  Antisense strand to SEQ ID NO: 824256
uguuccaugcacauuugug

SEQ ID NO: 824258 - RNA, 19 nt, Artificial Sequence
  Description of Artificial Sequence: Synthetic oligonucleotide
  Sense strand starting at position 3292 of SEQ ID NO: 587865
cagcuuucucauggaggau

SEQ ID NO: 824259 - RNA, 19 nt, Artificial Sequence
  Description of Artificial Sequence: Synthetic oligonucleotide
  Antisense strand to SEQ ID NO: 824258
auccuccaugagaaagcug

SEQ ID NO: 824260 - RNA, 19 nt, Artificial Sequence
  Description of Artificial Sequence: Synthetic oligonucleotide
  Sense strand starting at position 3293 of SEQ ID NO: 587865
agcuuucucauggaggaug

SEQ ID NO: 824261 - RNA, 19 nt, Artificial Sequence
  Description of Artificial Sequence: Synthetic oligonucleotide
  Antisense strand to SEQ ID NO: 824260
cauccuccaugagaaagcu

SEQ ID NO: 824262 - RNA, 19 nt, Artificial Sequence
  Description of Artificial Sequence: Synthetic oligonucleotide
  Sense strand starting at position 3321 of SEQ ID NO: 587865
uuaguuuaagccuagucua

SEQ ID NO: 824263 - RNA, 19 nt, Artificial Sequence
  Description of Artificial Sequence: Synthetic oligonucleotide
  Antisense strand to SEQ ID NO: 824262
uagacuaggcuuaaacuaa

SEQ ID NO: 824264 - RNA, 19 nt, Artificial Sequence
  Description of Artificial Sequence: Synthetic oligonucleotide
  Sense strand starting at position 3575 of SEQ ID NO: 587865
gcuucucuucuagaaagua

SEQ ID NO: 824265 - RNA, 19 nt, Artificial Sequence
  Description of Artificial Sequence: Synthetic oligonucleotide
  Antisense strand to SEQ ID NO: 824264
uacuuucuagaagagaagc

SEQ ID NO: 824266 - RNA, 19 nt, Artificial Sequence
  Description of Artificial Sequence: Synthetic oligonucleotide
  Sense strand starting at position 3720 of SEQ ID NO: 587865
agucaagucuuuccauaug

SEQ ID NO: 824267 - RNA, 19 nt, Artificial Sequence
  Description of Artificial Sequence: Synthetic oligonucleotide
  Antisense strand to SEQ ID NO: 824266
cauauggaaagacuugacu

SEQ ID NO: 824268 - RNA, 19 nt, Artificial Sequence
  Description of Artificial Sequence: Synthetic oligonucleotide
  Sense strand starting at position 3766 of SEQ ID NO: 587865
gucauugccuaacuuuaga

SEQ ID NO: 824269 - RNA, 19 nt, Artificial Sequence
  Description of Artificial Sequence: Synthetic oligonucleotide
  Antisense strand to SEQ ID NO: 824268
ucuaaaguuaggcaaugac

SEQ ID NO: 824270 - RNA, 19 nt, Artificial Sequence
  Description of Artificial Sequence: Synthetic oligonucleotide
  Sense strand starting at position 22 of SEQ ID NO: 587866
cuagaagaaagcugguaaa

SEQ ID NO: 824271 - RNA, 19 nt, Artificial Sequence
  Description of Artificial Sequence: Synthetic oligonucleotide
  Antisense strand to SEQ ID NO: 824270
uuuaccagcuuucuucuag

SEQ ID NO: 824272 - RNA, 19 nt, Artificial Sequence
  Description of Artificial Sequence: Synthetic oligonucleotide
  Sense strand starting at position 64 of SEQ ID NO: 587866
aggaguacuggcuggguau

SEQ ID NO: 824273 - RNA, 19 nt, Artificial Sequence
  Description of Artificial Sequence: Synthetic oligonucleotide
  Antisense strand to SEQ ID NO: 824272
auacccagccaguacuccu

SEQ ID NO: 824274 - RNA, 19 nt, Artificial Sequence
  Description of Artificial Sequence: Synthetic oligonucleotide
  Sense strand starting at position 310 of SEQ ID NO: 587866
auguaccucuagucuuaga

SEQ ID NO: 824275 - RNA, 19 nt, Artificial Sequence
  Description of Artificial Sequence: Synthetic oligonucleotide
  Antisense strand to SEQ ID NO: 824274
ucuaagacuagagguacau

SEQ ID NO: 824276 - RNA, 19 nt, Artificial Sequence
  Description of Artificial Sequence: Synthetic oligonucleotide
  Sense strand starting at position 323 of SEQ ID NO: 587866
cuuagauuccuaggaggcu

SEQ ID NO: 824277 - RNA, 19 nt, Artificial Sequence
  Description of Artificial Sequence: Synthetic oligonucleotide
  Antisense strand to SEQ ID NO: 824276
agccuccuaggaaucuaag

SEQ ID NO: 824278 - RNA, 19 nt, Artificial Sequence
  Description of Artificial Sequence: Synthetic oligonucleotide
  Sense strand starting at position 713 of SEQ ID NO: 587866
ugagauccagccugaguga

SEQ ID NO: 824279 - RNA, 19 nt, Artificial Sequence
  Description of Artificial Sequence: Synthetic oligonucleotide
  Antisense strand to SEQ ID NO: 824278
ucacucaggcuggaucuca

SEQ ID NO: 824280 - RNA, 19 nt, Artificial Sequence
  Description of Artificial Sequence: Synthetic oligonucleotide
  Sense strand starting at position 1115 of SEQ ID NO: 587866
ugaugugauaucuggguuu

SEQ ID NO: 824281 - RNA, 19 nt, Artificial Sequence
  Description of Artificial Sequence: Synthetic oligonucleotide
  Antisense strand to SEQ ID NO: 824280
aaacccagauaucacauca

SEQ ID NO: 824282 - RNA, 19 nt, Artificial Sequence
  Description of Artificial Sequence: Synthetic oligonucleotide
  Sense strand starting at position 1161 of SEQ ID NO: 587866
gugugagggaggugaaaua

SEQ ID NO: 824283 - RNA, 19 nt, Artificial Sequence
  Description of Artificial Sequence: Synthetic oligonucleotide
  Antisense strand to SEQ ID NO: 824282
uauuucaccucccucacac

SEQ ID NO: 824284 - RNA, 19 nt, Artificial Sequence
  Description of Artificial Sequence: Synthetic oligonucleotide
  Sense strand starting at position 1190 of SEQ ID NO: 587866
ggaguugaugguugcugaa

SEQ ID NO: 824285 - RNA, 19 nt, Artificial Sequence
  Description of Artificial Sequence: Synthetic oligonucleotide
  Antisense strand to SEQ ID NO: 824284
uucagcaaccaucaacucc

SEQ ID NO: 824286 - RNA, 19 nt, Artificial Sequence
  Description of Artificial Sequence: Synthetic oligonucleotide
  Sense strand starting at position 1662 of SEQ ID NO: 587866
aauugugggcuuggaguaa

SEQ ID NO: 824287 - RNA, 19 nt, Artificial Sequence
  Description of Artificial Sequence: Synthetic oligonucleotide
  Antisense strand to SEQ ID NO: 824286
uuacuccaagcccacaauu

SEQ ID NO: 824288 - RNA, 19 nt, Artificial Sequence
  Description of Artificial Sequence: Synthetic oligonucleotide
  Sense strand starting at position 1839 of SEQ ID NO: 587866
ccagaugugcuccacaaag

SEQ ID NO: 824289 - RNA, 19 nt, Artificial Sequence
  Description of Artificial Sequence: Synthetic oligonucleotide
  Antisense strand to SEQ ID NO: 824288
cuuuguggagcacaucugg

SEQ ID NO: 824290 - RNA, 19 nt, Artificial Sequence
  Description of Artificial Sequence: Synthetic oligonucleotide
  Sense strand starting at position 1841 of SEQ ID NO: 587866
agaugugcuccacaaaguc

SEQ ID NO: 824291 - RNA, 19 nt, Artificial Sequence
  Description of Artificial Sequence: Synthetic oligonucleotide
  Antisense strand to SEQ ID NO: 824290
gacuuuguggagcacaucu

SEQ ID NO: 824292 - RNA, 19 nt, Artificial Sequence
  Description of Artificial Sequence: Synthetic oligonucleotide
  Sense strand starting at position 2009 of SEQ ID NO: 587866
gcaggacaguuuccugauu

SEQ ID NO: 824293 - RNA, 19 nt, Artificial Sequence
  Description of Artificial Sequence: Synthetic oligonucleotide
  Antisense strand to SEQ ID NO: 824292
aaucaggaaacuguccugc

SEQ ID NO: 824294 - RNA, 19 nt, Artificial Sequence
  Description of Artificial Sequence: Synthetic oligonucleotide
  Sense strand starting at position 2010 of SEQ ID NO: 587866
caggacaguuuccugauua

SEQ ID NO: 824295 - RNA, 19 nt, Artificial Sequence
  Description of Artificial Sequence: Synthetic oligonucleotide
  Antisense strand to SEQ ID NO: 824294
uaaucaggaaacuguccug

SEQ ID NO: 824296 - RNA, 19 nt, Artificial Sequence
  Description of Artificial Sequence: Synthetic oligonucleotide
  Sense strand starting at position 2014 of SEQ ID NO: 587866
acaguuuccugauuagaga

SEQ ID NO: 824297 - RNA, 19 nt, Artificial Sequence
  Description of Artificial Sequence: Synthetic oligonucleotide
  Antisense strand to SEQ ID NO: 824296
ucucuaaucaggaaacugu

SEQ ID NO: 824298 - RNA, 19 nt, Artificial Sequence
  Description of Artificial Sequence: Synthetic oligonucleotide
  Sense strand starting at position 2042 of SEQ ID NO: 587866
ccagacaaugggugcauua

SEQ ID NO: 824299 - RNA, 19 nt, Artificial Sequence
  Description of Artificial Sequence: Synthetic oligonucleotide
  Antisense strand to SEQ ID NO: 824298
uaaugcacccauugucugg

SEQ ID NO: 824300 - RNA, 19 nt, Artificial Sequence
  Description of Artificial Sequence: Synthetic oligonucleotide
  Sense strand starting at position 2049 of SEQ ID NO: 587866
augggugcauuaucaauua

SEQ ID NO: 824301 - RNA, 19 nt, Artificial Sequence
  Description of Artificial Sequence: Synthetic oligonucleotide
  Antisense strand to SEQ ID NO: 824300
uaauugauaaugcacccau

SEQ ID NO: 824302 - RNA, 19 nt, Artificial Sequence
  Description of Artificial Sequence: Synthetic oligonucleotide
  Sense strand starting at position 2075 of SEQ ID NO: 587866
acuauuugaucagggagaa

SEQ ID NO: 824303 - RNA, 19 nt, Artificial Sequence
  Description of Artificial Sequence: Synthetic oligonucleotide
  Antisense strand to SEQ ID NO: 824302
uucucccugaucaaauagu

SEQ ID NO: 824304 - RNA, 19 nt, Artificial Sequence
  Description of Artificial Sequence: Synthetic oligonucleotide
  Sense strand starting at position 2111 of SEQ ID NO: 587866
agauuaggaucccauuuau

SEQ ID NO: 824305 - RNA, 19 nt, Artificial Sequence
  Description of Artificial Sequence: Synthetic oligonucleotide
  Antisense strand to SEQ ID NO: 824304
auaaaugggauccuaaucu

SEQ ID NO: 824306 - RNA, 19 nt, Artificial Sequence
  Description of Artificial Sequence: Synthetic oligonucleotide
  Sense strand starting at position 2301 of SEQ ID NO: 587866
ugggcaguuaugggaagaa

SEQ ID NO: 824307 - RNA, 19 nt, Artificial Sequence
  Description of Artificial Sequence: Synthetic oligonucleotide
  Antisense strand to SEQ ID NO: 824306
uucuucccauaacugccca

SEQ ID NO: 824308 - RNA, 19 nt, Artificial Sequence
  Description of Artificial Sequence: Synthetic oligonucleotide
  Sense strand starting at position 2314 of SEQ ID NO: 587866
gaagaaaucacguaggguu

SEQ ID NO: 824309 - RNA, 19 nt, Artificial Sequence
  Description of Artificial Sequence: Synthetic oligonucleotide
  Antisense strand to SEQ ID NO: 824308
aacccuacgugauuucuuc

SEQ ID NO: 824310 - RNA, 19 nt, Artificial Sequence
  Description of Artificial Sequence: Synthetic oligonucleotide
  Sense strand starting at position 2316 of SEQ ID NO: 587866
agaaaucacguaggguuua

SEQ ID NO: 824311 - RNA, 19 nt, Artificial Sequence
  Description of Artificial Sequence: Synthetic oligonucleotide
  Antisense strand to SEQ ID NO: 824310
uaaacccuacgugauuucu

SEQ ID NO: 824312 - RNA, 19 nt, Artificial Sequence
  Description of Artificial Sequence: Synthetic oligonucleotide
  Sense strand starting at position 2321 of SEQ ID NO: 587866
ucacguaggguuuaagaug

SEQ ID NO: 824313 - RNA, 19 nt, Artificial Sequence
  Description of Artificial Sequence: Synthetic oligonucleotide
  Antisense strand to SEQ ID NO: 824312
caucuuaaacccuacguga

SEQ ID NO: 824314 - RNA, 19 nt, Artificial Sequence
  Description of Artificial Sequence: Synthetic oligonucleotide
  Sense strand starting at position 2355 of SEQ ID NO: 587866
auccauguauucccugaca

SEQ ID NO: 824315 - RNA, 19 nt, Artificial Sequence
  Description of Artificial Sequence: Synthetic oligonucleotide
  Antisense strand to SEQ ID NO: 824314
ugucagggaauacauggau

SEQ ID NO: 824316 - RNA, 19 nt, Artificial Sequence
  Description of Artificial Sequence: Synthetic oligonucleotide
  Sense strand starting at position 2357 of SEQ ID NO: 587866
ccauguauucccugacacc

SEQ ID NO: 824317 - RNA, 19 nt, Artificial Sequence
  Description of Artificial Sequence: Synthetic oligonucleotide
  Antisense strand to SEQ ID NO: 824316
ggugucagggaauacaugg

SEQ ID NO: 824318 - RNA, 19 nt, Artificial Sequence
  Description of Artificial Sequence: Synthetic oligonucleotide
  Sense strand starting at position 2461 of SEQ ID NO: 587866
auguuugaccaagaacugu

SEQ ID NO: 824319 - RNA, 19 nt, Artificial Sequence
  Description of Artificial Sequence: Synthetic oligonucleotide
  Antisense strand to SEQ ID NO: 824318
acaguucuuggucaaacau

SEQ ID NO: 824320 - RNA, 19 nt, Artificial Sequence
  Description of Artificial Sequence: Synthetic oligonucleotide
  Sense strand starting at position 2467 of SEQ ID NO: 587866
gaccaagaacugugugaga

SEQ ID NO: 824321 - RNA, 19 nt, Artificial Sequence
  Description of Artificial Sequence: Synthetic oligonucleotide
  Antisense strand to SEQ ID NO: 824320
ucucacacaguucuugguc

SEQ ID NO: 824322 - RNA, 19 nt, Artificial Sequence
  Description of Artificial Sequence: Synthetic oligonucleotide
  Sense strand starting at position 2495 of SEQ ID NO: 587866
gcuuuaggcccugaaaggu

SEQ ID NO: 824323 - RNA, 19 nt, Artificial Sequence
  Description of Artificial Sequence: Synthetic oligonucleotide
  Antisense strand to SEQ ID NO: 824322
accuuucagggccuaaagc

SEQ ID NO: 824324 - RNA, 19 nt, Artificial Sequence
  Description of Artificial Sequence: Synthetic oligonucleotide
  Sense strand starting at position 2503 of SEQ ID NO: 587866
cccugaaaggugcauugua

SEQ ID NO: 824325 - RNA, 19 nt, Artificial Sequence
  Description of Artificial Sequence: Synthetic oligonucleotide
  Antisense strand to SEQ ID NO: 824324
uacaaugcaccuuucaggg

SEQ ID NO: 824326 - RNA, 19 nt, Artificial Sequence
  Description of Artificial Sequence: Synthetic oligonucleotide
  Sense strand starting at position 2583 of SEQ ID NO: 587866
gccuguccucuagaccuua

SEQ ID NO: 824327 - RNA, 19 nt, Artificial Sequence
  Description of Artificial Sequence: Synthetic oligonucleotide
  Antisense strand to SEQ ID NO: 824326
uaaggucuagaggacaggc

SEQ ID NO: 824328 - RNA, 19 nt, Artificial Sequence
  Description of Artificial Sequence: Synthetic oligonucleotide
  Sense strand starting at position 2619 of SEQ ID NO: 587866
ugagaaauaucccuugcuu

SEQ ID NO: 824329 - RNA, 19 nt, Artificial Sequence
  Description of Artificial Sequence: Synthetic oligonucleotide
  Antisense strand to SEQ ID NO: 824328
aagcaagggauauuucuca

SEQ ID NO: 824330 - RNA, 19 nt, Artificial Sequence
  Description of Artificial Sequence: Synthetic oligonucleotide
  Sense strand starting at position 2727 of SEQ ID NO: 587866
ggucaaagguggcuggaua

SEQ ID NO: 824331 - RNA, 19 nt, Artificial Sequence
  Description of Artificial Sequence: Synthetic oligonucleotide
  Antisense strand to SEQ ID NO: 824330
uauccagccaccuuugacc

SEQ ID NO: 824332 - RNA, 19 nt, Artificial Sequence
  Description of Artificial Sequence: Synthetic oligonucleotide
  Sense strand starting at position 2739 of SEQ ID NO: 587866
cuggauagaugauaagaga

SEQ ID NO: 824333 - RNA, 19 nt, Artificial Sequence
  Description of Artificial Sequence: Synthetic oligonucleotide
  Antisense strand to SEQ ID NO: 824332
ucucuuaucaucuauccag

SEQ ID NO: 824334 - RNA, 19 nt, Artificial Sequence
  Description of Artificial Sequence: Synthetic oligonucleotide
  Sense strand starting at position 2786 of SEQ ID NO: 587866
aagugauggcucuggagag

SEQ ID NO: 824335 - RNA, 19 nt, Artificial Sequence
  Description of Artificial Sequence: Synthetic oligonucleotide
  Antisense strand to SEQ ID NO: 824334
cucuccagagccaucacuu

SEQ ID NO: 824336 - RNA, 19 nt, Artificial Sequence
  Description of Artificial Sequence: Synthetic oligonucleotide
  Sense strand starting at position 3085 of SEQ ID NO: 587866
uggugauuugcgcauugcu

SEQ ID NO: 824337 - RNA, 19 nt, Artificial Sequence
  Description of Artificial Sequence: Synthetic oligonucleotide
  Antisense strand to SEQ ID NO: 824336
agcaaugcgcaaaucacca

SEQ ID NO: 824338 - RNA, 19 nt, Artificial Sequence
  Description of Artificial Sequence: Synthetic oligonucleotide
  Sense strand starting at position 3189 of SEQ ID NO: 587866
gugaauagguucucauuaa

SEQ ID NO: 824339 - RNA, 19 nt, Artificial Sequence
  Description of Artificial Sequence: Synthetic oligonucleotide
  Antisense strand to SEQ ID NO: 824338
uuaaugagaaccuauucac

SEQ ID NO: 824340 - RNA, 19 nt, Artificial Sequence
  Description of Artificial Sequence: Synthetic oligonucleotide
  Sense strand starting at position 3250 of SEQ ID NO: 587866
ccauaaggaucugccuuaa

SEQ ID NO: 824341 - RNA, 19 nt, Artificial Sequence
  Description of Artificial Sequence: Synthetic oligonucleotide
  Antisense strand to SEQ ID NO: 824340
uuaaggcagauccuuaugg

SEQ ID NO: 824342 - RNA, 19 nt, Artificial Sequence
  Description of Artificial Sequence: Synthetic oligonucleotide
  Sense strand starting at position 3254 of SEQ ID NO: 587866
aaggaucugccuuaaguuu

SEQ ID NO: 824343 - RNA, 19 nt, Artificial Sequence
  Description of Artificial Sequence: Synthetic oligonucleotide
  Antisense strand to SEQ ID NO: 824342
aaacuuaaggcagauccuu

SEQ ID NO: 824344 - RNA, 19 nt, Artificial Sequence
  Description of Artificial Sequence: Synthetic oligonucleotide
  Sense strand starting at position 3336 of SEQ ID NO: 587866
uccagaguguuugugggaa

SEQ ID NO: 824345 - RNA, 19 nt, Artificial Sequence
  Description of Artificial Sequence: Synthetic oligonucleotide
  Antisense strand to SEQ ID NO: 824344
uucccacaaacacucugga

SEQ ID NO: 824346 - RNA, 19 nt, Artificial Sequence
  Description of Artificial Sequence: Synthetic oligonucleotide
  Sense strand starting at position 3931 of SEQ ID NO: 587866
uugccaaguucuccagaag

SEQ ID NO: 824347 - RNA, 19 nt, Artificial Sequence
  Description of Artificial Sequence: Synthetic oligonucleotide
  Antisense strand to SEQ ID NO: 824346
cuucuggagaacuuggcaa

SEQ ID NO: 824348 - RNA, 19 nt, Artificial Sequence
  Description of Artificial Sequence: Synthetic oligonucleotide
  Sense strand starting at position 3932 of SEQ ID NO: 587866
ugccaaguucuccagaaga

SEQ ID NO: 824349 - RNA, 19 nt, Artificial Sequence
  Description of Artificial Sequence: Synthetic oligonucleotide
  Antisense strand to SEQ ID NO: 824348
ucuucuggagaacuuggca

SEQ ID NO: 824350 - RNA, 19 nt, Artificial Sequence
  Description of Artificial Sequence: Synthetic oligonucleotide
  Sense strand starting at position 48 of SEQ ID NO: 587867
gagggcauguuauucugaa

SEQ ID NO: 824351 - RNA, 19 nt, Artificial Sequence
  Description of Artificial Sequence: Synthetic oligonucleotide
  Antisense strand to SEQ ID NO: 824350
uucagaauaacaugcccuc

SEQ ID NO: 824352 - RNA, 19 nt, Artificial Sequence
  Description of Artificial Sequence: Synthetic oligonucleotide
  Sense strand starting at position 49 of SEQ ID NO: 587867
agggcauguuauucugaaa

SEQ ID NO: 824353 - RNA, 19 nt, Artificial Sequence
  Description of Artificial Sequence: Synthetic oligonucleotide
  Antisense strand to SEQ ID NO: 824352
uuucagaauaacaugcccu

SEQ ID NO: 824354 - RNA, 19 nt, Artificial Sequence
  Description of Artificial Sequence: Synthetic oligonucleotide
  Sense strand starting at position 179 of SEQ ID NO: 587867
uguugaugugugcaaacaa

SEQ ID NO: 824355 - RNA, 19 nt, Artificial Sequence
  Description of Artificial Sequence: Synthetic oligonucleotide
  Antisense strand to SEQ ID NO: 824354
uuguuugcacacaucaaca

SEQ ID NO: 824356 - RNA, 19 nt, Artificial Sequence
  Description of Artificial Sequence: Synthetic oligonucleotide
  Sense strand starting at position 270 of SEQ ID NO: 587867
ucauauaaacagugucgaa

SEQ ID NO: 824357 - RNA, 19 nt, Artificial Sequence
  Description of Artificial Sequence: Synthetic oligonucleotide
  Antisense strand to SEQ ID NO: 824356
uucgacacuguuuauauga

SEQ ID NO: 824358 - RNA, 19 nt, Artificial Sequence
  Description of Artificial Sequence: Synthetic oligonucleotide
  Sense strand starting at position 277 of SEQ ID NO: 587867
aacagugucgaacagauca

SEQ ID NO: 824359 - RNA, 19 nt, Artificial Sequence
  Description of Artificial Sequence: Synthetic oligonucleotide
  Antisense strand to SEQ ID NO: 824358
ugaucuguucgacacuguu

SEQ ID NO: 824360 - RNA, 19 nt, Artificial Sequence
  Description of Artificial Sequence: Synthetic oligonucleotide
  Sense strand starting at position 333 of SEQ ID NO: 587867
ugcaguggcaguuaaagaa

SEQ ID NO: 824361 - RNA, 19 nt, Artificial Sequence
  Description of Artificial Sequence: Synthetic oligonucleotide
  Antisense strand to SEQ ID NO: 824360
uucuuuaacugccacugca

SEQ ID NO: 824362 - RNA, 19 nt, Artificial Sequence
  Description of Artificial Sequence: Synthetic oligonucleotide
  Sense strand starting at position 437 of SEQ ID NO: 587867
gccaacaucugcuuugaac

SEQ ID NO: 824363 - RNA, 19 nt, Artificial Sequence
  Description of Artificial Sequence: Synthetic oligonucleotide
  Antisense strand to SEQ ID NO: 824362
guucaaagcagauguuggc

SEQ ID NO: 824364 - RNA, 19 nt, Artificial Sequence
  Description of Artificial Sequence: Synthetic oligonucleotide
  Sense strand starting at position 648 of SEQ ID NO: 587867
cuagaaccgcuauaauaug

SEQ ID NO: 824365 - RNA, 19 nt, Artificial Sequence
  Description of Artificial Sequence: Synthetic oligonucleotide
  Antisense strand to SEQ ID NO: 824364
cauauuauagcgguucuag

SEQ ID NO: 824366 - RNA, 19 nt, Artificial Sequence
  Description of Artificial Sequence: Synthetic oligonucleotide
  Sense strand starting at position 722 of SEQ ID NO: 587867
uaguaagggcuauguaagu

SEQ ID NO: 824367 - RNA, 19 nt, Artificial Sequence
  Description of Artificial Sequence: Synthetic oligonucleotide
  Antisense strand to SEQ ID NO: 824366
acuuacauagcccuuacua

SEQ ID NO: 824368 - RNA, 19 nt, Artificial Sequence
  Description of Artificial Sequence: Synthetic oligonucleotide
  Sense strand starting at position 732 of SEQ ID NO: 587867
uauguaaguguuugguaaa

SEQ ID NO: 824369 - RNA, 19 nt, Artificial Sequence
  Description of Artificial Sequence: Synthetic oligonucleotide
  Antisense strand to SEQ ID NO: 824368
uuuaccaaacacuuacaua

SEQ ID NO: 824370 - RNA, 19 nt, Artificial Sequence
  Description of Artificial Sequence: Synthetic oligonucleotide
  Sense strand starting at position 766 of SEQ ID NO: 587867
cccagauuggcugggugaa

SEQ ID NO: 824371 - RNA, 19 nt, Artificial Sequence
  Description of Artificial Sequence: Synthetic oligonucleotide
  Antisense strand to SEQ ID NO: 824370
uucacccagccaaucuggg

SEQ ID NO: 824372 - RNA, 19 nt, Artificial Sequence
  Description of Artificial Sequence: Synthetic oligonucleotide
  Sense strand starting at position 859 of SEQ ID NO: 587867
auuacagugcucuguauuu

SEQ ID NO: 824373 - RNA, 19 nt, Artificial Sequence
  Description of Artificial Sequence: Synthetic oligonucleotide
  Antisense strand to SEQ ID NO: 824372
aaauacagagcacuguaau

SEQ ID NO: 824374 - RNA, 19 nt, Artificial Sequence
  Description of Artificial Sequence: Synthetic oligonucleotide
  Sense strand starting at position 920 of SEQ ID NO: 587867
cugaaauucuacucauggu

SEQ ID NO: 824375 - RNA, 19 nt, Artificial Sequence
  Description of Artificial Sequence: Synthetic oligonucleotide
  Antisense strand to SEQ ID NO: 824374
accaugaguagaauuucag

SEQ ID NO: 824376 - RNA, 19 nt, Artificial Sequence
  Description of Artificial Sequence: Synthetic oligonucleotide
  Sense strand starting at position 984 of SEQ ID NO: 587867
agagaugauuccuuucucu

SEQ ID NO: 824377 - RNA, 19 nt, Artificial Sequence
  Description of Artificial Sequence: Synthetic oligonucleotide
  Antisense strand to SEQ ID NO: 824376
agagaaaggaaucaucucu

SEQ ID NO: 824378 - RNA, 19 nt, Artificial Sequence
  Description of Artificial Sequence: Synthetic oligonucleotide
  Sense strand starting at position 1057 of SEQ ID NO: 587867
cacuucuuguggguacauu

SEQ ID NO: 824379 - RNA, 19 nt, Artificial Sequence
  Description of Artificial Sequence: Synthetic oligonucleotide
  Antisense strand to SEQ ID NO: 824378
aauguacccacaagaagug

SEQ ID NO: 824380 - RNA, 19 nt, Artificial Sequence
  Description of Artificial Sequence: Synthetic oligonucleotide
  Sense strand starting at position 2054 of SEQ ID NO: 587867
cagagaugaccuggugugu

SEQ ID NO: 824381 - RNA, 19 nt, Artificial Sequence
  Description of Artificial Sequence: Synthetic oligonucleotide
  Antisense strand to SEQ ID NO: 824380
acacaccaggucaucucug

SEQ ID NO: 824382 - RNA, 19 nt, Artificial Sequence
  Description of Artificial Sequence: Synthetic oligonucleotide
  Sense strand starting at position 2218 of SEQ ID NO: 587867
uugucauuagcagaguuac

SEQ ID NO: 824383 - RNA, 19 nt, Artificial Sequence
  Description of Artificial Sequence: Synthetic oligonucleotide
  Antisense strand to SEQ ID NO: 824382
guaacucugcuaaugacaa

SEQ ID NO: 824384 - RNA, 19 nt, Artificial Sequence
  Description of Artificial Sequence: Synthetic oligonucleotide
  Sense strand starting at position 2230 of SEQ ID NO: 587867
gaguuacggcccuuguguu

SEQ ID NO: 824385 - RNA, 19 nt, Artificial Sequence
  Description of Artificial Sequence: Synthetic oligonucleotide
  Antisense strand to SEQ ID NO: 824384
aacacaagggccguaacuc

SEQ ID NO: 824386 - RNA, 19 nt, Artificial Sequence
  Description of Artificial Sequence: Synthetic oligonucleotide
  Sense strand starting at position 2237 of SEQ ID NO: 587867
ggcccuuguguuuauaaac

SEQ ID NO: 824387 - RNA, 19 nt, Artificial Sequence
  Description of Artificial Sequence: Synthetic oligonucleotide
  Antisense strand to SEQ ID NO: 824386
guuuauaaacacaagggcc

SEQ ID NO: 824388 - RNA, 19 nt, Artificial Sequence
  Description of Artificial Sequence: Synthetic oligonucleotide
  Sense strand starting at position 2280 of SEQ ID NO: 587867
agauccugugugcagagaa

SEQ ID NO: 824389 - RNA, 19 nt, Artificial Sequence
  Description of Artificial Sequence: Synthetic oligonucleotide
  Antisense strand to SEQ ID NO: 824388
uucucugcacacaggaucu

SEQ ID NO: 824390 - RNA, 19 nt, Artificial Sequence
  Description of Artificial Sequence: Synthetic oligonucleotide
  Sense strand starting at position 2423 of SEQ ID NO: 587867
uuuagaucuguuuaucucu

SEQ ID NO: 824391 - RNA, 19 nt, Artificial Sequence
  Description of Artificial Sequence: Synthetic oligonucleotide
  Antisense strand to SEQ ID NO: 824390
agagauaaacagaucuaaa

SEQ ID NO: 824392 - RNA, 19 nt, Artificial Sequence
  Description of Artificial Sequence: Synthetic oligonucleotide
  Sense strand starting at position 2495 of SEQ ID NO: 587867
uguggagucaagugguuaa

SEQ ID NO: 824393 - RNA, 19 nt, Artificial Sequence
  Description of Artificial Sequence: Synthetic oligonucleotide
  Antisense strand to SEQ ID NO: 824392
uuaaccacuugacuccaca

SEQ ID NO: 824394 - RNA, 19 nt, Artificial Sequence
  Description of Artificial Sequence: Synthetic oligonucleotide
  Sense strand starting at position 2498 of SEQ ID NO: 587867
ggagucaagugguuaagau

SEQ ID NO: 824395 - RNA, 19 nt, Artificial Sequence
  Description of Artificial Sequence: Synthetic oligonucleotide
  Antisense strand to SEQ ID NO: 824394
aucuuaaccacuugacucc

SEQ ID NO: 824396 - RNA, 19 nt, Artificial Sequence
  Description of Artificial Sequence: Synthetic oligonucleotide
  Sense strand starting at position 2499 of SEQ ID NO: 587867
gagucaagugguuaagauu

SEQ ID NO: 824397 - RNA, 19 nt, Artificial Sequence
  Description of Artificial Sequence: Synthetic oligonucleotide
  Antisense strand to SEQ ID NO: 824396
aaucuuaaccacuugacuc

SEQ ID NO: 824398 - RNA, 19 nt, Artificial Sequence
  Description of Artificial Sequence: Synthetic oligonucleotide
  Sense strand starting at position 2520 of SEQ ID NO: 587867
gaaguagaguggguuguuu

SEQ ID NO: 824399 - RNA, 19 nt, Artificial Sequence
  Description of Artificial Sequence: Synthetic oligonucleotide
  Antisense strand to SEQ ID NO: 824398
aaacaacccacucuacuuc

SEQ ID NO: 824400 - RNA, 19 nt, Artificial Sequence
  Description of Artificial Sequence: Synthetic oligonucleotide
  Sense strand starting at position 2625 of SEQ ID NO: 587867
ugcauaucaugccuuagau

SEQ ID NO: 824401 - RNA, 19 nt, Artificial Sequence
  Description of Artificial Sequence: Synthetic oligonucleotide
  Antisense strand to SEQ ID NO: 824400
aucuaaggcaugauaugca

SEQ ID NO: 824402 - RNA, 19 nt, Artificial Sequence
  Description of Artificial Sequence: Synthetic oligonucleotide
  Sense strand starting at position 2733 of SEQ ID NO: 587867
ggaacugggaucuaugugu

SEQ ID NO: 824403 - RNA, 19 nt, Artificial Sequence
  Description of Artificial Sequence: Synthetic oligonucleotide
  Antisense strand to SEQ ID NO: 824402
acacauagaucccaguucc

SEQ ID NO: 824404 - RNA, 19 nt, Artificial Sequence
  Description of Artificial Sequence: Synthetic oligonucleotide
  Sense strand starting at position 2737 of SEQ ID NO: 587867
cugggaucuaugugugacu

SEQ ID NO: 824405 - RNA, 19 nt, Artificial Sequence
  Description of Artificial Sequence: Synthetic oligonucleotide
  Antisense strand to SEQ ID NO: 824404
agucacacauagaucccag

SEQ ID NO: 824406 - RNA, 19 nt, Artificial Sequence
  Description of Artificial Sequence: Synthetic oligonucleotide
  Sense strand starting at position 2738 of SEQ ID NO: 587867
ugggaucuaugugugacuu

SEQ ID NO: 824407 - RNA, 19 nt, Artificial Sequence
  Description of Artificial Sequence: Synthetic oligonucleotide
  Antisense strand to SEQ ID NO: 824406
aagucacacauagauccca

SEQ ID NO: 824408 - RNA, 19 nt, Artificial Sequence
  Description of Artificial Sequence: Synthetic oligonucleotide
  Sense strand starting at position 2746 of SEQ ID NO: 587867
augugugacuucccuaaau

SEQ ID NO: 824409 - RNA, 19 nt, Artificial Sequence
  Description of Artificial Sequence: Synthetic oligonucleotide
  Antisense strand to SEQ ID NO: 824408
auuuagggaagucacacau

SEQ ID NO: 824410 - RNA, 19 nt, Artificial Sequence
  Description of Artificial Sequence: Synthetic oligonucleotide
  Sense strand starting at position 2748 of SEQ ID NO: 587867
gugugacuucccuaaauuc

SEQ ID NO: 824411 - RNA, 19 nt, Artificial Sequence
  Description of Artificial Sequence: Synthetic oligonucleotide
  Antisense strand to SEQ ID NO: 824410
gaauuuagggaagucacac

SEQ ID NO: 824412 - RNA, 19 nt, Artificial Sequence
  Description of Artificial Sequence: Synthetic oligonucleotide
  Sense strand starting at position 2952 of SEQ ID NO: 587867
ugaauauaagaaugcagua

SEQ ID NO: 824413 - RNA, 19 nt, Artificial Sequence
  Description of Artificial Sequence: Synthetic oligonucleotide
  Antisense strand to SEQ ID NO: 824412
uacugcauucuuauauuca

SEQ ID NO: 824414 - RNA, 19 nt, Artificial Sequence
  Description of Artificial Sequence: Synthetic oligonucleotide
  Sense strand starting at position 3045 of SEQ ID NO: 587867
aggaguucuucccuuguaa

SEQ ID NO: 824415 - RNA, 19 nt, Artificial Sequence
  Description of Artificial Sequence: Synthetic oligonucleotide
  Antisense strand to SEQ ID NO: 824414
uuacaagggaagaacuccu

SEQ ID NO: 824416 - RNA, 19 nt, Artificial Sequence
  Description of Artificial Sequence: Synthetic oligonucleotide
  Sense strand starting at position 3069 of SEQ ID NO: 587867
ucaacaagugaugagugua

SEQ ID NO: 824417 - RNA, 19 nt, Artificial Sequence
  Description of Artificial Sequence: Synthetic oligonucleotide
  Antisense strand to SEQ ID NO: 824416
uacacucaucacuuguuga

SEQ ID NO: 824418 - RNA, 19 nt, Artificial Sequence
  Description of Artificial Sequence: Synthetic oligonucleotide
  Sense strand starting at position 3072 of SEQ ID NO: 587867
acaagugaugaguguaucu

SEQ ID NO: 824419 - RNA, 19 nt, Artificial Sequence
  Description of Artificial Sequence: Synthetic oligonucleotide
  Antisense strand to SEQ ID NO: 824418
agauacacucaucacuugu

SEQ ID NO: 824420 - RNA, 19 nt, Artificial Sequence
  Description of Artificial Sequence: Synthetic oligonucleotide
  Sense strand starting at position 3074 of SEQ ID NO: 587867
aagugaugaguguaucucu

SEQ ID NO: 824421 - RNA, 19 nt, Artificial Sequence
  Description of Artificial Sequence: Synthetic oligonucleotide
  Antisense strand to SEQ ID NO: 824420
agagauacacucaucacuu

SEQ ID NO: 824422 - RNA, 19 nt, Artificial Sequence
  Description of Artificial Sequence: Synthetic oligonucleotide
  Sense strand starting at position 3077 of SEQ ID NO: 587867
ugaugaguguaucucuuaa

SEQ ID NO: 824423 - RNA, 19 nt, Artificial Sequence
  Description of Artificial Sequence: Synthetic oligonucleotide
  Antisense strand to SEQ ID NO: 824422
uuaagagauacacucauca

SEQ ID NO: 824424 - RNA, 19 nt, Artificial Sequence
  Description of Artificial Sequence: Synthetic oligonucleotide
  Sense strand starting at position 3079 of SEQ ID NO: 587867
augaguguaucucuuaauu

SEQ ID NO: 824425 - RNA, 19 nt, Artificial Sequence
  Description of Artificial Sequence: Synthetic oligonucleotide
  Antisense strand to SEQ ID NO: 824424
aauuaagagauacacucau

SEQ ID NO: 824426 - RNA, 19 nt, Artificial Sequence
  Description of Artificial Sequence: Synthetic oligonucleotide
  Sense strand starting at position 3135 of SEQ ID NO: 587867
aaggaaguucugugucaau

SEQ ID NO: 824427 - RNA, 19 nt, Artificial Sequence
  Description of Artificial Sequence: Synthetic oligonucleotide
  Antisense strand to SEQ ID NO: 824426
auugacacagaacuuccuu

SEQ ID NO: 824428 - RNA, 19 nt, Artificial Sequence
  Description of Artificial Sequence: Synthetic oligonucleotide
  Sense strand starting at position 3189 of SEQ ID NO: 587867
agacaaauaccuggcuauc

SEQ ID NO: 824429 - RNA, 19 nt, Artificial Sequence
  Description of Artificial Sequence: Synthetic oligonucleotide
  Antisense strand to SEQ ID NO: 824428
gauagccagguauuugucu

SEQ ID NO: 824430 - RNA, 19 nt, Artificial Sequence
  Description of Artificial Sequence: Synthetic oligonucleotide
  Sense strand starting at position 101 of SEQ ID NO: 587868
gacauuaucucuuugggac

SEQ ID NO: 824431 - RNA, 19 nt, Artificial Sequence
  Description of Artificial Sequence: Synthetic oligonucleotide
  Antisense strand to SEQ ID NO: 824430
gucccaaagagauaauguc

SEQ ID NO: 824432 - RNA, 19 nt, Artificial Sequence
  Description of Artificial Sequence: Synthetic oligonucleotide
  Sense strand starting at position 304 of SEQ ID NO: 587868
auuagaacauguuuguaca

SEQ ID NO: 824433 - RNA, 19 nt, Artificial Sequence
  Description of Artificial Sequence: Synthetic oligonucleotide
  Antisense strand to SEQ ID NO: 824432
uguacaaacauguucuaau

SEQ ID NO: 824434 - RNA, 19 nt, Artificial Sequence
  Description of Artificial Sequence: Synthetic oligonucleotide
  Sense strand starting at position 305 of SEQ ID NO: 587868
uuagaacauguuuguacaa

SEQ ID NO: 824435 - RNA, 19 nt, Artificial Sequence
  Description of Artificial Sequence: Synthetic oligonucleotide
  Antisense strand to SEQ ID NO: 824434
uuguacaaacauguucuaa

SEQ ID NO: 824436 - RNA, 19 nt, Artificial Sequence
  Description of Artificial Sequence: Synthetic oligonucleotide
  Sense strand starting at position 330 of SEQ ID NO: 587868
agaagacaaucaucuuguu

SEQ ID NO: 824437 - RNA, 19 nt, Artificial Sequence
  Description of Artificial Sequence: Synthetic oligonucleotide
  Antisense strand to SEQ ID NO: 824436
aacaagaugauugucuucu

SEQ ID NO: 824438 - RNA, 19 nt, Artificial Sequence
  Description of Artificial Sequence: Synthetic oligonucleotide
  Sense strand starting at position 551 of SEQ ID NO: 587868
uacuuuguugaucagcaga

SEQ ID NO: 824439 - RNA, 19 nt, Artificial Sequence
  Description of Artificial Sequence: Synthetic oligonucleotide
  Antisense strand to SEQ ID NO: 824438
ucugcugaucaacaaagua

SEQ ID NO: 824440 - RNA, 19 nt, Artificial Sequence
  Description of Artificial Sequence: Synthetic oligonucleotide
  Sense strand starting at position 580 of SEQ ID NO: 587868
agccuaagcucugccauuu

SEQ ID NO: 824441 - RNA, 19 nt, Artificial Sequence
  Description of Artificial Sequence: Synthetic oligonucleotide
  Antisense strand to SEQ ID NO: 824440
aaauggcagagcuuaggcu

SEQ ID NO: 824442 - RNA, 19 nt, Artificial Sequence
  Description of Artificial Sequence: Synthetic oligonucleotide
  Sense strand starting at position 598 of SEQ ID NO: 587868
uauugauucugagucuuug

SEQ ID NO: 824443 - RNA, 19 nt, Artificial Sequence
  Description of Artificial Sequence: Synthetic oligonucleotide
  Antisense strand to SEQ ID NO: 824442
caaagacucagaaucaaua

SEQ ID NO: 824444 - RNA, 19 nt, Artificial Sequence
  Description of Artificial Sequence: Synthetic oligonucleotide
  Sense strand starting at position 802 of SEQ ID NO: 587868
uguauaaagcgauauaaac

SEQ ID NO: 824445 - RNA, 19 nt, Artificial Sequence
  Description of Artificial Sequence: Synthetic oligonucleotide
  Antisense strand to SEQ ID NO: 824444
guuuauaucgcuuuauaca

SEQ ID NO: 824446 - RNA, 19 nt, Artificial Sequence
  Description of Artificial Sequence: Synthetic oligonucleotide
  Sense strand starting at position 915 of SEQ ID NO: 587868
gccuucgagacugaaguuu

SEQ ID NO: 824447 - RNA, 19 nt, Artificial Sequence
  Description of Artificial Sequence: Synthetic oligonucleotide
  Antisense strand to SEQ ID NO: 824446
aaacuucagucucgaaggc

SEQ ID NO: 824448 - RNA, 19 nt, Artificial Sequence
  Description of Artificial Sequence: Synthetic oligonucleotide
  Sense strand starting at position 924 of SEQ ID NO: 587868
acugaaguuucuguggaug

SEQ ID NO: 824449 - RNA, 19 nt, Artificial Sequence
  Description of Artificial Sequence: Synthetic oligonucleotide
  Antisense strand to SEQ ID NO: 824448
cauccacagaaacuucagu

SEQ ID NO: 824450 - RNA, 19 nt, Artificial Sequence
  Description of Artificial Sequence: Synthetic oligonucleotide
  Sense strand starting at position 1063 of SEQ ID NO: 587868
uagcaacagcucugaggaa

SEQ ID NO: 824451 - RNA, 19 nt, Artificial Sequence
  Description of Artificial Sequence: Synthetic oligonucleotide
  Antisense strand to SEQ ID NO: 824450
uuccucagagcuguugcua

SEQ ID NO: 824452 - RNA, 19 nt, Artificial Sequence
  Description of Artificial Sequence: Synthetic oligonucleotide
  Sense strand starting at position 1079 of SEQ ID NO: 587868
gaaagaauauacguagguu

SEQ ID NO: 824453 - RNA, 19 nt, Artificial Sequence
  Description of Artificial Sequence: Synthetic oligonucleotide
  Antisense strand to SEQ ID NO: 824452
aaccuacguauauucuuuc

SEQ ID NO: 824454 - RNA, 19 nt, Artificial Sequence
  Description of Artificial Sequence: Synthetic oligonucleotide
  Sense strand starting at position 1170 of SEQ ID NO: 587868
uggacuaugagccagguau

SEQ ID NO: 824455 - RNA, 19 nt, Artificial Sequence
  Description of Artificial Sequence: Synthetic oligonucleotide
  Antisense strand to SEQ ID NO: 824454
auaccuggcucauagucca

SEQ ID NO: 824456 - RNA, 19 nt, Artificial Sequence
  Description of Artificial Sequence: Synthetic oligonucleotide
  Sense strand starting at position 1172 of SEQ ID NO: 587868
gacuaugagccagguauua

SEQ ID NO: 824457 - RNA, 19 nt, Artificial Sequence
  Description of Artificial Sequence: Synthetic oligonucleotide
  Antisense strand to SEQ ID NO: 824456
uaauaccuggcucauaguc

SEQ ID NO: 824458 - RNA, 19 nt, Artificial Sequence
  Description of Artificial Sequence: Synthetic oligonucleotide
  Sense strand starting at position 1278 of SEQ ID NO: 587868
aggcaaauugcccaaguuu

SEQ ID NO: 824459 - RNA, 19 nt, Artificial Sequence
  Description of Artificial Sequence: Synthetic oligonucleotide
  Antisense strand to SEQ ID NO: 824458
aaacuugggcaauuugccu

SEQ ID NO: 824460 - RNA, 19 nt, Artificial Sequence
  Description of Artificial Sequence: Synthetic oligonucleotide
  Sense strand starting at position 1337 of SEQ ID NO: 587868
cgaagucugcgugcuucau

SEQ ID NO: 824461 - RNA, 19 nt, Artificial Sequence
  Description of Artificial Sequence: Synthetic oligonucleotide
  Antisense strand to SEQ ID NO: 824460
augaagcacgcagacuucg

SEQ ID NO: 824462 - RNA, 19 nt, Artificial Sequence
  Description of Artificial Sequence: Synthetic oligonucleotide
  Sense strand starting at position 2129 of SEQ ID NO: 587868
ggccuuaauuaaguaaaua

SEQ ID NO: 824463 - RNA, 19 nt, Artificial Sequence
  Description of Artificial Sequence: Synthetic oligonucleotide
  Antisense strand to SEQ ID NO: 824462
uauuuacuuaauuaaggcc

SEQ ID NO: 824464 - RNA, 19 nt, Artificial Sequence
  Description of Artificial Sequence: Synthetic oligonucleotide
  Sense strand starting at position 2270 of SEQ ID NO: 587868
cgcuaaaguguagaucuca

SEQ ID NO: 824465 - RNA, 19 nt, Artificial Sequence
  Description of Artificial Sequence: Synthetic oligonucleotide
  Antisense strand to SEQ ID NO: 824464
ugagaucuacacuuuagcg

SEQ ID NO: 824466 - RNA, 19 nt, Artificial Sequence
  Description of Artificial Sequence: Synthetic oligonucleotide
  Sense strand starting at position 2342 of SEQ ID NO: 587868
guaggagucacacacgaau

SEQ ID NO: 824467 - RNA, 19 nt, Artificial Sequence
  Description of Artificial Sequence: Synthetic oligonucleotide
  Antisense strand to SEQ ID NO: 824466
auucgugugugacuccuac

SEQ ID NO: 824468 - RNA, 19 nt, Artificial Sequence
  Description of Artificial Sequence: Synthetic oligonucleotide
  Sense strand starting at position 2375 of SEQ ID NO: 587868
gugagacgucauuaggaau

SEQ ID NO: 824469 - RNA, 19 nt, Artificial Sequence
  Description of Artificial Sequence: Synthetic oligonucleotide
  Antisense strand to SEQ ID NO: 824468
auuccuaaugacgucucac

SEQ ID NO: 824470 - RNA, 19 nt, Artificial Sequence
  Description of Artificial Sequence: Synthetic oligonucleotide
  Sense strand starting at position 2381 of SEQ ID NO: 587868
cgucauuaggaaugggauu

SEQ ID NO: 824471 - RNA, 19 nt, Artificial Sequence
  Description of Artificial Sequence: Synthetic oligonucleotide
  Antisense strand to SEQ ID NO: 824470
aaucccauuccuaaugacg

SEQ ID NO: 824472 - RNA, 19 nt, Artificial Sequence
  Description of Artificial Sequence: Synthetic oligonucleotide
  Sense strand starting at position 2416 of SEQ ID NO: 587868
cgaagcaauuccuuuacua

SEQ ID NO: 824473 - RNA, 19 nt, Artificial Sequence
  Description of Artificial Sequence: Synthetic oligonucleotide
  Antisense strand to SEQ ID NO: 824472
uaguaaaggaauugcuucg

SEQ ID NO: 824474 - RNA, 19 nt, Artificial Sequence
  Description of Artificial Sequence: Synthetic oligonucleotide
  Sense strand starting at position 2472 of SEQ ID NO: 587868
gucggcucccaguaagaau

SEQ ID NO: 824475 - RNA, 19 nt, Artificial Sequence
  Description of Artificial Sequence: Synthetic oligonucleotide
  Antisense strand to SEQ ID NO: 824474
auucuuacugggagccgac

SEQ ID NO: 824476 - RNA, 19 nt, Artificial Sequence
  Description of Artificial Sequence: Synthetic oligonucleotide
  Sense strand starting at position 2610 of SEQ ID NO: 587868
uugcgucugcguguacaga

SEQ ID NO: 824477 - RNA, 19 nt, Artificial Sequence
  Description of Artificial Sequence: Synthetic oligonucleotide
  Antisense strand to SEQ ID NO: 824476
ucuguacacgcagacgcaa

SEQ ID NO: 824478 - RNA, 19 nt, Artificial Sequence
  Description of Artificial Sequence: Synthetic oligonucleotide
  Sense strand starting at position 2899 of SEQ ID NO: 587868
gcaggauugacauacggua

SEQ ID NO: 824479 - RNA, 19 nt, Artificial Sequence
  Description of Artificial Sequence: Synthetic oligonucleotide
  Antisense strand to SEQ ID NO: 824478
uaccguaugucaauccugc

SEQ ID NO: 824480 - RNA, 19 nt, Artificial Sequence
  Description of Artificial Sequence: Synthetic oligonucleotide
  Sense strand starting at position 2913 of SEQ ID NO: 587868
cgguaaccuuuauuacaaa

SEQ ID NO: 824481 - RNA, 19 nt, Artificial Sequence
  Description of Artificial Sequence: Synthetic oligonucleotide
  Antisense strand to SEQ ID NO: 824480
uuuguaauaaagguuaccg

SEQ ID NO: 824482 - RNA, 19 nt, Artificial Sequence
  Description of Artificial Sequence: Synthetic oligonucleotide
  Sense strand starting at position 3125 of SEQ ID NO: 587868
agggaaguauugucuaguc

SEQ ID NO: 824483 - RNA, 19 nt, Artificial Sequence
  Description of Artificial Sequence: Synthetic oligonucleotide
  Antisense strand to SEQ ID NO: 824482
gacuagacaauacuucccu

SEQ ID NO: 824484 - RNA, 19 nt, Artificial Sequence
  Description of Artificial Sequence: Synthetic oligonucleotide
  Sense strand starting at position 3127 of SEQ ID NO: 587868
ggaaguauugucuagucag

SEQ ID NO: 824485 - RNA, 19 nt, Artificial Sequence
  Description of Artificial Sequence: Synthetic oligonucleotide
  Antisense strand to SEQ ID NO: 824484
cugacuagacaauacuucc

SEQ ID NO: 824486 - RNA, 19 nt, Artificial Sequence
  Description of Artificial Sequence: Synthetic oligonucleotide
  Sense strand starting at position 3130 of SEQ ID NO: 587868
aguauugucuagucaggag

SEQ ID NO: 824487 - RNA, 19 nt, Artificial Sequence
  Description of Artificial Sequence: Synthetic oligonucleotide
  Antisense strand to SEQ ID NO: 824486
cuccugacuagacaauacu

SEQ ID NO: 824488 - RNA, 19 nt, Artificial Sequence
  Description of Artificial Sequence: Synthetic oligonucleotide
  Sense strand starting at position 3186 of SEQ ID NO: 587868
agggaucuccggcaucacu

SEQ ID NO: 824489 - RNA, 19 nt, Artificial Sequence
  Description of Artificial Sequence: Synthetic oligonucleotide
  Antisense strand to SEQ ID NO: 824488
agugaugccggagaucccu

SEQ ID NO: 824490 - RNA, 19 nt, Artificial Sequence
  Description of Artificial Sequence: Synthetic oligonucleotide
  Sense strand starting at position 3225 of SEQ ID NO: 587868
acuuuccuguuuguaauaa

SEQ ID NO: 824491 - RNA, 19 nt, Artificial Sequence
  Description of Artificial Sequence: Synthetic oligonucleotide
  Antisense strand to SEQ ID NO: 824490
uuauuacaaacaggaaagu

SEQ ID NO: 824492 - RNA, 19 nt, Artificial Sequence
  Description of Artificial Sequence: Synthetic oligonucleotide
  Sense strand starting at position 3367 of SEQ ID NO: 587868
uucugagcagugugauaaa

SEQ ID NO: 824493 - RNA, 19 nt, Artificial Sequence
  Description of Artificial Sequence: Synthetic oligonucleotide
  Antisense strand to SEQ ID NO: 824492
uuuaucacacugcucagaa

SEQ ID NO: 824494 - RNA, 19 nt, Artificial Sequence
  Description of Artificial Sequence: Synthetic oligonucleotide
  Sense strand starting at position 3627 of SEQ ID NO: 587868
gguaguuaaucucuuacug

SEQ ID NO: 824495 - RNA, 19 nt, Artificial Sequence
  Description of Artificial Sequence: Synthetic oligonucleotide
  Antisense strand to SEQ ID NO: 824494
caguaagagauuaacuacc

SEQ ID NO: 824496 - RNA, 19 nt, Artificial Sequence
  Description of Artificial Sequence: Synthetic oligonucleotide
  Sense strand starting at position 3659 of SEQ ID NO: 587868
gaguaaauguuauuguagg

SEQ ID NO: 824497 - RNA, 19 nt, Artificial Sequence
  Description of Artificial Sequence: Synthetic oligonucleotide
  Antisense strand to SEQ ID NO: 824496
ccuacaauaacauuuacuc

SEQ ID NO: 824498 - RNA, 19 nt, Artificial Sequence
  Description of Artificial Sequence: Synthetic oligonucleotide
  Sense strand starting at position 3860 of SEQ ID NO: 587868
ggcuuucuccuuuagaguc

SEQ ID NO: 824499 - RNA, 19 nt, Artificial Sequence
  Description of Artificial Sequence: Synthetic oligonucleotide
  Antisense strand to SEQ ID NO: 824498
gacucuaaaggagaaagcc

SEQ ID NO: 824500 - RNA, 19 nt, Artificial Sequence
  Description of Artificial Sequence: Synthetic oligonucleotide
  Sense strand starting at position 3901 of SEQ ID NO: 587868
cugccaucucuguauaaag

SEQ ID NO: 824501 - RNA, 19 nt, Artificial Sequence
  Description of Artificial Sequence: Synthetic oligonucleotide
  Antisense strand to SEQ ID NO: 824500
cuuuauacagagauggcag

SEQ ID NO: 824502 - RNA, 19 nt, Artificial Sequence
  Description of Artificial Sequence: Synthetic oligonucleotide
  Sense strand starting at position 3903 of SEQ ID NO: 587868
gccaucucuguauaaagaa

SEQ ID NO: 824503 - RNA, 19 nt, Artificial Sequence
  Description of Artificial Sequence: Synthetic oligonucleotide
  Antisense strand to SEQ ID NO: 824502
uucuuuauacagagauggc

SEQ ID NO: 824504 - RNA, 19 nt, Artificial Sequence
  Description of Artificial Sequence: Synthetic oligonucleotide
  Sense strand starting at position 3928 of SEQ ID NO: 587868
caaagaacucaggguguuu

SEQ ID NO: 824505 - RNA, 19 nt, Artificial Sequence
  Description of Artificial Sequence: Synthetic oligonucleotide
  Antisense strand to SEQ ID NO: 824504
aaacacccugaguucuuug

SEQ ID NO: 824506 - RNA, 19 nt, Artificial Sequence
  Description of Artificial Sequence: Synthetic oligonucleotide
  Sense strand starting at position 3930 of SEQ ID NO: 587868
aagaacucaggguguuuga

SEQ ID NO: 824507 - RNA, 19 nt, Artificial Sequence
  Description of Artificial Sequence: Synthetic oligonucleotide
  Antisense strand to SEQ ID NO: 824506
ucaaacacccugaguucuu

SEQ ID NO: 824508 - RNA, 19 nt, Artificial Sequence
  Description of Artificial Sequence: Synthetic oligonucleotide
  Sense strand starting at position 3937 of SEQ ID NO: 587868
caggguguuugaucugauc

SEQ ID NO: 824509 - RNA, 19 nt, Artificial Sequence
  Description of Artificial Sequence: Synthetic oligonucleotide
  Antisense strand to SEQ ID NO: 824508
gaucagaucaaacacccug

SEQ ID NO: 824510 - RNA, 19 nt, Artificial Sequence
  Description of Artificial Sequence: Synthetic oligonucleotide
  Sense strand starting at position 68 of SEQ ID NO: 587869
gacuucuaaugugugggua

SEQ ID NO: 824511 - RNA, 19 nt, Artificial Sequence
  Description of Artificial Sequence: Synthetic oligonucleotide
  Antisense strand to SEQ ID NO: 824510
uacccacacauuagaaguc

SEQ ID NO: 824512 - RNA, 19 nt, Artificial Sequence
  Description of Artificial Sequence: Synthetic oligonucleotide
  Sense strand starting at position 76 of SEQ ID NO: 587869
auguguggguaucugacau

SEQ ID NO: 824513 - RNA, 19 nt, Artificial Sequence
  Description of Artificial Sequence: Synthetic oligonucleotide
  Antisense strand to SEQ ID NO: 824512
augucagauacccacacau

SEQ ID NO: 824514 - RNA, 19 nt, Artificial Sequence
  Description of Artificial Sequence: Synthetic oligonucleotide
  Sense strand starting at position 195 of SEQ ID NO: 587869
ggaaguaaucauugcugau

SEQ ID NO: 824515 - RNA, 19 nt, Artificial Sequence
  Description of Artificial Sequence: Synthetic oligonucleotide
  Antisense strand to SEQ ID NO: 824514
aucagcaaugauuacuucc

SEQ ID NO: 824516 - RNA, 19 nt, Artificial Sequence
  Description of Artificial Sequence: Synthetic oligonucleotide
  Sense strand starting at position 288 of SEQ ID NO: 587869
aggaauagcucagcuaaca

SEQ ID NO: 824517 - RNA, 19 nt, Artificial Sequence
  Description of Artificial Sequence: Synthetic oligonucleotide
  Antisense strand to SEQ ID NO: 824516
uguuagcugagcuauuccu

SEQ ID NO: 824518 - RNA, 19 nt, Artificial Sequence
  Description of Artificial Sequence: Synthetic oligonucleotide
  Sense strand starting at position 553 of SEQ ID NO: 587869
agugguucuacauguaauc

SEQ ID NO: 824519 - RNA, 19 nt, Artificial Sequence
  Description of Artificial Sequence: Synthetic oligonucleotide
  Antisense strand to SEQ ID NO: 824518
gauuacauguagaaccacu

SEQ ID NO: 824520 - RNA, 19 nt, Artificial Sequence
  Description of Artificial Sequence: Synthetic oligonucleotide
  Sense strand starting at position 735 of SEQ ID NO: 587869
gaucucuugaguuggagag

SEQ ID NO: 824521 - RNA, 19 nt, Artificial Sequence
  Description of Artificial Sequence: Synthetic oligonucleotide
  Antisense strand to SEQ ID NO: 824520
cucuccaacucaagagauc

SEQ ID NO: 824522 - RNA, 19 nt, Artificial Sequence
  Description of Artificial Sequence: Synthetic oligonucleotide
  Sense strand starting at position 736 of SEQ ID NO: 587869
aucucuugaguuggagagu

SEQ ID NO: 824523 - RNA, 19 nt, Artificial Sequence
  Description of Artificial Sequence: Synthetic oligonucleotide
  Antisense strand to SEQ ID NO: 824522
acucuccaacucaagagau

SEQ ID NO: 824524 - RNA, 19 nt, Artificial Sequence
  Description of Artificial Sequence: Synthetic oligonucleotide
  Sense strand starting at position 833 of SEQ ID NO: 587869
aaacauuaggucggugcaa

SEQ ID NO: 824525 - RNA, 19 nt, Artificial Sequence
  Description of Artificial Sequence: Synthetic oligonucleotide
  Antisense strand to SEQ ID NO: 824524
uugcaccgaccuaauguuu

SEQ ID NO: 824526 - RNA, 19 nt, Artificial Sequence
  Description of Artificial Sequence: Synthetic oligonucleotide
  Sense strand starting at position 834 of SEQ ID NO: 587869
aacauuaggucggugcaaa

SEQ ID NO: 824527 - RNA, 19 nt, Artificial Sequence
  Description of Artificial Sequence: Synthetic oligonucleotide
  Antisense strand to SEQ ID NO: 824526
uuugcaccgaccuaauguu

SEQ ID NO: 824528 - RNA, 19 nt, Artificial Sequence
  Description of Artificial Sequence: Synthetic oligonucleotide
  Sense strand starting at position 964 of SEQ ID NO: 587869
ugguauggacaguguaacu

SEQ ID NO: 824529 - RNA, 19 nt, Artificial Sequence
  Description of Artificial Sequence: Synthetic oligonucleotide
  Antisense strand to SEQ ID NO: 824528
aguuacacuguccauacca

SEQ ID NO: 824530 - RNA, 19 nt, Artificial Sequence
  Description of Artificial Sequence: Synthetic oligonucleotide
  Sense strand starting at position 1124 of SEQ ID NO: 587869
augacagcaguuuguaaau

SEQ ID NO: 824531 - RNA, 19 nt, Artificial Sequence
  Description of Artificial Sequence: Synthetic oligonucleotide
  Antisense strand to SEQ ID NO: 824530
auuuacaaacugcugucau

SEQ ID NO: 824532 - RNA, 19 nt, Artificial Sequence
  Description of Artificial Sequence: Synthetic oligonucleotide
  Sense strand starting at position 1155 of SEQ ID NO: 587869
ucagaaauuugagauuacu

SEQ ID NO: 824533 - RNA, 19 nt, Artificial Sequence
  Description of Artificial Sequence: Synthetic oligonucleotide
  Antisense strand to SEQ ID NO: 824532
aguaaucucaaauuucuga

SEQ ID NO: 824534 - RNA, 19 nt, Artificial Sequence
  Description of Artificial Sequence: Synthetic oligonucleotide
  Sense strand starting at position 1328 of SEQ ID NO: 587869
ugaggagcaucuguuugaa

SEQ ID NO: 824535 - RNA, 19 nt, Artificial Sequence
  Description of Artificial Sequence: Synthetic oligonucleotide
  Antisense strand to SEQ ID NO: 824534
uucaaacagaugcuccuca

SEQ ID NO: 824536 - RNA, 19 nt, Artificial Sequence
  Description of Artificial Sequence: Synthetic oligonucleotide
  Sense strand starting at position 1330 of SEQ ID NO: 587869
aggagcaucuguuugaaag

SEQ ID NO: 824537 - RNA, 19 nt, Artificial Sequence
  Description of Artificial Sequence: Synthetic oligonucleotide
  Antisense strand to SEQ ID NO: 824536
cuuucaaacagaugcuccu

SEQ ID NO: 824538 - RNA, 19 nt, Artificial Sequence
  Description of Artificial Sequence: Synthetic oligonucleotide
  Sense strand starting at position 1331 of SEQ ID NO: 587869
ggagcaucuguuugaaagg

SEQ ID NO: 824539 - RNA, 19 nt, Artificial Sequence
  Description of Artificial Sequence: Synthetic oligonucleotide
  Antisense strand to SEQ ID NO: 824538
ccuuucaaacagaugcucc

SEQ ID NO: 824540 - RNA, 19 nt, Artificial Sequence
  Description of Artificial Sequence: Synthetic oligonucleotide
  Sense strand starting at position 1360 of SEQ ID NO: 587869
acgcuugcugcuucucuaa

SEQ ID NO: 824541 - RNA, 19 nt, Artificial Sequence
  Description of Artificial Sequence: Synthetic oligonucleotide
  Antisense strand to SEQ ID NO: 824540
uuagagaagcagcaagcgu

SEQ ID NO: 824542 - RNA, 19 nt, Artificial Sequence
  Description of Artificial Sequence: Synthetic oligonucleotide
  Sense strand starting at position 1372 of SEQ ID NO: 587869
ucucuaagcucccugggaa

SEQ ID NO: 824543 - RNA, 19 nt, Artificial Sequence
  Description of Artificial Sequence: Synthetic oligonucleotide
  Antisense strand to SEQ ID NO: 824542
uucccagggagcuuagaga

SEQ ID NO: 824544 - RNA, 19 nt, Artificial Sequence
  Description of Artificial Sequence: Synthetic oligonucleotide
  Sense strand starting at position 1703 of SEQ ID NO: 587869
cugcuaggagucuagaaac

SEQ ID NO: 824545 - RNA, 19 nt, Artificial Sequence
  Description of Artificial Sequence: Synthetic oligonucleotide
  Antisense strand to SEQ ID NO: 824544
guuucuagacuccuagcag

SEQ ID NO: 824546 - RNA, 19 nt, Artificial Sequence
  Description of Artificial Sequence: Synthetic oligonucleotide
  Sense strand starting at position 2070 of SEQ ID NO: 587869
ugcaaccuccgaggaaauu

SEQ ID NO: 824547 - RNA, 19 nt, Artificial Sequence
  Description of Artificial Sequence: Synthetic oligonucleotide
  Antisense strand to SEQ ID NO: 824546
aauuuccucggagguugca

SEQ ID NO: 824548 - RNA, 19 nt, Artificial Sequence
  Description of Artificial Sequence: Synthetic oligonucleotide
  Sense strand starting at position 2717 of SEQ ID NO: 587869
uguugacauuaaguaaaug

SEQ ID NO: 824549 - RNA, 19 nt, Artificial Sequence
  Description of Artificial Sequence: Synthetic oligonucleotide
  Antisense strand to SEQ ID NO: 824548
cauuuacuuaaugucaaca

SEQ ID NO: 824550 - RNA, 19 nt, Artificial Sequence
  Description of Artificial Sequence: Synthetic oligonucleotide
  Sense strand starting at position 2881 of SEQ ID NO: 587869
aggagucuugaggauugca

SEQ ID NO: 824551 - RNA, 19 nt, Artificial Sequence
  Description of Artificial Sequence: Synthetic oligonucleotide
  Antisense strand to SEQ ID NO: 824550
ugcaauccucaagacuccu

SEQ ID NO: 824552 - RNA, 19 nt, Artificial Sequence
  Description of Artificial Sequence: Synthetic oligonucleotide
  Sense strand starting at position 2884 of SEQ ID NO: 587869
agucuugaggauugcaaca

SEQ ID NO: 824553 - RNA, 19 nt, Artificial Sequence
  Description of Artificial Sequence: Synthetic oligonucleotide
  Antisense strand to SEQ ID NO: 824552
uguugcaauccucaagacu

SEQ ID NO: 824554 - RNA, 19 nt, Artificial Sequence
  Description of Artificial Sequence: Synthetic oligonucleotide
  Sense strand starting at position 2960 of SEQ ID NO: 587869
gaggaaaucuuggaggaaa

SEQ ID NO: 824555 - RNA, 19 nt, Artificial Sequence
  Description of Artificial Sequence: Synthetic oligonucleotide
  Antisense strand to SEQ ID NO: 824554
uuuccuccaagauuuccuc

SEQ ID NO: 824556 - RNA, 19 nt, Artificial Sequence
  Description of Artificial Sequence: Synthetic oligonucleotide
  Sense strand starting at position 3081 of SEQ ID NO: 587869
uguguauugggagagaugu

SEQ ID NO: 824557 - RNA, 19 nt, Artificial Sequence
  Description of Artificial Sequence: Synthetic oligonucleotide
  Antisense strand to SEQ ID NO: 824556
acaucucucccaauacaca

SEQ ID NO: 824558 - RNA, 19 nt, Artificial Sequence
  Description of Artificial Sequence: Synthetic oligonucleotide
  Sense strand starting at position 3246 of SEQ ID NO: 587869
cggcauugucaggaaauaa

SEQ ID NO: 824559 - RNA, 19 nt, Artificial Sequence
  Description of Artificial Sequence: Synthetic oligonucleotide
  Antisense strand to SEQ ID NO: 824558
uuauuuccugacaaugccg

SEQ ID NO: 824560 - RNA, 19 nt, Artificial Sequence
  Description of Artificial Sequence: Synthetic oligonucleotide
  Sense strand starting at position 3268 of SEQ ID NO: 587869
ccagcuauuuaggaacaau

SEQ ID NO: 824561 - RNA, 19 nt, Artificial Sequence
  Description of Artificial Sequence: Synthetic oligonucleotide
  Antisense strand to SEQ ID NO: 824560
auuguuccuaaauagcugg

SEQ ID NO: 824562 - RNA, 19 nt, Artificial Sequence
  Description of Artificial Sequence: Synthetic oligonucleotide
  Sense strand starting at position 3398 of SEQ ID NO: 587869
cugcuaugacgaggucaga

SEQ ID NO: 824563 - RNA, 19 nt, Artificial Sequence
  Description of Artificial Sequence: Synthetic oligonucleotide
  Antisense strand to SEQ ID NO: 824562
ucugaccucgucauagcag

SEQ ID NO: 824564 - RNA, 19 nt, Artificial Sequence
  Description of Artificial Sequence: Synthetic oligonucleotide
  Sense strand starting at position 3436 of SEQ ID NO: 587869
ggaugcaucaguugaacca

SEQ ID NO: 824565 - RNA, 19 nt, Artificial Sequence
  Description of Artificial Sequence: Synthetic oligonucleotide
  Antisense strand to SEQ ID NO: 824564
ugguucaacugaugcaucc

SEQ ID NO: 824566 - RNA, 19 nt, Artificial Sequence
  Description of Artificial Sequence: Synthetic oligonucleotide
  Sense strand starting at position 3437 of SEQ ID NO: 587869
gaugcaucaguugaaccau

SEQ ID NO: 824567 - RNA, 19 nt, Artificial Sequence
  Description of Artificial Sequence: Synthetic oligonucleotide
  Antisense strand to SEQ ID NO: 824566
augguucaacugaugcauc

SEQ ID NO: 824568 - RNA, 19 nt, Artificial Sequence
  Description of Artificial Sequence: Synthetic oligonucleotide
  Sense strand starting at position 3457 of SEQ ID NO: 587869
cagggugguuuaucaguua

SEQ ID NO: 824569 - RNA, 19 nt, Artificial Sequence
  Description of Artificial Sequence: Synthetic oligonucleotide
  Antisense strand to SEQ ID NO: 824568
uaacugauaaaccacccug

SEQ ID NO: 824570 - RNA, 19 nt, Artificial Sequence
  Description of Artificial Sequence: Synthetic oligonucleotide
  Sense strand starting at position 3460 of SEQ ID NO: 587869
ggugguuuaucaguuagga

SEQ ID NO: 824571 - RNA, 19 nt, Artificial Sequence
  Description of Artificial Sequence: Synthetic oligonucleotide
  Antisense strand to SEQ ID NO: 824570
uccuaacugauaaaccacc

SEQ ID NO: 824572 - RNA, 19 nt, Artificial Sequence
  Description of Artificial Sequence: Synthetic oligonucleotide
  Sense strand starting at position 3628 of SEQ ID NO: 587869
guaaguugucaagaggguu

SEQ ID NO: 824573 - RNA, 19 nt, Artificial Sequence
  Description of Artificial Sequence: Synthetic oligonucleotide
  Antisense strand to SEQ ID NO: 824572
aacccucuugacaacuuac

SEQ ID NO: 824574 - RNA, 19 nt, Artificial Sequence
  Description of Artificial Sequence: Synthetic oligonucleotide
  Sense strand starting at position 3631 of SEQ ID NO: 587869
aguugucaagaggguuaaa

SEQ ID NO: 824575 - RNA, 19 nt, Artificial Sequence
  Description of Artificial Sequence: Synthetic oligonucleotide
  Antisense strand to SEQ ID NO: 824574
uuuaacccucuugacaacu

SEQ ID NO: 824576 - RNA, 19 nt, Artificial Sequence
  Description of Artificial Sequence: Synthetic oligonucleotide
  Sense strand starting at position 3643 of SEQ ID NO: 587869
gguuaaaugagaugcuaca

SEQ ID NO: 824577 - RNA, 19 nt, Artificial Sequence
  Description of Artificial Sequence: Synthetic oligonucleotide
  Antisense strand to SEQ ID NO: 824576
uguagcaucucauuuaacc

SEQ ID NO: 824578 - RNA, 19 nt, Artificial Sequence
  Description of Artificial Sequence: Synthetic oligonucleotide
  Sense strand starting at position 3674 of SEQ ID NO: 587869
agaagagcucuuggcaugu

SEQ ID NO: 824579 - RNA, 19 nt, Artificial Sequence
  Description of Artificial Sequence: Synthetic oligonucleotide
  Antisense strand to SEQ ID NO: 824578
acaugccaagagcucuucu

SEQ ID NO: 824580 - RNA, 19 nt, Artificial Sequence
  Description of Artificial Sequence: Synthetic oligonucleotide
  Sense strand starting at position 3813 of SEQ ID NO: 587869
agucauucccagggauccu

SEQ ID NO: 824581 - RNA, 19 nt, Artificial Sequence
  Description of Artificial Sequence: Synthetic oligonucleotide
  Antisense strand to SEQ ID NO: 824580
aggaucccugggaaugacu

SEQ ID NO: 824582 - RNA, 19 nt, Artificial Sequence
  Description of Artificial Sequence: Synthetic oligonucleotide
  Sense strand starting at position 3881 of SEQ ID NO: 587869
guugguaugcuugaccaau

SEQ ID NO: 824583 - RNA, 19 nt, Artificial Sequence
  Description of Artificial Sequence: Synthetic oligonucleotide
  Antisense strand to SEQ ID NO: 824582
auuggucaagcauaccaac

SEQ ID NO: 824584 - RNA, 19 nt, Artificial Sequence
  Description of Artificial Sequence: Synthetic oligonucleotide
  Sense strand starting at position 3912 of SEQ ID NO: 587869
aagugaugauggucugcca

SEQ ID NO: 824585 - RNA, 19 nt, Artificial Sequence
  Description of Artificial Sequence: Synthetic oligonucleotide
  Antisense strand to SEQ ID NO: 824584
uggcagaccaucaucacuu

SEQ ID NO: 824586 - RNA, 19 nt, Artificial Sequence
  Description of Artificial Sequence: Synthetic oligonucleotide
  Sense strand starting at position 3915 of SEQ ID NO: 587869
ugaugauggucugccacuu

SEQ ID NO: 824587 - RNA, 19 nt, Artificial Sequence
  Description of Artificial Sequence: Synthetic oligonucleotide
  Antisense strand to SEQ ID NO: 824586
aaguggcagaccaucauca

SEQ ID NO: 824588 - RNA, 19 nt, Artificial Sequence
  Description of Artificial Sequence: Synthetic oligonucleotide
  Sense strand starting at position 3958 of SEQ ID NO: 587869
uggugcuucuaucuugaaa

SEQ ID NO: 824589 - RNA, 19 nt, Artificial Sequence
  Description of Artificial Sequence: Synthetic oligonucleotide
  Antisense strand to SEQ ID NO: 824588
uuucaagauagaagcacca

SEQ ID NO: 824590 - RNA, 19 nt, Artificial Sequence
  Description of Artificial Sequence: Synthetic oligonucleotide
  Sense strand starting at position 147 of SEQ ID NO: 587870
agugguucuacauguaauc

SEQ ID NO: 824591 - RNA, 19 nt, Artificial Sequence
  Description of Artificial Sequence: Synthetic oligonucleotide
  Antisense strand to SEQ ID NO: 824590
gauuacauguagaaccacu

SEQ ID NO: 824592 - RNA, 19 nt, Artificial Sequence
  Description of Artificial Sequence: Synthetic oligonucleotide
  Sense strand starting at position 329 of SEQ ID NO: 587870
gaucucuugaguuggagag

SEQ ID NO: 824593 - RNA, 19 nt, Artificial Sequence
  Description of Artificial Sequence: Synthetic oligonucleotide
  Antisense strand to SEQ ID NO: 824592
cucuccaacucaagagauc

SEQ ID NO: 824594 - RNA, 19 nt, Artificial Sequence
  Description of Artificial Sequence: Synthetic oligonucleotide
  Sense strand starting at position 330 of SEQ ID NO: 587870
aucucuugaguuggagagu

SEQ ID NO: 824595 - RNA, 19 nt, Artificial Sequence
  Description of Artificial Sequence: Synthetic oligonucleotide
  Antisense strand to SEQ ID NO: 824594
acucuccaacucaagagau

SEQ ID NO: 824596 - RNA, 19 nt, Artificial Sequence
  Description of Artificial Sequence: Synthetic oligonucleotide
  Sense strand starting at position 427 of SEQ ID NO: 587870
aaacauuaggucggugcaa

SEQ ID NO: 824597 - RNA, 19 nt, Artificial Sequence
  Description of Artificial Sequence: Synthetic oligonucleotide
  Antisense strand to SEQ ID NO: 824596
uugcaccgaccuaauguuu

SEQ ID NO: 824598 - RNA, 19 nt, Artificial Sequence
  Description of Artificial Sequence: Synthetic oligonucleotide
  Sense strand starting at position 428 of SEQ ID NO: 587870
aacauuaggucggugcaaa

SEQ ID NO: 824599 - RNA, 19 nt, Artificial Sequence
  Description of Artificial Sequence: Synthetic oligonucleotide
  Antisense strand to SEQ ID NO: 824598
uuugcaccgaccuaauguu

SEQ ID NO: 824600 - RNA, 19 nt, Artificial Sequence
  Description of Artificial Sequence: Synthetic oligonucleotide
  Sense strand starting at position 558 of SEQ ID NO: 587870
ugguauggacaguguaacu

SEQ ID NO: 824601 - RNA, 19 nt, Artificial Sequence
  Description of Artificial Sequence: Synthetic oligonucleotide
  Antisense strand to SEQ ID NO: 824600
aguuacacuguccauacca

SEQ ID NO: 824602 - RNA, 19 nt, Artificial Sequence
  Description of Artificial Sequence: Synthetic oligonucleotide
  Sense strand starting at position 718 of SEQ ID NO: 587870
augacagcaguuuguaaau

SEQ ID NO: 824603 - RNA, 19 nt, Artificial Sequence
  Description of Artificial Sequence: Synthetic oligonucleotide
  Antisense strand to SEQ ID NO: 824602
auuuacaaacugcugucau

SEQ ID NO: 824604 - RNA, 19 nt, Artificial Sequence
  Description of Artificial Sequence: Synthetic oligonucleotide
  Sense strand starting at position 749 of SEQ ID NO: 587870
ucagaaauuugagauuacu

SEQ ID NO: 824605 - RNA, 19 nt, Artificial Sequence
  Description of Artificial Sequence: Synthetic oligonucleotide
  Antisense strand to SEQ ID NO: 824604
aguaaucucaaauuucuga

SEQ ID NO: 824606 - RNA, 19 nt, Artificial Sequence
  Description of Artificial Sequence: Synthetic oligonucleotide
  Sense strand starting at position 755 of SEQ ID NO: 587870
auuugagauuacuguacac

SEQ ID NO: 824607 - RNA, 19 nt, Artificial Sequence
  Description of Artificial Sequence: Synthetic oligonucleotide
  Antisense strand to SEQ ID NO: 824606
guguacaguaaucucaaau

SEQ ID NO: 824608 - RNA, 19 nt, Artificial Sequence
  Description of Artificial Sequence: Synthetic oligonucleotide
  Sense strand starting at position 922 of SEQ ID NO: 587870
ugaggagcaucuguuugaa

SEQ ID NO: 824609 - RNA, 19 nt, Artificial Sequence
  Description of Artificial Sequence: Synthetic oligonucleotide
  Antisense strand to SEQ ID NO: 824608
uucaaacagaugcuccuca

SEQ ID NO: 824610 - RNA, 19 nt, Artificial Sequence
  Description of Artificial Sequence: Synthetic oligonucleotide
  Sense strand starting at position 924 of SEQ ID NO: 587870
aggagcaucuguuugaaag

SEQ ID NO: 824611 - RNA, 19 nt, Artificial Sequence
  Description of Artificial Sequence: Synthetic oligonucleotide
  Antisense strand to SEQ ID NO: 824610
cuuucaaacagaugcuccu

SEQ ID NO: 824612 - RNA, 19 nt, Artificial Sequence
  Description of Artificial Sequence: Synthetic oligonucleotide
  Sense strand starting at position 925 of SEQ ID NO: 587870
ggagcaucuguuugaaagg

SEQ ID NO: 824613 - RNA, 19 nt, Artificial Sequence
  Description of Artificial Sequence: Synthetic oligonucleotide
  Antisense strand to SEQ ID NO: 824612
ccuuucaaacagaugcucc

SEQ ID NO: 824614 - RNA, 19 nt, Artificial Sequence
  Description of Artificial Sequence: Synthetic oligonucleotide
  Sense strand starting at position 954 of SEQ ID NO: 587870
acgcuugcugcuucucuaa

SEQ ID NO: 824615 - RNA, 19 nt, Artificial Sequence
  Description of Artificial Sequence: Synthetic oligonucleotide
  Antisense strand to SEQ ID NO: 824614
uuagagaagcagcaagcgu

SEQ ID NO: 824616 - RNA, 19 nt, Artificial Sequence
  Description of Artificial Sequence: Synthetic oligonucleotide
  Sense strand starting at position 966 of SEQ ID NO: 587870
ucucuaagcucccugggaa

SEQ ID NO: 824617 - RNA, 19 nt, Artificial Sequence
  Description of Artificial Sequence: Synthetic oligonucleotide
  Antisense strand to SEQ ID NO: 824616
uucccagggagcuuagaga

SEQ ID NO: 824618 - RNA, 19 nt, Artificial Sequence
  Description of Artificial Sequence: Synthetic oligonucleotide
  Sense strand starting at position 1297 of SEQ ID NO: 587870
cugcuaggagucuagaaac

SEQ ID NO: 824619 - RNA, 19 nt, Artificial Sequence
  Description of Artificial Sequence: Synthetic oligonucleotide
  Antisense strand to SEQ ID NO: 824618
guuucuagacuccuagcag

SEQ ID NO: 824620 - RNA, 19 nt, Artificial Sequence
  Description of Artificial Sequence: Synthetic oligonucleotide
  Sense strand starting at position 1664 of SEQ ID NO: 587870
ugcaaccuccgaggaaauu

SEQ ID NO: 824621 - RNA, 19 nt, Artificial Sequence
  Description of Artificial Sequence: Synthetic oligonucleotide
  Antisense strand to SEQ ID NO: 824620
aauuuccucggagguugca

SEQ ID NO: 824622 - RNA, 19 nt, Artificial Sequence
  Description of Artificial Sequence: Synthetic oligonucleotide
  Sense strand starting at position 2311 of SEQ ID NO: 587870
uguugacauuaaguaaaug

SEQ ID NO: 824623 - RNA, 19 nt, Artificial Sequence
  Description of Artificial Sequence: Synthetic oligonucleotide
  Antisense strand to SEQ ID NO: 824622
cauuuacuuaaugucaaca

SEQ ID NO: 824624 - RNA, 19 nt, Artificial Sequence
  Description of Artificial Sequence: Synthetic oligonucleotide
  Sense strand starting at position 2475 of SEQ ID NO: 587870
aggagucuugaggauugca

SEQ ID NO: 824625 - RNA, 19 nt, Artificial Sequence
  Description of Artificial Sequence: Synthetic oligonucleotide
  Antisense strand to SEQ ID NO: 824624
ugcaauccucaagacuccu

SEQ ID NO: 824626 - RNA, 19 nt, Artificial Sequence
  Description of Artificial Sequence: Synthetic oligonucleotide
  Sense strand starting at position 2478 of SEQ ID NO: 587870
agucuugaggauugcaaca

SEQ ID NO: 824627 - RNA, 19 nt, Artificial Sequence
  Description of Artificial Sequence: Synthetic oligonucleotide
  Antisense strand to SEQ ID NO: 824626
uguugcaauccucaagacu

SEQ ID NO: 824628 - RNA, 19 nt, Artificial Sequence
  Description of Artificial Sequence: Synthetic oligonucleotide
  Sense strand starting at position 2554 of SEQ ID NO: 587870
gaggaaaucuuggaggaaa

SEQ ID NO: 824629 - RNA, 19 nt, Artificial Sequence
  Description of Artificial Sequence: Synthetic oligonucleotide
  Antisense strand to SEQ ID NO: 824628
uuuccuccaagauuuccuc

SEQ ID NO: 824630 - RNA, 19 nt, Artificial Sequence
  Description of Artificial Sequence: Synthetic oligonucleotide
  Sense strand starting at position 2675 of SEQ ID NO: 587870
uguguauugggagagaugu

SEQ ID NO: 824631 - RNA, 19 nt, Artificial Sequence
  Description of Artificial Sequence: Synthetic oligonucleotide
  Antisense strand to SEQ ID NO: 824630
acaucucucccaauacaca

SEQ ID NO: 824632 - RNA, 19 nt, Artificial Sequence
  Description of Artificial Sequence: Synthetic oligonucleotide
  Sense strand starting at position 2840 of SEQ ID NO: 587870
cggcauugucaggaaauaa

SEQ ID NO: 824633 - RNA, 19 nt, Artificial Sequence
  Description of Artificial Sequence: Synthetic oligonucleotide
  Antisense strand to SEQ ID NO: 824632
uuauuuccugacaaugccg

SEQ ID NO: 824634 - RNA, 19 nt, Artificial Sequence
  Description of Artificial Sequence: Synthetic oligonucleotide
  Sense strand starting at position 2862 of SEQ ID NO: 587870
ccagcuauuuaggaacaau

SEQ ID NO: 824635 - RNA, 19 nt, Artificial Sequence
  Description of Artificial Sequence: Synthetic oligonucleotide
  Antisense strand to SEQ ID NO: 824634
auuguuccuaaauagcugg

SEQ ID NO: 824636 - RNA, 19 nt, Artificial Sequence
  Description of Artificial Sequence: Synthetic oligonucleotide
  Sense strand starting at position 2992 of SEQ ID NO: 587870
cugcuaugacgaggucaga

SEQ ID NO: 824637 - RNA, 19 nt, Artificial Sequence
  Description of Artificial Sequence: Synthetic oligonucleotide
  Antisense strand to SEQ ID NO: 824636
ucugaccucgucauagcag

SEQ ID NO: 824638 - RNA, 19 nt, Artificial Sequence
  Description of Artificial Sequence: Synthetic oligonucleotide
  Sense strand starting at position 3030 of SEQ ID NO: 587870
ggaugcaucaguugaacca

SEQ ID NO: 824639 - RNA, 19 nt, Artificial Sequence
  Description of Artificial Sequence: Synthetic oligonucleotide
  Antisense strand to SEQ ID NO: 824638
ugguucaacugaugcaucc

SEQ ID NO: 824640 - RNA, 19 nt, Artificial Sequence
  Description of Artificial Sequence: Synthetic oligonucleotide
  Sense strand starting at position 3031 of SEQ ID NO: 587870
gaugcaucaguugaaccau

SEQ ID NO: 824641 - RNA, 19 nt, Artificial Sequence
  Description of Artificial Sequence: Synthetic oligonucleotide
  Antisense strand to SEQ ID NO: 824640
augguucaacugaugcauc

SEQ ID NO: 824642 - RNA, 19 nt, Artificial Sequence
  Description of Artificial Sequence: Synthetic oligonucleotide
  Sense strand starting at position 3051 of SEQ ID NO: 587870
cagggugguuuaucaguua

SEQ ID NO: 824643 - RNA, 19 nt, Artificial Sequence
  Description of Artificial Sequence: Synthetic oligonucleotide
  Antisense strand to SEQ ID NO: 824642
uaacugauaaaccacccug

SEQ ID NO: 824644 - RNA, 19 nt, Artificial Sequence
  Description of Artificial Sequence: Synthetic oligonucleotide
  Sense strand starting at position 3054 of SEQ ID NO: 587870
ggugguuuaucaguuagga

SEQ ID NO: 824645 - RNA, 19 nt, Artificial Sequence
  Description of Artificial Sequence: Synthetic oligonucleotide
  Antisense strand to SEQ ID NO: 824644
uccuaacugauaaaccacc

SEQ ID NO: 824646 - RNA, 19 nt, Artificial Sequence
  Description of Artificial Sequence: Synthetic oligonucleotide
  Sense strand starting at position 3218 of SEQ ID NO: 587870
cucgguaaguugucaagag

SEQ ID NO: 824647 - RNA, 19 nt, Artificial Sequence
  Description of Artificial Sequence: Synthetic oligonucleotide
  Antisense strand to SEQ ID NO: 824646
cucuugacaacuuaccgag

SEQ ID NO: 824648 - RNA, 19 nt, Artificial Sequence
  Description of Artificial Sequence: Synthetic oligonucleotide
  Sense strand starting at position 3222 of SEQ ID NO: 587870
guaaguugucaagaggguu

SEQ ID NO: 824649 - RNA, 19 nt, Artificial Sequence
  Description of Artificial Sequence: Synthetic oligonucleotide
  Antisense strand to SEQ ID NO: 824648
aacccucuugacaacuuac

SEQ ID NO: 824650 - RNA, 19 nt, Artificial Sequence
  Description of Artificial Sequence: Synthetic oligonucleotide
  Sense strand starting at position 3225 of SEQ ID NO: 587870
aguugucaagaggguuaaa

SEQ ID NO: 824651 - RNA, 19 nt, Artificial Sequence
  Description of Artificial Sequence: Synthetic oligonucleotide
  Antisense strand to SEQ ID NO: 824650
uuuaacccucuugacaacu

SEQ ID NO: 824652 - RNA, 19 nt, Artificial Sequence
  Description of Artificial Sequence: Synthetic oligonucleotide
  Sense strand starting at position 3237 of SEQ ID NO: 587870
gguuaaaugagaugcuaca

SEQ ID NO: 824653 - RNA, 19 nt, Artificial Sequence
  Description of Artificial Sequence: Synthetic oligonucleotide
  Antisense strand to SEQ ID NO: 824652
uguagcaucucauuuaacc

SEQ ID NO: 824654 - RNA, 19 nt, Artificial Sequence
  Description of Artificial Sequence: Synthetic oligonucleotide
  Sense strand starting at position 3268 of SEQ ID NO: 587870
agaagagcucuuggcaugu

SEQ ID NO: 824655 - RNA, 19 nt, Artificial Sequence
  Description of Artificial Sequence: Synthetic oligonucleotide
  Antisense strand to SEQ ID NO: 824654
acaugccaagagcucuucu

SEQ ID NO: 824656 - RNA, 19 nt, Artificial Sequence
  Description of Artificial Sequence: Synthetic oligonucleotide
  Sense strand starting at position 3284 of SEQ ID NO: 587870
uguggugaguguucaaaca

SEQ ID NO: 824657 - RNA, 19 nt, Artificial Sequence
  Description of Artificial Sequence: Synthetic oligonucleotide
  Antisense strand to SEQ ID NO: 824656
uguuugaacacucaccaca

SEQ ID NO: 824658 - RNA, 19 nt, Artificial Sequence
  Description of Artificial Sequence: Synthetic oligonucleotide
  Sense strand starting at position 3407 of SEQ ID NO: 587870
agucauucccagggauccu

SEQ ID NO: 824659 - RNA, 19 nt, Artificial Sequence
  Description of Artificial Sequence: Synthetic oligonucleotide
  Antisense strand to SEQ ID NO: 824658
aggaucccugggaaugacu

SEQ ID NO: 824660 - RNA, 19 nt, Artificial Sequence
  Description of Artificial Sequence: Synthetic oligonucleotide
  Sense strand starting at position 3475 of SEQ ID NO: 587870
guugguaugcuugaccaau

SEQ ID NO: 824661 - RNA, 19 nt, Artificial Sequence
  Description of Artificial Sequence: Synthetic oligonucleotide
  Antisense strand to SEQ ID NO: 824660
auuggucaagcauaccaac

SEQ ID NO: 824662 - RNA, 19 nt, Artificial Sequence
  Description of Artificial Sequence: Synthetic oligonucleotide
  Sense strand starting at position 3506 of SEQ ID NO: 587870
aagugaugauggucugcca

SEQ ID NO: 824663 - RNA, 19 nt, Artificial Sequence
  Description of Artificial Sequence: Synthetic oligonucleotide
  Antisense strand to SEQ ID NO: 824662
uggcagaccaucaucacuu

SEQ ID NO: 824664 - RNA, 19 nt, Artificial Sequence
  Description of Artificial Sequence: Synthetic oligonucleotide
  Sense strand starting at position 3509 of SEQ ID NO: 587870
ugaugauggucugccacuu

SEQ ID NO: 824665 - RNA, 19 nt, Artificial Sequence
  Description of Artificial Sequence: Synthetic oligonucleotide
  Antisense strand to SEQ ID NO: 824664
aaguggcagaccaucauca

SEQ ID NO: 824666 - RNA, 19 nt, Artificial Sequence
  Description of Artificial Sequence: Synthetic oligonucleotide
  Sense strand starting at position 3552 of SEQ ID NO: 587870
uggugcuucuaucuugaaa

SEQ ID NO: 824667 - RNA, 19 nt, Artificial Sequence
  Description of Artificial Sequence: Synthetic oligonucleotide
  Antisense strand to SEQ ID NO: 824666
uuucaagauagaagcacca

SEQ ID NO: 824668 - RNA, 19 nt, Artificial Sequence
  Description of Artificial Sequence: Synthetic oligonucleotide
  Sense strand starting at position 3828 of SEQ ID NO: 587870
auuggcauggucuggaaga

SEQ ID NO: 824669 - RNA, 19 nt, Artificial Sequence
  Description of Artificial Sequence: Synthetic oligonucleotide
  Antisense strand to SEQ ID NO: 824668
ucuuccagaccaugccaau

SEQ ID NO: 824670 - RNA, 19 nt, Artificial Sequence
  Description of Artificial Sequence: Synthetic oligonucleotide
  Sense strand starting at position 405 of SEQ ID NO: 587871
acugcagaacucugucuua

SEQ ID NO: 824671 - RNA, 19 nt, Artificial Sequence
  Description of Artificial Sequence: Synthetic oligonucleotide
  Antisense strand to SEQ ID NO: 824670
uaagacagaguucugcagu

SEQ ID NO: 824672 - RNA, 19 nt, Artificial Sequence
  Description of Artificial Sequence: Synthetic oligonucleotide
  Sense strand starting at position 408 of SEQ ID NO: 587871
gcagaacucugucuuaagc

SEQ ID NO: 824673 - RNA, 19 nt, Artificial Sequence
  Description of Artificial Sequence: Synthetic oligonucleotide
  Antisense strand to SEQ ID NO: 824672
gcuuaagacagaguucugc

SEQ ID NO: 824674 - RNA, 19 nt, Artificial Sequence
  Description of Artificial Sequence: Synthetic oligonucleotide
  Sense strand starting at position 416 of SEQ ID NO: 587871
cugucuuaagcaggaggua

SEQ ID NO: 824675 - RNA, 19 nt, Artificial Sequence
  Description of Artificial Sequence: Synthetic oligonucleotide
  Antisense strand to SEQ ID NO: 824674
uaccuccugcuuaagacag

SEQ ID NO: 824676 - RNA, 19 nt, Artificial Sequence
  Description of Artificial Sequence: Synthetic oligonucleotide
  Sense strand starting at position 417 of SEQ ID NO: 587871
ugucuuaagcaggagguau

SEQ ID NO: 824677 - RNA, 19 nt, Artificial Sequence
  Description of Artificial Sequence: Synthetic oligonucleotide
  Antisense strand to SEQ ID NO: 824676
auaccuccugcuuaagaca

SEQ ID NO: 824678 - RNA, 19 nt, Artificial Sequence
  Description of Artificial Sequence: Synthetic oligonucleotide
  Sense strand starting at position 425 of SEQ ID NO: 587871
gcaggagguaucugagucu

SEQ ID NO: 824679 - RNA, 19 nt, Artificial Sequence
  Description of Artificial Sequence: Synthetic oligonucleotide
  Antisense strand to SEQ ID NO: 824678
agacucagauaccuccugc

SEQ ID NO: 824680 - RNA, 19 nt, Artificial Sequence
  Description of Artificial Sequence: Synthetic oligonucleotide
  Sense strand starting at position 428 of SEQ ID NO: 587871
ggagguaucugagucuguc

SEQ ID NO: 824681 - RNA, 19 nt, Artificial Sequence
  Description of Artificial Sequence: Synthetic oligonucleotide
  Antisense strand to SEQ ID NO: 824680
gacagacucagauaccucc

SEQ ID NO: 824682 - RNA, 19 nt, Artificial Sequence
  Description of Artificial Sequence: Synthetic oligonucleotide
  Sense strand starting at position 479 of SEQ ID NO: 587871
uugggaugaugucuucuca

SEQ ID NO: 824683 - RNA, 19 nt, Artificial Sequence
  Description of Artificial Sequence: Synthetic oligonucleotide
  Antisense strand to SEQ ID NO: 824682
ugagaagacaucaucccaa

SEQ ID NO: 824684 - RNA, 19 nt, Artificial Sequence
  Description of Artificial Sequence: Synthetic oligonucleotide
  Sense strand starting at position 543 of SEQ ID NO: 587871
cauccuuccugaggguuaa

SEQ ID NO: 824685 - RNA, 19 nt, Artificial Sequence
  Description of Artificial Sequence: Synthetic oligonucleotide
  Antisense strand to SEQ ID NO: 824684
uuaacccucaggaaggaug

SEQ ID NO: 824686 - RNA, 19 nt, Artificial Sequence
  Description of Artificial Sequence: Synthetic oligonucleotide
  Sense strand starting at position 778 of SEQ ID NO: 587871
uccaaauuguaauuguauc

SEQ ID NO: 824687 - RNA, 19 nt, Artificial Sequence
  Description of Artificial Sequence: Synthetic oligonucleotide
  Antisense strand to SEQ ID NO: 824686
gauacaauuacaauuugga

SEQ ID NO: 824688 - RNA, 19 nt, Artificial Sequence
  Description of Artificial Sequence: Synthetic oligonucleotide
  Sense strand starting at position 784 of SEQ ID NO: 587871
uuguaauuguauccauuac

SEQ ID NO: 824689 - RNA, 19 nt, Artificial Sequence
  Description of Artificial Sequence: Synthetic oligonucleotide
  Antisense strand to SEQ ID NO: 824688
guaauggauacaauuacaa

SEQ ID NO: 824690 - RNA, 19 nt, Artificial Sequence
  Description of Artificial Sequence: Synthetic oligonucleotide
  Sense strand starting at position 861 of SEQ ID NO: 587871
ugagcuuccugaggguuga

SEQ ID NO: 824691 - RNA, 19 nt, Artificial Sequence
  Description of Artificial Sequence: Synthetic oligonucleotide
  Antisense strand to SEQ ID NO: 824690
ucaacccucaggaagcuca

SEQ ID NO: 824692 - RNA, 19 nt, Artificial Sequence
  Description of Artificial Sequence: Synthetic oligonucleotide
  Sense strand starting at position 865 of SEQ ID NO: 587871
cuuccugaggguugaggaa

SEQ ID NO: 824693 - RNA, 19 nt, Artificial Sequence
  Description of Artificial Sequence: Synthetic oligonucleotide
  Antisense strand to SEQ ID NO: 824692
uuccucaacccucaggaag

SEQ ID NO: 824694 - RNA, 19 nt, Artificial Sequence
  Description of Artificial Sequence: Synthetic oligonucleotide
  Sense strand starting at position 1096 of SEQ ID NO: 587871
cuguacgccuaucaucaaa

SEQ ID NO: 824695 - RNA, 19 nt, Artificial Sequence
  Description of Artificial Sequence: Synthetic oligonucleotide
  Antisense strand to SEQ ID NO: 824694
uuugaugauaggcguacag

SEQ ID NO: 824696 - RNA, 19 nt, Artificial Sequence
  Description of Artificial Sequence: Synthetic oligonucleotide
  Sense strand starting at position 1118 of SEQ ID NO: 587871
ucacaauagcccuguaaag

SEQ ID NO: 824697 - RNA, 19 nt, Artificial Sequence
  Description of Artificial Sequence: Synthetic oligonucleotide
  Antisense strand to SEQ ID NO: 824696
cuuuacagggcuauuguga

SEQ ID NO: 824698 - RNA, 19 nt, Artificial Sequence
  Description of Artificial Sequence: Synthetic oligonucleotide
  Sense strand starting at position 1120 of SEQ ID NO: 587871
acaauagcccuguaaagua

SEQ ID NO: 824699 - RNA, 19 nt, Artificial Sequence
  Description of Artificial Sequence: Synthetic oligonucleotide
  Antisense strand to SEQ ID NO: 824698
uacuuuacagggcuauugu

SEQ ID NO: 824700 - RNA, 19 nt, Artificial Sequence
  Description of Artificial Sequence: Synthetic oligonucleotide
  Sense strand starting at position 1684 of SEQ ID NO: 587871
gcuggcuuugcccacaaau

SEQ ID NO: 824701 - RNA, 19 nt, Artificial Sequence
  Description of Artificial Sequence: Synthetic oligonucleotide
  Antisense strand to SEQ ID NO: 824700
auuugugggcaaagccagc

SEQ ID NO: 824702 - RNA, 19 nt, Artificial Sequence
  Description of Artificial Sequence: Synthetic oligonucleotide
  Sense strand starting at position 1784 of SEQ ID NO: 587871
ucacguuagagcuggucuu

SEQ ID NO: 824703 - RNA, 19 nt, Artificial Sequence
  Description of Artificial Sequence: Synthetic oligonucleotide
  Antisense strand to SEQ ID NO: 824702
aagaccagcucuaacguga

SEQ ID NO: 824704 - RNA, 19 nt, Artificial Sequence
  Description of Artificial Sequence: Synthetic oligonucleotide
  Sense strand starting at position 1785 of SEQ ID NO: 587871
cacguuagagcuggucuuu

SEQ ID NO: 824705 - RNA, 19 nt, Artificial Sequence
  Description of Artificial Sequence: Synthetic oligonucleotide
  Antisense strand to SEQ ID NO: 824704
aaagaccagcucuaacgug

SEQ ID NO: 824706 - RNA, 19 nt, Artificial Sequence
  Description of Artificial Sequence: Synthetic oligonucleotide
  Sense strand starting at position 2096 of SEQ ID NO: 587871
gcggguuaguacgacgaga

SEQ ID NO: 824707 - RNA, 19 nt, Artificial Sequence
  Description of Artificial Sequence: Synthetic oligonucleotide
  Antisense strand to SEQ ID NO: 824706
ucucgucguacuaacccgc

SEQ ID NO: 824708 - RNA, 19 nt, Artificial Sequence
  Description of Artificial Sequence: Synthetic oligonucleotide
  Sense strand starting at position 2098 of SEQ ID NO: 587871
ggguuaguacgacgagaag

SEQ ID NO: 824709 - RNA, 19 nt, Artificial Sequence
  Description of Artificial Sequence: Synthetic oligonucleotide
  Antisense strand to SEQ ID NO: 824708
cuucucgucguacuaaccc

SEQ ID NO: 824710 - RNA, 19 nt, Artificial Sequence
  Description of Artificial Sequence: Synthetic oligonucleotide
  Sense strand starting at position 2099 of SEQ ID NO: 587871
gguuaguacgacgagaaga

SEQ ID NO: 824711 - RNA, 19 nt, Artificial Sequence
  Description of Artificial Sequence: Synthetic oligonucleotide
  Antisense strand to SEQ ID NO: 824710
ucuucucgucguacuaacc

SEQ ID NO: 824712 - RNA, 19 nt, Artificial Sequence
  Description of Artificial Sequence: Synthetic oligonucleotide
  Sense strand starting at position 2699 of SEQ ID NO: 587871
ccuccugggauuuguaguu

SEQ ID NO: 824713 - RNA, 19 nt, Artificial Sequence
  Description of Artificial Sequence: Synthetic oligonucleotide
  Antisense strand to SEQ ID NO: 824712
aacuacaaaucccaggagg

SEQ ID NO: 824714 - RNA, 19 nt, Artificial Sequence
  Description of Artificial Sequence: Synthetic oligonucleotide
  Sense strand starting at position 2803 of SEQ ID NO: 587871
cuccuaggcgucuggagaa

SEQ ID NO: 824715 - RNA, 19 nt, Artificial Sequence
  Description of Artificial Sequence: Synthetic oligonucleotide
  Antisense strand to SEQ ID NO: 824714
uucuccagacgccuaggag

SEQ ID NO: 824716 - RNA, 19 nt, Artificial Sequence
  Description of Artificial Sequence: Synthetic oligonucleotide
  Sense strand starting at position 2844 of SEQ ID NO: 587871
aguggaggaaccuguaguu

SEQ ID NO: 824717 - RNA, 19 nt, Artificial Sequence
  Description of Artificial Sequence: Synthetic oligonucleotide
  Antisense strand to SEQ ID NO: 824716
aacuacagguuccuccacu

SEQ ID NO: 824718 - RNA, 19 nt, Artificial Sequence
  Description of Artificial Sequence: Synthetic oligonucleotide
  Sense strand starting at position 3008 of SEQ ID NO: 587871
gcaggagucacgucccguu

SEQ ID NO: 824719 - RNA, 19 nt, Artificial Sequence
  Description of Artificial Sequence: Synthetic oligonucleotide
  Antisense strand to SEQ ID NO: 824718
aacgggacgugacuccugc

SEQ ID NO: 824720 - RNA, 19 nt, Artificial Sequence
  Description of Artificial Sequence: Synthetic oligonucleotide
  Sense strand starting at position 3091 of SEQ ID NO: 587871
ugggaauguugagcaacaa

SEQ ID NO: 824721 - RNA, 19 nt, Artificial Sequence
  Description of Artificial Sequence: Synthetic oligonucleotide
  Antisense strand to SEQ ID NO: 824720
uuguugcucaacauuccca

SEQ ID NO: 824722 - RNA, 19 nt, Artificial Sequence
  Description of Artificial Sequence: Synthetic oligonucleotide
  Sense strand starting at position 3148 of SEQ ID NO: 587871
ggucuagucuagucccaga

SEQ ID NO: 824723 - RNA, 19 nt, Artificial Sequence
  Description of Artificial Sequence: Synthetic oligonucleotide
  Antisense strand to SEQ ID NO: 824722
ucugggacuagacuagacc

SEQ ID NO: 824724 - RNA, 19 nt, Artificial Sequence
  Description of Artificial Sequence: Synthetic oligonucleotide
  Sense strand starting at position 3151 of SEQ ID NO: 587871
cuagucuagucccagaacu

SEQ ID NO: 824725 - RNA, 19 nt, Artificial Sequence
  Description of Artificial Sequence: Synthetic oligonucleotide
  Antisense strand to SEQ ID NO: 824724
aguucugggacuagacuag

SEQ ID NO: 824726 - RNA, 19 nt, Artificial Sequence
  Description of Artificial Sequence: Synthetic oligonucleotide
  Sense strand starting at position 3161 of SEQ ID NO: 587871
cccagaacucgcguguucu

SEQ ID NO: 824727 - RNA, 19 nt, Artificial Sequence
  Description of Artificial Sequence: Synthetic oligonucleotide
  Antisense strand to SEQ ID NO: 824726
agaacacgcgaguucuggg

SEQ ID NO: 824728 - RNA, 19 nt, Artificial Sequence
  Description of Artificial Sequence: Synthetic oligonucleotide
  Sense strand starting at position 3162 of SEQ ID NO: 587871
ccagaacucgcguguucug

SEQ ID NO: 824729 - RNA, 19 nt, Artificial Sequence
  Description of Artificial Sequence: Synthetic oligonucleotide
  Antisense strand to SEQ ID NO: 824728
cagaacacgcgaguucugg

SEQ ID NO: 824730 - RNA, 19 nt, Artificial Sequence
  Description of Artificial Sequence: Synthetic oligonucleotide
  Sense strand starting at position 3368 of SEQ ID NO: 587871
gauagauacccauggucug

SEQ ID NO: 824731 - RNA, 19 nt, Artificial Sequence
  Description of Artificial Sequence: Synthetic oligonucleotide
  Antisense strand to SEQ ID NO: 824730
cagaccauggguaucuauc

SEQ ID NO: 824732 - RNA, 19 nt, Artificial Sequence
  Description of Artificial Sequence: Synthetic oligonucleotide
  Sense strand starting at position 3596 of SEQ ID NO: 587871
ggaagcaugcuucaugguu

SEQ ID NO: 824733 - RNA, 19 nt, Artificial Sequence
  Description of Artificial Sequence: Synthetic oligonucleotide
  Antisense strand to SEQ ID NO: 824732
aaccaugaagcaugcuucc

SEQ ID NO: 824734 - RNA, 19 nt, Artificial Sequence
  Description of Artificial Sequence: Synthetic oligonucleotide
  Sense strand starting at position 3821 of SEQ ID NO: 587871
augguucugucugugcaga

SEQ ID NO: 824735 - RNA, 19 nt, Artificial Sequence
  Description of Artificial Sequence: Synthetic oligonucleotide
  Antisense strand to SEQ ID NO: 824734
ucugcacagacagaaccau

SEQ ID NO: 824736 - RNA, 19 nt, Artificial Sequence
  Description of Artificial Sequence: Synthetic oligonucleotide
  Sense strand starting at position 3823 of SEQ ID NO: 587871
gguucugucugugcagacu

SEQ ID NO: 824737 - RNA, 19 nt, Artificial Sequence
  Description of Artificial Sequence: Synthetic oligonucleotide
  Antisense strand to SEQ ID NO: 824736
agucugcacagacagaacc

SEQ ID NO: 824738 - RNA, 19 nt, Artificial Sequence
  Description of Artificial Sequence: Synthetic oligonucleotide
  Sense strand starting at position 45 of SEQ ID NO: 587872
ccauuacccuaucugugau

SEQ ID NO: 824739 - RNA, 19 nt, Artificial Sequence
  Description of Artificial Sequence: Synthetic oligonucleotide
  Antisense strand to SEQ ID NO: 824738
aucacagauaggguaaugg

SEQ ID NO: 824740 - RNA, 19 nt, Artificial Sequence
  Description of Artificial Sequence: Synthetic oligonucleotide
  Sense strand starting at position 183 of SEQ ID NO: 587872
aguggaaacugaguuauga

SEQ ID NO: 824741 - RNA, 19 nt, Artificial Sequence
  Description of Artificial Sequence: Synthetic oligonucleotide
  Antisense strand to SEQ ID NO: 824740
ucauaacucaguuuccacu

SEQ ID NO: 824742 - RNA, 19 nt, Artificial Sequence
  Description of Artificial Sequence: Synthetic oligonucleotide
  Sense strand starting at position 192 of SEQ ID NO: 587872
ugaguuaugagcuaugcuc

SEQ ID NO: 824743 - RNA, 19 nt, Artificial Sequence
  Description of Artificial Sequence: Synthetic oligonucleotide
  Antisense strand to SEQ ID NO: 824742
gagcauagcucauaacuca

SEQ ID NO: 824744 - RNA, 19 nt, Artificial Sequence
  Description of Artificial Sequence: Synthetic oligonucleotide
  Sense strand starting at position 228 of SEQ ID NO: 587872
aggaaacuccucuggacuu

SEQ ID NO: 824745 - RNA, 19 nt, Artificial Sequence
  Description of Artificial Sequence: Synthetic oligonucleotide
  Antisense strand to SEQ ID NO: 824744
aaguccagaggaguuuccu

SEQ ID NO: 824746 - RNA, 19 nt, Artificial Sequence
  Description of Artificial Sequence: Synthetic oligonucleotide
  Sense strand starting at position 638 of SEQ ID NO: 587872
agggcuugcagucagauga

SEQ ID NO: 824747 - RNA, 19 nt, Artificial Sequence
  Description of Artificial Sequence: Synthetic oligonucleotide
  Antisense strand to SEQ ID NO: 824746
ucaucugacugcaagcccu

SEQ ID NO: 824748 - RNA, 19 nt, Artificial Sequence
  Description of Artificial Sequence: Synthetic oligonucleotide
  Sense strand starting at position 1057 of SEQ ID NO: 587872
aagauuaguguccaaagcu

SEQ ID NO: 824749 - RNA, 19 nt, Artificial Sequence
  Description of Artificial Sequence: Synthetic oligonucleotide
  Antisense strand to SEQ ID NO: 824748
agcuuuggacacuaaucuu

SEQ ID NO: 824750 - RNA, 19 nt, Artificial Sequence
  Description of Artificial Sequence: Synthetic oligonucleotide
  Sense strand starting at position 1517 of SEQ ID NO: 587872
cuccauucgcagcaaauga

SEQ ID NO: 824751 - RNA, 19 nt, Artificial Sequence
  Description of Artificial Sequence: Synthetic oligonucleotide
  Antisense strand to SEQ ID NO: 824750
ucauuugcugcgaauggag

SEQ ID NO: 824752 - RNA, 19 nt, Artificial Sequence
  Description of Artificial Sequence: Synthetic oligonucleotide
  Sense strand starting at position 1613 of SEQ ID NO: 587872
cuuucuuucuaacugguga

SEQ ID NO: 824753 - RNA, 19 nt, Artificial Sequence
  Description of Artificial Sequence: Synthetic oligonucleotide
  Antisense strand to SEQ ID NO: 824752
ucaccaguuagaaagaaag

SEQ ID NO: 824754 - RNA, 19 nt, Artificial Sequence
  Description of Artificial Sequence: Synthetic oligonucleotide
  Sense strand starting at position 1929 of SEQ ID NO: 587872
ccagucuuuggugacagau

SEQ ID NO: 824755 - RNA, 19 nt, Artificial Sequence
  Description of Artificial Sequence: Synthetic oligonucleotide
  Antisense strand to SEQ ID NO: 824754
aucugucaccaaagacugg

SEQ ID NO: 824756 - RNA, 19 nt, Artificial Sequence
  Description of Artificial Sequence: Synthetic oligonucleotide
  Sense strand starting at position 1946 of SEQ ID NO: 587872
auuauaguaagaggaguau

SEQ ID NO: 824757 - RNA, 19 nt, Artificial Sequence
  Description of Artificial Sequence: Synthetic oligonucleotide
  Antisense strand to SEQ ID NO: 824756
auacuccucuuacuauaau

SEQ ID NO: 824758 - RNA, 19 nt, Artificial Sequence
  Description of Artificial Sequence: Synthetic oligonucleotide
  Sense strand starting at position 2125 of SEQ ID NO: 587872
guaggagaguugcugaacu

SEQ ID NO: 824759 - RNA, 19 nt, Artificial Sequence
  Description of Artificial Sequence: Synthetic oligonucleotide
  Antisense strand to SEQ ID NO: 824758
aguucagcaacucuccuac

SEQ ID NO: 824760 - RNA, 19 nt, Artificial Sequence
  Description of Artificial Sequence: Synthetic oligonucleotide
  Sense strand starting at position 2199 of SEQ ID NO: 587872
cugucucuugcaguguuau

SEQ ID NO: 824761 - RNA, 19 nt, Artificial Sequence
  Description of Artificial Sequence: Synthetic oligonucleotide
  Antisense strand to SEQ ID NO: 824760
auaacacugcaagagacag

SEQ ID NO: 824762 - RNA, 19 nt, Artificial Sequence
  Description of Artificial Sequence: Synthetic oligonucleotide
  Sense strand starting at position 2212 of SEQ ID NO: 587872
uguuauaagaagcgaaaga

SEQ ID NO: 824763 - RNA, 19 nt, Artificial Sequence
  Description of Artificial Sequence: Synthetic oligonucleotide
  Antisense strand to SEQ ID NO: 824762
ucuuucgcuucuuauaaca

SEQ ID NO: 824764 - RNA, 19 nt, Artificial Sequence
  Description of Artificial Sequence: Synthetic oligonucleotide
  Sense strand starting at position 2262 of SEQ ID NO: 587872
gucucauggcucuaggaug

SEQ ID NO: 824765 - RNA, 19 nt, Artificial Sequence
  Description of Artificial Sequence: Synthetic oligonucleotide
  Antisense strand to SEQ ID NO: 824764
cauccuagagccaugagac

SEQ ID NO: 824766 - RNA, 19 nt, Artificial Sequence
  Description of Artificial Sequence: Synthetic oligonucleotide
  Sense strand starting at position 2383 of SEQ ID NO: 587872
gugagcugggauuaugguu

SEQ ID NO: 824767 - RNA, 19 nt, Artificial Sequence
  Description of Artificial Sequence: Synthetic oligonucleotide
  Antisense strand to SEQ ID NO: 824766
aaccauaaucccagcucac

SEQ ID NO: 824768 - RNA, 19 nt, Artificial Sequence
  Description of Artificial Sequence: Synthetic oligonucleotide
  Sense strand starting at position 2388 of SEQ ID NO: 587872
cugggauuaugguucagag

SEQ ID NO: 824769 - RNA, 19 nt, Artificial Sequence
  Description of Artificial Sequence: Synthetic oligonucleotide
  Antisense strand to SEQ ID NO: 824768
cucugaaccauaaucccag

SEQ ID NO: 824770 - RNA, 19 nt, Artificial Sequence
  Description of Artificial Sequence: Synthetic oligonucleotide
  Sense strand starting at position 2475 of SEQ ID NO: 587872
uuguuauaaggaugaaugu

SEQ ID NO: 824771 - RNA, 19 nt, Artificial Sequence
  Description of Artificial Sequence: Synthetic oligonucleotide
  Antisense strand to SEQ ID NO: 824770
acauucauccuuauaacaa

SEQ ID NO: 824772 - RNA, 19 nt, Artificial Sequence
  Description of Artificial Sequence: Synthetic oligonucleotide
  Sense strand starting at position 2622 of SEQ ID NO: 587872
cugugcuugauggagaagu

SEQ ID NO: 824773 - RNA, 19 nt, Artificial Sequence
  Description of Artificial Sequence: Synthetic oligonucleotide
  Antisense strand to SEQ ID NO: 824772
acuucuccaucaagcacag

SEQ ID NO: 824774 - RNA, 19 nt, Artificial Sequence
  Description of Artificial Sequence: Synthetic oligonucleotide
  Sense strand starting at position 2624 of SEQ ID NO: 587872
gugcuugauggagaaguaa

SEQ ID NO: 824775 - RNA, 19 nt, Artificial Sequence
  Description of Artificial Sequence: Synthetic oligonucleotide
  Antisense strand to SEQ ID NO: 824774
uuacuucuccaucaagcac

SEQ ID NO: 824776 - RNA, 19 nt, Artificial Sequence
  Description of Artificial Sequence: Synthetic oligonucleotide
  Sense strand starting at position 2670 of SEQ ID NO: 587872
cagugaagucaggagucau

SEQ ID NO: 824777 - RNA, 19 nt, Artificial Sequence
  Description of Artificial Sequence: Synthetic oligonucleotide
  Antisense strand to SEQ ID NO: 824776
augacuccugacuucacug

SEQ ID NO: 824778 - RNA, 19 nt, Artificial Sequence
  Description of Artificial Sequence: Synthetic oligonucleotide
  Sense strand starting at position 2870 of SEQ ID NO: 587872
uuagaaaugcccugaagaa

SEQ ID NO: 824779 - RNA, 19 nt, Artificial Sequence
  Description of Artificial Sequence: Synthetic oligonucleotide
  Antisense strand to SEQ ID NO: 824778
uucuucagggcauuucuaa

SEQ ID NO: 824780 - RNA, 19 nt, Artificial Sequence
  Description of Artificial Sequence: Synthetic oligonucleotide
  Sense strand starting at position 3085 of SEQ ID NO: 587872
aggucagugcuaggagauc

SEQ ID NO: 824781 - RNA, 19 nt, Artificial Sequence
  Description of Artificial Sequence: Synthetic oligonucleotide
  Antisense strand to SEQ ID NO: 824780
gaucuccuagcacugaccu

SEQ ID NO: 824782 - RNA, 19 nt, Artificial Sequence
  Description of Artificial Sequence: Synthetic oligonucleotide
  Sense strand starting at position 3248 of SEQ ID NO: 587872
ugauuauauugauccacug

SEQ ID NO: 824783 - RNA, 19 nt, Artificial Sequence
  Description of Artificial Sequence: Synthetic oligonucleotide
  Antisense strand to SEQ ID NO: 824782
caguggaucaauauaauca

SEQ ID NO: 824784 - RNA, 19 nt, Artificial Sequence
  Description of Artificial Sequence: Synthetic oligonucleotide
  Sense strand starting at position 3305 of SEQ ID NO: 587872
ugacuaaggagauguguga

SEQ ID NO: 824785 - RNA, 19 nt, Artificial Sequence
  Description of Artificial Sequence: Synthetic oligonucleotide
  Antisense strand to SEQ ID NO: 824784
ucacacaucuccuuaguca

SEQ ID NO: 824786 - RNA, 19 nt, Artificial Sequence
  Description of Artificial Sequence: Synthetic oligonucleotide
  Sense strand starting at position 3312 of SEQ ID NO: 587872
ggagaugugugacccagga

SEQ ID NO: 824787 - RNA, 19 nt, Artificial Sequence
  Description of Artificial Sequence: Synthetic oligonucleotide
  Antisense strand to SEQ ID NO: 824786
uccugggucacacaucucc

SEQ ID NO: 824788 - RNA, 19 nt, Artificial Sequence
  Description of Artificial Sequence: Synthetic oligonucleotide
  Sense strand starting at position 3316 of SEQ ID NO: 587872
augugugacccaggaagua

SEQ ID NO: 824789 - RNA, 19 nt, Artificial Sequence
  Description of Artificial Sequence: Synthetic oligonucleotide
  Antisense strand to SEQ ID NO: 824788
uacuuccugggucacacau

SEQ ID NO: 824790 - RNA, 19 nt, Artificial Sequence
  Description of Artificial Sequence: Synthetic oligonucleotide
  Sense strand starting at position 3336 of SEQ ID NO: 587872
agaucagauugggcucuau

SEQ ID NO: 824791 - RNA, 19 nt, Artificial Sequence
  Description of Artificial Sequence: Synthetic oligonucleotide
  Antisense strand to SEQ ID NO: 824790
auagagcccaaucugaucu

SEQ ID NO: 824792 - RNA, 19 nt, Artificial Sequence
  Description of Artificial Sequence: Synthetic oligonucleotide
  Sense strand starting at position 3371 of SEQ ID NO: 587872
uugagcuaguaacuuaaau

SEQ ID NO: 824793 - RNA, 19 nt, Artificial Sequence
  Description of Artificial Sequence: Synthetic oligonucleotide
  Antisense strand to SEQ ID NO: 824792
auuuaaguuacuagcucaa

SEQ ID NO: 824794 - RNA, 19 nt, Artificial Sequence
  Description of Artificial Sequence: Synthetic oligonucleotide
  Sense strand starting at position 3396 of SEQ ID NO: 587872
ugcagacauggucacagua

SEQ ID NO: 824795 - RNA, 19 nt, Artificial Sequence
  Description of Artificial Sequence: Synthetic oligonucleotide
  Antisense strand to SEQ ID NO: 824794
uacugugaccaugucugca

SEQ ID NO: 824796 - RNA, 19 nt, Artificial Sequence
  Description of Artificial Sequence: Synthetic oligonucleotide
  Sense strand starting at position 3420 of SEQ ID NO: 587872
ugaucagauuugggauaua

SEQ ID NO: 824797 - RNA, 19 nt, Artificial Sequence
  Description of Artificial Sequence: Synthetic oligonucleotide
  Antisense strand to SEQ ID NO: 824796
uauaucccaaaucugauca

SEQ ID NO: 824798 - RNA, 19 nt, Artificial Sequence
  Description of Artificial Sequence: Synthetic oligonucleotide
  Sense strand starting at position 3433 of SEQ ID NO: 587872
gauauaucucgcguuggca

SEQ ID NO: 824799 - RNA, 19 nt, Artificial Sequence
  Description of Artificial Sequence: Synthetic oligonucleotide
  Antisense strand to SEQ ID NO: 824798
ugccaacgcgagauauauc

SEQ ID NO: 824800 - RNA, 19 nt, Artificial Sequence
  Description of Artificial Sequence: Synthetic oligonucleotide
  Sense strand starting at position 3448 of SEQ ID NO: 587872
ggcagcugacuauaugagu

SEQ ID NO: 824801 - RNA, 19 nt, Artificial Sequence
  Description of Artificial Sequence: Synthetic oligonucleotide
  Antisense strand to SEQ ID NO: 824800
acucauauagucagcugcc

SEQ ID NO: 824802 - RNA, 19 nt, Artificial Sequence
  Description of Artificial Sequence: Synthetic oligonucleotide
  Sense strand starting at position 3453 of SEQ ID NO: 587872
cugacuauaugaguuggga

SEQ ID NO: 824803 - RNA, 19 nt, Artificial Sequence
  Description of Artificial Sequence: Synthetic oligonucleotide
  Antisense strand to SEQ ID NO: 824802
ucccaacucauauagucag

SEQ ID NO: 824804 - RNA, 19 nt, Artificial Sequence
  Description of Artificial Sequence: Synthetic oligonucleotide
  Sense strand starting at position 3456 of SEQ ID NO: 587872
acuauaugaguugggaauu

SEQ ID NO: 824805 - RNA, 19 nt, Artificial Sequence
  Description of Artificial Sequence: Synthetic oligonucleotide
  Antisense strand to SEQ ID NO: 824804
aauucccaacucauauagu

SEQ ID NO: 824806 - RNA, 19 nt, Artificial Sequence
  Description of Artificial Sequence: Synthetic oligonucleotide
  Sense strand starting at position 3481 of SEQ ID NO: 587872
agaggucagggcuguagau

SEQ ID NO: 824807 - RNA, 19 nt, Artificial Sequence
  Description of Artificial Sequence: Synthetic oligonucleotide
  Antisense strand to SEQ ID NO: 824806
aucuacagcccugaccucu

SEQ ID NO: 824808 - RNA, 19 nt, Artificial Sequence
  Description of Artificial Sequence: Synthetic oligonucleotide
  Sense strand starting at position 3495 of SEQ ID NO: 587872
uagauacagcuuuggaaga

SEQ ID NO: 824809 - RNA, 19 nt, Artificial Sequence
  Description of Artificial Sequence: Synthetic oligonucleotide
  Antisense strand to SEQ ID NO: 824808
ucuuccaaagcuguaucua

SEQ ID NO: 824810 - RNA, 19 nt, Artificial Sequence
  Description of Artificial Sequence: Synthetic oligonucleotide
  Sense strand starting at position 3527 of SEQ ID NO: 587872
gcgguaucacaauagccaa

SEQ ID NO: 824811 - RNA, 19 nt, Artificial Sequence
  Description of Artificial Sequence: Synthetic oligonucleotide
  Antisense strand to SEQ ID NO: 824810
uuggcuauugugauaccgc

SEQ ID NO: 824812 - RNA, 19 nt, Artificial Sequence
  Description of Artificial Sequence: Synthetic oligonucleotide
  Sense strand starting at position 3746 of SEQ ID NO: 587872
cccugucuccacugaauga

SEQ ID NO: 824813 - RNA, 19 nt, Artificial Sequence
  Description of Artificial Sequence: Synthetic oligonucleotide
  Antisense strand to SEQ ID NO: 824812
ucauucaguggagacaggg

SEQ ID NO: 824814 - RNA, 19 nt, Artificial Sequence
  Description of Artificial Sequence: Synthetic oligonucleotide
  Sense strand starting at position 3883 of SEQ ID NO: 587872
uuggaauccucaguuccua

SEQ ID NO: 824815 - RNA, 19 nt, Artificial Sequence
  Description of Artificial Sequence: Synthetic oligonucleotide
  Antisense strand to SEQ ID NO: 824814
uaggaacugaggauuccaa

SEQ ID NO: 824816 - RNA, 19 nt, Artificial Sequence
  Description of Artificial Sequence: Synthetic oligonucleotide
  Sense strand starting at position 3981 of SEQ ID NO: 587872
ucuggagcauuuguguauu

SEQ ID NO: 824817 - RNA, 19 nt, Artificial Sequence
  Description of Artificial Sequence: Synthetic oligonucleotide
  Antisense strand to SEQ ID NO: 824816
aauacacaaaugcuccaga

SEQ ID NO: 824818 - RNA, 19 nt, Artificial Sequence
  Description of Artificial Sequence: Synthetic oligonucleotide
  Sense strand starting at position 2 of SEQ ID NO: 587873
cucuaugucuguucuagag

SEQ ID NO: 824819 - RNA, 19 nt, Artificial Sequence
  Description of Artificial Sequence: Synthetic oligonucleotide
  Antisense strand to SEQ ID NO: 824818
cucuagaacagacauagag

SEQ ID NO: 824820 - RNA, 19 nt, Artificial Sequence
  Description of Artificial Sequence: Synthetic oligonucleotide
  Sense strand starting at position 6 of SEQ ID NO: 587873
augucuguucuagagguga

SEQ ID NO: 824821 - RNA, 19 nt, Artificial Sequence
  Description of Artificial Sequence: Synthetic oligonucleotide
  Antisense strand to SEQ ID NO: 824820
ucaccucuagaacagacau

SEQ ID NO: 824822 - RNA, 19 nt, Artificial Sequence
  Description of Artificial Sequence: Synthetic oligonucleotide
  Sense strand starting at position 314 of SEQ ID NO: 587873
cggcauucuccugacagca

SEQ ID NO: 824823 - RNA, 19 nt, Artificial Sequence
  Description of Artificial Sequence: Synthetic oligonucleotide
  Antisense strand to SEQ ID NO: 824822
ugcugucaggagaaugccg

SEQ ID NO: 824824 - RNA, 19 nt, Artificial Sequence
  Description of Artificial Sequence: Synthetic oligonucleotide
  Sense strand starting at position 482 of SEQ ID NO: 587873
ucuugcauuuggcuugaga

SEQ ID NO: 824825 - RNA, 19 nt, Artificial Sequence
  Description of Artificial Sequence: Synthetic oligonucleotide
  Antisense strand to SEQ ID NO: 824824
ucucaagccaaaugcaaga

SEQ ID NO: 824826 - RNA, 19 nt, Artificial Sequence
  Description of Artificial Sequence: Synthetic oligonucleotide
  Sense strand starting at position 535 of SEQ ID NO: 587873
aggauuguucugcaucuga

SEQ ID NO: 824827 - RNA, 19 nt, Artificial Sequence
  Description of Artificial Sequence: Synthetic oligonucleotide
  Antisense strand to SEQ ID NO: 824826
ucagaugcagaacaauccu

SEQ ID NO: 824828 - RNA, 19 nt, Artificial Sequence
  Description of Artificial Sequence: Synthetic oligonucleotide
  Sense strand starting at position 542 of SEQ ID NO: 587873
uucugcaucugacuugaaa

SEQ ID NO: 824829 - RNA, 19 nt, Artificial Sequence
  Description of Artificial Sequence: Synthetic oligonucleotide
  Antisense strand to SEQ ID NO: 824828
uuucaagucagaugcagaa

SEQ ID NO: 824830 - RNA, 19 nt, Artificial Sequence
  Description of Artificial Sequence: Synthetic oligonucleotide
  Sense strand starting at position 653 of SEQ ID NO: 587873
ugagaaggcuccuuuguga

SEQ ID NO: 824831 - RNA, 19 nt, Artificial Sequence
  Description of Artificial Sequence: Synthetic oligonucleotide
  Antisense strand to SEQ ID NO: 824830
ucacaaaggagccuucuca

SEQ ID NO: 824832 - RNA, 19 nt, Artificial Sequence
  Description of Artificial Sequence: Synthetic oligonucleotide
  Sense strand starting at position 1096 of SEQ ID NO: 587873
gagggacucuuuguagcuu

SEQ ID NO: 824833 - RNA, 19 nt, Artificial Sequence
  Description of Artificial Sequence: Synthetic oligonucleotide
  Antisense strand to SEQ ID NO: 824832
aagcuacaaagagucccuc

SEQ ID NO: 824834 - RNA, 19 nt, Artificial Sequence
  Description of Artificial Sequence: Synthetic oligonucleotide
  Sense strand starting at position 1150 of SEQ ID NO: 587873
gcugacuuuggucaucacu

SEQ ID NO: 824835 - RNA, 19 nt, Artificial Sequence
  Description of Artificial Sequence: Synthetic oligonucleotide
  Antisense strand to SEQ ID NO: 824834
agugaugaccaaagucagc

SEQ ID NO: 824836 - RNA, 19 nt, Artificial Sequence
  Description of Artificial Sequence: Synthetic oligonucleotide
  Sense strand starting at position 1152 of SEQ ID NO: 587873
ugacuuuggucaucacuga

SEQ ID NO: 824837 - RNA, 19 nt, Artificial Sequence
  Description of Artificial Sequence: Synthetic oligonucleotide
  Antisense strand to SEQ ID NO: 824836
ucagugaugaccaaaguca

SEQ ID NO: 824838 - RNA, 19 nt, Artificial Sequence
  Description of Artificial Sequence: Synthetic oligonucleotide
  Sense strand starting at position 1153 of SEQ ID NO: 587873
gacuuuggucaucacugau

SEQ ID NO: 824839 - RNA, 19 nt, Artificial Sequence
  Description of Artificial Sequence: Synthetic oligonucleotide
  Antisense strand to SEQ ID NO: 824838
aucagugaugaccaaaguc

SEQ ID NO: 824840 - RNA, 19 nt, Artificial Sequence
  Description of Artificial Sequence: Synthetic oligonucleotide
  Sense strand starting at position 1156 of SEQ ID NO: 587873
uuuggucaucacugauuaa

SEQ ID NO: 824841 - RNA, 19 nt, Artificial Sequence
  Description of Artificial Sequence: Synthetic oligonucleotide
  Antisense strand to SEQ ID NO: 824840
uuaaucagugaugaccaaa

SEQ ID NO: 824842 - RNA, 19 nt, Artificial Sequence
  Description of Artificial Sequence: Synthetic oligonucleotide
  Sense strand starting at position 1159 of SEQ ID NO: 587873
ggucaucacugauuaaccu

SEQ ID NO: 824843 - RNA, 19 nt, Artificial Sequence
  Description of Artificial Sequence: Synthetic oligonucleotide
  Antisense strand to SEQ ID NO: 824842
agguuaaucagugaugacc

SEQ ID NO: 824844 - RNA, 19 nt, Artificial Sequence
  Description of Artificial Sequence: Synthetic oligonucleotide
  Sense strand starting at position 1233 of SEQ ID NO: 587873
gacauaagguuuccuuugu

SEQ ID NO: 824845 - RNA, 19 nt, Artificial Sequence
  Description of Artificial Sequence: Synthetic oligonucleotide
  Antisense strand to SEQ ID NO: 824844
acaaaggaaaccuuauguc

SEQ ID NO: 824846 - RNA, 19 nt, Artificial Sequence
  Description of Artificial Sequence: Synthetic oligonucleotide
  Sense strand starting at position 1234 of SEQ ID NO: 587873
acauaagguuuccuuuguu

SEQ ID NO: 824847 - RNA, 19 nt, Artificial Sequence
  Description of Artificial Sequence: Synthetic oligonucleotide
  Antisense strand to SEQ ID NO: 824846
aacaaaggaaaccuuaugu

SEQ ID NO: 824848 - RNA, 19 nt, Artificial Sequence
  Description of Artificial Sequence: Synthetic oligonucleotide
  Sense strand starting at position 1258 of SEQ ID NO: 587873
gaagaugucacaggauggu

SEQ ID NO: 824849 - RNA, 19 nt, Artificial Sequence
  Description of Artificial Sequence: Synthetic oligonucleotide
  Antisense strand to SEQ ID NO: 824848
accauccugugacaucuuc

SEQ ID NO: 824850 - RNA, 19 nt, Artificial Sequence
  Description of Artificial Sequence: Synthetic oligonucleotide
  Sense strand starting at position 1268 of SEQ ID NO: 587873
caggauggugccuagcuua

SEQ ID NO: 824851 - RNA, 19 nt, Artificial Sequence
  Description of Artificial Sequence: Synthetic oligonucleotide
  Antisense strand to SEQ ID NO: 824850
uaagcuaggcaccauccug

SEQ ID NO: 824852 - RNA, 19 nt, Artificial Sequence
  Description of Artificial Sequence: Synthetic oligonucleotide
  Sense strand starting at position 1337 of SEQ ID NO: 587873
uauauuaugggcugccaga

SEQ ID NO: 824853 - RNA, 19 nt, Artificial Sequence
  Description of Artificial Sequence: Synthetic oligonucleotide
  Antisense strand to SEQ ID NO: 824852
ucuggcagcccauaauaua

SEQ ID NO: 824854 - RNA, 19 nt, Artificial Sequence
  Description of Artificial Sequence: Synthetic oligonucleotide
  Sense strand starting at position 1392 of SEQ ID NO: 587873
gggccuggauuggaaauuu

SEQ ID NO: 824855 - RNA, 19 nt, Artificial Sequence
  Description of Artificial Sequence: Synthetic oligonucleotide
  Antisense strand to SEQ ID NO: 824854
aaauuuccaauccaggccc

SEQ ID NO: 824856 - RNA, 19 nt, Artificial Sequence
  Description of Artificial Sequence: Synthetic oligonucleotide
  Sense strand starting at position 1401 of SEQ ID NO: 587873
uuggaaauuuaacagcaaa

SEQ ID NO: 824857 - RNA, 19 nt, Artificial Sequence
  Description of Artificial Sequence: Synthetic oligonucleotide
  Antisense strand to SEQ ID NO: 824856
uuugcuguuaaauuuccaa

SEQ ID NO: 824858 - RNA, 19 nt, Artificial Sequence
  Description of Artificial Sequence: Synthetic oligonucleotide
  Sense strand starting at position 1412 of SEQ ID NO: 587873
acagcaaaugcccagugau

SEQ ID NO: 824859 - RNA, 19 nt, Artificial Sequence
  Description of Artificial Sequence: Synthetic oligonucleotide
  Antisense strand to SEQ ID NO: 824858
aucacugggcauuugcugu

SEQ ID NO: 824860 - RNA, 19 nt, Artificial Sequence
  Description of Artificial Sequence: Synthetic oligonucleotide
  Sense strand starting at position 1493 of SEQ ID NO: 587873
gcugaucuuggagauccau

SEQ ID NO: 824861 - RNA, 19 nt, Artificial Sequence
  Description of Artificial Sequence: Synthetic oligonucleotide
  Antisense strand to SEQ ID NO: 824860
auggaucuccaagaucagc

SEQ ID NO: 824862 - RNA, 19 nt, Artificial Sequence
  Description of Artificial Sequence: Synthetic oligonucleotide
  Sense strand starting at position 1711 of SEQ ID NO: 587873
ucaagcaucucaccagaga

SEQ ID NO: 824863 - RNA, 19 nt, Artificial Sequence
  Description of Artificial Sequence: Synthetic oligonucleotide
  Antisense strand to SEQ ID NO: 824862
ucucuggugagaugcuuga

SEQ ID NO: 824864 - RNA, 19 nt, Artificial Sequence
  Description of Artificial Sequence: Synthetic oligonucleotide
  Sense strand starting at position 1961 of SEQ ID NO: 587873
ggcuguuuauaugugaaga

SEQ ID NO: 824865 - RNA, 19 nt, Artificial Sequence
  Description of Artificial Sequence: Synthetic oligonucleotide
  Antisense strand to SEQ ID NO: 824864
ucuucacauauaaacagcc

SEQ ID NO: 824866 - RNA, 19 nt, Artificial Sequence
  Description of Artificial Sequence: Synthetic oligonucleotide
  Sense strand starting at position 1986 of SEQ ID NO: 587873
uggugaagauugguuacuu

SEQ ID NO: 824867 - RNA, 19 nt, Artificial Sequence
  Description of Artificial Sequence: Synthetic oligonucleotide
  Antisense strand to SEQ ID NO: 824866
aaguaaccaaucuucacca

SEQ ID NO: 824868 - RNA, 19 nt, Artificial Sequence
  Description of Artificial Sequence: Synthetic oligonucleotide
  Sense strand starting at position 1987 of SEQ ID NO: 587873
ggugaagauugguuacuuu

SEQ ID NO: 824869 - RNA, 19 nt, Artificial Sequence
  Description of Artificial Sequence: Synthetic oligonucleotide
  Antisense strand to SEQ ID NO: 824868
aaaguaaccaaucuucacc

SEQ ID NO: 824870 - RNA, 19 nt, Artificial Sequence
  Description of Artificial Sequence: Synthetic oligonucleotide
  Sense strand starting at position 2166 of SEQ ID NO: 587873
ucagguggcccagaaagua

SEQ ID NO: 824871 - RNA, 19 nt, Artificial Sequence
  Description of Artificial Sequence: Synthetic oligonucleotide
  Antisense strand to SEQ ID NO: 824870
uacuuucugggccaccuga

SEQ ID NO: 824872 - RNA, 19 nt, Artificial Sequence
  Description of Artificial Sequence: Synthetic oligonucleotide
  Sense strand starting at position 2317 of SEQ ID NO: 587873
gucagcaugcuuuaacaaa

SEQ ID NO: 824873 - RNA, 19 nt, Artificial Sequence
  Description of Artificial Sequence: Synthetic oligonucleotide
  Antisense strand to SEQ ID NO: 824872
uuuguuaaagcaugcugac

SEQ ID NO: 824874 - RNA, 19 nt, Artificial Sequence
  Description of Artificial Sequence: Synthetic oligonucleotide
  Sense strand starting at position 2508 of SEQ ID NO: 587873
cauggcaaguaauuguaga

SEQ ID NO: 824875 - RNA, 19 nt, Artificial Sequence
  Description of Artificial Sequence: Synthetic oligonucleotide
  Antisense strand to SEQ ID NO: 824874
ucuacaauuacuugccaug

SEQ ID NO: 824876 - RNA, 19 nt, Artificial Sequence
  Description of Artificial Sequence: Synthetic oligonucleotide
  Sense strand starting at position 2509 of SEQ ID NO: 587873
auggcaaguaauuguagaa

SEQ ID NO: 824877 - RNA, 19 nt, Artificial Sequence
  Description of Artificial Sequence: Synthetic oligonucleotide
  Antisense strand to SEQ ID NO: 824876
uucuacaauuacuugccau

SEQ ID NO: 824878 - RNA, 19 nt, Artificial Sequence
  Description of Artificial Sequence: Synthetic oligonucleotide
  Sense strand starting at position 2545 of SEQ ID NO: 587873
gaugcuaaaucucuggguu

SEQ ID NO: 824879 - RNA, 19 nt, Artificial Sequence
  Description of Artificial Sequence: Synthetic oligonucleotide
  Antisense strand to SEQ ID NO: 824878
aacccagagauuuagcauc

SEQ ID NO: 824880 - RNA, 19 nt, Artificial Sequence
  Description of Artificial Sequence: Synthetic oligonucleotide
  Sense strand starting at position 2627 of SEQ ID NO: 587873
gaugacuucgggcaaguca

SEQ ID NO: 824881 - RNA, 19 nt, Artificial Sequence
  Description of Artificial Sequence: Synthetic oligonucleotide
  Antisense strand to SEQ ID NO: 824880
ugacuugcccgaagucauc

SEQ ID NO: 824882 - RNA, 19 nt, Artificial Sequence
  Description of Artificial Sequence: Synthetic oligonucleotide
  Sense strand starting at position 2635 of SEQ ID NO: 587873
cgggcaagucauuaaccuu

SEQ ID NO: 824883 - RNA, 19 nt, Artificial Sequence
  Description of Artificial Sequence: Synthetic oligonucleotide
  Antisense strand to SEQ ID NO: 824882
aagguuaaugacuugcccg

SEQ ID NO: 824884 - RNA, 19 nt, Artificial Sequence
  Description of Artificial Sequence: Synthetic oligonucleotide
  Sense strand starting at position 2946 of SEQ ID NO: 587873
uggccaagucauuaaccuu

SEQ ID NO: 824885 - RNA, 19 nt, Artificial Sequence
  Description of Artificial Sequence: Synthetic oligonucleotide
  Antisense strand to SEQ ID NO: 824884
aagguuaaugacuuggcca

SEQ ID NO: 824886 - RNA, 19 nt, Artificial Sequence
  Description of Artificial Sequence: Synthetic oligonucleotide
  Sense strand starting at position 2984 of SEQ ID NO: 587873
acacuaauugaacaguguu

SEQ ID NO: 824887 - RNA, 19 nt, Artificial Sequence
  Description of Artificial Sequence: Synthetic oligonucleotide
  Antisense strand to SEQ ID NO: 824886
aacacuguucaauuagugu

SEQ ID NO: 824888 - RNA, 19 nt, Artificial Sequence
  Description of Artificial Sequence: Synthetic oligonucleotide
  Sense strand starting at position 3071 of SEQ ID NO: 587873
acauguuaguuauuacucu

SEQ ID NO: 824889 - RNA, 19 nt, Artificial Sequence
  Description of Artificial Sequence: Synthetic oligonucleotide
  Antisense strand to SEQ ID NO: 824888
agaguaauaacuaacaugu

SEQ ID NO: 824890 - RNA, 19 nt, Artificial Sequence
  Description of Artificial Sequence: Synthetic oligonucleotide
  Sense strand starting at position 3080 of SEQ ID NO: 587873
uuauuacucuguuuacuga

SEQ ID NO: 824891 - RNA, 19 nt, Artificial Sequence
  Description of Artificial Sequence: Synthetic oligonucleotide
  Antisense strand to SEQ ID NO: 824890
ucaguaaacagaguaauaa

SEQ ID NO: 824892 - RNA, 19 nt, Artificial Sequence
  Description of Artificial Sequence: Synthetic oligonucleotide
  Sense strand starting at position 3090 of SEQ ID NO: 587873
guuuacugauuguccuuaa

SEQ ID NO: 824893 - RNA, 19 nt, Artificial Sequence
  Description of Artificial Sequence: Synthetic oligonucleotide
  Antisense strand to SEQ ID NO: 824892
uuaaggacaaucaguaaac

SEQ ID NO: 824894 - RNA, 19 nt, Artificial Sequence
  Description of Artificial Sequence: Synthetic oligonucleotide
  Sense strand starting at position 3094 of SEQ ID NO: 587873
acugauuguccuuaaugau

SEQ ID NO: 824895 - RNA, 19 nt, Artificial Sequence
  Description of Artificial Sequence: Synthetic oligonucleotide
  Antisense strand to SEQ ID NO: 824894
aucauuaaggacaaucagu

SEQ ID NO: 824896 - RNA, 19 nt, Artificial Sequence
  Description of Artificial Sequence: Synthetic oligonucleotide
  Sense strand starting at position 3777 of SEQ ID NO: 587873
ugaucuuugugacuagaaa

SEQ ID NO: 824897 - RNA, 19 nt, Artificial Sequence
  Description of Artificial Sequence: Synthetic oligonucleotide
  Antisense strand to SEQ ID NO: 824896
uuucuagucacaaagauca

SEQ ID NO: 824898 - RNA, 19 nt, Artificial Sequence
  Description of Artificial Sequence: Synthetic oligonucleotide
  Sense strand starting at position 2 of SEQ ID NO: 587874
aagugauagcacugagaau

SEQ ID NO: 824899 - RNA, 19 nt, Artificial Sequence
  Description of Artificial Sequence: Synthetic oligonucleotide
  Antisense strand to SEQ ID NO: 824898
auucucagugcuaucacuu

SEQ ID NO: 824900 - RNA, 19 nt, Artificial Sequence
  Description of Artificial Sequence: Synthetic oligonucleotide
  Sense strand starting at position 21 of SEQ ID NO: 587874
ugagaagagcacuggcaau

SEQ ID NO: 824901 - RNA, 19 nt, Artificial Sequence
  Description of Artificial Sequence: Synthetic oligonucleotide
  Antisense strand to SEQ ID NO: 824900
auugccagugcucuucuca

SEQ ID NO: 824902 - RNA, 19 nt, Artificial Sequence
  Description of Artificial Sequence: Synthetic oligonucleotide
  Sense strand starting at position 359 of SEQ ID NO: 587874
ugcucugucucauuuagga

SEQ ID NO: 824903 - RNA, 19 nt, Artificial Sequence
  Description of Artificial Sequence: Synthetic oligonucleotide
  Antisense strand to SEQ ID NO: 824902
uccuaaaugagacagagca

SEQ ID NO: 824904 - RNA, 19 nt, Artificial Sequence
  Description of Artificial Sequence: Synthetic oligonucleotide
  Sense strand starting at position 478 of SEQ ID NO: 587874
cuccaccacucauugagua

SEQ ID NO: 824905 - RNA, 19 nt, Artificial Sequence
  Description of Artificial Sequence: Synthetic oligonucleotide
  Antisense strand to SEQ ID NO: 824904
uacucaaugagugguggag

SEQ ID NO: 824906 - RNA, 19 nt, Artificial Sequence
  Description of Artificial Sequence: Synthetic oligonucleotide
  Sense strand starting at position 482 of SEQ ID NO: 587874
accacucauugaguacuua

SEQ ID NO: 824907 - RNA, 19 nt, Artificial Sequence
  Description of Artificial Sequence: Synthetic oligonucleotide
  Antisense strand to SEQ ID NO: 824906
uaaguacucaaugaguggu

SEQ ID NO: 824908 - RNA, 19 nt, Artificial Sequence
  Description of Artificial Sequence: Synthetic oligonucleotide
  Sense strand starting at position 492 of SEQ ID NO: 587874
gaguacuuagcauauacga

SEQ ID NO: 824909 - RNA, 19 nt, Artificial Sequence
  Description of Artificial Sequence: Synthetic oligonucleotide
  Antisense strand to SEQ ID NO: 824908
ucguauaugcuaaguacuc

SEQ ID NO: 824910 - RNA, 19 nt, Artificial Sequence
  Description of Artificial Sequence: Synthetic oligonucleotide
  Sense strand starting at position 588 of SEQ ID NO: 587874
cauuauaaguggcuuaaga

SEQ ID NO: 824911 - RNA, 19 nt, Artificial Sequence
  Description of Artificial Sequence: Synthetic oligonucleotide
  Antisense strand to SEQ ID NO: 824910
ucuuaagccacuuauaaug

SEQ ID NO: 824912 - RNA, 19 nt, Artificial Sequence
  Description of Artificial Sequence: Synthetic oligonucleotide
  Sense strand starting at position 1022 of SEQ ID NO: 587874
cuaaucccacugugaaagu

SEQ ID NO: 824913 - RNA, 19 nt, Artificial Sequence
  Description of Artificial Sequence: Synthetic oligonucleotide
  Antisense strand to SEQ ID NO: 824912
acuuucacagugggauuag

SEQ ID NO: 824914 - RNA, 19 nt, Artificial Sequence
  Description of Artificial Sequence: Synthetic oligonucleotide
  Sense strand starting at position 1142 of SEQ ID NO: 587874
uugauacuggcacaaguau

SEQ ID NO: 824915 - RNA, 19 nt, Artificial Sequence
  Description of Artificial Sequence: Synthetic oligonucleotide
  Antisense strand to SEQ ID NO: 824914
auacuugugccaguaucaa

SEQ ID NO: 824916 - RNA, 19 nt, Artificial Sequence
  Description of Artificial Sequence: Synthetic oligonucleotide
  Sense strand starting at position 1196 of SEQ ID NO: 587874
uauggaauguaccugacaa

SEQ ID NO: 824917 - RNA, 19 nt, Artificial Sequence
  Description of Artificial Sequence: Synthetic oligonucleotide
  Antisense strand to SEQ ID NO: 824916
uugucagguacauuccaua

SEQ ID NO: 824918 - RNA, 19 nt, Artificial Sequence
  Description of Artificial Sequence: Synthetic oligonucleotide
  Sense strand starting at position 1479 of SEQ ID NO: 587874
aggucucuuccauacuguu

SEQ ID NO: 824919 - RNA, 19 nt, Artificial Sequence
  Description of Artificial Sequence: Synthetic oligonucleotide
  Antisense strand to SEQ ID NO: 824918
aacaguauggaagagaccu

SEQ ID NO: 824920 - RNA, 19 nt, Artificial Sequence
  Description of Artificial Sequence: Synthetic oligonucleotide
  Sense strand starting at position 1541 of SEQ ID NO: 587874
ucaauaguauuagugguaa

SEQ ID NO: 824921 - RNA, 19 nt, Artificial Sequence
  Description of Artificial Sequence: Synthetic oligonucleotide
  Antisense strand to SEQ ID NO: 824920
uuaccacuaauacuauuga

SEQ ID NO: 824922 - RNA, 19 nt, Artificial Sequence
  Description of Artificial Sequence: Synthetic oligonucleotide
  Sense strand starting at position 1688 of SEQ ID NO: 587874
agaguugaauagucacauu

SEQ ID NO: 824923 - RNA, 19 nt, Artificial Sequence
  Description of Artificial Sequence: Synthetic oligonucleotide
  Antisense strand to SEQ ID NO: 824922
aaugugacuauucaacucu

SEQ ID NO: 824924 - RNA, 19 nt, Artificial Sequence
  Description of Artificial Sequence: Synthetic oligonucleotide
  Sense strand starting at position 1750 of SEQ ID NO: 587874
guagcaucugaugagaucu

SEQ ID NO: 824925 - RNA, 19 nt, Artificial Sequence
  Description of Artificial Sequence: Synthetic oligonucleotide
  Antisense strand to SEQ ID NO: 824924
agaucucaucagaugcuac

SEQ ID NO: 824926 - RNA, 19 nt, Artificial Sequence
  Description of Artificial Sequence: Synthetic oligonucleotide
  Sense strand starting at position 1761 of SEQ ID NO: 587874
ugagaucuucuuggccaca

SEQ ID NO: 824927 - RNA, 19 nt, Artificial Sequence
  Description of Artificial Sequence: Synthetic oligonucleotide
  Antisense strand to SEQ ID NO: 824926
uguggccaagaagaucuca

SEQ ID NO: 824928 - RNA, 19 nt, Artificial Sequence
  Description of Artificial Sequence: Synthetic oligonucleotide
  Sense strand starting at position 1762 of SEQ ID NO: 587874
gagaucuucuuggccacau

SEQ ID NO: 824929 - RNA, 19 nt, Artificial Sequence
  Description of Artificial Sequence: Synthetic oligonucleotide
  Antisense strand to SEQ ID NO: 824928
auguggccaagaagaucuc

SEQ ID NO: 824930 - RNA, 19 nt, Artificial Sequence
  Description of Artificial Sequence: Synthetic oligonucleotide
  Sense strand starting at position 1763 of SEQ ID NO: 587874
agaucuucuuggccacauu

SEQ ID NO: 824931 - RNA, 19 nt, Artificial Sequence
  Description of Artificial Sequence: Synthetic oligonucleotide
  Antisense strand to SEQ ID NO: 824930
aauguggccaagaagaucu

SEQ ID NO: 824932 - RNA, 19 nt, Artificial Sequence
  Description of Artificial Sequence: Synthetic oligonucleotide
  Sense strand starting at position 2080 of SEQ ID NO: 587874
acagucugagggugaguua

SEQ ID NO: 824933 - RNA, 19 nt, Artificial Sequence
  Description of Artificial Sequence: Synthetic oligonucleotide
  Antisense strand to SEQ ID NO: 824932
uaacucacccucagacugu

SEQ ID NO: 824934 - RNA, 19 nt, Artificial Sequence
  Description of Artificial Sequence: Synthetic oligonucleotide
  Sense strand starting at position 2083 of SEQ ID NO: 587874
gucugagggugaguuagau

SEQ ID NO: 824935 - RNA, 19 nt, Artificial Sequence
  Description of Artificial Sequence: Synthetic oligonucleotide
  Antisense strand to SEQ ID NO: 824934
aucuaacucacccucagac

SEQ ID NO: 824936 - RNA, 19 nt, Artificial Sequence
  Description of Artificial Sequence: Synthetic oligonucleotide
  Sense strand starting at position 2089 of SEQ ID NO: 587874
gggugaguuagauaacagu

SEQ ID NO: 824937 - RNA, 19 nt, Artificial Sequence
  Description of Artificial Sequence: Synthetic oligonucleotide
  Antisense strand to SEQ ID NO: 824936
acuguuaucuaacucaccc

SEQ ID NO: 824938 - RNA, 19 nt, Artificial Sequence
  Description of Artificial Sequence: Synthetic oligonucleotide
  Sense strand starting at position 2192 of SEQ ID NO: 587874
uuuaacuugugauuaagac

SEQ ID NO: 824939 - RNA, 19 nt, Artificial Sequence
  Description of Artificial Sequence: Synthetic oligonucleotide
  Antisense strand to SEQ ID NO: 824938
gucuuaaucacaaguuaaa

SEQ ID NO: 824940 - RNA, 19 nt, Artificial Sequence
  Description of Artificial Sequence: Synthetic oligonucleotide
  Sense strand starting at position 2238 of SEQ ID NO: 587874
uucgauuuaucacaacaga

SEQ ID NO: 824941 - RNA, 19 nt, Artificial Sequence
  Description of Artificial Sequence: Synthetic oligonucleotide
  Antisense strand to SEQ ID NO: 824940
ucuguugugauaaaucgaa

SEQ ID NO: 824942 - RNA, 19 nt, Artificial Sequence
  Description of Artificial Sequence: Synthetic oligonucleotide
  Sense strand starting at position 2282 of SEQ ID NO: 587874
cucauuucugcuuaugcga

SEQ ID NO: 824943 - RNA, 19 nt, Artificial Sequence
  Description of Artificial Sequence: Synthetic oligonucleotide
  Antisense strand to SEQ ID NO: 824942
ucgcauaagcagaaaugag

SEQ ID NO: 824944 - RNA, 19 nt, Artificial Sequence
  Description of Artificial Sequence: Synthetic oligonucleotide
  Sense strand starting at position 2351 of SEQ ID NO: 587874
guuaguuauuucuugcuaa

SEQ ID NO: 824945 - RNA, 19 nt, Artificial Sequence
  Description of Artificial Sequence: Synthetic oligonucleotide
  Antisense strand to SEQ ID NO: 824944
uuagcaagaaauaacuaac

SEQ ID NO: 824946 - RNA, 19 nt, Artificial Sequence
  Description of Artificial Sequence: Synthetic oligonucleotide
  Sense strand starting at position 2519 of SEQ ID NO: 587874
cuggccaucccauaaugau

SEQ ID NO: 824947 - RNA, 19 nt, Artificial Sequence
  Description of Artificial Sequence: Synthetic oligonucleotide
  Antisense strand to SEQ ID NO: 824946
aucauuaugggauggccag

SEQ ID NO: 824948 - RNA, 19 nt, Artificial Sequence
  Description of Artificial Sequence: Synthetic oligonucleotide
  Sense strand starting at position 2659 of SEQ ID NO: 587874
ugcaucucugaaggaugau

SEQ ID NO: 824949 - RNA, 19 nt, Artificial Sequence
  Description of Artificial Sequence: Synthetic oligonucleotide
  Antisense strand to SEQ ID NO: 824948
aucauccuucagagaugca

SEQ ID NO: 824950 - RNA, 19 nt, Artificial Sequence
  Description of Artificial Sequence: Synthetic oligonucleotide
  Sense strand starting at position 2710 of SEQ ID NO: 587874
uuguauaccuaaguaggaa

SEQ ID NO: 824951 - RNA, 19 nt, Artificial Sequence
  Description of Artificial Sequence: Synthetic oligonucleotide
  Antisense strand to SEQ ID NO: 824950
uuccuacuuagguauacaa

SEQ ID NO: 824952 - RNA, 19 nt, Artificial Sequence
  Description of Artificial Sequence: Synthetic oligonucleotide
  Sense strand starting at position 2737 of SEQ ID NO: 587874
ccugaaugguuaccagaua

SEQ ID NO: 824953 - RNA, 19 nt, Artificial Sequence
  Description of Artificial Sequence: Synthetic oligonucleotide
  Antisense strand to SEQ ID NO: 824952
uaucugguaaccauucagg

SEQ ID NO: 824954 - RNA, 19 nt, Artificial Sequence
  Description of Artificial Sequence: Synthetic oligonucleotide
  Sense strand starting at position 2972 of SEQ ID NO: 587874
gguugccaggaaugagaaa

SEQ ID NO: 824955 - RNA, 19 nt, Artificial Sequence
  Description of Artificial Sequence: Synthetic oligonucleotide
  Antisense strand to SEQ ID NO: 824954
uuucucauuccuggcaacc

SEQ ID NO: 824956 - RNA, 19 nt, Artificial Sequence
  Description of Artificial Sequence: Synthetic oligonucleotide
  Sense strand starting at position 3117 of SEQ ID NO: 587874
cuauuaagccuacagaugu

SEQ ID NO: 824957 - RNA, 19 nt, Artificial Sequence
  Description of Artificial Sequence: Synthetic oligonucleotide
  Antisense strand to SEQ ID NO: 824956
acaucuguaggcuuaauag

SEQ ID NO: 824958 - RNA, 19 nt, Artificial Sequence
  Description of Artificial Sequence: Synthetic oligonucleotide
  Sense strand starting at position 3137 of SEQ ID NO: 587874
guagucucugaacacauga

SEQ ID NO: 824959 - RNA, 19 nt, Artificial Sequence
  Description of Artificial Sequence: Synthetic oligonucleotide
  Antisense strand to SEQ ID NO: 824958
ucauguguucagagacuac

SEQ ID NO: 824960 - RNA, 19 nt, Artificial Sequence
  Description of Artificial Sequence: Synthetic oligonucleotide
  Sense strand starting at position 3173 of SEQ ID NO: 587874
ucauguaaucaugaugcaa

SEQ ID NO: 824961 - RNA, 19 nt, Artificial Sequence
  Description of Artificial Sequence: Synthetic oligonucleotide
  Antisense strand to SEQ ID NO: 824960
uugcaucaugauuacauga

SEQ ID NO: 824962 - RNA, 19 nt, Artificial Sequence
  Description of Artificial Sequence: Synthetic oligonucleotide
  Sense strand starting at position 3292 of SEQ ID NO: 587874
accauuuaugucgguuaau

SEQ ID NO: 824963 - RNA, 19 nt, Artificial Sequence
  Description of Artificial Sequence: Synthetic oligonucleotide
  Antisense strand to SEQ ID NO: 824962
auuaaccgacauaaauggu

SEQ ID NO: 824964 - RNA, 19 nt, Artificial Sequence
  Description of Artificial Sequence: Synthetic oligonucleotide
  Sense strand starting at position 3293 of SEQ ID NO: 587874
ccauuuaugucgguuaauc

SEQ ID NO: 824965 - RNA, 19 nt, Artificial Sequence
  Description of Artificial Sequence: Synthetic oligonucleotide
  Antisense strand to SEQ ID NO: 824964
gauuaaccgacauaaaugg

SEQ ID NO: 824966 - RNA, 19 nt, Artificial Sequence
  Description of Artificial Sequence: Synthetic oligonucleotide
  Sense strand starting at position 3374 of SEQ ID NO: 587874
caagauccgcuguaccaau

SEQ ID NO: 824967 - RNA, 19 nt, Artificial Sequence
  Description of Artificial Sequence: Synthetic oligonucleotide
  Antisense strand to SEQ ID NO: 824966
auugguacagcggaucuug

SEQ ID NO: 824968 - RNA, 19 nt, Artificial Sequence
  Description of Artificial Sequence: Synthetic oligonucleotide
  Sense strand starting at position 3402 of SEQ ID NO: 587874
agggaaugggacuguucau

SEQ ID NO: 824969 - RNA, 19 nt, Artificial Sequence
  Description of Artificial Sequence: Synthetic oligonucleotide
  Antisense strand to SEQ ID NO: 824968
augaacagucccauucccu

SEQ ID NO: 824970 - RNA, 19 nt, Artificial Sequence
  Description of Artificial Sequence: Synthetic oligonucleotide
  Sense strand starting at position 3495 of SEQ ID NO: 587874
guuaucuuuaguuauguga

SEQ ID NO: 824971 - RNA, 19 nt, Artificial Sequence
  Description of Artificial Sequence: Synthetic oligonucleotide
  Antisense strand to SEQ ID NO: 824970
ucacauaacuaaagauaac

SEQ ID NO: 824972 - RNA, 19 nt, Artificial Sequence
  Description of Artificial Sequence: Synthetic oligonucleotide
  Sense strand starting at position 3498 of SEQ ID NO: 587874
aucuuuaguuaugugacca

SEQ ID NO: 824973 - RNA, 19 nt, Artificial Sequence
  Description of Artificial Sequence: Synthetic oligonucleotide
  Antisense strand to SEQ ID NO: 824972
uggucacauaacuaaagau

SEQ ID NO: 824974 - RNA, 19 nt, Artificial Sequence
  Description of Artificial Sequence: Synthetic oligonucleotide
  Sense strand starting at position 3502 of SEQ ID NO: 587874
uuaguuaugugaccaaaua

SEQ ID NO: 824975 - RNA, 19 nt, Artificial Sequence
  Description of Artificial Sequence: Synthetic oligonucleotide
  Antisense strand to SEQ ID NO: 824974
uauuuggucacauaacuaa

SEQ ID NO: 824976 - RNA, 19 nt, Artificial Sequence
  Description of Artificial Sequence: Synthetic oligonucleotide
  Sense strand starting at position 3550 of SEQ ID NO: 587874
cgaagaugugaguauauca

SEQ ID NO: 824977 - RNA, 19 nt, Artificial Sequence
  Description of Artificial Sequence: Synthetic oligonucleotide
  Antisense strand to SEQ ID NO: 824976
ugauauacucacaucuucg

SEQ ID NO: 824978 - RNA, 19 nt, Artificial Sequence
  Description of Artificial Sequence: Synthetic oligonucleotide
  Sense strand starting at position 16 of SEQ ID NO: 587875
aucgcuuacuagcuauuua

SEQ ID NO: 824979 - RNA, 19 nt, Artificial Sequence
  Description of Artificial Sequence: Synthetic oligonucleotide
  Antisense strand to SEQ ID NO: 824978
uaaauagcuaguaagcgau

SEQ ID NO: 824980 - RNA, 19 nt, Artificial Sequence
  Description of Artificial Sequence: Synthetic oligonucleotide
  Sense strand starting at position 28 of SEQ ID NO: 587875
cuauuuaugucuggauuua

SEQ ID NO: 824981 - RNA, 19 nt, Artificial Sequence
  Description of Artificial Sequence: Synthetic oligonucleotide
  Antisense strand to SEQ ID NO: 824980
uaaauccagacauaaauag

SEQ ID NO: 824982 - RNA, 19 nt, Artificial Sequence
  Description of Artificial Sequence: Synthetic oligonucleotide
  Sense strand starting at position 72 of SEQ ID NO: 587875
uuuaauggcuagguauaaa

SEQ ID NO: 824983 - RNA, 19 nt, Artificial Sequence
  Description of Artificial Sequence: Synthetic oligonucleotide
  Antisense strand to SEQ ID NO: 824982
uuuauaccuagccauuaaa

SEQ ID NO: 824984 - RNA, 19 nt, Artificial Sequence
  Description of Artificial Sequence: Synthetic oligonucleotide
  Sense strand starting at position 158 of SEQ ID NO: 587875
gccuaucaccuugaugguu

SEQ ID NO: 824985 - RNA, 19 nt, Artificial Sequence
  Description of Artificial Sequence: Synthetic oligonucleotide
  Antisense strand to SEQ ID NO: 824984
aaccaucaaggugauaggc

SEQ ID NO: 824986 - RNA, 19 nt, Artificial Sequence
  Description of Artificial Sequence: Synthetic oligonucleotide
  Sense strand starting at position 507 of SEQ ID NO: 587875
ugggcugcccacugagaaa

SEQ ID NO: 824987 - RNA, 19 nt, Artificial Sequence
  Description of Artificial Sequence: Synthetic oligonucleotide
  Antisense strand to SEQ ID NO: 824986
uuucucagugggcagccca

SEQ ID NO: 824988 - RNA, 19 nt, Artificial Sequence
  Description of Artificial Sequence: Synthetic oligonucleotide
  Sense strand starting at position 569 of SEQ ID NO: 587875
gccucugaagguuaggaga

SEQ ID NO: 824989 - RNA, 19 nt, Artificial Sequence
  Description of Artificial Sequence: Synthetic oligonucleotide
  Antisense strand to SEQ ID NO: 824988
ucuccuaaccuucagaggc

SEQ ID NO: 824990 - RNA, 19 nt, Artificial Sequence
  Description of Artificial Sequence: Synthetic oligonucleotide
  Sense strand starting at position 796 of SEQ ID NO: 587875
ucauaucauuagucagcau

SEQ ID NO: 824991 - RNA, 19 nt, Artificial Sequence
  Description of Artificial Sequence: Synthetic oligonucleotide
  Antisense strand to SEQ ID NO: 824990
augcugacuaaugauauga

SEQ ID NO: 824992 - RNA, 19 nt, Artificial Sequence
  Description of Artificial Sequence: Synthetic oligonucleotide
  Sense strand starting at position 800 of SEQ ID NO: 587875
aucauuagucagcauuaag

SEQ ID NO: 824993 - RNA, 19 nt, Artificial Sequence
  Description of Artificial Sequence: Synthetic oligonucleotide
  Antisense strand to SEQ ID NO: 824992
cuuaaugcugacuaaugau

SEQ ID NO: 824994 - RNA, 19 nt, Artificial Sequence
  Description of Artificial Sequence: Synthetic oligonucleotide
  Sense strand starting at position 803 of SEQ ID NO: 587875
auuagucagcauuaaguca

SEQ ID NO: 824995 - RNA, 19 nt, Artificial Sequence
  Description of Artificial Sequence: Synthetic oligonucleotide
  Antisense strand to SEQ ID NO: 824994
ugacuuaaugcugacuaau

SEQ ID NO: 824996 - RNA, 19 nt, Artificial Sequence
  Description of Artificial Sequence: Synthetic oligonucleotide
  Sense strand starting at position 966 of SEQ ID NO: 587875
uuguauacucuuugacuua

SEQ ID NO: 824997 - RNA, 19 nt, Artificial Sequence
  Description of Artificial Sequence: Synthetic oligonucleotide
  Antisense strand to SEQ ID NO: 824996
uaagucaaagaguauacaa

SEQ ID NO: 824998 - RNA, 19 nt, Artificial Sequence
  Description of Artificial Sequence: Synthetic oligonucleotide
  Sense strand starting at position 1101 of SEQ ID NO: 587875
cauguuaaugguggauuau

SEQ ID NO: 824999 - RNA, 19 nt, Artificial Sequence
  Description of Artificial Sequence: Synthetic oligonucleotide
  Antisense strand to SEQ ID NO: 824998
auaauccaccauuaacaug

SEQ ID NO: 825000 - RNA, 19 nt, Artificial Sequence
  Description of Artificial Sequence: Synthetic oligonucleotide
  Sense strand starting at position 1102 of SEQ ID NO: 587875
auguuaaugguggauuauu

SEQ ID NO: 825001 - RNA, 19 nt, Artificial Sequence
  Description of Artificial Sequence: Synthetic oligonucleotide
  Antisense strand to SEQ ID NO: 825000
aauaauccaccauuaacau

SEQ ID NO: 825002 - RNA, 19 nt, Artificial Sequence
  Description of Artificial Sequence: Synthetic oligonucleotide
  Sense strand starting at position 1199 of SEQ ID NO: 587875
gggaaauuaaacuguguuu

SEQ ID NO: 825003 - RNA, 19 nt, Artificial Sequence
  Description of Artificial Sequence: Synthetic oligonucleotide
  Antisense strand to SEQ ID NO: 825002
aaacacaguuuaauuuccc

SEQ ID NO: 825004 - RNA, 19 nt, Artificial Sequence
  Description of Artificial Sequence: Synthetic oligonucleotide
  Sense strand starting at position 1243 of SEQ ID NO: 587875
auaaauauaugggcacauu

SEQ ID NO: 825005 - RNA, 19 nt, Artificial Sequence
  Description of Artificial Sequence: Synthetic oligonucleotide
  Antisense strand to SEQ ID NO: 825004
aaugugcccauauauuuau

SEQ ID NO: 825006 - RNA, 19 nt, Artificial Sequence
  Description of Artificial Sequence: Synthetic oligonucleotide
  Sense strand starting at position 1315 of SEQ ID NO: 587875
aguuaucuucuguguauuu

SEQ ID NO: 825007 - RNA, 19 nt, Artificial Sequence
  Description of Artificial Sequence: Synthetic oligonucleotide
  Antisense strand to SEQ ID NO: 825006
aaauacacagaagauaacu

SEQ ID NO: 825008 - RNA, 19 nt, Artificial Sequence
  Description of Artificial Sequence: Synthetic oligonucleotide
  Sense strand starting at position 1521 of SEQ ID NO: 587875
accaaauucucaguuaagu

SEQ ID NO: 825009 - RNA, 19 nt, Artificial Sequence
  Description of Artificial Sequence: Synthetic oligonucleotide
  Antisense strand to SEQ ID NO: 825008
acuuaacugagaauuuggu

SEQ ID NO: 825010 - RNA, 19 nt, Artificial Sequence
  Description of Artificial Sequence: Synthetic oligonucleotide
  Sense strand starting at position 1554 of SEQ ID NO: 587875
gcaugcaauuacuuaagau

SEQ ID NO: 825011 - RNA, 19 nt, Artificial Sequence
  Description of Artificial Sequence: Synthetic oligonucleotide
  Antisense strand to SEQ ID NO: 825010
aucuuaaguaauugcaugc

SEQ ID NO: 825012 - RNA, 19 nt, Artificial Sequence
  Description of Artificial Sequence: Synthetic oligonucleotide
  Sense strand starting at position 1593 of SEQ ID NO: 587875
ggagguauuucugaauaca

SEQ ID NO: 825013 - RNA, 19 nt, Artificial Sequence
  Description of Artificial Sequence: Synthetic oligonucleotide
  Antisense strand to SEQ ID NO: 825012
uguauucagaaauaccucc

SEQ ID NO: 825014 - RNA, 19 nt, Artificial Sequence
  Description of Artificial Sequence: Synthetic oligonucleotide
  Sense strand starting at position 1667 of SEQ ID NO: 587875
aaacauagugagugaagua

SEQ ID NO: 825015 - RNA, 19 nt, Artificial Sequence
  Description of Artificial Sequence: Synthetic oligonucleotide
  Antisense strand to SEQ ID NO: 825014
uacuucacucacuauguuu

SEQ ID NO: 825016 - RNA, 19 nt, Artificial Sequence
  Description of Artificial Sequence: Synthetic oligonucleotide
  Sense strand starting at position 1744 of SEQ ID NO: 587875
ccaggaauuugccaacaaa

SEQ ID NO: 825017 - RNA, 19 nt, Artificial Sequence
  Description of Artificial Sequence: Synthetic oligonucleotide
  Antisense strand to SEQ ID NO: 825016
uuuguuggcaaauuccugg

SEQ ID NO: 825018 - RNA, 19 nt, Artificial Sequence
  Description of Artificial Sequence: Synthetic oligonucleotide
  Sense strand starting at position 1876 of SEQ ID NO: 587875
ugaggcacucagugaggua

SEQ ID NO: 825019 - RNA, 19 nt, Artificial Sequence
  Description of Artificial Sequence: Synthetic oligonucleotide
  Antisense strand to SEQ ID NO: 825018
uaccucacugagugccuca

SEQ ID NO: 825020 - RNA, 19 nt, Artificial Sequence
  Description of Artificial Sequence: Synthetic oligonucleotide
  Sense strand starting at position 1877 of SEQ ID NO: 587875
gaggcacucagugagguau

SEQ ID NO: 825021 - RNA, 19 nt, Artificial Sequence
  Description of Artificial Sequence: Synthetic oligonucleotide
  Antisense strand to SEQ ID NO: 825020
auaccucacugagugccuc

SEQ ID NO: 825022 - RNA, 19 nt, Artificial Sequence
  Description of Artificial Sequence: Synthetic oligonucleotide
  Sense strand starting at position 1919 of SEQ ID NO: 587875
gggacacuguucucugaac

SEQ ID NO: 825023 - RNA, 19 nt, Artificial Sequence
  Description of Artificial Sequence: Synthetic oligonucleotide
  Antisense strand to SEQ ID NO: 825022
guucagagaacaguguccc

SEQ ID NO: 825024 - RNA, 19 nt, Artificial Sequence
  Description of Artificial Sequence: Synthetic oligonucleotide
  Sense strand starting at position 1940 of SEQ ID NO: 587875
ggaugugcuguuggauuua

SEQ ID NO: 825025 - RNA, 19 nt, Artificial Sequence
  Description of Artificial Sequence: Synthetic oligonucleotide
  Antisense strand to SEQ ID NO: 825024
uaaauccaacagcacaucc

SEQ ID NO: 825026 - RNA, 19 nt, Artificial Sequence
  Description of Artificial Sequence: Synthetic oligonucleotide
  Sense strand starting at position 1966 of SEQ ID NO: 587875
cuguuaucugaggauucug

SEQ ID NO: 825027 - RNA, 19 nt, Artificial Sequence
  Description of Artificial Sequence: Synthetic oligonucleotide
  Antisense strand to SEQ ID NO: 825026
cagaauccucagauaacag

SEQ ID NO: 825028 - RNA, 19 nt, Artificial Sequence
  Description of Artificial Sequence: Synthetic oligonucleotide
  Sense strand starting at position 2003 of SEQ ID NO: 587875
ugccuuuguccacaaagau

SEQ ID NO: 825029 - RNA, 19 nt, Artificial Sequence
  Description of Artificial Sequence: Synthetic oligonucleotide
  Antisense strand to SEQ ID NO: 825028
aucuuuguggacaaaggca

SEQ ID NO: 825030 - RNA, 19 nt, Artificial Sequence
  Description of Artificial Sequence: Synthetic oligonucleotide
  Sense strand starting at position 2349 of SEQ ID NO: 587875
ucuguaaaggcuuagauua

SEQ ID NO: 825031 - RNA, 19 nt, Artificial Sequence
  Description of Artificial Sequence: Synthetic oligonucleotide
  Antisense strand to SEQ ID NO: 825030
uaaucuaagccuuuacaga

SEQ ID NO: 825032 - RNA, 19 nt, Artificial Sequence
  Description of Artificial Sequence: Synthetic oligonucleotide
  Sense strand starting at position 2444 of SEQ ID NO: 587875
augacuggaugguuaacua

SEQ ID NO: 825033 - RNA, 19 nt, Artificial Sequence
  Description of Artificial Sequence: Synthetic oligonucleotide
  Antisense strand to SEQ ID NO: 825032
uaguuaaccauccagucau

SEQ ID NO: 825034 - RNA, 19 nt, Artificial Sequence
  Description of Artificial Sequence: Synthetic oligonucleotide
  Sense strand starting at position 2486 of SEQ ID NO: 587875
gggaucuugagaggcucua

SEQ ID NO: 825035 - RNA, 19 nt, Artificial Sequence
  Description of Artificial Sequence: Synthetic oligonucleotide
  Antisense strand to SEQ ID NO: 825034
uagagccucucaagauccc

SEQ ID NO: 825036 - RNA, 19 nt, Artificial Sequence
  Description of Artificial Sequence: Synthetic oligonucleotide
  Sense strand starting at position 2497 of SEQ ID NO: 587875
aggcucuaaugaucuauau

SEQ ID NO: 825037 - RNA, 19 nt, Artificial Sequence
  Description of Artificial Sequence: Synthetic oligonucleotide
  Antisense strand to SEQ ID NO: 825036
auauagaucauuagagccu

SEQ ID NO: 825038 - RNA, 19 nt, Artificial Sequence
  Description of Artificial Sequence: Synthetic oligonucleotide
  Sense strand starting at position 2632 of SEQ ID NO: 587875
cuccuaauugugggaauua

SEQ ID NO: 825039 - RNA, 19 nt, Artificial Sequence
  Description of Artificial Sequence: Synthetic oligonucleotide
  Antisense strand to SEQ ID NO: 825038
uaauucccacaauuaggag

SEQ ID NO: 825040 - RNA, 19 nt, Artificial Sequence
  Description of Artificial Sequence: Synthetic oligonucleotide
  Sense strand starting at position 2653 of SEQ ID NO: 587875
uagggaacuuucgauuuaa

SEQ ID NO: 825041 - RNA, 19 nt, Artificial Sequence
  Description of Artificial Sequence: Synthetic oligonucleotide
  Antisense strand to SEQ ID NO: 825040
uuaaaucgaaaguucccua

SEQ ID NO: 825042 - RNA, 19 nt, Artificial Sequence
  Description of Artificial Sequence: Synthetic oligonucleotide
  Sense strand starting at position 3110 of SEQ ID NO: 587875
cuacaaucugguggcuuaa

SEQ ID NO: 825043 - RNA, 19 nt, Artificial Sequence
  Description of Artificial Sequence: Synthetic oligonucleotide
  Antisense strand to SEQ ID NO: 825042
uuaagccaccagauuguag

SEQ ID NO: 825044 - RNA, 19 nt, Artificial Sequence
  Description of Artificial Sequence: Synthetic oligonucleotide
  Sense strand starting at position 3178 of SEQ ID NO: 587875
uacaucacaccggguuaaa

SEQ ID NO: 825045 - RNA, 19 nt, Artificial Sequence
  Description of Artificial Sequence: Synthetic oligonucleotide
  Antisense strand to SEQ ID NO: 825044
uuuaacccggugugaugua

SEQ ID NO: 825046 - RNA, 19 nt, Artificial Sequence
  Description of Artificial Sequence: Synthetic oligonucleotide
  Sense strand starting at position 3674 of SEQ ID NO: 587875
gcaagacucugggcauaag

SEQ ID NO: 825047 - RNA, 19 nt, Artificial Sequence
  Description of Artificial Sequence: Synthetic oligonucleotide
  Antisense strand to SEQ ID NO: 825046
cuuaugcccagagucuugc

SEQ ID NO: 825048 - RNA, 19 nt, Artificial Sequence
  Description of Artificial Sequence: Synthetic oligonucleotide
  Sense strand starting at position 3685 of SEQ ID NO: 587875
ggcauaaggcaguauccuu

SEQ ID NO: 825049 - RNA, 19 nt, Artificial Sequence
  Description of Artificial Sequence: Synthetic oligonucleotide
  Antisense strand to SEQ ID NO: 825048
aaggauacugccuuaugcc

SEQ ID NO: 825050 - RNA, 19 nt, Artificial Sequence
  Description of Artificial Sequence: Synthetic oligonucleotide
  Sense strand starting at position 3754 of SEQ ID NO: 587875
guguuagaacucugagggu

SEQ ID NO: 825051 - RNA, 19 nt, Artificial Sequence
  Description of Artificial Sequence: Synthetic oligonucleotide
  Antisense strand to SEQ ID NO: 825050
acccucagaguucuaacac

SEQ ID NO: 825052 - RNA, 19 nt, Artificial Sequence
  Description of Artificial Sequence: Synthetic oligonucleotide
  Sense strand starting at position 3791 of SEQ ID NO: 587875
uguaccuguguccaauaga

SEQ ID NO: 825053 - RNA, 19 nt, Artificial Sequence
  Description of Artificial Sequence: Synthetic oligonucleotide
  Antisense strand to SEQ ID NO: 825052
ucuauuggacacagguaca

SEQ ID NO: 825054 - RNA, 19 nt, Artificial Sequence
  Description of Artificial Sequence: Synthetic oligonucleotide
  Sense strand starting at position 3954 of SEQ ID NO: 587875
aucacauguugggcaauaa

SEQ ID NO: 825055 - RNA, 19 nt, Artificial Sequence
  Description of Artificial Sequence: Synthetic oligonucleotide
  Antisense strand to SEQ ID NO: 825054
uuauugcccaacaugugau

SEQ ID NO: 825056 - RNA, 19 nt, Artificial Sequence
  Description of Artificial Sequence: Synthetic oligonucleotide
  Sense strand starting at position 3955 of SEQ ID NO: 587875
ucacauguugggcaauaau

SEQ ID NO: 825057 - RNA, 19 nt, Artificial Sequence
  Description of Artificial Sequence: Synthetic oligonucleotide
  Antisense strand to SEQ ID NO: 825056
auuauugcccaacauguga

SEQ ID NO: 825058 - RNA, 19 nt, Artificial Sequence
  Description of Artificial Sequence: Synthetic oligonucleotide
  Sense strand starting at position 60 of SEQ ID NO: 587876
uacagaaacgucugugaaa

SEQ ID NO: 825059 - RNA, 19 nt, Artificial Sequence
  Description of Artificial Sequence: Synthetic oligonucleotide
  Antisense strand to SEQ ID NO: 825058
uuucacagacguuucugua

SEQ ID NO: 825060 - RNA, 19 nt, Artificial Sequence
  Description of Artificial Sequence: Synthetic oligonucleotide
  Sense strand starting at position 61 of SEQ ID NO: 587876
acagaaacgucugugaaau

SEQ ID NO: 825061 - RNA, 19 nt, Artificial Sequence
  Description of Artificial Sequence: Synthetic oligonucleotide
  Antisense strand to SEQ ID NO: 825060
auuucacagacguuucugu

SEQ ID NO: 825062 - RNA, 19 nt, Artificial Sequence
  Description of Artificial Sequence: Synthetic oligonucleotide
  Sense strand starting at position 173 of SEQ ID NO: 587876
acuacaguguaccuuuaaa

SEQ ID NO: 825063 - RNA, 19 nt, Artificial Sequence
  Description of Artificial Sequence: Synthetic oligonucleotide
  Antisense strand to SEQ ID NO: 825062
uuuaaagguacacuguagu

SEQ ID NO: 825064 - RNA, 19 nt, Artificial Sequence
  Description of Artificial Sequence: Synthetic oligonucleotide
  Sense strand starting at position 624 of SEQ ID NO: 587876
ccuuccuugcucuagagau

SEQ ID NO: 825065 - RNA, 19 nt, Artificial Sequence
  Description of Artificial Sequence: Synthetic oligonucleotide
  Antisense strand to SEQ ID NO: 825064
aucucuagagcaaggaagg

SEQ ID NO: 825066 - RNA, 19 nt, Artificial Sequence
  Description of Artificial Sequence: Synthetic oligonucleotide
  Sense strand starting at position 626 of SEQ ID NO: 587876
uuccuugcucuagagauga

SEQ ID NO: 825067 - RNA, 19 nt, Artificial Sequence
  Description of Artificial Sequence: Synthetic oligonucleotide
  Antisense strand to SEQ ID NO: 825066
ucaucucuagagcaaggaa

SEQ ID NO: 825068 - RNA, 19 nt, Artificial Sequence
  Description of Artificial Sequence: Synthetic oligonucleotide
  Sense strand starting at position 670 of SEQ ID NO: 587876
uauccuaucgccuaggaga

SEQ ID NO: 825069 - RNA, 19 nt, Artificial Sequence
  Description of Artificial Sequence: Synthetic oligonucleotide
  Antisense strand to SEQ ID NO: 825068
ucuccuaggcgauaggaua

SEQ ID NO: 825070 - RNA, 19 nt, Artificial Sequence
  Description of Artificial Sequence: Synthetic oligonucleotide
  Sense strand starting at position 912 of SEQ ID NO: 587876
uuagaugaacugcaguuaa

SEQ ID NO: 825071 - RNA, 19 nt, Artificial Sequence
  Description of Artificial Sequence: Synthetic oligonucleotide
  Antisense strand to SEQ ID NO: 825070
uuaacugcaguucaucuaa

SEQ ID NO: 825072 - RNA, 19 nt, Artificial Sequence
  Description of Artificial Sequence: Synthetic oligonucleotide
  Sense strand starting at position 922 of SEQ ID NO: 587876
ugcaguuaagguuacagaa

SEQ ID NO: 825073 - RNA, 19 nt, Artificial Sequence
  Description of Artificial Sequence: Synthetic oligonucleotide
  Antisense strand to SEQ ID NO: 825072
uucuguaaccuuaacugca

SEQ ID NO: 825074 - RNA, 19 nt, Artificial Sequence
  Description of Artificial Sequence: Synthetic oligonucleotide
  Sense strand starting at position 1162 of SEQ ID NO: 587876
aaacuuguagcacagagua

SEQ ID NO: 825075 - RNA, 19 nt, Artificial Sequence
  Description of Artificial Sequence: Synthetic oligonucleotide
  Antisense strand to SEQ ID NO: 825074
uacucugugcuacaaguuu

SEQ ID NO: 825076 - RNA, 19 nt, Artificial Sequence
  Description of Artificial Sequence: Synthetic oligonucleotide
  Sense strand starting at position 1214 of SEQ ID NO: 587876
agaauuagguuaccauagu

SEQ ID NO: 825077 - RNA, 19 nt, Artificial Sequence
  Description of Artificial Sequence: Synthetic oligonucleotide
  Antisense strand to SEQ ID NO: 825076
acuaugguaaccuaauucu

SEQ ID NO: 825078 - RNA, 19 nt, Artificial Sequence
  Description of Artificial Sequence: Synthetic oligonucleotide
  Sense strand starting at position 1253 of SEQ ID NO: 587876
acaauacaauguuucugua

SEQ ID NO: 825079 - RNA, 19 nt, Artificial Sequence
  Description of Artificial Sequence: Synthetic oligonucleotide
  Antisense strand to SEQ ID NO: 825078
uacagaaacauuguauugu

SEQ ID NO: 825080 - RNA, 19 nt, Artificial Sequence
  Description of Artificial Sequence: Synthetic oligonucleotide
  Sense strand starting at position 1492 of SEQ ID NO: 587876
cauuacuaugacgguaaca

SEQ ID NO: 825081 - RNA, 19 nt, Artificial Sequence
  Description of Artificial Sequence: Synthetic oligonucleotide
  Antisense strand to SEQ ID NO: 825080
uguuaccgucauaguaaug

SEQ ID NO: 825082 - RNA, 19 nt, Artificial Sequence
  Description of Artificial Sequence: Synthetic oligonucleotide
  Sense strand starting at position 1494 of SEQ ID NO: 587876
uuacuaugacgguaacauu

SEQ ID NO: 825083 - RNA, 19 nt, Artificial Sequence
  Description of Artificial Sequence: Synthetic oligonucleotide
  Antisense strand to SEQ ID NO: 825082
aauguuaccgucauaguaa

SEQ ID NO: 825084 - RNA, 19 nt, Artificial Sequence
  Description of Artificial Sequence: Synthetic oligonucleotide
  Sense strand starting at position 1661 of SEQ ID NO: 587876
ccacauuaggccgagaagu

SEQ ID NO: 825085 - RNA, 19 nt, Artificial Sequence
  Description of Artificial Sequence: Synthetic oligonucleotide
  Antisense strand to SEQ ID NO: 825084
acuucucggccuaaugugg

SEQ ID NO: 825086 - RNA, 19 nt, Artificial Sequence
  Description of Artificial Sequence: Synthetic oligonucleotide
  Sense strand starting at position 1663 of SEQ ID NO: 587876
acauuaggccgagaaguca

SEQ ID NO: 825087 - RNA, 19 nt, Artificial Sequence
  Description of Artificial Sequence: Synthetic oligonucleotide
  Antisense strand to SEQ ID NO: 825086
ugacuucucggccuaaugu

SEQ ID NO: 825088 - RNA, 19 nt, Artificial Sequence
  Description of Artificial Sequence: Synthetic oligonucleotide
  Sense strand starting at position 1762 of SEQ ID NO: 587876
ggaacacgcugauuugcau

SEQ ID NO: 825089 - RNA, 19 nt, Artificial Sequence
  Description of Artificial Sequence: Synthetic oligonucleotide
  Antisense strand to SEQ ID NO: 825088
augcaaaucagcguguucc

SEQ ID NO: 825090 - RNA, 19 nt, Artificial Sequence
  Description of Artificial Sequence: Synthetic oligonucleotide
  Sense strand starting at position 1769 of SEQ ID NO: 587876
gcugauuugcaucaugugu

SEQ ID NO: 825091 - RNA, 19 nt, Artificial Sequence
  Description of Artificial Sequence: Synthetic oligonucleotide
  Antisense strand to SEQ ID NO: 825090
acacaugaugcaaaucagc

SEQ ID NO: 825092 - RNA, 19 nt, Artificial Sequence
  Description of Artificial Sequence: Synthetic oligonucleotide
  Sense strand starting at position 1780 of SEQ ID NO: 587876
ucaugugugccgggauuua

SEQ ID NO: 825093 - RNA, 19 nt, Artificial Sequence
  Description of Artificial Sequence: Synthetic oligonucleotide
  Antisense strand to SEQ ID NO: 825092
uaaaucccggcacacauga

SEQ ID NO: 825094 - RNA, 19 nt, Artificial Sequence
  Description of Artificial Sequence: Synthetic oligonucleotide
  Sense strand starting at position 1819 of SEQ ID NO: 587876
guccucuuaaugggaaaug

SEQ ID NO: 825095 - RNA, 19 nt, Artificial Sequence
  Description of Artificial Sequence: Synthetic oligonucleotide
  Antisense strand to SEQ ID NO: 825094
cauuucccauuaagaggac

SEQ ID NO: 825096 - RNA, 19 nt, Artificial Sequence
  Description of Artificial Sequence: Synthetic oligonucleotide
  Sense strand starting at position 1878 of SEQ ID NO: 587876
ugauuaugcuaauuacuga

SEQ ID NO: 825097 - RNA, 19 nt, Artificial Sequence
  Description of Artificial Sequence: Synthetic oligonucleotide
  Antisense strand to SEQ ID NO: 825096
ucaguaauuagcauaauca

SEQ ID NO: 825098 - RNA, 19 nt, Artificial Sequence
  Description of Artificial Sequence: Synthetic oligonucleotide
  Sense strand starting at position 2071 of SEQ ID NO: 587876
aaaggacauucuguccgau

SEQ ID NO: 825099 - RNA, 19 nt, Artificial Sequence
  Description of Artificial Sequence: Synthetic oligonucleotide
  Antisense strand to SEQ ID NO: 825098
aucggacagaauguccuuu

SEQ ID NO: 825100 - RNA, 19 nt, Artificial Sequence
  Description of Artificial Sequence: Synthetic oligonucleotide
  Sense strand starting at position 2089 of SEQ ID NO: 587876
uuauuuaaacagcgugauu

SEQ ID NO: 825101 - RNA, 19 nt, Artificial Sequence
  Description of Artificial Sequence: Synthetic oligonucleotide
  Antisense strand to SEQ ID NO: 825100
aaucacgcuguuuaaauaa

SEQ ID NO: 825102 - RNA, 19 nt, Artificial Sequence
  Description of Artificial Sequence: Synthetic oligonucleotide
  Sense strand starting at position 2092 of SEQ ID NO: 587876
uuuaaacagcgugauuaga

SEQ ID NO: 825103 - RNA, 19 nt, Artificial Sequence
  Description of Artificial Sequence: Synthetic oligonucleotide
  Antisense strand to SEQ ID NO: 825102
ucuaaucacgcuguuuaaa

SEQ ID NO: 825104 - RNA, 19 nt, Artificial Sequence
  Description of Artificial Sequence: Synthetic oligonucleotide
  Sense strand starting at position 2365 of SEQ ID NO: 587876
uuuaacuccuuggcuagaa

SEQ ID NO: 825105 - RNA, 19 nt, Artificial Sequence
  Description of Artificial Sequence: Synthetic oligonucleotide
  Antisense strand to SEQ ID NO: 825104
uucuagccaaggaguuaaa

SEQ ID NO: 825106 - RNA, 19 nt, Artificial Sequence
  Description of Artificial Sequence: Synthetic oligonucleotide
  Sense strand starting at position 2366 of SEQ ID NO: 587876
uuaacuccuuggcuagaaa

SEQ ID NO: 825107 - RNA, 19 nt, Artificial Sequence
  Description of Artificial Sequence: Synthetic oligonucleotide
  Antisense strand to SEQ ID NO: 825106
uuucuagccaaggaguuaa

SEQ ID NO: 825108 - RNA, 19 nt, Artificial Sequence
  Description of Artificial Sequence: Synthetic oligonucleotide
  Sense strand starting at position 2396 of SEQ ID NO: 587876
guaggugacugaccaucua

SEQ ID NO: 825109 - RNA, 19 nt, Artificial Sequence
  Description of Artificial Sequence: Synthetic oligonucleotide
  Antisense strand to SEQ ID NO: 825108
uagauggucagucaccuac

SEQ ID NO: 825110 - RNA, 19 nt, Artificial Sequence
  Description of Artificial Sequence: Synthetic oligonucleotide
  Sense strand starting at position 2549 of SEQ ID NO: 587876
guaucuacucaagacgguu

SEQ ID NO: 825111 - RNA, 19 nt, Artificial Sequence
  Description of Artificial Sequence: Synthetic oligonucleotide
  Antisense strand to SEQ ID NO: 825110
aaccgucuugaguagauac

SEQ ID NO: 825112 - RNA, 19 nt, Artificial Sequence
  Description of Artificial Sequence: Synthetic oligonucleotide
  Sense strand starting at position 2673 of SEQ ID NO: 587876
gcaucuuugggagauguca

SEQ ID NO: 825113 - RNA, 19 nt, Artificial Sequence
  Description of Artificial Sequence: Synthetic oligonucleotide
  Antisense strand to SEQ ID NO: 825112
ugacaucucccaaagaugc

SEQ ID NO: 825114 - RNA, 19 nt, Artificial Sequence
  Description of Artificial Sequence: Synthetic oligonucleotide
  Sense strand starting at position 2675 of SEQ ID NO: 587876
aucuuugggagaugucauu

SEQ ID NO: 825115 - RNA, 19 nt, Artificial Sequence
  Description of Artificial Sequence: Synthetic oligonucleotide
  Antisense strand to SEQ ID NO: 825114
aaugacaucucccaaagau

SEQ ID NO: 825116 - RNA, 19 nt, Artificial Sequence
  Description of Artificial Sequence: Synthetic oligonucleotide
  Sense strand starting at position 2979 of SEQ ID NO: 587876
acagguauccugcaacaug

SEQ ID NO: 825117 - RNA, 19 nt, Artificial Sequence
  Description of Artificial Sequence: Synthetic oligonucleotide
  Antisense strand to SEQ ID NO: 825116
cauguugcaggauaccugu

SEQ ID NO: 825118 - RNA, 19 nt, Artificial Sequence
  Description of Artificial Sequence: Synthetic oligonucleotide
  Sense strand starting at position 3296 of SEQ ID NO: 587876
gucagcacucaucaaagau

SEQ ID NO: 825119 - RNA, 19 nt, Artificial Sequence
  Description of Artificial Sequence: Synthetic oligonucleotide
  Antisense strand to SEQ ID NO: 825118
aucuuugaugagugcugac

SEQ ID NO: 825120 - RNA, 19 nt, Artificial Sequence
  Description of Artificial Sequence: Synthetic oligonucleotide
  Sense strand starting at position 3320 of SEQ ID NO: 587876
gcugcuaaugaacagaauu

SEQ ID NO: 825121 - RNA, 19 nt, Artificial Sequence
  Description of Artificial Sequence: Synthetic oligonucleotide
  Antisense strand to SEQ ID NO: 825120
aauucuguucauuagcagc

SEQ ID NO: 825122 - RNA, 19 nt, Artificial Sequence
  Description of Artificial Sequence: Synthetic oligonucleotide
  Sense strand starting at position 3356 of SEQ ID NO: 587876
gcaaacucacuccagaagu

SEQ ID NO: 825123 - RNA, 19 nt, Artificial Sequence
  Description of Artificial Sequence: Synthetic oligonucleotide
  Antisense strand to SEQ ID NO: 825122
acuucuggagugaguuugc

SEQ ID NO: 825124 - RNA, 19 nt, Artificial Sequence
  Description of Artificial Sequence: Synthetic oligonucleotide
  Sense strand starting at position 3477 of SEQ ID NO: 587876
ugcccuaaaccagaaagua

SEQ ID NO: 825125 - RNA, 19 nt, Artificial Sequence
  Description of Artificial Sequence: Synthetic oligonucleotide
  Antisense strand to SEQ ID NO: 825124
uacuuucugguuuagggca

SEQ ID NO: 825126 - RNA, 19 nt, Artificial Sequence
  Description of Artificial Sequence: Synthetic oligonucleotide
  Sense strand starting at position 3550 of SEQ ID NO: 587876
agcaaucugauguaugaug

SEQ ID NO: 825127 - RNA, 19 nt, Artificial Sequence
  Description of Artificial Sequence: Synthetic oligonucleotide
  Antisense strand to SEQ ID NO: 825126
caucauacaucagauugcu

SEQ ID NO: 825128 - RNA, 19 nt, Artificial Sequence
  Description of Artificial Sequence: Synthetic oligonucleotide
  Sense strand starting at position 3552 of SEQ ID NO: 587876
caaucugauguaugaugga

SEQ ID NO: 825129 - RNA, 19 nt, Artificial Sequence
  Description of Artificial Sequence: Synthetic oligonucleotide
  Antisense strand to SEQ ID NO: 825128
uccaucauacaucagauug

SEQ ID NO: 825130 - RNA, 19 nt, Artificial Sequence
  Description of Artificial Sequence: Synthetic oligonucleotide
  Sense strand starting at position 3629 of SEQ ID NO: 587876
gucagauaugccuaguaug

SEQ ID NO: 825131 - RNA, 19 nt, Artificial Sequence
  Description of Artificial Sequence: Synthetic oligonucleotide
  Antisense strand to SEQ ID NO: 825130
cauacuaggcauaucugac

SEQ ID NO: 825132 - RNA, 19 nt, Artificial Sequence
  Description of Artificial Sequence: Synthetic oligonucleotide
  Sense strand starting at position 3674 of SEQ ID NO: 587876
ccuguuccacaguggaaga

SEQ ID NO: 825133 - RNA, 19 nt, Artificial Sequence
  Description of Artificial Sequence: Synthetic oligonucleotide
  Antisense strand to SEQ ID NO: 825132
ucuuccacuguggaacagg

SEQ ID NO: 825134 - RNA, 19 nt, Artificial Sequence
  Description of Artificial Sequence: Synthetic oligonucleotide
  Sense strand starting at position 3826 of SEQ ID NO: 587876
guaucagaguaccuugaaa

SEQ ID NO: 825135 - RNA, 19 nt, Artificial Sequence
  Description of Artificial Sequence: Synthetic oligonucleotide
  Antisense strand to SEQ ID NO: 825134
uuucaagguacucugauac

SEQ ID NO: 825136 - RNA, 19 nt, Artificial Sequence
  Description of Artificial Sequence: Synthetic oligonucleotide
  Sense strand starting at position 3966 of SEQ ID NO: 587876
guuuaugaauguccacuaa

SEQ ID NO: 825137 - RNA, 19 nt, Artificial Sequence
  Description of Artificial Sequence: Synthetic oligonucleotide
  Antisense strand to SEQ ID NO: 825136
uuaguggacauucauaaac

SEQ ID NO: 825138 - RNA, 19 nt, Artificial Sequence
  Description of Artificial Sequence: Synthetic oligonucleotide
  Sense strand starting at position 66 of SEQ ID NO: 587877
gugcuagacucaucaacaa

SEQ ID NO: 825139 - RNA, 19 nt, Artificial Sequence
  Description of Artificial Sequence: Synthetic oligonucleotide
  Antisense strand to SEQ ID NO: 825138
uuguugaugagucuagcac

SEQ ID NO: 825140 - RNA, 19 nt, Artificial Sequence
  Description of Artificial Sequence: Synthetic oligonucleotide
  Sense strand starting at position 151 of SEQ ID NO: 587877
auguuuguuuacccuuaau

SEQ ID NO: 825141 - RNA, 19 nt, Artificial Sequence
  Description of Artificial Sequence: Synthetic oligonucleotide
  Antisense strand to SEQ ID NO: 825140
auuaaggguaaacaaacau

SEQ ID NO: 825142 - RNA, 19 nt, Artificial Sequence
  Description of Artificial Sequence: Synthetic oligonucleotide
  Sense strand starting at position 164 of SEQ ID NO: 587877
cuuaauuaggaaugucacu

SEQ ID NO: 825143 - RNA, 19 nt, Artificial Sequence
  Description of Artificial Sequence: Synthetic oligonucleotide
  Antisense strand to SEQ ID NO: 825142
agugacauuccuaauuaag

SEQ ID NO: 825144 - RNA, 19 nt, Artificial Sequence
  Description of Artificial Sequence: Synthetic oligonucleotide
  Sense strand starting at position 169 of SEQ ID NO: 587877
uuaggaaugucacuuagaa

SEQ ID NO: 825145 - RNA, 19 nt, Artificial Sequence
  Description of Artificial Sequence: Synthetic oligonucleotide
  Antisense strand to SEQ ID NO: 825144
uucuaagugacauuccuaa

SEQ ID NO: 825146 - RNA, 19 nt, Artificial Sequence
  Description of Artificial Sequence: Synthetic oligonucleotide
  Sense strand starting at position 282 of SEQ ID NO: 587877
gggugacaauguuauauaa

SEQ ID NO: 825147 - RNA, 19 nt, Artificial Sequence
  Description of Artificial Sequence: Synthetic oligonucleotide
  Antisense strand to SEQ ID NO: 825146
uuauauaacauugucaccc

SEQ ID NO: 825148 - RNA, 19 nt, Artificial Sequence
  Description of Artificial Sequence: Synthetic oligonucleotide
  Sense strand starting at position 420 of SEQ ID NO: 587877
uuuacucuauggguaacau

SEQ ID NO: 825149 - RNA, 19 nt, Artificial Sequence
  Description of Artificial Sequence: Synthetic oligonucleotide
  Antisense strand to SEQ ID NO: 825148
auguuacccauagaguaaa

SEQ ID NO: 825150 - RNA, 19 nt, Artificial Sequence
  Description of Artificial Sequence: Synthetic oligonucleotide
  Sense strand starting at position 421 of SEQ ID NO: 587877
uuacucuauggguaacauu

SEQ ID NO: 825151 - RNA, 19 nt, Artificial Sequence
  Description of Artificial Sequence: Synthetic oligonucleotide
  Antisense strand to SEQ ID NO: 825150
aauguuacccauagaguaa

SEQ ID NO: 825152 - RNA, 19 nt, Artificial Sequence
  Description of Artificial Sequence: Synthetic oligonucleotide
  Sense strand starting at position 480 of SEQ ID NO: 587877
gcauuuaaugcacacguuu

SEQ ID NO: 825153 - RNA, 19 nt, Artificial Sequence
  Description of Artificial Sequence: Synthetic oligonucleotide
  Antisense strand to SEQ ID NO: 825152
aaacgugugcauuaaaugc

SEQ ID NO: 825154 - RNA, 19 nt, Artificial Sequence
  Description of Artificial Sequence: Synthetic oligonucleotide
  Sense strand starting at position 1027 of SEQ ID NO: 587877
accguaaauuaagcuagua

SEQ ID NO: 825155 - RNA, 19 nt, Artificial Sequence
  Description of Artificial Sequence: Synthetic oligonucleotide
  Antisense strand to SEQ ID NO: 825154
uacuagcuuaauuuacggu

SEQ ID NO: 825156 - RNA, 19 nt, Artificial Sequence
  Description of Artificial Sequence: Synthetic oligonucleotide
  Sense strand starting at position 1029 of SEQ ID NO: 587877
cguaaauuaagcuaguaug

SEQ ID NO: 825157 - RNA, 19 nt, Artificial Sequence
  Description of Artificial Sequence: Synthetic oligonucleotide
  Antisense strand to SEQ ID NO: 825156
cauacuagcuuaauuuacg

SEQ ID NO: 825158 - RNA, 19 nt, Artificial Sequence
  Description of Artificial Sequence: Synthetic oligonucleotide
  Sense strand starting at position 1044 of SEQ ID NO: 587877
uauguuauugcguaaagua

SEQ ID NO: 825159 - RNA, 19 nt, Artificial Sequence
  Description of Artificial Sequence: Synthetic oligonucleotide
  Antisense strand to SEQ ID NO: 825158
uacuuuacgcaauaacaua

SEQ ID NO: 825160 - RNA, 19 nt, Artificial Sequence
  Description of Artificial Sequence: Synthetic oligonucleotide
  Sense strand starting at position 1053 of SEQ ID NO: 587877
gcguaaaguaauggucuua

SEQ ID NO: 825161 - RNA, 19 nt, Artificial Sequence
  Description of Artificial Sequence: Synthetic oligonucleotide
  Antisense strand to SEQ ID NO: 825160
uaagaccauuacuuuacgc

SEQ ID NO: 825162 - RNA, 19 nt, Artificial Sequence
  Description of Artificial Sequence: Synthetic oligonucleotide
  Sense strand starting at position 1063 of SEQ ID NO: 587877
auggucuuacccuagacga

SEQ ID NO: 825163 - RNA, 19 nt, Artificial Sequence
  Description of Artificial Sequence: Synthetic oligonucleotide
  Antisense strand to SEQ ID NO: 825162
ucgucuaggguaagaccau

SEQ ID NO: 825164 - RNA, 19 nt, Artificial Sequence
  Description of Artificial Sequence: Synthetic oligonucleotide
  Sense strand starting at position 1076 of SEQ ID NO: 587877
agacgaaggugaguuuaau

SEQ ID NO: 825165 - RNA, 19 nt, Artificial Sequence
  Description of Artificial Sequence: Synthetic oligonucleotide
  Antisense strand to SEQ ID NO: 825164
auuaaacucaccuucgucu

SEQ ID NO: 825166 - RNA, 19 nt, Artificial Sequence
  Description of Artificial Sequence: Synthetic oligonucleotide
  Sense strand starting at position 1082 of SEQ ID NO: 587877
aggugaguuuaauuguaac

SEQ ID NO: 825167 - RNA, 19 nt, Artificial Sequence
  Description of Artificial Sequence: Synthetic oligonucleotide
  Antisense strand to SEQ ID NO: 825166
guuacaauuaaacucaccu

SEQ ID NO: 825168 - RNA, 19 nt, Artificial Sequence
  Description of Artificial Sequence: Synthetic oligonucleotide
  Sense strand starting at position 1192 of SEQ ID NO: 587877
gcugguccuagagaacuua

SEQ ID NO: 825169 - RNA, 19 nt, Artificial Sequence
  Description of Artificial Sequence: Synthetic oligonucleotide
  Antisense strand to SEQ ID NO: 825168
uaaguucucuaggaccagc

SEQ ID NO: 825170 - RNA, 19 nt, Artificial Sequence
  Description of Artificial Sequence: Synthetic oligonucleotide
  Sense strand starting at position 1249 of SEQ ID NO: 587877
ggccauuuaucugcaaggu

SEQ ID NO: 825171 - RNA, 19 nt, Artificial Sequence
  Description of Artificial Sequence: Synthetic oligonucleotide
  Antisense strand to SEQ ID NO: 825170
accuugcagauaaauggcc

SEQ ID NO: 825172 - RNA, 19 nt, Artificial Sequence
  Description of Artificial Sequence: Synthetic oligonucleotide
  Sense strand starting at position 1306 of SEQ ID NO: 587877
gcugaaauccuaugcaaau

SEQ ID NO: 825173 - RNA, 19 nt, Artificial Sequence
  Description of Artificial Sequence: Synthetic oligonucleotide
  Antisense strand to SEQ ID NO: 825172
auuugcauaggauuucagc

SEQ ID NO: 825174 - RNA, 19 nt, Artificial Sequence
  Description of Artificial Sequence: Synthetic oligonucleotide
  Sense strand starting at position 1345 of SEQ ID NO: 587877
ggaaacacuucugucaagu

SEQ ID NO: 825175 - RNA, 19 nt, Artificial Sequence
  Description of Artificial Sequence: Synthetic oligonucleotide
  Antisense strand to SEQ ID NO: 825174
acuugacagaaguguuucc

SEQ ID NO: 825176 - RNA, 19 nt, Artificial Sequence
  Description of Artificial Sequence: Synthetic oligonucleotide
  Sense strand starting at position 1355 of SEQ ID NO: 587877
cugucaagucacuacacaa

SEQ ID NO: 825177 - RNA, 19 nt, Artificial Sequence
  Description of Artificial Sequence: Synthetic oligonucleotide
  Antisense strand to SEQ ID NO: 825176
uuguguagugacuugacag

SEQ ID NO: 825178 - RNA, 19 nt, Artificial Sequence
  Description of Artificial Sequence: Synthetic oligonucleotide
  Sense strand starting at position 1702 of SEQ ID NO: 587877
cugccacuuccgucgaguu

SEQ ID NO: 825179 - RNA, 19 nt, Artificial Sequence
  Description of Artificial Sequence: Synthetic oligonucleotide
  Antisense strand to SEQ ID NO: 825178
aacucgacggaaguggcag

SEQ ID NO: 825180 - RNA, 19 nt, Artificial Sequence
  Description of Artificial Sequence: Synthetic oligonucleotide
  Sense strand starting at position 1969 of SEQ ID NO: 587877
ugcgucucuccggcucaaa

SEQ ID NO: 825181 - RNA, 19 nt, Artificial Sequence
  Description of Artificial Sequence: Synthetic oligonucleotide
  Antisense strand to SEQ ID NO: 825180
uuugagccggagagacgca

SEQ ID NO: 825182 - RNA, 19 nt, Artificial Sequence
  Description of Artificial Sequence: Synthetic oligonucleotide
  Sense strand starting at position 2850 of SEQ ID NO: 587877
gccugugagcuuguaugua

SEQ ID NO: 825183 - RNA, 19 nt, Artificial Sequence
  Description of Artificial Sequence: Synthetic oligonucleotide
  Antisense strand to SEQ ID NO: 825182
uacauacaagcucacaggc

SEQ ID NO: 825184 - RNA, 19 nt, Artificial Sequence
  Description of Artificial Sequence: Synthetic oligonucleotide
  Sense strand starting at position 2897 of SEQ ID NO: 587877
aguguuucagagggaugag

SEQ ID NO: 825185 - RNA, 19 nt, Artificial Sequence
  Description of Artificial Sequence: Synthetic oligonucleotide
  Antisense strand to SEQ ID NO: 825184
cucaucccucugaaacacu

SEQ ID NO: 825186 - RNA, 19 nt, Artificial Sequence
  Description of Artificial Sequence: Synthetic oligonucleotide
  Sense strand starting at position 2967 of SEQ ID NO: 587877
ggaacuaagugguuccaau

SEQ ID NO: 825187 - RNA, 19 nt, Artificial Sequence
  Description of Artificial Sequence: Synthetic oligonucleotide
  Antisense strand to SEQ ID NO: 825186
auuggaaccacuuaguucc

SEQ ID NO: 825188 - RNA, 19 nt, Artificial Sequence
  Description of Artificial Sequence: Synthetic oligonucleotide
  Sense strand starting at position 2975 of SEQ ID NO: 587877
gugguuccaaugugaauuu

SEQ ID NO: 825189 - RNA, 19 nt, Artificial Sequence
  Description of Artificial Sequence: Synthetic oligonucleotide
  Antisense strand to SEQ ID NO: 825188
aaauucacauuggaaccac

SEQ ID NO: 825190 - RNA, 19 nt, Artificial Sequence
  Description of Artificial Sequence: Synthetic oligonucleotide
  Sense strand starting at position 2986 of SEQ ID NO: 587877
gugaauuuguaucaaagua

SEQ ID NO: 825191 - RNA, 19 nt, Artificial Sequence
  Description of Artificial Sequence: Synthetic oligonucleotide
  Antisense strand to SEQ ID NO: 825190
uacuuugauacaaauucac

SEQ ID NO: 825192 - RNA, 19 nt, Artificial Sequence
  Description of Artificial Sequence: Synthetic oligonucleotide
  Sense strand starting at position 3050 of SEQ ID NO: 587877
augacaagcgguggucaau

SEQ ID NO: 825193 - RNA, 19 nt, Artificial Sequence
  Description of Artificial Sequence: Synthetic oligonucleotide
  Antisense strand to SEQ ID NO: 825192
auugaccaccgcuugucau

SEQ ID NO: 825194 - RNA, 19 nt, Artificial Sequence
  Description of Artificial Sequence: Synthetic oligonucleotide
  Sense strand starting at position 3137 of SEQ ID NO: 587877
gugaccuagucccuagaaa

SEQ ID NO: 825195 - RNA, 19 nt, Artificial Sequence
  Description of Artificial Sequence: Synthetic oligonucleotide
  Antisense strand to SEQ ID NO: 825194
uuucuagggacuaggucac

SEQ ID NO: 825196 - RNA, 19 nt, Artificial Sequence
  Description of Artificial Sequence: Synthetic oligonucleotide
  Sense strand starting at position 3372 of SEQ ID NO: 587877
gcaggagaaucccucgauu

SEQ ID NO: 825197 - RNA, 19 nt, Artificial Sequence
  Description of Artificial Sequence: Synthetic oligonucleotide
  Antisense strand to SEQ ID NO: 825196
aaucgagggauucuccugc

SEQ ID NO: 825198 - RNA, 19 nt, Artificial Sequence
  Description of Artificial Sequence: Synthetic oligonucleotide
  Sense strand starting at position 3374 of SEQ ID NO: 587877
aggagaaucccucgauucu

SEQ ID NO: 825199 - RNA, 19 nt, Artificial Sequence
  Description of Artificial Sequence: Synthetic oligonucleotide
  Antisense strand to SEQ ID NO: 825198
agaaucgagggauucuccu

SEQ ID NO: 825200 - RNA, 19 nt, Artificial Sequence
  Description of Artificial Sequence: Synthetic oligonucleotide
  Sense strand starting at position 3533 of SEQ ID NO: 587877
uguaauauauuggcaaguu

SEQ ID NO: 825201 - RNA, 19 nt, Artificial Sequence
  Description of Artificial Sequence: Synthetic oligonucleotide
  Antisense strand to SEQ ID NO: 825200
aacuugccaauauauuaca

SEQ ID NO: 825202 - RNA, 19 nt, Artificial Sequence
  Description of Artificial Sequence: Synthetic oligonucleotide
  Sense strand starting at position 3559 of SEQ ID NO: 587877
ucuuguuuacuugagacuu

SEQ ID NO: 825203 - RNA, 19 nt, Artificial Sequence
  Description of Artificial Sequence: Synthetic oligonucleotide
  Antisense strand to SEQ ID NO: 825202
aagucucaaguaaacaaga

SEQ ID NO: 825204 - RNA, 19 nt, Artificial Sequence
  Description of Artificial Sequence: Synthetic oligonucleotide
  Sense strand starting at position 3645 of SEQ ID NO: 587877
aauggugucuugcuuuaga

SEQ ID NO: 825205 - RNA, 19 nt, Artificial Sequence
  Description of Artificial Sequence: Synthetic oligonucleotide
  Antisense strand to SEQ ID NO: 825204
ucuaaagcaagacaccauu

SEQ ID NO: 825206 - RNA, 19 nt, Artificial Sequence
  Description of Artificial Sequence: Synthetic oligonucleotide
  Sense strand starting at position 3648 of SEQ ID NO: 587877
ggugucuugcuuuagauuc

SEQ ID NO: 825207 - RNA, 19 nt, Artificial Sequence
  Description of Artificial Sequence: Synthetic oligonucleotide
  Antisense strand to SEQ ID NO: 825206
gaaucuaaagcaagacacc

SEQ ID NO: 825208 - RNA, 19 nt, Artificial Sequence
  Description of Artificial Sequence: Synthetic oligonucleotide
  Sense strand starting at position 3706 of SEQ ID NO: 587877
gguguauguguguacacuu

SEQ ID NO: 825209 - RNA, 19 nt, Artificial Sequence
  Description of Artificial Sequence: Synthetic oligonucleotide
  Antisense strand to SEQ ID NO: 825208
aaguguacacacauacacc

SEQ ID NO: 825210 - RNA, 19 nt, Artificial Sequence
  Description of Artificial Sequence: Synthetic oligonucleotide
  Sense strand starting at position 3713 of SEQ ID NO: 587877
guguguacacuugguuaca

SEQ ID NO: 825211 - RNA, 19 nt, Artificial Sequence
  Description of Artificial Sequence: Synthetic oligonucleotide
  Antisense strand to SEQ ID NO: 825210
uguaaccaaguguacacac

SEQ ID NO: 825212 - RNA, 19 nt, Artificial Sequence
  Description of Artificial Sequence: Synthetic oligonucleotide
  Sense strand starting at position 3789 of SEQ ID NO: 587877
gggucuguacugugacuca

SEQ ID NO: 825213 - RNA, 19 nt, Artificial Sequence
  Description of Artificial Sequence: Synthetic oligonucleotide
  Antisense strand to SEQ ID NO: 825212
ugagucacaguacagaccc

SEQ ID NO: 825214 - RNA, 19 nt, Artificial Sequence
  Description of Artificial Sequence: Synthetic oligonucleotide
  Sense strand starting at position 3846 of SEQ ID NO: 587877
ucaugccauugaucaugau

SEQ ID NO: 825215 - RNA, 19 nt, Artificial Sequence
  Description of Artificial Sequence: Synthetic oligonucleotide
  Antisense strand to SEQ ID NO: 825214
aucaugaucaauggcauga

SEQ ID NO: 825216 - RNA, 19 nt, Artificial Sequence
  Description of Artificial Sequence: Synthetic oligonucleotide
  Sense strand starting at position 3951 of SEQ ID NO: 587877
gcagaagagugacuucaug

SEQ ID NO: 825217 - RNA, 19 nt, Artificial Sequence
  Description of Artificial Sequence: Synthetic oligonucleotide
  Antisense strand to SEQ ID NO: 825216
caugaagucacucuucugc

SEQ ID NO: 825218 - RNA, 19 nt, Artificial Sequence
  Description of Artificial Sequence: Synthetic oligonucleotide
  Sense strand starting at position 326 of SEQ ID NO: 587878
accguaaauuaagcuagua

SEQ ID NO: 825219 - RNA, 19 nt, Artificial Sequence
  Description of Artificial Sequence: Synthetic oligonucleotide
  Antisense strand to SEQ ID NO: 825218
uacuagcuuaauuuacggu

SEQ ID NO: 825220 - RNA, 19 nt, Artificial Sequence
  Description of Artificial Sequence: Synthetic oligonucleotide
  Sense strand starting at position 328 of SEQ ID NO: 587878
cguaaauuaagcuaguaug

SEQ ID NO: 825221 - RNA, 19 nt, Artificial Sequence
  Description of Artificial Sequence: Synthetic oligonucleotide
  Antisense strand to SEQ ID NO: 825220
cauacuagcuuaauuuacg

SEQ ID NO: 825222 - RNA, 19 nt, Artificial Sequence
  Description of Artificial Sequence: Synthetic oligonucleotide
  Sense strand starting at position 343 of SEQ ID NO: 587878
uauguuauugcguaaagua

SEQ ID NO: 825223 - RNA, 19 nt, Artificial Sequence
  Description of Artificial Sequence: Synthetic oligonucleotide
  Antisense strand to SEQ ID NO: 825222
uacuuuacgcaauaacaua

SEQ ID NO: 825224 - RNA, 19 nt, Artificial Sequence
  Description of Artificial Sequence: Synthetic oligonucleotide
  Sense strand starting at position 362 of SEQ ID NO: 587878
auggucuuacccuagacga

SEQ ID NO: 825225 - RNA, 19 nt, Artificial Sequence
  Description of Artificial Sequence: Synthetic oligonucleotide
  Antisense strand to SEQ ID NO: 825224
ucgucuaggguaagaccau

SEQ ID NO: 825226 - RNA, 19 nt, Artificial Sequence
  Description of Artificial Sequence: Synthetic oligonucleotide
  Sense strand starting at position 375 of SEQ ID NO: 587878
agacgaaggugaguuuaau

SEQ ID NO: 825227 - RNA, 19 nt, Artificial Sequence
  Description of Artificial Sequence: Synthetic oligonucleotide
  Antisense strand to SEQ ID NO: 825226
auuaaacucaccuucgucu

SEQ ID NO: 825228 - RNA, 19 nt, Artificial Sequence
  Description of Artificial Sequence: Synthetic oligonucleotide
  Sense strand starting at position 381 of SEQ ID NO: 587878
aggugaguuuaauuguaac

SEQ ID NO: 825229 - RNA, 19 nt, Artificial Sequence
  Description of Artificial Sequence: Synthetic oligonucleotide
  Antisense strand to SEQ ID NO: 825228
guuacaauuaaacucaccu

SEQ ID NO: 825230 - RNA, 19 nt, Artificial Sequence
  Description of Artificial Sequence: Synthetic oligonucleotide
  Sense strand starting at position 491 of SEQ ID NO: 587878
gcugguccuagagaacuua

SEQ ID NO: 825231 - RNA, 19 nt, Artificial Sequence
  Description of Artificial Sequence: Synthetic oligonucleotide
  Antisense strand to SEQ ID NO: 825230
uaaguucucuaggaccagc

SEQ ID NO: 825232 - RNA, 19 nt, Artificial Sequence
  Description of Artificial Sequence: Synthetic oligonucleotide
  Sense strand starting at position 548 of SEQ ID NO: 587878
ggccauuuaucugcaaggu

SEQ ID NO: 825233 - RNA, 19 nt, Artificial Sequence
  Description of Artificial Sequence: Synthetic oligonucleotide
  Antisense strand to SEQ ID NO: 825232
accuugcagauaaauggcc

SEQ ID NO: 825234 - RNA, 19 nt, Artificial Sequence
  Description of Artificial Sequence: Synthetic oligonucleotide
  Sense strand starting at position 605 of SEQ ID NO: 587878
gcugaaauccuaugcaaau

SEQ ID NO: 825235 - RNA, 19 nt, Artificial Sequence
  Description of Artificial Sequence: Synthetic oligonucleotide
  Antisense strand to SEQ ID NO: 825234
auuugcauaggauuucagc

SEQ ID NO: 825236 - RNA, 19 nt, Artificial Sequence
  Description of Artificial Sequence: Synthetic oligonucleotide
  Sense strand starting at position 644 of SEQ ID NO: 587878
ggaaacacuucugucaagu

SEQ ID NO: 825237 - RNA, 19 nt, Artificial Sequence
  Description of Artificial Sequence: Synthetic oligonucleotide
  Antisense strand to SEQ ID NO: 825236
acuugacagaaguguuucc

SEQ ID NO: 825238 - RNA, 19 nt, Artificial Sequence
  Description of Artificial Sequence: Synthetic oligonucleotide
  Sense strand starting at position 654 of SEQ ID NO: 587878
cugucaagucacuacacaa

SEQ ID NO: 825239 - RNA, 19 nt, Artificial Sequence
  Description of Artificial Sequence: Synthetic oligonucleotide
  Antisense strand to SEQ ID NO: 825238
uuguguagugacuugacag

SEQ ID NO: 825240 - RNA, 19 nt, Artificial Sequence
  Description of Artificial Sequence: Synthetic oligonucleotide
  Sense strand starting at position 1001 of SEQ ID NO: 587878
cugccacuuccgucgaguu

SEQ ID NO: 825241 - RNA, 19 nt, Artificial Sequence
  Description of Artificial Sequence: Synthetic oligonucleotide
  Antisense strand to SEQ ID NO: 825240
aacucgacggaaguggcag

SEQ ID NO: 825242 - RNA, 19 nt, Artificial Sequence
  Description of Artificial Sequence: Synthetic oligonucleotide
  Sense strand starting at position 1268 of SEQ ID NO: 587878
ugcgucucuccggcucaaa

SEQ ID NO: 825243 - RNA, 19 nt, Artificial Sequence
  Description of Artificial Sequence: Synthetic oligonucleotide
  Antisense strand to SEQ ID NO: 825242
uuugagccggagagacgca

SEQ ID NO: 825244 - RNA, 19 nt, Artificial Sequence
  Description of Artificial Sequence: Synthetic oligonucleotide
  Sense strand starting at position 2149 of SEQ ID NO: 587878
gccugugagcuuguaugua

SEQ ID NO: 825245 - RNA, 19 nt, Artificial Sequence
  Description of Artificial Sequence: Synthetic oligonucleotide
  Antisense strand to SEQ ID NO: 825244
uacauacaagcucacaggc

SEQ ID NO: 825246 - RNA, 19 nt, Artificial Sequence
  Description of Artificial Sequence: Synthetic oligonucleotide
  Sense strand starting at position 2196 of SEQ ID NO: 587878
aguguuucagagggaugag

SEQ ID NO: 825247 - RNA, 19 nt, Artificial Sequence
  Description of Artificial Sequence: Synthetic oligonucleotide
  Antisense strand to SEQ ID NO: 825246
cucaucccucugaaacacu

SEQ ID NO: 825248 - RNA, 19 nt, Artificial Sequence
  Description of Artificial Sequence: Synthetic oligonucleotide
  Sense strand starting at position 2266 of SEQ ID NO: 587878
ggaacuaagugguuccaau

SEQ ID NO: 825249 - RNA, 19 nt, Artificial Sequence
  Description of Artificial Sequence: Synthetic oligonucleotide
  Antisense strand to SEQ ID NO: 825248
auuggaaccacuuaguucc

SEQ ID NO: 825250 - RNA, 19 nt, Artificial Sequence
  Description of Artificial Sequence: Synthetic oligonucleotide
  Sense strand starting at position 2274 of SEQ ID NO: 587878
gugguuccaaugugaauuu

SEQ ID NO: 825251 - RNA, 19 nt, Artificial Sequence
  Description of Artificial Sequence: Synthetic oligonucleotide
  Antisense strand to SEQ ID NO: 825250
aaauucacauuggaaccac

SEQ ID NO: 825252 - RNA, 19 nt, Artificial Sequence
  Description of Artificial Sequence: Synthetic oligonucleotide
  Sense strand starting at position 2285 of SEQ ID NO: 587878
gugaauuuguaucaaagua

SEQ ID NO: 825253 - RNA, 19 nt, Artificial Sequence
  Description of Artificial Sequence: Synthetic oligonucleotide
  Antisense strand to SEQ ID NO: 825252
uacuuugauacaaauucac

SEQ ID NO: 825254 - RNA, 19 nt, Artificial Sequence
  Description of Artificial Sequence: Synthetic oligonucleotide
  Sense strand starting at position 2349 of SEQ ID NO: 587878
augacaagcgguggucaau

SEQ ID NO: 825255 - RNA, 19 nt, Artificial Sequence
  Description of Artificial Sequence: Synthetic oligonucleotide
  Antisense strand to SEQ ID NO: 825254
auugaccaccgcuugucau

SEQ ID NO: 825256 - RNA, 19 nt, Artificial Sequence
  Description of Artificial Sequence: Synthetic oligonucleotide
  Sense strand starting at position 2436 of SEQ ID NO: 587878
gugaccuagucccuagaaa

SEQ ID NO: 825257 - RNA, 19 nt, Artificial Sequence
  Description of Artificial Sequence: Synthetic oligonucleotide
  Antisense strand to SEQ ID NO: 825256
uuucuagggacuaggucac

SEQ ID NO: 825258 - RNA, 19 nt, Artificial Sequence
  Description of Artificial Sequence: Synthetic oligonucleotide
  Sense strand starting at position 2671 of SEQ ID NO: 587878
gcaggagaaucccucgauu

SEQ ID NO: 825259 - RNA, 19 nt, Artificial Sequence
  Description of Artificial Sequence: Synthetic oligonucleotide
  Antisense strand to SEQ ID NO: 825258
aaucgagggauucuccugc

SEQ ID NO: 825260 - RNA, 19 nt, Artificial Sequence
  Description of Artificial Sequence: Synthetic oligonucleotide
  Sense strand starting at position 2673 of SEQ ID NO: 587878
aggagaaucccucgauucu

SEQ ID NO: 825261 - RNA, 19 nt, Artificial Sequence
  Description of Artificial Sequence: Synthetic oligonucleotide
  Antisense strand to SEQ ID NO: 825260
agaaucgagggauucuccu

SEQ ID NO: 825262 - RNA, 19 nt, Artificial Sequence
  Description of Artificial Sequence: Synthetic oligonucleotide
  Sense strand starting at position 2832 of SEQ ID NO: 587878
uguaauauauuggcaaguu

SEQ ID NO: 825263 - RNA, 19 nt, Artificial Sequence
  Description of Artificial Sequence: Synthetic oligonucleotide
  Antisense strand to SEQ ID NO: 825262
aacuugccaauauauuaca

SEQ ID NO: 825264 - RNA, 19 nt, Artificial Sequence
  Description of Artificial Sequence: Synthetic oligonucleotide
  Sense strand starting at position 2858 of SEQ ID NO: 587878
ucuuguuuacuugagacuu

SEQ ID NO: 825265 - RNA, 19 nt, Artificial Sequence
  Description of Artificial Sequence: Synthetic oligonucleotide
  Antisense strand to SEQ ID NO: 825264
aagucucaaguaaacaaga

SEQ ID NO: 825266 - RNA, 19 nt, Artificial Sequence
  Description of Artificial Sequence: Synthetic oligonucleotide
  Sense strand starting at position 2944 of SEQ ID NO: 587878
aauggugucuugcuuuaga

SEQ ID NO: 825267 - RNA, 19 nt, Artificial Sequence
  Description of Artificial Sequence: Synthetic oligonucleotide
  Antisense strand to SEQ ID NO: 825266
ucuaaagcaagacaccauu

SEQ ID NO: 825268 - RNA, 19 nt, Artificial Sequence
  Description of Artificial Sequence: Synthetic oligonucleotide
  Sense strand starting at position 2947 of SEQ ID NO: 587878
ggugucuugcuuuagauuc

SEQ ID NO: 825269 - RNA, 19 nt, Artificial Sequence
  Description of Artificial Sequence: Synthetic oligonucleotide
  Antisense strand to SEQ ID NO: 825268
gaaucuaaagcaagacacc

SEQ ID NO: 825270 - RNA, 19 nt, Artificial Sequence
  Description of Artificial Sequence: Synthetic oligonucleotide
  Sense strand starting at position 3005 of SEQ ID NO: 587878
gguguauguguguacacuu

SEQ ID NO: 825271 - RNA, 19 nt, Artificial Sequence
  Description of Artificial Sequence: Synthetic oligonucleotide
  Antisense strand to SEQ ID NO: 825270
aaguguacacacauacacc

SEQ ID NO: 825272 - RNA, 19 nt, Artificial Sequence
  Description of Artificial Sequence: Synthetic oligonucleotide
  Sense strand starting at position 3088 of SEQ ID NO: 587878
gggucuguacugugacuca

SEQ ID NO: 825273 - RNA, 19 nt, Artificial Sequence
  Description of Artificial Sequence: Synthetic oligonucleotide
  Antisense strand to SEQ ID NO: 825272
ugagucacaguacagaccc

SEQ ID NO: 825274 - RNA, 19 nt, Artificial Sequence
  Description of Artificial Sequence: Synthetic oligonucleotide
  Sense strand starting at position 3145 of SEQ ID NO: 587878
ucaugccauugaucaugau

SEQ ID NO: 825275 - RNA, 19 nt, Artificial Sequence
  Description of Artificial Sequence: Synthetic oligonucleotide
  Antisense strand to SEQ ID NO: 825274
aucaugaucaauggcauga

SEQ ID NO: 825276 - RNA, 19 nt, Artificial Sequence
  Description of Artificial Sequence: Synthetic oligonucleotide
  Sense strand starting at position 3250 of SEQ ID NO: 587878
gcagaagagugacuucaug

SEQ ID NO: 825277 - RNA, 19 nt, Artificial Sequence
  Description of Artificial Sequence: Synthetic oligonucleotide
  Antisense strand to SEQ ID NO: 825276
caugaagucacucuucugc

SEQ ID NO: 825278 - RNA, 19 nt, Artificial Sequence
  Description of Artificial Sequence: Synthetic oligonucleotide
  Sense strand starting at position 3324 of SEQ ID NO: 587878
guucuaugucagcaguaau

SEQ ID NO: 825279 - RNA, 19 nt, Artificial Sequence
  Description of Artificial Sequence: Synthetic oligonucleotide
  Antisense strand to SEQ ID NO: 825278
auuacugcugacauagaac

SEQ ID NO: 825280 - RNA, 19 nt, Artificial Sequence
  Description of Artificial Sequence: Synthetic oligonucleotide
  Sense strand starting at position 3327 of SEQ ID NO: 587878
cuaugucagcaguaauuag

SEQ ID NO: 825281 - RNA, 19 nt, Artificial Sequence
  Description of Artificial Sequence: Synthetic oligonucleotide
  Antisense strand to SEQ ID NO: 825280
cuaauuacugcugacauag

SEQ ID NO: 825282 - RNA, 19 nt, Artificial Sequence
  Description of Artificial Sequence: Synthetic oligonucleotide
  Sense strand starting at position 3354 of SEQ ID NO: 587878
uccuaaguguaauuaaaga

SEQ ID NO: 825283 - RNA, 19 nt, Artificial Sequence
  Description of Artificial Sequence: Synthetic oligonucleotide
  Antisense strand to SEQ ID NO: 825282
ucuuuaauuacacuuagga

SEQ ID NO: 825284 - RNA, 19 nt, Artificial Sequence
  Description of Artificial Sequence: Synthetic oligonucleotide
  Sense strand starting at position 3410 of SEQ ID NO: 587878
guaggaauauaccauuuac

SEQ ID NO: 825285 - RNA, 19 nt, Artificial Sequence
  Description of Artificial Sequence: Synthetic oligonucleotide
  Antisense strand to SEQ ID NO: 825284
guaaaugguauauuccuac

SEQ ID NO: 825286 - RNA, 19 nt, Artificial Sequence
  Description of Artificial Sequence: Synthetic oligonucleotide
  Sense strand starting at position 3466 of SEQ ID NO: 587878
guaagaaauuaaccugguu

SEQ ID NO: 825287 - RNA, 19 nt, Artificial Sequence
  Description of Artificial Sequence: Synthetic oligonucleotide
  Antisense strand to SEQ ID NO: 825286
aaccagguuaauuucuuac

SEQ ID NO: 825288 - RNA, 19 nt, Artificial Sequence
  Description of Artificial Sequence: Synthetic oligonucleotide
  Sense strand starting at position 3536 of SEQ ID NO: 587878
aaaugacacccgugaaaug

SEQ ID NO: 825289 - RNA, 19 nt, Artificial Sequence
  Description of Artificial Sequence: Synthetic oligonucleotide
  Antisense strand to SEQ ID NO: 825288
cauuucacgggugucauuu

SEQ ID NO: 825290 - RNA, 19 nt, Artificial Sequence
  Description of Artificial Sequence: Synthetic oligonucleotide
  Sense strand starting at position 3581 of SEQ ID NO: 587878
cccguuucuugccuaauuu

SEQ ID NO: 825291 - RNA, 19 nt, Artificial Sequence
  Description of Artificial Sequence: Synthetic oligonucleotide
  Antisense strand to SEQ ID NO: 825290
aaauuaggcaagaaacggg

SEQ ID NO: 825292 - RNA, 19 nt, Artificial Sequence
  Description of Artificial Sequence: Synthetic oligonucleotide
  Sense strand starting at position 3740 of SEQ ID NO: 587878
accaacgaaguuugagauu

SEQ ID NO: 825293 - RNA, 19 nt, Artificial Sequence
  Description of Artificial Sequence: Synthetic oligonucleotide
  Antisense strand to SEQ ID NO: 825292
aaucucaaacuucguuggu

SEQ ID NO: 825294 - RNA, 19 nt, Artificial Sequence
  Description of Artificial Sequence: Synthetic oligonucleotide
  Sense strand starting at position 3800 of SEQ ID NO: 587878
aguuuccaugucuaaagua

SEQ ID NO: 825295 - RNA, 19 nt, Artificial Sequence
  Description of Artificial Sequence: Synthetic oligonucleotide
  Antisense strand to SEQ ID NO: 825294
uacuuuagacauggaaacu

SEQ ID NO: 825296 - RNA, 19 nt, Artificial Sequence
  Description of Artificial Sequence: Synthetic oligonucleotide
  Sense strand starting at position 3813 of SEQ ID NO: 587878
aaaguaggcugauuacuua

SEQ ID NO: 825297 - RNA, 19 nt, Artificial Sequence
  Description of Artificial Sequence: Synthetic oligonucleotide
  Antisense strand to SEQ ID NO: 825296
uaaguaaucagccuacuuu

SEQ ID NO: 825298 - RNA, 19 nt, Artificial Sequence
  Description of Artificial Sequence: Synthetic oligonucleotide
  Sense strand starting at position 27 of SEQ ID NO: 587879
gguacuuauagagguaaua

SEQ ID NO: 825299 - RNA, 19 nt, Artificial Sequence
  Description of Artificial Sequence: Synthetic oligonucleotide
  Antisense strand to SEQ ID NO: 825298
uauuaccucuauaaguacc

SEQ ID NO: 825300 - RNA, 19 nt, Artificial Sequence
  Description of Artificial Sequence: Synthetic oligonucleotide
  Sense strand starting at position 68 of SEQ ID NO: 587879
ggguuccagaguuagauua

SEQ ID NO: 825301 - RNA, 19 nt, Artificial Sequence
  Description of Artificial Sequence: Synthetic oligonucleotide
  Antisense strand to SEQ ID NO: 825300
uaaucuaacucuggaaccc

SEQ ID NO: 825302 - RNA, 19 nt, Artificial Sequence
  Description of Artificial Sequence: Synthetic oligonucleotide
  Sense strand starting at position 79 of SEQ ID NO: 587879
uuagauuaccuggguuuaa

SEQ ID NO: 825303 - RNA, 19 nt, Artificial Sequence
  Description of Artificial Sequence: Synthetic oligonucleotide
  Antisense strand to SEQ ID NO: 825302
uuaaacccagguaaucuaa

SEQ ID NO: 825304 - RNA, 19 nt, Artificial Sequence
  Description of Artificial Sequence: Synthetic oligonucleotide
  Sense strand starting at position 80 of SEQ ID NO: 587879
uagauuaccuggguuuaaa

SEQ ID NO: 825305 - RNA, 19 nt, Artificial Sequence
  Description of Artificial Sequence: Synthetic oligonucleotide
  Antisense strand to SEQ ID NO: 825304
uuuaaacccagguaaucua

SEQ ID NO: 825306 - RNA, 19 nt, Artificial Sequence
  Description of Artificial Sequence: Synthetic oligonucleotide
  Sense strand starting at position 154 of SEQ ID NO: 587879
uccucaucuguauagcaga

SEQ ID NO: 825307 - RNA, 19 nt, Artificial Sequence
  Description of Artificial Sequence: Synthetic oligonucleotide
  Antisense strand to SEQ ID NO: 825306
ucugcuauacagaugagga

SEQ ID NO: 825308 - RNA, 19 nt, Artificial Sequence
  Description of Artificial Sequence: Synthetic oligonucleotide
  Sense strand starting at position 159 of SEQ ID NO: 587879
aucuguauagcagauauca

SEQ ID NO: 825309 - RNA, 19 nt, Artificial Sequence
  Description of Artificial Sequence: Synthetic oligonucleotide
  Antisense strand to SEQ ID NO: 825308
ugauaucugcuauacagau

SEQ ID NO: 825310 - RNA, 19 nt, Artificial Sequence
  Description of Artificial Sequence: Synthetic oligonucleotide
  Sense strand starting at position 185 of SEQ ID NO: 587879
acaggauuguuccugugaa

SEQ ID NO: 825311 - RNA, 19 nt, Artificial Sequence
  Description of Artificial Sequence: Synthetic oligonucleotide
  Antisense strand to SEQ ID NO: 825310
uucacaggaacaauccugu

SEQ ID NO: 825312 - RNA, 19 nt, Artificial Sequence
  Description of Artificial Sequence: Synthetic oligonucleotide
  Sense strand starting at position 262 of SEQ ID NO: 587879
ccuaguaaauacucgauaa

SEQ ID NO: 825313 - RNA, 19 nt, Artificial Sequence
  Description of Artificial Sequence: Synthetic oligonucleotide
  Antisense strand to SEQ ID NO: 825312
uuaucgaguauuuacuagg

SEQ ID NO: 825314 - RNA, 19 nt, Artificial Sequence
  Description of Artificial Sequence: Synthetic oligonucleotide
  Sense strand starting at position 275 of SEQ ID NO: 587879
cgauaaagauuacuuguca

SEQ ID NO: 825315 - RNA, 19 nt, Artificial Sequence
  Description of Artificial Sequence: Synthetic oligonucleotide
  Antisense strand to SEQ ID NO: 825314
ugacaaguaaucuuuaucg

SEQ ID NO: 825316 - RNA, 19 nt, Artificial Sequence
  Description of Artificial Sequence: Synthetic oligonucleotide
  Sense strand starting at position 299 of SEQ ID NO: 587879
auaauuauuugugcaugca

SEQ ID NO: 825317 - RNA, 19 nt, Artificial Sequence
  Description of Artificial Sequence: Synthetic oligonucleotide
  Antisense strand to SEQ ID NO: 825316
ugcaugcacaaauaauuau

SEQ ID NO: 825318 - RNA, 19 nt, Artificial Sequence
  Description of Artificial Sequence: Synthetic oligonucleotide
  Sense strand starting at position 302 of SEQ ID NO: 587879
auuauuugugcaugcauca

SEQ ID NO: 825319 - RNA, 19 nt, Artificial Sequence
  Description of Artificial Sequence: Synthetic oligonucleotide
  Antisense strand to SEQ ID NO: 825318
ugaugcaugcacaaauaau

SEQ ID NO: 825320 - RNA, 19 nt, Artificial Sequence
  Description of Artificial Sequence: Synthetic oligonucleotide
  Sense strand starting at position 438 of SEQ ID NO: 587879
uuagcccuucuaugggaaa

SEQ ID NO: 825321 - RNA, 19 nt, Artificial Sequence
  Description of Artificial Sequence: Synthetic oligonucleotide
  Antisense strand to SEQ ID NO: 825320
uuucccauagaagggcuaa

SEQ ID NO: 825322 - RNA, 19 nt, Artificial Sequence
  Description of Artificial Sequence: Synthetic oligonucleotide
  Sense strand starting at position 495 of SEQ ID NO: 587879
cauggccaucaguaaugua

SEQ ID NO: 825323 - RNA, 19 nt, Artificial Sequence
  Description of Artificial Sequence: Synthetic oligonucleotide
  Antisense strand to SEQ ID NO: 825322
uacauuacugauggccaug

SEQ ID NO: 825324 - RNA, 19 nt, Artificial Sequence
  Description of Artificial Sequence: Synthetic oligonucleotide
  Sense strand starting at position 568 of SEQ ID NO: 587879
uuauguugucuagaauuac

SEQ ID NO: 825325 - RNA, 19 nt, Artificial Sequence
  Description of Artificial Sequence: Synthetic oligonucleotide
  Antisense strand to SEQ ID NO: 825324
guaauucuagacaacauaa

SEQ ID NO: 825326 - RNA, 19 nt, Artificial Sequence
  Description of Artificial Sequence: Synthetic oligonucleotide
  Sense strand starting at position 602 of SEQ ID NO: 587879
gucuaacgccuacaauuaa

SEQ ID NO: 825327 - RNA, 19 nt, Artificial Sequence
  Description of Artificial Sequence: Synthetic oligonucleotide
  Antisense strand to SEQ ID NO: 825326
uuaauuguaggcguuagac

SEQ ID NO: 825328 - RNA, 19 nt, Artificial Sequence
  Description of Artificial Sequence: Synthetic oligonucleotide
  Sense strand starting at position 639 of SEQ ID NO: 587879
gcaagaacuuuauuagaua

SEQ ID NO: 825329 - RNA, 19 nt, Artificial Sequence
  Description of Artificial Sequence: Synthetic oligonucleotide
  Antisense strand to SEQ ID NO: 825328
uaucuaauaaaguucuugc

SEQ ID NO: 825330 - RNA, 19 nt, Artificial Sequence
  Description of Artificial Sequence: Synthetic oligonucleotide
  Sense strand starting at position 751 of SEQ ID NO: 587879
uuuaauucucaaggcugaa

SEQ ID NO: 825331 - RNA, 19 nt, Artificial Sequence
  Description of Artificial Sequence: Synthetic oligonucleotide
  Antisense strand to SEQ ID NO: 825330
uucagccuugagaauuaaa

SEQ ID NO: 825332 - RNA, 19 nt, Artificial Sequence
  Description of Artificial Sequence: Synthetic oligonucleotide
  Sense strand starting at position 763 of SEQ ID NO: 587879
ggcugaacuuaacuuguaa

SEQ ID NO: 825333 - RNA, 19 nt, Artificial Sequence
  Description of Artificial Sequence: Synthetic oligonucleotide
  Antisense strand to SEQ ID NO: 825332
uuacaaguuaaguucagcc

SEQ ID NO: 825334 - RNA, 19 nt, Artificial Sequence
  Description of Artificial Sequence: Synthetic oligonucleotide
  Sense strand starting at position 848 of SEQ ID NO: 587879
gacuuuaguguugaguuua

SEQ ID NO: 825335 - RNA, 19 nt, Artificial Sequence
  Description of Artificial Sequence: Synthetic oligonucleotide
  Antisense strand to SEQ ID NO: 825334
uaaacucaacacuaaaguc

SEQ ID NO: 825336 - RNA, 19 nt, Artificial Sequence
  Description of Artificial Sequence: Synthetic oligonucleotide
  Sense strand starting at position 1109 of SEQ ID NO: 587879
gagugaaugauuugcacgu

SEQ ID NO: 825337 - RNA, 19 nt, Artificial Sequence
  Description of Artificial Sequence: Synthetic oligonucleotide
  Antisense strand to SEQ ID NO: 825336
acgugcaaaucauucacuc

SEQ ID NO: 825338 - RNA, 19 nt, Artificial Sequence
  Description of Artificial Sequence: Synthetic oligonucleotide
  Sense strand starting at position 1113 of SEQ ID NO: 587879
gaaugauuugcacguguga

SEQ ID NO: 825339 - RNA, 19 nt, Artificial Sequence
  Description of Artificial Sequence: Synthetic oligonucleotide
  Antisense strand to SEQ ID NO: 825338
ucacacgugcaaaucauuc

SEQ ID NO: 825340 - RNA, 19 nt, Artificial Sequence
  Description of Artificial Sequence: Synthetic oligonucleotide
  Sense strand starting at position 2179 of SEQ ID NO: 587879
gagguaagauaaguuggua

SEQ ID NO: 825341 - RNA, 19 nt, Artificial Sequence
  Description of Artificial Sequence: Synthetic oligonucleotide
  Antisense strand to SEQ ID NO: 825340
uaccaacuuaucuuaccuc

SEQ ID NO: 825342 - RNA, 19 nt, Artificial Sequence
  Description of Artificial Sequence: Synthetic oligonucleotide
  Sense strand starting at position 2394 of SEQ ID NO: 587879
ucuaguggugagugggaaa

SEQ ID NO: 825343 - RNA, 19 nt, Artificial Sequence
  Description of Artificial Sequence: Synthetic oligonucleotide
  Antisense strand to SEQ ID NO: 825342
uuucccacucaccacuaga

SEQ ID NO: 825344 - RNA, 19 nt, Artificial Sequence
  Description of Artificial Sequence: Synthetic oligonucleotide
  Sense strand starting at position 2407 of SEQ ID NO: 587879
gggaaacaguugucuauag

SEQ ID NO: 825345 - RNA, 19 nt, Artificial Sequence
  Description of Artificial Sequence: Synthetic oligonucleotide
  Antisense strand to SEQ ID NO: 825344
cuauagacaacuguuuccc

SEQ ID NO: 825346 - RNA, 19 nt, Artificial Sequence
  Description of Artificial Sequence: Synthetic oligonucleotide
  Sense strand starting at position 2409 of SEQ ID NO: 587879
gaaacaguugucuauagug

SEQ ID NO: 825347 - RNA, 19 nt, Artificial Sequence
  Description of Artificial Sequence: Synthetic oligonucleotide
  Antisense strand to SEQ ID NO: 825346
cacuauagacaacuguuuc

SEQ ID NO: 825348 - RNA, 19 nt, Artificial Sequence
  Description of Artificial Sequence: Synthetic oligonucleotide
  Sense strand starting at position 2411 of SEQ ID NO: 587879
aacaguugucuauagugga

SEQ ID NO: 825349 - RNA, 19 nt, Artificial Sequence
  Description of Artificial Sequence: Synthetic oligonucleotide
  Antisense strand to SEQ ID NO: 825348
uccacuauagacaacuguu

SEQ ID NO: 825350 - RNA, 19 nt, Artificial Sequence
  Description of Artificial Sequence: Synthetic oligonucleotide
  Sense strand starting at position 2415 of SEQ ID NO: 587879
guugucuauaguggagaaa

SEQ ID NO: 825351 - RNA, 19 nt, Artificial Sequence
  Description of Artificial Sequence: Synthetic oligonucleotide
  Antisense strand to SEQ ID NO: 825350
uuucuccacuauagacaac

SEQ ID NO: 825352 - RNA, 19 nt, Artificial Sequence
  Description of Artificial Sequence: Synthetic oligonucleotide
  Sense strand starting at position 2509 of SEQ ID NO: 587879
gguugaagggcugagaguu

SEQ ID NO: 825353 - RNA, 19 nt, Artificial Sequence
  Description of Artificial Sequence: Synthetic oligonucleotide
  Antisense strand to SEQ ID NO: 825352
aacucucagcccuucaacc

SEQ ID NO: 825354 - RNA, 19 nt, Artificial Sequence
  Description of Artificial Sequence: Synthetic oligonucleotide
  Sense strand starting at position 2556 of SEQ ID NO: 587879
ucuucuugccgcuuuacua

SEQ ID NO: 825355 - RNA, 19 nt, Artificial Sequence
  Description of Artificial Sequence: Synthetic oligonucleotide
  Antisense strand to SEQ ID NO: 825354
uaguaaagcggcaagaaga

SEQ ID NO: 825356 - RNA, 19 nt, Artificial Sequence
  Description of Artificial Sequence: Synthetic oligonucleotide
  Sense strand starting at position 2878 of SEQ ID NO: 587879
gaguaagcgagaugagaug

SEQ ID NO: 825357 - RNA, 19 nt, Artificial Sequence
  Description of Artificial Sequence: Synthetic oligonucleotide
  Antisense strand to SEQ ID NO: 825356
caucucaucucgcuuacuc

SEQ ID NO: 825358 - RNA, 19 nt, Artificial Sequence
  Description of Artificial Sequence: Synthetic oligonucleotide
  Sense strand starting at position 2920 of SEQ ID NO: 587879
uuugguugaguaggagaua

SEQ ID NO: 825359 - RNA, 19 nt, Artificial Sequence
  Description of Artificial Sequence: Synthetic oligonucleotide
  Antisense strand to SEQ ID NO: 825358
uaucuccuacucaaccaaa

SEQ ID NO: 825360 - RNA, 19 nt, Artificial Sequence
  Description of Artificial Sequence: Synthetic oligonucleotide
  Sense strand starting at position 2934 of SEQ ID NO: 587879
agauauuaucaacaugugu

SEQ ID NO: 825361 - RNA, 19 nt, Artificial Sequence
  Description of Artificial Sequence: Synthetic oligonucleotide
  Antisense strand to SEQ ID NO: 825360
acacauguugauaauaucu

SEQ ID NO: 825362 - RNA, 19 nt, Artificial Sequence
  Description of Artificial Sequence: Synthetic oligonucleotide
  Sense strand starting at position 3119 of SEQ ID NO: 587879
ccacaagugguuuaguauu

SEQ ID NO: 825363 - RNA, 19 nt, Artificial Sequence
  Description of Artificial Sequence: Synthetic oligonucleotide
  Antisense strand to SEQ ID NO: 825362
aauacuaaaccacuugugg

SEQ ID NO: 825364 - RNA, 19 nt, Artificial Sequence
  Description of Artificial Sequence: Synthetic oligonucleotide
  Sense strand starting at position 3363 of SEQ ID NO: 587879
agucuuucccaucagacuu

SEQ ID NO: 825365 - RNA, 19 nt, Artificial Sequence
  Description of Artificial Sequence: Synthetic oligonucleotide
  Antisense strand to SEQ ID NO: 825364
aagucugaugggaaagacu

SEQ ID NO: 825366 - RNA, 19 nt, Artificial Sequence
  Description of Artificial Sequence: Synthetic oligonucleotide
  Sense strand starting at position 3690 of SEQ ID NO: 587879
gccaauuauggacauuauc

SEQ ID NO: 825367 - RNA, 19 nt, Artificial Sequence
  Description of Artificial Sequence: Synthetic oligonucleotide
  Antisense strand to SEQ ID NO: 825366
gauaauguccauaauuggc

SEQ ID NO: 825368 - RNA, 19 nt, Artificial Sequence
  Description of Artificial Sequence: Synthetic oligonucleotide
  Sense strand starting at position 3795 of SEQ ID NO: 587879
gguuuacagugauugaaau

SEQ ID NO: 825369 - RNA, 19 nt, Artificial Sequence
  Description of Artificial Sequence: Synthetic oligonucleotide
  Antisense strand to SEQ ID NO: 825368
auuucaaucacuguaaacc

SEQ ID NO: 825370 - RNA, 19 nt, Artificial Sequence
  Description of Artificial Sequence: Synthetic oligonucleotide
  Sense strand starting at position 3796 of SEQ ID NO: 587879
guuuacagugauugaaauc

SEQ ID NO: 825371 - RNA, 19 nt, Artificial Sequence
  Description of Artificial Sequence: Synthetic oligonucleotide
  Antisense strand to SEQ ID NO: 825370
gauuucaaucacuguaaac

SEQ ID NO: 825372 - RNA, 19 nt, Artificial Sequence
  Description of Artificial Sequence: Synthetic oligonucleotide
  Sense strand starting at position 3817 of SEQ ID NO: 587879
aucuguuaaccacgaaacu

SEQ ID NO: 825373 - RNA, 19 nt, Artificial Sequence
  Description of Artificial Sequence: Synthetic oligonucleotide
  Antisense strand to SEQ ID NO: 825372
aguuucgugguuaacagau

SEQ ID NO: 825374 - RNA, 19 nt, Artificial Sequence
  Description of Artificial Sequence: Synthetic oligonucleotide
  Sense strand starting at position 3818 of SEQ ID NO: 587879
ucuguuaaccacgaaacuu

SEQ ID NO: 825375 - RNA, 19 nt, Artificial Sequence
  Description of Artificial Sequence: Synthetic oligonucleotide
  Antisense strand to SEQ ID NO: 825374
aaguuucgugguuaacaga

SEQ ID NO: 825376 - RNA, 19 nt, Artificial Sequence
  Description of Artificial Sequence: Synthetic oligonucleotide
  Sense strand starting at position 3898 of SEQ ID NO: 587879
gugaguacugcuugaauuu

SEQ ID NO: 825377 - RNA, 19 nt, Artificial Sequence
  Description of Artificial Sequence: Synthetic oligonucleotide
  Antisense strand to SEQ ID NO: 825376
aaauucaagcaguacucac

SEQ ID NO: 825378 - RNA, 19 nt, Artificial Sequence
  Description of Artificial Sequence: Synthetic oligonucleotide
  Sense strand starting at position 188 of SEQ ID NO: 587880
uuuauuacauuugagggau

SEQ ID NO: 825379 - RNA, 19 nt, Artificial Sequence
  Description of Artificial Sequence: Synthetic oligonucleotide
  Antisense strand to SEQ ID NO: 825378
aucccucaaauguaauaaa

SEQ ID NO: 825380 - RNA, 19 nt, Artificial Sequence
  Description of Artificial Sequence: Synthetic oligonucleotide
  Sense strand starting at position 200 of SEQ ID NO: 587880
gagggauucuuucccauac

SEQ ID NO: 825381 - RNA, 19 nt, Artificial Sequence
  Description of Artificial Sequence: Synthetic oligonucleotide
  Antisense strand to SEQ ID NO: 825380
guaugggaaagaaucccuc

SEQ ID NO: 825382 - RNA, 19 nt, Artificial Sequence
  Description of Artificial Sequence: Synthetic oligonucleotide
  Sense strand starting at position 201 of SEQ ID NO: 587880
agggauucuuucccauaca

SEQ ID NO: 825383 - RNA, 19 nt, Artificial Sequence
  Description of Artificial Sequence: Synthetic oligonucleotide
  Antisense strand to SEQ ID NO: 825382
uguaugggaaagaaucccu

SEQ ID NO: 825384 - RNA, 19 nt, Artificial Sequence
  Description of Artificial Sequence: Synthetic oligonucleotide
  Sense strand starting at position 241 of SEQ ID NO: 587880
agugucuuuccuggagaug

SEQ ID NO: 825385 - RNA, 19 nt, Artificial Sequence
  Description of Artificial Sequence: Synthetic oligonucleotide
  Antisense strand to SEQ ID NO: 825384
caucuccaggaaagacacu

SEQ ID NO: 825386 - RNA, 19 nt, Artificial Sequence
  Description of Artificial Sequence: Synthetic oligonucleotide
  Sense strand starting at position 242 of SEQ ID NO: 587880
gugucuuuccuggagauga

SEQ ID NO: 825387 - RNA, 19 nt, Artificial Sequence
  Description of Artificial Sequence: Synthetic oligonucleotide
  Antisense strand to SEQ ID NO: 825386
ucaucuccaggaaagacac

SEQ ID NO: 825388 - RNA, 19 nt, Artificial Sequence
  Description of Artificial Sequence: Synthetic oligonucleotide
  Sense strand starting at position 550 of SEQ ID NO: 587880
cuccgaauccuccaaagca

SEQ ID NO: 825389 - RNA, 19 nt, Artificial Sequence
  Description of Artificial Sequence: Synthetic oligonucleotide
  Antisense strand to SEQ ID NO: 825388
ugcuuuggaggauucggag

SEQ ID NO: 825390 - RNA, 19 nt, Artificial Sequence
  Description of Artificial Sequence: Synthetic oligonucleotide
  Sense strand starting at position 678 of SEQ ID NO: 587880
caugaauuaggcgaguuau

SEQ ID NO: 825391 - RNA, 19 nt, Artificial Sequence
  Description of Artificial Sequence: Synthetic oligonucleotide
  Antisense strand to SEQ ID NO: 825390
auaacucgccuaauucaug

SEQ ID NO: 825392 - RNA, 19 nt, Artificial Sequence
  Description of Artificial Sequence: Synthetic oligonucleotide
  Sense strand starting at position 966 of SEQ ID NO: 587880
ggagaaggcaaacgucauu

SEQ ID NO: 825393 - RNA, 19 nt, Artificial Sequence
  Description of Artificial Sequence: Synthetic oligonucleotide
  Antisense strand to SEQ ID NO: 825392
aaugacguuugccuucucc

SEQ ID NO: 825394 - RNA, 19 nt, Artificial Sequence
  Description of Artificial Sequence: Synthetic oligonucleotide
  Sense strand starting at position 1079 of SEQ ID NO: 587880
cugccacuagucgagagaa

SEQ ID NO: 825395 - RNA, 19 nt, Artificial Sequence
  Description of Artificial Sequence: Synthetic oligonucleotide
  Antisense strand to SEQ ID NO: 825394
uucucucgacuaguggcag

SEQ ID NO: 825396 - RNA, 19 nt, Artificial Sequence
  Description of Artificial Sequence: Synthetic oligonucleotide
  Sense strand starting at position 1081 of SEQ ID NO: 587880
gccacuagucgagagaaga

SEQ ID NO: 825397 - RNA, 19 nt, Artificial Sequence
  Description of Artificial Sequence: Synthetic oligonucleotide
  Antisense strand to SEQ ID NO: 825396
ucuucucucgacuaguggc

SEQ ID NO: 825398 - RNA, 19 nt, Artificial Sequence
  Description of Artificial Sequence: Synthetic oligonucleotide
  Sense strand starting at position 2354 of SEQ ID NO: 587880
uagacugcuuuguuggaga

SEQ ID NO: 825399 - RNA, 19 nt, Artificial Sequence
  Description of Artificial Sequence: Synthetic oligonucleotide
  Antisense strand to SEQ ID NO: 825398
ucuccaacaaagcagucua

SEQ ID NO: 825400 - RNA, 19 nt, Artificial Sequence
  Description of Artificial Sequence: Synthetic oligonucleotide
  Sense strand starting at position 2356 of SEQ ID NO: 587880
gacugcuuuguuggagaga

SEQ ID NO: 825401 - RNA, 19 nt, Artificial Sequence
  Description of Artificial Sequence: Synthetic oligonucleotide
  Antisense strand to SEQ ID NO: 825400
ucucuccaacaaagcaguc

SEQ ID NO: 825402 - RNA, 19 nt, Artificial Sequence
  Description of Artificial Sequence: Synthetic oligonucleotide
  Sense strand starting at position 2439 of SEQ ID NO: 587880
cuuguucucaccgagagac

SEQ ID NO: 825403 - RNA, 19 nt, Artificial Sequence
  Description of Artificial Sequence: Synthetic oligonucleotide
  Antisense strand to SEQ ID NO: 825402
gucucucggugagaacaag

SEQ ID NO: 825404 - RNA, 19 nt, Artificial Sequence
  Description of Artificial Sequence: Synthetic oligonucleotide
  Sense strand starting at position 2546 of SEQ ID NO: 587880
uggguuugauaggcccaua

SEQ ID NO: 825405 - RNA, 19 nt, Artificial Sequence
  Description of Artificial Sequence: Synthetic oligonucleotide
  Antisense strand to SEQ ID NO: 825404
uaugggccuaucaaaccca

SEQ ID NO: 825406 - RNA, 19 nt, Artificial Sequence
  Description of Artificial Sequence: Synthetic oligonucleotide
  Sense strand starting at position 2580 of SEQ ID NO: 587880
ugaucucacaguuaggagu

SEQ ID NO: 825407 - RNA, 19 nt, Artificial Sequence
  Description of Artificial Sequence: Synthetic oligonucleotide
  Antisense strand to SEQ ID NO: 825406
acuccuaacugugagauca

SEQ ID NO: 825408 - RNA, 19 nt, Artificial Sequence
  Description of Artificial Sequence: Synthetic oligonucleotide
  Sense strand starting at position 2598 of SEQ ID NO: 587880
ugugaacuggcugagagua

SEQ ID NO: 825409 - RNA, 19 nt, Artificial Sequence
  Description of Artificial Sequence: Synthetic oligonucleotide
  Antisense strand to SEQ ID NO: 825408
uacucucagccaguucaca

SEQ ID NO: 825410 - RNA, 19 nt, Artificial Sequence
  Description of Artificial Sequence: Synthetic oligonucleotide
  Sense strand starting at position 2645 of SEQ ID NO: 587880
uuaagacuguggucaccua

SEQ ID NO: 825411 - RNA, 19 nt, Artificial Sequence
  Description of Artificial Sequence: Synthetic oligonucleotide
  Antisense strand to SEQ ID NO: 825410
uaggugaccacagucuuaa

SEQ ID NO: 825412 - RNA, 19 nt, Artificial Sequence
  Description of Artificial Sequence: Synthetic oligonucleotide
  Sense strand starting at position 2823 of SEQ ID NO: 587880
uuaagaugacuugggcuga

SEQ ID NO: 825413 - RNA, 19 nt, Artificial Sequence
  Description of Artificial Sequence: Synthetic oligonucleotide
  Antisense strand to SEQ ID NO: 825412
ucagcccaagucaucuuaa

SEQ ID NO: 825414 - RNA, 19 nt, Artificial Sequence
  Description of Artificial Sequence: Synthetic oligonucleotide
  Sense strand starting at position 2827 of SEQ ID NO: 587880
gaugacuugggcugaucaa

SEQ ID NO: 825415 - RNA, 19 nt, Artificial Sequence
  Description of Artificial Sequence: Synthetic oligonucleotide
  Antisense strand to SEQ ID NO: 825414
uugaucagcccaagucauc

SEQ ID NO: 825416 - RNA, 19 nt, Artificial Sequence
  Description of Artificial Sequence: Synthetic oligonucleotide
  Sense strand starting at position 2882 of SEQ ID NO: 587880
aaggcuucucgucaggaaa

SEQ ID NO: 825417 - RNA, 19 nt, Artificial Sequence
  Description of Artificial Sequence: Synthetic oligonucleotide
  Antisense strand to SEQ ID NO: 825416
uuuccugacgagaagccuu

SEQ ID NO: 825418 - RNA, 19 nt, Artificial Sequence
  Description of Artificial Sequence: Synthetic oligonucleotide
  Sense strand starting at position 3011 of SEQ ID NO: 587880
uaaugugagcauggguaga

SEQ ID NO: 825419 - RNA, 19 nt, Artificial Sequence
  Description of Artificial Sequence: Synthetic oligonucleotide
  Antisense strand to SEQ ID NO: 825418
ucuacccaugcucacauua

SEQ ID NO: 825420 - RNA, 19 nt, Artificial Sequence
  Description of Artificial Sequence: Synthetic oligonucleotide
  Sense strand starting at position 3103 of SEQ ID NO: 587880
gagugcuaaggaugugaua

SEQ ID NO: 825421 - RNA, 19 nt, Artificial Sequence
  Description of Artificial Sequence: Synthetic oligonucleotide
  Antisense strand to SEQ ID NO: 825420
uaucacauccuuagcacuc

SEQ ID NO: 825422 - RNA, 19 nt, Artificial Sequence
  Description of Artificial Sequence: Synthetic oligonucleotide
  Sense strand starting at position 3105 of SEQ ID NO: 587880
gugcuaaggaugugauaag

SEQ ID NO: 825423 - RNA, 19 nt, Artificial Sequence
  Description of Artificial Sequence: Synthetic oligonucleotide
  Antisense strand to SEQ ID NO: 825422
cuuaucacauccuuagcac

SEQ ID NO: 825424 - RNA, 19 nt, Artificial Sequence
  Description of Artificial Sequence: Synthetic oligonucleotide
  Sense strand starting at position 3156 of SEQ ID NO: 587880
cucuguaauggcuagagaa

SEQ ID NO: 825425 - RNA, 19 nt, Artificial Sequence
  Description of Artificial Sequence: Synthetic oligonucleotide
  Antisense strand to SEQ ID NO: 825424
uucucuagccauuacagag

SEQ ID NO: 825426 - RNA, 19 nt, Artificial Sequence
  Description of Artificial Sequence: Synthetic oligonucleotide
  Sense strand starting at position 3217 of SEQ ID NO: 587880
agaagcuguugauccuuau

SEQ ID NO: 825427 - RNA, 19 nt, Artificial Sequence
  Description of Artificial Sequence: Synthetic oligonucleotide
  Antisense strand to SEQ ID NO: 825426
auaaggaucaacagcuucu

SEQ ID NO: 825428 - RNA, 19 nt, Artificial Sequence
  Description of Artificial Sequence: Synthetic oligonucleotide
  Sense strand starting at position 3255 of SEQ ID NO: 587880
aagcauuaagucuguaaga

SEQ ID NO: 825429 - RNA, 19 nt, Artificial Sequence
  Description of Artificial Sequence: Synthetic oligonucleotide
  Antisense strand to SEQ ID NO: 825428
ucuuacagacuuaaugcuu

SEQ ID NO: 825430 - RNA, 19 nt, Artificial Sequence
  Description of Artificial Sequence: Synthetic oligonucleotide
  Sense strand starting at position 3256 of SEQ ID NO: 587880
agcauuaagucuguaagaa

SEQ ID NO: 825431 - RNA, 19 nt, Artificial Sequence
  Description of Artificial Sequence: Synthetic oligonucleotide
  Antisense strand to SEQ ID NO: 825430
uucuuacagacuuaaugcu

SEQ ID NO: 825432 - RNA, 19 nt, Artificial Sequence
  Description of Artificial Sequence: Synthetic oligonucleotide
  Sense strand starting at position 3257 of SEQ ID NO: 587880
gcauuaagucuguaagaac

SEQ ID NO: 825433 - RNA, 19 nt, Artificial Sequence
  Description of Artificial Sequence: Synthetic oligonucleotide
  Antisense strand to SEQ ID NO: 825432
guucuuacagacuuaaugc

SEQ ID NO: 825434 - RNA, 19 nt, Artificial Sequence
  Description of Artificial Sequence: Synthetic oligonucleotide
  Sense strand starting at position 3285 of SEQ ID NO: 587880
cacuucugggaauguaaca

SEQ ID NO: 825435 - RNA, 19 nt, Artificial Sequence
  Description of Artificial Sequence: Synthetic oligonucleotide
  Antisense strand to SEQ ID NO: 825434
uguuacauucccagaagug

SEQ ID NO: 825436 - RNA, 19 nt, Artificial Sequence
  Description of Artificial Sequence: Synthetic oligonucleotide
  Sense strand starting at position 3341 of SEQ ID NO: 587880
uccuuagagcaguaaauca

SEQ ID NO: 825437 - RNA, 19 nt, Artificial Sequence
  Description of Artificial Sequence: Synthetic oligonucleotide
  Antisense strand to SEQ ID NO: 825436
ugauuuacugcucuaagga

SEQ ID NO: 825438 - RNA, 19 nt, Artificial Sequence
  Description of Artificial Sequence: Synthetic oligonucleotide
  Sense strand starting at position 3348 of SEQ ID NO: 587880
agcaguaaaucauuggaaa

SEQ ID NO: 825439 - RNA, 19 nt, Artificial Sequence
  Description of Artificial Sequence: Synthetic oligonucleotide
  Antisense strand to SEQ ID NO: 825438
uuuccaaugauuuacugcu

SEQ ID NO: 825440 - RNA, 19 nt, Artificial Sequence
  Description of Artificial Sequence: Synthetic oligonucleotide
  Sense strand starting at position 3349 of SEQ ID NO: 587880
gcaguaaaucauuggaaac

SEQ ID NO: 825441 - RNA, 19 nt, Artificial Sequence
  Description of Artificial Sequence: Synthetic oligonucleotide
  Antisense strand to SEQ ID NO: 825440
guuuccaaugauuuacugc

SEQ ID NO: 825442 - RNA, 19 nt, Artificial Sequence
  Description of Artificial Sequence: Synthetic oligonucleotide
  Sense strand starting at position 3403 of SEQ ID NO: 587880
aaauuaugaugugugcaua

SEQ ID NO: 825443 - RNA, 19 nt, Artificial Sequence
  Description of Artificial Sequence: Synthetic oligonucleotide
  Antisense strand to SEQ ID NO: 825442
uaugcacacaucauaauuu

SEQ ID NO: 825444 - RNA, 19 nt, Artificial Sequence
  Description of Artificial Sequence: Synthetic oligonucleotide
  Sense strand starting at position 3406 of SEQ ID NO: 587880
uuaugaugugugcauaaua

SEQ ID NO: 825445 - RNA, 19 nt, Artificial Sequence
  Description of Artificial Sequence: Synthetic oligonucleotide
  Antisense strand to SEQ ID NO: 825444
uauuaugcacacaucauaa

SEQ ID NO: 825446 - RNA, 19 nt, Artificial Sequence
  Description of Artificial Sequence: Synthetic oligonucleotide
  Sense strand starting at position 3470 of SEQ ID NO: 587880
cgacauggacgaugauuau

SEQ ID NO: 825447 - RNA, 19 nt, Artificial Sequence
  Description of Artificial Sequence: Synthetic oligonucleotide
  Antisense strand to SEQ ID NO: 825446
auaaucaucguccaugucg

SEQ ID NO: 825448 - RNA, 19 nt, Artificial Sequence
  Description of Artificial Sequence: Synthetic oligonucleotide
  Sense strand starting at position 3473 of SEQ ID NO: 587880
cauggacgaugauuauaau

SEQ ID NO: 825449 - RNA, 19 nt, Artificial Sequence
  Description of Artificial Sequence: Synthetic oligonucleotide
  Antisense strand to SEQ ID NO: 825448
auuauaaucaucguccaug

SEQ ID NO: 825450 - RNA, 19 nt, Artificial Sequence
  Description of Artificial Sequence: Synthetic oligonucleotide
  Sense strand starting at position 3547 of SEQ ID NO: 587880
auguaaaugugcucaggaa

SEQ ID NO: 825451 - RNA, 19 nt, Artificial Sequence
  Description of Artificial Sequence: Synthetic oligonucleotide
  Antisense strand to SEQ ID NO: 825450
uuccugagcacauuuacau

SEQ ID NO: 825452 - RNA, 19 nt, Artificial Sequence
  Description of Artificial Sequence: Synthetic oligonucleotide
  Sense strand starting at position 3548 of SEQ ID NO: 587880
uguaaaugugcucaggaaa

SEQ ID NO: 825453 - RNA, 19 nt, Artificial Sequence
  Description of Artificial Sequence: Synthetic oligonucleotide
  Antisense strand to SEQ ID NO: 825452
uuuccugagcacauuuaca

SEQ ID NO: 825454 - RNA, 19 nt, Artificial Sequence
  Description of Artificial Sequence: Synthetic oligonucleotide
  Sense strand starting at position 3764 of SEQ ID NO: 587880
ugugcauauguauaagaua

SEQ ID NO: 825455 - RNA, 19 nt, Artificial Sequence
  Description of Artificial Sequence: Synthetic oligonucleotide
  Antisense strand to SEQ ID NO: 825454
uaucuuauacauaugcaca

SEQ ID NO: 825456 - RNA, 19 nt, Artificial Sequence
  Description of Artificial Sequence: Synthetic oligonucleotide
  Sense strand starting at position 3904 of SEQ ID NO: 587880
ucauauccauguguauaua

SEQ ID NO: 825457 - RNA, 19 nt, Artificial Sequence
  Description of Artificial Sequence: Synthetic oligonucleotide
  Antisense strand to SEQ ID NO: 825456
uauauacacauggauauga

SEQ ID NO: 825458 - RNA, 19 nt, Artificial Sequence
  Description of Artificial Sequence: Synthetic oligonucleotide
  Sense strand starting at position 33 of SEQ ID NO: 587881
ggaacuuaugaacggcauu

SEQ ID NO: 825459 - RNA, 19 nt, Artificial Sequence
  Description of Artificial Sequence: Synthetic oligonucleotide
  Antisense strand to SEQ ID NO: 825458
aaugccguucauaaguucc

SEQ ID NO: 825460 - RNA, 19 nt, Artificial Sequence
  Description of Artificial Sequence: Synthetic oligonucleotide
  Sense strand starting at position 243 of SEQ ID NO: 587881
uuaauaacgcuagaaucca

SEQ ID NO: 825461 - RNA, 19 nt, Artificial Sequence
  Description of Artificial Sequence: Synthetic oligonucleotide
  Antisense strand to SEQ ID NO: 825460
uggauucuagcguuauuaa

SEQ ID NO: 825462 - RNA, 19 nt, Artificial Sequence
  Description of Artificial Sequence: Synthetic oligonucleotide
  Sense strand starting at position 429 of SEQ ID NO: 587881
cuauuacugucacugagaa

SEQ ID NO: 825463 - RNA, 19 nt, Artificial Sequence
  Description of Artificial Sequence: Synthetic oligonucleotide
  Antisense strand to SEQ ID NO: 825462
uucucagugacaguaauag

SEQ ID NO: 825464 - RNA, 19 nt, Artificial Sequence
  Description of Artificial Sequence: Synthetic oligonucleotide
  Sense strand starting at position 553 of SEQ ID NO: 587881
aaaugugucuauguaugga

SEQ ID NO: 825465 - RNA, 19 nt, Artificial Sequence
  Description of Artificial Sequence: Synthetic oligonucleotide
  Antisense strand to SEQ ID NO: 825464
uccauacauagacacauuu

SEQ ID NO: 825466 - RNA, 19 nt, Artificial Sequence
  Description of Artificial Sequence: Synthetic oligonucleotide
  Sense strand starting at position 556 of SEQ ID NO: 587881
ugugucuauguauggauuu

SEQ ID NO: 825467 - RNA, 19 nt, Artificial Sequence
  Description of Artificial Sequence: Synthetic oligonucleotide
  Antisense strand to SEQ ID NO: 825466
aaauccauacauagacaca

SEQ ID NO: 825468 - RNA, 19 nt, Artificial Sequence
  Description of Artificial Sequence: Synthetic oligonucleotide
  Sense strand starting at position 869 of SEQ ID NO: 587881
cuuguuuccucagugauga

SEQ ID NO: 825469 - RNA, 19 nt, Artificial Sequence
  Description of Artificial Sequence: Synthetic oligonucleotide
  Antisense strand to SEQ ID NO: 825468
ucaucacugaggaaacaag

SEQ ID NO: 825470 - RNA, 19 nt, Artificial Sequence
  Description of Artificial Sequence: Synthetic oligonucleotide
  Sense strand starting at position 870 of SEQ ID NO: 587881
uuguuuccucagugaugau

SEQ ID NO: 825471 - RNA, 19 nt, Artificial Sequence
  Description of Artificial Sequence: Synthetic oligonucleotide
  Antisense strand to SEQ ID NO: 825470
aucaucacugaggaaacaa

SEQ ID NO: 825472 - RNA, 19 nt, Artificial Sequence
  Description of Artificial Sequence: Synthetic oligonucleotide
  Sense strand starting at position 874 of SEQ ID NO: 587881
uuccucagugaugauugau

SEQ ID NO: 825473 - RNA, 19 nt, Artificial Sequence
  Description of Artificial Sequence: Synthetic oligonucleotide
  Antisense strand to SEQ ID NO: 825472
aucaaucaucacugaggaa

SEQ ID NO: 825474 - RNA, 19 nt, Artificial Sequence
  Description of Artificial Sequence: Synthetic oligonucleotide
  Sense strand starting at position 877 of SEQ ID NO: 587881
cucagugaugauugauguu

SEQ ID NO: 825475 - RNA, 19 nt, Artificial Sequence
  Description of Artificial Sequence: Synthetic oligonucleotide
  Antisense strand to SEQ ID NO: 825474
aacaucaaucaucacugag

SEQ ID NO: 825476 - RNA, 19 nt, Artificial Sequence
  Description of Artificial Sequence: Synthetic oligonucleotide
  Sense strand starting at position 886 of SEQ ID NO: 587881
gauugauguuaaccugugu

SEQ ID NO: 825477 - RNA, 19 nt, Artificial Sequence
  Description of Artificial Sequence: Synthetic oligonucleotide
  Antisense strand to SEQ ID NO: 825476
acacagguuaacaucaauc

SEQ ID NO: 825478 - RNA, 19 nt, Artificial Sequence
  Description of Artificial Sequence: Synthetic oligonucleotide
  Sense strand starting at position 992 of SEQ ID NO: 587881
aauggucagugguucuauu

SEQ ID NO: 825479 - RNA, 19 nt, Artificial Sequence
  Description of Artificial Sequence: Synthetic oligonucleotide
  Antisense strand to SEQ ID NO: 825478
aauagaaccacugaccauu

SEQ ID NO: 825480 - RNA, 19 nt, Artificial Sequence
  Description of Artificial Sequence: Synthetic oligonucleotide
  Sense strand starting at position 1085 of SEQ ID NO: 587881
agcuauugggaguaauggu

SEQ ID NO: 825481 - RNA, 19 nt, Artificial Sequence
  Description of Artificial Sequence: Synthetic oligonucleotide
  Antisense strand to SEQ ID NO: 825480
accauuacucccaauagcu

SEQ ID NO: 825482 - RNA, 19 nt, Artificial Sequence
  Description of Artificial Sequence: Synthetic oligonucleotide
  Sense strand starting at position 1163 of SEQ ID NO: 587881
cauguucuagugcaggaaa

SEQ ID NO: 825483 - RNA, 19 nt, Artificial Sequence
  Description of Artificial Sequence: Synthetic oligonucleotide
  Antisense strand to SEQ ID NO: 825482
uuuccugcacuagaacaug

SEQ ID NO: 825484 - RNA, 19 nt, Artificial Sequence
  Description of Artificial Sequence: Synthetic oligonucleotide
  Sense strand starting at position 1195 of SEQ ID NO: 587881
gugguaucaggagguguca

SEQ ID NO: 825485 - RNA, 19 nt, Artificial Sequence
  Description of Artificial Sequence: Synthetic oligonucleotide
  Antisense strand to SEQ ID NO: 825484
ugacaccuccugauaccac

SEQ ID NO: 825486 - RNA, 19 nt, Artificial Sequence
  Description of Artificial Sequence: Synthetic oligonucleotide
  Sense strand starting at position 1204 of SEQ ID NO: 587881
ggaggugucagguaagcua

SEQ ID NO: 825487 - RNA, 19 nt, Artificial Sequence
  Description of Artificial Sequence: Synthetic oligonucleotide
  Antisense strand to SEQ ID NO: 825486
uagcuuaccugacaccucc

SEQ ID NO: 825488 - RNA, 19 nt, Artificial Sequence
  Description of Artificial Sequence: Synthetic oligonucleotide
  Sense strand starting at position 1284 of SEQ ID NO: 587881
agucuuaguuaccucaacu

SEQ ID NO: 825489 - RNA, 19 nt, Artificial Sequence
  Description of Artificial Sequence: Synthetic oligonucleotide
  Antisense strand to SEQ ID NO: 825488
aguugagguaacuaagacu

SEQ ID NO: 825490 - RNA, 19 nt, Artificial Sequence
  Description of Artificial Sequence: Synthetic oligonucleotide
  Sense strand starting at position 1292 of SEQ ID NO: 587881
uuaccucaacugugaauag

SEQ ID NO: 825491 - RNA, 19 nt, Artificial Sequence
  Description of Artificial Sequence: Synthetic oligonucleotide
  Antisense strand to SEQ ID NO: 825490
cuauucacaguugagguaa

SEQ ID NO: 825492 - RNA, 19 nt, Artificial Sequence
  Description of Artificial Sequence: Synthetic oligonucleotide
  Sense strand starting at position 1334 of SEQ ID NO: 587881
aguuaauaugagggccaga

SEQ ID NO: 825493 - RNA, 19 nt, Artificial Sequence
  Description of Artificial Sequence: Synthetic oligonucleotide
  Antisense strand to SEQ ID NO: 825492
ucuggcccucauauuaacu

SEQ ID NO: 825494 - RNA, 19 nt, Artificial Sequence
  Description of Artificial Sequence: Synthetic oligonucleotide
  Sense strand starting at position 1415 of SEQ ID NO: 587881
guugguucugucuaugacu

SEQ ID NO: 825495 - RNA, 19 nt, Artificial Sequence
  Description of Artificial Sequence: Synthetic oligonucleotide
  Antisense strand to SEQ ID NO: 825494
agucauagacagaaccaac

SEQ ID NO: 825496 - RNA, 19 nt, Artificial Sequence
  Description of Artificial Sequence: Synthetic oligonucleotide
  Sense strand starting at position 1420 of SEQ ID NO: 587881
uucugucuaugacuccaua

SEQ ID NO: 825497 - RNA, 19 nt, Artificial Sequence
  Description of Artificial Sequence: Synthetic oligonucleotide
  Antisense strand to SEQ ID NO: 825496
uauggagucauagacagaa

SEQ ID NO: 825498 - RNA, 19 nt, Artificial Sequence
  Description of Artificial Sequence: Synthetic oligonucleotide
  Sense strand starting at position 1423 of SEQ ID NO: 587881
ugucuaugacuccauagua

SEQ ID NO: 825499 - RNA, 19 nt, Artificial Sequence
  Description of Artificial Sequence: Synthetic oligonucleotide
  Antisense strand to SEQ ID NO: 825498
uacuauggagucauagaca

SEQ ID NO: 825500 - RNA, 19 nt, Artificial Sequence
  Description of Artificial Sequence: Synthetic oligonucleotide
  Sense strand starting at position 1433 of SEQ ID NO: 587881
uccauaguauggguauaua

SEQ ID NO: 825501 - RNA, 19 nt, Artificial Sequence
  Description of Artificial Sequence: Synthetic oligonucleotide
  Antisense strand to SEQ ID NO: 825500
uauauacccauacuaugga

SEQ ID NO: 825502 - RNA, 19 nt, Artificial Sequence
  Description of Artificial Sequence: Synthetic oligonucleotide
  Sense strand starting at position 1444 of SEQ ID NO: 587881
gguauauaaugcuuuauga

SEQ ID NO: 825503 - RNA, 19 nt, Artificial Sequence
  Description of Artificial Sequence: Synthetic oligonucleotide
  Antisense strand to SEQ ID NO: 825502
ucauaaagcauuauauacc

SEQ ID NO: 825504 - RNA, 19 nt, Artificial Sequence
  Description of Artificial Sequence: Synthetic oligonucleotide
  Sense strand starting at position 1466 of SEQ ID NO: 587881
ugcuucuaacguuacauuu

SEQ ID NO: 825505 - RNA, 19 nt, Artificial Sequence
  Description of Artificial Sequence: Synthetic oligonucleotide
  Antisense strand to SEQ ID NO: 825504
aaauguaacguuagaagca

SEQ ID NO: 825506 - RNA, 19 nt, Artificial Sequence
  Description of Artificial Sequence: Synthetic oligonucleotide
  Sense strand starting at position 1483 of SEQ ID NO: 587881
uuuaauagucugugaucuc

SEQ ID NO: 825507 - RNA, 19 nt, Artificial Sequence
  Description of Artificial Sequence: Synthetic oligonucleotide
  Antisense strand to SEQ ID NO: 825506
gagaucacagacuauuaaa

SEQ ID NO: 825508 - RNA, 19 nt, Artificial Sequence
  Description of Artificial Sequence: Synthetic oligonucleotide
  Sense strand starting at position 1492 of SEQ ID NO: 587881
cugugaucuccucaauagc

SEQ ID NO: 825509 - RNA, 19 nt, Artificial Sequence
  Description of Artificial Sequence: Synthetic oligonucleotide
  Antisense strand to SEQ ID NO: 825508
gcuauugaggagaucacag

SEQ ID NO: 825510 - RNA, 19 nt, Artificial Sequence
  Description of Artificial Sequence: Synthetic oligonucleotide
  Sense strand starting at position 2356 of SEQ ID NO: 587881
aggcuucuuaucgaugcaa

SEQ ID NO: 825511 - RNA, 19 nt, Artificial Sequence
  Description of Artificial Sequence: Synthetic oligonucleotide
  Antisense strand to SEQ ID NO: 825510
uugcaucgauaagaagccu

SEQ ID NO: 825512 - RNA, 19 nt, Artificial Sequence
  Description of Artificial Sequence: Synthetic oligonucleotide
  Sense strand starting at position 2533 of SEQ ID NO: 587881
uucuuaugcccagagaaua

SEQ ID NO: 825513 - RNA, 19 nt, Artificial Sequence
  Description of Artificial Sequence: Synthetic oligonucleotide
  Antisense strand to SEQ ID NO: 825512
uauucucugggcauaagaa

SEQ ID NO: 825514 - RNA, 19 nt, Artificial Sequence
  Description of Artificial Sequence: Synthetic oligonucleotide
  Sense strand starting at position 2550 of SEQ ID NO: 587881
uaguguagaagugguugaa

SEQ ID NO: 825515 - RNA, 19 nt, Artificial Sequence
  Description of Artificial Sequence: Synthetic oligonucleotide
  Antisense strand to SEQ ID NO: 825514
uucaaccacuucuacacua

SEQ ID NO: 825516 - RNA, 19 nt, Artificial Sequence
  Description of Artificial Sequence: Synthetic oligonucleotide
  Sense strand starting at position 2553 of SEQ ID NO: 587881
uguagaagugguugaaaga

SEQ ID NO: 825517 - RNA, 19 nt, Artificial Sequence
  Description of Artificial Sequence: Synthetic oligonucleotide
  Antisense strand to SEQ ID NO: 825516
ucuuucaaccacuucuaca

SEQ ID NO: 825518 - RNA, 19 nt, Artificial Sequence
  Description of Artificial Sequence: Synthetic oligonucleotide
  Sense strand starting at position 2636 of SEQ ID NO: 587881
gcaugaccaaugggaagua

SEQ ID NO: 825519 - RNA, 19 nt, Artificial Sequence
  Description of Artificial Sequence: Synthetic oligonucleotide
  Antisense strand to SEQ ID NO: 825518
uacuucccauuggucaugc

SEQ ID NO: 825520 - RNA, 19 nt, Artificial Sequence
  Description of Artificial Sequence: Synthetic oligonucleotide
  Sense strand starting at position 2666 of SEQ ID NO: 587881
ggagcuucgaucuagauag

SEQ ID NO: 825521 - RNA, 19 nt, Artificial Sequence
  Description of Artificial Sequence: Synthetic oligonucleotide
  Antisense strand to SEQ ID NO: 825520
cuaucuagaucgaagcucc

SEQ ID NO: 825522 - RNA, 19 nt, Artificial Sequence
  Description of Artificial Sequence: Synthetic oligonucleotide
  Sense strand starting at position 2668 of SEQ ID NO: 587881
agcuucgaucuagauagga

SEQ ID NO: 825523 - RNA, 19 nt, Artificial Sequence
  Description of Artificial Sequence: Synthetic oligonucleotide
  Antisense strand to SEQ ID NO: 825522
uccuaucuagaucgaagcu

SEQ ID NO: 825524 - RNA, 19 nt, Artificial Sequence
  Description of Artificial Sequence: Synthetic oligonucleotide
  Sense strand starting at position 2927 of SEQ ID NO: 587881
agcuaaguucaguggaaga

SEQ ID NO: 825525 - RNA, 19 nt, Artificial Sequence
  Description of Artificial Sequence: Synthetic oligonucleotide
  Antisense strand to SEQ ID NO: 825524
ucuuccacugaacuuagcu

SEQ ID NO: 825526 - RNA, 19 nt, Artificial Sequence
  Description of Artificial Sequence: Synthetic oligonucleotide
  Sense strand starting at position 2963 of SEQ ID NO: 587881
guuuauugugcaucugugu

SEQ ID NO: 825527 - RNA, 19 nt, Artificial Sequence
  Description of Artificial Sequence: Synthetic oligonucleotide
  Antisense strand to SEQ ID NO: 825526
acacagaugcacaauaaac

SEQ ID NO: 825528 - RNA, 19 nt, Artificial Sequence
  Description of Artificial Sequence: Synthetic oligonucleotide
  Sense strand starting at position 3133 of SEQ ID NO: 587881
aguagaucuccuuagguaa

SEQ ID NO: 825529 - RNA, 19 nt, Artificial Sequence
  Description of Artificial Sequence: Synthetic oligonucleotide
  Antisense strand to SEQ ID NO: 825528
uuaccuaaggagaucuacu

SEQ ID NO: 825530 - RNA, 19 nt, Artificial Sequence
  Description of Artificial Sequence: Synthetic oligonucleotide
  Sense strand starting at position 3335 of SEQ ID NO: 587881
uccgaaugucacuguauuu

SEQ ID NO: 825531 - RNA, 19 nt, Artificial Sequence
  Description of Artificial Sequence: Synthetic oligonucleotide
  Antisense strand to SEQ ID NO: 825530
aaauacagugacauucgga

SEQ ID NO: 825532 - RNA, 19 nt, Artificial Sequence
  Description of Artificial Sequence: Synthetic oligonucleotide
  Sense strand starting at position 3626 of SEQ ID NO: 587881
cugugauacuuuguuauac

SEQ ID NO: 825533 - RNA, 19 nt, Artificial Sequence
  Description of Artificial Sequence: Synthetic oligonucleotide
  Antisense strand to SEQ ID NO: 825532
guauaacaaaguaucacag

SEQ ID NO: 825534 - RNA, 19 nt, Artificial Sequence
  Description of Artificial Sequence: Synthetic oligonucleotide
  Sense strand starting at position 3827 of SEQ ID NO: 587881
gccugaaaugcuuauccac

SEQ ID NO: 825535 - RNA, 19 nt, Artificial Sequence
  Description of Artificial Sequence: Synthetic oligonucleotide
  Antisense strand to SEQ ID NO: 825534
guggauaagcauuucaggc

SEQ ID NO: 825536 - RNA, 19 nt, Artificial Sequence
  Description of Artificial Sequence: Synthetic oligonucleotide
  Sense strand starting at position 3834 of SEQ ID NO: 587881
augcuuauccacuaguucu

SEQ ID NO: 825537 - RNA, 19 nt, Artificial Sequence
  Description of Artificial Sequence: Synthetic oligonucleotide
  Antisense strand to SEQ ID NO: 825536
agaacuaguggauaagcau

SEQ ID NO: 825538 - RNA, 19 nt, Artificial Sequence
  Description of Artificial Sequence: Synthetic oligonucleotide
  Sense strand starting at position 214 of SEQ ID NO: 587882
ugcugaaacuaucugguua

SEQ ID NO: 825539 - RNA, 19 nt, Artificial Sequence
  Description of Artificial Sequence: Synthetic oligonucleotide
  Antisense strand to SEQ ID NO: 825538
uaaccagauaguuucagca

SEQ ID NO: 825540 - RNA, 19 nt, Artificial Sequence
  Description of Artificial Sequence: Synthetic oligonucleotide
  Sense strand starting at position 327 of SEQ ID NO: 587882
gcuguuauuuacuuugcau

SEQ ID NO: 825541 - RNA, 19 nt, Artificial Sequence
  Description of Artificial Sequence: Synthetic oligonucleotide
  Antisense strand to SEQ ID NO: 825540
augcaaaguaaauaacagc

SEQ ID NO: 825542 - RNA, 19 nt, Artificial Sequence
  Description of Artificial Sequence: Synthetic oligonucleotide
  Sense strand starting at position 349 of SEQ ID NO: 587882
ucugaaagauuacuaugca

SEQ ID NO: 825543 - RNA, 19 nt, Artificial Sequence
  Description of Artificial Sequence: Synthetic oligonucleotide
  Antisense strand to SEQ ID NO: 825542
ugcauaguaaucuuucaga

SEQ ID NO: 825544 - RNA, 19 nt, Artificial Sequence
  Description of Artificial Sequence: Synthetic oligonucleotide
  Sense strand starting at position 421 of SEQ ID NO: 587882
uccuauaaaguaugacagu

SEQ ID NO: 825545 - RNA, 19 nt, Artificial Sequence
  Description of Artificial Sequence: Synthetic oligonucleotide
  Antisense strand to SEQ ID NO: 825544
acugucauacuuuauagga

SEQ ID NO: 825546 - RNA, 19 nt, Artificial Sequence
  Description of Artificial Sequence: Synthetic oligonucleotide
  Sense strand starting at position 509 of SEQ ID NO: 587882
uuguuccagcuacagaaua

SEQ ID NO: 825547 - RNA, 19 nt, Artificial Sequence
  Description of Artificial Sequence: Synthetic oligonucleotide
  Antisense strand to SEQ ID NO: 825546
uauucuguagcuggaacaa

SEQ ID NO: 825548 - RNA, 19 nt, Artificial Sequence
  Description of Artificial Sequence: Synthetic oligonucleotide
  Sense strand starting at position 602 of SEQ ID NO: 587882
gaaauauaagccugcagug

SEQ ID NO: 825549 - RNA, 19 nt, Artificial Sequence
  Description of Artificial Sequence: Synthetic oligonucleotide
  Antisense strand to SEQ ID NO: 825548
cacugcaggcuuauauuuc

SEQ ID NO: 825550 - RNA, 19 nt, Artificial Sequence
  Description of Artificial Sequence: Synthetic oligonucleotide
  Sense strand starting at position 619 of SEQ ID NO: 587882
ugucuaugccaaggaaacu

SEQ ID NO: 825551 - RNA, 19 nt, Artificial Sequence
  Description of Artificial Sequence: Synthetic oligonucleotide
  Antisense strand to SEQ ID NO: 825550
aguuuccuuggcauagaca

SEQ ID NO: 825552 - RNA, 19 nt, Artificial Sequence
  Description of Artificial Sequence: Synthetic oligonucleotide
  Sense strand starting at position 839 of SEQ ID NO: 587882
ucagacuucucaccaguuu

SEQ ID NO: 825553 - RNA, 19 nt, Artificial Sequence
  Description of Artificial Sequence: Synthetic oligonucleotide
  Antisense strand to SEQ ID NO: 825552
aaacuggugagaagucuga

SEQ ID NO: 825554 - RNA, 19 nt, Artificial Sequence
  Description of Artificial Sequence: Synthetic oligonucleotide
  Sense strand starting at position 868 of SEQ ID NO: 587882
cugagaaauagauguagua

SEQ ID NO: 825555 - RNA, 19 nt, Artificial Sequence
  Description of Artificial Sequence: Synthetic oligonucleotide
  Antisense strand to SEQ ID NO: 825554
uacuacaucuauuucucag

SEQ ID NO: 825556 - RNA, 19 nt, Artificial Sequence
  Description of Artificial Sequence: Synthetic oligonucleotide
  Sense strand starting at position 887 of SEQ ID NO: 587882
gguaaugugauacagaagu

SEQ ID NO: 825557 - RNA, 19 nt, Artificial Sequence
  Description of Artificial Sequence: Synthetic oligonucleotide
  Antisense strand to SEQ ID NO: 825556
acuucuguaucacauuacc

SEQ ID NO: 825558 - RNA, 19 nt, Artificial Sequence
  Description of Artificial Sequence: Synthetic oligonucleotide
  Sense strand starting at position 947 of SEQ ID NO: 587882
aggauucucuuugcaaaua

SEQ ID NO: 825559 - RNA, 19 nt, Artificial Sequence
  Description of Artificial Sequence: Synthetic oligonucleotide
  Antisense strand to SEQ ID NO: 825558
uauuugcaaagagaauccu

SEQ ID NO: 825560 - RNA, 19 nt, Artificial Sequence
  Description of Artificial Sequence: Synthetic oligonucleotide
  Sense strand starting at position 963 of SEQ ID NO: 587882
auaccaaucuuggcaaaga

SEQ ID NO: 825561 - RNA, 19 nt, Artificial Sequence
  Description of Artificial Sequence: Synthetic oligonucleotide
  Antisense strand to SEQ ID NO: 825560
ucuuugccaagauugguau

SEQ ID NO: 825562 - RNA, 19 nt, Artificial Sequence
  Description of Artificial Sequence: Synthetic oligonucleotide
  Sense strand starting at position 1113 of SEQ ID NO: 587882
agugaaaguaggcaacuau

SEQ ID NO: 825563 - RNA, 19 nt, Artificial Sequence
  Description of Artificial Sequence: Synthetic oligonucleotide
  Antisense strand to SEQ ID NO: 825562
auaguugccuacuuucacu

SEQ ID NO: 825564 - RNA, 19 nt, Artificial Sequence
  Description of Artificial Sequence: Synthetic oligonucleotide
  Sense strand starting at position 1358 of SEQ ID NO: 587882
uguuuauucuaggucauag

SEQ ID NO: 825565 - RNA, 19 nt, Artificial Sequence
  Description of Artificial Sequence: Synthetic oligonucleotide
  Antisense strand to SEQ ID NO: 825564
cuaugaccuagaauaaaca

SEQ ID NO: 825566 - RNA, 19 nt, Artificial Sequence
  Description of Artificial Sequence: Synthetic oligonucleotide
  Sense strand starting at position 1360 of SEQ ID NO: 587882
uuuauucuaggucauagua

SEQ ID NO: 825567 - RNA, 19 nt, Artificial Sequence
  Description of Artificial Sequence: Synthetic oligonucleotide
  Antisense strand to SEQ ID NO: 825566
uacuaugaccuagaauaaa

SEQ ID NO: 825568 - RNA, 19 nt, Artificial Sequence
  Description of Artificial Sequence: Synthetic oligonucleotide
  Sense strand starting at position 1370 of SEQ ID NO: 587882
gucauaguauuauuccaag

SEQ ID NO: 825569 - RNA, 19 nt, Artificial Sequence
  Description of Artificial Sequence: Synthetic oligonucleotide
  Antisense strand to SEQ ID NO: 825568
cuuggaauaauacuaugac

SEQ ID NO: 825570 - RNA, 19 nt, Artificial Sequence
  Description of Artificial Sequence: Synthetic oligonucleotide
  Sense strand starting at position 1376 of SEQ ID NO: 587882
guauuauuccaaggaagca

SEQ ID NO: 825571 - RNA, 19 nt, Artificial Sequence
  Description of Artificial Sequence: Synthetic oligonucleotide
  Antisense strand to SEQ ID NO: 825570
ugcuuccuuggaauaauac

SEQ ID NO: 825572 - RNA, 19 nt, Artificial Sequence
  Description of Artificial Sequence: Synthetic oligonucleotide
  Sense strand starting at position 1396 of SEQ ID NO: 587882
agugacaucuacucugcau

SEQ ID NO: 825573 - RNA, 19 nt, Artificial Sequence
  Description of Artificial Sequence: Synthetic oligonucleotide
  Antisense strand to SEQ ID NO: 825572
augcagaguagaugucacu

SEQ ID NO: 825574 - RNA, 19 nt, Artificial Sequence
  Description of Artificial Sequence: Synthetic oligonucleotide
  Sense strand starting at position 2035 of SEQ ID NO: 587882
ugguuaaugagguaguucu

SEQ ID NO: 825575 - RNA, 19 nt, Artificial Sequence
  Description of Artificial Sequence: Synthetic oligonucleotide
  Antisense strand to SEQ ID NO: 825574
agaacuaccucauuaacca

SEQ ID NO: 825576 - RNA, 19 nt, Artificial Sequence
  Description of Artificial Sequence: Synthetic oligonucleotide
  Sense strand starting at position 2192 of SEQ ID NO: 587882
gcccuauuucuuugagagc

SEQ ID NO: 825577 - RNA, 19 nt, Artificial Sequence
  Description of Artificial Sequence: Synthetic oligonucleotide
  Antisense strand to SEQ ID NO: 825576
gcucucaaagaaauagggc

SEQ ID NO: 825578 - RNA, 19 nt, Artificial Sequence
  Description of Artificial Sequence: Synthetic oligonucleotide
  Sense strand starting at position 2263 of SEQ ID NO: 587882
auaacagggcauugcuaaa

SEQ ID NO: 825579 - RNA, 19 nt, Artificial Sequence
  Description of Artificial Sequence: Synthetic oligonucleotide
  Antisense strand to SEQ ID NO: 825578
uuuagcaaugcccuguuau

SEQ ID NO: 825580 - RNA, 19 nt, Artificial Sequence
  Description of Artificial Sequence: Synthetic oligonucleotide
  Sense strand starting at position 2275 of SEQ ID NO: 587882
ugcuaaagguccuuaccau

SEQ ID NO: 825581 - RNA, 19 nt, Artificial Sequence
  Description of Artificial Sequence: Synthetic oligonucleotide
  Antisense strand to SEQ ID NO: 825580
augguaaggaccuuuagca

SEQ ID NO: 825582 - RNA, 19 nt, Artificial Sequence
  Description of Artificial Sequence: Synthetic oligonucleotide
  Sense strand starting at position 2276 of SEQ ID NO: 587882
gcuaaagguccuuaccauu

SEQ ID NO: 825583 - RNA, 19 nt, Artificial Sequence
  Description of Artificial Sequence: Synthetic oligonucleotide
  Antisense strand to SEQ ID NO: 825582
aaugguaaggaccuuuagc

SEQ ID NO: 825584 - RNA, 19 nt, Artificial Sequence
  Description of Artificial Sequence: Synthetic oligonucleotide
  Sense strand starting at position 2364 of SEQ ID NO: 587882
aggaguaacuaguucucau

SEQ ID NO: 825585 - RNA, 19 nt, Artificial Sequence
  Description of Artificial Sequence: Synthetic oligonucleotide
  Antisense strand to SEQ ID NO: 825584
augagaacuaguuacuccu

SEQ ID NO: 825586 - RNA, 19 nt, Artificial Sequence
  Description of Artificial Sequence: Synthetic oligonucleotide
  Sense strand starting at position 2367 of SEQ ID NO: 587882
aguaacuaguucucauaaa

SEQ ID NO: 825587 - RNA, 19 nt, Artificial Sequence
  Description of Artificial Sequence: Synthetic oligonucleotide
  Antisense strand to SEQ ID NO: 825586
uuuaugagaacuaguuacu

SEQ ID NO: 825588 - RNA, 19 nt, Artificial Sequence
  Description of Artificial Sequence: Synthetic oligonucleotide
  Sense strand starting at position 2436 of SEQ ID NO: 587882
acauauuugugacaggaga

SEQ ID NO: 825589 - RNA, 19 nt, Artificial Sequence
  Description of Artificial Sequence: Synthetic oligonucleotide
  Antisense strand to SEQ ID NO: 825588
ucuccugucacaaauaugu

SEQ ID NO: 825590 - RNA, 19 nt, Artificial Sequence
  Description of Artificial Sequence: Synthetic oligonucleotide
  Sense strand starting at position 2450 of SEQ ID NO: 587882
ggagaucuucccugucucu

SEQ ID NO: 825591 - RNA, 19 nt, Artificial Sequence
  Description of Artificial Sequence: Synthetic oligonucleotide
  Antisense strand to SEQ ID NO: 825590
agagacagggaagaucucc

SEQ ID NO: 825592 - RNA, 19 nt, Artificial Sequence
  Description of Artificial Sequence: Synthetic oligonucleotide
  Sense strand starting at position 2489 of SEQ ID NO: 587882
cucugaugguuucucuaag

SEQ ID NO: 825593 - RNA, 19 nt, Artificial Sequence
  Description of Artificial Sequence: Synthetic oligonucleotide
  Antisense strand to SEQ ID NO: 825592
cuuagagaaaccaucagag

SEQ ID NO: 825594 - RNA, 19 nt, Artificial Sequence
  Description of Artificial Sequence: Synthetic oligonucleotide
  Sense strand starting at position 2530 of SEQ ID NO: 587882
acugaaauuuacugaggaa

SEQ ID NO: 825595 - RNA, 19 nt, Artificial Sequence
  Description of Artificial Sequence: Synthetic oligonucleotide
  Antisense strand to SEQ ID NO: 825594
uuccucaguaaauuucagu

SEQ ID NO: 825596 - RNA, 19 nt, Artificial Sequence
  Description of Artificial Sequence: Synthetic oligonucleotide
  Sense strand starting at position 2533 of SEQ ID NO: 587882
gaaauuuacugaggaaugu

SEQ ID NO: 825597 - RNA, 19 nt, Artificial Sequence
  Description of Artificial Sequence: Synthetic oligonucleotide
  Antisense strand to SEQ ID NO: 825596
acauuccucaguaaauuuc

SEQ ID NO: 825598 - RNA, 19 nt, Artificial Sequence
  Description of Artificial Sequence: Synthetic oligonucleotide
  Sense strand starting at position 2537 of SEQ ID NO: 587882
uuuacugaggaauguuaua

SEQ ID NO: 825599 - RNA, 19 nt, Artificial Sequence
  Description of Artificial Sequence: Synthetic oligonucleotide
  Antisense strand to SEQ ID NO: 825598
uauaacauuccucaguaaa

SEQ ID NO: 825600 - RNA, 19 nt, Artificial Sequence
  Description of Artificial Sequence: Synthetic oligonucleotide
  Sense strand starting at position 2560 of SEQ ID NO: 587882
ucaaacuauuguuugaagu

SEQ ID NO: 825601 - RNA, 19 nt, Artificial Sequence
  Description of Artificial Sequence: Synthetic oligonucleotide
  Antisense strand to SEQ ID NO: 825600
acuucaaacaauaguuuga

SEQ ID NO: 825602 - RNA, 19 nt, Artificial Sequence
  Description of Artificial Sequence: Synthetic oligonucleotide
  Sense strand starting at position 2852 of SEQ ID NO: 587882
cccauuuguuuggagaaua

SEQ ID NO: 825603 - RNA, 19 nt, Artificial Sequence
  Description of Artificial Sequence: Synthetic oligonucleotide
  Antisense strand to SEQ ID NO: 825602
uauucuccaaacaaauggg

SEQ ID NO: 825604 - RNA, 19 nt, Artificial Sequence
  Description of Artificial Sequence: Synthetic oligonucleotide
  Sense strand starting at position 2882 of SEQ ID NO: 587882
ucuggaagccuuuauaaua

SEQ ID NO: 825605 - RNA, 19 nt, Artificial Sequence
  Description of Artificial Sequence: Synthetic oligonucleotide
  Antisense strand to SEQ ID NO: 825604
uauuauaaaggcuuccaga

SEQ ID NO: 825606 - RNA, 19 nt, Artificial Sequence
  Description of Artificial Sequence: Synthetic oligonucleotide
  Sense strand starting at position 2981 of SEQ ID NO: 587882
agaugacaucucuagcuuu

SEQ ID NO: 825607 - RNA, 19 nt, Artificial Sequence
  Description of Artificial Sequence: Synthetic oligonucleotide
  Antisense strand to SEQ ID NO: 825606
aaagcuagagaugucaucu

SEQ ID NO: 825608 - RNA, 19 nt, Artificial Sequence
  Description of Artificial Sequence: Synthetic oligonucleotide
  Sense strand starting at position 3204 of SEQ ID NO: 587882
uccuauccucuugguauga

SEQ ID NO: 825609 - RNA, 19 nt, Artificial Sequence
  Description of Artificial Sequence: Synthetic oligonucleotide
  Antisense strand to SEQ ID NO: 825608
ucauaccaagaggauagga

SEQ ID NO: 825610 - RNA, 19 nt, Artificial Sequence
  Description of Artificial Sequence: Synthetic oligonucleotide
  Sense strand starting at position 3208 of SEQ ID NO: 587882
auccucuugguaugagaga

SEQ ID NO: 825611 - RNA, 19 nt, Artificial Sequence
  Description of Artificial Sequence: Synthetic oligonucleotide
  Antisense strand to SEQ ID NO: 825610
ucucucauaccaagaggau

SEQ ID NO: 825612 - RNA, 19 nt, Artificial Sequence
  Description of Artificial Sequence: Synthetic oligonucleotide
  Sense strand starting at position 3463 of SEQ ID NO: 587882
uugaaagcuuaacugaaau

SEQ ID NO: 825613 - RNA, 19 nt, Artificial Sequence
  Description of Artificial Sequence: Synthetic oligonucleotide
  Antisense strand to SEQ ID NO: 825612
auuucaguuaagcuuucaa

SEQ ID NO: 825614 - RNA, 19 nt, Artificial Sequence
  Description of Artificial Sequence: Synthetic oligonucleotide
  Sense strand starting at position 3777 of SEQ ID NO: 587882
uuuccaugugcauacauau

SEQ ID NO: 825615 - RNA, 19 nt, Artificial Sequence
  Description of Artificial Sequence: Synthetic oligonucleotide
  Antisense strand to SEQ ID NO: 825614
auauguaugcacauggaaa

SEQ ID NO: 825616 - RNA, 19 nt, Artificial Sequence
  Description of Artificial Sequence: Synthetic oligonucleotide
  Sense strand starting at position 3932 of SEQ ID NO: 587882
caagaaugcuaaguguauu

SEQ ID NO: 825617 - RNA, 19 nt, Artificial Sequence
  Description of Artificial Sequence: Synthetic oligonucleotide
  Antisense strand to SEQ ID NO: 825616
aauacacuuagcauucuug

SEQ ID NO: 825618 - RNA, 19 nt, Artificial Sequence
  Description of Artificial Sequence: Synthetic oligonucleotide
  Sense strand starting at position 23 of SEQ ID NO: 587883
gaggccugucaugauaugu

SEQ ID NO: 825619 - RNA, 19 nt, Artificial Sequence
  Description of Artificial Sequence: Synthetic oligonucleotide
  Antisense strand to SEQ ID NO: 825618
acauaucaugacaggccuc

SEQ ID NO: 825620 - RNA, 19 nt, Artificial Sequence
  Description of Artificial Sequence: Synthetic oligonucleotide
  Sense strand starting at position 31 of SEQ ID NO: 587883
ucaugauauguccaccucu

SEQ ID NO: 825621 - RNA, 19 nt, Artificial Sequence
  Description of Artificial Sequence: Synthetic oligonucleotide
  Antisense strand to SEQ ID NO: 825620
agagguggacauaucauga

SEQ ID NO: 825622 - RNA, 19 nt, Artificial Sequence
  Description of Artificial Sequence: Synthetic oligonucleotide
  Sense strand starting at position 544 of SEQ ID NO: 587883
gcaaauuugcacuguuaga

SEQ ID NO: 825623 - RNA, 19 nt, Artificial Sequence
  Description of Artificial Sequence: Synthetic oligonucleotide
  Antisense strand to SEQ ID NO: 825622
ucuaacagugcaaauuugc

SEQ ID NO: 825624 - RNA, 19 nt, Artificial Sequence
  Description of Artificial Sequence: Synthetic oligonucleotide
  Sense strand starting at position 698 of SEQ ID NO: 587883
aagguauuacgauacaugu

SEQ ID NO: 825625 - RNA, 19 nt, Artificial Sequence
  Description of Artificial Sequence: Synthetic oligonucleotide
  Antisense strand to SEQ ID NO: 825624
acauguaucguaauaccuu

SEQ ID NO: 825626 - RNA, 19 nt, Artificial Sequence
  Description of Artificial Sequence: Synthetic oligonucleotide
  Sense strand starting at position 734 of SEQ ID NO: 587883
gggaaacuugagugcuaag

SEQ ID NO: 825627 - RNA, 19 nt, Artificial Sequence
  Description of Artificial Sequence: Synthetic oligonucleotide
  Antisense strand to SEQ ID NO: 825626
cuuagcacucaaguuuccc

SEQ ID NO: 825628 - RNA, 19 nt, Artificial Sequence
  Description of Artificial Sequence: Synthetic oligonucleotide
  Sense strand starting at position 741 of SEQ ID NO: 587883
uugagugcuaagggaguaa

SEQ ID NO: 825629 - RNA, 19 nt, Artificial Sequence
  Description of Artificial Sequence: Synthetic oligonucleotide
  Antisense strand to SEQ ID NO: 825628
uuacucccuuagcacucaa

SEQ ID NO: 825630 - RNA, 19 nt, Artificial Sequence
  Description of Artificial Sequence: Synthetic oligonucleotide
  Sense strand starting at position 745 of SEQ ID NO: 587883
gugcuaagggaguaaauag

SEQ ID NO: 825631 - RNA, 19 nt, Artificial Sequence
  Description of Artificial Sequence: Synthetic oligonucleotide
  Antisense strand to SEQ ID NO: 825630
cuauuuacucccuuagcac

SEQ ID NO: 825632 - RNA, 19 nt, Artificial Sequence
  Description of Artificial Sequence: Synthetic oligonucleotide
  Sense strand starting at position 778 of SEQ ID NO: 587883
ucggaugugcuacaagaga

SEQ ID NO: 825633 - RNA, 19 nt, Artificial Sequence
  Description of Artificial Sequence: Synthetic oligonucleotide
  Antisense strand to SEQ ID NO: 825632
ucucuuguagcacauccga

SEQ ID NO: 825634 - RNA, 19 nt, Artificial Sequence
  Description of Artificial Sequence: Synthetic oligonucleotide
  Sense strand starting at position 925 of SEQ ID NO: 587883
uguuuaauugcucacuaag

SEQ ID NO: 825635 - RNA, 19 nt, Artificial Sequence
  Description of Artificial Sequence: Synthetic oligonucleotide
  Antisense strand to SEQ ID NO: 825634
cuuagugagcaauuaaaca

SEQ ID NO: 825636 - RNA, 19 nt, Artificial Sequence
  Description of Artificial Sequence: Synthetic oligonucleotide
  Sense strand starting at position 995 of SEQ ID NO: 587883
cacuaaugaguugguaaca

SEQ ID NO: 825637 - RNA, 19 nt, Artificial Sequence
  Description of Artificial Sequence: Synthetic oligonucleotide
  Antisense strand to SEQ ID NO: 825636
uguuaccaacucauuagug

SEQ ID NO: 825638 - RNA, 19 nt, Artificial Sequence
  Description of Artificial Sequence: Synthetic oligonucleotide
  Sense strand starting at position 996 of SEQ ID NO: 587883
acuaaugaguugguaacaa

SEQ ID NO: 825639 - RNA, 19 nt, Artificial Sequence
  Description of Artificial Sequence: Synthetic oligonucleotide
  Antisense strand to SEQ ID NO: 825638
uuguuaccaacucauuagu

SEQ ID NO: 825640 - RNA, 19 nt, Artificial Sequence
  Description of Artificial Sequence: Synthetic oligonucleotide
  Sense strand starting at position 1041 of SEQ ID NO: 587883
aggagaugcccaugcuuaa

SEQ ID NO: 825641 - RNA, 19 nt, Artificial Sequence
  Description of Artificial Sequence: Synthetic oligonucleotide
  Antisense strand to SEQ ID NO: 825640
uuaagcaugggcaucuccu

SEQ ID NO: 825642 - RNA, 19 nt, Artificial Sequence
  Description of Artificial Sequence: Synthetic oligonucleotide
  Sense strand starting at position 1075 of SEQ ID NO: 587883
agaugauuaugaguucgau

SEQ ID NO: 825643 - RNA, 19 nt, Artificial Sequence
  Description of Artificial Sequence: Synthetic oligonucleotide
  Antisense strand to SEQ ID NO: 825642
aucgaacucauaaucaucu

SEQ ID NO: 825644 - RNA, 19 nt, Artificial Sequence
  Description of Artificial Sequence: Synthetic oligonucleotide
  Sense strand starting at position 1142 of SEQ ID NO: 587883
aucaaugacucaccaggua

SEQ ID NO: 825645 - RNA, 19 nt, Artificial Sequence
  Description of Artificial Sequence: Synthetic oligonucleotide
  Antisense strand to SEQ ID NO: 825644
uaccuggugagucauugau

SEQ ID NO: 825646 - RNA, 19 nt, Artificial Sequence
  Description of Artificial Sequence: Synthetic oligonucleotide
  Sense strand starting at position 1411 of SEQ ID NO: 587883
cuggaaagcaguugguaaa

SEQ ID NO: 825647 - RNA, 19 nt, Artificial Sequence
  Description of Artificial Sequence: Synthetic oligonucleotide
  Antisense strand to SEQ ID NO: 825646
uuuaccaacugcuuuccag

SEQ ID NO: 825648 - RNA, 19 nt, Artificial Sequence
  Description of Artificial Sequence: Synthetic oligonucleotide
  Sense strand starting at position 1421 of SEQ ID NO: 587883
guugguaaacuguaaggua

SEQ ID NO: 825649 - RNA, 19 nt, Artificial Sequence
  Description of Artificial Sequence: Synthetic oligonucleotide
  Antisense strand to SEQ ID NO: 825648
uaccuuacaguuuaccaac

SEQ ID NO: 825650 - RNA, 19 nt, Artificial Sequence
  Description of Artificial Sequence: Synthetic oligonucleotide
  Sense strand starting at position 1430 of SEQ ID NO: 587883
cuguaagguaccugguaaa

SEQ ID NO: 825651 - RNA, 19 nt, Artificial Sequence
  Description of Artificial Sequence: Synthetic oligonucleotide
  Antisense strand to SEQ ID NO: 825650
uuuaccagguaccuuacag

SEQ ID NO: 825652 - RNA, 19 nt, Artificial Sequence
  Description of Artificial Sequence: Synthetic oligonucleotide
  Sense strand starting at position 1454 of SEQ ID NO: 587883
aaccguaaaguccaguaaa

SEQ ID NO: 825653 - RNA, 19 nt, Artificial Sequence
  Description of Artificial Sequence: Synthetic oligonucleotide
  Antisense strand to SEQ ID NO: 825652
uuuacuggacuuuacgguu

SEQ ID NO: 825654 - RNA, 19 nt, Artificial Sequence
  Description of Artificial Sequence: Synthetic oligonucleotide
  Sense strand starting at position 1498 of SEQ ID NO: 587883
guccucugacccugacaau

SEQ ID NO: 825655 - RNA, 19 nt, Artificial Sequence
  Description of Artificial Sequence: Synthetic oligonucleotide
  Antisense strand to SEQ ID NO: 825654
auugucagggucagaggac

SEQ ID NO: 825656 - RNA, 19 nt, Artificial Sequence
  Description of Artificial Sequence: Synthetic oligonucleotide
  Sense strand starting at position 1561 of SEQ ID NO: 587883
gacugaauccugcagaagu

SEQ ID NO: 825657 - RNA, 19 nt, Artificial Sequence
  Description of Artificial Sequence: Synthetic oligonucleotide
  Antisense strand to SEQ ID NO: 825656
acuucugcaggauucaguc

SEQ ID NO: 825658 - RNA, 19 nt, Artificial Sequence
  Description of Artificial Sequence: Synthetic oligonucleotide
  Sense strand starting at position 1563 of SEQ ID NO: 587883
cugaauccugcagaaguuu

SEQ ID NO: 825659 - RNA, 19 nt, Artificial Sequence
  Description of Artificial Sequence: Synthetic oligonucleotide
  Antisense strand to SEQ ID NO: 825658
aaacuucugcaggauucag

SEQ ID NO: 825660 - RNA, 19 nt, Artificial Sequence
  Description of Artificial Sequence: Synthetic oligonucleotide
  Sense strand starting at position 1815 of SEQ ID NO: 587883
aggucuccuaggcauuaga

SEQ ID NO: 825661 - RNA, 19 nt, Artificial Sequence
  Description of Artificial Sequence: Synthetic oligonucleotide
  Antisense strand to SEQ ID NO: 825660
ucuaaugccuaggagaccu

SEQ ID NO: 825662 - RNA, 19 nt, Artificial Sequence
  Description of Artificial Sequence: Synthetic oligonucleotide
  Sense strand starting at position 1818 of SEQ ID NO: 587883
ucuccuaggcauuagaaca

SEQ ID NO: 825663 - RNA, 19 nt, Artificial Sequence
  Description of Artificial Sequence: Synthetic oligonucleotide
  Antisense strand to SEQ ID NO: 825662
uguucuaaugccuaggaga

SEQ ID NO: 825664 - RNA, 19 nt, Artificial Sequence
  Description of Artificial Sequence: Synthetic oligonucleotide
  Sense strand starting at position 1838 of SEQ ID NO: 587883
ccuuaaugagggugagcau

SEQ ID NO: 825665 - RNA, 19 nt, Artificial Sequence
  Description of Artificial Sequence: Synthetic oligonucleotide
  Antisense strand to SEQ ID NO: 825664
augcucacccucauuaagg

SEQ ID NO: 825666 - RNA, 19 nt, Artificial Sequence
  Description of Artificial Sequence: Synthetic oligonucleotide
  Sense strand starting at position 1839 of SEQ ID NO: 587883
cuuaaugagggugagcauu

SEQ ID NO: 825667 - RNA, 19 nt, Artificial Sequence
  Description of Artificial Sequence: Synthetic oligonucleotide
  Antisense strand to SEQ ID NO: 825666
aaugcucacccucauuaag

SEQ ID NO: 825668 - RNA, 19 nt, Artificial Sequence
  Description of Artificial Sequence: Synthetic oligonucleotide
  Sense strand starting at position 1845 of SEQ ID NO: 587883
gagggugagcauugggaaa

SEQ ID NO: 825669 - RNA, 19 nt, Artificial Sequence
  Description of Artificial Sequence: Synthetic oligonucleotide
  Antisense strand to SEQ ID NO: 825668
uuucccaaugcucacccuc

SEQ ID NO: 825670 - RNA, 19 nt, Artificial Sequence
  Description of Artificial Sequence: Synthetic oligonucleotide
  Sense strand starting at position 2331 of SEQ ID NO: 587883
ccggcacugcgcucgaauu

SEQ ID NO: 825671 - RNA, 19 nt, Artificial Sequence
  Description of Artificial Sequence: Synthetic oligonucleotide
  Antisense strand to SEQ ID NO: 825670
aauucgagcgcagugccgg

SEQ ID NO: 825672 - RNA, 19 nt, Artificial Sequence
  Description of Artificial Sequence: Synthetic oligonucleotide
  Sense strand starting at position 2795 of SEQ ID NO: 587883
gugagucuagaucaagguu

SEQ ID NO: 825673 - RNA, 19 nt, Artificial Sequence
  Description of Artificial Sequence: Synthetic oligonucleotide
  Antisense strand to SEQ ID NO: 825672
aaccuugaucuagacucac

SEQ ID NO: 825674 - RNA, 19 nt, Artificial Sequence
  Description of Artificial Sequence: Synthetic oligonucleotide
  Sense strand starting at position 3285 of SEQ ID NO: 587883
cauucuuagucagugagac

SEQ ID NO: 825675 - RNA, 19 nt, Artificial Sequence
  Description of Artificial Sequence: Synthetic oligonucleotide
  Antisense strand to SEQ ID NO: 825674
gucucacugacuaagaaug

SEQ ID NO: 825676 - RNA, 19 nt, Artificial Sequence
  Description of Artificial Sequence: Synthetic oligonucleotide
  Sense strand starting at position 3352 of SEQ ID NO: 587883
gccaaaggcauaugugaaa

SEQ ID NO: 825677 - RNA, 19 nt, Artificial Sequence
  Description of Artificial Sequence: Synthetic oligonucleotide
  Antisense strand to SEQ ID NO: 825676
uuucacauaugccuuuggc

SEQ ID NO: 825678 - RNA, 19 nt, Artificial Sequence
  Description of Artificial Sequence: Synthetic oligonucleotide
  Sense strand starting at position 3384 of SEQ ID NO: 587883
uaaugaugucucugaaguc

SEQ ID NO: 825679 - RNA, 19 nt, Artificial Sequence
  Description of Artificial Sequence: Synthetic oligonucleotide
  Antisense strand to SEQ ID NO: 825678
gacuucagagacaucauua

SEQ ID NO: 825680 - RNA, 19 nt, Artificial Sequence
  Description of Artificial Sequence: Synthetic oligonucleotide
  Sense strand starting at position 3410 of SEQ ID NO: 587883
gauaguuuccaaugauaug

SEQ ID NO: 825681 - RNA, 19 nt, Artificial Sequence
  Description of Artificial Sequence: Synthetic oligonucleotide
  Antisense strand to SEQ ID NO: 825680
cauaucauuggaaacuauc

SEQ ID NO: 825682 - RNA, 19 nt, Artificial Sequence
  Description of Artificial Sequence: Synthetic oligonucleotide
  Sense strand starting at position 3416 of SEQ ID NO: 587883
uuccaaugauauguacagu

SEQ ID NO: 825683 - RNA, 19 nt, Artificial Sequence
  Description of Artificial Sequence: Synthetic oligonucleotide
  Antisense strand to SEQ ID NO: 825682
acuguacauaucauuggaa

SEQ ID NO: 825684 - RNA, 19 nt, Artificial Sequence
  Description of Artificial Sequence: Synthetic oligonucleotide
  Sense strand starting at position 3429 of SEQ ID NO: 587883
uacaguugccaucagagau

SEQ ID NO: 825685 - RNA, 19 nt, Artificial Sequence
  Description of Artificial Sequence: Synthetic oligonucleotide
  Antisense strand to SEQ ID NO: 825684
aucucugauggcaacugua

SEQ ID NO: 825686 - RNA, 19 nt, Artificial Sequence
  Description of Artificial Sequence: Synthetic oligonucleotide
  Sense strand starting at position 3483 of SEQ ID NO: 587883
gggauuaaguuaucaguua

SEQ ID NO: 825687 - RNA, 19 nt, Artificial Sequence
  Description of Artificial Sequence: Synthetic oligonucleotide
  Antisense strand to SEQ ID NO: 825686
uaacugauaacuuaauccc

SEQ ID NO: 825688 - RNA, 19 nt, Artificial Sequence
  Description of Artificial Sequence: Synthetic oligonucleotide
  Sense strand starting at position 3488 of SEQ ID NO: 587883
uaaguuaucaguuagggug

SEQ ID NO: 825689 - RNA, 19 nt, Artificial Sequence
  Description of Artificial Sequence: Synthetic oligonucleotide
  Antisense strand to SEQ ID NO: 825688
cacccuaacugauaacuua

SEQ ID NO: 825690 - RNA, 19 nt, Artificial Sequence
  Description of Artificial Sequence: Synthetic oligonucleotide
  Sense strand starting at position 3620 of SEQ ID NO: 587883
gggucagaagcucauugau

SEQ ID NO: 825691 - RNA, 19 nt, Artificial Sequence
  Description of Artificial Sequence: Synthetic oligonucleotide
  Antisense strand to SEQ ID NO: 825690
aucaaugagcuucugaccc

SEQ ID NO: 825692 - RNA, 19 nt, Artificial Sequence
  Description of Artificial Sequence: Synthetic oligonucleotide
  Sense strand starting at position 3632 of SEQ ID NO: 587883
cauugaugucauugaagac

SEQ ID NO: 825693 - RNA, 19 nt, Artificial Sequence
  Description of Artificial Sequence: Synthetic oligonucleotide
  Antisense strand to SEQ ID NO: 825692
gucuucaaugacaucaaug

SEQ ID NO: 825694 - RNA, 19 nt, Artificial Sequence
  Description of Artificial Sequence: Synthetic oligonucleotide
  Sense strand starting at position 3728 of SEQ ID NO: 587883
auaggcaagcuuuacaauu

SEQ ID NO: 825695 - RNA, 19 nt, Artificial Sequence
  Description of Artificial Sequence: Synthetic oligonucleotide
  Antisense strand to SEQ ID NO: 825694
aauuguaaagcuugccuau

SEQ ID NO: 825696 - RNA, 19 nt, Artificial Sequence
  Description of Artificial Sequence: Synthetic oligonucleotide
  Sense strand starting at position 3738 of SEQ ID NO: 587883
uuuacaauugcaugugaaa

SEQ ID NO: 825697 - RNA, 19 nt, Artificial Sequence
  Description of Artificial Sequence: Synthetic oligonucleotide
  Antisense strand to SEQ ID NO: 825696
uuucacaugcaauuguaaa

SEQ ID NO: 825698 - RNA, 19 nt, Artificial Sequence
  Description of Artificial Sequence: Synthetic oligonucleotide
  Sense strand starting at position 475 of SEQ ID NO: 587884
gggagacucugucucggaa

SEQ ID NO: 825699 - RNA, 19 nt, Artificial Sequence
  Description of Artificial Sequence: Synthetic oligonucleotide
  Antisense strand to SEQ ID NO: 825698
uuccgagacagagucuccc

SEQ ID NO: 825700 - RNA, 19 nt, Artificial Sequence
  Description of Artificial Sequence: Synthetic oligonucleotide
  Sense strand starting at position 701 of SEQ ID NO: 587884
gaggccugucaugauaugu

SEQ ID NO: 825701 - RNA, 19 nt, Artificial Sequence
  Description of Artificial Sequence: Synthetic oligonucleotide
  Antisense strand to SEQ ID NO: 825700
acauaucaugacaggccuc

SEQ ID NO: 825702 - RNA, 19 nt, Artificial Sequence
  Description of Artificial Sequence: Synthetic oligonucleotide
  Sense strand starting at position 709 of SEQ ID NO: 587884
ucaugauauguccaccucu

SEQ ID NO: 825703 - RNA, 19 nt, Artificial Sequence
  Description of Artificial Sequence: Synthetic oligonucleotide
  Antisense strand to SEQ ID NO: 825702
agagguggacauaucauga

SEQ ID NO: 825704 - RNA, 19 nt, Artificial Sequence
  Description of Artificial Sequence: Synthetic oligonucleotide
  Sense strand starting at position 853 of SEQ ID NO: 587884
guuguuucucucuaggauu

SEQ ID NO: 825705 - RNA, 19 nt, Artificial Sequence
  Description of Artificial Sequence: Synthetic oligonucleotide
  Antisense strand to SEQ ID NO: 825704
aauccuagagagaaacaac

SEQ ID NO: 825706 - RNA, 19 nt, Artificial Sequence
  Description of Artificial Sequence: Synthetic oligonucleotide
  Sense strand starting at position 1222 of SEQ ID NO: 587884
gcaaauuugcacuguuaga

SEQ ID NO: 825707 - RNA, 19 nt, Artificial Sequence
  Description of Artificial Sequence: Synthetic oligonucleotide
  Antisense strand to SEQ ID NO: 825706
ucuaacagugcaaauuugc

SEQ ID NO: 825708 - RNA, 19 nt, Artificial Sequence
  Description of Artificial Sequence: Synthetic oligonucleotide
  Sense strand starting at position 1376 of SEQ ID NO: 587884
aagguauuacgauacaugu

SEQ ID NO: 825709 - RNA, 19 nt, Artificial Sequence
  Description of Artificial Sequence: Synthetic oligonucleotide
  Antisense strand to SEQ ID NO: 825708
acauguaucguaauaccuu

SEQ ID NO: 825710 - RNA, 19 nt, Artificial Sequence
  Description of Artificial Sequence: Synthetic oligonucleotide
  Sense strand starting at position 1382 of SEQ ID NO: 587884
uuacgauacaugugguaga

SEQ ID NO: 825711 - RNA, 19 nt, Artificial Sequence
  Description of Artificial Sequence: Synthetic oligonucleotide
  Antisense strand to SEQ ID NO: 825710
ucuaccacauguaucguaa

SEQ ID NO: 825712 - RNA, 19 nt, Artificial Sequence
  Description of Artificial Sequence: Synthetic oligonucleotide
  Sense strand starting at position 1412 of SEQ ID NO: 587884
gggaaacuugagugcuaag

SEQ ID NO: 825713 - RNA, 19 nt, Artificial Sequence
  Description of Artificial Sequence: Synthetic oligonucleotide
  Antisense strand to SEQ ID NO: 825712
cuuagcacucaaguuuccc

SEQ ID NO: 825714 - RNA, 19 nt, Artificial Sequence
  Description of Artificial Sequence: Synthetic oligonucleotide
  Sense strand starting at position 1419 of SEQ ID NO: 587884
uugagugcuaagggaguaa

SEQ ID NO: 825715 - RNA, 19 nt, Artificial Sequence
  Description of Artificial Sequence: Synthetic oligonucleotide
  Antisense strand to SEQ ID NO: 825714
uuacucccuuagcacucaa

SEQ ID NO: 825716 - RNA, 19 nt, Artificial Sequence
  Description of Artificial Sequence: Synthetic oligonucleotide
  Sense strand starting at position 1423 of SEQ ID NO: 587884
gugcuaagggaguaaauag

SEQ ID NO: 825717 - RNA, 19 nt, Artificial Sequence
  Description of Artificial Sequence: Synthetic oligonucleotide
  Antisense strand to SEQ ID NO: 825716
cuauuuacucccuuagcac

SEQ ID NO: 825718 - RNA, 19 nt, Artificial Sequence
  Description of Artificial Sequence: Synthetic oligonucleotide
  Sense strand starting at position 1456 of SEQ ID NO: 587884
ucggaugugcuacaagaga

SEQ ID NO: 825719 - RNA, 19 nt, Artificial Sequence
  Description of Artificial Sequence: Synthetic oligonucleotide
  Antisense strand to SEQ ID NO: 825718
ucucuuguagcacauccga

SEQ ID NO: 825720 - RNA, 19 nt, Artificial Sequence
  Description of Artificial Sequence: Synthetic oligonucleotide
  Sense strand starting at position 1547 of SEQ ID NO: 587884
gacaaaugguguuaauuuc

SEQ ID NO: 825721 - RNA, 19 nt, Artificial Sequence
  Description of Artificial Sequence: Synthetic oligonucleotide
  Antisense strand to SEQ ID NO: 825720
gaaauuaacaccauuuguc

SEQ ID NO: 825722 - RNA, 19 nt, Artificial Sequence
  Description of Artificial Sequence: Synthetic oligonucleotide
  Sense strand starting at position 1603 of SEQ ID NO: 587884
uguuuaauugcucacuaag

SEQ ID NO: 825723 - RNA, 19 nt, Artificial Sequence
  Description of Artificial Sequence: Synthetic oligonucleotide
  Antisense strand to SEQ ID NO: 825722
cuuagugagcaauuaaaca

SEQ ID NO: 825724 - RNA, 19 nt, Artificial Sequence
  Description of Artificial Sequence: Synthetic oligonucleotide
  Sense strand starting at position 1673 of SEQ ID NO: 587884
cacuaaugaguugguaaca

SEQ ID NO: 825725 - RNA, 19 nt, Artificial Sequence
  Description of Artificial Sequence: Synthetic oligonucleotide
  Antisense strand to SEQ ID NO: 825724
uguuaccaacucauuagug

SEQ ID NO: 825726 - RNA, 19 nt, Artificial Sequence
  Description of Artificial Sequence: Synthetic oligonucleotide
  Sense strand starting at position 1674 of SEQ ID NO: 587884
acuaaugaguugguaacaa

SEQ ID NO: 825727 - RNA, 19 nt, Artificial Sequence
  Description of Artificial Sequence: Synthetic oligonucleotide
  Antisense strand to SEQ ID NO: 825726
uuguuaccaacucauuagu

SEQ ID NO: 825728 - RNA, 19 nt, Artificial Sequence
  Description of Artificial Sequence: Synthetic oligonucleotide
  Sense strand starting at position 1717 of SEQ ID NO: 587884
gcaggagaugcccaugcuu

SEQ ID NO: 825729 - RNA, 19 nt, Artificial Sequence
  Description of Artificial Sequence: Synthetic oligonucleotide
  Antisense strand to SEQ ID NO: 825728
aagcaugggcaucuccugc

SEQ ID NO: 825730 - RNA, 19 nt, Artificial Sequence
  Description of Artificial Sequence: Synthetic oligonucleotide
  Sense strand starting at position 1719 of SEQ ID NO: 587884
aggagaugcccaugcuuaa

SEQ ID NO: 825731 - RNA, 19 nt, Artificial Sequence
  Description of Artificial Sequence: Synthetic oligonucleotide
  Antisense strand to SEQ ID NO: 825730
uuaagcaugggcaucuccu

SEQ ID NO: 825732 - RNA, 19 nt, Artificial Sequence
  Description of Artificial Sequence: Synthetic oligonucleotide
  Sense strand starting at position 1753 of SEQ ID NO: 587884
agaugauuaugaguucgau

SEQ ID NO: 825733 - RNA, 19 nt, Artificial Sequence
  Description of Artificial Sequence: Synthetic oligonucleotide
  Antisense strand to SEQ ID NO: 825732
aucgaacucauaaucaucu

SEQ ID NO: 825734 - RNA, 19 nt, Artificial Sequence
  Description of Artificial Sequence: Synthetic oligonucleotide
  Sense strand starting at position 1820 of SEQ ID NO: 587884
aucaaugacucaccaggua

SEQ ID NO: 825735 - RNA, 19 nt, Artificial Sequence
  Description of Artificial Sequence: Synthetic oligonucleotide
  Antisense strand to SEQ ID NO: 825734
uaccuggugagucauugau

SEQ ID NO: 825736 - RNA, 19 nt, Artificial Sequence
  Description of Artificial Sequence: Synthetic oligonucleotide
  Sense strand starting at position 2064 of SEQ ID NO: 587884
auggcagcaccugguaaau

SEQ ID NO: 825737 - RNA, 19 nt, Artificial Sequence
  Description of Artificial Sequence: Synthetic oligonucleotide
  Antisense strand to SEQ ID NO: 825736
auuuaccaggugcugccau

SEQ ID NO: 825738 - RNA, 19 nt, Artificial Sequence
  Description of Artificial Sequence: Synthetic oligonucleotide
  Sense strand starting at position 2089 of SEQ ID NO: 587884
cuggaaagcaguugguaaa

SEQ ID NO: 825739 - RNA, 19 nt, Artificial Sequence
  Description of Artificial Sequence: Synthetic oligonucleotide
  Antisense strand to SEQ ID NO: 825738
uuuaccaacugcuuuccag

SEQ ID NO: 825740 - RNA, 19 nt, Artificial Sequence
  Description of Artificial Sequence: Synthetic oligonucleotide
  Sense strand starting at position 2099 of SEQ ID NO: 587884
guugguaaacuguaaggua

SEQ ID NO: 825741 - RNA, 19 nt, Artificial Sequence
  Description of Artificial Sequence: Synthetic oligonucleotide
  Antisense strand to SEQ ID NO: 825740
uaccuuacaguuuaccaac

SEQ ID NO: 825742 - RNA, 19 nt, Artificial Sequence
  Description of Artificial Sequence: Synthetic oligonucleotide
  Sense strand starting at position 2108 of SEQ ID NO: 587884
cuguaagguaccugguaaa

SEQ ID NO: 825743 - RNA, 19 nt, Artificial Sequence
  Description of Artificial Sequence: Synthetic oligonucleotide
  Antisense strand to SEQ ID NO: 825742
uuuaccagguaccuuacag

SEQ ID NO: 825744 - RNA, 19 nt, Artificial Sequence
  Description of Artificial Sequence: Synthetic oligonucleotide
  Sense strand starting at position 2132 of SEQ ID NO: 587884
aaccguaaaguccaguaaa

SEQ ID NO: 825745 - RNA, 19 nt, Artificial Sequence
  Description of Artificial Sequence: Synthetic oligonucleotide
  Antisense strand to SEQ ID NO: 825744
uuuacuggacuuuacgguu

SEQ ID NO: 825746 - RNA, 19 nt, Artificial Sequence
  Description of Artificial Sequence: Synthetic oligonucleotide
  Sense strand starting at position 2176 of SEQ ID NO: 587884
guccucugacccugacaau

SEQ ID NO: 825747 - RNA, 19 nt, Artificial Sequence
  Description of Artificial Sequence: Synthetic oligonucleotide
  Antisense strand to SEQ ID NO: 825746
auugucagggucagaggac

SEQ ID NO: 825748 - RNA, 19 nt, Artificial Sequence
  Description of Artificial Sequence: Synthetic oligonucleotide
  Sense strand starting at position 2210 of SEQ ID NO: 587884
ugagauauuucuuagcaug

SEQ ID NO: 825749 - RNA, 19 nt, Artificial Sequence
  Description of Artificial Sequence: Synthetic oligonucleotide
  Antisense strand to SEQ ID NO: 825748
caugcuaagaaauaucuca

SEQ ID NO: 825750 - RNA, 19 nt, Artificial Sequence
  Description of Artificial Sequence: Synthetic oligonucleotide
  Sense strand starting at position 2239 of SEQ ID NO: 587884
gacugaauccugcagaagu

SEQ ID NO: 825751 - RNA, 19 nt, Artificial Sequence
  Description of Artificial Sequence: Synthetic oligonucleotide
  Antisense strand to SEQ ID NO: 825750
acuucugcaggauucaguc

SEQ ID NO: 825752 - RNA, 19 nt, Artificial Sequence
  Description of Artificial Sequence: Synthetic oligonucleotide
  Sense strand starting at position 2241 of SEQ ID NO: 587884
cugaauccugcagaaguuu

SEQ ID NO: 825753 - RNA, 19 nt, Artificial Sequence
  Description of Artificial Sequence: Synthetic oligonucleotide
  Antisense strand to SEQ ID NO: 825752
aaacuucugcaggauucag

SEQ ID NO: 825754 - RNA, 19 nt, Artificial Sequence
  Description of Artificial Sequence: Synthetic oligonucleotide
  Sense strand starting at position 2337 of SEQ ID NO: 587884
gcuaaaccucccugguaua

SEQ ID NO: 825755 - RNA, 19 nt, Artificial Sequence
  Description of Artificial Sequence: Synthetic oligonucleotide
  Antisense strand to SEQ ID NO: 825754
uauaccagggagguuuagc

SEQ ID NO: 825756 - RNA, 19 nt, Artificial Sequence
  Description of Artificial Sequence: Synthetic oligonucleotide
  Sense strand starting at position 2493 of SEQ ID NO: 587884
aggucuccuaggcauuaga

SEQ ID NO: 825757 - RNA, 19 nt, Artificial Sequence
  Description of Artificial Sequence: Synthetic oligonucleotide
  Antisense strand to SEQ ID NO: 825756
ucuaaugccuaggagaccu

SEQ ID NO: 825758 - RNA, 19 nt, Artificial Sequence
  Description of Artificial Sequence: Synthetic oligonucleotide
  Sense strand starting at position 2496 of SEQ ID NO: 587884
ucuccuaggcauuagaaca

SEQ ID NO: 825759 - RNA, 19 nt, Artificial Sequence
  Description of Artificial Sequence: Synthetic oligonucleotide
  Antisense strand to SEQ ID NO: 825758
uguucuaaugccuaggaga

SEQ ID NO: 825760 - RNA, 19 nt, Artificial Sequence
  Description of Artificial Sequence: Synthetic oligonucleotide
  Sense strand starting at position 2516 of SEQ ID NO: 587884
ccuuaaugagggugagcau

SEQ ID NO: 825761 - RNA, 19 nt, Artificial Sequence
  Description of Artificial Sequence: Synthetic oligonucleotide
  Antisense strand to SEQ ID NO: 825760
augcucacccucauuaagg

SEQ ID NO: 825762 - RNA, 19 nt, Artificial Sequence
  Description of Artificial Sequence: Synthetic oligonucleotide
  Sense strand starting at position 2517 of SEQ ID NO: 587884
cuuaaugagggugagcauu

SEQ ID NO: 825763 - RNA, 19 nt, Artificial Sequence
  Description of Artificial Sequence: Synthetic oligonucleotide
  Antisense strand to SEQ ID NO: 825762
aaugcucacccucauuaag

SEQ ID NO: 825764 - RNA, 19 nt, Artificial Sequence
  Description of Artificial Sequence: Synthetic oligonucleotide
  Sense strand starting at position 2523 of SEQ ID NO: 587884
gagggugagcauugggaaa

SEQ ID NO: 825765 - RNA, 19 nt, Artificial Sequence
  Description of Artificial Sequence: Synthetic oligonucleotide
  Antisense strand to SEQ ID NO: 825764
uuucccaaugcucacccuc

SEQ ID NO: 825766 - RNA, 19 nt, Artificial Sequence
  Description of Artificial Sequence: Synthetic oligonucleotide
  Sense strand starting at position 3009 of SEQ ID NO: 587884
ccggcacugcgcucgaauu

SEQ ID NO: 825767 - RNA, 19 nt, Artificial Sequence
  Description of Artificial Sequence: Synthetic oligonucleotide
  Antisense strand to SEQ ID NO: 825766
aauucgagcgcagugccgg

SEQ ID NO: 825768 - RNA, 19 nt, Artificial Sequence
  Description of Artificial Sequence: Synthetic oligonucleotide
  Sense strand starting at position 3348 of SEQ ID NO: 587884
gcacuuugugucuaacuca

SEQ ID NO: 825769 - RNA, 19 nt, Artificial Sequence
  Description of Artificial Sequence: Synthetic oligonucleotide
  Antisense strand to SEQ ID NO: 825768
ugaguuagacacaaagugc

SEQ ID NO: 825770 - RNA, 19 nt, Artificial Sequence
  Description of Artificial Sequence: Synthetic oligonucleotide
  Sense strand starting at position 3473 of SEQ ID NO: 587884
gugagucuagaucaagguu

SEQ ID NO: 825771 - RNA, 19 nt, Artificial Sequence
  Description of Artificial Sequence: Synthetic oligonucleotide
  Antisense strand to SEQ ID NO: 825770
aaccuugaucuagacucac

SEQ ID NO: 825772 - RNA, 19 nt, Artificial Sequence
  Description of Artificial Sequence: Synthetic oligonucleotide
  Sense strand starting at position 3476 of SEQ ID NO: 587884
agucuagaucaagguuugu

SEQ ID NO: 825773 - RNA, 19 nt, Artificial Sequence
  Description of Artificial Sequence: Synthetic oligonucleotide
  Antisense strand to SEQ ID NO: 825772
acaaaccuugaucuagacu

SEQ ID NO: 825774 - RNA, 19 nt, Artificial Sequence
  Description of Artificial Sequence: Synthetic oligonucleotide
  Sense strand starting at position 3551 of SEQ ID NO: 587884
uuguguguagcccagggau

SEQ ID NO: 825775 - RNA, 19 nt, Artificial Sequence
  Description of Artificial Sequence: Synthetic oligonucleotide
  Antisense strand to SEQ ID NO: 825774
aucccugggcuacacacaa

SEQ ID NO: 825776 - RNA, 19 nt, Artificial Sequence
  Description of Artificial Sequence: Synthetic oligonucleotide
  Sense strand starting at position 3963 of SEQ ID NO: 587884
cauucuuagucagugagac

SEQ ID NO: 825777 - RNA, 19 nt, Artificial Sequence
  Description of Artificial Sequence: Synthetic oligonucleotide
  Antisense strand to SEQ ID NO: 825776
gucucacugacuaagaaug

SEQ ID NO: 825778 - RNA, 19 nt, Artificial Sequence
  Description of Artificial Sequence: Synthetic oligonucleotide
  Sense strand starting at position 49 of SEQ ID NO: 587885
gccaucugcccucaagaaa

SEQ ID NO: 825779 - RNA, 19 nt, Artificial Sequence
  Description of Artificial Sequence: Synthetic oligonucleotide
  Antisense strand to SEQ ID NO: 825778
uuucuugagggcagauggc

SEQ ID NO: 825780 - RNA, 19 nt, Artificial Sequence
  Description of Artificial Sequence: Synthetic oligonucleotide
  Sense strand starting at position 255 of SEQ ID NO: 587885
gaaugagacuuuguaacua

SEQ ID NO: 825781 - RNA, 19 nt, Artificial Sequence
  Description of Artificial Sequence: Synthetic oligonucleotide
  Antisense strand to SEQ ID NO: 825780
uaguuacaaagucucauuc

SEQ ID NO: 825782 - RNA, 19 nt, Artificial Sequence
  Description of Artificial Sequence: Synthetic oligonucleotide
  Sense strand starting at position 259 of SEQ ID NO: 587885
gagacuuuguaacuauaag

SEQ ID NO: 825783 - RNA, 19 nt, Artificial Sequence
  Description of Artificial Sequence: Synthetic oligonucleotide
  Antisense strand to SEQ ID NO: 825782
cuuauaguuacaaagucuc

SEQ ID NO: 825784 - RNA, 19 nt, Artificial Sequence
  Description of Artificial Sequence: Synthetic oligonucleotide
  Sense strand starting at position 273 of SEQ ID NO: 587885
auaagugguuggcuuauuu

SEQ ID NO: 825785 - RNA, 19 nt, Artificial Sequence
  Description of Artificial Sequence: Synthetic oligonucleotide
  Antisense strand to SEQ ID NO: 825784
aaauaagccaaccacuuau

SEQ ID NO: 825786 - RNA, 19 nt, Artificial Sequence
  Description of Artificial Sequence: Synthetic oligonucleotide
  Sense strand starting at position 282 of SEQ ID NO: 587885
uggcuuauuugugcaacaa

SEQ ID NO: 825787 - RNA, 19 nt, Artificial Sequence
  Description of Artificial Sequence: Synthetic oligonucleotide
  Antisense strand to SEQ ID NO: 825786
uuguugcacaaauaagcca

SEQ ID NO: 825788 - RNA, 19 nt, Artificial Sequence
  Description of Artificial Sequence: Synthetic oligonucleotide
  Sense strand starting at position 302 of SEQ ID NO: 587885
augcuaauagucuauguua

SEQ ID NO: 825789 - RNA, 19 nt, Artificial Sequence
  Description of Artificial Sequence: Synthetic oligonucleotide
  Antisense strand to SEQ ID NO: 825788
uaacauagacuauuagcau

SEQ ID NO: 825790 - RNA, 19 nt, Artificial Sequence
  Description of Artificial Sequence: Synthetic oligonucleotide
  Sense strand starting at position 501 of SEQ ID NO: 587885
gugagauugcuagauucuu

SEQ ID NO: 825791 - RNA, 19 nt, Artificial Sequence
  Description of Artificial Sequence: Synthetic oligonucleotide
  Antisense strand to SEQ ID NO: 825790
aagaaucuagcaaucucac

SEQ ID NO: 825792 - RNA, 19 nt, Artificial Sequence
  Description of Artificial Sequence: Synthetic oligonucleotide
  Sense strand starting at position 657 of SEQ ID NO: 587885
uauuauuaaugggcaagua

SEQ ID NO: 825793 - RNA, 19 nt, Artificial Sequence
  Description of Artificial Sequence: Synthetic oligonucleotide
  Antisense strand to SEQ ID NO: 825792
uacuugcccauuaauaaua

SEQ ID NO: 825794 - RNA, 19 nt, Artificial Sequence
  Description of Artificial Sequence: Synthetic oligonucleotide
  Sense strand starting at position 658 of SEQ ID NO: 587885
auuauuaaugggcaaguau

SEQ ID NO: 825795 - RNA, 19 nt, Artificial Sequence
  Description of Artificial Sequence: Synthetic oligonucleotide
  Antisense strand to SEQ ID NO: 825794
auacuugcccauuaauaau

SEQ ID NO: 825796 - RNA, 19 nt, Artificial Sequence
  Description of Artificial Sequence: Synthetic oligonucleotide
  Sense strand starting at position 665 of SEQ ID NO: 587885
augggcaaguauucucuua

SEQ ID NO: 825797 - RNA, 19 nt, Artificial Sequence
  Description of Artificial Sequence: Synthetic oligonucleotide
  Antisense strand to SEQ ID NO: 825796
uaagagaauacuugcccau

SEQ ID NO: 825798 - RNA, 19 nt, Artificial Sequence
  Description of Artificial Sequence: Synthetic oligonucleotide
  Sense strand starting at position 667 of SEQ ID NO: 587885
gggcaaguauucucuuaaa

SEQ ID NO: 825799 - RNA, 19 nt, Artificial Sequence
  Description of Artificial Sequence: Synthetic oligonucleotide
  Antisense strand to SEQ ID NO: 825798
uuuaagagaauacuugccc

SEQ ID NO: 825800 - RNA, 19 nt, Artificial Sequence
  Description of Artificial Sequence: Synthetic oligonucleotide
  Sense strand starting at position 800 of SEQ ID NO: 587885
auucuuauguaugugaaag

SEQ ID NO: 825801 - RNA, 19 nt, Artificial Sequence
  Description of Artificial Sequence: Synthetic oligonucleotide
  Antisense strand to SEQ ID NO: 825800
cuuucacauacauaagaau

SEQ ID NO: 825802 - RNA, 19 nt, Artificial Sequence
  Description of Artificial Sequence: Synthetic oligonucleotide
  Sense strand starting at position 818 of SEQ ID NO: 587885
guauauuuacugugcaauu

SEQ ID NO: 825803 - RNA, 19 nt, Artificial Sequence
  Description of Artificial Sequence: Synthetic oligonucleotide
  Antisense strand to SEQ ID NO: 825802
aauugcacaguaaauauac

SEQ ID NO: 825804 - RNA, 19 nt, Artificial Sequence
  Description of Artificial Sequence: Synthetic oligonucleotide
  Sense strand starting at position 834 of SEQ ID NO: 587885
auuaucgaagucugggaaa

SEQ ID NO: 825805 - RNA, 19 nt, Artificial Sequence
  Description of Artificial Sequence: Synthetic oligonucleotide
  Antisense strand to SEQ ID NO: 825804
uuucccagacuucgauaau

SEQ ID NO: 825806 - RNA, 19 nt, Artificial Sequence
  Description of Artificial Sequence: Synthetic oligonucleotide
  Sense strand starting at position 836 of SEQ ID NO: 587885
uaucgaagucugggaaacu

SEQ ID NO: 825807 - RNA, 19 nt, Artificial Sequence
  Description of Artificial Sequence: Synthetic oligonucleotide
  Antisense strand to SEQ ID NO: 825806
aguuucccagacuucgaua

SEQ ID NO: 825808 - RNA, 19 nt, Artificial Sequence
  Description of Artificial Sequence: Synthetic oligonucleotide
  Sense strand starting at position 872 of SEQ ID NO: 587885
cuauguagguuaucccuaa

SEQ ID NO: 825809 - RNA, 19 nt, Artificial Sequence
  Description of Artificial Sequence: Synthetic oligonucleotide
  Antisense strand to SEQ ID NO: 825808
uuagggauaaccuacauag

SEQ ID NO: 825810 - RNA, 19 nt, Artificial Sequence
  Description of Artificial Sequence: Synthetic oligonucleotide
  Sense strand starting at position 876 of SEQ ID NO: 587885
guagguuaucccuaacccu

SEQ ID NO: 825811 - RNA, 19 nt, Artificial Sequence
  Description of Artificial Sequence: Synthetic oligonucleotide
  Antisense strand to SEQ ID NO: 825810
aggguuagggauaaccuac

SEQ ID NO: 825812 - RNA, 19 nt, Artificial Sequence
  Description of Artificial Sequence: Synthetic oligonucleotide
  Sense strand starting at position 937 of SEQ ID NO: 587885
ugagaaagcuuccucugau

SEQ ID NO: 825813 - RNA, 19 nt, Artificial Sequence
  Description of Artificial Sequence: Synthetic oligonucleotide
  Antisense strand to SEQ ID NO: 825812
aucagaggaagcuuucuca

SEQ ID NO: 825814 - RNA, 19 nt, Artificial Sequence
  Description of Artificial Sequence: Synthetic oligonucleotide
  Sense strand starting at position 1206 of SEQ ID NO: 587885
auggaauacuuuguagaac

SEQ ID NO: 825815 - RNA, 19 nt, Artificial Sequence
  Description of Artificial Sequence: Synthetic oligonucleotide
  Antisense strand to SEQ ID NO: 825814
guucuacaaaguauuccau

SEQ ID NO: 825816 - RNA, 19 nt, Artificial Sequence
  Description of Artificial Sequence: Synthetic oligonucleotide
  Sense strand starting at position 2021 of SEQ ID NO: 587885
guagcauuacaugaagugu

SEQ ID NO: 825817 - RNA, 19 nt, Artificial Sequence
  Description of Artificial Sequence: Synthetic oligonucleotide
  Antisense strand to SEQ ID NO: 825816
acacuucauguaaugcuac

SEQ ID NO: 825818 - RNA, 19 nt, Artificial Sequence
  Description of Artificial Sequence: Synthetic oligonucleotide
  Sense strand starting at position 2029 of SEQ ID NO: 587885
acaugaaguguguaugucu

SEQ ID NO: 825819 - RNA, 19 nt, Artificial Sequence
  Description of Artificial Sequence: Synthetic oligonucleotide
  Antisense strand to SEQ ID NO: 825818
agacauacacacuucaugu

SEQ ID NO: 825820 - RNA, 19 nt, Artificial Sequence
  Description of Artificial Sequence: Synthetic oligonucleotide
  Sense strand starting at position 2253 of SEQ ID NO: 587885
ggaauuuaguucuaagaug

SEQ ID NO: 825821 - RNA, 19 nt, Artificial Sequence
  Description of Artificial Sequence: Synthetic oligonucleotide
  Antisense strand to SEQ ID NO: 825820
caucuuagaacuaaauucc

SEQ ID NO: 825822 - RNA, 19 nt, Artificial Sequence
  Description of Artificial Sequence: Synthetic oligonucleotide
  Sense strand starting at position 2261 of SEQ ID NO: 587885
guucuaagaugaccucuaa

SEQ ID NO: 825823 - RNA, 19 nt, Artificial Sequence
  Description of Artificial Sequence: Synthetic oligonucleotide
  Antisense strand to SEQ ID NO: 825822
uuagaggucaucuuagaac

SEQ ID NO: 825824 - RNA, 19 nt, Artificial Sequence
  Description of Artificial Sequence: Synthetic oligonucleotide
  Sense strand starting at position 2294 of SEQ ID NO: 587885
uuacuugucucuccuagga

SEQ ID NO: 825825 - RNA, 19 nt, Artificial Sequence
  Description of Artificial Sequence: Synthetic oligonucleotide
  Antisense strand to SEQ ID NO: 825824
uccuaggagagacaaguaa

SEQ ID NO: 825826 - RNA, 19 nt, Artificial Sequence
  Description of Artificial Sequence: Synthetic oligonucleotide
  Sense strand starting at position 2349 of SEQ ID NO: 587885
ggucaauaguuucugaaac

SEQ ID NO: 825827 - RNA, 19 nt, Artificial Sequence
  Description of Artificial Sequence: Synthetic oligonucleotide
  Antisense strand to SEQ ID NO: 825826
guuucagaaacuauugacc

SEQ ID NO: 825828 - RNA, 19 nt, Artificial Sequence
  Description of Artificial Sequence: Synthetic oligonucleotide
  Sense strand starting at position 2428 of SEQ ID NO: 587885
aggacagacucugcuucua

SEQ ID NO: 825829 - RNA, 19 nt, Artificial Sequence
  Description of Artificial Sequence: Synthetic oligonucleotide
  Antisense strand to SEQ ID NO: 825828
uagaagcagagucuguccu

SEQ ID NO: 825830 - RNA, 19 nt, Artificial Sequence
  Description of Artificial Sequence: Synthetic oligonucleotide
  Sense strand starting at position 2844 of SEQ ID NO: 587885
uugugugaacacuaacuuu

SEQ ID NO: 825831 - RNA, 19 nt, Artificial Sequence
  Description of Artificial Sequence: Synthetic oligonucleotide
  Antisense strand to SEQ ID NO: 825830
aaaguuaguguucacacaa

SEQ ID NO: 825832 - RNA, 19 nt, Artificial Sequence
  Description of Artificial Sequence: Synthetic oligonucleotide
  Sense strand starting at position 2919 of SEQ ID NO: 587885
cgggaaguugcccauuaug

SEQ ID NO: 825833 - RNA, 19 nt, Artificial Sequence
  Description of Artificial Sequence: Synthetic oligonucleotide
  Antisense strand to SEQ ID NO: 825832
cauaaugggcaacuucccg

SEQ ID NO: 825834 - RNA, 19 nt, Artificial Sequence
  Description of Artificial Sequence: Synthetic oligonucleotide
  Sense strand starting at position 3059 of SEQ ID NO: 587885
acuauuaggucuccuauca

SEQ ID NO: 825835 - RNA, 19 nt, Artificial Sequence
  Description of Artificial Sequence: Synthetic oligonucleotide
  Antisense strand to SEQ ID NO: 825834
ugauaggagaccuaauagu

SEQ ID NO: 825836 - RNA, 19 nt, Artificial Sequence
  Description of Artificial Sequence: Synthetic oligonucleotide
  Sense strand starting at position 3241 of SEQ ID NO: 587885
aagugaaggcauugaaauc

SEQ ID NO: 825837 - RNA, 19 nt, Artificial Sequence
  Description of Artificial Sequence: Synthetic oligonucleotide
  Antisense strand to SEQ ID NO: 825836
gauuucaaugccuucacuu

SEQ ID NO: 825838 - RNA, 19 nt, Artificial Sequence
  Description of Artificial Sequence: Synthetic oligonucleotide
  Sense strand starting at position 3250 of SEQ ID NO: 587885
cauugaaauccugggucua

SEQ ID NO: 825839 - RNA, 19 nt, Artificial Sequence
  Description of Artificial Sequence: Synthetic oligonucleotide
  Antisense strand to SEQ ID NO: 825838
uagacccaggauuucaaug

SEQ ID NO: 825840 - RNA, 19 nt, Artificial Sequence
  Description of Artificial Sequence: Synthetic oligonucleotide
  Sense strand starting at position 3251 of SEQ ID NO: 587885
auugaaauccugggucuac

SEQ ID NO: 825841 - RNA, 19 nt, Artificial Sequence
  Description of Artificial Sequence: Synthetic oligonucleotide
  Antisense strand to SEQ ID NO: 825840
guagacccaggauuucaau

SEQ ID NO: 825842 - RNA, 19 nt, Artificial Sequence
  Description of Artificial Sequence: Synthetic oligonucleotide
  Sense strand starting at position 3252 of SEQ ID NO: 587885
uugaaauccugggucuacu

SEQ ID NO: 825843 - RNA, 19 nt, Artificial Sequence
  Description of Artificial Sequence: Synthetic oligonucleotide
  Antisense strand to SEQ ID NO: 825842
aguagacccaggauuucaa

SEQ ID NO: 825844 - RNA, 19 nt, Artificial Sequence
  Description of Artificial Sequence: Synthetic oligonucleotide
  Sense strand starting at position 3323 of SEQ ID NO: 587885
cuuacaaaguaaucaguua

SEQ ID NO: 825845 - RNA, 19 nt, Artificial Sequence
  Description of Artificial Sequence: Synthetic oligonucleotide
  Antisense strand to SEQ ID NO: 825844
uaacugauuacuuuguaag

SEQ ID NO: 825846 - RNA, 19 nt, Artificial Sequence
  Description of Artificial Sequence: Synthetic oligonucleotide
  Sense strand starting at position 3408 of SEQ ID NO: 587885
augucacagcuugaaucau

SEQ ID NO: 825847 - RNA, 19 nt, Artificial Sequence
  Description of Artificial Sequence: Synthetic oligonucleotide
  Antisense strand to SEQ ID NO: 825846
augauucaagcugugacau

SEQ ID NO: 825848 - RNA, 19 nt, Artificial Sequence
  Description of Artificial Sequence: Synthetic oligonucleotide
  Sense strand starting at position 3519 of SEQ ID NO: 587885
cauuaagggugaguacaaa

SEQ ID NO: 825849 - RNA, 19 nt, Artificial Sequence
  Description of Artificial Sequence: Synthetic oligonucleotide
  Antisense strand to SEQ ID NO: 825848
uuuguacucacccuuaaug

SEQ ID NO: 825850 - RNA, 19 nt, Artificial Sequence
  Description of Artificial Sequence: Synthetic oligonucleotide
  Sense strand starting at position 3620 of SEQ ID NO: 587885
uugagauuccuccaugcga

SEQ ID NO: 825851 - RNA, 19 nt, Artificial Sequence
  Description of Artificial Sequence: Synthetic oligonucleotide
  Antisense strand to SEQ ID NO: 825850
ucgcauggaggaaucucaa

SEQ ID NO: 825852 - RNA, 19 nt, Artificial Sequence
  Description of Artificial Sequence: Synthetic oligonucleotide
  Sense strand starting at position 3716 of SEQ ID NO: 587885
uuauaaugagugugaagga

SEQ ID NO: 825853 - RNA, 19 nt, Artificial Sequence
  Description of Artificial Sequence: Synthetic oligonucleotide
  Antisense strand to SEQ ID NO: 825852
uccuucacacucauuauaa

SEQ ID NO: 825854 - RNA, 19 nt, Artificial Sequence
  Description of Artificial Sequence: Synthetic oligonucleotide
  Sense strand starting at position 3770 of SEQ ID NO: 587885
gcaagaauaaagugagagu

SEQ ID NO: 825855 - RNA, 19 nt, Artificial Sequence
  Description of Artificial Sequence: Synthetic oligonucleotide
  Antisense strand to SEQ ID NO: 825854
acucucacuuuauucuugc

SEQ ID NO: 825856 - RNA, 19 nt, Artificial Sequence
  Description of Artificial Sequence: Synthetic oligonucleotide
  Sense strand starting at position 3937 of SEQ ID NO: 587885
uccuauguggucuaauauc

SEQ ID NO: 825857 - RNA, 19 nt, Artificial Sequence
  Description of Artificial Sequence: Synthetic oligonucleotide
  Antisense strand to SEQ ID NO: 825856
gauauuagaccacauagga

SEQ ID NO: 825858 - RNA, 19 nt, Artificial Sequence
  Description of Artificial Sequence: Synthetic oligonucleotide
  Sense strand starting at position 6 of SEQ ID NO: 587886
gcuccucagaguggauaau

SEQ ID NO: 825859 - RNA, 19 nt, Artificial Sequence
  Description of Artificial Sequence: Synthetic oligonucleotide
  Antisense strand to SEQ ID NO: 825858
auuauccacucugaggagc

SEQ ID NO: 825860 - RNA, 19 nt, Artificial Sequence
  Description of Artificial Sequence: Synthetic oligonucleotide
  Sense strand starting at position 407 of SEQ ID NO: 587886
aucgaacccuucuagugaa

SEQ ID NO: 825861 - RNA, 19 nt, Artificial Sequence
  Description of Artificial Sequence: Synthetic oligonucleotide
  Antisense strand to SEQ ID NO: 825860
uucacuagaaggguucgau

SEQ ID NO: 825862 - RNA, 19 nt, Artificial Sequence
  Description of Artificial Sequence: Synthetic oligonucleotide
  Sense strand starting at position 435 of SEQ ID NO: 587886
ucaguugucgcacguuuca

SEQ ID NO: 825863 - RNA, 19 nt, Artificial Sequence
  Description of Artificial Sequence: Synthetic oligonucleotide
  Antisense strand to SEQ ID NO: 825862
ugaaacgugcgacaacuga

SEQ ID NO: 825864 - RNA, 19 nt, Artificial Sequence
  Description of Artificial Sequence: Synthetic oligonucleotide
  Sense strand starting at position 580 of SEQ ID NO: 587886
auuguuuagucuuugucua

SEQ ID NO: 825865 - RNA, 19 nt, Artificial Sequence
  Description of Artificial Sequence: Synthetic oligonucleotide
  Antisense strand to SEQ ID NO: 825864
uagacaaagacuaaacaau

SEQ ID NO: 825866 - RNA, 19 nt, Artificial Sequence
  Description of Artificial Sequence: Synthetic oligonucleotide
  Sense strand starting at position 581 of SEQ ID NO: 587886
uuguuuagucuuugucuag

SEQ ID NO: 825867 - RNA, 19 nt, Artificial Sequence
  Description of Artificial Sequence: Synthetic oligonucleotide
  Antisense strand to SEQ ID NO: 825866
cuagacaaagacuaaacaa

SEQ ID NO: 825868 - RNA, 19 nt, Artificial Sequence
  Description of Artificial Sequence: Synthetic oligonucleotide
  Sense strand starting at position 582 of SEQ ID NO: 587886
uguuuagucuuugucuagu

SEQ ID NO: 825869 - RNA, 19 nt, Artificial Sequence
  Description of Artificial Sequence: Synthetic oligonucleotide
  Antisense strand to SEQ ID NO: 825868
acuagacaaagacuaaaca

SEQ ID NO: 825870 - RNA, 19 nt, Artificial Sequence
  Description of Artificial Sequence: Synthetic oligonucleotide
  Sense strand starting at position 585 of SEQ ID NO: 587886
uuagucuuugucuaguaag

SEQ ID NO: 825871 - RNA, 19 nt, Artificial Sequence
  Description of Artificial Sequence: Synthetic oligonucleotide
  Antisense strand to SEQ ID NO: 825870
cuuacuagacaaagacuaa

SEQ ID NO: 825872 - RNA, 19 nt, Artificial Sequence
  Description of Artificial Sequence: Synthetic oligonucleotide
  Sense strand starting at position 614 of SEQ ID NO: 587886
gggauuccuuaaggauagu

SEQ ID NO: 825873 - RNA, 19 nt, Artificial Sequence
  Description of Artificial Sequence: Synthetic oligonucleotide
  Antisense strand to SEQ ID NO: 825872
acuauccuuaaggaauccc

SEQ ID NO: 825874 - RNA, 19 nt, Artificial Sequence
  Description of Artificial Sequence: Synthetic oligonucleotide
  Sense strand starting at position 675 of SEQ ID NO: 587886
guuugcaugcuuugugaua

SEQ ID NO: 825875 - RNA, 19 nt, Artificial Sequence
  Description of Artificial Sequence: Synthetic oligonucleotide
  Antisense strand to SEQ ID NO: 825874
uaucacaaagcaugcaaac

SEQ ID NO: 825876 - RNA, 19 nt, Artificial Sequence
  Description of Artificial Sequence: Synthetic oligonucleotide
  Sense strand starting at position 676 of SEQ ID NO: 587886
uuugcaugcuuugugauau

SEQ ID NO: 825877 - RNA, 19 nt, Artificial Sequence
  Description of Artificial Sequence: Synthetic oligonucleotide
  Antisense strand to SEQ ID NO: 825876
auaucacaaagcaugcaaa

SEQ ID NO: 825878 - RNA, 19 nt, Artificial Sequence
  Description of Artificial Sequence: Synthetic oligonucleotide
  Sense strand starting at position 677 of SEQ ID NO: 587886
uugcaugcuuugugauauu

SEQ ID NO: 825879 - RNA, 19 nt, Artificial Sequence
  Description of Artificial Sequence: Synthetic oligonucleotide
  Antisense strand to SEQ ID NO: 825878
aauaucacaaagcaugcaa

SEQ ID NO: 825880 - RNA, 19 nt, Artificial Sequence
  Description of Artificial Sequence: Synthetic oligonucleotide
  Sense strand starting at position 720 of SEQ ID NO: 587886
auuauaaugugcuauggaa

SEQ ID NO: 825881 - RNA, 19 nt, Artificial Sequence
  Description of Artificial Sequence: Synthetic oligonucleotide
  Antisense strand to SEQ ID NO: 825880
uuccauagcacauuauaau

SEQ ID NO: 825882 - RNA, 19 nt, Artificial Sequence
  Description of Artificial Sequence: Synthetic oligonucleotide
  Sense strand starting at position 722 of SEQ ID NO: 587886
uauaaugugcuauggaagu

SEQ ID NO: 825883 - RNA, 19 nt, Artificial Sequence
  Description of Artificial Sequence: Synthetic oligonucleotide
  Antisense strand to SEQ ID NO: 825882
acuuccauagcacauuaua

SEQ ID NO: 825884 - RNA, 19 nt, Artificial Sequence
  Description of Artificial Sequence: Synthetic oligonucleotide
  Sense strand starting at position 2368 of SEQ ID NO: 587886
gggucaaggucacagauca

SEQ ID NO: 825885 - RNA, 19 nt, Artificial Sequence
  Description of Artificial Sequence: Synthetic oligonucleotide
  Antisense strand to SEQ ID NO: 825884
ugaucugugaccuugaccc

SEQ ID NO: 825886 - RNA, 19 nt, Artificial Sequence
  Description of Artificial Sequence: Synthetic oligonucleotide
  Sense strand starting at position 3658 of SEQ ID NO: 587886
gagggaacuccugggcuca

SEQ ID NO: 825887 - RNA, 19 nt, Artificial Sequence
  Description of Artificial Sequence: Synthetic oligonucleotide
  Antisense strand to SEQ ID NO: 825886
ugagcccaggaguucccuc

SEQ ID NO: 825888 - RNA, 19 nt, Artificial Sequence
  Description of Artificial Sequence: Synthetic oligonucleotide
  Sense strand starting at position 3691 of SEQ ID NO: 587886
uccagcuucugaguagcaa

SEQ ID NO: 825889 - RNA, 19 nt, Artificial Sequence
  Description of Artificial Sequence: Synthetic oligonucleotide
  Antisense strand to SEQ ID NO: 825888
uugcuacucagaagcugga

SEQ ID NO: 825890 - RNA, 19 nt, Artificial Sequence
  Description of Artificial Sequence: Synthetic oligonucleotide
  Sense strand starting at position 3823 of SEQ ID NO: 587886
gccucagccuuccagugau

SEQ ID NO: 825891 - RNA, 19 nt, Artificial Sequence
  Description of Artificial Sequence: Synthetic oligonucleotide
  Antisense strand to SEQ ID NO: 825890
aucacuggaaggcugaggc

SEQ ID NO: 825892 - RNA, 19 nt, Artificial Sequence
  Description of Artificial Sequence: Synthetic oligonucleotide
  Sense strand starting at position 3826 of SEQ ID NO: 587886
ucagccuuccagugauuaa

SEQ ID NO: 825893 - RNA, 19 nt, Artificial Sequence
  Description of Artificial Sequence: Synthetic oligonucleotide
  Antisense strand to SEQ ID NO: 825892
uuaaucacuggaaggcuga

SEQ ID NO: 825894 - RNA, 19 nt, Artificial Sequence
  Description of Artificial Sequence: Synthetic oligonucleotide
  Sense strand starting at position 3889 of SEQ ID NO: 587886
gaauaugcauauggucaaa

SEQ ID NO: 825895 - RNA, 19 nt, Artificial Sequence
  Description of Artificial Sequence: Synthetic oligonucleotide
  Antisense strand to SEQ ID NO: 825894
uuugaccauaugcauauuc

SEQ ID NO: 825896 - RNA, 19 nt, Artificial Sequence
  Description of Artificial Sequence: Synthetic oligonucleotide
  Sense strand starting at position 3891 of SEQ ID NO: 587886
auaugcauauggucaaaua

SEQ ID NO: 825897 - RNA, 19 nt, Artificial Sequence
  Description of Artificial Sequence: Synthetic oligonucleotide
  Antisense strand to SEQ ID NO: 825896
uauuugaccauaugcauau

SEQ ID NO: 825898 - RNA, 19 nt, Artificial Sequence
  Description of Artificial Sequence: Synthetic oligonucleotide
  Sense strand starting at position 3959 of SEQ ID NO: 587886
ucaacaaaguguugggaaa

SEQ ID NO: 825899 - RNA, 19 nt, Artificial Sequence
  Description of Artificial Sequence: Synthetic oligonucleotide
  Antisense strand to SEQ ID NO: 825898
uuucccaacacuuuguuga

SEQ ID NO: 825900 - RNA, 19 nt, Artificial Sequence
  Description of Artificial Sequence: Synthetic oligonucleotide
  Sense strand starting at position 256 of SEQ ID NO: 587887
uugcuuuaccaaggaugua

SEQ ID NO: 825901 - RNA, 19 nt, Artificial Sequence
  Description of Artificial Sequence: Synthetic oligonucleotide
  Antisense strand to SEQ ID NO: 825900
uacauccuugguaaagcaa

SEQ ID NO: 825902 - RNA, 19 nt, Artificial Sequence
  Description of Artificial Sequence: Synthetic oligonucleotide
  Sense strand starting at position 343 of SEQ ID NO: 587887
auaugcauccaaggaugua

SEQ ID NO: 825903 - RNA, 19 nt, Artificial Sequence
  Description of Artificial Sequence: Synthetic oligonucleotide
  Antisense strand to SEQ ID NO: 825902
uacauccuuggaugcauau

SEQ ID NO: 825904 - RNA, 19 nt, Artificial Sequence
  Description of Artificial Sequence: Synthetic oligonucleotide
  Sense strand starting at position 367 of SEQ ID NO: 587887
acaaguucuuguccauauu

SEQ ID NO: 825905 - RNA, 19 nt, Artificial Sequence
  Description of Artificial Sequence: Synthetic oligonucleotide
  Antisense strand to SEQ ID NO: 825904
aauauggacaagaacuugu

SEQ ID NO: 825906 - RNA, 19 nt, Artificial Sequence
  Description of Artificial Sequence: Synthetic oligonucleotide
  Sense strand starting at position 376 of SEQ ID NO: 587887
uguccauauuuaggacuua

SEQ ID NO: 825907 - RNA, 19 nt, Artificial Sequence
  Description of Artificial Sequence: Synthetic oligonucleotide
  Antisense strand to SEQ ID NO: 825906
uaaguccuaaauauggaca

SEQ ID NO: 825908 - RNA, 19 nt, Artificial Sequence
  Description of Artificial Sequence: Synthetic oligonucleotide
  Sense strand starting at position 765 of SEQ ID NO: 587887
agggaaggauuacggaauu

SEQ ID NO: 825909 - RNA, 19 nt, Artificial Sequence
  Description of Artificial Sequence: Synthetic oligonucleotide
  Antisense strand to SEQ ID NO: 825908
aauuccguaauccuucccu

SEQ ID NO: 825910 - RNA, 19 nt, Artificial Sequence
  Description of Artificial Sequence: Synthetic oligonucleotide
  Sense strand starting at position 771 of SEQ ID NO: 587887
ggauuacggaauuguauau

SEQ ID NO: 825911 - RNA, 19 nt, Artificial Sequence
  Description of Artificial Sequence: Synthetic oligonucleotide
  Antisense strand to SEQ ID NO: 825910
auauacaauuccguaaucc

SEQ ID NO: 825912 - RNA, 19 nt, Artificial Sequence
  Description of Artificial Sequence: Synthetic oligonucleotide
  Sense strand starting at position 782 of SEQ ID NO: 587887
uuguauaugcugugguuaa

SEQ ID NO: 825913 - RNA, 19 nt, Artificial Sequence
  Description of Artificial Sequence: Synthetic oligonucleotide
  Antisense strand to SEQ ID NO: 825912
uuaaccacagcauauacaa

SEQ ID NO: 825914 - RNA, 19 nt, Artificial Sequence
  Description of Artificial Sequence: Synthetic oligonucleotide
  Sense strand starting at position 801 of SEQ ID NO: 587887
ggagaucuagucugaccgu

SEQ ID NO: 825915 - RNA, 19 nt, Artificial Sequence
  Description of Artificial Sequence: Synthetic oligonucleotide
  Antisense strand to SEQ ID NO: 825914
acggucagacuagaucucc

SEQ ID NO: 825916 - RNA, 19 nt, Artificial Sequence
  Description of Artificial Sequence: Synthetic oligonucleotide
  Sense strand starting at position 977 of SEQ ID NO: 587887
aggcuugcuccaggaagaa

SEQ ID NO: 825917 - RNA, 19 nt, Artificial Sequence
  Description of Artificial Sequence: Synthetic oligonucleotide
  Antisense strand to SEQ ID NO: 825916
uucuuccuggagcaagccu

SEQ ID NO: 825918 - RNA, 19 nt, Artificial Sequence
  Description of Artificial Sequence: Synthetic oligonucleotide
  Sense strand starting at position 1215 of SEQ ID NO: 587887
aggaucagaugaugaaacu

SEQ ID NO: 825919 - RNA, 19 nt, Artificial Sequence
  Description of Artificial Sequence: Synthetic oligonucleotide
  Antisense strand to SEQ ID NO: 825918
aguuucaucaucugauccu

SEQ ID NO: 825920 - RNA, 19 nt, Artificial Sequence
  Description of Artificial Sequence: Synthetic oligonucleotide
  Sense strand starting at position 1224 of SEQ ID NO: 587887
ugaugaaacugcucggaug

SEQ ID NO: 825921 - RNA, 19 nt, Artificial Sequence
  Description of Artificial Sequence: Synthetic oligonucleotide
  Antisense strand to SEQ ID NO: 825920
cauccgagcaguuucauca

SEQ ID NO: 825922 - RNA, 19 nt, Artificial Sequence
  Description of Artificial Sequence: Synthetic oligonucleotide
  Sense strand starting at position 1299 of SEQ ID NO: 587887
cuaacuuggucauuaagga

SEQ ID NO: 825923 - RNA, 19 nt, Artificial Sequence
  Description of Artificial Sequence: Synthetic oligonucleotide
  Antisense strand to SEQ ID NO: 825922
uccuuaaugaccaaguuag

SEQ ID NO: 825924 - RNA, 19 nt, Artificial Sequence
  Description of Artificial Sequence: Synthetic oligonucleotide
  Sense strand starting at position 1361 of SEQ ID NO: 587887
gagauucgcucagccggaa

SEQ ID NO: 825925 - RNA, 19 nt, Artificial Sequence
  Description of Artificial Sequence: Synthetic oligonucleotide
  Antisense strand to SEQ ID NO: 825924
uuccggcugagcgaaucuc

SEQ ID NO: 825926 - RNA, 19 nt, Artificial Sequence
  Description of Artificial Sequence: Synthetic oligonucleotide
  Sense strand starting at position 1365 of SEQ ID NO: 587887
uucgcucagccggaagauu

SEQ ID NO: 825927 - RNA, 19 nt, Artificial Sequence
  Description of Artificial Sequence: Synthetic oligonucleotide
  Antisense strand to SEQ ID NO: 825926
aaucuuccggcugagcgaa

SEQ ID NO: 825928 - RNA, 19 nt, Artificial Sequence
  Description of Artificial Sequence: Synthetic oligonucleotide
  Sense strand starting at position 1984 of SEQ ID NO: 587887
gcgcaugcccggcuauaua

SEQ ID NO: 825929 - RNA, 19 nt, Artificial Sequence
  Description of Artificial Sequence: Synthetic oligonucleotide
  Antisense strand to SEQ ID NO: 825928
uauauagccgggcaugcgc

SEQ ID NO: 825930 - RNA, 19 nt, Artificial Sequence
  Description of Artificial Sequence: Synthetic oligonucleotide
  Sense strand starting at position 2195 of SEQ ID NO: 587887
ggaaaccucccgugaagac

SEQ ID NO: 825931 - RNA, 19 nt, Artificial Sequence
  Description of Artificial Sequence: Synthetic oligonucleotide
  Antisense strand to SEQ ID NO: 825930
gucuucacgggagguuucc

SEQ ID NO: 825932 - RNA, 19 nt, Artificial Sequence
  Description of Artificial Sequence: Synthetic oligonucleotide
  Sense strand starting at position 2389 of SEQ ID NO: 587887
guguuucuucugcauauuu

SEQ ID NO: 825933 - RNA, 19 nt, Artificial Sequence
  Description of Artificial Sequence: Synthetic oligonucleotide
  Antisense strand to SEQ ID NO: 825932
aaauaugcagaagaaacac

SEQ ID NO: 825934 - RNA, 19 nt, Artificial Sequence
  Description of Artificial Sequence: Synthetic oligonucleotide
  Sense strand starting at position 2529 of SEQ ID NO: 587887
acccaaaguugggagaaau

SEQ ID NO: 825935 - RNA, 19 nt, Artificial Sequence
  Description of Artificial Sequence: Synthetic oligonucleotide
  Antisense strand to SEQ ID NO: 825934
auuucucccaacuuugggu

SEQ ID NO: 825936 - RNA, 19 nt, Artificial Sequence
  Description of Artificial Sequence: Synthetic oligonucleotide
  Sense strand starting at position 2561 of SEQ ID NO: 587887
ugaagaaguuccgaggaga

SEQ ID NO: 825937 - RNA, 19 nt, Artificial Sequence
  Description of Artificial Sequence: Synthetic oligonucleotide
  Antisense strand to SEQ ID NO: 825936
ucuccucggaacuucuuca

SEQ ID NO: 825938 - RNA, 19 nt, Artificial Sequence
  Description of Artificial Sequence: Synthetic oligonucleotide
  Sense strand starting at position 2577 of SEQ ID NO: 587887
agacucuuccucuguggga

SEQ ID NO: 825939 - RNA, 19 nt, Artificial Sequence
  Description of Artificial Sequence: Synthetic oligonucleotide
  Antisense strand to SEQ ID NO: 825938
ucccacagaggaagagucu

SEQ ID NO: 825940 - RNA, 19 nt, Artificial Sequence
  Description of Artificial Sequence: Synthetic oligonucleotide
  Sense strand starting at position 2579 of SEQ ID NO: 587887
acucuuccucugugggaca

SEQ ID NO: 825941 - RNA, 19 nt, Artificial Sequence
  Description of Artificial Sequence: Synthetic oligonucleotide
  Antisense strand to SEQ ID NO: 825940
ugucccacagaggaagagu

SEQ ID NO: 825942 - RNA, 19 nt, Artificial Sequence
  Description of Artificial Sequence: Synthetic oligonucleotide
  Sense strand starting at position 2611 of SEQ ID NO: 587887
guauaucaggccugggaaa

SEQ ID NO: 825943 - RNA, 19 nt, Artificial Sequence
  Description of Artificial Sequence: Synthetic oligonucleotide
  Antisense strand to SEQ ID NO: 825942
uuucccaggccugauauac

SEQ ID NO: 825944 - RNA, 19 nt, Artificial Sequence
  Description of Artificial Sequence: Synthetic oligonucleotide
  Sense strand starting at position 2612 of SEQ ID NO: 587887
uauaucaggccugggaaau

SEQ ID NO: 825945 - RNA, 19 nt, Artificial Sequence
  Description of Artificial Sequence: Synthetic oligonucleotide
  Antisense strand to SEQ ID NO: 825944
auuucccaggccugauaua

SEQ ID NO: 825946 - RNA, 19 nt, Artificial Sequence
  Description of Artificial Sequence: Synthetic oligonucleotide
  Sense strand starting at position 2613 of SEQ ID NO: 587887
auaucaggccugggaaaug

SEQ ID NO: 825947 - RNA, 19 nt, Artificial Sequence
  Description of Artificial Sequence: Synthetic oligonucleotide
  Antisense strand to SEQ ID NO: 825946
cauuucccaggccugauau

SEQ ID NO: 825948 - RNA, 19 nt, Artificial Sequence
  Description of Artificial Sequence: Synthetic oligonucleotide
  Sense strand starting at position 2675 of SEQ ID NO: 587887
uguucuguucugcaggaca

SEQ ID NO: 825949 - RNA, 19 nt, Artificial Sequence
  Description of Artificial Sequence: Synthetic oligonucleotide
  Antisense strand to SEQ ID NO: 825948
uguccugcagaacagaaca

SEQ ID NO: 825950 - RNA, 19 nt, Artificial Sequence
  Description of Artificial Sequence: Synthetic oligonucleotide
  Sense strand starting at position 2780 of SEQ ID NO: 587887
ggcuuaguacucgagcuga

SEQ ID NO: 825951 - RNA, 19 nt, Artificial Sequence
  Description of Artificial Sequence: Synthetic oligonucleotide
  Antisense strand to SEQ ID NO: 825950
ucagcucgaguacuaagcc

SEQ ID NO: 825952 - RNA, 19 nt, Artificial Sequence
  Description of Artificial Sequence: Synthetic oligonucleotide
  Sense strand starting at position 2826 of SEQ ID NO: 587887
ggcacuagcugucucuaaa

SEQ ID NO: 825953 - RNA, 19 nt, Artificial Sequence
  Description of Artificial Sequence: Synthetic oligonucleotide
  Antisense strand to SEQ ID NO: 825952
uuuagagacagcuagugcc

SEQ ID NO: 825954 - RNA, 19 nt, Artificial Sequence
  Description of Artificial Sequence: Synthetic oligonucleotide
  Sense strand starting at position 3102 of SEQ ID NO: 587887
gggugauauuccucucauu

SEQ ID NO: 825955 - RNA, 19 nt, Artificial Sequence
  Description of Artificial Sequence: Synthetic oligonucleotide
  Antisense strand to SEQ ID NO: 825954
aaugagaggaauaucaccc

SEQ ID NO: 825956 - RNA, 19 nt, Artificial Sequence
  Description of Artificial Sequence: Synthetic oligonucleotide
  Sense strand starting at position 3219 of SEQ ID NO: 587887
cggugcuuuccagacauua

SEQ ID NO: 825957 - RNA, 19 nt, Artificial Sequence
  Description of Artificial Sequence: Synthetic oligonucleotide
  Antisense strand to SEQ ID NO: 825956
uaaugucuggaaagcaccg

SEQ ID NO: 825958 - RNA, 19 nt, Artificial Sequence
  Description of Artificial Sequence: Synthetic oligonucleotide
  Sense strand starting at position 3231 of SEQ ID NO: 587887
gacauuaugucauccguuu

SEQ ID NO: 825959 - RNA, 19 nt, Artificial Sequence
  Description of Artificial Sequence: Synthetic oligonucleotide
  Antisense strand to SEQ ID NO: 825958
aaacggaugacauaauguc

SEQ ID NO: 825960 - RNA, 19 nt, Artificial Sequence
  Description of Artificial Sequence: Synthetic oligonucleotide
  Sense strand starting at position 3237 of SEQ ID NO: 587887
augucauccguuugggacu

SEQ ID NO: 825961 - RNA, 19 nt, Artificial Sequence
  Description of Artificial Sequence: Synthetic oligonucleotide
  Antisense strand to SEQ ID NO: 825960
agucccaaacggaugacau

SEQ ID NO: 825962 - RNA, 19 nt, Artificial Sequence
  Description of Artificial Sequence: Synthetic oligonucleotide
  Sense strand starting at position 3266 of SEQ ID NO: 587887
ugcagugggcugugagaaa

SEQ ID NO: 825963 - RNA, 19 nt, Artificial Sequence
  Description of Artificial Sequence: Synthetic oligonucleotide
  Antisense strand to SEQ ID NO: 825962
uuucucacagcccacugca

SEQ ID NO: 825964 - RNA, 19 nt, Artificial Sequence
  Description of Artificial Sequence: Synthetic oligonucleotide
  Sense strand starting at position 3355 of SEQ ID NO: 587887
ugaaauaaguaugcuucca

SEQ ID NO: 825965 - RNA, 19 nt, Artificial Sequence
  Description of Artificial Sequence: Synthetic oligonucleotide
  Antisense strand to SEQ ID NO: 825964
uggaagcauacuuauuuca

SEQ ID NO: 825966 - RNA, 19 nt, Artificial Sequence
  Description of Artificial Sequence: Synthetic oligonucleotide
  Sense strand starting at position 3414 of SEQ ID NO: 587887
auccuaauggaguguuaaa

SEQ ID NO: 825967 - RNA, 19 nt, Artificial Sequence
  Description of Artificial Sequence: Synthetic oligonucleotide
  Antisense strand to SEQ ID NO: 825966
uuuaacacuccauuaggau

SEQ ID NO: 825968 - RNA, 19 nt, Artificial Sequence
  Description of Artificial Sequence: Synthetic oligonucleotide
  Sense strand starting at position 3453 of SEQ ID NO: 587887
agagcaaucccauggcuuu

SEQ ID NO: 825969 - RNA, 19 nt, Artificial Sequence
  Description of Artificial Sequence: Synthetic oligonucleotide
  Antisense strand to SEQ ID NO: 825968
aaagccaugggauugcucu

SEQ ID NO: 825970 - RNA, 19 nt, Artificial Sequence
  Description of Artificial Sequence: Synthetic oligonucleotide
  Sense strand starting at position 3477 of SEQ ID NO: 587887
gcaaguugucaauacuguc

SEQ ID NO: 825971 - RNA, 19 nt, Artificial Sequence
  Description of Artificial Sequence: Synthetic oligonucleotide
  Antisense strand to SEQ ID NO: 825970
gacaguauugacaacuugc

SEQ ID NO: 825972 - RNA, 19 nt, Artificial Sequence
  Description of Artificial Sequence: Synthetic oligonucleotide
  Sense strand starting at position 3484 of SEQ ID NO: 587887
gucaauacuguccacagga

SEQ ID NO: 825973 - RNA, 19 nt, Artificial Sequence
  Description of Artificial Sequence: Synthetic oligonucleotide
  Antisense strand to SEQ ID NO: 825972
uccuguggacaguauugac

SEQ ID NO: 825974 - RNA, 19 nt, Artificial Sequence
  Description of Artificial Sequence: Synthetic oligonucleotide
  Sense strand starting at position 3520 of SEQ ID NO: 587887
aggagauugcucggcagag

SEQ ID NO: 825975 - RNA, 19 nt, Artificial Sequence
  Description of Artificial Sequence: Synthetic oligonucleotide
  Antisense strand to SEQ ID NO: 825974
cucugccgagcaaucuccu

SEQ ID NO: 825976 - RNA, 19 nt, Artificial Sequence
  Description of Artificial Sequence: Synthetic oligonucleotide
  Sense strand starting at position 3521 of SEQ ID NO: 587887
ggagauugcucggcagaga

SEQ ID NO: 825977 - RNA, 19 nt, Artificial Sequence
  Description of Artificial Sequence: Synthetic oligonucleotide
  Antisense strand to SEQ ID NO: 825976
ucucugccgagcaaucucc

SEQ ID NO: 825978 - RNA, 19 nt, Artificial Sequence
  Description of Artificial Sequence: Synthetic oligonucleotide
  Sense strand starting at position 3522 of SEQ ID NO: 587887
gagauugcucggcagagag

SEQ ID NO: 825979 - RNA, 19 nt, Artificial Sequence
  Description of Artificial Sequence: Synthetic oligonucleotide
  Antisense strand to SEQ ID NO: 825978
cucucugccgagcaaucuc

SEQ ID NO: 825980 - RNA, 19 nt, Artificial Sequence
  Description of Artificial Sequence: Synthetic oligonucleotide
  Sense strand starting at position 171 of SEQ ID NO: 587888
guccucaggucagugaguu

SEQ ID NO: 825981 - RNA, 19 nt, Artificial Sequence
  Description of Artificial Sequence: Synthetic oligonucleotide
  Antisense strand to SEQ ID NO: 825980
aacucacugaccugaggac

SEQ ID NO: 825982 - RNA, 19 nt, Artificial Sequence
  Description of Artificial Sequence: Synthetic oligonucleotide
  Sense strand starting at position 544 of SEQ ID NO: 587888
uugcuuuaccaaggaugua

SEQ ID NO: 825983 - RNA, 19 nt, Artificial Sequence
  Description of Artificial Sequence: Synthetic oligonucleotide
  Antisense strand to SEQ ID NO: 825982
uacauccuugguaaagcaa

SEQ ID NO: 825984 - RNA, 19 nt, Artificial Sequence
  Description of Artificial Sequence: Synthetic oligonucleotide
  Sense strand starting at position 631 of SEQ ID NO: 587888
auaugcauccaaggaugua

SEQ ID NO: 825985 - RNA, 19 nt, Artificial Sequence
  Description of Artificial Sequence: Synthetic oligonucleotide
  Antisense strand to SEQ ID NO: 825984
uacauccuuggaugcauau

SEQ ID NO: 825986 - RNA, 19 nt, Artificial Sequence
  Description of Artificial Sequence: Synthetic oligonucleotide
  Sense strand starting at position 655 of SEQ ID NO: 587888
acaaguucuuguccauauu

SEQ ID NO: 825987 - RNA, 19 nt, Artificial Sequence
  Description of Artificial Sequence: Synthetic oligonucleotide
  Antisense strand to SEQ ID NO: 825986
aauauggacaagaacuugu

SEQ ID NO: 825988 - RNA, 19 nt, Artificial Sequence
  Description of Artificial Sequence: Synthetic oligonucleotide
  Sense strand starting at position 664 of SEQ ID NO: 587888
uguccauauuuaggacuua

SEQ ID NO: 825989 - RNA, 19 nt, Artificial Sequence
  Description of Artificial Sequence: Synthetic oligonucleotide
  Antisense strand to SEQ ID NO: 825988
uaaguccuaaauauggaca

SEQ ID NO: 825990 - RNA, 19 nt, Artificial Sequence
  Description of Artificial Sequence: Synthetic oligonucleotide
  Sense strand starting at position 1059 of SEQ ID NO: 587888
ggauuacggaauuguauau

SEQ ID NO: 825991 - RNA, 19 nt, Artificial Sequence
  Description of Artificial Sequence: Synthetic oligonucleotide
  Antisense strand to SEQ ID NO: 825990
auauacaauuccguaaucc

SEQ ID NO: 825992 - RNA, 19 nt, Artificial Sequence
  Description of Artificial Sequence: Synthetic oligonucleotide
  Sense strand starting at position 1070 of SEQ ID NO: 587888
uuguauaugcugugguuaa

SEQ ID NO: 825993 - RNA, 19 nt, Artificial Sequence
  Description of Artificial Sequence: Synthetic oligonucleotide
  Antisense strand to SEQ ID NO: 825992
uuaaccacagcauauacaa

SEQ ID NO: 825994 - RNA, 19 nt, Artificial Sequence
  Description of Artificial Sequence: Synthetic oligonucleotide
  Sense strand starting at position 1089 of SEQ ID NO: 587888
ggagaucuagucugaccgu

SEQ ID NO: 825995 - RNA, 19 nt, Artificial Sequence
  Description of Artificial Sequence: Synthetic oligonucleotide
  Antisense strand to SEQ ID NO: 825994
acggucagacuagaucucc

SEQ ID NO: 825996 - RNA, 19 nt, Artificial Sequence
  Description of Artificial Sequence: Synthetic oligonucleotide
  Sense strand starting at position 1265 of SEQ ID NO: 587888
aggcuugcuccaggaagaa

SEQ ID NO: 825997 - RNA, 19 nt, Artificial Sequence
  Description of Artificial Sequence: Synthetic oligonucleotide
  Antisense strand to SEQ ID NO: 825996
uucuuccuggagcaagccu

SEQ ID NO: 825998 - RNA, 19 nt, Artificial Sequence
  Description of Artificial Sequence: Synthetic oligonucleotide
  Sense strand starting at position 1503 of SEQ ID NO: 587888
aggaucagaugaugaaacu

SEQ ID NO: 825999 - RNA, 19 nt, Artificial Sequence
  Description of Artificial Sequence: Synthetic oligonucleotide
  Antisense strand to SEQ ID NO: 825998
aguuucaucaucugauccu

SEQ ID NO: 826000 - RNA, 19 nt, Artificial Sequence
  Description of Artificial Sequence: Synthetic oligonucleotide
  Sense strand starting at position 1512 of SEQ ID NO: 587888
ugaugaaacugcucggaug

SEQ ID NO: 826001 - RNA, 19 nt, Artificial Sequence
  Description of Artificial Sequence: Synthetic oligonucleotide
  Antisense strand to SEQ ID NO: 826000
cauccgagcaguuucauca

SEQ ID NO: 826002 - RNA, 19 nt, Artificial Sequence
  Description of Artificial Sequence: Synthetic oligonucleotide
  Sense strand starting at position 1587 of SEQ ID NO: 587888
cuaacuuggucauuaagga

SEQ ID NO: 826003 - RNA, 19 nt, Artificial Sequence
  Description of Artificial Sequence: Synthetic oligonucleotide
  Antisense strand to SEQ ID NO: 826002
uccuuaaugaccaaguuag

SEQ ID NO: 826004 - RNA, 19 nt, Artificial Sequence
  Description of Artificial Sequence: Synthetic oligonucleotide
  Sense strand starting at position 1649 of SEQ ID NO: 587888
gagauucgcucagccggaa

SEQ ID NO: 826005 - RNA, 19 nt, Artificial Sequence
  Description of Artificial Sequence: Synthetic oligonucleotide
  Antisense strand to SEQ ID NO: 826004
uuccggcugagcgaaucuc

SEQ ID NO: 826006 - RNA, 19 nt, Artificial Sequence
  Description of Artificial Sequence: Synthetic oligonucleotide
  Sense strand starting at position 1653 of SEQ ID NO: 587888
uucgcucagccggaagauu

SEQ ID NO: 826007 - RNA, 19 nt, Artificial Sequence
  Description of Artificial Sequence: Synthetic oligonucleotide
  Antisense strand to SEQ ID NO: 826006
aaucuuccggcugagcgaa

SEQ ID NO: 826008 - RNA, 19 nt, Artificial Sequence
  Description of Artificial Sequence: Synthetic oligonucleotide
  Sense strand starting at position 2272 of SEQ ID NO: 587888
gcgcaugcccggcuauaua

SEQ ID NO: 826009 - RNA, 19 nt, Artificial Sequence
  Description of Artificial Sequence: Synthetic oligonucleotide
  Antisense strand to SEQ ID NO: 826008
uauauagccgggcaugcgc

SEQ ID NO: 826010 - RNA, 19 nt, Artificial Sequence
  Description of Artificial Sequence: Synthetic oligonucleotide
  Sense strand starting at position 2483 of SEQ ID NO: 587888
ggaaaccucccgugaagac

SEQ ID NO: 826011 - RNA, 19 nt, Artificial Sequence
  Description of Artificial Sequence: Synthetic oligonucleotide
  Antisense strand to SEQ ID NO: 826010
gucuucacgggagguuucc

SEQ ID NO: 826012 - RNA, 19 nt, Artificial Sequence
  Description of Artificial Sequence: Synthetic oligonucleotide
  Sense strand starting at position 2677 of SEQ ID NO: 587888
guguuucuucugcauauuu

SEQ ID NO: 826013 - RNA, 19 nt, Artificial Sequence
  Description of Artificial Sequence: Synthetic oligonucleotide
  Antisense strand to SEQ ID NO: 826012
aaauaugcagaagaaacac

SEQ ID NO: 826014 - RNA, 19 nt, Artificial Sequence
  Description of Artificial Sequence: Synthetic oligonucleotide
  Sense strand starting at position 2817 of SEQ ID NO: 587888
acccaaaguugggagaaau

SEQ ID NO: 826015 - RNA, 19 nt, Artificial Sequence
  Description of Artificial Sequence: Synthetic oligonucleotide
  Antisense strand to SEQ ID NO: 826014
auuucucccaacuuugggu

SEQ ID NO: 826016 - RNA, 19 nt, Artificial Sequence
  Description of Artificial Sequence: Synthetic oligonucleotide
  Sense strand starting at position 2849 of SEQ ID NO: 587888
ugaagaaguuccgaggaga

SEQ ID NO: 826017 - RNA, 19 nt, Artificial Sequence
  Description of Artificial Sequence: Synthetic oligonucleotide
  Antisense strand to SEQ ID NO: 826016
ucuccucggaacuucuuca

SEQ ID NO: 826018 - RNA, 19 nt, Artificial Sequence
  Description of Artificial Sequence: Synthetic oligonucleotide
  Sense strand starting at position 2865 of SEQ ID NO: 587888
agacucuuccucuguggga

SEQ ID NO: 826019 - RNA, 19 nt, Artificial Sequence
  Description of Artificial Sequence: Synthetic oligonucleotide
  Antisense strand to SEQ ID NO: 826018
ucccacagaggaagagucu

SEQ ID NO: 826020 - RNA, 19 nt, Artificial Sequence
  Description of Artificial Sequence: Synthetic oligonucleotide
  Sense strand starting at position 2867 of SEQ ID NO: 587888
acucuuccucugugggaca

SEQ ID NO: 826021 - RNA, 19 nt, Artificial Sequence
  Description of Artificial Sequence: Synthetic oligonucleotide
  Antisense strand to SEQ ID NO: 826020
ugucccacagaggaagagu

SEQ ID NO: 826022 - RNA, 19 nt, Artificial Sequence
  Description of Artificial Sequence: Synthetic oligonucleotide
  Sense strand starting at position 2899 of SEQ ID NO: 587888
guauaucaggccugggaaa

SEQ ID NO: 826023 - RNA, 19 nt, Artificial Sequence
  Description of Artificial Sequence: Synthetic oligonucleotide
  Antisense strand to SEQ ID NO: 826022
uuucccaggccugauauac

SEQ ID NO: 826024 - RNA, 19 nt, Artificial Sequence
  Description of Artificial Sequence: Synthetic oligonucleotide
  Sense strand starting at position 2900 of SEQ ID NO: 587888
uauaucaggccugggaaau

SEQ ID NO: 826025 - RNA, 19 nt, Artificial Sequence
  Description of Artificial Sequence: Synthetic oligonucleotide
  Antisense strand to SEQ ID NO: 826024
auuucccaggccugauaua

SEQ ID NO: 826026 - RNA, 19 nt, Artificial Sequence
  Description of Artificial Sequence: Synthetic oligonucleotide
  Sense strand starting at position 2901 of SEQ ID NO: 587888
auaucaggccugggaaaug

SEQ ID NO: 826027 - RNA, 19 nt, Artificial Sequence
  Description of Artificial Sequence: Synthetic oligonucleotide
  Antisense strand to SEQ ID NO: 826026
cauuucccaggccugauau

SEQ ID NO: 826028 - RNA, 19 nt, Artificial Sequence
  Description of Artificial Sequence: Synthetic oligonucleotide
  Sense strand starting at position 2963 of SEQ ID NO: 587888
uguucuguucugcaggaca

SEQ ID NO: 826029 - RNA, 19 nt, Artificial Sequence
  Description of Artificial Sequence: Synthetic oligonucleotide
  Antisense strand to SEQ ID NO: 826028
uguccugcagaacagaaca

SEQ ID NO: 826030 - RNA, 19 nt, Artificial Sequence
  Description of Artificial Sequence: Synthetic oligonucleotide
  Sense strand starting at position 3068 of SEQ ID NO: 587888
ggcuuaguacucgagcuga

SEQ ID NO: 826031 - RNA, 19 nt, Artificial Sequence
  Description of Artificial Sequence: Synthetic oligonucleotide
  Antisense strand to SEQ ID NO: 826030
ucagcucgaguacuaagcc

SEQ ID NO: 826032 - RNA, 19 nt, Artificial Sequence
  Description of Artificial Sequence: Synthetic oligonucleotide
  Sense strand starting at position 3114 of SEQ ID NO: 587888
ggcacuagcugucucuaaa

SEQ ID NO: 826033 - RNA, 19 nt, Artificial Sequence
  Description of Artificial Sequence: Synthetic oligonucleotide
  Antisense strand to SEQ ID NO: 826032
uuuagagacagcuagugcc

SEQ ID NO: 826034 - RNA, 19 nt, Artificial Sequence
  Description of Artificial Sequence: Synthetic oligonucleotide
  Sense strand starting at position 3390 of SEQ ID NO: 587888
gggugauauuccucucauu

SEQ ID NO: 826035 - RNA, 19 nt, Artificial Sequence
  Description of Artificial Sequence: Synthetic oligonucleotide
  Antisense strand to SEQ ID NO: 826034
aaugagaggaauaucaccc

SEQ ID NO: 826036 - RNA, 19 nt, Artificial Sequence
  Description of Artificial Sequence: Synthetic oligonucleotide
  Sense strand starting at position 3507 of SEQ ID NO: 587888
cggugcuuuccagacauua

SEQ ID NO: 826037 - RNA, 19 nt, Artificial Sequence
  Description of Artificial Sequence: Synthetic oligonucleotide
  Antisense strand to SEQ ID NO: 826036
uaaugucuggaaagcaccg

SEQ ID NO: 826038 - RNA, 19 nt, Artificial Sequence
  Description of Artificial Sequence: Synthetic oligonucleotide
  Sense strand starting at position 3519 of SEQ ID NO: 587888
gacauuaugucauccguuu

SEQ ID NO: 826039 - RNA, 19 nt, Artificial Sequence
  Description of Artificial Sequence: Synthetic oligonucleotide
  Antisense strand to SEQ ID NO: 826038
aaacggaugacauaauguc

SEQ ID NO: 826040 - RNA, 19 nt, Artificial Sequence
  Description of Artificial Sequence: Synthetic oligonucleotide
  Sense strand starting at position 3525 of SEQ ID NO: 587888
augucauccguuugggacu

SEQ ID NO: 826041 - RNA, 19 nt, Artificial Sequence
  Description of Artificial Sequence: Synthetic oligonucleotide
  Antisense strand to SEQ ID NO: 826040
agucccaaacggaugacau

SEQ ID NO: 826042 - RNA, 19 nt, Artificial Sequence
  Description of Artificial Sequence: Synthetic oligonucleotide
  Sense strand starting at position 3554 of SEQ ID NO: 587888
ugcagugggcugugagaaa

SEQ ID NO: 826043 - RNA, 19 nt, Artificial Sequence
  Description of Artificial Sequence: Synthetic oligonucleotide
  Antisense strand to SEQ ID NO: 826042
uuucucacagcccacugca

SEQ ID NO: 826044 - RNA, 19 nt, Artificial Sequence
  Description of Artificial Sequence: Synthetic oligonucleotide
  Sense strand starting at position 3643 of SEQ ID NO: 587888
ugaaauaaguaugcuucca

SEQ ID NO: 826045 - RNA, 19 nt, Artificial Sequence
  Description of Artificial Sequence: Synthetic oligonucleotide
  Antisense strand to SEQ ID NO: 826044
uggaagcauacuuauuuca

SEQ ID NO: 826046 - RNA, 19 nt, Artificial Sequence
  Description of Artificial Sequence: Synthetic oligonucleotide
  Sense strand starting at position 3702 of SEQ ID NO: 587888
auccuaauggaguguuaaa

SEQ ID NO: 826047 - RNA, 19 nt, Artificial Sequence
  Description of Artificial Sequence: Synthetic oligonucleotide
  Antisense strand to SEQ ID NO: 826046
uuuaacacuccauuaggau

SEQ ID NO: 826048 - RNA, 19 nt, Artificial Sequence
  Description of Artificial Sequence: Synthetic oligonucleotide
  Sense strand starting at position 3741 of SEQ ID NO: 587888
agagcaaucccauggcuuu

SEQ ID NO: 826049 - RNA, 19 nt, Artificial Sequence
  Description of Artificial Sequence: Synthetic oligonucleotide
  Antisense strand to SEQ ID NO: 826048
aaagccaugggauugcucu

SEQ ID NO: 826050 - RNA, 19 nt, Artificial Sequence
  Description of Artificial Sequence: Synthetic oligonucleotide
  Sense strand starting at position 3765 of SEQ ID NO: 587888
gcaaguugucaauacuguc

SEQ ID NO: 826051 - RNA, 19 nt, Artificial Sequence
  Description of Artificial Sequence: Synthetic oligonucleotide
  Antisense strand to SEQ ID NO: 826050
gacaguauugacaacuugc

SEQ ID NO: 826052 - RNA, 19 nt, Artificial Sequence
  Description of Artificial Sequence: Synthetic oligonucleotide
  Sense strand starting at position 3772 of SEQ ID NO: 587888
gucaauacuguccacagga

SEQ ID NO: 826053 - RNA, 19 nt, Artificial Sequence
  Description of Artificial Sequence: Synthetic oligonucleotide
  Antisense strand to SEQ ID NO: 826052
uccuguggacaguauugac

SEQ ID NO: 826054 - RNA, 19 nt, Artificial Sequence
  Description of Artificial Sequence: Synthetic oligonucleotide
  Sense strand starting at position 3808 of SEQ ID NO: 587888
aggagauugcucggcagag

SEQ ID NO: 826055 - RNA, 19 nt, Artificial Sequence
  Description of Artificial Sequence: Synthetic oligonucleotide
  Antisense strand to SEQ ID NO: 826054
cucugccgagcaaucuccu

SEQ ID NO: 826056 - RNA, 19 nt, Artificial Sequence
  Description of Artificial Sequence: Synthetic oligonucleotide
  Sense strand starting at position 3809 of SEQ ID NO: 587888
ggagauugcucggcagaga

SEQ ID NO: 826057 - RNA, 19 nt, Artificial Sequence
  Description of Artificial Sequence: Synthetic oligonucleotide
  Antisense strand to SEQ ID NO: 826056
ucucugccgagcaaucucc

SEQ ID NO: 826058 - RNA, 19 nt, Artificial Sequence
  Description of Artificial Sequence: Synthetic oligonucleotide
  Sense strand starting at position 3810 of SEQ ID NO: 587888
gagauugcucggcagagag

SEQ ID NO: 826059 - RNA, 19 nt, Artificial Sequence
  Description of Artificial Sequence: Synthetic oligonucleotide
  Antisense strand to SEQ ID NO: 826058
cucucugccgagcaaucuc

SEQ ID NO: 826060 - RNA, 19 nt, Artificial Sequence
  Description of Artificial Sequence: Synthetic oligonucleotide
  Sense strand starting at position 259 of SEQ ID NO: 587889
aggaaaggcucauggaaca

SEQ ID NO: 826061 - RNA, 19 nt, Artificial Sequence
  Description of Artificial Sequence: Synthetic oligonucleotide
  Antisense strand to SEQ ID NO: 826060
uguuccaugagccuuuccu

SEQ ID NO: 826062 - RNA, 19 nt, Artificial Sequence
  Description of Artificial Sequence: Synthetic oligonucleotide
  Sense strand starting at position 275 of SEQ ID NO: 587889
acagacuguuuccuagaga

SEQ ID NO: 826063 - RNA, 19 nt, Artificial Sequence
  Description of Artificial Sequence: Synthetic oligonucleotide
  Antisense strand to SEQ ID NO: 826062
ucucuaggaaacagucugu

SEQ ID NO: 826064 - RNA, 19 nt, Artificial Sequence
  Description of Artificial Sequence: Synthetic oligonucleotide
  Sense strand starting at position 276 of SEQ ID NO: 587889
cagacuguuuccuagagac

SEQ ID NO: 826065 - RNA, 19 nt, Artificial Sequence
  Description of Artificial Sequence: Synthetic oligonucleotide
  Antisense strand to SEQ ID NO: 826064
gucucuaggaaacagucug

SEQ ID NO: 826066 - RNA, 19 nt, Artificial Sequence
  Description of Artificial Sequence: Synthetic oligonucleotide
  Sense strand starting at position 278 of SEQ ID NO: 587889
gacuguuuccuagagacuu

SEQ ID NO: 826067 - RNA, 19 nt, Artificial Sequence
  Description of Artificial Sequence: Synthetic oligonucleotide
  Antisense strand to SEQ ID NO: 826066
aagucucuaggaaacaguc

SEQ ID NO: 826068 - RNA, 19 nt, Artificial Sequence
  Description of Artificial Sequence: Synthetic oligonucleotide
  Sense strand starting at position 303 of SEQ ID NO: 587889
gagcauugcucuccugaca

SEQ ID NO: 826069 - RNA, 19 nt, Artificial Sequence
  Description of Artificial Sequence: Synthetic oligonucleotide
  Antisense strand to SEQ ID NO: 826068
ugucaggagagcaaugcuc

SEQ ID NO: 826070 - RNA, 19 nt, Artificial Sequence
  Description of Artificial Sequence: Synthetic oligonucleotide
  Sense strand starting at position 355 of SEQ ID NO: 587889
gagaauaaguuucugguuu

SEQ ID NO: 826071 - RNA, 19 nt, Artificial Sequence
  Description of Artificial Sequence: Synthetic oligonucleotide
  Antisense strand to SEQ ID NO: 826070
aaaccagaaacuuauucuc

SEQ ID NO: 826072 - RNA, 19 nt, Artificial Sequence
  Description of Artificial Sequence: Synthetic oligonucleotide
  Sense strand starting at position 388 of SEQ ID NO: 587889
uaugguaggcuuuguuaag

SEQ ID NO: 826073 - RNA, 19 nt, Artificial Sequence
  Description of Artificial Sequence: Synthetic oligonucleotide
  Antisense strand to SEQ ID NO: 826072
cuuaacaaagccuaccaua

SEQ ID NO: 826074 - RNA, 19 nt, Artificial Sequence
  Description of Artificial Sequence: Synthetic oligonucleotide
  Sense strand starting at position 439 of SEQ ID NO: 587889
ggauuaacgccucagaguc

SEQ ID NO: 826075 - RNA, 19 nt, Artificial Sequence
  Description of Artificial Sequence: Synthetic oligonucleotide
  Antisense strand to SEQ ID NO: 826074
gacucugaggcguuaaucc

SEQ ID NO: 826076 - RNA, 19 nt, Artificial Sequence
  Description of Artificial Sequence: Synthetic oligonucleotide
  Sense strand starting at position 517 of SEQ ID NO: 587889
agguuugcuuuccaugaca

SEQ ID NO: 826077 - RNA, 19 nt, Artificial Sequence
  Description of Artificial Sequence: Synthetic oligonucleotide
  Antisense strand to SEQ ID NO: 826076
ugucauggaaagcaaaccu

SEQ ID NO: 826078 - RNA, 19 nt, Artificial Sequence
  Description of Artificial Sequence: Synthetic oligonucleotide
  Sense strand starting at position 519 of SEQ ID NO: 587889
guuugcuuuccaugacaga

SEQ ID NO: 826079 - RNA, 19 nt, Artificial Sequence
  Description of Artificial Sequence: Synthetic oligonucleotide
  Antisense strand to SEQ ID NO: 826078
ucugucauggaaagcaaac

SEQ ID NO: 826080 - RNA, 19 nt, Artificial Sequence
  Description of Artificial Sequence: Synthetic oligonucleotide
  Sense strand starting at position 522 of SEQ ID NO: 587889
ugcuuuccaugacagagaa

SEQ ID NO: 826081 - RNA, 19 nt, Artificial Sequence
  Description of Artificial Sequence: Synthetic oligonucleotide
  Antisense strand to SEQ ID NO: 826080
uucucugucauggaaagca

SEQ ID NO: 826082 - RNA, 19 nt, Artificial Sequence
  Description of Artificial Sequence: Synthetic oligonucleotide
  Sense strand starting at position 538 of SEQ ID NO: 587889
gaaauaagcccucggcugu

SEQ ID NO: 826083 - RNA, 19 nt, Artificial Sequence
  Description of Artificial Sequence: Synthetic oligonucleotide
  Antisense strand to SEQ ID NO: 826082
acagccgagggcuuauuuc

SEQ ID NO: 826084 - RNA, 19 nt, Artificial Sequence
  Description of Artificial Sequence: Synthetic oligonucleotide
  Sense strand starting at position 554 of SEQ ID NO: 587889
uguguaagcaguuauaggu

SEQ ID NO: 826085 - RNA, 19 nt, Artificial Sequence
  Description of Artificial Sequence: Synthetic oligonucleotide
  Antisense strand to SEQ ID NO: 826084
accuauaacugcuuacaca

SEQ ID NO: 826086 - RNA, 19 nt, Artificial Sequence
  Description of Artificial Sequence: Synthetic oligonucleotide
  Sense strand starting at position 560 of SEQ ID NO: 587889
agcaguuauagguaagcaa

SEQ ID NO: 826087 - RNA, 19 nt, Artificial Sequence
  Description of Artificial Sequence: Synthetic oligonucleotide
  Antisense strand to SEQ ID NO: 826086
uugcuuaccuauaacugcu

SEQ ID NO: 826088 - RNA, 19 nt, Artificial Sequence
  Description of Artificial Sequence: Synthetic oligonucleotide
  Sense strand starting at position 563 of SEQ ID NO: 587889
aguuauagguaagcaaguu

SEQ ID NO: 826089 - RNA, 19 nt, Artificial Sequence
  Description of Artificial Sequence: Synthetic oligonucleotide
  Antisense strand to SEQ ID NO: 826088
aacuugcuuaccuauaacu

SEQ ID NO: 826090 - RNA, 19 nt, Artificial Sequence
  Description of Artificial Sequence: Synthetic oligonucleotide
  Sense strand starting at position 564 of SEQ ID NO: 587889
guuauagguaagcaaguuu

SEQ ID NO: 826091 - RNA, 19 nt, Artificial Sequence
  Description of Artificial Sequence: Synthetic oligonucleotide
  Antisense strand to SEQ ID NO: 826090
aaacuugcuuaccuauaac

SEQ ID NO: 826092 - RNA, 19 nt, Artificial Sequence
  Description of Artificial Sequence: Synthetic oligonucleotide
  Sense strand starting at position 762 of SEQ ID NO: 587889
ccgcaauuguccuuucuca

SEQ ID NO: 826093 - RNA, 19 nt, Artificial Sequence
  Description of Artificial Sequence: Synthetic oligonucleotide
  Antisense strand to SEQ ID NO: 826092
ugagaaaggacaauugcgg

SEQ ID NO: 826094 - RNA, 19 nt, Artificial Sequence
  Description of Artificial Sequence: Synthetic oligonucleotide
  Sense strand starting at position 828 of SEQ ID NO: 587889
ggacaagagugucuuuacu

SEQ ID NO: 826095 - RNA, 19 nt, Artificial Sequence
  Description of Artificial Sequence: Synthetic oligonucleotide
  Antisense strand to SEQ ID NO: 826094
aguaaagacacucuugucc

SEQ ID NO: 826096 - RNA, 19 nt, Artificial Sequence
  Description of Artificial Sequence: Synthetic oligonucleotide
  Sense strand starting at position 834 of SEQ ID NO: 587889
gagugucuuuacuggaguu

SEQ ID NO: 826097 - RNA, 19 nt, Artificial Sequence
  Description of Artificial Sequence: Synthetic oligonucleotide
  Antisense strand to SEQ ID NO: 826096
aacuccaguaaagacacuc

SEQ ID NO: 826098 - RNA, 19 nt, Artificial Sequence
  Description of Artificial Sequence: Synthetic oligonucleotide
  Sense strand starting at position 907 of SEQ ID NO: 587889
gugggaucuuaagucaaag

SEQ ID NO: 826099 - RNA, 19 nt, Artificial Sequence
  Description of Artificial Sequence: Synthetic oligonucleotide
  Antisense strand to SEQ ID NO: 826098
cuuugacuuaagaucccac

SEQ ID NO: 826100 - RNA, 19 nt, Artificial Sequence
  Description of Artificial Sequence: Synthetic oligonucleotide
  Sense strand starting at position 1175 of SEQ ID NO: 587889
cagagugcuacguagagga

SEQ ID NO: 826101 - RNA, 19 nt, Artificial Sequence
  Description of Artificial Sequence: Synthetic oligonucleotide
  Antisense strand to SEQ ID NO: 826100
uccucuacguagcacucug

SEQ ID NO: 826102 - RNA, 19 nt, Artificial Sequence
  Description of Artificial Sequence: Synthetic oligonucleotide
  Sense strand starting at position 1358 of SEQ ID NO: 587889
gcgggcgaguccacauuaa

SEQ ID NO: 826103 - RNA, 19 nt, Artificial Sequence
  Description of Artificial Sequence: Synthetic oligonucleotide
  Antisense strand to SEQ ID NO: 826102
uuaauguggacucgcccgc

SEQ ID NO: 826104 - RNA, 19 nt, Artificial Sequence
  Description of Artificial Sequence: Synthetic oligonucleotide
  Sense strand starting at position 1655 of SEQ ID NO: 587889
guggcaacucguggcagaa

SEQ ID NO: 826105 - RNA, 19 nt, Artificial Sequence
  Description of Artificial Sequence: Synthetic oligonucleotide
  Antisense strand to SEQ ID NO: 826104
uucugccacgaguugccac

SEQ ID NO: 826106 - RNA, 19 nt, Artificial Sequence
  Description of Artificial Sequence: Synthetic oligonucleotide
  Sense strand starting at position 1757 of SEQ ID NO: 587889
cggcgucgcccagagugau

SEQ ID NO: 826107 - RNA, 19 nt, Artificial Sequence
  Description of Artificial Sequence: Synthetic oligonucleotide
  Antisense strand to SEQ ID NO: 826106
aucacucugggcgacgccg

SEQ ID NO: 826108 - RNA, 19 nt, Artificial Sequence
  Description of Artificial Sequence: Synthetic oligonucleotide
  Sense strand starting at position 1761 of SEQ ID NO: 587889
gucgcccagagugaucaua

SEQ ID NO: 826109 - RNA, 19 nt, Artificial Sequence
  Description of Artificial Sequence: Synthetic oligonucleotide
  Antisense strand to SEQ ID NO: 826108
uaugaucacucugggcgac

SEQ ID NO: 826110 - RNA, 19 nt, Artificial Sequence
  Description of Artificial Sequence: Synthetic oligonucleotide
  Sense strand starting at position 1763 of SEQ ID NO: 587889
cgcccagagugaucauaua

SEQ ID NO: 826111 - RNA, 19 nt, Artificial Sequence
  Description of Artificial Sequence: Synthetic oligonucleotide
  Antisense strand to SEQ ID NO: 826110
uauaugaucacucugggcg

SEQ ID NO: 826112 - RNA, 19 nt, Artificial Sequence
  Description of Artificial Sequence: Synthetic oligonucleotide
  Sense strand starting at position 1980 of SEQ ID NO: 587889
ggaggagccuugaguaagu

SEQ ID NO: 826113 - RNA, 19 nt, Artificial Sequence
  Description of Artificial Sequence: Synthetic oligonucleotide
  Antisense strand to SEQ ID NO: 826112
acuuacucaaggcuccucc

SEQ ID NO: 826114 - RNA, 19 nt, Artificial Sequence
  Description of Artificial Sequence: Synthetic oligonucleotide
  Sense strand starting at position 2341 of SEQ ID NO: 587889
ccggguaccuucccaagaa

SEQ ID NO: 826115 - RNA, 19 nt, Artificial Sequence
  Description of Artificial Sequence: Synthetic oligonucleotide
  Antisense strand to SEQ ID NO: 826114
uucuugggaagguacccgg

SEQ ID NO: 826116 - RNA, 19 nt, Artificial Sequence
  Description of Artificial Sequence: Synthetic oligonucleotide
  Sense strand starting at position 2384 of SEQ ID NO: 587889
gcaggagauugaagagguu

SEQ ID NO: 826117 - RNA, 19 nt, Artificial Sequence
  Description of Artificial Sequence: Synthetic oligonucleotide
  Antisense strand to SEQ ID NO: 826116
aaccucuucaaucuccugc

SEQ ID NO: 826118 - RNA, 19 nt, Artificial Sequence
  Description of Artificial Sequence: Synthetic oligonucleotide
  Sense strand starting at position 2393 of SEQ ID NO: 587889
ugaagagguucucaaacag

SEQ ID NO: 826119 - RNA, 19 nt, Artificial Sequence
  Description of Artificial Sequence: Synthetic oligonucleotide
  Antisense strand to SEQ ID NO: 826118
cuguuugagaaccucuuca

SEQ ID NO: 826120 - RNA, 19 nt, Artificial Sequence
  Description of Artificial Sequence: Synthetic oligonucleotide
  Sense strand starting at position 2724 of SEQ ID NO: 587889
ucaggaaggucugcaggau

SEQ ID NO: 826121 - RNA, 19 nt, Artificial Sequence
  Description of Artificial Sequence: Synthetic oligonucleotide
  Antisense strand to SEQ ID NO: 826120
auccugcagaccuuccuga

SEQ ID NO: 826122 - RNA, 19 nt, Artificial Sequence
  Description of Artificial Sequence: Synthetic oligonucleotide
  Sense strand starting at position 1372 of SEQ ID NO: 587890
ggagguggucugcaugaga

SEQ ID NO: 826123 - RNA, 19 nt, Artificial Sequence
  Description of Artificial Sequence: Synthetic oligonucleotide
  Antisense strand to SEQ ID NO: 826122
ucucaugcagaccaccucc

SEQ ID NO: 826124 - RNA, 19 nt, Artificial Sequence
  Description of Artificial Sequence: Synthetic oligonucleotide
  Sense strand starting at position 1801 of SEQ ID NO: 587890
cugccaauuugauggcaga

SEQ ID NO: 826125 - RNA, 19 nt, Artificial Sequence
  Description of Artificial Sequence: Synthetic oligonucleotide
  Antisense strand to SEQ ID NO: 826124
ucugccaucaaauuggcag

SEQ ID NO: 826126 - RNA, 19 nt, Artificial Sequence
  Description of Artificial Sequence: Synthetic oligonucleotide
  Sense strand starting at position 1862 of SEQ ID NO: 587890
gggacugugucccuggaaa

SEQ ID NO: 826127 - RNA, 19 nt, Artificial Sequence
  Description of Artificial Sequence: Synthetic oligonucleotide
  Antisense strand to SEQ ID NO: 826126
uuuccagggacacaguccc

SEQ ID NO: 826128 - RNA, 19 nt, Artificial Sequence
  Description of Artificial Sequence: Synthetic oligonucleotide
  Sense strand starting at position 2388 of SEQ ID NO: 587890
gaggaccucucccagguau

SEQ ID NO: 826129 - RNA, 19 nt, Artificial Sequence
  Description of Artificial Sequence: Synthetic oligonucleotide
  Antisense strand to SEQ ID NO: 826128
auaccugggagagguccuc

SEQ ID NO: 826130 - RNA, 19 nt, Artificial Sequence
  Description of Artificial Sequence: Synthetic oligonucleotide
  Sense strand starting at position 2400 of SEQ ID NO: 587890
cagguauuccugcagagcu

SEQ ID NO: 826131 - RNA, 19 nt, Artificial Sequence
  Description of Artificial Sequence: Synthetic oligonucleotide
  Antisense strand to SEQ ID NO: 826130
agcucugcaggaauaccug

SEQ ID NO: 826132 - RNA, 19 nt, Artificial Sequence
  Description of Artificial Sequence: Synthetic oligonucleotide
  Sense strand starting at position 2408 of SEQ ID NO: 587890
ccugcagagcucugugauu

SEQ ID NO: 826133 - RNA, 19 nt, Artificial Sequence
  Description of Artificial Sequence: Synthetic oligonucleotide
  Antisense strand to SEQ ID NO: 826132
aaucacagagcucugcagg

SEQ ID NO: 826134 - RNA, 19 nt, Artificial Sequence
  Description of Artificial Sequence: Synthetic oligonucleotide
  Sense strand starting at position 2421 of SEQ ID NO: 587890
gugauuggcugcuggagau

SEQ ID NO: 826135 - RNA, 19 nt, Artificial Sequence
  Description of Artificial Sequence: Synthetic oligonucleotide
  Antisense strand to SEQ ID NO: 826134
aucuccagcagccaaucac

SEQ ID NO: 826136 - RNA, 19 nt, Artificial Sequence
  Description of Artificial Sequence: Synthetic oligonucleotide
  Sense strand starting at position 2431 of SEQ ID NO: 587890
gcuggagaugccuggguua

SEQ ID NO: 826137 - RNA, 19 nt, Artificial Sequence
  Description of Artificial Sequence: Synthetic oligonucleotide
  Antisense strand to SEQ ID NO: 826136
uaacccaggcaucuccagc

SEQ ID NO: 826138 - RNA, 19 nt, Artificial Sequence
  Description of Artificial Sequence: Synthetic oligonucleotide
  Sense strand starting at position 2433 of SEQ ID NO: 587890
uggagaugccuggguuaac

SEQ ID NO: 826139 - RNA, 19 nt, Artificial Sequence
  Description of Artificial Sequence: Synthetic oligonucleotide
  Antisense strand to SEQ ID NO: 826138
guuaacccaggcaucucca

SEQ ID NO: 826140 - RNA, 19 nt, Artificial Sequence
  Description of Artificial Sequence: Synthetic oligonucleotide
  Sense strand starting at position 2448 of SEQ ID NO: 587890
uaaccauuccaguggcaga

SEQ ID NO: 826141 - RNA, 19 nt, Artificial Sequence
  Description of Artificial Sequence: Synthetic oligonucleotide
  Antisense strand to SEQ ID NO: 826140
ucugccacuggaaugguua

SEQ ID NO: 826142 - RNA, 19 nt, Artificial Sequence
  Description of Artificial Sequence: Synthetic oligonucleotide
  Sense strand starting at position 3110 of SEQ ID NO: 587890
cugcgauggagucaaagaa

SEQ ID NO: 826143 - RNA, 19 nt, Artificial Sequence
  Description of Artificial Sequence: Synthetic oligonucleotide
  Antisense strand to SEQ ID NO: 826142
uucuuugacuccaucgcag

SEQ ID NO: 826144 - RNA, 19 nt, Artificial Sequence
  Description of Artificial Sequence: Synthetic oligonucleotide
  Sense strand starting at position 3236 of SEQ ID NO: 587890
ccgagcuugggucaggaua

SEQ ID NO: 826145 - RNA, 19 nt, Artificial Sequence
  Description of Artificial Sequence: Synthetic oligonucleotide
  Antisense strand to SEQ ID NO: 826144
uauccugacccaagcucgg

SEQ ID NO: 826146 - RNA, 19 nt, Artificial Sequence
  Description of Artificial Sequence: Synthetic oligonucleotide
  Sense strand starting at position 3238 of SEQ ID NO: 587890
gagcuugggucaggauaag

SEQ ID NO: 826147 - RNA, 19 nt, Artificial Sequence
  Description of Artificial Sequence: Synthetic oligonucleotide
  Antisense strand to SEQ ID NO: 826146
cuuauccugacccaagcuc

SEQ ID NO: 826148 - RNA, 19 nt, Artificial Sequence
  Description of Artificial Sequence: Synthetic oligonucleotide
  Sense strand starting at position 3473 of SEQ ID NO: 587890
cagccugacccugagcauu

SEQ ID NO: 826149 - RNA, 19 nt, Artificial Sequence
  Description of Artificial Sequence: Synthetic oligonucleotide
  Antisense strand to SEQ ID NO: 826148
aaugcucagggucaggcug

SEQ ID NO: 826150 - RNA, 19 nt, Artificial Sequence
  Description of Artificial Sequence: Synthetic oligonucleotide
  Sense strand starting at position 3533 of SEQ ID NO: 587890
aggacucugucccgccaua

SEQ ID NO: 826151 - RNA, 19 nt, Artificial Sequence
  Description of Artificial Sequence: Synthetic oligonucleotide
  Antisense strand to SEQ ID NO: 826150
uauggcgggacagaguccu

SEQ ID NO: 826152 - RNA, 19 nt, Artificial Sequence
  Description of Artificial Sequence: Synthetic oligonucleotide
  Sense strand starting at position 3905 of SEQ ID NO: 587890
acuuuagcuucugggcaaa

SEQ ID NO: 826153 - RNA, 19 nt, Artificial Sequence
  Description of Artificial Sequence: Synthetic oligonucleotide
  Antisense strand to SEQ ID NO: 826152
uuugcccagaagcuaaagu

SEQ ID NO: 826154 - RNA, 19 nt, Artificial Sequence
  Description of Artificial Sequence: Synthetic oligonucleotide
  Sense strand starting at position 1010 of SEQ ID NO: 587891
ggagguggucugcaugaga

SEQ ID NO: 826155 - RNA, 19 nt, Artificial Sequence
  Description of Artificial Sequence: Synthetic oligonucleotide
  Antisense strand to SEQ ID NO: 826154
ucucaugcagaccaccucc

SEQ ID NO: 826156 - RNA, 19 nt, Artificial Sequence
  Description of Artificial Sequence: Synthetic oligonucleotide
  Sense strand starting at position 1439 of SEQ ID NO: 587891
cugccaauuugauggcaga

SEQ ID NO: 826157 - RNA, 19 nt, Artificial Sequence
  Description of Artificial Sequence: Synthetic oligonucleotide
  Antisense strand to SEQ ID NO: 826156
ucugccaucaaauuggcag

SEQ ID NO: 826158 - RNA, 19 nt, Artificial Sequence
  Description of Artificial Sequence: Synthetic oligonucleotide
  Sense strand starting at position 1500 of SEQ ID NO: 587891
gggacugugucccuggaaa

SEQ ID NO: 826159 - RNA, 19 nt, Artificial Sequence
  Description of Artificial Sequence: Synthetic oligonucleotide
  Antisense strand to SEQ ID NO: 826158
uuuccagggacacaguccc

SEQ ID NO: 826160 - RNA, 19 nt, Artificial Sequence
  Description of Artificial Sequence: Synthetic oligonucleotide
  Sense strand starting at position 2026 of SEQ ID NO: 587891
gaggaccucucccagguau

SEQ ID NO: 826161 - RNA, 19 nt, Artificial Sequence
  Description of Artificial Sequence: Synthetic oligonucleotide
  Antisense strand to SEQ ID NO: 826160
auaccugggagagguccuc

SEQ ID NO: 826162 - RNA, 19 nt, Artificial Sequence
  Description of Artificial Sequence: Synthetic oligonucleotide
  Sense strand starting at position 2038 of SEQ ID NO: 587891
cagguauuccugcagagcu

SEQ ID NO: 826163 - RNA, 19 nt, Artificial Sequence
  Description of Artificial Sequence: Synthetic oligonucleotide
  Antisense strand to SEQ ID NO: 826162
agcucugcaggaauaccug

SEQ ID NO: 826164 - RNA, 19 nt, Artificial Sequence
  Description of Artificial Sequence: Synthetic oligonucleotide
  Sense strand starting at position 2046 of SEQ ID NO: 587891
ccugcagagcucugugauu

SEQ ID NO: 826165 - RNA, 19 nt, Artificial Sequence
  Description of Artificial Sequence: Synthetic oligonucleotide
  Antisense strand to SEQ ID NO: 826164
aaucacagagcucugcagg

SEQ ID NO: 826166 - RNA, 19 nt, Artificial Sequence
  Description of Artificial Sequence: Synthetic oligonucleotide
  Sense strand starting at position 2059 of SEQ ID NO: 587891
gugauuggcugcuggagau

SEQ ID NO: 826167 - RNA, 19 nt, Artificial Sequence
  Description of Artificial Sequence: Synthetic oligonucleotide
  Antisense strand to SEQ ID NO: 826166
aucuccagcagccaaucac

SEQ ID NO: 826168 - RNA, 19 nt, Artificial Sequence
  Description of Artificial Sequence: Synthetic oligonucleotide
  Sense strand starting at position 2069 of SEQ ID NO: 587891
gcuggagaugccuggguua

SEQ ID NO: 826169 - RNA, 19 nt, Artificial Sequence
  Description of Artificial Sequence: Synthetic oligonucleotide
  Antisense strand to SEQ ID NO: 826168
uaacccaggcaucuccagc

SEQ ID NO: 826170 - RNA, 19 nt, Artificial Sequence
  Description of Artificial Sequence: Synthetic oligonucleotide
  Sense strand starting at position 2071 of SEQ ID NO: 587891
uggagaugccuggguuaac

SEQ ID NO: 826171 - RNA, 19 nt, Artificial Sequence
  Description of Artificial Sequence: Synthetic oligonucleotide
  Antisense strand to SEQ ID NO: 826170
guuaacccaggcaucucca

SEQ ID NO: 826172 - RNA, 19 nt, Artificial Sequence
  Description of Artificial Sequence: Synthetic oligonucleotide
  Sense strand starting at position 2086 of SEQ ID NO: 587891
uaaccauuccaguggcaga

SEQ ID NO: 826173 - RNA, 19 nt, Artificial Sequence
  Description of Artificial Sequence: Synthetic oligonucleotide
  Antisense strand to SEQ ID NO: 826172
ucugccacuggaaugguua

SEQ ID NO: 826174 - RNA, 19 nt, Artificial Sequence
  Description of Artificial Sequence: Synthetic oligonucleotide
  Sense strand starting at position 2748 of SEQ ID NO: 587891
cugcgauggagucaaagaa

SEQ ID NO: 826175 - RNA, 19 nt, Artificial Sequence
  Description of Artificial Sequence: Synthetic oligonucleotide
  Antisense strand to SEQ ID NO: 826174
uucuuugacuccaucgcag

SEQ ID NO: 826176 - RNA, 19 nt, Artificial Sequence
  Description of Artificial Sequence: Synthetic oligonucleotide
  Sense strand starting at position 2874 of SEQ ID NO: 587891
ccgagcuugggucaggaua

SEQ ID NO: 826177 - RNA, 19 nt, Artificial Sequence
  Description of Artificial Sequence: Synthetic oligonucleotide
  Antisense strand to SEQ ID NO: 826176
uauccugacccaagcucgg

SEQ ID NO: 826178 - RNA, 19 nt, Artificial Sequence
  Description of Artificial Sequence: Synthetic oligonucleotide
  Sense strand starting at position 2876 of SEQ ID NO: 587891
gagcuugggucaggauaag

SEQ ID NO: 826179 - RNA, 19 nt, Artificial Sequence
  Description of Artificial Sequence: Synthetic oligonucleotide
  Antisense strand to SEQ ID NO: 826178
cuuauccugacccaagcuc

SEQ ID NO: 826180 - RNA, 19 nt, Artificial Sequence
  Description of Artificial Sequence: Synthetic oligonucleotide
  Sense strand starting at position 3111 of SEQ ID NO: 587891
cagccugacccugagcauu

SEQ ID NO: 826181 - RNA, 19 nt, Artificial Sequence
  Description of Artificial Sequence: Synthetic oligonucleotide
  Antisense strand to SEQ ID NO: 826180
aaugcucagggucaggcug

SEQ ID NO: 826182 - RNA, 19 nt, Artificial Sequence
  Description of Artificial Sequence: Synthetic oligonucleotide
  Sense strand starting at position 3171 of SEQ ID NO: 587891
aggacucugucccgccaua

SEQ ID NO: 826183 - RNA, 19 nt, Artificial Sequence
  Description of Artificial Sequence: Synthetic oligonucleotide
  Antisense strand to SEQ ID NO: 826182
uauggcgggacagaguccu

SEQ ID NO: 826184 - RNA, 19 nt, Artificial Sequence
  Description of Artificial Sequence: Synthetic oligonucleotide
  Sense strand starting at position 3543 of SEQ ID NO: 587891
acuuuagcuucugggcaaa

SEQ ID NO: 826185 - RNA, 19 nt, Artificial Sequence
  Description of Artificial Sequence: Synthetic oligonucleotide
  Antisense strand to SEQ ID NO: 826184
uuugcccagaagcuaaagu

SEQ ID NO: 826186 - RNA, 19 nt, Artificial Sequence
  Description of Artificial Sequence: Synthetic oligonucleotide
  Sense strand starting at position 3788 of SEQ ID NO: 587891
ggcccacucugucauccaa

SEQ ID NO: 826187 - RNA, 19 nt, Artificial Sequence
  Description of Artificial Sequence: Synthetic oligonucleotide
  Antisense strand to SEQ ID NO: 826186
uuggaugacagagugggcc

SEQ ID NO: 826188 - RNA, 19 nt, Artificial Sequence
  Description of Artificial Sequence: Synthetic oligonucleotide
  Sense strand starting at position 161 of SEQ ID NO: 587892
aagugaauuccaggcugca

SEQ ID NO: 826189 - RNA, 19 nt, Artificial Sequence
  Description of Artificial Sequence: Synthetic oligonucleotide
  Antisense strand to SEQ ID NO: 826188
ugcagccuggaauucacuu

SEQ ID NO: 826190 - RNA, 19 nt, Artificial Sequence
  Description of Artificial Sequence: Synthetic oligonucleotide
  Sense strand starting at position 311 of SEQ ID NO: 587892
gggacagcuuccuuuguuu

SEQ ID NO: 826191 - RNA, 19 nt, Artificial Sequence
  Description of Artificial Sequence: Synthetic oligonucleotide
  Antisense strand to SEQ ID NO: 826190
aaacaaaggaagcuguccc

SEQ ID NO: 826192 - RNA, 19 nt, Artificial Sequence
  Description of Artificial Sequence: Synthetic oligonucleotide
  Sense strand starting at position 708 of SEQ ID NO: 587892
gugugauaaacugggacuu

SEQ ID NO: 826193 - RNA, 19 nt, Artificial Sequence
  Description of Artificial Sequence: Synthetic oligonucleotide
  Antisense strand to SEQ ID NO: 826192
aagucccaguuuaucacac

SEQ ID NO: 826194 - RNA, 19 nt, Artificial Sequence
  Description of Artificial Sequence: Synthetic oligonucleotide
  Sense strand starting at position 709 of SEQ ID NO: 587892
ugugauaaacugggacuuu

SEQ ID NO: 826195 - RNA, 19 nt, Artificial Sequence
  Description of Artificial Sequence: Synthetic oligonucleotide
  Antisense strand to SEQ ID NO: 826194
aaagucccaguuuaucaca

SEQ ID NO: 826196 - RNA, 19 nt, Artificial Sequence
  Description of Artificial Sequence: Synthetic oligonucleotide
  Sense strand starting at position 768 of SEQ ID NO: 587892
gugggaaagucgccuauaa

SEQ ID NO: 826197 - RNA, 19 nt, Artificial Sequence
  Description of Artificial Sequence: Synthetic oligonucleotide
  Antisense strand to SEQ ID NO: 826196
uuauaggcgacuuucccac

SEQ ID NO: 826198 - RNA, 19 nt, Artificial Sequence
  Description of Artificial Sequence: Synthetic oligonucleotide
  Sense strand starting at position 770 of SEQ ID NO: 587892
gggaaagucgccuauaaau

SEQ ID NO: 826199 - RNA, 19 nt, Artificial Sequence
  Description of Artificial Sequence: Synthetic oligonucleotide
  Antisense strand to SEQ ID NO: 826198
auuuauaggcgacuuuccc

SEQ ID NO: 826200 - RNA, 19 nt, Artificial Sequence
  Description of Artificial Sequence: Synthetic oligonucleotide
  Sense strand starting at position 772 of SEQ ID NO: 587892
gaaagucgccuauaaaugu

SEQ ID NO: 826201 - RNA, 19 nt, Artificial Sequence
  Description of Artificial Sequence: Synthetic oligonucleotide
  Antisense strand to SEQ ID NO: 826200
acauuuauaggcgacuuuc

SEQ ID NO: 826202 - RNA, 19 nt, Artificial Sequence
  Description of Artificial Sequence: Synthetic oligonucleotide
  Sense strand starting at position 897 of SEQ ID NO: 587892
ggcgaaacucgugagcaca

SEQ ID NO: 826203 - RNA, 19 nt, Artificial Sequence
  Description of Artificial Sequence: Synthetic oligonucleotide
  Antisense strand to SEQ ID NO: 826202
ugugcucacgaguuucgcc

SEQ ID NO: 826204 - RNA, 19 nt, Artificial Sequence
  Description of Artificial Sequence: Synthetic oligonucleotide
  Sense strand starting at position 913 of SEQ ID NO: 587892
acaaguccugcgugggaaa

SEQ ID NO: 826205 - RNA, 19 nt, Artificial Sequence
  Description of Artificial Sequence: Synthetic oligonucleotide
  Antisense strand to SEQ ID NO: 826204
uuucccacgcaggacuugu

SEQ ID NO: 826206 - RNA, 19 nt, Artificial Sequence
  Description of Artificial Sequence: Synthetic oligonucleotide
  Sense strand starting at position 924 of SEQ ID NO: 587892
gugggaaaggcuuagcauc

SEQ ID NO: 826207 - RNA, 19 nt, Artificial Sequence
  Description of Artificial Sequence: Synthetic oligonucleotide
  Antisense strand to SEQ ID NO: 826206
gaugcuaagccuuucccac

SEQ ID NO: 826208 - RNA, 19 nt, Artificial Sequence
  Description of Artificial Sequence: Synthetic oligonucleotide
  Sense strand starting at position 944 of SEQ ID NO: 587892
uugagugaccucugaugaa

SEQ ID NO: 826209 - RNA, 19 nt, Artificial Sequence
  Description of Artificial Sequence: Synthetic oligonucleotide
  Antisense strand to SEQ ID NO: 826208
uucaucagaggucacucaa

SEQ ID NO: 826210 - RNA, 19 nt, Artificial Sequence
  Description of Artificial Sequence: Synthetic oligonucleotide
  Sense strand starting at position 1266 of SEQ ID NO: 587892
ccuugaguguucucacaug

SEQ ID NO: 826211 - RNA, 19 nt, Artificial Sequence
  Description of Artificial Sequence: Synthetic oligonucleotide
  Antisense strand to SEQ ID NO: 826210
caugugagaacacucaagg

SEQ ID NO: 826212 - RNA, 19 nt, Artificial Sequence
  Description of Artificial Sequence: Synthetic oligonucleotide
  Sense strand starting at position 1546 of SEQ ID NO: 587892
caagcuuuagauggaguga

SEQ ID NO: 826213 - RNA, 19 nt, Artificial Sequence
  Description of Artificial Sequence: Synthetic oligonucleotide
  Antisense strand to SEQ ID NO: 826212
ucacuccaucuaaagcuug

SEQ ID NO: 826214 - RNA, 19 nt, Artificial Sequence
  Description of Artificial Sequence: Synthetic oligonucleotide
  Sense strand starting at position 1584 of SEQ ID NO: 587892
uuugaaauugagcauucua

SEQ ID NO: 826215 - RNA, 19 nt, Artificial Sequence
  Description of Artificial Sequence: Synthetic oligonucleotide
  Antisense strand to SEQ ID NO: 826214
uagaaugcucaauuucaaa

SEQ ID NO: 826216 - RNA, 19 nt, Artificial Sequence
  Description of Artificial Sequence: Synthetic oligonucleotide
  Sense strand starting at position 2046 of SEQ ID NO: 587892
gcaaacaucuuugugauga

SEQ ID NO: 826217 - RNA, 19 nt, Artificial Sequence
  Description of Artificial Sequence: Synthetic oligonucleotide
  Antisense strand to SEQ ID NO: 826216
ucaucacaaagauguuugc

SEQ ID NO: 826218 - RNA, 19 nt, Artificial Sequence
  Description of Artificial Sequence: Synthetic oligonucleotide
  Sense strand starting at position 2077 of SEQ ID NO: 587892
aucguagcuguauaaacaa

SEQ ID NO: 826219 - RNA, 19 nt, Artificial Sequence
  Description of Artificial Sequence: Synthetic oligonucleotide
  Antisense strand to SEQ ID NO: 826218
uuguuuauacagcuacgau

SEQ ID NO: 826220 - RNA, 19 nt, Artificial Sequence
  Description of Artificial Sequence: Synthetic oligonucleotide
  Sense strand starting at position 2102 of SEQ ID NO: 587892
ggccuuuggccugagauuc

SEQ ID NO: 826221 - RNA, 19 nt, Artificial Sequence
  Description of Artificial Sequence: Synthetic oligonucleotide
  Antisense strand to SEQ ID NO: 826220
gaaucucaggccaaaggcc

SEQ ID NO: 826222 - RNA, 19 nt, Artificial Sequence
  Description of Artificial Sequence: Synthetic oligonucleotide
  Sense strand starting at position 2119 of SEQ ID NO: 587892
uccggaagcuuccugaaga

SEQ ID NO: 826223 - RNA, 19 nt, Artificial Sequence
  Description of Artificial Sequence: Synthetic oligonucleotide
  Antisense strand to SEQ ID NO: 826222
ucuucaggaagcuuccgga

SEQ ID NO: 826224 - RNA, 19 nt, Artificial Sequence
  Description of Artificial Sequence: Synthetic oligonucleotide
  Sense strand starting at position 3125 of SEQ ID NO: 587892
gggugaugagccugacuuc

SEQ ID NO: 826225 - RNA, 19 nt, Artificial Sequence
  Description of Artificial Sequence: Synthetic oligonucleotide
  Antisense strand to SEQ ID NO: 826224
gaagucaggcucaucaccc

SEQ ID NO: 826226 - RNA, 19 nt, Artificial Sequence
  Description of Artificial Sequence: Synthetic oligonucleotide
  Sense strand starting at position 3206 of SEQ ID NO: 587892
cagaaaugcucggcucuga

SEQ ID NO: 826227 - RNA, 19 nt, Artificial Sequence
  Description of Artificial Sequence: Synthetic oligonucleotide
  Antisense strand to SEQ ID NO: 826226
ucagagccgagcauuucug

SEQ ID NO: 826228 - RNA, 19 nt, Artificial Sequence
  Description of Artificial Sequence: Synthetic oligonucleotide
  Sense strand starting at position 3308 of SEQ ID NO: 587892
cugggaaaggugggcauua

SEQ ID NO: 826229 - RNA, 19 nt, Artificial Sequence
  Description of Artificial Sequence: Synthetic oligonucleotide
  Antisense strand to SEQ ID NO: 826228
uaaugcccaccuuucccag

SEQ ID NO: 826230 - RNA, 19 nt, Artificial Sequence
  Description of Artificial Sequence: Synthetic oligonucleotide
  Sense strand starting at position 3309 of SEQ ID NO: 587892
ugggaaaggugggcauuau

SEQ ID NO: 826231 - RNA, 19 nt, Artificial Sequence
  Description of Artificial Sequence: Synthetic oligonucleotide
  Antisense strand to SEQ ID NO: 826230
auaaugcccaccuuuccca

SEQ ID NO: 826232 - RNA, 19 nt, Artificial Sequence
  Description of Artificial Sequence: Synthetic oligonucleotide
  Sense strand starting at position 3317 of SEQ ID NO: 587892
gugggcauuauggagauua

SEQ ID NO: 826233 - RNA, 19 nt, Artificial Sequence
  Description of Artificial Sequence: Synthetic oligonucleotide
  Antisense strand to SEQ ID NO: 826232
uaaucuccauaaugcccac

SEQ ID NO: 826234 - RNA, 19 nt, Artificial Sequence
  Description of Artificial Sequence: Synthetic oligonucleotide
  Sense strand starting at position 3396 of SEQ ID NO: 587892
ggccguggugcucugauga

SEQ ID NO: 826235 - RNA, 19 nt, Artificial Sequence
  Description of Artificial Sequence: Synthetic oligonucleotide
  Antisense strand to SEQ ID NO: 826234
ucaucagagcaccacggcc

SEQ ID NO: 826236 - RNA, 19 nt, Artificial Sequence
  Description of Artificial Sequence: Synthetic oligonucleotide
  Sense strand starting at position 3460 of SEQ ID NO: 587892
gcaccauuacacgaugaua

SEQ ID NO: 826237 - RNA, 19 nt, Artificial Sequence
  Description of Artificial Sequence: Synthetic oligonucleotide
  Antisense strand to SEQ ID NO: 826236
uaucaucguguaauggugc

SEQ ID NO: 826238 - RNA, 19 nt, Artificial Sequence
  Description of Artificial Sequence: Synthetic oligonucleotide
  Sense strand starting at position 3465 of SEQ ID NO: 587892
auuacacgaugauaagaaa

SEQ ID NO: 826239 - RNA, 19 nt, Artificial Sequence
  Description of Artificial Sequence: Synthetic oligonucleotide
  Antisense strand to SEQ ID NO: 826238
uuucuuaucaucguguaau

SEQ ID NO: 826240 - RNA, 19 nt, Artificial Sequence
  Description of Artificial Sequence: Synthetic oligonucleotide
  Sense strand starting at position 3476 of SEQ ID NO: 587892
auaagaaaguucucugcaa

SEQ ID NO: 826241 - RNA, 19 nt, Artificial Sequence
  Description of Artificial Sequence: Synthetic oligonucleotide
  Antisense strand to SEQ ID NO: 826240
uugcagagaacuuucuuau

SEQ ID NO: 826242 - RNA, 19 nt, Artificial Sequence
  Description of Artificial Sequence: Synthetic oligonucleotide
  Sense strand starting at position 3478 of SEQ ID NO: 587892
aagaaaguucucugcaagu

SEQ ID NO: 826243 - RNA, 19 nt, Artificial Sequence
  Description of Artificial Sequence: Synthetic oligonucleotide
  Antisense strand to SEQ ID NO: 826242
acuugcagagaacuuucuu

SEQ ID NO: 826244 - RNA, 19 nt, Artificial Sequence
  Description of Artificial Sequence: Synthetic oligonucleotide
  Sense strand starting at position 3480 of SEQ ID NO: 587892
gaaaguucucugcaagucu

SEQ ID NO: 826245 - RNA, 19 nt, Artificial Sequence
  Description of Artificial Sequence: Synthetic oligonucleotide
  Antisense strand to SEQ ID NO: 826244
agacuugcagagaacuuuc

SEQ ID NO: 826246 - RNA, 19 nt, Artificial Sequence
  Description of Artificial Sequence: Synthetic oligonucleotide
  Sense strand starting at position 3497 of SEQ ID NO: 587892
cuacuuacucucgguaaau

SEQ ID NO: 826247 - RNA, 19 nt, Artificial Sequence
  Description of Artificial Sequence: Synthetic oligonucleotide
  Antisense strand to SEQ ID NO: 826246
auuuaccgagaguaaguag

SEQ ID NO: 826248 - RNA, 19 nt, Artificial Sequence
  Description of Artificial Sequence: Synthetic oligonucleotide
  Sense strand starting at position 3498 of SEQ ID NO: 587892
uacuuacucucgguaaaug

SEQ ID NO: 826249 - RNA, 19 nt, Artificial Sequence
  Description of Artificial Sequence: Synthetic oligonucleotide
  Antisense strand to SEQ ID NO: 826248
cauuuaccgagaguaagua

SEQ ID NO: 826250 - RNA, 19 nt, Artificial Sequence
  Description of Artificial Sequence: Synthetic oligonucleotide
  Sense strand starting at position 3499 of SEQ ID NO: 587892
acuuacucucgguaaauga

SEQ ID NO: 826251 - RNA, 19 nt, Artificial Sequence
  Description of Artificial Sequence: Synthetic oligonucleotide
  Antisense strand to SEQ ID NO: 826250
ucauuuaccgagaguaagu

SEQ ID NO: 826252 - RNA, 19 nt, Artificial Sequence
  Description of Artificial Sequence: Synthetic oligonucleotide
  Sense strand starting at position 3508 of SEQ ID NO: 587892
cgguaaaugaauuacaugu

SEQ ID NO: 826253 - RNA, 19 nt, Artificial Sequence
  Description of Artificial Sequence: Synthetic oligonucleotide
  Antisense strand to SEQ ID NO: 826252
acauguaauucauuuaccg

SEQ ID NO: 826254 - RNA, 19 nt, Artificial Sequence
  Description of Artificial Sequence: Synthetic oligonucleotide
  Sense strand starting at position 3583 of SEQ ID NO: 587892
ggaaguagguuucccagaa

SEQ ID NO: 826255 - RNA, 19 nt, Artificial Sequence
  Description of Artificial Sequence: Synthetic oligonucleotide
  Antisense strand to SEQ ID NO: 826254
uucugggaaaccuacuucc

SEQ ID NO: 826256 - RNA, 19 nt, Artificial Sequence
  Description of Artificial Sequence: Synthetic oligonucleotide
  Sense strand starting at position 3584 of SEQ ID NO: 587892
gaaguagguuucccagaag

SEQ ID NO: 826257 - RNA, 19 nt, Artificial Sequence
  Description of Artificial Sequence: Synthetic oligonucleotide
  Antisense strand to SEQ ID NO: 826256
cuucugggaaaccuacuuc

SEQ ID NO: 826258 - RNA, 19 nt, Artificial Sequence
  Description of Artificial Sequence: Synthetic oligonucleotide
  Sense strand starting at position 3587 of SEQ ID NO: 587892
guagguuucccagaagcug

SEQ ID NO: 826259 - RNA, 19 nt, Artificial Sequence
  Description of Artificial Sequence: Synthetic oligonucleotide
  Antisense strand to SEQ ID NO: 826258
cagcuucugggaaaccuac

SEQ ID NO: 826260 - RNA, 19 nt, Artificial Sequence
  Description of Artificial Sequence: Synthetic oligonucleotide
  Sense strand starting at position 3675 of SEQ ID NO: 587892
ccuggaggucuuuaaaguu

SEQ ID NO: 826261 - RNA, 19 nt, Artificial Sequence
  Description of Artificial Sequence: Synthetic oligonucleotide
  Antisense strand to SEQ ID NO: 826260
aacuuuaaagaccuccagg

SEQ ID NO: 826262 - RNA, 19 nt, Artificial Sequence
  Description of Artificial Sequence: Synthetic oligonucleotide
  Sense strand starting at position 3681 of SEQ ID NO: 587892
ggucuuuaaaguuaaaggu

SEQ ID NO: 826263 - RNA, 19 nt, Artificial Sequence
  Description of Artificial Sequence: Synthetic oligonucleotide
  Antisense strand to SEQ ID NO: 826262
accuuuaacuuuaaagacc

SEQ ID NO: 826264 - RNA, 19 nt, Artificial Sequence
  Description of Artificial Sequence: Synthetic oligonucleotide
  Sense strand starting at position 3858 of SEQ ID NO: 587892
acaggacaguccuuguauu

SEQ ID NO: 826265 - RNA, 19 nt, Artificial Sequence
  Description of Artificial Sequence: Synthetic oligonucleotide
  Antisense strand to SEQ ID NO: 826264
aauacaaggacuguccugu

SEQ ID NO: 826266 - RNA, 19 nt, Artificial Sequence
  Description of Artificial Sequence: Synthetic oligonucleotide
  Sense strand starting at position 3865 of SEQ ID NO: 587892
aguccuuguauuggagaca

SEQ ID NO: 826267 - RNA, 19 nt, Artificial Sequence
  Description of Artificial Sequence: Synthetic oligonucleotide
  Antisense strand to SEQ ID NO: 826266
ugucuccaauacaaggacu

SEQ ID NO: 826268 - RNA, 19 nt, Artificial Sequence
  Description of Artificial Sequence: Synthetic oligonucleotide
  Sense strand starting at position 366 of SEQ ID NO: 587893
ccaccugugcgucugugaa

SEQ ID NO: 826269 - RNA, 19 nt, Artificial Sequence
  Description of Artificial Sequence: Synthetic oligonucleotide
  Antisense strand to SEQ ID NO: 826268
uucacagacgcacaggugg

SEQ ID NO: 826270 - RNA, 19 nt, Artificial Sequence
  Description of Artificial Sequence: Synthetic oligonucleotide
  Sense strand starting at position 401 of SEQ ID NO: 587893
cccaccugugucugugaau

SEQ ID NO: 826271 - RNA, 19 nt, Artificial Sequence
  Description of Artificial Sequence: Synthetic oligonucleotide
  Antisense strand to SEQ ID NO: 826270
auucacagacacagguggg

SEQ ID NO: 826272 - RNA, 19 nt, Artificial Sequence
  Description of Artificial Sequence: Synthetic oligonucleotide
  Sense strand starting at position 402 of SEQ ID NO: 587893
ccaccugugucugugaauu

SEQ ID NO: 826273 - RNA, 19 nt, Artificial Sequence
  Description of Artificial Sequence: Synthetic oligonucleotide
  Antisense strand to SEQ ID NO: 826272
aauucacagacacaggugg

SEQ ID NO: 826274 - RNA, 19 nt, Artificial Sequence
  Description of Artificial Sequence: Synthetic oligonucleotide
  Sense strand starting at position 522 of SEQ ID NO: 587893
gucuaugaauuuccguguu

SEQ ID NO: 826275 - RNA, 19 nt, Artificial Sequence
  Description of Artificial Sequence: Synthetic oligonucleotide
  Antisense strand to SEQ ID NO: 826274
aacacggaaauucauagac

SEQ ID NO: 826276 - RNA, 19 nt, Artificial Sequence
  Description of Artificial Sequence: Synthetic oligonucleotide
  Sense strand starting at position 630 of SEQ ID NO: 587893
gucugugaauuuccguguu

SEQ ID NO: 826277 - RNA, 19 nt, Artificial Sequence
  Description of Artificial Sequence: Synthetic oligonucleotide
  Antisense strand to SEQ ID NO: 826276
aacacggaaauucacagac

SEQ ID NO: 826278 - RNA, 19 nt, Artificial Sequence
  Description of Artificial Sequence: Synthetic oligonucleotide
  Sense strand starting at position 668 of SEQ ID NO: 587893
gucugugaauuucuguguu

SEQ ID NO: 826279 - RNA, 19 nt, Artificial Sequence
  Description of Artificial Sequence: Synthetic oligonucleotide
  Antisense strand to SEQ ID NO: 826278
aacacagaaauucacagac

SEQ ID NO: 826280 - RNA, 19 nt, Artificial Sequence
  Description of Artificial Sequence: Synthetic oligonucleotide
  Sense strand starting at position 694 of SEQ ID NO: 587893
ccaccugugcgucugugau

SEQ ID NO: 826281 - RNA, 19 nt, Artificial Sequence
  Description of Artificial Sequence: Synthetic oligonucleotide
  Antisense strand to SEQ ID NO: 826280
aucacagacgcacaggugg

SEQ ID NO: 826282 - RNA, 19 nt, Artificial Sequence
  Description of Artificial Sequence: Synthetic oligonucleotide
  Sense strand starting at position 696 of SEQ ID NO: 587893
accugugcgucugugauuu

SEQ ID NO: 826283 - RNA, 19 nt, Artificial Sequence
  Description of Artificial Sequence: Synthetic oligonucleotide
  Antisense strand to SEQ ID NO: 826282
aaaucacagacgcacaggu

SEQ ID NO: 826284 - RNA, 19 nt, Artificial Sequence
  Description of Artificial Sequence: Synthetic oligonucleotide
  Sense strand starting at position 734 of SEQ ID NO: 587893
cugugcgugccugugaauu

SEQ ID NO: 826285 - RNA, 19 nt, Artificial Sequence
  Description of Artificial Sequence: Synthetic oligonucleotide
  Antisense strand to SEQ ID NO: 826284
aauucacaggcacgcacag

SEQ ID NO: 826286 - RNA, 19 nt, Artificial Sequence
  Description of Artificial Sequence: Synthetic oligonucleotide
  Sense strand starting at position 761 of SEQ ID NO: 587893
uuuggaaaugccugucucu

SEQ ID NO: 826287 - RNA, 19 nt, Artificial Sequence
  Description of Artificial Sequence: Synthetic oligonucleotide
  Antisense strand to SEQ ID NO: 826286
agagacaggcauuuccaaa

SEQ ID NO: 826288 - RNA, 19 nt, Artificial Sequence
  Description of Artificial Sequence: Synthetic oligonucleotide
  Sense strand starting at position 965 of SEQ ID NO: 587893
cgaauucgccugcaugaca

SEQ ID NO: 826289 - RNA, 19 nt, Artificial Sequence
  Description of Artificial Sequence: Synthetic oligonucleotide
  Antisense strand to SEQ ID NO: 826288
ugucaugcaggcgaauucg

SEQ ID NO: 826290 - RNA, 19 nt, Artificial Sequence
  Description of Artificial Sequence: Synthetic oligonucleotide
  Sense strand starting at position 1082 of SEQ ID NO: 587893
aguacuuaucagugccaau

SEQ ID NO: 826291 - RNA, 19 nt, Artificial Sequence
  Description of Artificial Sequence: Synthetic oligonucleotide
  Antisense strand to SEQ ID NO: 826290
auuggcacugauaaguacu

SEQ ID NO: 826292 - RNA, 19 nt, Artificial Sequence
  Description of Artificial Sequence: Synthetic oligonucleotide
  Sense strand starting at position 1369 of SEQ ID NO: 587893
acaguauuggugugaccag

SEQ ID NO: 826293 - RNA, 19 nt, Artificial Sequence
  Description of Artificial Sequence: Synthetic oligonucleotide
  Antisense strand to SEQ ID NO: 826292
cuggucacaccaauacugu

SEQ ID NO: 826294 - RNA, 19 nt, Artificial Sequence
  Description of Artificial Sequence: Synthetic oligonucleotide
  Sense strand starting at position 1392 of SEQ ID NO: 587893
guuuccauggcguaacaga

SEQ ID NO: 826295 - RNA, 19 nt, Artificial Sequence
  Description of Artificial Sequence: Synthetic oligonucleotide
  Antisense strand to SEQ ID NO: 826294
ucuguuacgccauggaaac

SEQ ID NO: 826296 - RNA, 19 nt, Artificial Sequence
  Description of Artificial Sequence: Synthetic oligonucleotide
  Sense strand starting at position 1744 of SEQ ID NO: 587893
acaaguggcuaucucacaa

SEQ ID NO: 826297 - RNA, 19 nt, Artificial Sequence
  Description of Artificial Sequence: Synthetic oligonucleotide
  Antisense strand to SEQ ID NO: 826296
uugugagauagccacuugu

SEQ ID NO: 826298 - RNA, 19 nt, Artificial Sequence
  Description of Artificial Sequence: Synthetic oligonucleotide
  Sense strand starting at position 1764 of SEQ ID NO: 587893
uucucacaacgguaugaga

SEQ ID NO: 826299 - RNA, 19 nt, Artificial Sequence
  Description of Artificial Sequence: Synthetic oligonucleotide
  Antisense strand to SEQ ID NO: 826298
ucucauaccguugugagaa

SEQ ID NO: 826300 - RNA, 19 nt, Artificial Sequence
  Description of Artificial Sequence: Synthetic oligonucleotide
  Sense strand starting at position 1773 of SEQ ID NO: 587893
cgguaugagacaugcagca

SEQ ID NO: 826301 - RNA, 19 nt, Artificial Sequence
  Description of Artificial Sequence: Synthetic oligonucleotide
  Antisense strand to SEQ ID NO: 826300
ugcugcaugucucauaccg

SEQ ID NO: 826302 - RNA, 19 nt, Artificial Sequence
  Description of Artificial Sequence: Synthetic oligonucleotide
  Sense strand starting at position 1832 of SEQ ID NO: 587893
gcugguuuacugugaauua

SEQ ID NO: 826303 - RNA, 19 nt, Artificial Sequence
  Description of Artificial Sequence: Synthetic oligonucleotide
  Antisense strand to SEQ ID NO: 826302
uaauucacaguaaaccagc

SEQ ID NO: 826304 - RNA, 19 nt, Artificial Sequence
  Description of Artificial Sequence: Synthetic oligonucleotide
  Sense strand starting at position 1982 of SEQ ID NO: 587893
caucgagugacuggaugau

SEQ ID NO: 826305 - RNA, 19 nt, Artificial Sequence
  Description of Artificial Sequence: Synthetic oligonucleotide
  Antisense strand to SEQ ID NO: 826304
aucauccagucacucgaug

SEQ ID NO: 826306 - RNA, 19 nt, Artificial Sequence
  Description of Artificial Sequence: Synthetic oligonucleotide
  Sense strand starting at position 1988 of SEQ ID NO: 587893
gugacuggaugaucugcaa

SEQ ID NO: 826307 - RNA, 19 nt, Artificial Sequence
  Description of Artificial Sequence: Synthetic oligonucleotide
  Antisense strand to SEQ ID NO: 826306
uugcagaucauccagucac

SEQ ID NO: 826308 - RNA, 19 nt, Artificial Sequence
  Description of Artificial Sequence: Synthetic oligonucleotide
  Sense strand starting at position 2284 of SEQ ID NO: 587893
cucuuuggccaguaacaau

SEQ ID NO: 826309 - RNA, 19 nt, Artificial Sequence
  Description of Artificial Sequence: Synthetic oligonucleotide
  Antisense strand to SEQ ID NO: 826308
auuguuacuggccaaagag

SEQ ID NO: 826310 - RNA, 19 nt, Artificial Sequence
  Description of Artificial Sequence: Synthetic oligonucleotide
  Sense strand starting at position 2325 of SEQ ID NO: 587893
gcacguaacuauuccagca

SEQ ID NO: 826311 - RNA, 19 nt, Artificial Sequence
  Description of Artificial Sequence: Synthetic oligonucleotide
  Antisense strand to SEQ ID NO: 826310
ugcuggaauaguuacgugc

SEQ ID NO: 826312 - RNA, 19 nt, Artificial Sequence
  Description of Artificial Sequence: Synthetic oligonucleotide
  Sense strand starting at position 2468 of SEQ ID NO: 587893
aguuuaauuuguuagugac

SEQ ID NO: 826313 - RNA, 19 nt, Artificial Sequence
  Description of Artificial Sequence: Synthetic oligonucleotide
  Antisense strand to SEQ ID NO: 826312
gucacuaacaaauuaaacu

SEQ ID NO: 826314 - RNA, 19 nt, Artificial Sequence
  Description of Artificial Sequence: Synthetic oligonucleotide
  Sense strand starting at position 2471 of SEQ ID NO: 587893
uuaauuuguuagugacaag

SEQ ID NO: 826315 - RNA, 19 nt, Artificial Sequence
  Description of Artificial Sequence: Synthetic oligonucleotide
  Antisense strand to SEQ ID NO: 826314
cuugucacuaacaaauuaa

SEQ ID NO: 826316 - RNA, 19 nt, Artificial Sequence
  Description of Artificial Sequence: Synthetic oligonucleotide
  Sense strand starting at position 2557 of SEQ ID NO: 587893
ggaaucaagugaucuccca

SEQ ID NO: 826317 - RNA, 19 nt, Artificial Sequence
  Description of Artificial Sequence: Synthetic oligonucleotide
  Antisense strand to SEQ ID NO: 826316
ugggagaucacuugauucc

SEQ ID NO: 826318 - RNA, 19 nt, Artificial Sequence
  Description of Artificial Sequence: Synthetic oligonucleotide
  Sense strand starting at position 3216 of SEQ ID NO: 587893
ccuggacuccugugguauu

SEQ ID NO: 826319 - RNA, 19 nt, Artificial Sequence
  Description of Artificial Sequence: Synthetic oligonucleotide
  Antisense strand to SEQ ID NO: 826318
aauaccacaggaguccagg

SEQ ID NO: 826320 - RNA, 19 nt, Artificial Sequence
  Description of Artificial Sequence: Synthetic oligonucleotide
  Sense strand starting at position 3229 of SEQ ID NO: 587893
gguauuggccuuuagguua

SEQ ID NO: 826321 - RNA, 19 nt, Artificial Sequence
  Description of Artificial Sequence: Synthetic oligonucleotide
  Antisense strand to SEQ ID NO: 826320
uaaccuaaaggccaauacc

SEQ ID NO: 826322 - RNA, 19 nt, Artificial Sequence
  Description of Artificial Sequence: Synthetic oligonucleotide
  Sense strand starting at position 3308 of SEQ ID NO: 587893
ugugccaaacucugacuau

SEQ ID NO: 826323 - RNA, 19 nt, Artificial Sequence
  Description of Artificial Sequence: Synthetic oligonucleotide
  Antisense strand to SEQ ID NO: 826322
auagucagaguuuggcaca

SEQ ID NO: 826324 - RNA, 19 nt, Artificial Sequence
  Description of Artificial Sequence: Synthetic oligonucleotide
  Sense strand starting at position 3311 of SEQ ID NO: 587893
gccaaacucugacuauagu

SEQ ID NO: 826325 - RNA, 19 nt, Artificial Sequence
  Description of Artificial Sequence: Synthetic oligonucleotide
  Antisense strand to SEQ ID NO: 826324
acuauagucagaguuuggc

SEQ ID NO: 826326 - RNA, 19 nt, Artificial Sequence
  Description of Artificial Sequence: Synthetic oligonucleotide
  Sense strand starting at position 3361 of SEQ ID NO: 587893
gcagcuuucccagggucua

SEQ ID NO: 826327 - RNA, 19 nt, Artificial Sequence
  Description of Artificial Sequence: Synthetic oligonucleotide
  Antisense strand to SEQ ID NO: 826326
uagacccugggaaagcugc

SEQ ID NO: 826328 - RNA, 19 nt, Artificial Sequence
  Description of Artificial Sequence: Synthetic oligonucleotide
  Sense strand starting at position 3416 of SEQ ID NO: 587893
cccugccuccagugacaaa

SEQ ID NO: 826329 - RNA, 19 nt, Artificial Sequence
  Description of Artificial Sequence: Synthetic oligonucleotide
  Antisense strand to SEQ ID NO: 826328
uuugucacuggaggcaggg

SEQ ID NO: 826330 - RNA, 19 nt, Artificial Sequence
  Description of Artificial Sequence: Synthetic oligonucleotide
  Sense strand starting at position 3485 of SEQ ID NO: 587893
gcaauaagcuaacuggaaa

SEQ ID NO: 826331 - RNA, 19 nt, Artificial Sequence
  Description of Artificial Sequence: Synthetic oligonucleotide
  Antisense strand to SEQ ID NO: 826330
uuuccaguuagcuuauugc

SEQ ID NO: 826332 - RNA, 19 nt, Artificial Sequence
  Description of Artificial Sequence: Synthetic oligonucleotide
  Sense strand starting at position 3534 of SEQ ID NO: 587893
gucaaucucuccucaggua

SEQ ID NO: 826333 - RNA, 19 nt, Artificial Sequence
  Description of Artificial Sequence: Synthetic oligonucleotide
  Antisense strand to SEQ ID NO: 826332
uaccugaggagagauugac

SEQ ID NO: 826334 - RNA, 19 nt, Artificial Sequence
  Description of Artificial Sequence: Synthetic oligonucleotide
  Sense strand starting at position 3596 of SEQ ID NO: 587893
ggaguuaggucuccagaca

SEQ ID NO: 826335 - RNA, 19 nt, Artificial Sequence
  Description of Artificial Sequence: Synthetic oligonucleotide
  Antisense strand to SEQ ID NO: 826334
ugucuggagaccuaacucc

SEQ ID NO: 826336 - RNA, 19 nt, Artificial Sequence
  Description of Artificial Sequence: Synthetic oligonucleotide
  Sense strand starting at position 3597 of SEQ ID NO: 587893
gaguuaggucuccagacau

SEQ ID NO: 826337 - RNA, 19 nt, Artificial Sequence
  Description of Artificial Sequence: Synthetic oligonucleotide
  Antisense strand to SEQ ID NO: 826336
augucuggagaccuaacuc

SEQ ID NO: 826338 - RNA, 19 nt, Artificial Sequence
  Description of Artificial Sequence: Synthetic oligonucleotide
  Sense strand starting at position 3678 of SEQ ID NO: 587893
uauauuaagguaggucuau

SEQ ID NO: 826339 - RNA, 19 nt, Artificial Sequence
  Description of Artificial Sequence: Synthetic oligonucleotide
  Antisense strand to SEQ ID NO: 826338
auagaccuaccuuaauaua

SEQ ID NO: 826340 - RNA, 19 nt, Artificial Sequence
  Description of Artificial Sequence: Synthetic oligonucleotide
  Sense strand starting at position 3687 of SEQ ID NO: 587893
guaggucuaugggccaaua

SEQ ID NO: 826341 - RNA, 19 nt, Artificial Sequence
  Description of Artificial Sequence: Synthetic oligonucleotide
  Antisense strand to SEQ ID NO: 826340
uauuggcccauagaccuac

SEQ ID NO: 826342 - RNA, 19 nt, Artificial Sequence
  Description of Artificial Sequence: Synthetic oligonucleotide
  Sense strand starting at position 3699 of SEQ ID NO: 587893
gccaauaccuuacugagaa

SEQ ID NO: 826343 - RNA, 19 nt, Artificial Sequence
  Description of Artificial Sequence: Synthetic oligonucleotide
  Antisense strand to SEQ ID NO: 826342
uucucaguaagguauuggc

SEQ ID NO: 826344 - RNA, 19 nt, Artificial Sequence
  Description of Artificial Sequence: Synthetic oligonucleotide
  Sense strand starting at position 3768 of SEQ ID NO: 587893
aaccaaagguggucuuaau

SEQ ID NO: 826345 - RNA, 19 nt, Artificial Sequence
  Description of Artificial Sequence: Synthetic oligonucleotide
  Antisense strand to SEQ ID NO: 826344
auuaagaccaccuuugguu

SEQ ID NO: 826346 - RNA, 19 nt, Artificial Sequence
  Description of Artificial Sequence: Synthetic oligonucleotide
  Sense strand starting at position 3907 of SEQ ID NO: 587893
gggagaagacuccgcugua

SEQ ID NO: 826347 - RNA, 19 nt, Artificial Sequence
  Description of Artificial Sequence: Synthetic oligonucleotide
  Antisense strand to SEQ ID NO: 826346
uacagcggagucuucuccc

SEQ ID NO: 826348 - RNA, 19 nt, Artificial Sequence
  Description of Artificial Sequence: Synthetic oligonucleotide
  Sense strand starting at position 5 of SEQ ID NO: 587894
agcagaaugucagggcuga

SEQ ID NO: 826349 - RNA, 19 nt, Artificial Sequence
  Description of Artificial Sequence: Synthetic oligonucleotide
  Antisense strand to SEQ ID NO: 826348
ucagcccugacauucugcu

SEQ ID NO: 826350 - RNA, 19 nt, Artificial Sequence
  Description of Artificial Sequence: Synthetic oligonucleotide
  Sense strand starting at position 988 of SEQ ID NO: 587894
ggucaugaugcccaaggga

SEQ ID NO: 826351 - RNA, 19 nt, Artificial Sequence
  Description of Artificial Sequence: Synthetic oligonucleotide
  Antisense strand to SEQ ID NO: 826350
ucccuugggcaucaugacc

SEQ ID NO: 826352 - RNA, 19 nt, Artificial Sequence
  Description of Artificial Sequence: Synthetic oligonucleotide
  Sense strand starting at position 1389 of SEQ ID NO: 587894
cuucuucuagcuugaaaga

SEQ ID NO: 826353 - RNA, 19 nt, Artificial Sequence
  Description of Artificial Sequence: Synthetic oligonucleotide
  Antisense strand to SEQ ID NO: 826352
ucuuucaagcuagaagaag

SEQ ID NO: 826354 - RNA, 19 nt, Artificial Sequence
  Description of Artificial Sequence: Synthetic oligonucleotide
  Sense strand starting at position 1390 of SEQ ID NO: 587894
uucuucuagcuugaaagaa

SEQ ID NO: 826355 - RNA, 19 nt, Artificial Sequence
  Description of Artificial Sequence: Synthetic oligonucleotide
  Antisense strand to SEQ ID NO: 826354
uucuuucaagcuagaagaa

SEQ ID NO: 826356 - RNA, 19 nt, Artificial Sequence
  Description of Artificial Sequence: Synthetic oligonucleotide
  Sense strand starting at position 2472 of SEQ ID NO: 587894
accgcauucccuuggaaau

SEQ ID NO: 826357 - RNA, 19 nt, Artificial Sequence
  Description of Artificial Sequence: Synthetic oligonucleotide
  Antisense strand to SEQ ID NO: 826356
auuuccaagggaaugcggu

SEQ ID NO: 826358 - RNA, 19 nt, Artificial Sequence
  Description of Artificial Sequence: Synthetic oligonucleotide
  Sense strand starting at position 2473 of SEQ ID NO: 587894
ccgcauucccuuggaaauc

SEQ ID NO: 826359 - RNA, 19 nt, Artificial Sequence
  Description of Artificial Sequence: Synthetic oligonucleotide
  Antisense strand to SEQ ID NO: 826358
gauuuccaagggaaugcgg

SEQ ID NO: 826360 - RNA, 19 nt, Artificial Sequence
  Description of Artificial Sequence: Synthetic oligonucleotide
  Sense strand starting at position 3028 of SEQ ID NO: 587894
gaaggacucgugugggaac

SEQ ID NO: 826361 - RNA, 19 nt, Artificial Sequence
  Description of Artificial Sequence: Synthetic oligonucleotide
  Antisense strand to SEQ ID NO: 826360
guucccacacgaguccuuc

SEQ ID NO: 826362 - RNA, 19 nt, Artificial Sequence
  Description of Artificial Sequence: Synthetic oligonucleotide
  Sense strand starting at position 3030 of SEQ ID NO: 587894
aggacucgugugggaacau

SEQ ID NO: 826363 - RNA, 19 nt, Artificial Sequence
  Description of Artificial Sequence: Synthetic oligonucleotide
  Antisense strand to SEQ ID NO: 826362
auguucccacacgaguccu

SEQ ID NO: 826364 - RNA, 19 nt, Artificial Sequence
  Description of Artificial Sequence: Synthetic oligonucleotide
  Sense strand starting at position 3031 of SEQ ID NO: 587894
ggacucgugugggaacauu

SEQ ID NO: 826365 - RNA, 19 nt, Artificial Sequence
  Description of Artificial Sequence: Synthetic oligonucleotide
  Antisense strand to SEQ ID NO: 826364
aauguucccacacgagucc

SEQ ID NO: 826366 - RNA, 19 nt, Artificial Sequence
  Description of Artificial Sequence: Synthetic oligonucleotide
  Sense strand starting at position 3165 of SEQ ID NO: 587894
gcacaucagcugugacacu

SEQ ID NO: 826367 - RNA, 19 nt, Artificial Sequence
  Description of Artificial Sequence: Synthetic oligonucleotide
  Antisense strand to SEQ ID NO: 826366
agugucacagcugaugugc

SEQ ID NO: 826368 - RNA, 19 nt, Artificial Sequence
  Description of Artificial Sequence: Synthetic oligonucleotide
  Sense strand starting at position 3683 of SEQ ID NO: 587894
uggugagcuucuuggagga

SEQ ID NO: 826369 - RNA, 19 nt, Artificial Sequence
  Description of Artificial Sequence: Synthetic oligonucleotide
  Antisense strand to SEQ ID NO: 826368
uccuccaagaagcucacca

SEQ ID NO: 826370 - RNA, 19 nt, Artificial Sequence
  Description of Artificial Sequence: Synthetic oligonucleotide
  Sense strand starting at position 3719 of SEQ ID NO: 587894
gcaaguuguggcugaccua

SEQ ID NO: 826371 - RNA, 19 nt, Artificial Sequence
  Description of Artificial Sequence: Synthetic oligonucleotide
  Antisense strand to SEQ ID NO: 826370
uaggucagccacaacuugc

SEQ ID NO: 826372 - RNA, 19 nt, Artificial Sequence
  Description of Artificial Sequence: Synthetic oligonucleotide
  Sense strand starting at position 3763 of SEQ ID NO: 587894
ggcgcacugcugguaaguu

SEQ ID NO: 826373 - RNA, 19 nt, Artificial Sequence
  Description of Artificial Sequence: Synthetic oligonucleotide
  Antisense strand to SEQ ID NO: 826372
aacuuaccagcagugcgcc

SEQ ID NO: 826374 - RNA, 19 nt, Artificial Sequence
  Description of Artificial Sequence: Synthetic oligonucleotide
  Sense strand starting at position 3908 of SEQ ID NO: 587894
accggcaucaaccguaaua

SEQ ID NO: 826375 - RNA, 19 nt, Artificial Sequence
  Description of Artificial Sequence: Synthetic oligonucleotide
  Antisense strand to SEQ ID NO: 826374
uauuacgguugaugccggu

SEQ ID NO: 826376 - RNA, 19 nt, Artificial Sequence
  Description of Artificial Sequence: Synthetic oligonucleotide
  Sense strand starting at position 3946 of SEQ ID NO: 587894
ugucgaggcucugcagaaa

SEQ ID NO: 826377 - RNA, 19 nt, Artificial Sequence
  Description of Artificial Sequence: Synthetic oligonucleotide
  Antisense strand to SEQ ID NO: 826376
uuucugcagagccucgaca

SEQ ID NO: 826378 - RNA, 19 nt, Artificial Sequence
  Description of Artificial Sequence: Synthetic oligonucleotide
  Sense strand starting at position 964 of SEQ ID NO: 587895
ggucaugaugcccaaggga

SEQ ID NO: 826379 - RNA, 19 nt, Artificial Sequence
  Description of Artificial Sequence: Synthetic oligonucleotide
  Antisense strand to SEQ ID NO: 826378
ucccuugggcaucaugacc

SEQ ID NO: 826380 - RNA, 19 nt, Artificial Sequence
  Description of Artificial Sequence: Synthetic oligonucleotide
  Sense strand starting at position 1365 of SEQ ID NO: 587895
cuucuucuagcuugaaaga

SEQ ID NO: 826381 - RNA, 19 nt, Artificial Sequence
  Description of Artificial Sequence: Synthetic oligonucleotide
  Antisense strand to SEQ ID NO: 826380
ucuuucaagcuagaagaag

SEQ ID NO: 826382 - RNA, 19 nt, Artificial Sequence
  Description of Artificial Sequence: Synthetic oligonucleotide
  Sense strand starting at position 1366 of SEQ ID NO: 587895
uucuucuagcuugaaagaa

SEQ ID NO: 826383 - RNA, 19 nt, Artificial Sequence
  Description of Artificial Sequence: Synthetic oligonucleotide
  Antisense strand to SEQ ID NO: 826382
uucuuucaagcuagaagaa

SEQ ID NO: 826384 - RNA, 19 nt, Artificial Sequence
  Description of Artificial Sequence: Synthetic oligonucleotide
  Sense strand starting at position 2448 of SEQ ID NO: 587895
accgcauucccuuggaaau

SEQ ID NO: 826385 - RNA, 19 nt, Artificial Sequence
  Description of Artificial Sequence: Synthetic oligonucleotide
  Antisense strand to SEQ ID NO: 826384
auuuccaagggaaugcggu

SEQ ID NO: 826386 - RNA, 19 nt, Artificial Sequence
  Description of Artificial Sequence: Synthetic oligonucleotide
  Sense strand starting at position 2449 of SEQ ID NO: 587895
ccgcauucccuuggaaauc

SEQ ID NO: 826387 - RNA, 19 nt, Artificial Sequence
  Description of Artificial Sequence: Synthetic oligonucleotide
  Antisense strand to SEQ ID NO: 826386
gauuuccaagggaaugcgg

SEQ ID NO: 826388 - RNA, 19 nt, Artificial Sequence
  Description of Artificial Sequence: Synthetic oligonucleotide
  Sense strand starting at position 3004 of SEQ ID NO: 587895
gaaggacucgugugggaac

SEQ ID NO: 826389 - RNA, 19 nt, Artificial Sequence
  Description of Artificial Sequence: Synthetic oligonucleotide
  Antisense strand to SEQ ID NO: 826388
guucccacacgaguccuuc

SEQ ID NO: 826390 - RNA, 19 nt, Artificial Sequence
  Description of Artificial Sequence: Synthetic oligonucleotide
  Sense strand starting at position 3006 of SEQ ID NO: 587895
aggacucgugugggaacau

SEQ ID NO: 826391 - RNA, 19 nt, Artificial Sequence
  Description of Artificial Sequence: Synthetic oligonucleotide
  Antisense strand to SEQ ID NO: 826390
auguucccacacgaguccu

SEQ ID NO: 826392 - RNA, 19 nt, Artificial Sequence
  Description of Artificial Sequence: Synthetic oligonucleotide
  Sense strand starting at position 3007 of SEQ ID NO: 587895
ggacucgugugggaacauu

SEQ ID NO: 826393 - RNA, 19 nt, Artificial Sequence
  Description of Artificial Sequence: Synthetic oligonucleotide
  Antisense strand to SEQ ID NO: 826392
aauguucccacacgagucc

SEQ ID NO: 826394 - RNA, 19 nt, Artificial Sequence
  Description of Artificial Sequence: Synthetic oligonucleotide
  Sense strand starting at position 3141 of SEQ ID NO: 587895
gcacaucagcugugacacu

SEQ ID NO: 826395 - RNA, 19 nt, Artificial Sequence
  Description of Artificial Sequence: Synthetic oligonucleotide
  Antisense strand to SEQ ID NO: 826394
agugucacagcugaugugc

SEQ ID NO: 826396 - RNA, 19 nt, Artificial Sequence
  Description of Artificial Sequence: Synthetic oligonucleotide
  Sense strand starting at position 3659 of SEQ ID NO: 587895
uggugagcuucuuggagga

SEQ ID NO: 826397 - RNA, 19 nt, Artificial Sequence
  Description of Artificial Sequence: Synthetic oligonucleotide
  Antisense strand to SEQ ID NO: 826396
uccuccaagaagcucacca

SEQ ID NO: 826398 - RNA, 19 nt, Artificial Sequence
  Description of Artificial Sequence: Synthetic oligonucleotide
  Sense strand starting at position 3695 of SEQ ID NO: 587895
gcaaguuguggcugaccua

SEQ ID NO: 826399 - RNA, 19 nt, Artificial Sequence
  Description of Artificial Sequence: Synthetic oligonucleotide
  Antisense strand to SEQ ID NO: 826398
uaggucagccacaacuugc

SEQ ID NO: 826400 - RNA, 19 nt, Artificial Sequence
  Description of Artificial Sequence: Synthetic oligonucleotide
  Sense strand starting at position 3739 of SEQ ID NO: 587895
ggcgcacugcugguaaguu

SEQ ID NO: 826401 - RNA, 19 nt, Artificial Sequence
  Description of Artificial Sequence: Synthetic oligonucleotide
  Antisense strand to SEQ ID NO: 826400
aacuuaccagcagugcgcc

SEQ ID NO: 826402 - RNA, 19 nt, Artificial Sequence
  Description of Artificial Sequence: Synthetic oligonucleotide
  Sense strand starting at position 3884 of SEQ ID NO: 587895
accggcaucaaccguaaua

SEQ ID NO: 826403 - RNA, 19 nt, Artificial Sequence
  Description of Artificial Sequence: Synthetic oligonucleotide
  Antisense strand to SEQ ID NO: 826402
uauuacgguugaugccggu

SEQ ID NO: 826404 - RNA, 19 nt, Artificial Sequence
  Description of Artificial Sequence: Synthetic oligonucleotide
  Sense strand starting at position 3922 of SEQ ID NO: 587895
ugucgaggcucugcagaaa

SEQ ID NO: 826405 - RNA, 19 nt, Artificial Sequence
  Description of Artificial Sequence: Synthetic oligonucleotide
  Antisense strand to SEQ ID NO: 826404
uuucugcagagccucgaca

SEQ ID NO: 826406 - RNA, 19 nt, Artificial Sequence
  Description of Artificial Sequence: Synthetic oligonucleotide
  Sense strand starting at position 40 of SEQ ID NO: 587896
agcagaaugucagggcuga

SEQ ID NO: 826407 - RNA, 19 nt, Artificial Sequence
  Description of Artificial Sequence: Synthetic oligonucleotide
  Antisense strand to SEQ ID NO: 826406
ucagcccugacauucugcu

SEQ ID NO: 826408 - RNA, 19 nt, Artificial Sequence
  Description of Artificial Sequence: Synthetic oligonucleotide
  Sense strand starting at position 1023 of SEQ ID NO: 587896
ggucaugaugcccaaggga

SEQ ID NO: 826409 - RNA, 19 nt, Artificial Sequence
  Description of Artificial Sequence: Synthetic oligonucleotide
  Antisense strand to SEQ ID NO: 826408
ucccuugggcaucaugacc

SEQ ID NO: 826410 - RNA, 19 nt, Artificial Sequence
  Description of Artificial Sequence: Synthetic oligonucleotide
  Sense strand starting at position 1424 of SEQ ID NO: 587896
cuucuucuagcuugaaaga

SEQ ID NO: 826411 - RNA, 19 nt, Artificial Sequence
  Description of Artificial Sequence: Synthetic oligonucleotide
  Antisense strand to SEQ ID NO: 826410
ucuuucaagcuagaagaag

SEQ ID NO: 826412 - RNA, 19 nt, Artificial Sequence
  Description of Artificial Sequence: Synthetic oligonucleotide
  Sense strand starting at position 1425 of SEQ ID NO: 587896
uucuucuagcuugaaagaa

SEQ ID NO: 826413 - RNA, 19 nt, Artificial Sequence
  Description of Artificial Sequence: Synthetic oligonucleotide
  Antisense strand to SEQ ID NO: 826412
uucuuucaagcuagaagaa

SEQ ID NO: 826414 - RNA, 19 nt, Artificial Sequence
  Description of Artificial Sequence: Synthetic oligonucleotide
  Sense strand starting at position 2507 of SEQ ID NO: 587896
accgcauucccuuggaaau

SEQ ID NO: 826415 - RNA, 19 nt, Artificial Sequence
  Description of Artificial Sequence: Synthetic oligonucleotide
  Antisense strand to SEQ ID NO: 826414
auuuccaagggaaugcggu

SEQ ID NO: 826416 - RNA, 19 nt, Artificial Sequence
  Description of Artificial Sequence: Synthetic oligonucleotide
  Sense strand starting at position 2508 of SEQ ID NO: 587896
ccgcauucccuuggaaauc

SEQ ID NO: 826417 - RNA, 19 nt, Artificial Sequence
  Description of Artificial Sequence: Synthetic oligonucleotide
  Antisense strand to SEQ ID NO: 826416
gauuuccaagggaaugcgg

SEQ ID NO: 826418 - RNA, 19 nt, Artificial Sequence
  Description of Artificial Sequence: Synthetic oligonucleotide
  Sense strand starting at position 3063 of SEQ ID NO: 587896
gaaggacucgugugggaac

SEQ ID NO: 826419 - RNA, 19 nt, Artificial Sequence
  Description of Artificial Sequence: Synthetic oligonucleotide
  Antisense strand to SEQ ID NO: 826418
guucccacacgaguccuuc

SEQ ID NO: 826420 - RNA, 19 nt, Artificial Sequence
  Description of Artificial Sequence: Synthetic oligonucleotide
  Sense strand starting at position 3065 of SEQ ID NO: 587896
aggacucgugugggaacau

SEQ ID NO: 826421 - RNA, 19 nt, Artificial Sequence
  Description of Artificial Sequence: Synthetic oligonucleotide
  Antisense strand to SEQ ID NO: 826420
auguucccacacgaguccu

SEQ ID NO: 826422 - RNA, 19 nt, Artificial Sequence
  Description of Artificial Sequence: Synthetic oligonucleotide
  Sense strand starting at position 3066 of SEQ ID NO: 587896
ggacucgugugggaacauu

SEQ ID NO: 826423 - RNA, 19 nt, Artificial Sequence
  Description of Artificial Sequence: Synthetic oligonucleotide
  Antisense strand to SEQ ID NO: 826422
aauguucccacacgagucc

SEQ ID NO: 826424 - RNA, 19 nt, Artificial Sequence
  Description of Artificial Sequence: Synthetic oligonucleotide
  Sense strand starting at position 3200 of SEQ ID NO: 587896
gcacaucagcugugacacu

SEQ ID NO: 826425 - RNA, 19 nt, Artificial Sequence
  Description of Artificial Sequence: Synthetic oligonucleotide
  Antisense strand to SEQ ID NO: 826424
agugucacagcugaugugc

SEQ ID NO: 826426 - RNA, 19 nt, Artificial Sequence
  Description of Artificial Sequence: Synthetic oligonucleotide
  Sense strand starting at position 3718 of SEQ ID NO: 587896
uggugagcuucuuggagga

SEQ ID NO: 826427 - RNA, 19 nt, Artificial Sequence
  Description of Artificial Sequence: Synthetic oligonucleotide
  Antisense strand to SEQ ID NO: 826426
uccuccaagaagcucacca

SEQ ID NO: 826428 - RNA, 19 nt, Artificial Sequence
  Description of Artificial Sequence: Synthetic oligonucleotide
  Sense strand starting at position 3754 of SEQ ID NO: 587896
gcaaguuguggcugaccua

SEQ ID NO: 826429 - RNA, 19 nt, Artificial Sequence
  Description of Artificial Sequence: Synthetic oligonucleotide
  Antisense strand to SEQ ID NO: 826428
uaggucagccacaacuugc

SEQ ID NO: 826430 - RNA, 19 nt, Artificial Sequence
  Description of Artificial Sequence: Synthetic oligonucleotide
  Sense strand starting at position 3798 of SEQ ID NO: 587896
ggcgcacugcugguaaguu

SEQ ID NO: 826431 - RNA, 19 nt, Artificial Sequence
  Description of Artificial Sequence: Synthetic oligonucleotide
  Antisense strand to SEQ ID NO: 826430
aacuuaccagcagugcgcc

SEQ ID NO: 826432 - RNA, 19 nt, Artificial Sequence
  Description of Artificial Sequence: Synthetic oligonucleotide
  Sense strand starting at position 3943 of SEQ ID NO: 587896
accggcaucaaccguaaua

SEQ ID NO: 826433 - RNA, 19 nt, Artificial Sequence
  Description of Artificial Sequence: Synthetic oligonucleotide
  Antisense strand to SEQ ID NO: 826432
uauuacgguugaugccggu

SEQ ID NO: 826434 - RNA, 19 nt, Artificial Sequence
  Description of Artificial Sequence: Synthetic oligonucleotide
  Sense strand starting at position 3981 of SEQ ID NO: 587896
ugucgaggcucugcagaaa

SEQ ID NO: 826435 - RNA, 19 nt, Artificial Sequence
  Description of Artificial Sequence: Synthetic oligonucleotide
  Antisense strand to SEQ ID NO: 826434
uuucugcagagccucgaca

SEQ ID NO: 826436 - RNA, 19 nt, Artificial Sequence
  Description of Artificial Sequence: Synthetic oligonucleotide
  Sense strand starting at position 259 of SEQ ID NO: 587897
ccaaguguucgagaccaac

SEQ ID NO: 826437 - RNA, 19 nt, Artificial Sequence
  Description of Artificial Sequence: Synthetic oligonucleotide
  Antisense strand to SEQ ID NO: 826436
guuggucucgaacacuugg

SEQ ID NO: 826438 - RNA, 19 nt, Artificial Sequence
  Description of Artificial Sequence: Synthetic oligonucleotide
  Sense strand starting at position 691 of SEQ ID NO: 587897
aucagaaugcuugacguga

SEQ ID NO: 826439 - RNA, 19 nt, Artificial Sequence
  Description of Artificial Sequence: Synthetic oligonucleotide
  Antisense strand to SEQ ID NO: 826438
ucacgucaagcauucugau

SEQ ID NO: 826440 - RNA, 19 nt, Artificial Sequence
  Description of Artificial Sequence: Synthetic oligonucleotide
  Sense strand starting at position 825 of SEQ ID NO: 587897
gccucaaugcgucauaccu

SEQ ID NO: 826441 - RNA, 19 nt, Artificial Sequence
  Description of Artificial Sequence: Synthetic oligonucleotide
  Antisense strand to SEQ ID NO: 826440
agguaugacgcauugaggc

SEQ ID NO: 826442 - RNA, 19 nt, Artificial Sequence
  Description of Artificial Sequence: Synthetic oligonucleotide
  Sense strand starting at position 853 of SEQ ID NO: 587897
acaaacauagucuggcauu

SEQ ID NO: 826443 - RNA, 19 nt, Artificial Sequence
  Description of Artificial Sequence: Synthetic oligonucleotide
  Antisense strand to SEQ ID NO: 826442
aaugccagacuauguuugu

SEQ ID NO: 826444 - RNA, 19 nt, Artificial Sequence
  Description of Artificial Sequence: Synthetic oligonucleotide
  Sense strand starting at position 869 of SEQ ID NO: 587897
auuggaucauuccuggauu

SEQ ID NO: 826445 - RNA, 19 nt, Artificial Sequence
  Description of Artificial Sequence: Synthetic oligonucleotide
  Antisense strand to SEQ ID NO: 826444
aauccaggaaugauccaau

SEQ ID NO: 826446 - RNA, 19 nt, Artificial Sequence
  Description of Artificial Sequence: Synthetic oligonucleotide
  Sense strand starting at position 870 of SEQ ID NO: 587897
uuggaucauuccuggauuu

SEQ ID NO: 826447 - RNA, 19 nt, Artificial Sequence
  Description of Artificial Sequence: Synthetic oligonucleotide
  Antisense strand to SEQ ID NO: 826446
aaauccaggaaugauccaa

SEQ ID NO: 826448 - RNA, 19 nt, Artificial Sequence
  Description of Artificial Sequence: Synthetic oligonucleotide
  Sense strand starting at position 889 of SEQ ID NO: 587897
acaguuucaugggugagga

SEQ ID NO: 826449 - RNA, 19 nt, Artificial Sequence
  Description of Artificial Sequence: Synthetic oligonucleotide
  Antisense strand to SEQ ID NO: 826448
uccucacccaugaaacugu

SEQ ID NO: 826450 - RNA, 19 nt, Artificial Sequence
  Description of Artificial Sequence: Synthetic oligonucleotide
  Sense strand starting at position 960 of SEQ ID NO: 587897
acagaagucccauaccugu

SEQ ID NO: 826451 - RNA, 19 nt, Artificial Sequence
  Description of Artificial Sequence: Synthetic oligonucleotide
  Antisense strand to SEQ ID NO: 826450
acagguaugggacuucugu

SEQ ID NO: 826452 - RNA, 19 nt, Artificial Sequence
  Description of Artificial Sequence: Synthetic oligonucleotide
  Sense strand starting at position 1049 of SEQ ID NO: 587897
uaauuaagaguagguaaca

SEQ ID NO: 826453 - RNA, 19 nt, Artificial Sequence
  Description of Artificial Sequence: Synthetic oligonucleotide
  Antisense strand to SEQ ID NO: 826452
uguuaccuacucuuaauua

SEQ ID NO: 826454 - RNA, 19 nt, Artificial Sequence
  Description of Artificial Sequence: Synthetic oligonucleotide
  Sense strand starting at position 1205 of SEQ ID NO: 587897
aauggauuguuaccugcua

SEQ ID NO: 826455 - RNA, 19 nt, Artificial Sequence
  Description of Artificial Sequence: Synthetic oligonucleotide
  Antisense strand to SEQ ID NO: 826454
uagcagguaacaauccauu

SEQ ID NO: 826456 - RNA, 19 nt, Artificial Sequence
  Description of Artificial Sequence: Synthetic oligonucleotide
  Sense strand starting at position 1206 of SEQ ID NO: 587897
auggauuguuaccugcuau

SEQ ID NO: 826457 - RNA, 19 nt, Artificial Sequence
  Description of Artificial Sequence: Synthetic oligonucleotide
  Antisense strand to SEQ ID NO: 826456
auagcagguaacaauccau

SEQ ID NO: 826458 - RNA, 19 nt, Artificial Sequence
  Description of Artificial Sequence: Synthetic oligonucleotide
  Sense strand starting at position 1218 of SEQ ID NO: 587897
cugcuauaaguguaaagca

SEQ ID NO: 826459 - RNA, 19 nt, Artificial Sequence
  Description of Artificial Sequence: Synthetic oligonucleotide
  Antisense strand to SEQ ID NO: 826458
ugcuuuacacuuauagcag

SEQ ID NO: 826460 - RNA, 19 nt, Artificial Sequence
  Description of Artificial Sequence: Synthetic oligonucleotide
  Sense strand starting at position 1263 of SEQ ID NO: 587897
cuuggaagauggcuuguau

SEQ ID NO: 826461 - RNA, 19 nt, Artificial Sequence
  Description of Artificial Sequence: Synthetic oligonucleotide
  Antisense strand to SEQ ID NO: 826460
auacaagccaucuuccaag

SEQ ID NO: 826462 - RNA, 19 nt, Artificial Sequence
  Description of Artificial Sequence: Synthetic oligonucleotide
  Sense strand starting at position 1274 of SEQ ID NO: 587897
gcuuguauaaggugagaga

SEQ ID NO: 826463 - RNA, 19 nt, Artificial Sequence
  Description of Artificial Sequence: Synthetic oligonucleotide
  Antisense strand to SEQ ID NO: 826462
ucucucaccuuauacaagc

SEQ ID NO: 826464 - RNA, 19 nt, Artificial Sequence
  Description of Artificial Sequence: Synthetic oligonucleotide
  Sense strand starting at position 1285 of SEQ ID NO: 587897
gugagagauaucuggaagu

SEQ ID NO: 826465 - RNA, 19 nt, Artificial Sequence
  Description of Artificial Sequence: Synthetic oligonucleotide
  Antisense strand to SEQ ID NO: 826464
acuuccagauaucucucac

SEQ ID NO: 826466 - RNA, 19 nt, Artificial Sequence
  Description of Artificial Sequence: Synthetic oligonucleotide
  Sense strand starting at position 1494 of SEQ ID NO: 587897
gacauuucuuaggcagcuu

SEQ ID NO: 826467 - RNA, 19 nt, Artificial Sequence
  Description of Artificial Sequence: Synthetic oligonucleotide
  Antisense strand to SEQ ID NO: 826466
aagcugccuaagaaauguc

SEQ ID NO: 826468 - RNA, 19 nt, Artificial Sequence
  Description of Artificial Sequence: Synthetic oligonucleotide
  Sense strand starting at position 1634 of SEQ ID NO: 587897
gagccaaaguaucucuuga

SEQ ID NO: 826469 - RNA, 19 nt, Artificial Sequence
  Description of Artificial Sequence: Synthetic oligonucleotide
  Antisense strand to SEQ ID NO: 826468
ucaagagauacuuuggcuc

SEQ ID NO: 826470 - RNA, 19 nt, Artificial Sequence
  Description of Artificial Sequence: Synthetic oligonucleotide
  Sense strand starting at position 1636 of SEQ ID NO: 587897
gccaaaguaucucuugaga

SEQ ID NO: 826471 - RNA, 19 nt, Artificial Sequence
  Description of Artificial Sequence: Synthetic oligonucleotide
  Antisense strand to SEQ ID NO: 826470
ucucaagagauacuuuggc

SEQ ID NO: 826472 - RNA, 19 nt, Artificial Sequence
  Description of Artificial Sequence: Synthetic oligonucleotide
  Sense strand starting at position 1691 of SEQ ID NO: 587897
cuuaucucugcagagcaaa

SEQ ID NO: 826473 - RNA, 19 nt, Artificial Sequence
  Description of Artificial Sequence: Synthetic oligonucleotide
  Antisense strand to SEQ ID NO: 826472
uuugcucugcagagauaag

SEQ ID NO: 826474 - RNA, 19 nt, Artificial Sequence
  Description of Artificial Sequence: Synthetic oligonucleotide
  Sense strand starting at position 1703 of SEQ ID NO: 587897
gagcaaagaguugauguca

SEQ ID NO: 826475 - RNA, 19 nt, Artificial Sequence
  Description of Artificial Sequence: Synthetic oligonucleotide
  Antisense strand to SEQ ID NO: 826474
ugacaucaacucuuugcuc

SEQ ID NO: 826476 - RNA, 19 nt, Artificial Sequence
  Description of Artificial Sequence: Synthetic oligonucleotide
  Sense strand starting at position 1711 of SEQ ID NO: 587897
aguugaugucauggccagu

SEQ ID NO: 826477 - RNA, 19 nt, Artificial Sequence
  Description of Artificial Sequence: Synthetic oligonucleotide
  Antisense strand to SEQ ID NO: 826476
acuggccaugacaucaacu

SEQ ID NO: 826478 - RNA, 19 nt, Artificial Sequence
  Description of Artificial Sequence: Synthetic oligonucleotide
  Sense strand starting at position 1755 of SEQ ID NO: 587897
gggagacucccacguucau

SEQ ID NO: 826479 - RNA, 19 nt, Artificial Sequence
  Description of Artificial Sequence: Synthetic oligonucleotide
  Antisense strand to SEQ ID NO: 826478
augaacgugggagucuccc

SEQ ID NO: 826480 - RNA, 19 nt, Artificial Sequence
  Description of Artificial Sequence: Synthetic oligonucleotide
  Sense strand starting at position 1977 of SEQ ID NO: 587897
guugauggauuccugaaau

SEQ ID NO: 826481 - RNA, 19 nt, Artificial Sequence
  Description of Artificial Sequence: Synthetic oligonucleotide
  Antisense strand to SEQ ID NO: 826480
auuucaggaauccaucaac

SEQ ID NO: 826482 - RNA, 19 nt, Artificial Sequence
  Description of Artificial Sequence: Synthetic oligonucleotide
  Sense strand starting at position 2230 of SEQ ID NO: 587897
cauggauuacagugcaaag

SEQ ID NO: 826483 - RNA, 19 nt, Artificial Sequence
  Description of Artificial Sequence: Synthetic oligonucleotide
  Antisense strand to SEQ ID NO: 826482
cuuugcacuguaauccaug

SEQ ID NO: 826484 - RNA, 19 nt, Artificial Sequence
  Description of Artificial Sequence: Synthetic oligonucleotide
  Sense strand starting at position 2232 of SEQ ID NO: 587897
uggauuacagugcaaaguu

SEQ ID NO: 826485 - RNA, 19 nt, Artificial Sequence
  Description of Artificial Sequence: Synthetic oligonucleotide
  Antisense strand to SEQ ID NO: 826484
aacuuugcacuguaaucca

SEQ ID NO: 826486 - RNA, 19 nt, Artificial Sequence
  Description of Artificial Sequence: Synthetic oligonucleotide
  Sense strand starting at position 2295 of SEQ ID NO: 587897
uucccugcucuggaaacaa

SEQ ID NO: 826487 - RNA, 19 nt, Artificial Sequence
  Description of Artificial Sequence: Synthetic oligonucleotide
  Antisense strand to SEQ ID NO: 826486
uuguuuccagagcagggaa

SEQ ID NO: 826488 - RNA, 19 nt, Artificial Sequence
  Description of Artificial Sequence: Synthetic oligonucleotide
  Sense strand starting at position 2477 of SEQ ID NO: 587897
ugguuauugguuuguucuu

SEQ ID NO: 826489 - RNA, 19 nt, Artificial Sequence
  Description of Artificial Sequence: Synthetic oligonucleotide
  Antisense strand to SEQ ID NO: 826488
aagaacaaaccaauaacca

SEQ ID NO: 826490 - RNA, 19 nt, Artificial Sequence
  Description of Artificial Sequence: Synthetic oligonucleotide
  Sense strand starting at position 2841 of SEQ ID NO: 587897
aggcuuauauuaccagaag

SEQ ID NO: 826491 - RNA, 19 nt, Artificial Sequence
  Description of Artificial Sequence: Synthetic oligonucleotide
  Antisense strand to SEQ ID NO: 826490
cuucugguaauauaagccu

SEQ ID NO: 826492 - RNA, 19 nt, Artificial Sequence
  Description of Artificial Sequence: Synthetic oligonucleotide
  Sense strand starting at position 2880 of SEQ ID NO: 587897
gggaaaugcucugaaacau

SEQ ID NO: 826493 - RNA, 19 nt, Artificial Sequence
  Description of Artificial Sequence: Synthetic oligonucleotide
  Antisense strand to SEQ ID NO: 826492
auguuucagagcauuuccc

SEQ ID NO: 826494 - RNA, 19 nt, Artificial Sequence
  Description of Artificial Sequence: Synthetic oligonucleotide
  Sense strand starting at position 2930 of SEQ ID NO: 587897
cugguagccuuagucacau

SEQ ID NO: 826495 - RNA, 19 nt, Artificial Sequence
  Description of Artificial Sequence: Synthetic oligonucleotide
  Antisense strand to SEQ ID NO: 826494
augugacuaaggcuaccag

SEQ ID NO: 826496 - RNA, 19 nt, Artificial Sequence
  Description of Artificial Sequence: Synthetic oligonucleotide
  Sense strand starting at position 3007 of SEQ ID NO: 587897
gaaggaggguccuaaccau

SEQ ID NO: 826497 - RNA, 19 nt, Artificial Sequence
  Description of Artificial Sequence: Synthetic oligonucleotide
  Antisense strand to SEQ ID NO: 826496
augguuaggacccuccuuc

SEQ ID NO: 826498 - RNA, 19 nt, Artificial Sequence
  Description of Artificial Sequence: Synthetic oligonucleotide
  Sense strand starting at position 3052 of SEQ ID NO: 587897
uuuaguagcucccacauuu

SEQ ID NO: 826499 - RNA, 19 nt, Artificial Sequence
  Description of Artificial Sequence: Synthetic oligonucleotide
  Antisense strand to SEQ ID NO: 826498
aaaugugggagcuacuaaa

SEQ ID NO: 826500 - RNA, 19 nt, Artificial Sequence
  Description of Artificial Sequence: Synthetic oligonucleotide
  Sense strand starting at position 3088 of SEQ ID NO: 587897
aagcccuguccugagaauu

SEQ ID NO: 826501 - RNA, 19 nt, Artificial Sequence
  Description of Artificial Sequence: Synthetic oligonucleotide
  Antisense strand to SEQ ID NO: 826500
aauucucaggacagggcuu

SEQ ID NO: 826502 - RNA, 19 nt, Artificial Sequence
  Description of Artificial Sequence: Synthetic oligonucleotide
  Sense strand starting at position 3133 of SEQ ID NO: 587897
auauaagccuaggaaauaa

SEQ ID NO: 826503 - RNA, 19 nt, Artificial Sequence
  Description of Artificial Sequence: Synthetic oligonucleotide
  Antisense strand to SEQ ID NO: 826502
uuauuuccuaggcuuauau

SEQ ID NO: 826504 - RNA, 19 nt, Artificial Sequence
  Description of Artificial Sequence: Synthetic oligonucleotide
  Sense strand starting at position 3423 of SEQ ID NO: 587897
aagugaaauugcuugguuu

SEQ ID NO: 826505 - RNA, 19 nt, Artificial Sequence
  Description of Artificial Sequence: Synthetic oligonucleotide
  Antisense strand to SEQ ID NO: 826504
aaaccaagcaauuucacuu

SEQ ID NO: 826506 - RNA, 19 nt, Artificial Sequence
  Description of Artificial Sequence: Synthetic oligonucleotide
  Sense strand starting at position 3440 of SEQ ID NO: 587897
uuugcuuugguuugggaaa

SEQ ID NO: 826507 - RNA, 19 nt, Artificial Sequence
  Description of Artificial Sequence: Synthetic oligonucleotide
  Antisense strand to SEQ ID NO: 826506
uuucccaaaccaaagcaaa

SEQ ID NO: 826508 - RNA, 19 nt, Artificial Sequence
  Description of Artificial Sequence: Synthetic oligonucleotide
  Sense strand starting at position 3831 of SEQ ID NO: 587897
cuacauggauuucgguaaa

SEQ ID NO: 826509 - RNA, 19 nt, Artificial Sequence
  Description of Artificial Sequence: Synthetic oligonucleotide
  Antisense strand to SEQ ID NO: 826508
uuuaccgaaauccauguag

SEQ ID NO: 826510 - RNA, 19 nt, Artificial Sequence
  Description of Artificial Sequence: Synthetic oligonucleotide
  Sense strand starting at position 3883 of SEQ ID NO: 587897
ccuuguuucuucucucgga

SEQ ID NO: 826511 - RNA, 19 nt, Artificial Sequence
  Description of Artificial Sequence: Synthetic oligonucleotide
  Antisense strand to SEQ ID NO: 826510
uccgagagaagaaacaagg

SEQ ID NO: 826512 - RNA, 19 nt, Artificial Sequence
  Description of Artificial Sequence: Synthetic oligonucleotide
  Sense strand starting at position 3932 of SEQ ID NO: 587897
ccagaaaguucuccauaag

SEQ ID NO: 826513 - RNA, 19 nt, Artificial Sequence
  Description of Artificial Sequence: Synthetic oligonucleotide
  Antisense strand to SEQ ID NO: 826512
cuuauggagaacuuucugg

SEQ ID NO: 826514 - RNA, 19 nt, Artificial Sequence
  Description of Artificial Sequence: Synthetic oligonucleotide
  Sense strand starting at position 3946 of SEQ ID NO: 587897
auaagauaguguuacugaa

SEQ ID NO: 826515 - RNA, 19 nt, Artificial Sequence
  Description of Artificial Sequence: Synthetic oligonucleotide
  Antisense strand to SEQ ID NO: 826514
uucaguaacacuaucuuau

SEQ ID NO: 826516 - RNA, 19 nt, Artificial Sequence
  Description of Artificial Sequence: Synthetic oligonucleotide
  Sense strand starting at position 539 of SEQ ID NO: 587898
gaagaaguccuguguucug

SEQ ID NO: 826517 - RNA, 19 nt, Artificial Sequence
  Description of Artificial Sequence: Synthetic oligonucleotide
  Antisense strand to SEQ ID NO: 826516
cagaacacaggacuucuuc

SEQ ID NO: 826518 - RNA, 19 nt, Artificial Sequence
  Description of Artificial Sequence: Synthetic oligonucleotide
  Sense strand starting at position 549 of SEQ ID NO: 587898
uguguucugcacugagaga

SEQ ID NO: 826519 - RNA, 19 nt, Artificial Sequence
  Description of Artificial Sequence: Synthetic oligonucleotide
  Antisense strand to SEQ ID NO: 826518
ucucucagugcagaacaca

SEQ ID NO: 826520 - RNA, 19 nt, Artificial Sequence
  Description of Artificial Sequence: Synthetic oligonucleotide
  Sense strand starting at position 550 of SEQ ID NO: 587898
guguucugcacugagagau

SEQ ID NO: 826521 - RNA, 19 nt, Artificial Sequence
  Description of Artificial Sequence: Synthetic oligonucleotide
  Antisense strand to SEQ ID NO: 826520
aucucucagugcagaacac

SEQ ID NO: 826522 - RNA, 19 nt, Artificial Sequence
  Description of Artificial Sequence: Synthetic oligonucleotide
  Sense strand starting at position 704 of SEQ ID NO: 587898
ucaccuuccggaggagaua

SEQ ID NO: 826523 - RNA, 19 nt, Artificial Sequence
  Description of Artificial Sequence: Synthetic oligonucleotide
  Antisense strand to SEQ ID NO: 826522
uaucuccuccggaagguga

SEQ ID NO: 826524 - RNA, 19 nt, Artificial Sequence
  Description of Artificial Sequence: Synthetic oligonucleotide
  Sense strand starting at position 870 of SEQ ID NO: 587898
aaggauuaguguuucugca

SEQ ID NO: 826525 - RNA, 19 nt, Artificial Sequence
  Description of Artificial Sequence: Synthetic oligonucleotide
  Antisense strand to SEQ ID NO: 826524
ugcagaaacacuaauccuu

SEQ ID NO: 826526 - RNA, 19 nt, Artificial Sequence
  Description of Artificial Sequence: Synthetic oligonucleotide
  Sense strand starting at position 872 of SEQ ID NO: 587898
ggauuaguguuucugcaca

SEQ ID NO: 826527 - RNA, 19 nt, Artificial Sequence
  Description of Artificial Sequence: Synthetic oligonucleotide
  Antisense strand to SEQ ID NO: 826526
ugugcagaaacacuaaucc

SEQ ID NO: 826528 - RNA, 19 nt, Artificial Sequence
  Description of Artificial Sequence: Synthetic oligonucleotide
  Sense strand starting at position 874 of SEQ ID NO: 587898
auuaguguuucugcacaaa

SEQ ID NO: 826529 - RNA, 19 nt, Artificial Sequence
  Description of Artificial Sequence: Synthetic oligonucleotide
  Antisense strand to SEQ ID NO: 826528
uuugugcagaaacacuaau

SEQ ID NO: 826530 - RNA, 19 nt, Artificial Sequence
  Description of Artificial Sequence: Synthetic oligonucleotide
  Sense strand starting at position 885 of SEQ ID NO: 587898
ugcacaaacgucuagauaa

SEQ ID NO: 826531 - RNA, 19 nt, Artificial Sequence
  Description of Artificial Sequence: Synthetic oligonucleotide
  Antisense strand to SEQ ID NO: 826530
uuaucuagacguuugugca

SEQ ID NO: 826532 - RNA, 19 nt, Artificial Sequence
  Description of Artificial Sequence: Synthetic oligonucleotide
  Sense strand starting at position 972 of SEQ ID NO: 587898
ugaagaggcugaguacuuu

SEQ ID NO: 826533 - RNA, 19 nt, Artificial Sequence
  Description of Artificial Sequence: Synthetic oligonucleotide
  Antisense strand to SEQ ID NO: 826532
aaaguacucagccucuuca

SEQ ID NO: 826534 - RNA, 19 nt, Artificial Sequence
  Description of Artificial Sequence: Synthetic oligonucleotide
  Sense strand starting at position 994 of SEQ ID NO: 587898
ucuugaaauccaggcacua

SEQ ID NO: 826535 - RNA, 19 nt, Artificial Sequence
  Description of Artificial Sequence: Synthetic oligonucleotide
  Antisense strand to SEQ ID NO: 826534
uagugccuggauuucaaga

SEQ ID NO: 826536 - RNA, 19 nt, Artificial Sequence
  Description of Artificial Sequence: Synthetic oligonucleotide
  Sense strand starting at position 1067 of SEQ ID NO: 587898
cgacgaguugaagaugaca

SEQ ID NO: 826537 - RNA, 19 nt, Artificial Sequence
  Description of Artificial Sequence: Synthetic oligonucleotide
  Antisense strand to SEQ ID NO: 826536
ugucaucuucaacucgucg

SEQ ID NO: 826538 - RNA, 19 nt, Artificial Sequence
  Description of Artificial Sequence: Synthetic oligonucleotide
  Sense strand starting at position 1069 of SEQ ID NO: 587898
acgaguugaagaugacaau

SEQ ID NO: 826539 - RNA, 19 nt, Artificial Sequence
  Description of Artificial Sequence: Synthetic oligonucleotide
  Antisense strand to SEQ ID NO: 826538
auugucaucuucaacucgu

SEQ ID NO: 826540 - RNA, 19 nt, Artificial Sequence
  Description of Artificial Sequence: Synthetic oligonucleotide
  Sense strand starting at position 1110 of SEQ ID NO: 587898
acuggauguaagcgucaaa

SEQ ID NO: 826541 - RNA, 19 nt, Artificial Sequence
  Description of Artificial Sequence: Synthetic oligonucleotide
  Antisense strand to SEQ ID NO: 826540
uuugacgcuuacauccagu

SEQ ID NO: 826542 - RNA, 19 nt, Artificial Sequence
  Description of Artificial Sequence: Synthetic oligonucleotide
  Sense strand starting at position 1169 of SEQ ID NO: 587898
gggugauggguugggagau

SEQ ID NO: 826543 - RNA, 19 nt, Artificial Sequence
  Description of Artificial Sequence: Synthetic oligonucleotide
  Antisense strand to SEQ ID NO: 826542
aucucccaacccaucaccc

SEQ ID NO: 826544 - RNA, 19 nt, Artificial Sequence
  Description of Artificial Sequence: Synthetic oligonucleotide
  Sense strand starting at position 2264 of SEQ ID NO: 587898
aggauaaacuucgugcucu

SEQ ID NO: 826545 - RNA, 19 nt, Artificial Sequence
  Description of Artificial Sequence: Synthetic oligonucleotide
  Antisense strand to SEQ ID NO: 826544
agagcacgaaguuuauccu

SEQ ID NO: 826546 - RNA, 19 nt, Artificial Sequence
  Description of Artificial Sequence: Synthetic oligonucleotide
  Sense strand starting at position 2313 of SEQ ID NO: 587898
cgaaucuucuaagcagagu

SEQ ID NO: 826547 - RNA, 19 nt, Artificial Sequence
  Description of Artificial Sequence: Synthetic oligonucleotide
  Antisense strand to SEQ ID NO: 826546
acucugcuuagaagauucg

SEQ ID NO: 826548 - RNA, 19 nt, Artificial Sequence
  Description of Artificial Sequence: Synthetic oligonucleotide
  Sense strand starting at position 2441 of SEQ ID NO: 587898
ggaugugcuuugucaaaug

SEQ ID NO: 826549 - RNA, 19 nt, Artificial Sequence
  Description of Artificial Sequence: Synthetic oligonucleotide
  Antisense strand to SEQ ID NO: 826548
cauuugacaaagcacaucc

SEQ ID NO: 826550 - RNA, 19 nt, Artificial Sequence
  Description of Artificial Sequence: Synthetic oligonucleotide
  Sense strand starting at position 2499 of SEQ ID NO: 587898
ggaagacuccagugguaug

SEQ ID NO: 826551 - RNA, 19 nt, Artificial Sequence
  Description of Artificial Sequence: Synthetic oligonucleotide
  Antisense strand to SEQ ID NO: 826550
cauaccacuggagucuucc

SEQ ID NO: 826552 - RNA, 19 nt, Artificial Sequence
  Description of Artificial Sequence: Synthetic oligonucleotide
  Sense strand starting at position 2500 of SEQ ID NO: 587898
gaagacuccagugguauga

SEQ ID NO: 826553 - RNA, 19 nt, Artificial Sequence
  Description of Artificial Sequence: Synthetic oligonucleotide
  Antisense strand to SEQ ID NO: 826552
ucauaccacuggagucuuc

SEQ ID NO: 826554 - RNA, 19 nt, Artificial Sequence
  Description of Artificial Sequence: Synthetic oligonucleotide
  Sense strand starting at position 2504 of SEQ ID NO: 587898
acuccagugguaugaauac

SEQ ID NO: 826555 - RNA, 19 nt, Artificial Sequence
  Description of Artificial Sequence: Synthetic oligonucleotide
  Antisense strand to SEQ ID NO: 826554
guauucauaccacuggagu

SEQ ID NO: 826556 - RNA, 19 nt, Artificial Sequence
  Description of Artificial Sequence: Synthetic oligonucleotide
  Sense strand starting at position 2515 of SEQ ID NO: 587898
augaauacguagucacgau

SEQ ID NO: 826557 - RNA, 19 nt, Artificial Sequence
  Description of Artificial Sequence: Synthetic oligonucleotide
  Antisense strand to SEQ ID NO: 826556
aucgugacuacguauucau

SEQ ID NO: 826558 - RNA, 19 nt, Artificial Sequence
  Description of Artificial Sequence: Synthetic oligonucleotide
  Sense strand starting at position 2516 of SEQ ID NO: 587898
ugaauacguagucacgauu

SEQ ID NO: 826559 - RNA, 19 nt, Artificial Sequence
  Description of Artificial Sequence: Synthetic oligonucleotide
  Antisense strand to SEQ ID NO: 826558
aaucgugacuacguauuca

SEQ ID NO: 826560 - RNA, 19 nt, Artificial Sequence
  Description of Artificial Sequence: Synthetic oligonucleotide
  Sense strand starting at position 2610 of SEQ ID NO: 587898
ccuacugcgcuauuguuua

SEQ ID NO: 826561 - RNA, 19 nt, Artificial Sequence
  Description of Artificial Sequence: Synthetic oligonucleotide
  Antisense strand to SEQ ID NO: 826560
uaaacaauagcgcaguagg

SEQ ID NO: 826562 - RNA, 19 nt, Artificial Sequence
  Description of Artificial Sequence: Synthetic oligonucleotide
  Sense strand starting at position 2618 of SEQ ID NO: 587898
gcuauuguuuacuuuagga

SEQ ID NO: 826563 - RNA, 19 nt, Artificial Sequence
  Description of Artificial Sequence: Synthetic oligonucleotide
  Antisense strand to SEQ ID NO: 826562
uccuaaaguaaacaauagc

SEQ ID NO: 826564 - RNA, 19 nt, Artificial Sequence
  Description of Artificial Sequence: Synthetic oligonucleotide
  Sense strand starting at position 2620 of SEQ ID NO: 587898
uauuguuuacuuuaggagu

SEQ ID NO: 826565 - RNA, 19 nt, Artificial Sequence
  Description of Artificial Sequence: Synthetic oligonucleotide
  Antisense strand to SEQ ID NO: 826564
acuccuaaaguaaacaaua

SEQ ID NO: 826566 - RNA, 19 nt, Artificial Sequence
  Description of Artificial Sequence: Synthetic oligonucleotide
  Sense strand starting at position 2753 of SEQ ID NO: 587898
ugugguuugucuuuagaga

SEQ ID NO: 826567 - RNA, 19 nt, Artificial Sequence
  Description of Artificial Sequence: Synthetic oligonucleotide
  Antisense strand to SEQ ID NO: 826566
ucucuaaagacaaaccaca

SEQ ID NO: 826568 - RNA, 19 nt, Artificial Sequence
  Description of Artificial Sequence: Synthetic oligonucleotide
  Sense strand starting at position 2754 of SEQ ID NO: 587898
gugguuugucuuuagagac

SEQ ID NO: 826569 - RNA, 19 nt, Artificial Sequence
  Description of Artificial Sequence: Synthetic oligonucleotide
  Antisense strand to SEQ ID NO: 826568
gucucuaaagacaaaccac

SEQ ID NO: 826570 - RNA, 19 nt, Artificial Sequence
  Description of Artificial Sequence: Synthetic oligonucleotide
  Sense strand starting at position 2909 of SEQ ID NO: 587898
cugagaauuacaggcuuga

SEQ ID NO: 826571 - RNA, 19 nt, Artificial Sequence
  Description of Artificial Sequence: Synthetic oligonucleotide
  Antisense strand to SEQ ID NO: 826570
ucaagccuguaauucucag

SEQ ID NO: 826572 - RNA, 19 nt, Artificial Sequence
  Description of Artificial Sequence: Synthetic oligonucleotide
  Sense strand starting at position 2975 of SEQ ID NO: 587898
cuuuacuuugcauaguauu

SEQ ID NO: 826573 - RNA, 19 nt, Artificial Sequence
  Description of Artificial Sequence: Synthetic oligonucleotide
  Antisense strand to SEQ ID NO: 826572
aauacuaugcaaaguaaag

SEQ ID NO: 826574 - RNA, 19 nt, Artificial Sequence
  Description of Artificial Sequence: Synthetic oligonucleotide
  Sense strand starting at position 2982 of SEQ ID NO: 587898
uugcauaguauuggaguaa

SEQ ID NO: 826575 - RNA, 19 nt, Artificial Sequence
  Description of Artificial Sequence: Synthetic oligonucleotide
  Antisense strand to SEQ ID NO: 826574
uuacuccaauacuaugcaa

SEQ ID NO: 826576 - RNA, 19 nt, Artificial Sequence
  Description of Artificial Sequence: Synthetic oligonucleotide
  Sense strand starting at position 2986 of SEQ ID NO: 587898
auaguauuggaguaaacgu

SEQ ID NO: 826577 - RNA, 19 nt, Artificial Sequence
  Description of Artificial Sequence: Synthetic oligonucleotide
  Antisense strand to SEQ ID NO: 826576
acguuuacuccaauacuau

SEQ ID NO: 826578 - RNA, 19 nt, Artificial Sequence
  Description of Artificial Sequence: Synthetic oligonucleotide
  Sense strand starting at position 2995 of SEQ ID NO: 587898
gaguaaacgucccuuuaac

SEQ ID NO: 826579 - RNA, 19 nt, Artificial Sequence
  Description of Artificial Sequence: Synthetic oligonucleotide
  Antisense strand to SEQ ID NO: 826578
guuaaagggacguuuacuc

SEQ ID NO: 826580 - RNA, 19 nt, Artificial Sequence
  Description of Artificial Sequence: Synthetic oligonucleotide
  Sense strand starting at position 3051 of SEQ ID NO: 587898
uguauugcugccucacagu

SEQ ID NO: 826581 - RNA, 19 nt, Artificial Sequence
  Description of Artificial Sequence: Synthetic oligonucleotide
  Antisense strand to SEQ ID NO: 826580
acugugaggcagcaauaca

SEQ ID NO: 826582 - RNA, 19 nt, Artificial Sequence
  Description of Artificial Sequence: Synthetic oligonucleotide
  Sense strand starting at position 3057 of SEQ ID NO: 587898
gcugccucacaguacauau

SEQ ID NO: 826583 - RNA, 19 nt, Artificial Sequence
  Description of Artificial Sequence: Synthetic oligonucleotide
  Antisense strand to SEQ ID NO: 826582
auauguacugugaggcagc

SEQ ID NO: 826584 - RNA, 19 nt, Artificial Sequence
  Description of Artificial Sequence: Synthetic oligonucleotide
  Sense strand starting at position 3561 of SEQ ID NO: 587898
acagcacuaugauuacgaa

SEQ ID NO: 826585 - RNA, 19 nt, Artificial Sequence
  Description of Artificial Sequence: Synthetic oligonucleotide
  Antisense strand to SEQ ID NO: 826584
uucguaaucauagugcugu

SEQ ID NO: 826586 - RNA, 19 nt, Artificial Sequence
  Description of Artificial Sequence: Synthetic oligonucleotide
  Sense strand starting at position 3576 of SEQ ID NO: 587898
cgaagauauuaucugauag

SEQ ID NO: 826587 - RNA, 19 nt, Artificial Sequence
  Description of Artificial Sequence: Synthetic oligonucleotide
  Antisense strand to SEQ ID NO: 826586
cuaucagauaauaucuucg

SEQ ID NO: 826588 - RNA, 19 nt, Artificial Sequence
  Description of Artificial Sequence: Synthetic oligonucleotide
  Sense strand starting at position 3608 of SEQ ID NO: 587898
aguaauagagacugucaaa

SEQ ID NO: 826589 - RNA, 19 nt, Artificial Sequence
  Description of Artificial Sequence: Synthetic oligonucleotide
  Antisense strand to SEQ ID NO: 826588
uuugacagucucuauuacu

SEQ ID NO: 826590 - RNA, 19 nt, Artificial Sequence
  Description of Artificial Sequence: Synthetic oligonucleotide
  Sense strand starting at position 3689 of SEQ ID NO: 587898
ggaaaugaugcguguggac

SEQ ID NO: 826591 - RNA, 19 nt, Artificial Sequence
  Description of Artificial Sequence: Synthetic oligonucleotide
  Antisense strand to SEQ ID NO: 826590
guccacacgcaucauuucc

SEQ ID NO: 826592 - RNA, 19 nt, Artificial Sequence
  Description of Artificial Sequence: Synthetic oligonucleotide
  Sense strand starting at position 3797 of SEQ ID NO: 587898
ugaguaaucuggucuaaca

SEQ ID NO: 826593 - RNA, 19 nt, Artificial Sequence
  Description of Artificial Sequence: Synthetic oligonucleotide
  Antisense strand to SEQ ID NO: 826592
uguuagaccagauuacuca

SEQ ID NO: 826594 - RNA, 19 nt, Artificial Sequence
  Description of Artificial Sequence: Synthetic oligonucleotide
  Sense strand starting at position 3799 of SEQ ID NO: 587898
aguaaucuggucuaacauu

SEQ ID NO: 826595 - RNA, 19 nt, Artificial Sequence
  Description of Artificial Sequence: Synthetic oligonucleotide
  Antisense strand to SEQ ID NO: 826594
aauguuagaccagauuacu

SEQ ID NO: 826596 - RNA, 19 nt, Artificial Sequence
  Description of Artificial Sequence: Synthetic oligonucleotide
  Sense strand starting at position 123 of SEQ ID NO: 587899
uaaauuagugauggucauc

SEQ ID NO: 826597 - RNA, 19 nt, Artificial Sequence
  Description of Artificial Sequence: Synthetic oligonucleotide
  Antisense strand to SEQ ID NO: 826596
gaugaccaucacuaauuua

SEQ ID NO: 826598 - RNA, 19 nt, Artificial Sequence
  Description of Artificial Sequence: Synthetic oligonucleotide
  Sense strand starting at position 283 of SEQ ID NO: 587899
gggaggucuguguaggcaa

SEQ ID NO: 826599 - RNA, 19 nt, Artificial Sequence
  Description of Artificial Sequence: Synthetic oligonucleotide
  Antisense strand to SEQ ID NO: 826598
uugccuacacagaccuccc

SEQ ID NO: 826600 - RNA, 19 nt, Artificial Sequence
  Description of Artificial Sequence: Synthetic oligonucleotide
  Sense strand starting at position 375 of SEQ ID NO: 587899
agacaaagaucccauuugu

SEQ ID NO: 826601 - RNA, 19 nt, Artificial Sequence
  Description of Artificial Sequence: Synthetic oligonucleotide
  Antisense strand to SEQ ID NO: 826600
acaaaugggaucuuugucu

SEQ ID NO: 826602 - RNA, 19 nt, Artificial Sequence
  Description of Artificial Sequence: Synthetic oligonucleotide
  Sense strand starting at position 433 of SEQ ID NO: 587899
gucagaaacuucucagaac

SEQ ID NO: 826603 - RNA, 19 nt, Artificial Sequence
  Description of Artificial Sequence: Synthetic oligonucleotide
  Antisense strand to SEQ ID NO: 826602
guucugagaaguuucugac

SEQ ID NO: 826604 - RNA, 19 nt, Artificial Sequence
  Description of Artificial Sequence: Synthetic oligonucleotide
  Sense strand starting at position 641 of SEQ ID NO: 587899
guguaucaugcagugcuua

SEQ ID NO: 826605 - RNA, 19 nt, Artificial Sequence
  Description of Artificial Sequence: Synthetic oligonucleotide
  Antisense strand to SEQ ID NO: 826604
uaagcacugcaugauacac

SEQ ID NO: 826606 - RNA, 19 nt, Artificial Sequence
  Description of Artificial Sequence: Synthetic oligonucleotide
  Sense strand starting at position 662 of SEQ ID NO: 587899
agaugaagaaaguguaucu

SEQ ID NO: 826607 - RNA, 19 nt, Artificial Sequence
  Description of Artificial Sequence: Synthetic oligonucleotide
  Antisense strand to SEQ ID NO: 826606
agauacacuuucuucaucu

SEQ ID NO: 826608 - RNA, 19 nt, Artificial Sequence
  Description of Artificial Sequence: Synthetic oligonucleotide
  Sense strand starting at position 717 of SEQ ID NO: 587899
ugauauaugaaaggagugu

SEQ ID NO: 826609 - RNA, 19 nt, Artificial Sequence
  Description of Artificial Sequence: Synthetic oligonucleotide
  Antisense strand to SEQ ID NO: 826608
acacuccuuucauauauca

SEQ ID NO: 826610 - RNA, 19 nt, Artificial Sequence
  Description of Artificial Sequence: Synthetic oligonucleotide
  Sense strand starting at position 792 of SEQ ID NO: 587899
auguacauaucuuugaagu

SEQ ID NO: 826611 - RNA, 19 nt, Artificial Sequence
  Description of Artificial Sequence: Synthetic oligonucleotide
  Antisense strand to SEQ ID NO: 826610
acuucaaagauauguacau

SEQ ID NO: 826612 - RNA, 19 nt, Artificial Sequence
  Description of Artificial Sequence: Synthetic oligonucleotide
  Sense strand starting at position 889 of SEQ ID NO: 587899
gggacuuacugcccaagaa

SEQ ID NO: 826613 - RNA, 19 nt, Artificial Sequence
  Description of Artificial Sequence: Synthetic oligonucleotide
  Antisense strand to SEQ ID NO: 826612
uucuugggcaguaaguccc

SEQ ID NO: 826614 - RNA, 19 nt, Artificial Sequence
  Description of Artificial Sequence: Synthetic oligonucleotide
  Sense strand starting at position 977 of SEQ ID NO: 587899
cauuaaucuggagggcaua

SEQ ID NO: 826615 - RNA, 19 nt, Artificial Sequence
  Description of Artificial Sequence: Synthetic oligonucleotide
  Antisense strand to SEQ ID NO: 826614
uaugcccuccagauuaaug

SEQ ID NO: 826616 - RNA, 19 nt, Artificial Sequence
  Description of Artificial Sequence: Synthetic oligonucleotide
  Sense strand starting at position 1014 of SEQ ID NO: 587899
gcagaugaucugcaccauu

SEQ ID NO: 826617 - RNA, 19 nt, Artificial Sequence
  Description of Artificial Sequence: Synthetic oligonucleotide
  Antisense strand to SEQ ID NO: 826616
aauggugcagaucaucugc

SEQ ID NO: 826618 - RNA, 19 nt, Artificial Sequence
  Description of Artificial Sequence: Synthetic oligonucleotide
  Sense strand starting at position 1017 of SEQ ID NO: 587899
gaugaucugcaccauugua

SEQ ID NO: 826619 - RNA, 19 nt, Artificial Sequence
  Description of Artificial Sequence: Synthetic oligonucleotide
  Antisense strand to SEQ ID NO: 826618
uacaauggugcagaucauc

SEQ ID NO: 826620 - RNA, 19 nt, Artificial Sequence
  Description of Artificial Sequence: Synthetic oligonucleotide
  Sense strand starting at position 1101 of SEQ ID NO: 587899
guauaagaacaaugaugca

SEQ ID NO: 826621 - RNA, 19 nt, Artificial Sequence
  Description of Artificial Sequence: Synthetic oligonucleotide
  Antisense strand to SEQ ID NO: 826620
ugcaucauuguucuuauac

SEQ ID NO: 826622 - RNA, 19 nt, Artificial Sequence
  Description of Artificial Sequence: Synthetic oligonucleotide
  Sense strand starting at position 1156 of SEQ ID NO: 587899
uguccuuggccuuagaaua

SEQ ID NO: 826623 - RNA, 19 nt, Artificial Sequence
  Description of Artificial Sequence: Synthetic oligonucleotide
  Antisense strand to SEQ ID NO: 826622
uauucuaaggccaaggaca

SEQ ID NO: 826624 - RNA, 19 nt, Artificial Sequence
  Description of Artificial Sequence: Synthetic oligonucleotide
  Sense strand starting at position 1192 of SEQ ID NO: 587899
ucccuaugaggucacaagu

SEQ ID NO: 826625 - RNA, 19 nt, Artificial Sequence
  Description of Artificial Sequence: Synthetic oligonucleotide
  Antisense strand to SEQ ID NO: 826624
acuugugaccucauaggga

SEQ ID NO: 826626 - RNA, 19 nt, Artificial Sequence
  Description of Artificial Sequence: Synthetic oligonucleotide
  Sense strand starting at position 1198 of SEQ ID NO: 587899
ugaggucacaagugauucu

SEQ ID NO: 826627 - RNA, 19 nt, Artificial Sequence
  Description of Artificial Sequence: Synthetic oligonucleotide
  Antisense strand to SEQ ID NO: 826626
agaaucacuugugaccuca

SEQ ID NO: 826628 - RNA, 19 nt, Artificial Sequence
  Description of Artificial Sequence: Synthetic oligonucleotide
  Sense strand starting at position 1281 of SEQ ID NO: 587899
gcgucucuugaggaagaua

SEQ ID NO: 826629 - RNA, 19 nt, Artificial Sequence
  Description of Artificial Sequence: Synthetic oligonucleotide
  Antisense strand to SEQ ID NO: 826628
uaucuuccucaagagacgc

SEQ ID NO: 826630 - RNA, 19 nt, Artificial Sequence
  Description of Artificial Sequence: Synthetic oligonucleotide
  Sense strand starting at position 1292 of SEQ ID NO: 587899
ggaagauaaauaugugcau

SEQ ID NO: 826631 - RNA, 19 nt, Artificial Sequence
  Description of Artificial Sequence: Synthetic oligonucleotide
  Antisense strand to SEQ ID NO: 826630
augcacauauuuaucuucc

SEQ ID NO: 826632 - RNA, 19 nt, Artificial Sequence
  Description of Artificial Sequence: Synthetic oligonucleotide
  Sense strand starting at position 1293 of SEQ ID NO: 587899
gaagauaaauaugugcaua

SEQ ID NO: 826633 - RNA, 19 nt, Artificial Sequence
  Description of Artificial Sequence: Synthetic oligonucleotide
  Antisense strand to SEQ ID NO: 826632
uaugcacauauuuaucuuc

SEQ ID NO: 826634 - RNA, 19 nt, Artificial Sequence
  Description of Artificial Sequence: Synthetic oligonucleotide
  Sense strand starting at position 1306 of SEQ ID NO: 587899
ugcauauuagcuuagaucu

SEQ ID NO: 826635 - RNA, 19 nt, Artificial Sequence
  Description of Artificial Sequence: Synthetic oligonucleotide
  Antisense strand to SEQ ID NO: 826634
agaucuaagcuaauaugca

SEQ ID NO: 826636 - RNA, 19 nt, Artificial Sequence
  Description of Artificial Sequence: Synthetic oligonucleotide
  Sense strand starting at position 1581 of SEQ ID NO: 587899
ggccaucaacuugacagua

SEQ ID NO: 826637 - RNA, 19 nt, Artificial Sequence
  Description of Artificial Sequence: Synthetic oligonucleotide
  Antisense strand to SEQ ID NO: 826636
uacugucaaguugauggcc

SEQ ID NO: 826638 - RNA, 19 nt, Artificial Sequence
  Description of Artificial Sequence: Synthetic oligonucleotide
  Sense strand starting at position 1628 of SEQ ID NO: 587899
cccugaugacauugacgga

SEQ ID NO: 826639 - RNA, 19 nt, Artificial Sequence
  Description of Artificial Sequence: Synthetic oligonucleotide
  Antisense strand to SEQ ID NO: 826638
uccgucaaugucaucaggg

SEQ ID NO: 826640 - RNA, 19 nt, Artificial Sequence
  Description of Artificial Sequence: Synthetic oligonucleotide
  Sense strand starting at position 1746 of SEQ ID NO: 587899
ugcauugagucacuuagaa

SEQ ID NO: 826641 - RNA, 19 nt, Artificial Sequence
  Description of Artificial Sequence: Synthetic oligonucleotide
  Antisense strand to SEQ ID NO: 826640
uucuaagugacucaaugca

SEQ ID NO: 826642 - RNA, 19 nt, Artificial Sequence
  Description of Artificial Sequence: Synthetic oligonucleotide
  Sense strand starting at position 1786 of SEQ ID NO: 587899
cuaaguaaagguugacauu

SEQ ID NO: 826643 - RNA, 19 nt, Artificial Sequence
  Description of Artificial Sequence: Synthetic oligonucleotide
  Antisense strand to SEQ ID NO: 826642
aaugucaaccuuuacuuag

SEQ ID NO: 826644 - RNA, 19 nt, Artificial Sequence
  Description of Artificial Sequence: Synthetic oligonucleotide
  Sense strand starting at position 2027 of SEQ ID NO: 587899
cguauagauaaguagggau

SEQ ID NO: 826645 - RNA, 19 nt, Artificial Sequence
  Description of Artificial Sequence: Synthetic oligonucleotide
  Antisense strand to SEQ ID NO: 826644
aucccuacuuaucuauacg

SEQ ID NO: 826646 - RNA, 19 nt, Artificial Sequence
  Description of Artificial Sequence: Synthetic oligonucleotide
  Sense strand starting at position 2042 of SEQ ID NO: 587899
ggaucuuuaccauacuguu

SEQ ID NO: 826647 - RNA, 19 nt, Artificial Sequence
  Description of Artificial Sequence: Synthetic oligonucleotide
  Antisense strand to SEQ ID NO: 826646
aacaguaugguaaagaucc

SEQ ID NO: 826648 - RNA, 19 nt, Artificial Sequence
  Description of Artificial Sequence: Synthetic oligonucleotide
  Sense strand starting at position 2138 of SEQ ID NO: 587899
aaauuauaacguggguuaa

SEQ ID NO: 826649 - RNA, 19 nt, Artificial Sequence
  Description of Artificial Sequence: Synthetic oligonucleotide
  Antisense strand to SEQ ID NO: 826648
uuaacccacguuauaauuu

SEQ ID NO: 826650 - RNA, 19 nt, Artificial Sequence
  Description of Artificial Sequence: Synthetic oligonucleotide
  Sense strand starting at position 2139 of SEQ ID NO: 587899
aauuauaacguggguuaaa

SEQ ID NO: 826651 - RNA, 19 nt, Artificial Sequence
  Description of Artificial Sequence: Synthetic oligonucleotide
  Antisense strand to SEQ ID NO: 826650
uuuaacccacguuauaauu

SEQ ID NO: 826652 - RNA, 19 nt, Artificial Sequence
  Description of Artificial Sequence: Synthetic oligonucleotide
  Sense strand starting at position 2140 of SEQ ID NO: 587899
auuauaacguggguuaaau

SEQ ID NO: 826653 - RNA, 19 nt, Artificial Sequence
  Description of Artificial Sequence: Synthetic oligonucleotide
  Antisense strand to SEQ ID NO: 826652
auuuaacccacguuauaau

SEQ ID NO: 826654 - RNA, 19 nt, Artificial Sequence
  Description of Artificial Sequence: Synthetic oligonucleotide
  Sense strand starting at position 2142 of SEQ ID NO: 587899
uauaacguggguuaaauaa

SEQ ID NO: 826655 - RNA, 19 nt, Artificial Sequence
  Description of Artificial Sequence: Synthetic oligonucleotide
  Antisense strand to SEQ ID NO: 826654
uuauuuaacccacguuaua

SEQ ID NO: 826656 - RNA, 19 nt, Artificial Sequence
  Description of Artificial Sequence: Synthetic oligonucleotide
  Sense strand starting at position 2350 of SEQ ID NO: 587899
guacuuaagccugaaucuu

SEQ ID NO: 826657 - RNA, 19 nt, Artificial Sequence
  Description of Artificial Sequence: Synthetic oligonucleotide
  Antisense strand to SEQ ID NO: 826656
aagauucaggcuuaaguac

SEQ ID NO: 826658 - RNA, 19 nt, Artificial Sequence
  Description of Artificial Sequence: Synthetic oligonucleotide
  Sense strand starting at position 2358 of SEQ ID NO: 587899
gccugaaucuuucuggaaa

SEQ ID NO: 826659 - RNA, 19 nt, Artificial Sequence
  Description of Artificial Sequence: Synthetic oligonucleotide
  Antisense strand to SEQ ID NO: 826658
uuuccagaaagauucaggc

SEQ ID NO: 826660 - RNA, 19 nt, Artificial Sequence
  Description of Artificial Sequence: Synthetic oligonucleotide
  Sense strand starting at position 2598 of SEQ ID NO: 587899
caguacugccaggaaguua

SEQ ID NO: 826661 - RNA, 19 nt, Artificial Sequence
  Description of Artificial Sequence: Synthetic oligonucleotide
  Antisense strand to SEQ ID NO: 826660
uaacuuccuggcaguacug

SEQ ID NO: 826662 - RNA, 19 nt, Artificial Sequence
  Description of Artificial Sequence: Synthetic oligonucleotide
  Sense strand starting at position 2780 of SEQ ID NO: 587899
gcaacaucacagugggaau

SEQ ID NO: 826663 - RNA, 19 nt, Artificial Sequence
  Description of Artificial Sequence: Synthetic oligonucleotide
  Antisense strand to SEQ ID NO: 826662
auucccacugugauguugc

SEQ ID NO: 826664 - RNA, 19 nt, Artificial Sequence
  Description of Artificial Sequence: Synthetic oligonucleotide
  Sense strand starting at position 3284 of SEQ ID NO: 587899
ucaauuagauguucuugaa

SEQ ID NO: 826665 - RNA, 19 nt, Artificial Sequence
  Description of Artificial Sequence: Synthetic oligonucleotide
  Antisense strand to SEQ ID NO: 826664
uucaagaacaucuaauuga

SEQ ID NO: 826666 - RNA, 19 nt, Artificial Sequence
  Description of Artificial Sequence: Synthetic oligonucleotide
  Sense strand starting at position 3316 of SEQ ID NO: 587899
aaaugauuaggucggucaa

SEQ ID NO: 826667 - RNA, 19 nt, Artificial Sequence
  Description of Artificial Sequence: Synthetic oligonucleotide
  Antisense strand to SEQ ID NO: 826666
uugaccgaccuaaucauuu

SEQ ID NO: 826668 - RNA, 19 nt, Artificial Sequence
  Description of Artificial Sequence: Synthetic oligonucleotide
  Sense strand starting at position 3317 of SEQ ID NO: 587899
aaugauuaggucggucaaa

SEQ ID NO: 826669 - RNA, 19 nt, Artificial Sequence
  Description of Artificial Sequence: Synthetic oligonucleotide
  Antisense strand to SEQ ID NO: 826668
uuugaccgaccuaaucauu

SEQ ID NO: 826670 - RNA, 19 nt, Artificial Sequence
  Description of Artificial Sequence: Synthetic oligonucleotide
  Sense strand starting at position 3829 of SEQ ID NO: 587899
ggccuugcugcgcuucuaa

SEQ ID NO: 826671 - RNA, 19 nt, Artificial Sequence
  Description of Artificial Sequence: Synthetic oligonucleotide
  Antisense strand to SEQ ID NO: 826670
uuagaagcgcagcaaggcc

SEQ ID NO: 826672 - RNA, 19 nt, Artificial Sequence
  Description of Artificial Sequence: Synthetic oligonucleotide
  Sense strand starting at position 3903 of SEQ ID NO: 587899
gcuauuuagaguggucucu

SEQ ID NO: 826673 - RNA, 19 nt, Artificial Sequence
  Description of Artificial Sequence: Synthetic oligonucleotide
  Antisense strand to SEQ ID NO: 826672
agagaccacucuaaauagc

SEQ ID NO: 826674 - RNA, 19 nt, Artificial Sequence
  Description of Artificial Sequence: Synthetic oligonucleotide
  Sense strand starting at position 3905 of SEQ ID NO: 587899
uauuuagaguggucucugu

SEQ ID NO: 826675 - RNA, 19 nt, Artificial Sequence
  Description of Artificial Sequence: Synthetic oligonucleotide
  Antisense strand to SEQ ID NO: 826674
acagagaccacucuaaaua

SEQ ID NO: 826676 - RNA, 19 nt, Artificial Sequence
  Description of Artificial Sequence: Synthetic oligonucleotide
  Sense strand starting at position 130 of SEQ ID NO: 587900
aaguuuauguuacuuggga

SEQ ID NO: 826677 - RNA, 19 nt, Artificial Sequence
  Description of Artificial Sequence: Synthetic oligonucleotide
  Antisense strand to SEQ ID NO: 826676
ucccaaguaacauaaacuu

SEQ ID NO: 826678 - RNA, 19 nt, Artificial Sequence
  Description of Artificial Sequence: Synthetic oligonucleotide
  Sense strand starting at position 131 of SEQ ID NO: 587900
aguuuauguuacuugggaa

SEQ ID NO: 826679 - RNA, 19 nt, Artificial Sequence
  Description of Artificial Sequence: Synthetic oligonucleotide
  Antisense strand to SEQ ID NO: 826678
uucccaaguaacauaaacu

SEQ ID NO: 826680 - RNA, 19 nt, Artificial Sequence
  Description of Artificial Sequence: Synthetic oligonucleotide
  Sense strand starting at position 132 of SEQ ID NO: 587900
guuuauguuacuugggaaa

SEQ ID NO: 826681 - RNA, 19 nt, Artificial Sequence
  Description of Artificial Sequence: Synthetic oligonucleotide
  Antisense strand to SEQ ID NO: 826680
uuucccaaguaacauaaac

SEQ ID NO: 826682 - RNA, 19 nt, Artificial Sequence
  Description of Artificial Sequence: Synthetic oligonucleotide
  Sense strand starting at position 158 of SEQ ID NO: 587900
caugaaguaugagucugaa

SEQ ID NO: 826683 - RNA, 19 nt, Artificial Sequence
  Description of Artificial Sequence: Synthetic oligonucleotide
  Antisense strand to SEQ ID NO: 826682
uucagacucauacuucaug

SEQ ID NO: 826684 - RNA, 19 nt, Artificial Sequence
  Description of Artificial Sequence: Synthetic oligonucleotide
  Sense strand starting at position 331 of SEQ ID NO: 587900
guuucagugugagugaaac

SEQ ID NO: 826685 - RNA, 19 nt, Artificial Sequence
  Description of Artificial Sequence: Synthetic oligonucleotide
  Antisense strand to SEQ ID NO: 826684
guuucacucacacugaaac

SEQ ID NO: 826686 - RNA, 19 nt, Artificial Sequence
  Description of Artificial Sequence: Synthetic oligonucleotide
  Sense strand starting at position 337 of SEQ ID NO: 587900
gugugagugaaacauaucu

SEQ ID NO: 826687 - RNA, 19 nt, Artificial Sequence
  Description of Artificial Sequence: Synthetic oligonucleotide
  Antisense strand to SEQ ID NO: 826686
agauauguuucacucacac

SEQ ID NO: 826688 - RNA, 19 nt, Artificial Sequence
  Description of Artificial Sequence: Synthetic oligonucleotide
  Sense strand starting at position 344 of SEQ ID NO: 587900
ugaaacauaucugagagaa

SEQ ID NO: 826689 - RNA, 19 nt, Artificial Sequence
  Description of Artificial Sequence: Synthetic oligonucleotide
  Antisense strand to SEQ ID NO: 826688
uucucucagauauguuuca

SEQ ID NO: 826690 - RNA, 19 nt, Artificial Sequence
  Description of Artificial Sequence: Synthetic oligonucleotide
  Sense strand starting at position 403 of SEQ ID NO: 587900
uugacauugucaucuaagu

SEQ ID NO: 826691 - RNA, 19 nt, Artificial Sequence
  Description of Artificial Sequence: Synthetic oligonucleotide
  Antisense strand to SEQ ID NO: 826690
acuuagaugacaaugucaa

SEQ ID NO: 826692 - RNA, 19 nt, Artificial Sequence
  Description of Artificial Sequence: Synthetic oligonucleotide
  Sense strand starting at position 408 of SEQ ID NO: 587900
auugucaucuaaguagguu

SEQ ID NO: 826693 - RNA, 19 nt, Artificial Sequence
  Description of Artificial Sequence: Synthetic oligonucleotide
  Antisense strand to SEQ ID NO: 826692
aaccuacuuagaugacaau

SEQ ID NO: 826694 - RNA, 19 nt, Artificial Sequence
  Description of Artificial Sequence: Synthetic oligonucleotide
  Sense strand starting at position 425 of SEQ ID NO: 587900
uuggucccaggguauaaau

SEQ ID NO: 826695 - RNA, 19 nt, Artificial Sequence
  Description of Artificial Sequence: Synthetic oligonucleotide
  Antisense strand to SEQ ID NO: 826694
auuuauacccugggaccaa

SEQ ID NO: 826696 - RNA, 19 nt, Artificial Sequence
  Description of Artificial Sequence: Synthetic oligonucleotide
  Sense strand starting at position 435 of SEQ ID NO: 587900
gguauaaauagguguggag

SEQ ID NO: 826697 - RNA, 19 nt, Artificial Sequence
  Description of Artificial Sequence: Synthetic oligonucleotide
  Antisense strand to SEQ ID NO: 826696
cuccacaccuauuuauacc

SEQ ID NO: 826698 - RNA, 19 nt, Artificial Sequence
  Description of Artificial Sequence: Synthetic oligonucleotide
  Sense strand starting at position 452 of SEQ ID NO: 587900
agcccauuccaaugagaau

SEQ ID NO: 826699 - RNA, 19 nt, Artificial Sequence
  Description of Artificial Sequence: Synthetic oligonucleotide
  Antisense strand to SEQ ID NO: 826698
auucucauuggaaugggcu

SEQ ID NO: 826700 - RNA, 19 nt, Artificial Sequence
  Description of Artificial Sequence: Synthetic oligonucleotide
  Sense strand starting at position 466 of SEQ ID NO: 587900
agaaucugcgcgcaaauga

SEQ ID NO: 826701 - RNA, 19 nt, Artificial Sequence
  Description of Artificial Sequence: Synthetic oligonucleotide
  Antisense strand to SEQ ID NO: 826700
ucauuugcgcgcagauucu

SEQ ID NO: 826702 - RNA, 19 nt, Artificial Sequence
  Description of Artificial Sequence: Synthetic oligonucleotide
  Sense strand starting at position 494 of SEQ ID NO: 587900
cguagacccagugauuauu

SEQ ID NO: 826703 - RNA, 19 nt, Artificial Sequence
  Description of Artificial Sequence: Synthetic oligonucleotide
  Antisense strand to SEQ ID NO: 826702
aauaaucacugggucuacg

SEQ ID NO: 826704 - RNA, 19 nt, Artificial Sequence
  Description of Artificial Sequence: Synthetic oligonucleotide
  Sense strand starting at position 626 of SEQ ID NO: 587900
gcgagaugaagugagguaa

SEQ ID NO: 826705 - RNA, 19 nt, Artificial Sequence
  Description of Artificial Sequence: Synthetic oligonucleotide
  Antisense strand to SEQ ID NO: 826704
uuaccucacuucaucucgc

SEQ ID NO: 826706 - RNA, 19 nt, Artificial Sequence
  Description of Artificial Sequence: Synthetic oligonucleotide
  Sense strand starting at position 746 of SEQ ID NO: 587900
ccagguucccgaugucaaa

SEQ ID NO: 826707 - RNA, 19 nt, Artificial Sequence
  Description of Artificial Sequence: Synthetic oligonucleotide
  Antisense strand to SEQ ID NO: 826706
uuugacaucgggaaccugg

SEQ ID NO: 826708 - RNA, 19 nt, Artificial Sequence
  Description of Artificial Sequence: Synthetic oligonucleotide
  Sense strand starting at position 820 of SEQ ID NO: 587900
gugguaauuacgcugcuca

SEQ ID NO: 826709 - RNA, 19 nt, Artificial Sequence
  Description of Artificial Sequence: Synthetic oligonucleotide
  Antisense strand to SEQ ID NO: 826708
ugagcagcguaauuaccac

SEQ ID NO: 826710 - RNA, 19 nt, Artificial Sequence
  Description of Artificial Sequence: Synthetic oligonucleotide
  Sense strand starting at position 850 of SEQ ID NO: 587900
accauuaacgccuggauga

SEQ ID NO: 826711 - RNA, 19 nt, Artificial Sequence
  Description of Artificial Sequence: Synthetic oligonucleotide
  Antisense strand to SEQ ID NO: 826710
ucauccaggcguuaauggu

SEQ ID NO: 826712 - RNA, 19 nt, Artificial Sequence
  Description of Artificial Sequence: Synthetic oligonucleotide
  Sense strand starting at position 851 of SEQ ID NO: 587900
ccauuaacgccuggaugaa

SEQ ID NO: 826713 - RNA, 19 nt, Artificial Sequence
  Description of Artificial Sequence: Synthetic oligonucleotide
  Antisense strand to SEQ ID NO: 826712
uucauccaggcguuaaugg

SEQ ID NO: 826714 - RNA, 19 nt, Artificial Sequence
  Description of Artificial Sequence: Synthetic oligonucleotide
  Sense strand starting at position 1277 of SEQ ID NO: 587900
cguccauggcgcuuagaau

SEQ ID NO: 826715 - RNA, 19 nt, Artificial Sequence
  Description of Artificial Sequence: Synthetic oligonucleotide
  Antisense strand to SEQ ID NO: 826714
auucuaagcgccauggacg

SEQ ID NO: 826716 - RNA, 19 nt, Artificial Sequence
  Description of Artificial Sequence: Synthetic oligonucleotide
  Sense strand starting at position 1278 of SEQ ID NO: 587900
guccauggcgcuuagaauu

SEQ ID NO: 826717 - RNA, 19 nt, Artificial Sequence
  Description of Artificial Sequence: Synthetic oligonucleotide
  Antisense strand to SEQ ID NO: 826716
aauucuaagcgccauggac

SEQ ID NO: 826718 - RNA, 19 nt, Artificial Sequence
  Description of Artificial Sequence: Synthetic oligonucleotide
  Sense strand starting at position 1452 of SEQ ID NO: 587900
agugcauccugaucacaga

SEQ ID NO: 826719 - RNA, 19 nt, Artificial Sequence
  Description of Artificial Sequence: Synthetic oligonucleotide
  Antisense strand to SEQ ID NO: 826718
ucugugaucaggaugcacu

SEQ ID NO: 826720 - RNA, 19 nt, Artificial Sequence
  Description of Artificial Sequence: Synthetic oligonucleotide
  Sense strand starting at position 1943 of SEQ ID NO: 587900
ucuccagucccggaacaau

SEQ ID NO: 826721 - RNA, 19 nt, Artificial Sequence
  Description of Artificial Sequence: Synthetic oligonucleotide
  Antisense strand to SEQ ID NO: 826720
auuguuccgggacuggaga

SEQ ID NO: 826722 - RNA, 19 nt, Artificial Sequence
  Description of Artificial Sequence: Synthetic oligonucleotide
  Sense strand starting at position 2134 of SEQ ID NO: 587900
ccguacuccuacuccauua

SEQ ID NO: 826723 - RNA, 19 nt, Artificial Sequence
  Description of Artificial Sequence: Synthetic oligonucleotide
  Antisense strand to SEQ ID NO: 826722
uaauggaguaggaguacgg

SEQ ID NO: 826724 - RNA, 19 nt, Artificial Sequence
  Description of Artificial Sequence: Synthetic oligonucleotide
  Sense strand starting at position 2207 of SEQ ID NO: 587900
uguauucccugucccaauu

SEQ ID NO: 826725 - RNA, 19 nt, Artificial Sequence
  Description of Artificial Sequence: Synthetic oligonucleotide
  Antisense strand to SEQ ID NO: 826724
aauugggacagggaauaca

SEQ ID NO: 826726 - RNA, 19 nt, Artificial Sequence
  Description of Artificial Sequence: Synthetic oligonucleotide
  Sense strand starting at position 2251 of SEQ ID NO: 587900
ggguaaacuacguguguag

SEQ ID NO: 826727 - RNA, 19 nt, Artificial Sequence
  Description of Artificial Sequence: Synthetic oligonucleotide
  Antisense strand to SEQ ID NO: 826726
cuacacacguaguuuaccc

SEQ ID NO: 826728 - RNA, 19 nt, Artificial Sequence
  Description of Artificial Sequence: Synthetic oligonucleotide
  Sense strand starting at position 2253 of SEQ ID NO: 587900
guaaacuacguguguagaa

SEQ ID NO: 826729 - RNA, 19 nt, Artificial Sequence
  Description of Artificial Sequence: Synthetic oligonucleotide
  Antisense strand to SEQ ID NO: 826728
uucuacacacguaguuuac

SEQ ID NO: 826730 - RNA, 19 nt, Artificial Sequence
  Description of Artificial Sequence: Synthetic oligonucleotide
  Sense strand starting at position 2254 of SEQ ID NO: 587900
uaaacuacguguguagaaa

SEQ ID NO: 826731 - RNA, 19 nt, Artificial Sequence
  Description of Artificial Sequence: Synthetic oligonucleotide
  Antisense strand to SEQ ID NO: 826730
uuucuacacacguaguuua

SEQ ID NO: 826732 - RNA, 19 nt, Artificial Sequence
  Description of Artificial Sequence: Synthetic oligonucleotide
  Sense strand starting at position 2255 of SEQ ID NO: 587900
aaacuacguguguagaaau

SEQ ID NO: 826733 - RNA, 19 nt, Artificial Sequence
  Description of Artificial Sequence: Synthetic oligonucleotide
  Antisense strand to SEQ ID NO: 826732
auuucuacacacguaguuu

SEQ ID NO: 826734 - RNA, 19 nt, Artificial Sequence
  Description of Artificial Sequence: Synthetic oligonucleotide
  Sense strand starting at position 2300 of SEQ ID NO: 587900
acgugugcgcgacuagauu

SEQ ID NO: 826735 - RNA, 19 nt, Artificial Sequence
  Description of Artificial Sequence: Synthetic oligonucleotide
  Antisense strand to SEQ ID NO: 826734
aaucuagucgcgcacacgu

SEQ ID NO: 826736 - RNA, 19 nt, Artificial Sequence
  Description of Artificial Sequence: Synthetic oligonucleotide
  Sense strand starting at position 2301 of SEQ ID NO: 587900
cgugugcgcgacuagauuu

SEQ ID NO: 826737 - RNA, 19 nt, Artificial Sequence
  Description of Artificial Sequence: Synthetic oligonucleotide
  Antisense strand to SEQ ID NO: 826736
aaaucuagucgcgcacacg

SEQ ID NO: 826738 - RNA, 19 nt, Artificial Sequence
  Description of Artificial Sequence: Synthetic oligonucleotide
  Sense strand starting at position 2307 of SEQ ID NO: 587900
cgcgacuagauuugaaucu

SEQ ID NO: 826739 - RNA, 19 nt, Artificial Sequence
  Description of Artificial Sequence: Synthetic oligonucleotide
  Antisense strand to SEQ ID NO: 826738
agauucaaaucuagucgcg

SEQ ID NO: 826740 - RNA, 19 nt, Artificial Sequence
  Description of Artificial Sequence: Synthetic oligonucleotide
  Sense strand starting at position 2484 of SEQ ID NO: 587900
cccagagcgcgguaucaaa

SEQ ID NO: 826741 - RNA, 19 nt, Artificial Sequence
  Description of Artificial Sequence: Synthetic oligonucleotide
  Antisense strand to SEQ ID NO: 826740
uuugauaccgcgcucuggg

SEQ ID NO: 826742 - RNA, 19 nt, Artificial Sequence
  Description of Artificial Sequence: Synthetic oligonucleotide
  Sense strand starting at position 3562 of SEQ ID NO: 587900
cguccagccgaagagaaau

SEQ ID NO: 826743 - RNA, 19 nt, Artificial Sequence
  Description of Artificial Sequence: Synthetic oligonucleotide
  Antisense strand to SEQ ID NO: 826742
auuucucuucggcuggacg

SEQ ID NO: 826744 - RNA, 19 nt, Artificial Sequence
  Description of Artificial Sequence: Synthetic oligonucleotide
  Sense strand starting at position 3582 of SEQ ID NO: 587900
agugaaugagacugugacu

SEQ ID NO: 826745 - RNA, 19 nt, Artificial Sequence
  Description of Artificial Sequence: Synthetic oligonucleotide
  Antisense strand to SEQ ID NO: 826744
agucacagucucauucacu

SEQ ID NO: 826746 - RNA, 19 nt, Artificial Sequence
  Description of Artificial Sequence: Synthetic oligonucleotide
  Sense strand starting at position 3809 of SEQ ID NO: 587900
gggagccggucucuagaaa

SEQ ID NO: 826747 - RNA, 19 nt, Artificial Sequence
  Description of Artificial Sequence: Synthetic oligonucleotide
  Antisense strand to SEQ ID NO: 826746
uuucuagagaccggcuccc

SEQ ID NO: 826748 - RNA, 19 nt, Artificial Sequence
  Description of Artificial Sequence: Synthetic oligonucleotide
  Sense strand starting at position 3868 of SEQ ID NO: 587900
aucauuucugaucguuuau

SEQ ID NO: 826749 - RNA, 19 nt, Artificial Sequence
  Description of Artificial Sequence: Synthetic oligonucleotide
  Antisense strand to SEQ ID NO: 826748
auaaacgaucagaaaugau

SEQ ID NO: 826750 - RNA, 19 nt, Artificial Sequence
  Description of Artificial Sequence: Synthetic oligonucleotide
  Sense strand starting at position 3924 of SEQ ID NO: 587900
aguagauucugggaccaaa

SEQ ID NO: 826751 - RNA, 19 nt, Artificial Sequence
  Description of Artificial Sequence: Synthetic oligonucleotide
  Antisense strand to SEQ ID NO: 826750
uuuggucccagaaucuacu

SEQ ID NO: 826752 - RNA, 19 nt, Artificial Sequence
  Description of Artificial Sequence: Synthetic oligonucleotide
  Sense strand starting at position 3956 of SEQ ID NO: 587900
agauacuuggucggaggaa

SEQ ID NO: 826753 - RNA, 19 nt, Artificial Sequence
  Description of Artificial Sequence: Synthetic oligonucleotide
  Antisense strand to SEQ ID NO: 826752
uuccuccgaccaaguaucu

SEQ ID NO: 826754 - RNA, 19 nt, Artificial Sequence
  Description of Artificial Sequence: Synthetic oligonucleotide
  Sense strand starting at position 3968 of SEQ ID NO: 587900
ggaggaaaccucuggcuug

SEQ ID NO: 826755 - RNA, 19 nt, Artificial Sequence
  Description of Artificial Sequence: Synthetic oligonucleotide
  Antisense strand to SEQ ID NO: 826754
caagccagagguuuccucc

SEQ ID NO: 826756 - RNA, 19 nt, Artificial Sequence
  Description of Artificial Sequence: Synthetic oligonucleotide
  Sense strand starting at position 132 of SEQ ID NO: 587901
ggcaauaaagcaugaugua

SEQ ID NO: 826757 - RNA, 19 nt, Artificial Sequence
  Description of Artificial Sequence: Synthetic oligonucleotide
  Antisense strand to SEQ ID NO: 826756
uacaucaugcuuuauugcc

SEQ ID NO: 826758 - RNA, 19 nt, Artificial Sequence
  Description of Artificial Sequence: Synthetic oligonucleotide
  Sense strand starting at position 133 of SEQ ID NO: 587901
gcaauaaagcaugauguau

SEQ ID NO: 826759 - RNA, 19 nt, Artificial Sequence
  Description of Artificial Sequence: Synthetic oligonucleotide
  Antisense strand to SEQ ID NO: 826758
auacaucaugcuuuauugc

SEQ ID NO: 826760 - RNA, 19 nt, Artificial Sequence
  Description of Artificial Sequence: Synthetic oligonucleotide
  Sense strand starting at position 176 of SEQ ID NO: 587901
ugcugcucuggacagaaau

SEQ ID NO: 826761 - RNA, 19 nt, Artificial Sequence
  Description of Artificial Sequence: Synthetic oligonucleotide
  Antisense strand to SEQ ID NO: 826760
auuucuguccagagcagca

SEQ ID NO: 826762 - RNA, 19 nt, Artificial Sequence
  Description of Artificial Sequence: Synthetic oligonucleotide
  Sense strand starting at position 351 of SEQ ID NO: 587901
aaguuuauguuacuuggga

SEQ ID NO: 826763 - RNA, 19 nt, Artificial Sequence
  Description of Artificial Sequence: Synthetic oligonucleotide
  Antisense strand to SEQ ID NO: 826762
ucccaaguaacauaaacuu

SEQ ID NO: 826764 - RNA, 19 nt, Artificial Sequence
  Description of Artificial Sequence: Synthetic oligonucleotide
  Sense strand starting at position 352 of SEQ ID NO: 587901
aguuuauguuacuugggaa

SEQ ID NO: 826765 - RNA, 19 nt, Artificial Sequence
  Description of Artificial Sequence: Synthetic oligonucleotide
  Antisense strand to SEQ ID NO: 826764
uucccaaguaacauaaacu

SEQ ID NO: 826766 - RNA, 19 nt, Artificial Sequence
  Description of Artificial Sequence: Synthetic oligonucleotide
  Sense strand starting at position 353 of SEQ ID NO: 587901
guuuauguuacuugggaaa

SEQ ID NO: 826767 - RNA, 19 nt, Artificial Sequence
  Description of Artificial Sequence: Synthetic oligonucleotide
  Antisense strand to SEQ ID NO: 826766
uuucccaaguaacauaaac

SEQ ID NO: 826768 - RNA, 19 nt, Artificial Sequence
  Description of Artificial Sequence: Synthetic oligonucleotide
  Sense strand starting at position 379 of SEQ ID NO: 587901
caugaaguaugagucugaa

SEQ ID NO: 826769 - RNA, 19 nt, Artificial Sequence
  Description of Artificial Sequence: Synthetic oligonucleotide
  Antisense strand to SEQ ID NO: 826768
uucagacucauacuucaug

SEQ ID NO: 826770 - RNA, 19 nt, Artificial Sequence
  Description of Artificial Sequence: Synthetic oligonucleotide
  Sense strand starting at position 552 of SEQ ID NO: 587901
guuucagugugagugaaac

SEQ ID NO: 826771 - RNA, 19 nt, Artificial Sequence
  Description of Artificial Sequence: Synthetic oligonucleotide
  Antisense strand to SEQ ID NO: 826770
guuucacucacacugaaac

SEQ ID NO: 826772 - RNA, 19 nt, Artificial Sequence
  Description of Artificial Sequence: Synthetic oligonucleotide
  Sense strand starting at position 558 of SEQ ID NO: 587901
gugugagugaaacauaucu

SEQ ID NO: 826773 - RNA, 19 nt, Artificial Sequence
  Description of Artificial Sequence: Synthetic oligonucleotide
  Antisense strand to SEQ ID NO: 826772
agauauguuucacucacac

SEQ ID NO: 826774 - RNA, 19 nt, Artificial Sequence
  Description of Artificial Sequence: Synthetic oligonucleotide
  Sense strand starting at position 565 of SEQ ID NO: 587901
ugaaacauaucugagagaa

SEQ ID NO: 826775 - RNA, 19 nt, Artificial Sequence
  Description of Artificial Sequence: Synthetic oligonucleotide
  Antisense strand to SEQ ID NO: 826774
uucucucagauauguuuca

SEQ ID NO: 826776 - RNA, 19 nt, Artificial Sequence
  Description of Artificial Sequence: Synthetic oligonucleotide
  Sense strand starting at position 583 of SEQ ID NO: 587901
acaggaaagucuuaccuag

SEQ ID NO: 826777 - RNA, 19 nt, Artificial Sequence
  Description of Artificial Sequence: Synthetic oligonucleotide
  Antisense strand to SEQ ID NO: 826776
cuagguaagacuuuccugu

SEQ ID NO: 826778 - RNA, 19 nt, Artificial Sequence
  Description of Artificial Sequence: Synthetic oligonucleotide
  Sense strand starting at position 624 of SEQ ID NO: 587901
uugacauugucaucuaagu

SEQ ID NO: 826779 - RNA, 19 nt, Artificial Sequence
  Description of Artificial Sequence: Synthetic oligonucleotide
  Antisense strand to SEQ ID NO: 826778
acuuagaugacaaugucaa

SEQ ID NO: 826780 - RNA, 19 nt, Artificial Sequence
  Description of Artificial Sequence: Synthetic oligonucleotide
  Sense strand starting at position 629 of SEQ ID NO: 587901
auugucaucuaaguagguu

SEQ ID NO: 826781 - RNA, 19 nt, Artificial Sequence
  Description of Artificial Sequence: Synthetic oligonucleotide
  Antisense strand to SEQ ID NO: 826780
aaccuacuuagaugacaau

SEQ ID NO: 826782 - RNA, 19 nt, Artificial Sequence
  Description of Artificial Sequence: Synthetic oligonucleotide
  Sense strand starting at position 646 of SEQ ID NO: 587901
uuggucccaggguauaaau

SEQ ID NO: 826783 - RNA, 19 nt, Artificial Sequence
  Description of Artificial Sequence: Synthetic oligonucleotide
  Antisense strand to SEQ ID NO: 826782
auuuauacccugggaccaa

SEQ ID NO: 826784 - RNA, 19 nt, Artificial Sequence
  Description of Artificial Sequence: Synthetic oligonucleotide
  Sense strand starting at position 656 of SEQ ID NO: 587901
gguauaaauagguguggag

SEQ ID NO: 826785 - RNA, 19 nt, Artificial Sequence
  Description of Artificial Sequence: Synthetic oligonucleotide
  Antisense strand to SEQ ID NO: 826784
cuccacaccuauuuauacc

SEQ ID NO: 826786 - RNA, 19 nt, Artificial Sequence
  Description of Artificial Sequence: Synthetic oligonucleotide
  Sense strand starting at position 673 of SEQ ID NO: 587901
agcccauuccaaugagaau

SEQ ID NO: 826787 - RNA, 19 nt, Artificial Sequence
  Description of Artificial Sequence: Synthetic oligonucleotide
  Antisense strand to SEQ ID NO: 826786
auucucauuggaaugggcu

SEQ ID NO: 826788 - RNA, 19 nt, Artificial Sequence
  Description of Artificial Sequence: Synthetic oligonucleotide
  Sense strand starting at position 687 of SEQ ID NO: 587901
agaaucugcgcgcaaauga

SEQ ID NO: 826789 - RNA, 19 nt, Artificial Sequence
  Description of Artificial Sequence: Synthetic oligonucleotide
  Antisense strand to SEQ ID NO: 826788
ucauuugcgcgcagauucu

SEQ ID NO: 826790 - RNA, 19 nt, Artificial Sequence
  Description of Artificial Sequence: Synthetic oligonucleotide
  Sense strand starting at position 715 of SEQ ID NO: 587901
cguagacccagugauuauu

SEQ ID NO: 826791 - RNA, 19 nt, Artificial Sequence
  Description of Artificial Sequence: Synthetic oligonucleotide
  Antisense strand to SEQ ID NO: 826790
aauaaucacugggucuacg

SEQ ID NO: 826792 - RNA, 19 nt, Artificial Sequence
  Description of Artificial Sequence: Synthetic oligonucleotide
  Sense strand starting at position 847 of SEQ ID NO: 587901
gcgagaugaagugagguaa

SEQ ID NO: 826793 - RNA, 19 nt, Artificial Sequence
  Description of Artificial Sequence: Synthetic oligonucleotide
  Antisense strand to SEQ ID NO: 826792
uuaccucacuucaucucgc

SEQ ID NO: 826794 - RNA, 19 nt, Artificial Sequence
  Description of Artificial Sequence: Synthetic oligonucleotide
  Sense strand starting at position 967 of SEQ ID NO: 587901
ccagguucccgaugucaaa

SEQ ID NO: 826795 - RNA, 19 nt, Artificial Sequence
  Description of Artificial Sequence: Synthetic oligonucleotide
  Antisense strand to SEQ ID NO: 826794
uuugacaucgggaaccugg

SEQ ID NO: 826796 - RNA, 19 nt, Artificial Sequence
  Description of Artificial Sequence: Synthetic oligonucleotide
  Sense strand starting at position 1041 of SEQ ID NO: 587901
gugguaauuacgcugcuca

SEQ ID NO: 826797 - RNA, 19 nt, Artificial Sequence
  Description of Artificial Sequence: Synthetic oligonucleotide
  Antisense strand to SEQ ID NO: 826796
ugagcagcguaauuaccac

SEQ ID NO: 826798 - RNA, 19 nt, Artificial Sequence
  Description of Artificial Sequence: Synthetic oligonucleotide
  Sense strand starting at position 1071 of SEQ ID NO: 587901
accauuaacgccuggauga

SEQ ID NO: 826799 - RNA, 19 nt, Artificial Sequence
  Description of Artificial Sequence: Synthetic oligonucleotide
  Antisense strand to SEQ ID NO: 826798
ucauccaggcguuaauggu

SEQ ID NO: 826800 - RNA, 19 nt, Artificial Sequence
  Description of Artificial Sequence: Synthetic oligonucleotide
  Sense strand starting at position 1072 of SEQ ID NO: 587901
ccauuaacgccuggaugaa

SEQ ID NO: 826801 - RNA, 19 nt, Artificial Sequence
  Description of Artificial Sequence: Synthetic oligonucleotide
  Antisense strand to SEQ ID NO: 826800
uucauccaggcguuaaugg

SEQ ID NO: 826802 - RNA, 19 nt, Artificial Sequence
  Description of Artificial Sequence: Synthetic oligonucleotide
  Sense strand starting at position 1084 of SEQ ID NO: 587901
ggaugaaggucagaaagca

SEQ ID NO: 826803 - RNA, 19 nt, Artificial Sequence
  Description of Artificial Sequence: Synthetic oligonucleotide
  Antisense strand to SEQ ID NO: 826802
ugcuuucugaccuucaucc

SEQ ID NO: 826804 - RNA, 19 nt, Artificial Sequence
  Description of Artificial Sequence: Synthetic oligonucleotide
  Sense strand starting at position 1498 of SEQ ID NO: 587901
cguccauggcgcuuagaau

SEQ ID NO: 826805 - RNA, 19 nt, Artificial Sequence
  Description of Artificial Sequence: Synthetic oligonucleotide
  Antisense strand to SEQ ID NO: 826804
auucuaagcgccauggacg

SEQ ID NO: 826806 - RNA, 19 nt, Artificial Sequence
  Description of Artificial Sequence: Synthetic oligonucleotide
  Sense strand starting at position 1499 of SEQ ID NO: 587901
guccauggcgcuuagaauu

SEQ ID NO: 826807 - RNA, 19 nt, Artificial Sequence
  Description of Artificial Sequence: Synthetic oligonucleotide
  Antisense strand to SEQ ID NO: 826806
aauucuaagcgccauggac

SEQ ID NO: 826808 - RNA, 19 nt, Artificial Sequence
  Description of Artificial Sequence: Synthetic oligonucleotide
  Sense strand starting at position 1673 of SEQ ID NO: 587901
agugcauccugaucacaga

SEQ ID NO: 826809 - RNA, 19 nt, Artificial Sequence
  Description of Artificial Sequence: Synthetic oligonucleotide
  Antisense strand to SEQ ID NO: 826808
ucugugaucaggaugcacu

SEQ ID NO: 826810 - RNA, 19 nt, Artificial Sequence
  Description of Artificial Sequence: Synthetic oligonucleotide
  Sense strand starting at position 2164 of SEQ ID NO: 587901
ucuccagucccggaacaau

SEQ ID NO: 826811 - RNA, 19 nt, Artificial Sequence
  Description of Artificial Sequence: Synthetic oligonucleotide
  Antisense strand to SEQ ID NO: 826810
auuguuccgggacuggaga

SEQ ID NO: 826812 - RNA, 19 nt, Artificial Sequence
  Description of Artificial Sequence: Synthetic oligonucleotide
  Sense strand starting at position 2355 of SEQ ID NO: 587901
ccguacuccuacuccauua

SEQ ID NO: 826813 - RNA, 19 nt, Artificial Sequence
  Description of Artificial Sequence: Synthetic oligonucleotide
  Antisense strand to SEQ ID NO: 826812
uaauggaguaggaguacgg

SEQ ID NO: 826814 - RNA, 19 nt, Artificial Sequence
  Description of Artificial Sequence: Synthetic oligonucleotide
  Sense strand starting at position 2428 of SEQ ID NO: 587901
uguauucccugucccaauu

SEQ ID NO: 826815 - RNA, 19 nt, Artificial Sequence
  Description of Artificial Sequence: Synthetic oligonucleotide
  Antisense strand to SEQ ID NO: 826814
aauugggacagggaauaca

SEQ ID NO: 826816 - RNA, 19 nt, Artificial Sequence
  Description of Artificial Sequence: Synthetic oligonucleotide
  Sense strand starting at position 2472 of SEQ ID NO: 587901
ggguaaacuacguguguag

SEQ ID NO: 826817 - RNA, 19 nt, Artificial Sequence
  Description of Artificial Sequence: Synthetic oligonucleotide
  Antisense strand to SEQ ID NO: 826816
cuacacacguaguuuaccc

SEQ ID NO: 826818 - RNA, 19 nt, Artificial Sequence
  Description of Artificial Sequence: Synthetic oligonucleotide
  Sense strand starting at position 2474 of SEQ ID NO: 587901
guaaacuacguguguagaa

SEQ ID NO: 826819 - RNA, 19 nt, Artificial Sequence
  Description of Artificial Sequence: Synthetic oligonucleotide
  Antisense strand to SEQ ID NO: 826818
uucuacacacguaguuuac

SEQ ID NO: 826820 - RNA, 19 nt, Artificial Sequence
  Description of Artificial Sequence: Synthetic oligonucleotide
  Sense strand starting at position 2475 of SEQ ID NO: 587901
uaaacuacguguguagaaa

SEQ ID NO: 826821 - RNA, 19 nt, Artificial Sequence
  Description of Artificial Sequence: Synthetic oligonucleotide
  Antisense strand to SEQ ID NO: 826820
uuucuacacacguaguuua

SEQ ID NO: 826822 - RNA, 19 nt, Artificial Sequence
  Description of Artificial Sequence: Synthetic oligonucleotide
  Sense strand starting at position 2476 of SEQ ID NO: 587901
aaacuacguguguagaaau

SEQ ID NO: 826823 - RNA, 19 nt, Artificial Sequence
  Description of Artificial Sequence: Synthetic oligonucleotide
  Antisense strand to SEQ ID NO: 826822
auuucuacacacguaguuu

SEQ ID NO: 826824 - RNA, 19 nt, Artificial Sequence
  Description of Artificial Sequence: Synthetic oligonucleotide
  Sense strand starting at position 2521 of SEQ ID NO: 587901
acgugugcgcgacuagauu

SEQ ID NO: 826825 - RNA, 19 nt, Artificial Sequence
  Description of Artificial Sequence: Synthetic oligonucleotide
  Antisense strand to SEQ ID NO: 826824
aaucuagucgcgcacacgu

SEQ ID NO: 826826 - RNA, 19 nt, Artificial Sequence
  Description of Artificial Sequence: Synthetic oligonucleotide
  Sense strand starting at position 2522 of SEQ ID NO: 587901
cgugugcgcgacuagauuu

SEQ ID NO: 826827 - RNA, 19 nt, Artificial Sequence
  Description of Artificial Sequence: Synthetic oligonucleotide
  Antisense strand to SEQ ID NO: 826826
aaaucuagucgcgcacacg

SEQ ID NO: 826828 - RNA, 19 nt, Artificial Sequence
  Description of Artificial Sequence: Synthetic oligonucleotide
  Sense strand starting at position 2528 of SEQ ID NO: 587901
cgcgacuagauuugaaucu

SEQ ID NO: 826829 - RNA, 19 nt, Artificial Sequence
  Description of Artificial Sequence: Synthetic oligonucleotide
  Antisense strand to SEQ ID NO: 826828
agauucaaaucuagucgcg

SEQ ID NO: 826830 - RNA, 19 nt, Artificial Sequence
  Description of Artificial Sequence: Synthetic oligonucleotide
  Sense strand starting at position 2705 of SEQ ID NO: 587901
cccagagcgcgguaucaaa

SEQ ID NO: 826831 - RNA, 19 nt, Artificial Sequence
  Description of Artificial Sequence: Synthetic oligonucleotide
  Antisense strand to SEQ ID NO: 826830
uuugauaccgcgcucuggg

SEQ ID NO: 826832 - RNA, 19 nt, Artificial Sequence
  Description of Artificial Sequence: Synthetic oligonucleotide
  Sense strand starting at position 3783 of SEQ ID NO: 587901
cguccagccgaagagaaau

SEQ ID NO: 826833 - RNA, 19 nt, Artificial Sequence
  Description of Artificial Sequence: Synthetic oligonucleotide
  Antisense strand to SEQ ID NO: 826832
auuucucuucggcuggacg

SEQ ID NO: 826834 - RNA, 19 nt, Artificial Sequence
  Description of Artificial Sequence: Synthetic oligonucleotide
  Sense strand starting at position 3803 of SEQ ID NO: 587901
agugaaugagacugugacu

SEQ ID NO: 826835 - RNA, 19 nt, Artificial Sequence
  Description of Artificial Sequence: Synthetic oligonucleotide
  Antisense strand to SEQ ID NO: 826834
agucacagucucauucacu

SEQ ID NO: 826836 - RNA, 19 nt, Artificial Sequence
  Description of Artificial Sequence: Synthetic oligonucleotide
  Sense strand starting at position 269 of SEQ ID NO: 587902
ucuccagucccggaacaau

SEQ ID NO: 826837 - RNA, 19 nt, Artificial Sequence
  Description of Artificial Sequence: Synthetic oligonucleotide
  Antisense strand to SEQ ID NO: 826836
auuguuccgggacuggaga

SEQ ID NO: 826838 - RNA, 19 nt, Artificial Sequence
  Description of Artificial Sequence: Synthetic oligonucleotide
  Sense strand starting at position 580 of SEQ ID NO: 587902
uaaacuacguguguagaaa

SEQ ID NO: 826839 - RNA, 19 nt, Artificial Sequence
  Description of Artificial Sequence: Synthetic oligonucleotide
  Antisense strand to SEQ ID NO: 826838
uuucuacacacguaguuua

SEQ ID NO: 826840 - RNA, 19 nt, Artificial Sequence
  Description of Artificial Sequence: Synthetic oligonucleotide
  Sense strand starting at position 581 of SEQ ID NO: 587902
aaacuacguguguagaaau

SEQ ID NO: 826841 - RNA, 19 nt, Artificial Sequence
  Description of Artificial Sequence: Synthetic oligonucleotide
  Antisense strand to SEQ ID NO: 826840
auuucuacacacguaguuu

SEQ ID NO: 826842 - RNA, 19 nt, Artificial Sequence
  Description of Artificial Sequence: Synthetic oligonucleotide
  Sense strand starting at position 626 of SEQ ID NO: 587902
acgugugcgcgacuagauu

SEQ ID NO: 826843 - RNA, 19 nt, Artificial Sequence
  Description of Artificial Sequence: Synthetic oligonucleotide
  Antisense strand to SEQ ID NO: 826842
aaucuagucgcgcacacgu

SEQ ID NO: 826844 - RNA, 19 nt, Artificial Sequence
  Description of Artificial Sequence: Synthetic oligonucleotide
  Sense strand starting at position 633 of SEQ ID NO: 587902
cgcgacuagauuugaaucu

SEQ ID NO: 826845 - RNA, 19 nt, Artificial Sequence
  Description of Artificial Sequence: Synthetic oligonucleotide
  Antisense strand to SEQ ID NO: 826844
agauucaaaucuagucgcg

SEQ ID NO: 826846 - RNA, 19 nt, Artificial Sequence
  Description of Artificial Sequence: Synthetic oligonucleotide
  Sense strand starting at position 1888 of SEQ ID NO: 587902
cguccagccgaagagaaau

SEQ ID NO: 826847 - RNA, 19 nt, Artificial Sequence
  Description of Artificial Sequence: Synthetic oligonucleotide
  Antisense strand to SEQ ID NO: 826846
auuucucuucggcuggacg

SEQ ID NO: 826848 - RNA, 19 nt, Artificial Sequence
  Description of Artificial Sequence: Synthetic oligonucleotide
  Sense strand starting at position 1908 of SEQ ID NO: 587902
agugaaugagacugugacu

SEQ ID NO: 826849 - RNA, 19 nt, Artificial Sequence
  Description of Artificial Sequence: Synthetic oligonucleotide
  Antisense strand to SEQ ID NO: 826848
agucacagucucauucacu

SEQ ID NO: 826850 - RNA, 19 nt, Artificial Sequence
  Description of Artificial Sequence: Synthetic oligonucleotide
  Sense strand starting at position 2135 of SEQ ID NO: 587902
gggagccggucucuagaaa

SEQ ID NO: 826851 - RNA, 19 nt, Artificial Sequence
  Description of Artificial Sequence: Synthetic oligonucleotide
  Antisense strand to SEQ ID NO: 826850
uuucuagagaccggcuccc

SEQ ID NO: 826852 - RNA, 19 nt, Artificial Sequence
  Description of Artificial Sequence: Synthetic oligonucleotide
  Sense strand starting at position 2194 of SEQ ID NO: 587902
aucauuucugaucguuuau

SEQ ID NO: 826853 - RNA, 19 nt, Artificial Sequence
  Description of Artificial Sequence: Synthetic oligonucleotide
  Antisense strand to SEQ ID NO: 826852
auaaacgaucagaaaugau

SEQ ID NO: 826854 - RNA, 19 nt, Artificial Sequence
  Description of Artificial Sequence: Synthetic oligonucleotide
  Sense strand starting at position 2282 of SEQ ID NO: 587902
agauacuuggucggaggaa

SEQ ID NO: 826855 - RNA, 19 nt, Artificial Sequence
  Description of Artificial Sequence: Synthetic oligonucleotide
  Antisense strand to SEQ ID NO: 826854
uuccuccgaccaaguaucu

SEQ ID NO: 826856 - RNA, 19 nt, Artificial Sequence
  Description of Artificial Sequence: Synthetic oligonucleotide
  Sense strand starting at position 2294 of SEQ ID NO: 587902
ggaggaaaccucuggcuug

SEQ ID NO: 826857 - RNA, 19 nt, Artificial Sequence
  Description of Artificial Sequence: Synthetic oligonucleotide
  Antisense strand to SEQ ID NO: 826856
caagccagagguuuccucc

SEQ ID NO: 826858 - RNA, 19 nt, Artificial Sequence
  Description of Artificial Sequence: Synthetic oligonucleotide
  Sense strand starting at position 2373 of SEQ ID NO: 587902
uggaguagccaauauccau

SEQ ID NO: 826859 - RNA, 19 nt, Artificial Sequence
  Description of Artificial Sequence: Synthetic oligonucleotide
  Antisense strand to SEQ ID NO: 826858
auggauauuggcuacucca

SEQ ID NO: 826860 - RNA, 19 nt, Artificial Sequence
  Description of Artificial Sequence: Synthetic oligonucleotide
  Sense strand starting at position 2444 of SEQ ID NO: 587902
gccagucaauagguagaua

SEQ ID NO: 826861 - RNA, 19 nt, Artificial Sequence
  Description of Artificial Sequence: Synthetic oligonucleotide
  Antisense strand to SEQ ID NO: 826860
uaucuaccuauugacuggc

SEQ ID NO: 826862 - RNA, 19 nt, Artificial Sequence
  Description of Artificial Sequence: Synthetic oligonucleotide
  Sense strand starting at position 2505 of SEQ ID NO: 587902
gcaagaguggcugaguaga

SEQ ID NO: 826863 - RNA, 19 nt, Artificial Sequence
  Description of Artificial Sequence: Synthetic oligonucleotide
  Antisense strand to SEQ ID NO: 826862
ucuacucagccacucuugc

SEQ ID NO: 826864 - RNA, 19 nt, Artificial Sequence
  Description of Artificial Sequence: Synthetic oligonucleotide
  Sense strand starting at position 2507 of SEQ ID NO: 587902
aagaguggcugaguagaaa

SEQ ID NO: 826865 - RNA, 19 nt, Artificial Sequence
  Description of Artificial Sequence: Synthetic oligonucleotide
  Antisense strand to SEQ ID NO: 826864
uuucuacucagccacucuu

SEQ ID NO: 826866 - RNA, 19 nt, Artificial Sequence
  Description of Artificial Sequence: Synthetic oligonucleotide
  Sense strand starting at position 2583 of SEQ ID NO: 587902
cugacuuccucaccagaga

SEQ ID NO: 826867 - RNA, 19 nt, Artificial Sequence
  Description of Artificial Sequence: Synthetic oligonucleotide
  Antisense strand to SEQ ID NO: 826866
ucucuggugaggaagucag

SEQ ID NO: 826868 - RNA, 19 nt, Artificial Sequence
  Description of Artificial Sequence: Synthetic oligonucleotide
  Sense strand starting at position 2734 of SEQ ID NO: 587902
ugaugcaaucugcaagaga

SEQ ID NO: 826869 - RNA, 19 nt, Artificial Sequence
  Description of Artificial Sequence: Synthetic oligonucleotide
  Antisense strand to SEQ ID NO: 826868
ucucuugcagauugcauca

SEQ ID NO: 826870 - RNA, 19 nt, Artificial Sequence
  Description of Artificial Sequence: Synthetic oligonucleotide
  Sense strand starting at position 2836 of SEQ ID NO: 587902
gguggagaaacaugcuuua

SEQ ID NO: 826871 - RNA, 19 nt, Artificial Sequence
  Description of Artificial Sequence: Synthetic oligonucleotide
  Antisense strand to SEQ ID NO: 826870
uaaagcauguuucuccacc

SEQ ID NO: 826872 - RNA, 19 nt, Artificial Sequence
  Description of Artificial Sequence: Synthetic oligonucleotide
  Sense strand starting at position 2855 of SEQ ID NO: 587902
ggagaaagauuguucucau

SEQ ID NO: 826873 - RNA, 19 nt, Artificial Sequence
  Description of Artificial Sequence: Synthetic oligonucleotide
  Antisense strand to SEQ ID NO: 826872
augagaacaaucuuucucc

SEQ ID NO: 826874 - RNA, 19 nt, Artificial Sequence
  Description of Artificial Sequence: Synthetic oligonucleotide
  Sense strand starting at position 2856 of SEQ ID NO: 587902
gagaaagauuguucucauc

SEQ ID NO: 826875 - RNA, 19 nt, Artificial Sequence
  Description of Artificial Sequence: Synthetic oligonucleotide
  Antisense strand to SEQ ID NO: 826874
gaugagaacaaucuuucuc

SEQ ID NO: 826876 - RNA, 19 nt, Artificial Sequence
  Description of Artificial Sequence: Synthetic oligonucleotide
  Sense strand starting at position 2960 of SEQ ID NO: 587902
gaauauugaucaguaguca

SEQ ID NO: 826877 - RNA, 19 nt, Artificial Sequence
  Description of Artificial Sequence: Synthetic oligonucleotide
  Antisense strand to SEQ ID NO: 826876
ugacuacugaucaauauuc

SEQ ID NO: 826878 - RNA, 19 nt, Artificial Sequence
  Description of Artificial Sequence: Synthetic oligonucleotide
  Sense strand starting at position 2973 of SEQ ID NO: 587902
uagucaucagcccaaaggu

SEQ ID NO: 826879 - RNA, 19 nt, Artificial Sequence
  Description of Artificial Sequence: Synthetic oligonucleotide
  Antisense strand to SEQ ID NO: 826878
accuuugggcugaugacua

SEQ ID NO: 826880 - RNA, 19 nt, Artificial Sequence
  Description of Artificial Sequence: Synthetic oligonucleotide
  Sense strand starting at position 3213 of SEQ ID NO: 587902
agaguaucugagggcacuu

SEQ ID NO: 826881 - RNA, 19 nt, Artificial Sequence
  Description of Artificial Sequence: Synthetic oligonucleotide
  Antisense strand to SEQ ID NO: 826880
aagugcccucagauacucu

SEQ ID NO: 826882 - RNA, 19 nt, Artificial Sequence
  Description of Artificial Sequence: Synthetic oligonucleotide
  Sense strand starting at position 3224 of SEQ ID NO: 587902
gggcacuugugaccauuga

SEQ ID NO: 826883 - RNA, 19 nt, Artificial Sequence
  Description of Artificial Sequence: Synthetic oligonucleotide
  Antisense strand to SEQ ID NO: 826882
ucaauggucacaagugccc

SEQ ID NO: 826884 - RNA, 19 nt, Artificial Sequence
  Description of Artificial Sequence: Synthetic oligonucleotide
  Sense strand starting at position 3228 of SEQ ID NO: 587902
acuugugaccauugacaga

SEQ ID NO: 826885 - RNA, 19 nt, Artificial Sequence
  Description of Artificial Sequence: Synthetic oligonucleotide
  Antisense strand to SEQ ID NO: 826884
ucugucaauggucacaagu

SEQ ID NO: 826886 - RNA, 19 nt, Artificial Sequence
  Description of Artificial Sequence: Synthetic oligonucleotide
  Sense strand starting at position 3355 of SEQ ID NO: 587902
augaaagcauugucuccau

SEQ ID NO: 826887 - RNA, 19 nt, Artificial Sequence
  Description of Artificial Sequence: Synthetic oligonucleotide
  Antisense strand to SEQ ID NO: 826886
auggagacaaugcuuucau

SEQ ID NO: 826888 - RNA, 19 nt, Artificial Sequence
  Description of Artificial Sequence: Synthetic oligonucleotide
  Sense strand starting at position 3379 of SEQ ID NO: 587902
agaugugauaaguguagag

SEQ ID NO: 826889 - RNA, 19 nt, Artificial Sequence
  Description of Artificial Sequence: Synthetic oligonucleotide
  Antisense strand to SEQ ID NO: 826888
cucuacacuuaucacaucu

SEQ ID NO: 826890 - RNA, 19 nt, Artificial Sequence
  Description of Artificial Sequence: Synthetic oligonucleotide
  Sense strand starting at position 3383 of SEQ ID NO: 587902
gugauaaguguagagaggu

SEQ ID NO: 826891 - RNA, 19 nt, Artificial Sequence
  Description of Artificial Sequence: Synthetic oligonucleotide
  Antisense strand to SEQ ID NO: 826890
accucucuacacuuaucac

SEQ ID NO: 826892 - RNA, 19 nt, Artificial Sequence
  Description of Artificial Sequence: Synthetic oligonucleotide
  Sense strand starting at position 3397 of SEQ ID NO: 587902
gagguuaaguaacuuuaua

SEQ ID NO: 826893 - RNA, 19 nt, Artificial Sequence
  Description of Artificial Sequence: Synthetic oligonucleotide
  Antisense strand to SEQ ID NO: 826892
uauaaaguuacuuaaccuc

SEQ ID NO: 826894 - RNA, 19 nt, Artificial Sequence
  Description of Artificial Sequence: Synthetic oligonucleotide
  Sense strand starting at position 3423 of SEQ ID NO: 587902
acagcugcucuguagacaa

SEQ ID NO: 826895 - RNA, 19 nt, Artificial Sequence
  Description of Artificial Sequence: Synthetic oligonucleotide
  Antisense strand to SEQ ID NO: 826894
uugucuacagagcagcugu

SEQ ID NO: 826896 - RNA, 19 nt, Artificial Sequence
  Description of Artificial Sequence: Synthetic oligonucleotide
  Sense strand starting at position 3425 of SEQ ID NO: 587902
agcugcucuguagacaaua

SEQ ID NO: 826897 - RNA, 19 nt, Artificial Sequence
  Description of Artificial Sequence: Synthetic oligonucleotide
  Antisense strand to SEQ ID NO: 826896
uauugucuacagagcagcu

SEQ ID NO: 826898 - RNA, 19 nt, Artificial Sequence
  Description of Artificial Sequence: Synthetic oligonucleotide
  Sense strand starting at position 3520 of SEQ ID NO: 587902
gaauaacauccugacucgu

SEQ ID NO: 826899 - RNA, 19 nt, Artificial Sequence
  Description of Artificial Sequence: Synthetic oligonucleotide
  Antisense strand to SEQ ID NO: 826898
acgagucaggauguuauuc

SEQ ID NO: 826900 - RNA, 19 nt, Artificial Sequence
  Description of Artificial Sequence: Synthetic oligonucleotide
  Sense strand starting at position 3593 of SEQ ID NO: 587902
uacagcgauccuuagagaa

SEQ ID NO: 826901 - RNA, 19 nt, Artificial Sequence
  Description of Artificial Sequence: Synthetic oligonucleotide
  Antisense strand to SEQ ID NO: 826900
uucucuaaggaucgcugua

SEQ ID NO: 826902 - RNA, 19 nt, Artificial Sequence
  Description of Artificial Sequence: Synthetic oligonucleotide
  Sense strand starting at position 3620 of SEQ ID NO: 587902
gccaguugacaguaaagaa

SEQ ID NO: 826903 - RNA, 19 nt, Artificial Sequence
  Description of Artificial Sequence: Synthetic oligonucleotide
  Antisense strand to SEQ ID NO: 826902
uucuuuacugucaacuggc

SEQ ID NO: 826904 - RNA, 19 nt, Artificial Sequence
  Description of Artificial Sequence: Synthetic oligonucleotide
  Sense strand starting at position 3634 of SEQ ID NO: 587902
aagaacaaucaguguguau

SEQ ID NO: 826905 - RNA, 19 nt, Artificial Sequence
  Description of Artificial Sequence: Synthetic oligonucleotide
  Antisense strand to SEQ ID NO: 826904
auacacacugauuguucuu

SEQ ID NO: 826906 - RNA, 19 nt, Artificial Sequence
  Description of Artificial Sequence: Synthetic oligonucleotide
  Sense strand starting at position 3641 of SEQ ID NO: 587902
aucaguguguauuugaagu

SEQ ID NO: 826907 - RNA, 19 nt, Artificial Sequence
  Description of Artificial Sequence: Synthetic oligonucleotide
  Antisense strand to SEQ ID NO: 826906
acuucaaauacacacugau

SEQ ID NO: 826908 - RNA, 19 nt, Artificial Sequence
  Description of Artificial Sequence: Synthetic oligonucleotide
  Sense strand starting at position 3836 of SEQ ID NO: 587902
ugcugauaaagugagcaaa

SEQ ID NO: 826909 - RNA, 19 nt, Artificial Sequence
  Description of Artificial Sequence: Synthetic oligonucleotide
  Antisense strand to SEQ ID NO: 826908
uuugcucacuuuaucagca

SEQ ID NO: 826910 - RNA, 19 nt, Artificial Sequence
  Description of Artificial Sequence: Synthetic oligonucleotide
  Sense strand starting at position 3838 of SEQ ID NO: 587902
cugauaaagugagcaaaga

SEQ ID NO: 826911 - RNA, 19 nt, Artificial Sequence
  Description of Artificial Sequence: Synthetic oligonucleotide
  Antisense strand to SEQ ID NO: 826910
ucuuugcucacuuuaucag

SEQ ID NO: 826912 - RNA, 19 nt, Artificial Sequence
  Description of Artificial Sequence: Synthetic oligonucleotide
  Sense strand starting at position 3880 of SEQ ID NO: 587902
auacucuucugagcugauu

SEQ ID NO: 826913 - RNA, 19 nt, Artificial Sequence
  Description of Artificial Sequence: Synthetic oligonucleotide
  Antisense strand to SEQ ID NO: 826912
aaucagcucagaagaguau

SEQ ID NO: 826914 - RNA, 19 nt, Artificial Sequence
  Description of Artificial Sequence: Synthetic oligonucleotide
  Sense strand starting at position 3978 of SEQ ID NO: 587902
uccagacaucagugaauuc

SEQ ID NO: 826915 - RNA, 19 nt, Artificial Sequence
  Description of Artificial Sequence: Synthetic oligonucleotide
  Antisense strand to SEQ ID NO: 826914
gaauucacugaugucugga

SEQ ID NO: 826916 - RNA, 19 nt, Artificial Sequence
  Description of Artificial Sequence: Synthetic oligonucleotide
  Sense strand starting at position 89 of SEQ ID NO: 587903
gcaguugucagaggaggug

SEQ ID NO: 826917 - RNA, 19 nt, Artificial Sequence
  Description of Artificial Sequence: Synthetic oligonucleotide
  Antisense strand to SEQ ID NO: 826916
caccuccucugacaacugc

SEQ ID NO: 826918 - RNA, 19 nt, Artificial Sequence
  Description of Artificial Sequence: Synthetic oligonucleotide
  Sense strand starting at position 179 of SEQ ID NO: 587903
caggcagagccagauguau

SEQ ID NO: 826919 - RNA, 19 nt, Artificial Sequence
  Description of Artificial Sequence: Synthetic oligonucleotide
  Antisense strand to SEQ ID NO: 826918
auacaucuggcucugccug

SEQ ID NO: 826920 - RNA, 19 nt, Artificial Sequence
  Description of Artificial Sequence: Synthetic oligonucleotide
  Sense strand starting at position 254 of SEQ ID NO: 587903
gagcgaugucuccaggguu

SEQ ID NO: 826921 - RNA, 19 nt, Artificial Sequence
  Description of Artificial Sequence: Synthetic oligonucleotide
  Antisense strand to SEQ ID NO: 826920
aacccuggagacaucgcuc

SEQ ID NO: 826922 - RNA, 19 nt, Artificial Sequence
  Description of Artificial Sequence: Synthetic oligonucleotide
  Sense strand starting at position 278 of SEQ ID NO: 587903
gggagauucuuagcgggag

SEQ ID NO: 826923 - RNA, 19 nt, Artificial Sequence
  Description of Artificial Sequence: Synthetic oligonucleotide
  Antisense strand to SEQ ID NO: 826922
cucccgcuaagaaucuccc

SEQ ID NO: 826924 - RNA, 19 nt, Artificial Sequence
  Description of Artificial Sequence: Synthetic oligonucleotide
  Sense strand starting at position 279 of SEQ ID NO: 587903
ggagauucuuagcgggaga

SEQ ID NO: 826925 - RNA, 19 nt, Artificial Sequence
  Description of Artificial Sequence: Synthetic oligonucleotide
  Antisense strand to SEQ ID NO: 826924
ucucccgcuaagaaucucc

SEQ ID NO: 826926 - RNA, 19 nt, Artificial Sequence
  Description of Artificial Sequence: Synthetic oligonucleotide
  Sense strand starting at position 280 of SEQ ID NO: 587903
gagauucuuagcgggagau

SEQ ID NO: 826927 - RNA, 19 nt, Artificial Sequence
  Description of Artificial Sequence: Synthetic oligonucleotide
  Antisense strand to SEQ ID NO: 826926
aucucccgcuaagaaucuc

SEQ ID NO: 826928 - RNA, 19 nt, Artificial Sequence
  Description of Artificial Sequence: Synthetic oligonucleotide
  Sense strand starting at position 281 of SEQ ID NO: 587903
agauucuuagcgggagaug

SEQ ID NO: 826929 - RNA, 19 nt, Artificial Sequence
  Description of Artificial Sequence: Synthetic oligonucleotide
  Antisense strand to SEQ ID NO: 826928
caucucccgcuaagaaucu

SEQ ID NO: 826930 - RNA, 19 nt, Artificial Sequence
  Description of Artificial Sequence: Synthetic oligonucleotide
  Sense strand starting at position 282 of SEQ ID NO: 587903
gauucuuagcgggagaugu

SEQ ID NO: 826931 - RNA, 19 nt, Artificial Sequence
  Description of Artificial Sequence: Synthetic oligonucleotide
  Antisense strand to SEQ ID NO: 826930
acaucucccgcuaagaauc

SEQ ID NO: 826932 - RNA, 19 nt, Artificial Sequence
  Description of Artificial Sequence: Synthetic oligonucleotide
  Sense strand starting at position 293 of SEQ ID NO: 587903
ggagauguucccugggcua

SEQ ID NO: 826933 - RNA, 19 nt, Artificial Sequence
  Description of Artificial Sequence: Synthetic oligonucleotide
  Antisense strand to SEQ ID NO: 826932
uagcccagggaacaucucc

SEQ ID NO: 826934 - RNA, 19 nt, Artificial Sequence
  Description of Artificial Sequence: Synthetic oligonucleotide
  Sense strand starting at position 340 of SEQ ID NO: 587903
gcuaguuugcaucaggaaa

SEQ ID NO: 826935 - RNA, 19 nt, Artificial Sequence
  Description of Artificial Sequence: Synthetic oligonucleotide
  Antisense strand to SEQ ID NO: 826934
uuuccugaugcaaacuagc

SEQ ID NO: 826936 - RNA, 19 nt, Artificial Sequence
  Description of Artificial Sequence: Synthetic oligonucleotide
  Sense strand starting at position 399 of SEQ ID NO: 587903
cuaucugugaaauggguca

SEQ ID NO: 826937 - RNA, 19 nt, Artificial Sequence
  Description of Artificial Sequence: Synthetic oligonucleotide
  Antisense strand to SEQ ID NO: 826936
ugacccauuucacagauag

SEQ ID NO: 826938 - RNA, 19 nt, Artificial Sequence
  Description of Artificial Sequence: Synthetic oligonucleotide
  Sense strand starting at position 401 of SEQ ID NO: 587903
aucugugaaaugggucaca

SEQ ID NO: 826939 - RNA, 19 nt, Artificial Sequence
  Description of Artificial Sequence: Synthetic oligonucleotide
  Antisense strand to SEQ ID NO: 826938
ugugacccauuucacagau

SEQ ID NO: 826940 - RNA, 19 nt, Artificial Sequence
  Description of Artificial Sequence: Synthetic oligonucleotide
  Sense strand starting at position 450 of SEQ ID NO: 587903
ccuagaaugugcuguccuu

SEQ ID NO: 826941 - RNA, 19 nt, Artificial Sequence
  Description of Artificial Sequence: Synthetic oligonucleotide
  Antisense strand to SEQ ID NO: 826940
aaggacagcacauucuagg

SEQ ID NO: 826942 - RNA, 19 nt, Artificial Sequence
  Description of Artificial Sequence: Synthetic oligonucleotide
  Sense strand starting at position 534 of SEQ ID NO: 587903
ccacucuuggcuuaguuau

SEQ ID NO: 826943 - RNA, 19 nt, Artificial Sequence
  Description of Artificial Sequence: Synthetic oligonucleotide
  Antisense strand to SEQ ID NO: 826942
auaacuaagccaagagugg

SEQ ID NO: 826944 - RNA, 19 nt, Artificial Sequence
  Description of Artificial Sequence: Synthetic oligonucleotide
  Sense strand starting at position 619 of SEQ ID NO: 587903
augagugagcugugccaca

SEQ ID NO: 826945 - RNA, 19 nt, Artificial Sequence
  Description of Artificial Sequence: Synthetic oligonucleotide
  Antisense strand to SEQ ID NO: 826944
uguggcacagcucacucau

SEQ ID NO: 826946 - RNA, 19 nt, Artificial Sequence
  Description of Artificial Sequence: Synthetic oligonucleotide
  Sense strand starting at position 961 of SEQ ID NO: 587903
ugugaucccuguucccaau

SEQ ID NO: 826947 - RNA, 19 nt, Artificial Sequence
  Description of Artificial Sequence: Synthetic oligonucleotide
  Antisense strand to SEQ ID NO: 826946
auugggaacagggaucaca

SEQ ID NO: 826948 - RNA, 19 nt, Artificial Sequence
  Description of Artificial Sequence: Synthetic oligonucleotide
  Sense strand starting at position 1040 of SEQ ID NO: 587903
auuauuaggccuugucaga

SEQ ID NO: 826949 - RNA, 19 nt, Artificial Sequence
  Description of Artificial Sequence: Synthetic oligonucleotide
  Antisense strand to SEQ ID NO: 826948
ucugacaaggccuaauaau

SEQ ID NO: 826950 - RNA, 19 nt, Artificial Sequence
  Description of Artificial Sequence: Synthetic oligonucleotide
  Sense strand starting at position 1051 of SEQ ID NO: 587903
uugucagaccucugaagug

SEQ ID NO: 826951 - RNA, 19 nt, Artificial Sequence
  Description of Artificial Sequence: Synthetic oligonucleotide
  Antisense strand to SEQ ID NO: 826950
cacuucagaggucugacaa

SEQ ID NO: 826952 - RNA, 19 nt, Artificial Sequence
  Description of Artificial Sequence: Synthetic oligonucleotide
  Sense strand starting at position 1446 of SEQ ID NO: 587903
ggguaaugguccugcagga

SEQ ID NO: 826953 - RNA, 19 nt, Artificial Sequence
  Description of Artificial Sequence: Synthetic oligonucleotide
  Antisense strand to SEQ ID NO: 826952
uccugcaggaccauuaccc

SEQ ID NO: 826954 - RNA, 19 nt, Artificial Sequence
  Description of Artificial Sequence: Synthetic oligonucleotide
  Sense strand starting at position 1586 of SEQ ID NO: 587903
gaaggagucucgcugacau

SEQ ID NO: 826955 - RNA, 19 nt, Artificial Sequence
  Description of Artificial Sequence: Synthetic oligonucleotide
  Antisense strand to SEQ ID NO: 826954
augucagcgagacuccuuc

SEQ ID NO: 826956 - RNA, 19 nt, Artificial Sequence
  Description of Artificial Sequence: Synthetic oligonucleotide
  Sense strand starting at position 1590 of SEQ ID NO: 587903
gagucucgcugacaucuuu

SEQ ID NO: 826957 - RNA, 19 nt, Artificial Sequence
  Description of Artificial Sequence: Synthetic oligonucleotide
  Antisense strand to SEQ ID NO: 826956
aaagaugucagcgagacuc

SEQ ID NO: 826958 - RNA, 19 nt, Artificial Sequence
  Description of Artificial Sequence: Synthetic oligonucleotide
  Sense strand starting at position 1641 of SEQ ID NO: 587903
cuggcagcuuucucuaacu

SEQ ID NO: 826959 - RNA, 19 nt, Artificial Sequence
  Description of Artificial Sequence: Synthetic oligonucleotide
  Antisense strand to SEQ ID NO: 826958
aguuagagaaagcugccag

SEQ ID NO: 826960 - RNA, 19 nt, Artificial Sequence
  Description of Artificial Sequence: Synthetic oligonucleotide
  Sense strand starting at position 1643 of SEQ ID NO: 587903
ggcagcuuucucuaacuga

SEQ ID NO: 826961 - RNA, 19 nt, Artificial Sequence
  Description of Artificial Sequence: Synthetic oligonucleotide
  Antisense strand to SEQ ID NO: 826960
ucaguuagagaaagcugcc

SEQ ID NO: 826962 - RNA, 19 nt, Artificial Sequence
  Description of Artificial Sequence: Synthetic oligonucleotide
  Sense strand starting at position 1768 of SEQ ID NO: 587903
ccaggaggcucacugagaa

SEQ ID NO: 826963 - RNA, 19 nt, Artificial Sequence
  Description of Artificial Sequence: Synthetic oligonucleotide
  Antisense strand to SEQ ID NO: 826962
uucucagugagccuccugg

SEQ ID NO: 826964 - RNA, 19 nt, Artificial Sequence
  Description of Artificial Sequence: Synthetic oligonucleotide
  Sense strand starting at position 1981 of SEQ ID NO: 587903
gugcucagaagugaugaga

SEQ ID NO: 826965 - RNA, 19 nt, Artificial Sequence
  Description of Artificial Sequence: Synthetic oligonucleotide
  Antisense strand to SEQ ID NO: 826964
ucucaucacuucugagcac

SEQ ID NO: 826966 - RNA, 19 nt, Artificial Sequence
  Description of Artificial Sequence: Synthetic oligonucleotide
  Sense strand starting at position 2078 of SEQ ID NO: 587903
gagucaggaacgugguaaa

SEQ ID NO: 826967 - RNA, 19 nt, Artificial Sequence
  Description of Artificial Sequence: Synthetic oligonucleotide
  Antisense strand to SEQ ID NO: 826966
uuuaccacguuccugacuc

SEQ ID NO: 826968 - RNA, 19 nt, Artificial Sequence
  Description of Artificial Sequence: Synthetic oligonucleotide
  Sense strand starting at position 2157 of SEQ ID NO: 587903
agcucugucugaggacgau

SEQ ID NO: 826969 - RNA, 19 nt, Artificial Sequence
  Description of Artificial Sequence: Synthetic oligonucleotide
  Antisense strand to SEQ ID NO: 826968
aucguccucagacagagcu

SEQ ID NO: 826970 - RNA, 19 nt, Artificial Sequence
  Description of Artificial Sequence: Synthetic oligonucleotide
  Sense strand starting at position 2244 of SEQ ID NO: 587903
cugggacagcucugacaga

SEQ ID NO: 826971 - RNA, 19 nt, Artificial Sequence
  Description of Artificial Sequence: Synthetic oligonucleotide
  Antisense strand to SEQ ID NO: 826970
ucugucagagcugucccag

SEQ ID NO: 826972 - RNA, 19 nt, Artificial Sequence
  Description of Artificial Sequence: Synthetic oligonucleotide
  Sense strand starting at position 2707 of SEQ ID NO: 587903
cuguguugucugcucuuua

SEQ ID NO: 826973 - RNA, 19 nt, Artificial Sequence
  Description of Artificial Sequence: Synthetic oligonucleotide
  Antisense strand to SEQ ID NO: 826972
uaaagagcagacaacacag

SEQ ID NO: 826974 - RNA, 19 nt, Artificial Sequence
  Description of Artificial Sequence: Synthetic oligonucleotide
  Sense strand starting at position 2891 of SEQ ID NO: 587903
ugguuucucuguccuguga

SEQ ID NO: 826975 - RNA, 19 nt, Artificial Sequence
  Description of Artificial Sequence: Synthetic oligonucleotide
  Antisense strand to SEQ ID NO: 826974
ucacaggacagagaaacca

SEQ ID NO: 826976 - RNA, 19 nt, Artificial Sequence
  Description of Artificial Sequence: Synthetic oligonucleotide
  Sense strand starting at position 2893 of SEQ ID NO: 587903
guuucucuguccugugaug

SEQ ID NO: 826977 - RNA, 19 nt, Artificial Sequence
  Description of Artificial Sequence: Synthetic oligonucleotide
  Antisense strand to SEQ ID NO: 826976
caucacaggacagagaaac

SEQ ID NO: 826978 - RNA, 19 nt, Artificial Sequence
  Description of Artificial Sequence: Synthetic oligonucleotide
  Sense strand starting at position 2911 of SEQ ID NO: 587903
gucccaaugggugguugua

SEQ ID NO: 826979 - RNA, 19 nt, Artificial Sequence
  Description of Artificial Sequence: Synthetic oligonucleotide
  Antisense strand to SEQ ID NO: 826978
uacaaccacccauugggac

SEQ ID NO: 826980 - RNA, 19 nt, Artificial Sequence
  Description of Artificial Sequence: Synthetic oligonucleotide
  Sense strand starting at position 2913 of SEQ ID NO: 587903
cccaaugggugguuguaua

SEQ ID NO: 826981 - RNA, 19 nt, Artificial Sequence
  Description of Artificial Sequence: Synthetic oligonucleotide
  Antisense strand to SEQ ID NO: 826980
uauacaaccacccauuggg

SEQ ID NO: 826982 - RNA, 19 nt, Artificial Sequence
  Description of Artificial Sequence: Synthetic oligonucleotide
  Sense strand starting at position 2920 of SEQ ID NO: 587903
ggugguuguauagauggau

SEQ ID NO: 826983 - RNA, 19 nt, Artificial Sequence
  Description of Artificial Sequence: Synthetic oligonucleotide
  Antisense strand to SEQ ID NO: 826982
auccaucuauacaaccacc

SEQ ID NO: 826984 - RNA, 19 nt, Artificial Sequence
  Description of Artificial Sequence: Synthetic oligonucleotide
  Sense strand starting at position 2924 of SEQ ID NO: 587903
guuguauagauggaugagu

SEQ ID NO: 826985 - RNA, 19 nt, Artificial Sequence
  Description of Artificial Sequence: Synthetic oligonucleotide
  Antisense strand to SEQ ID NO: 826984
acucauccaucuauacaac

SEQ ID NO: 826986 - RNA, 19 nt, Artificial Sequence
  Description of Artificial Sequence: Synthetic oligonucleotide
  Sense strand starting at position 3121 of SEQ ID NO: 587903
auggauggaugguaagaga

SEQ ID NO: 826987 - RNA, 19 nt, Artificial Sequence
  Description of Artificial Sequence: Synthetic oligonucleotide
  Antisense strand to SEQ ID NO: 826986
ucucuuaccauccauccau

SEQ ID NO: 826988 - RNA, 19 nt, Artificial Sequence
  Description of Artificial Sequence: Synthetic oligonucleotide
  Sense strand starting at position 3156 of SEQ ID NO: 587903
gaaggauguauggguggau

SEQ ID NO: 826989 - RNA, 19 nt, Artificial Sequence
  Description of Artificial Sequence: Synthetic oligonucleotide
  Antisense strand to SEQ ID NO: 826988
auccacccauacauccuuc

SEQ ID NO: 826990 - RNA, 19 nt, Artificial Sequence
  Description of Artificial Sequence: Synthetic oligonucleotide
  Sense strand starting at position 3157 of SEQ ID NO: 587903
aaggauguauggguggaua

SEQ ID NO: 826991 - RNA, 19 nt, Artificial Sequence
  Description of Artificial Sequence: Synthetic oligonucleotide
  Antisense strand to SEQ ID NO: 826990
uauccacccauacauccuu

SEQ ID NO: 826992 - RNA, 19 nt, Artificial Sequence
  Description of Artificial Sequence: Synthetic oligonucleotide
  Sense strand starting at position 3159 of SEQ ID NO: 587903
ggauguauggguggauaag

SEQ ID NO: 826993 - RNA, 19 nt, Artificial Sequence
  Description of Artificial Sequence: Synthetic oligonucleotide
  Antisense strand to SEQ ID NO: 826992
cuuauccacccauacaucc

SEQ ID NO: 826994 - RNA, 19 nt, Artificial Sequence
  Description of Artificial Sequence: Synthetic oligonucleotide
  Sense strand starting at position 3160 of SEQ ID NO: 587903
gauguauggguggauaagu

SEQ ID NO: 826995 - RNA, 19 nt, Artificial Sequence
  Description of Artificial Sequence: Synthetic oligonucleotide
  Antisense strand to SEQ ID NO: 826994
acuuauccacccauacauc

SEQ ID NO: 826996 - RNA, 19 nt, Artificial Sequence
  Description of Artificial Sequence: Synthetic oligonucleotide
  Sense strand starting at position 188 of SEQ ID NO: 587904
ugauauguuuacucccauu

SEQ ID NO: 826997 - RNA, 19 nt, Artificial Sequence
  Description of Artificial Sequence: Synthetic oligonucleotide
  Antisense strand to SEQ ID NO: 826996
aaugggaguaaacauauca

SEQ ID NO: 826998 - RNA, 19 nt, Artificial Sequence
  Description of Artificial Sequence: Synthetic oligonucleotide
  Sense strand starting at position 278 of SEQ ID NO: 587904
uggguugccagaugagaau

SEQ ID NO: 826999 - RNA, 19 nt, Artificial Sequence
  Description of Artificial Sequence: Synthetic oligonucleotide
  Antisense strand to SEQ ID NO: 826998
auucucaucuggcaaccca

SEQ ID NO: 827000 - RNA, 19 nt, Artificial Sequence
  Description of Artificial Sequence: Synthetic oligonucleotide
  Sense strand starting at position 359 of SEQ ID NO: 587904
agcauaucacuuugaaaug

SEQ ID NO: 827001 - RNA, 19 nt, Artificial Sequence
  Description of Artificial Sequence: Synthetic oligonucleotide
  Antisense strand to SEQ ID NO: 827000
cauuucaaagugauaugcu

SEQ ID NO: 827002 - RNA, 19 nt, Artificial Sequence
  Description of Artificial Sequence: Synthetic oligonucleotide
  Sense strand starting at position 369 of SEQ ID NO: 587904
uuugaaaugugaucaguua

SEQ ID NO: 827003 - RNA, 19 nt, Artificial Sequence
  Description of Artificial Sequence: Synthetic oligonucleotide
  Antisense strand to SEQ ID NO: 827002
uaacugaucacauuucaaa

SEQ ID NO: 827004 - RNA, 19 nt, Artificial Sequence
  Description of Artificial Sequence: Synthetic oligonucleotide
  Sense strand starting at position 377 of SEQ ID NO: 587904
gugaucaguuaauccuaau

SEQ ID NO: 827005 - RNA, 19 nt, Artificial Sequence
  Description of Artificial Sequence: Synthetic oligonucleotide
  Antisense strand to SEQ ID NO: 827004
auuaggauuaacugaucac

SEQ ID NO: 827006 - RNA, 19 nt, Artificial Sequence
  Description of Artificial Sequence: Synthetic oligonucleotide
  Sense strand starting at position 488 of SEQ ID NO: 587904
cugugcuaacaauagacau

SEQ ID NO: 827007 - RNA, 19 nt, Artificial Sequence
  Description of Artificial Sequence: Synthetic oligonucleotide
  Antisense strand to SEQ ID NO: 827006
augucuauuguuagcacag

SEQ ID NO: 827008 - RNA, 19 nt, Artificial Sequence
  Description of Artificial Sequence: Synthetic oligonucleotide
  Sense strand starting at position 569 of SEQ ID NO: 587904
guugacaguuuaccugaaa

SEQ ID NO: 827009 - RNA, 19 nt, Artificial Sequence
  Description of Artificial Sequence: Synthetic oligonucleotide
  Antisense strand to SEQ ID NO: 827008
uuucagguaaacugucaac

SEQ ID NO: 827010 - RNA, 19 nt, Artificial Sequence
  Description of Artificial Sequence: Synthetic oligonucleotide
  Sense strand starting at position 570 of SEQ ID NO: 587904
uugacaguuuaccugaaau

SEQ ID NO: 827011 - RNA, 19 nt, Artificial Sequence
  Description of Artificial Sequence: Synthetic oligonucleotide
  Antisense strand to SEQ ID NO: 827010
auuucagguaaacugucaa

SEQ ID NO: 827012 - RNA, 19 nt, Artificial Sequence
  Description of Artificial Sequence: Synthetic oligonucleotide
  Sense strand starting at position 766 of SEQ ID NO: 587904
ggauacuuugcucaggcua

SEQ ID NO: 827013 - RNA, 19 nt, Artificial Sequence
  Description of Artificial Sequence: Synthetic oligonucleotide
  Antisense strand to SEQ ID NO: 827012
uagccugagcaaaguaucc

SEQ ID NO: 827014 - RNA, 19 nt, Artificial Sequence
  Description of Artificial Sequence: Synthetic oligonucleotide
  Sense strand starting at position 895 of SEQ ID NO: 587904
uuagguccgauauaguaua

SEQ ID NO: 827015 - RNA, 19 nt, Artificial Sequence
  Description of Artificial Sequence: Synthetic oligonucleotide
  Antisense strand to SEQ ID NO: 827014
uauacuauaucggaccuaa

SEQ ID NO: 827016 - RNA, 19 nt, Artificial Sequence
  Description of Artificial Sequence: Synthetic oligonucleotide
  Sense strand starting at position 900 of SEQ ID NO: 587904
uccgauauaguauauagau

SEQ ID NO: 827017 - RNA, 19 nt, Artificial Sequence
  Description of Artificial Sequence: Synthetic oligonucleotide
  Antisense strand to SEQ ID NO: 827016
aucuauauacuauaucgga

SEQ ID NO: 827018 - RNA, 19 nt, Artificial Sequence
  Description of Artificial Sequence: Synthetic oligonucleotide
  Sense strand starting at position 906 of SEQ ID NO: 587904
auaguauauagauggaguu

SEQ ID NO: 827019 - RNA, 19 nt, Artificial Sequence
  Description of Artificial Sequence: Synthetic oligonucleotide
  Antisense strand to SEQ ID NO: 827018
aacuccaucuauauacuau

SEQ ID NO: 827020 - RNA, 19 nt, Artificial Sequence
  Description of Artificial Sequence: Synthetic oligonucleotide
  Sense strand starting at position 1043 of SEQ ID NO: 587904
ucuuguuaccuagaaaggu

SEQ ID NO: 827021 - RNA, 19 nt, Artificial Sequence
  Description of Artificial Sequence: Synthetic oligonucleotide
  Antisense strand to SEQ ID NO: 827020
accuuucuagguaacaaga

SEQ ID NO: 827022 - RNA, 19 nt, Artificial Sequence
  Description of Artificial Sequence: Synthetic oligonucleotide
  Sense strand starting at position 1052 of SEQ ID NO: 587904
cuagaaagguacuuacucu

SEQ ID NO: 827023 - RNA, 19 nt, Artificial Sequence
  Description of Artificial Sequence: Synthetic oligonucleotide
  Antisense strand to SEQ ID NO: 827022
agaguaaguaccuuucuag

SEQ ID NO: 827024 - RNA, 19 nt, Artificial Sequence
  Description of Artificial Sequence: Synthetic oligonucleotide
  Sense strand starting at position 1241 of SEQ ID NO: 587904
guuuaauagcaugacuuua

SEQ ID NO: 827025 - RNA, 19 nt, Artificial Sequence
  Description of Artificial Sequence: Synthetic oligonucleotide
  Antisense strand to SEQ ID NO: 827024
uaaagucaugcuauuaaac

SEQ ID NO: 827026 - RNA, 19 nt, Artificial Sequence
  Description of Artificial Sequence: Synthetic oligonucleotide
  Sense strand starting at position 1553 of SEQ ID NO: 587904
aaagcuuuagucuggaauu

SEQ ID NO: 827027 - RNA, 19 nt, Artificial Sequence
  Description of Artificial Sequence: Synthetic oligonucleotide
  Antisense strand to SEQ ID NO: 827026
aauuccagacuaaagcuuu

SEQ ID NO: 827028 - RNA, 19 nt, Artificial Sequence
  Description of Artificial Sequence: Synthetic oligonucleotide
  Sense strand starting at position 1695 of SEQ ID NO: 587904
uacucugaggucuggauau

SEQ ID NO: 827029 - RNA, 19 nt, Artificial Sequence
  Description of Artificial Sequence: Synthetic oligonucleotide
  Antisense strand to SEQ ID NO: 827028
auauccagaccucagagua

SEQ ID NO: 827030 - RNA, 19 nt, Artificial Sequence
  Description of Artificial Sequence: Synthetic oligonucleotide
  Sense strand starting at position 1854 of SEQ ID NO: 587904
gauauuuaguaggagcaaa

SEQ ID NO: 827031 - RNA, 19 nt, Artificial Sequence
  Description of Artificial Sequence: Synthetic oligonucleotide
  Antisense strand to SEQ ID NO: 827030
uuugcuccuacuaaauauc

SEQ ID NO: 827032 - RNA, 19 nt, Artificial Sequence
  Description of Artificial Sequence: Synthetic oligonucleotide
  Sense strand starting at position 1956 of SEQ ID NO: 587904
accuaccucuugucugaga

SEQ ID NO: 827033 - RNA, 19 nt, Artificial Sequence
  Description of Artificial Sequence: Synthetic oligonucleotide
  Antisense strand to SEQ ID NO: 827032
ucucagacaagagguaggu

SEQ ID NO: 827034 - RNA, 19 nt, Artificial Sequence
  Description of Artificial Sequence: Synthetic oligonucleotide
  Sense strand starting at position 2235 of SEQ ID NO: 587904
aauugaugauucuuuagug

SEQ ID NO: 827035 - RNA, 19 nt, Artificial Sequence
  Description of Artificial Sequence: Synthetic oligonucleotide
  Antisense strand to SEQ ID NO: 827034
cacuaaagaaucaucaauu

SEQ ID NO: 827036 - RNA, 19 nt, Artificial Sequence
  Description of Artificial Sequence: Synthetic oligonucleotide
  Sense strand starting at position 2293 of SEQ ID NO: 587904
gugcuagggcuggaagaua

SEQ ID NO: 827037 - RNA, 19 nt, Artificial Sequence
  Description of Artificial Sequence: Synthetic oligonucleotide
  Antisense strand to SEQ ID NO: 827036
uaucuuccagcccuagcac

SEQ ID NO: 827038 - RNA, 19 nt, Artificial Sequence
  Description of Artificial Sequence: Synthetic oligonucleotide
  Sense strand starting at position 2323 of SEQ ID NO: 587904
gguaguaaccuaggaaaca

SEQ ID NO: 827039 - RNA, 19 nt, Artificial Sequence
  Description of Artificial Sequence: Synthetic oligonucleotide
  Antisense strand to SEQ ID NO: 827038
uguuuccuagguuacuacc

SEQ ID NO: 827040 - RNA, 19 nt, Artificial Sequence
  Description of Artificial Sequence: Synthetic oligonucleotide
  Sense strand starting at position 2352 of SEQ ID NO: 587904
guuugccagccugauauuu

SEQ ID NO: 827041 - RNA, 19 nt, Artificial Sequence
  Description of Artificial Sequence: Synthetic oligonucleotide
  Antisense strand to SEQ ID NO: 827040
aaauaucaggcuggcaaac

SEQ ID NO: 827042 - RNA, 19 nt, Artificial Sequence
  Description of Artificial Sequence: Synthetic oligonucleotide
  Sense strand starting at position 2452 of SEQ ID NO: 587904
gcacucuggaagugauuau

SEQ ID NO: 827043 - RNA, 19 nt, Artificial Sequence
  Description of Artificial Sequence: Synthetic oligonucleotide
  Antisense strand to SEQ ID NO: 827042
auaaucacuuccagagugc

SEQ ID NO: 827044 - RNA, 19 nt, Artificial Sequence
  Description of Artificial Sequence: Synthetic oligonucleotide
  Sense strand starting at position 2604 of SEQ ID NO: 587904
caaagugaucuccagguug

SEQ ID NO: 827045 - RNA, 19 nt, Artificial Sequence
  Description of Artificial Sequence: Synthetic oligonucleotide
  Antisense strand to SEQ ID NO: 827044
caaccuggagaucacuuug

SEQ ID NO: 827046 - RNA, 19 nt, Artificial Sequence
  Description of Artificial Sequence: Synthetic oligonucleotide
  Sense strand starting at position 2623 of SEQ ID NO: 587904
gcucuuuagagacagagua

SEQ ID NO: 827047 - RNA, 19 nt, Artificial Sequence
  Description of Artificial Sequence: Synthetic oligonucleotide
  Antisense strand to SEQ ID NO: 827046
uacucugucucuaaagagc

SEQ ID NO: 827048 - RNA, 19 nt, Artificial Sequence
  Description of Artificial Sequence: Synthetic oligonucleotide
  Sense strand starting at position 2665 of SEQ ID NO: 587904
agaguuauggucuaagcac

SEQ ID NO: 827049 - RNA, 19 nt, Artificial Sequence
  Description of Artificial Sequence: Synthetic oligonucleotide
  Antisense strand to SEQ ID NO: 827048
gugcuuagaccauaacucu

SEQ ID NO: 827050 - RNA, 19 nt, Artificial Sequence
  Description of Artificial Sequence: Synthetic oligonucleotide
  Sense strand starting at position 3094 of SEQ ID NO: 587904
auagaugaauugguacauu

SEQ ID NO: 827051 - RNA, 19 nt, Artificial Sequence
  Description of Artificial Sequence: Synthetic oligonucleotide
  Antisense strand to SEQ ID NO: 827050
aauguaccaauucaucuau

SEQ ID NO: 827052 - RNA, 19 nt, Artificial Sequence
  Description of Artificial Sequence: Synthetic oligonucleotide
  Sense strand starting at position 3193 of SEQ ID NO: 587904
uaagcuugacauugaguua

SEQ ID NO: 827053 - RNA, 19 nt, Artificial Sequence
  Description of Artificial Sequence: Synthetic oligonucleotide
  Antisense strand to SEQ ID NO: 827052
uaacucaaugucaagcuua

SEQ ID NO: 827054 - RNA, 19 nt, Artificial Sequence
  Description of Artificial Sequence: Synthetic oligonucleotide
  Sense strand starting at position 3198 of SEQ ID NO: 587904
uugacauugaguuaguagu

SEQ ID NO: 827055 - RNA, 19 nt, Artificial Sequence
  Description of Artificial Sequence: Synthetic oligonucleotide
  Antisense strand to SEQ ID NO: 827054
acuacuaacucaaugucaa

SEQ ID NO: 827056 - RNA, 19 nt, Artificial Sequence
  Description of Artificial Sequence: Synthetic oligonucleotide
  Sense strand starting at position 3440 of SEQ ID NO: 587904
auggaauaaucuguguaaa

SEQ ID NO: 827057 - RNA, 19 nt, Artificial Sequence
  Description of Artificial Sequence: Synthetic oligonucleotide
  Antisense strand to SEQ ID NO: 827056
uuuacacagauuauuccau

SEQ ID NO: 827058 - RNA, 19 nt, Artificial Sequence
  Description of Artificial Sequence: Synthetic oligonucleotide
  Sense strand starting at position 3441 of SEQ ID NO: 587904
uggaauaaucuguguaaag

SEQ ID NO: 827059 - RNA, 19 nt, Artificial Sequence
  Description of Artificial Sequence: Synthetic oligonucleotide
  Antisense strand to SEQ ID NO: 827058
cuuuacacagauuauucca

SEQ ID NO: 827060 - RNA, 19 nt, Artificial Sequence
  Description of Artificial Sequence: Synthetic oligonucleotide
  Sense strand starting at position 3442 of SEQ ID NO: 587904
ggaauaaucuguguaaagg

SEQ ID NO: 827061 - RNA, 19 nt, Artificial Sequence
  Description of Artificial Sequence: Synthetic oligonucleotide
  Antisense strand to SEQ ID NO: 827060
ccuuuacacagauuauucc

SEQ ID NO: 827062 - RNA, 19 nt, Artificial Sequence
  Description of Artificial Sequence: Synthetic oligonucleotide
  Sense strand starting at position 3443 of SEQ ID NO: 587904
gaauaaucuguguaaaggc

SEQ ID NO: 827063 - RNA, 19 nt, Artificial Sequence
  Description of Artificial Sequence: Synthetic oligonucleotide
  Antisense strand to SEQ ID NO: 827062
gccuuuacacagauuauuc

SEQ ID NO: 827064 - RNA, 19 nt, Artificial Sequence
  Description of Artificial Sequence: Synthetic oligonucleotide
  Sense strand starting at position 3574 of SEQ ID NO: 587904
agggauuacguaugaauau

SEQ ID NO: 827065 - RNA, 19 nt, Artificial Sequence
  Description of Artificial Sequence: Synthetic oligonucleotide
  Antisense strand to SEQ ID NO: 827064
auauucauacguaaucccu

SEQ ID NO: 827066 - RNA, 19 nt, Artificial Sequence
  Description of Artificial Sequence: Synthetic oligonucleotide
  Sense strand starting at position 3594 of SEQ ID NO: 587904
uaccauaguguuuagcaga

SEQ ID NO: 827067 - RNA, 19 nt, Artificial Sequence
  Description of Artificial Sequence: Synthetic oligonucleotide
  Antisense strand to SEQ ID NO: 827066
ucugcuaaacacuauggua

SEQ ID NO: 827068 - RNA, 19 nt, Artificial Sequence
  Description of Artificial Sequence: Synthetic oligonucleotide
  Sense strand starting at position 3599 of SEQ ID NO: 587904
uaguguuuagcagauaaua

SEQ ID NO: 827069 - RNA, 19 nt, Artificial Sequence
  Description of Artificial Sequence: Synthetic oligonucleotide
  Antisense strand to SEQ ID NO: 827068
uauuaucugcuaaacacua

SEQ ID NO: 827070 - RNA, 19 nt, Artificial Sequence
  Description of Artificial Sequence: Synthetic oligonucleotide
  Sense strand starting at position 3644 of SEQ ID NO: 587904
ugcugaacaccuugggaga

SEQ ID NO: 827071 - RNA, 19 nt, Artificial Sequence
  Description of Artificial Sequence: Synthetic oligonucleotide
  Antisense strand to SEQ ID NO: 827070
ucucccaagguguucagca

SEQ ID NO: 827072 - RNA, 19 nt, Artificial Sequence
  Description of Artificial Sequence: Synthetic oligonucleotide
  Sense strand starting at position 3663 of SEQ ID NO: 587904
augaacuacguagguaaua

SEQ ID NO: 827073 - RNA, 19 nt, Artificial Sequence
  Description of Artificial Sequence: Synthetic oligonucleotide
  Antisense strand to SEQ ID NO: 827072
uauuaccuacguaguucau

SEQ ID NO: 827074 - RNA, 19 nt, Artificial Sequence
  Description of Artificial Sequence: Synthetic oligonucleotide
  Sense strand starting at position 3664 of SEQ ID NO: 587904
ugaacuacguagguaauau

SEQ ID NO: 827075 - RNA, 19 nt, Artificial Sequence
  Description of Artificial Sequence: Synthetic oligonucleotide
  Antisense strand to SEQ ID NO: 827074
auauuaccuacguaguuca

SEQ ID NO: 827076 - RNA, 19 nt, Artificial Sequence
  Description of Artificial Sequence: Synthetic oligonucleotide
  Sense strand starting at position 29 of SEQ ID NO: 587905
auaugcaggucuuuaauua

SEQ ID NO: 827077 - RNA, 19 nt, Artificial Sequence
  Description of Artificial Sequence: Synthetic oligonucleotide
  Antisense strand to SEQ ID NO: 827076
uaauuaaagaccugcauau

SEQ ID NO: 827078 - RNA, 19 nt, Artificial Sequence
  Description of Artificial Sequence: Synthetic oligonucleotide
  Sense strand starting at position 74 of SEQ ID NO: 587905
gcugacauagaacgguaaa

SEQ ID NO: 827079 - RNA, 19 nt, Artificial Sequence
  Description of Artificial Sequence: Synthetic oligonucleotide
  Antisense strand to SEQ ID NO: 827078
uuuaccguucuaugucagc

SEQ ID NO: 827080 - RNA, 19 nt, Artificial Sequence
  Description of Artificial Sequence: Synthetic oligonucleotide
  Sense strand starting at position 127 of SEQ ID NO: 587905
acaugauugguaugucaug

SEQ ID NO: 827081 - RNA, 19 nt, Artificial Sequence
  Description of Artificial Sequence: Synthetic oligonucleotide
  Antisense strand to SEQ ID NO: 827080
caugacauaccaaucaugu

SEQ ID NO: 827082 - RNA, 19 nt, Artificial Sequence
  Description of Artificial Sequence: Synthetic oligonucleotide
  Sense strand starting at position 128 of SEQ ID NO: 587905
caugauugguaugucauga

SEQ ID NO: 827083 - RNA, 19 nt, Artificial Sequence
  Description of Artificial Sequence: Synthetic oligonucleotide
  Antisense strand to SEQ ID NO: 827082
ucaugacauaccaaucaug

SEQ ID NO: 827084 - RNA, 19 nt, Artificial Sequence
  Description of Artificial Sequence: Synthetic oligonucleotide
  Sense strand starting at position 133 of SEQ ID NO: 587905
uugguaugucaugaaguca

SEQ ID NO: 827085 - RNA, 19 nt, Artificial Sequence
  Description of Artificial Sequence: Synthetic oligonucleotide
  Antisense strand to SEQ ID NO: 827084
ugacuucaugacauaccaa

SEQ ID NO: 827086 - RNA, 19 nt, Artificial Sequence
  Description of Artificial Sequence: Synthetic oligonucleotide
  Sense strand starting at position 251 of SEQ ID NO: 587905
ugaucaauggcaugacuuu

SEQ ID NO: 827087 - RNA, 19 nt, Artificial Sequence
  Description of Artificial Sequence: Synthetic oligonucleotide
  Antisense strand to SEQ ID NO: 827086
aaagucaugccauugauca

SEQ ID NO: 827088 - RNA, 19 nt, Artificial Sequence
  Description of Artificial Sequence: Synthetic oligonucleotide
  Sense strand starting at position 433 of SEQ ID NO: 587905
agccuuccucuggaaucua

SEQ ID NO: 827089 - RNA, 19 nt, Artificial Sequence
  Description of Artificial Sequence: Synthetic oligonucleotide
  Antisense strand to SEQ ID NO: 827088
uagauuccagaggaaggcu

SEQ ID NO: 827090 - RNA, 19 nt, Artificial Sequence
  Description of Artificial Sequence: Synthetic oligonucleotide
  Sense strand starting at position 716 of SEQ ID NO: 587905
cccagaaucgagggauucu

SEQ ID NO: 827091 - RNA, 19 nt, Artificial Sequence
  Description of Artificial Sequence: Synthetic oligonucleotide
  Antisense strand to SEQ ID NO: 827090
agaaucccucgauucuggg

SEQ ID NO: 827092 - RNA, 19 nt, Artificial Sequence
  Description of Artificial Sequence: Synthetic oligonucleotide
  Sense strand starting at position 963 of SEQ ID NO: 587905
ggacuaggucacuguauca

SEQ ID NO: 827093 - RNA, 19 nt, Artificial Sequence
  Description of Artificial Sequence: Synthetic oligonucleotide
  Antisense strand to SEQ ID NO: 827092
ugauacagugaccuagucc

SEQ ID NO: 827094 - RNA, 19 nt, Artificial Sequence
  Description of Artificial Sequence: Synthetic oligonucleotide
  Sense strand starting at position 1022 of SEQ ID NO: 587905
ucacgucuaggugauucua

SEQ ID NO: 827095 - RNA, 19 nt, Artificial Sequence
  Description of Artificial Sequence: Synthetic oligonucleotide
  Antisense strand to SEQ ID NO: 827094
uagaaucaccuagacguga

SEQ ID NO: 827096 - RNA, 19 nt, Artificial Sequence
  Description of Artificial Sequence: Synthetic oligonucleotide
  Sense strand starting at position 1024 of SEQ ID NO: 587905
acgucuaggugauucuaaa

SEQ ID NO: 827097 - RNA, 19 nt, Artificial Sequence
  Description of Artificial Sequence: Synthetic oligonucleotide
  Antisense strand to SEQ ID NO: 827096
uuuagaaucaccuagacgu

SEQ ID NO: 827098 - RNA, 19 nt, Artificial Sequence
  Description of Artificial Sequence: Synthetic oligonucleotide
  Sense strand starting at position 1053 of SEQ ID NO: 587905
gcuugucaucgugccuuga

SEQ ID NO: 827099 - RNA, 19 nt, Artificial Sequence
  Description of Artificial Sequence: Synthetic oligonucleotide
  Antisense strand to SEQ ID NO: 827098
ucaaggcacgaugacaagc

SEQ ID NO: 827100 - RNA, 19 nt, Artificial Sequence
  Description of Artificial Sequence: Synthetic oligonucleotide
  Sense strand starting at position 1097 of SEQ ID NO: 587905
agaacuuuguuacuuugau

SEQ ID NO: 827101 - RNA, 19 nt, Artificial Sequence
  Description of Artificial Sequence: Synthetic oligonucleotide
  Antisense strand to SEQ ID NO: 827100
aucaaaguaacaaaguucu

SEQ ID NO: 827102 - RNA, 19 nt, Artificial Sequence
  Description of Artificial Sequence: Synthetic oligonucleotide
  Sense strand starting at position 1132 of SEQ ID NO: 587905
accacuuaguuccuagagu

SEQ ID NO: 827103 - RNA, 19 nt, Artificial Sequence
  Description of Artificial Sequence: Synthetic oligonucleotide
  Antisense strand to SEQ ID NO: 827102
acucuaggaacuaaguggu

SEQ ID NO: 827104 - RNA, 19 nt, Artificial Sequence
  Description of Artificial Sequence: Synthetic oligonucleotide
  Sense strand starting at position 1210 of SEQ ID NO: 587905
acacuaaaggcuugguauu

SEQ ID NO: 827105 - RNA, 19 nt, Artificial Sequence
  Description of Artificial Sequence: Synthetic oligonucleotide
  Antisense strand to SEQ ID NO: 827104
aauaccaagccuuuagugu

SEQ ID NO: 827106 - RNA, 19 nt, Artificial Sequence
  Description of Artificial Sequence: Synthetic oligonucleotide
  Sense strand starting at position 2056 of SEQ ID NO: 587905
ggucgguuuccggaugaaa

SEQ ID NO: 827107 - RNA, 19 nt, Artificial Sequence
  Description of Artificial Sequence: Synthetic oligonucleotide
  Antisense strand to SEQ ID NO: 827106
uuucauccggaaaccgacc

SEQ ID NO: 827108 - RNA, 19 nt, Artificial Sequence
  Description of Artificial Sequence: Synthetic oligonucleotide
  Sense strand starting at position 2677 of SEQ ID NO: 587905
ggauauggccaggaugcua

SEQ ID NO: 827109 - RNA, 19 nt, Artificial Sequence
  Description of Artificial Sequence: Synthetic oligonucleotide
  Antisense strand to SEQ ID NO: 827108
uagcauccuggccauaucc

SEQ ID NO: 827110 - RNA, 19 nt, Artificial Sequence
  Description of Artificial Sequence: Synthetic oligonucleotide
  Sense strand starting at position 2739 of SEQ ID NO: 587905
uguguagugacuugacaga

SEQ ID NO: 827111 - RNA, 19 nt, Artificial Sequence
  Description of Artificial Sequence: Synthetic oligonucleotide
  Antisense strand to SEQ ID NO: 827110
ucugucaagucacuacaca

SEQ ID NO: 827112 - RNA, 19 nt, Artificial Sequence
  Description of Artificial Sequence: Synthetic oligonucleotide
  Sense strand starting at position 2744 of SEQ ID NO: 587905
agugacuugacagaagugu

SEQ ID NO: 827113 - RNA, 19 nt, Artificial Sequence
  Description of Artificial Sequence: Synthetic oligonucleotide
  Antisense strand to SEQ ID NO: 827112
acacuucugucaagucacu

SEQ ID NO: 827114 - RNA, 19 nt, Artificial Sequence
  Description of Artificial Sequence: Synthetic oligonucleotide
  Sense strand starting at position 2807 of SEQ ID NO: 587905
ucaguauggaagugaucag

SEQ ID NO: 827115 - RNA, 19 nt, Artificial Sequence
  Description of Artificial Sequence: Synthetic oligonucleotide
  Antisense strand to SEQ ID NO: 827114
cugaucacuuccauacuga

SEQ ID NO: 827116 - RNA, 19 nt, Artificial Sequence
  Description of Artificial Sequence: Synthetic oligonucleotide
  Sense strand starting at position 2840 of SEQ ID NO: 587905
ugccaccuugcagauaaau

SEQ ID NO: 827117 - RNA, 19 nt, Artificial Sequence
  Description of Artificial Sequence: Synthetic oligonucleotide
  Antisense strand to SEQ ID NO: 827116
auuuaucugcaagguggca

SEQ ID NO: 827118 - RNA, 19 nt, Artificial Sequence
  Description of Artificial Sequence: Synthetic oligonucleotide
  Sense strand starting at position 2870 of SEQ ID NO: 587905
cacguaguucgucuuuacu

SEQ ID NO: 827119 - RNA, 19 nt, Artificial Sequence
  Description of Artificial Sequence: Synthetic oligonucleotide
  Antisense strand to SEQ ID NO: 827118
aguaaagacgaacuacgug

SEQ ID NO: 827120 - RNA, 19 nt, Artificial Sequence
  Description of Artificial Sequence: Synthetic oligonucleotide
  Sense strand starting at position 2896 of SEQ ID NO: 587905
uugauuaaguucucuagga

SEQ ID NO: 827121 - RNA, 19 nt, Artificial Sequence
  Description of Artificial Sequence: Synthetic oligonucleotide
  Antisense strand to SEQ ID NO: 827120
uccuagagaacuuaaucaa

SEQ ID NO: 827122 - RNA, 19 nt, Artificial Sequence
  Description of Artificial Sequence: Synthetic oligonucleotide
  Sense strand starting at position 2897 of SEQ ID NO: 587905
ugauuaaguucucuaggac

SEQ ID NO: 827123 - RNA, 19 nt, Artificial Sequence
  Description of Artificial Sequence: Synthetic oligonucleotide
  Antisense strand to SEQ ID NO: 827122
guccuagagaacuuaauca

SEQ ID NO: 827124 - RNA, 19 nt, Artificial Sequence
  Description of Artificial Sequence: Synthetic oligonucleotide
  Sense strand starting at position 2912 of SEQ ID NO: 587905
ggaccagcugacugguaau

SEQ ID NO: 827125 - RNA, 19 nt, Artificial Sequence
  Description of Artificial Sequence: Synthetic oligonucleotide
  Antisense strand to SEQ ID NO: 827124
auuaccagucagcuggucc

SEQ ID NO: 827126 - RNA, 19 nt, Artificial Sequence
  Description of Artificial Sequence: Synthetic oligonucleotide
  Sense strand starting at position 2918 of SEQ ID NO: 587905
gcugacugguaauuauaag

SEQ ID NO: 827127 - RNA, 19 nt, Artificial Sequence
  Description of Artificial Sequence: Synthetic oligonucleotide
  Antisense strand to SEQ ID NO: 827126
cuuauaauuaccagucagc

SEQ ID NO: 827128 - RNA, 19 nt, Artificial Sequence
  Description of Artificial Sequence: Synthetic oligonucleotide
  Sense strand starting at position 2924 of SEQ ID NO: 587905
ugguaauuauaagucacau

SEQ ID NO: 827129 - RNA, 19 nt, Artificial Sequence
  Description of Artificial Sequence: Synthetic oligonucleotide
  Antisense strand to SEQ ID NO: 827128
augugacuuauaauuacca

SEQ ID NO: 827130 - RNA, 19 nt, Artificial Sequence
  Description of Artificial Sequence: Synthetic oligonucleotide
  Sense strand starting at position 3042 of SEQ ID NO: 587905
agaccauuacuuuacgcaa

SEQ ID NO: 827131 - RNA, 19 nt, Artificial Sequence
  Description of Artificial Sequence: Synthetic oligonucleotide
  Antisense strand to SEQ ID NO: 827130
uugcguaaaguaauggucu

SEQ ID NO: 827132 - RNA, 19 nt, Artificial Sequence
  Description of Artificial Sequence: Synthetic oligonucleotide
  Sense strand starting at position 3143 of SEQ ID NO: 587905
uuaguuugacucuaaaguu

SEQ ID NO: 827133 - RNA, 19 nt, Artificial Sequence
  Description of Artificial Sequence: Synthetic oligonucleotide
  Antisense strand to SEQ ID NO: 827132
aacuuuagagucaaacuaa

SEQ ID NO: 827134 - RNA, 19 nt, Artificial Sequence
  Description of Artificial Sequence: Synthetic oligonucleotide
  Sense strand starting at position 3181 of SEQ ID NO: 587905
aggugauguugaguacuga

SEQ ID NO: 827135 - RNA, 19 nt, Artificial Sequence
  Description of Artificial Sequence: Synthetic oligonucleotide
  Antisense strand to SEQ ID NO: 827134
ucaguacucaacaucaccu

SEQ ID NO: 827136 - RNA, 19 nt, Artificial Sequence
  Description of Artificial Sequence: Synthetic oligonucleotide
  Sense strand starting at position 3182 of SEQ ID NO: 587905
ggugauguugaguacugau

SEQ ID NO: 827137 - RNA, 19 nt, Artificial Sequence
  Description of Artificial Sequence: Synthetic oligonucleotide
  Antisense strand to SEQ ID NO: 827136
aucaguacucaacaucacc

SEQ ID NO: 827138 - RNA, 19 nt, Artificial Sequence
  Description of Artificial Sequence: Synthetic oligonucleotide
  Sense strand starting at position 3266 of SEQ ID NO: 587905
acgugaguuugauuucagu

SEQ ID NO: 827139 - RNA, 19 nt, Artificial Sequence
  Description of Artificial Sequence: Synthetic oligonucleotide
  Antisense strand to SEQ ID NO: 827138
acugaaaucaaacucacgu

SEQ ID NO: 827140 - RNA, 19 nt, Artificial Sequence
  Description of Artificial Sequence: Synthetic oligonucleotide
  Sense strand starting at position 3272 of SEQ ID NO: 587905
guuugauuucagugugucc

SEQ ID NO: 827141 - RNA, 19 nt, Artificial Sequence
  Description of Artificial Sequence: Synthetic oligonucleotide
  Antisense strand to SEQ ID NO: 827140
ggacacacugaaaucaaac

SEQ ID NO: 827142 - RNA, 19 nt, Artificial Sequence
  Description of Artificial Sequence: Synthetic oligonucleotide
  Sense strand starting at position 3293 of SEQ ID NO: 587905
augugaaacguguacauua

SEQ ID NO: 827143 - RNA, 19 nt, Artificial Sequence
  Description of Artificial Sequence: Synthetic oligonucleotide
  Antisense strand to SEQ ID NO: 827142
uaauguacacguuucacau

SEQ ID NO: 827144 - RNA, 19 nt, Artificial Sequence
  Description of Artificial Sequence: Synthetic oligonucleotide
  Sense strand starting at position 3295 of SEQ ID NO: 587905
gugaaacguguacauuauu

SEQ ID NO: 827145 - RNA, 19 nt, Artificial Sequence
  Description of Artificial Sequence: Synthetic oligonucleotide
  Antisense strand to SEQ ID NO: 827144
aauaauguacacguuucac

SEQ ID NO: 827146 - RNA, 19 nt, Artificial Sequence
  Description of Artificial Sequence: Synthetic oligonucleotide
  Sense strand starting at position 3651 of SEQ ID NO: 587905
auaagaguguuggcaauau

SEQ ID NO: 827147 - RNA, 19 nt, Artificial Sequence
  Description of Artificial Sequence: Synthetic oligonucleotide
  Antisense strand to SEQ ID NO: 827146
auauugccaacacucuuau

SEQ ID NO: 827148 - RNA, 19 nt, Artificial Sequence
  Description of Artificial Sequence: Synthetic oligonucleotide
  Sense strand starting at position 3708 of SEQ ID NO: 587905
guuggaagauggcuuuaaa

SEQ ID NO: 827149 - RNA, 19 nt, Artificial Sequence
  Description of Artificial Sequence: Synthetic oligonucleotide
  Antisense strand to SEQ ID NO: 827148
uuuaaagccaucuuccaac

SEQ ID NO: 827150 - RNA, 19 nt, Artificial Sequence
  Description of Artificial Sequence: Synthetic oligonucleotide
  Sense strand starting at position 3783 of SEQ ID NO: 587905
ccgugucucuuauuuauca

SEQ ID NO: 827151 - RNA, 19 nt, Artificial Sequence
  Description of Artificial Sequence: Synthetic oligonucleotide
  Antisense strand to SEQ ID NO: 827150
ugauaaauaagagacacgg

SEQ ID NO: 827152 - RNA, 19 nt, Artificial Sequence
  Description of Artificial Sequence: Synthetic oligonucleotide
  Sense strand starting at position 3829 of SEQ ID NO: 587905
cagugaacaggcuaugcua

SEQ ID NO: 827153 - RNA, 19 nt, Artificial Sequence
  Description of Artificial Sequence: Synthetic oligonucleotide
  Antisense strand to SEQ ID NO: 827152
uagcauagccuguucacug

SEQ ID NO: 827154 - RNA, 19 nt, Artificial Sequence
  Description of Artificial Sequence: Synthetic oligonucleotide
  Sense strand starting at position 3870 of SEQ ID NO: 587905
uugagaaagcccuaauggu

SEQ ID NO: 827155 - RNA, 19 nt, Artificial Sequence
  Description of Artificial Sequence: Synthetic oligonucleotide
  Antisense strand to SEQ ID NO: 827154
accauuagggcuuucucaa

SEQ ID NO: 827156 - RNA, 19 nt, Artificial Sequence
  Description of Artificial Sequence: Synthetic oligonucleotide
  Sense strand starting at position 203 of SEQ ID NO: 587906
auaugcaggucuuuaauua

SEQ ID NO: 827157 - RNA, 19 nt, Artificial Sequence
  Description of Artificial Sequence: Synthetic oligonucleotide
  Antisense strand to SEQ ID NO: 827156
uaauuaaagaccugcauau

SEQ ID NO: 827158 - RNA, 19 nt, Artificial Sequence
  Description of Artificial Sequence: Synthetic oligonucleotide
  Sense strand starting at position 248 of SEQ ID NO: 587906
gcugacauagaacgguaaa

SEQ ID NO: 827159 - RNA, 19 nt, Artificial Sequence
  Description of Artificial Sequence: Synthetic oligonucleotide
  Antisense strand to SEQ ID NO: 827158
uuuaccguucuaugucagc

SEQ ID NO: 827160 - RNA, 19 nt, Artificial Sequence
  Description of Artificial Sequence: Synthetic oligonucleotide
  Sense strand starting at position 301 of SEQ ID NO: 587906
acaugauugguaugucaug

SEQ ID NO: 827161 - RNA, 19 nt, Artificial Sequence
  Description of Artificial Sequence: Synthetic oligonucleotide
  Antisense strand to SEQ ID NO: 827160
caugacauaccaaucaugu

SEQ ID NO: 827162 - RNA, 19 nt, Artificial Sequence
  Description of Artificial Sequence: Synthetic oligonucleotide
  Sense strand starting at position 302 of SEQ ID NO: 587906
caugauugguaugucauga

SEQ ID NO: 827163 - RNA, 19 nt, Artificial Sequence
  Description of Artificial Sequence: Synthetic oligonucleotide
  Antisense strand to SEQ ID NO: 827162
ucaugacauaccaaucaug

SEQ ID NO: 827164 - RNA, 19 nt, Artificial Sequence
  Description of Artificial Sequence: Synthetic oligonucleotide
  Sense strand starting at position 307 of SEQ ID NO: 587906
uugguaugucaugaaguca

SEQ ID NO: 827165 - RNA, 19 nt, Artificial Sequence
  Description of Artificial Sequence: Synthetic oligonucleotide
  Antisense strand to SEQ ID NO: 827164
ugacuucaugacauaccaa

SEQ ID NO: 827166 - RNA, 19 nt, Artificial Sequence
  Description of Artificial Sequence: Synthetic oligonucleotide
  Sense strand starting at position 343 of SEQ ID NO: 587906
gcacaugcacuugaguuau

SEQ ID NO: 827167 - RNA, 19 nt, Artificial Sequence
  Description of Artificial Sequence: Synthetic oligonucleotide
  Antisense strand to SEQ ID NO: 827166
auaacucaagugcaugugc

SEQ ID NO: 827168 - RNA, 19 nt, Artificial Sequence
  Description of Artificial Sequence: Synthetic oligonucleotide
  Sense strand starting at position 425 of SEQ ID NO: 587906
ugaucaauggcaugacuuu

SEQ ID NO: 827169 - RNA, 19 nt, Artificial Sequence
  Description of Artificial Sequence: Synthetic oligonucleotide
  Antisense strand to SEQ ID NO: 827168
aaagucaugccauugauca

SEQ ID NO: 827170 - RNA, 19 nt, Artificial Sequence
  Description of Artificial Sequence: Synthetic oligonucleotide
  Sense strand starting at position 607 of SEQ ID NO: 587906
agccuuccucuggaaucua

SEQ ID NO: 827171 - RNA, 19 nt, Artificial Sequence
  Description of Artificial Sequence: Synthetic oligonucleotide
  Antisense strand to SEQ ID NO: 827170
uagauuccagaggaaggcu

SEQ ID NO: 827172 - RNA, 19 nt, Artificial Sequence
  Description of Artificial Sequence: Synthetic oligonucleotide
  Sense strand starting at position 890 of SEQ ID NO: 587906
cccagaaucgagggauucu

SEQ ID NO: 827173 - RNA, 19 nt, Artificial Sequence
  Description of Artificial Sequence: Synthetic oligonucleotide
  Antisense strand to SEQ ID NO: 827172
agaaucccucgauucuggg

SEQ ID NO: 827174 - RNA, 19 nt, Artificial Sequence
  Description of Artificial Sequence: Synthetic oligonucleotide
  Sense strand starting at position 1137 of SEQ ID NO: 587906
ggacuaggucacuguauca

SEQ ID NO: 827175 - RNA, 19 nt, Artificial Sequence
  Description of Artificial Sequence: Synthetic oligonucleotide
  Antisense strand to SEQ ID NO: 827174
ugauacagugaccuagucc

SEQ ID NO: 827176 - RNA, 19 nt, Artificial Sequence
  Description of Artificial Sequence: Synthetic oligonucleotide
  Sense strand starting at position 1191 of SEQ ID NO: 587906
ugaugucacgucuagguga

SEQ ID NO: 827177 - RNA, 19 nt, Artificial Sequence
  Description of Artificial Sequence: Synthetic oligonucleotide
  Antisense strand to SEQ ID NO: 827176
ucaccuagacgugacauca

SEQ ID NO: 827178 - RNA, 19 nt, Artificial Sequence
  Description of Artificial Sequence: Synthetic oligonucleotide
  Sense strand starting at position 1196 of SEQ ID NO: 587906
ucacgucuaggugauucua

SEQ ID NO: 827179 - RNA, 19 nt, Artificial Sequence
  Description of Artificial Sequence: Synthetic oligonucleotide
  Antisense strand to SEQ ID NO: 827178
uagaaucaccuagacguga

SEQ ID NO: 827180 - RNA, 19 nt, Artificial Sequence
  Description of Artificial Sequence: Synthetic oligonucleotide
  Sense strand starting at position 1198 of SEQ ID NO: 587906
acgucuaggugauucuaaa

SEQ ID NO: 827181 - RNA, 19 nt, Artificial Sequence
  Description of Artificial Sequence: Synthetic oligonucleotide
  Antisense strand to SEQ ID NO: 827180
uuuagaaucaccuagacgu

SEQ ID NO: 827182 - RNA, 19 nt, Artificial Sequence
  Description of Artificial Sequence: Synthetic oligonucleotide
  Sense strand starting at position 1227 of SEQ ID NO: 587906
gcuugucaucgugccuuga

SEQ ID NO: 827183 - RNA, 19 nt, Artificial Sequence
  Description of Artificial Sequence: Synthetic oligonucleotide
  Antisense strand to SEQ ID NO: 827182
ucaaggcacgaugacaagc

SEQ ID NO: 827184 - RNA, 19 nt, Artificial Sequence
  Description of Artificial Sequence: Synthetic oligonucleotide
  Sense strand starting at position 1271 of SEQ ID NO: 587906
agaacuuuguuacuuugau

SEQ ID NO: 827185 - RNA, 19 nt, Artificial Sequence
  Description of Artificial Sequence: Synthetic oligonucleotide
  Antisense strand to SEQ ID NO: 827184
aucaaaguaacaaaguucu

SEQ ID NO: 827186 - RNA, 19 nt, Artificial Sequence
  Description of Artificial Sequence: Synthetic oligonucleotide
  Sense strand starting at position 1306 of SEQ ID NO: 587906
accacuuaguuccuagagu

SEQ ID NO: 827187 - RNA, 19 nt, Artificial Sequence
  Description of Artificial Sequence: Synthetic oligonucleotide
  Antisense strand to SEQ ID NO: 827186
acucuaggaacuaaguggu

SEQ ID NO: 827188 - RNA, 19 nt, Artificial Sequence
  Description of Artificial Sequence: Synthetic oligonucleotide
  Sense strand starting at position 1384 of SEQ ID NO: 587906
acacuaaaggcuugguauu

SEQ ID NO: 827189 - RNA, 19 nt, Artificial Sequence
  Description of Artificial Sequence: Synthetic oligonucleotide
  Antisense strand to SEQ ID NO: 827188
aauaccaagccuuuagugu

SEQ ID NO: 827190 - RNA, 19 nt, Artificial Sequence
  Description of Artificial Sequence: Synthetic oligonucleotide
  Sense strand starting at position 2230 of SEQ ID NO: 587906
ggucgguuuccggaugaaa

SEQ ID NO: 827191 - RNA, 19 nt, Artificial Sequence
  Description of Artificial Sequence: Synthetic oligonucleotide
  Antisense strand to SEQ ID NO: 827190
uuucauccggaaaccgacc

SEQ ID NO: 827192 - RNA, 19 nt, Artificial Sequence
  Description of Artificial Sequence: Synthetic oligonucleotide
  Sense strand starting at position 2851 of SEQ ID NO: 587906
ggauauggccaggaugcua

SEQ ID NO: 827193 - RNA, 19 nt, Artificial Sequence
  Description of Artificial Sequence: Synthetic oligonucleotide
  Antisense strand to SEQ ID NO: 827192
uagcauccuggccauaucc

SEQ ID NO: 827194 - RNA, 19 nt, Artificial Sequence
  Description of Artificial Sequence: Synthetic oligonucleotide
  Sense strand starting at position 2913 of SEQ ID NO: 587906
uguguagugacuugacaga

SEQ ID NO: 827195 - RNA, 19 nt, Artificial Sequence
  Description of Artificial Sequence: Synthetic oligonucleotide
  Antisense strand to SEQ ID NO: 827194
ucugucaagucacuacaca

SEQ ID NO: 827196 - RNA, 19 nt, Artificial Sequence
  Description of Artificial Sequence: Synthetic oligonucleotide
  Sense strand starting at position 2918 of SEQ ID NO: 587906
agugacuugacagaagugu

SEQ ID NO: 827197 - RNA, 19 nt, Artificial Sequence
  Description of Artificial Sequence: Synthetic oligonucleotide
  Antisense strand to SEQ ID NO: 827196
acacuucugucaagucacu

SEQ ID NO: 827198 - RNA, 19 nt, Artificial Sequence
  Description of Artificial Sequence: Synthetic oligonucleotide
  Sense strand starting at position 2981 of SEQ ID NO: 587906
ucaguauggaagugaucag

SEQ ID NO: 827199 - RNA, 19 nt, Artificial Sequence
  Description of Artificial Sequence: Synthetic oligonucleotide
  Antisense strand to SEQ ID NO: 827198
cugaucacuuccauacuga

SEQ ID NO: 827200 - RNA, 19 nt, Artificial Sequence
  Description of Artificial Sequence: Synthetic oligonucleotide
  Sense strand starting at position 3014 of SEQ ID NO: 587906
ugccaccuugcagauaaau

SEQ ID NO: 827201 - RNA, 19 nt, Artificial Sequence
  Description of Artificial Sequence: Synthetic oligonucleotide
  Antisense strand to SEQ ID NO: 827200
auuuaucugcaagguggca

SEQ ID NO: 827202 - RNA, 19 nt, Artificial Sequence
  Description of Artificial Sequence: Synthetic oligonucleotide
  Sense strand starting at position 3044 of SEQ ID NO: 587906
cacguaguucgucuuuacu

SEQ ID NO: 827203 - RNA, 19 nt, Artificial Sequence
  Description of Artificial Sequence: Synthetic oligonucleotide
  Antisense strand to SEQ ID NO: 827202
aguaaagacgaacuacgug

SEQ ID NO: 827204 - RNA, 19 nt, Artificial Sequence
  Description of Artificial Sequence: Synthetic oligonucleotide
  Sense strand starting at position 3070 of SEQ ID NO: 587906
uugauuaaguucucuagga

SEQ ID NO: 827205 - RNA, 19 nt, Artificial Sequence
  Description of Artificial Sequence: Synthetic oligonucleotide
  Antisense strand to SEQ ID NO: 827204
uccuagagaacuuaaucaa

SEQ ID NO: 827206 - RNA, 19 nt, Artificial Sequence
  Description of Artificial Sequence: Synthetic oligonucleotide
  Sense strand starting at position 3071 of SEQ ID NO: 587906
ugauuaaguucucuaggac

SEQ ID NO: 827207 - RNA, 19 nt, Artificial Sequence
  Description of Artificial Sequence: Synthetic oligonucleotide
  Antisense strand to SEQ ID NO: 827206
guccuagagaacuuaauca

SEQ ID NO: 827208 - RNA, 19 nt, Artificial Sequence
  Description of Artificial Sequence: Synthetic oligonucleotide
  Sense strand starting at position 3086 of SEQ ID NO: 587906
ggaccagcugacugguaau

SEQ ID NO: 827209 - RNA, 19 nt, Artificial Sequence
  Description of Artificial Sequence: Synthetic oligonucleotide
  Antisense strand to SEQ ID NO: 827208
auuaccagucagcuggucc

SEQ ID NO: 827210 - RNA, 19 nt, Artificial Sequence
  Description of Artificial Sequence: Synthetic oligonucleotide
  Sense strand starting at position 3092 of SEQ ID NO: 587906
gcugacugguaauuauaag

SEQ ID NO: 827211 - RNA, 19 nt, Artificial Sequence
  Description of Artificial Sequence: Synthetic oligonucleotide
  Antisense strand to SEQ ID NO: 827210
cuuauaauuaccagucagc

SEQ ID NO: 827212 - RNA, 19 nt, Artificial Sequence
  Description of Artificial Sequence: Synthetic oligonucleotide
  Sense strand starting at position 3098 of SEQ ID NO: 587906
ugguaauuauaagucacau

SEQ ID NO: 827213 - RNA, 19 nt, Artificial Sequence
  Description of Artificial Sequence: Synthetic oligonucleotide
  Antisense strand to SEQ ID NO: 827212
augugacuuauaauuacca

SEQ ID NO: 827214 - RNA, 19 nt, Artificial Sequence
  Description of Artificial Sequence: Synthetic oligonucleotide
  Sense strand starting at position 3216 of SEQ ID NO: 587906
agaccauuacuuuacgcaa

SEQ ID NO: 827215 - RNA, 19 nt, Artificial Sequence
  Description of Artificial Sequence: Synthetic oligonucleotide
  Antisense strand to SEQ ID NO: 827214
uugcguaaaguaauggucu

SEQ ID NO: 827216 - RNA, 19 nt, Artificial Sequence
  Description of Artificial Sequence: Synthetic oligonucleotide
  Sense strand starting at position 3317 of SEQ ID NO: 587906
uuaguuugacucuaaaguu

SEQ ID NO: 827217 - RNA, 19 nt, Artificial Sequence
  Description of Artificial Sequence: Synthetic oligonucleotide
  Antisense strand to SEQ ID NO: 827216
aacuuuagagucaaacuaa

SEQ ID NO: 827218 - RNA, 19 nt, Artificial Sequence
  Description of Artificial Sequence: Synthetic oligonucleotide
  Sense strand starting at position 3355 of SEQ ID NO: 587906
aggugauguugaguacuga

SEQ ID NO: 827219 - RNA, 19 nt, Artificial Sequence
  Description of Artificial Sequence: Synthetic oligonucleotide
  Antisense strand to SEQ ID NO: 827218
ucaguacucaacaucaccu

SEQ ID NO: 827220 - RNA, 19 nt, Artificial Sequence
  Description of Artificial Sequence: Synthetic oligonucleotide
  Sense strand starting at position 3356 of SEQ ID NO: 587906
ggugauguugaguacugau

SEQ ID NO: 827221 - RNA, 19 nt, Artificial Sequence
  Description of Artificial Sequence: Synthetic oligonucleotide
  Antisense strand to SEQ ID NO: 827220
aucaguacucaacaucacc

SEQ ID NO: 827222 - RNA, 19 nt, Artificial Sequence
  Description of Artificial Sequence: Synthetic oligonucleotide
  Sense strand starting at position 3440 of SEQ ID NO: 587906
acgugaguuugauuucagu

SEQ ID NO: 827223 - RNA, 19 nt, Artificial Sequence
  Description of Artificial Sequence: Synthetic oligonucleotide
  Antisense strand to SEQ ID NO: 827222
acugaaaucaaacucacgu

SEQ ID NO: 827224 - RNA, 19 nt, Artificial Sequence
  Description of Artificial Sequence: Synthetic oligonucleotide
  Sense strand starting at position 3446 of SEQ ID NO: 587906
guuugauuucagugugucc

SEQ ID NO: 827225 - RNA, 19 nt, Artificial Sequence
  Description of Artificial Sequence: Synthetic oligonucleotide
  Antisense strand to SEQ ID NO: 827224
ggacacacugaaaucaaac

SEQ ID NO: 827226 - RNA, 19 nt, Artificial Sequence
  Description of Artificial Sequence: Synthetic oligonucleotide
  Sense strand starting at position 3467 of SEQ ID NO: 587906
augugaaacguguacauua

SEQ ID NO: 827227 - RNA, 19 nt, Artificial Sequence
  Description of Artificial Sequence: Synthetic oligonucleotide
  Antisense strand to SEQ ID NO: 827226
uaauguacacguuucacau

SEQ ID NO: 827228 - RNA, 19 nt, Artificial Sequence
  Description of Artificial Sequence: Synthetic oligonucleotide
  Sense strand starting at position 3469 of SEQ ID NO: 587906
gugaaacguguacauuauu

SEQ ID NO: 827229 - RNA, 19 nt, Artificial Sequence
  Description of Artificial Sequence: Synthetic oligonucleotide
  Antisense strand to SEQ ID NO: 827228
aauaauguacacguuucac

SEQ ID NO: 827230 - RNA, 19 nt, Artificial Sequence
  Description of Artificial Sequence: Synthetic oligonucleotide
  Sense strand starting at position 3825 of SEQ ID NO: 587906
auaagaguguuggcaauau

SEQ ID NO: 827231 - RNA, 19 nt, Artificial Sequence
  Description of Artificial Sequence: Synthetic oligonucleotide
  Antisense strand to SEQ ID NO: 827230
auauugccaacacucuuau

SEQ ID NO: 827232 - RNA, 19 nt, Artificial Sequence
  Description of Artificial Sequence: Synthetic oligonucleotide
  Sense strand starting at position 3882 of SEQ ID NO: 587906
guuggaagauggcuuuaaa

SEQ ID NO: 827233 - RNA, 19 nt, Artificial Sequence
  Description of Artificial Sequence: Synthetic oligonucleotide
  Antisense strand to SEQ ID NO: 827232
uuuaaagccaucuuccaac

SEQ ID NO: 827234 - RNA, 19 nt, Artificial Sequence
  Description of Artificial Sequence: Synthetic oligonucleotide
  Sense strand starting at position 3957 of SEQ ID NO: 587906
ccgugucucuuauuuauca

SEQ ID NO: 827235 - RNA, 19 nt, Artificial Sequence
  Description of Artificial Sequence: Synthetic oligonucleotide
  Antisense strand to SEQ ID NO: 827234
ugauaaauaagagacacgg

SEQ ID NO: 827236 - RNA, 19 nt, Artificial Sequence
  Description of Artificial Sequence: Synthetic oligonucleotide
  Sense strand starting at position 249 of SEQ ID NO: 587907
cccagaaucgagggauucu

SEQ ID NO: 827237 - RNA, 19 nt, Artificial Sequence
  Description of Artificial Sequence: Synthetic oligonucleotide
  Antisense strand to SEQ ID NO: 827236
agaaucccucgauucuggg

SEQ ID NO: 827238 - RNA, 19 nt, Artificial Sequence
  Description of Artificial Sequence: Synthetic oligonucleotide
  Sense strand starting at position 496 of SEQ ID NO: 587907
ggacuaggucacuguauca

SEQ ID NO: 827239 - RNA, 19 nt, Artificial Sequence
  Description of Artificial Sequence: Synthetic oligonucleotide
  Antisense strand to SEQ ID NO: 827238
ugauacagugaccuagucc

SEQ ID NO: 827240 - RNA, 19 nt, Artificial Sequence
  Description of Artificial Sequence: Synthetic oligonucleotide
  Sense strand starting at position 586 of SEQ ID NO: 587907
gcuugucaucgugccuuga

SEQ ID NO: 827241 - RNA, 19 nt, Artificial Sequence
  Description of Artificial Sequence: Synthetic oligonucleotide
  Antisense strand to SEQ ID NO: 827240
ucaaggcacgaugacaagc

SEQ ID NO: 827242 - RNA, 19 nt, Artificial Sequence
  Description of Artificial Sequence: Synthetic oligonucleotide
  Sense strand starting at position 630 of SEQ ID NO: 587907
agaacuuuguuacuuugau

SEQ ID NO: 827243 - RNA, 19 nt, Artificial Sequence
  Description of Artificial Sequence: Synthetic oligonucleotide
  Antisense strand to SEQ ID NO: 827242
aucaaaguaacaaaguucu

SEQ ID NO: 827244 - RNA, 19 nt, Artificial Sequence
  Description of Artificial Sequence: Synthetic oligonucleotide
  Sense strand starting at position 743 of SEQ ID NO: 587907
acacuaaaggcuugguauu

SEQ ID NO: 827245 - RNA, 19 nt, Artificial Sequence
  Description of Artificial Sequence: Synthetic oligonucleotide
  Antisense strand to SEQ ID NO: 827244
aauaccaagccuuuagugu

SEQ ID NO: 827246 - RNA, 19 nt, Artificial Sequence
  Description of Artificial Sequence: Synthetic oligonucleotide
  Sense strand starting at position 1589 of SEQ ID NO: 587907
ggucgguuuccggaugaaa

SEQ ID NO: 827247 - RNA, 19 nt, Artificial Sequence
  Description of Artificial Sequence: Synthetic oligonucleotide
  Antisense strand to SEQ ID NO: 827246
uuucauccggaaaccgacc

SEQ ID NO: 827248 - RNA, 19 nt, Artificial Sequence
  Description of Artificial Sequence: Synthetic oligonucleotide
  Sense strand starting at position 2210 of SEQ ID NO: 587907
ggauauggccaggaugcua

SEQ ID NO: 827249 - RNA, 19 nt, Artificial Sequence
  Description of Artificial Sequence: Synthetic oligonucleotide
  Antisense strand to SEQ ID NO: 827248
uagcauccuggccauaucc

SEQ ID NO: 827250 - RNA, 19 nt, Artificial Sequence
  Description of Artificial Sequence: Synthetic oligonucleotide
  Sense strand starting at position 2277 of SEQ ID NO: 587907
agugacuugacagaagugu

SEQ ID NO: 827251 - RNA, 19 nt, Artificial Sequence
  Description of Artificial Sequence: Synthetic oligonucleotide
  Antisense strand to SEQ ID NO: 827250
acacuucugucaagucacu

SEQ ID NO: 827252 - RNA, 19 nt, Artificial Sequence
  Description of Artificial Sequence: Synthetic oligonucleotide
  Sense strand starting at position 2340 of SEQ ID NO: 587907
ucaguauggaagugaucag

SEQ ID NO: 827253 - RNA, 19 nt, Artificial Sequence
  Description of Artificial Sequence: Synthetic oligonucleotide
  Antisense strand to SEQ ID NO: 827252
cugaucacuuccauacuga

SEQ ID NO: 827254 - RNA, 19 nt, Artificial Sequence
  Description of Artificial Sequence: Synthetic oligonucleotide
  Sense strand starting at position 2373 of SEQ ID NO: 587907
ugccaccuugcagauaaau

SEQ ID NO: 827255 - RNA, 19 nt, Artificial Sequence
  Description of Artificial Sequence: Synthetic oligonucleotide
  Antisense strand to SEQ ID NO: 827254
auuuaucugcaagguggca

SEQ ID NO: 827256 - RNA, 19 nt, Artificial Sequence
  Description of Artificial Sequence: Synthetic oligonucleotide
  Sense strand starting at position 2403 of SEQ ID NO: 587907
cacguaguucgucuuuacu

SEQ ID NO: 827257 - RNA, 19 nt, Artificial Sequence
  Description of Artificial Sequence: Synthetic oligonucleotide
  Antisense strand to SEQ ID NO: 827256
aguaaagacgaacuacgug

SEQ ID NO: 827258 - RNA, 19 nt, Artificial Sequence
  Description of Artificial Sequence: Synthetic oligonucleotide
  Sense strand starting at position 2429 of SEQ ID NO: 587907
uugauuaaguucucuagga

SEQ ID NO: 827259 - RNA, 19 nt, Artificial Sequence
  Description of Artificial Sequence: Synthetic oligonucleotide
  Antisense strand to SEQ ID NO: 827258
uccuagagaacuuaaucaa

SEQ ID NO: 827260 - RNA, 19 nt, Artificial Sequence
  Description of Artificial Sequence: Synthetic oligonucleotide
  Sense strand starting at position 2430 of SEQ ID NO: 587907
ugauuaaguucucuaggac

SEQ ID NO: 827261 - RNA, 19 nt, Artificial Sequence
  Description of Artificial Sequence: Synthetic oligonucleotide
  Antisense strand to SEQ ID NO: 827260
guccuagagaacuuaauca

SEQ ID NO: 827262 - RNA, 19 nt, Artificial Sequence
  Description of Artificial Sequence: Synthetic oligonucleotide
  Sense strand starting at position 2445 of SEQ ID NO: 587907
ggaccagcugacugguaau

SEQ ID NO: 827263 - RNA, 19 nt, Artificial Sequence
  Description of Artificial Sequence: Synthetic oligonucleotide
  Antisense strand to SEQ ID NO: 827262
auuaccagucagcuggucc

SEQ ID NO: 827264 - RNA, 19 nt, Artificial Sequence
  Description of Artificial Sequence: Synthetic oligonucleotide
  Sense strand starting at position 2451 of SEQ ID NO: 587907
gcugacugguaauuauaag

SEQ ID NO: 827265 - RNA, 19 nt, Artificial Sequence
  Description of Artificial Sequence: Synthetic oligonucleotide
  Antisense strand to SEQ ID NO: 827264
cuuauaauuaccagucagc

SEQ ID NO: 827266 - RNA, 19 nt, Artificial Sequence
  Description of Artificial Sequence: Synthetic oligonucleotide
  Sense strand starting at position 2457 of SEQ ID NO: 587907
ugguaauuauaagucacau

SEQ ID NO: 827267 - RNA, 19 nt, Artificial Sequence
  Description of Artificial Sequence: Synthetic oligonucleotide
  Antisense strand to SEQ ID NO: 827266
augugacuuauaauuacca

SEQ ID NO: 827268 - RNA, 19 nt, Artificial Sequence
  Description of Artificial Sequence: Synthetic oligonucleotide
  Sense strand starting at position 2575 of SEQ ID NO: 587907
agaccauuacuuuacgcaa

SEQ ID NO: 827269 - RNA, 19 nt, Artificial Sequence
  Description of Artificial Sequence: Synthetic oligonucleotide
  Antisense strand to SEQ ID NO: 827268
uugcguaaaguaauggucu

SEQ ID NO: 827270 - RNA, 19 nt, Artificial Sequence
  Description of Artificial Sequence: Synthetic oligonucleotide
  Sense strand starting at position 2676 of SEQ ID NO: 587907
uuaguuugacucuaaaguu

SEQ ID NO: 827271 - RNA, 19 nt, Artificial Sequence
  Description of Artificial Sequence: Synthetic oligonucleotide
  Antisense strand to SEQ ID NO: 827270
aacuuuagagucaaacuaa

SEQ ID NO: 827272 - RNA, 19 nt, Artificial Sequence
  Description of Artificial Sequence: Synthetic oligonucleotide
  Sense strand starting at position 2714 of SEQ ID NO: 587907
aggugauguugaguacuga

SEQ ID NO: 827273 - RNA, 19 nt, Artificial Sequence
  Description of Artificial Sequence: Synthetic oligonucleotide
  Antisense strand to SEQ ID NO: 827272
ucaguacucaacaucaccu

SEQ ID NO: 827274 - RNA, 19 nt, Artificial Sequence
  Description of Artificial Sequence: Synthetic oligonucleotide
  Sense strand starting at position 2715 of SEQ ID NO: 587907
ggugauguugaguacugau

SEQ ID NO: 827275 - RNA, 19 nt, Artificial Sequence
  Description of Artificial Sequence: Synthetic oligonucleotide
  Antisense strand to SEQ ID NO: 827274
aucaguacucaacaucacc

SEQ ID NO: 827276 - RNA, 19 nt, Artificial Sequence
  Description of Artificial Sequence: Synthetic oligonucleotide
  Sense strand starting at position 2799 of SEQ ID NO: 587907
acgugaguuugauuucagu

SEQ ID NO: 827277 - RNA, 19 nt, Artificial Sequence
  Description of Artificial Sequence: Synthetic oligonucleotide
  Antisense strand to SEQ ID NO: 827276
acugaaaucaaacucacgu

SEQ ID NO: 827278 - RNA, 19 nt, Artificial Sequence
  Description of Artificial Sequence: Synthetic oligonucleotide
  Sense strand starting at position 2805 of SEQ ID NO: 587907
guuugauuucagugugucc

SEQ ID NO: 827279 - RNA, 19 nt, Artificial Sequence
  Description of Artificial Sequence: Synthetic oligonucleotide
  Antisense strand to SEQ ID NO: 827278
ggacacacugaaaucaaac

SEQ ID NO: 827280 - RNA, 19 nt, Artificial Sequence
  Description of Artificial Sequence: Synthetic oligonucleotide
  Sense strand starting at position 2826 of SEQ ID NO: 587907
augugaaacguguacauua

SEQ ID NO: 827281 - RNA, 19 nt, Artificial Sequence
  Description of Artificial Sequence: Synthetic oligonucleotide
  Antisense strand to SEQ ID NO: 827280
uaauguacacguuucacau

SEQ ID NO: 827282 - RNA, 19 nt, Artificial Sequence
  Description of Artificial Sequence: Synthetic oligonucleotide
  Sense strand starting at position 2828 of SEQ ID NO: 587907
gugaaacguguacauuauu

SEQ ID NO: 827283 - RNA, 19 nt, Artificial Sequence
  Description of Artificial Sequence: Synthetic oligonucleotide
  Antisense strand to SEQ ID NO: 827282
aauaauguacacguuucac

SEQ ID NO: 827284 - RNA, 19 nt, Artificial Sequence
  Description of Artificial Sequence: Synthetic oligonucleotide
  Sense strand starting at position 3184 of SEQ ID NO: 587907
auaagaguguuggcaauau

SEQ ID NO: 827285 - RNA, 19 nt, Artificial Sequence
  Description of Artificial Sequence: Synthetic oligonucleotide
  Antisense strand to SEQ ID NO: 827284
auauugccaacacucuuau

SEQ ID NO: 827286 - RNA, 19 nt, Artificial Sequence
  Description of Artificial Sequence: Synthetic oligonucleotide
  Sense strand starting at position 3241 of SEQ ID NO: 587907
guuggaagauggcuuuaaa

SEQ ID NO: 827287 - RNA, 19 nt, Artificial Sequence
  Description of Artificial Sequence: Synthetic oligonucleotide
  Antisense strand to SEQ ID NO: 827286
uuuaaagccaucuuccaac

SEQ ID NO: 827288 - RNA, 19 nt, Artificial Sequence
  Description of Artificial Sequence: Synthetic oligonucleotide
  Sense strand starting at position 3316 of SEQ ID NO: 587907
ccgugucucuuauuuauca

SEQ ID NO: 827289 - RNA, 19 nt, Artificial Sequence
  Description of Artificial Sequence: Synthetic oligonucleotide
  Antisense strand to SEQ ID NO: 827288
ugauaaauaagagacacgg

SEQ ID NO: 827290 - RNA, 19 nt, Artificial Sequence
  Description of Artificial Sequence: Synthetic oligonucleotide
  Sense strand starting at position 3362 of SEQ ID NO: 587907
cagugaacaggcuaugcua

SEQ ID NO: 827291 - RNA, 19 nt, Artificial Sequence
  Description of Artificial Sequence: Synthetic oligonucleotide
  Antisense strand to SEQ ID NO: 827290
uagcauagccuguucacug

SEQ ID NO: 827292 - RNA, 19 nt, Artificial Sequence
  Description of Artificial Sequence: Synthetic oligonucleotide
  Sense strand starting at position 3403 of SEQ ID NO: 587907
uugagaaagcccuaauggu

SEQ ID NO: 827293 - RNA, 19 nt, Artificial Sequence
  Description of Artificial Sequence: Synthetic oligonucleotide
  Antisense strand to SEQ ID NO: 827292
accauuagggcuuucucaa

SEQ ID NO: 827294 - RNA, 19 nt, Artificial Sequence
  Description of Artificial Sequence: Synthetic oligonucleotide
  Sense strand starting at position 3553 of SEQ ID NO: 587907
uauuacuuuguugaugagu

SEQ ID NO: 827295 - RNA, 19 nt, Artificial Sequence
  Description of Artificial Sequence: Synthetic oligonucleotide
  Antisense strand to SEQ ID NO: 827294
acucaucaacaaaguaaua

SEQ ID NO: 827296 - RNA, 19 nt, Artificial Sequence
  Description of Artificial Sequence: Synthetic oligonucleotide
  Sense strand starting at position 3556 of SEQ ID NO: 587907
uacuuuguugaugagucua

SEQ ID NO: 827297 - RNA, 19 nt, Artificial Sequence
  Description of Artificial Sequence: Synthetic oligonucleotide
  Antisense strand to SEQ ID NO: 827296
uagacucaucaacaaagua

SEQ ID NO: 827298 - RNA, 19 nt, Artificial Sequence
  Description of Artificial Sequence: Synthetic oligonucleotide
  Sense strand starting at position 3561 of SEQ ID NO: 587907
uguugaugagucuagcaca

SEQ ID NO: 827299 - RNA, 19 nt, Artificial Sequence
  Description of Artificial Sequence: Synthetic oligonucleotide
  Antisense strand to SEQ ID NO: 827298
ugugcuagacucaucaaca

SEQ ID NO: 827300 - RNA, 19 nt, Artificial Sequence
  Description of Artificial Sequence: Synthetic oligonucleotide
  Sense strand starting at position 3629 of SEQ ID NO: 587907
uugugaaagauuugugugu

SEQ ID NO: 827301 - RNA, 19 nt, Artificial Sequence
  Description of Artificial Sequence: Synthetic oligonucleotide
  Antisense strand to SEQ ID NO: 827300
acacacaaaucuuucacaa

SEQ ID NO: 827302 - RNA, 19 nt, Artificial Sequence
  Description of Artificial Sequence: Synthetic oligonucleotide
  Sense strand starting at position 3636 of SEQ ID NO: 587907
agauuugugugucuaaguu

SEQ ID NO: 827303 - RNA, 19 nt, Artificial Sequence
  Description of Artificial Sequence: Synthetic oligonucleotide
  Antisense strand to SEQ ID NO: 827302
aacuuagacacacaaaucu

SEQ ID NO: 827304 - RNA, 19 nt, Artificial Sequence
  Description of Artificial Sequence: Synthetic oligonucleotide
  Sense strand starting at position 3677 of SEQ ID NO: 587907
ugaacauaugcuuaguauu

SEQ ID NO: 827305 - RNA, 19 nt, Artificial Sequence
  Description of Artificial Sequence: Synthetic oligonucleotide
  Antisense strand to SEQ ID NO: 827304
aauacuaagcauauguuca

SEQ ID NO: 827306 - RNA, 19 nt, Artificial Sequence
  Description of Artificial Sequence: Synthetic oligonucleotide
  Sense strand starting at position 3689 of SEQ ID NO: 587907
uaguauugaguccaguacu

SEQ ID NO: 827307 - RNA, 19 nt, Artificial Sequence
  Description of Artificial Sequence: Synthetic oligonucleotide
  Antisense strand to SEQ ID NO: 827306
aguacuggacucaauacua

SEQ ID NO: 827308 - RNA, 19 nt, Artificial Sequence
  Description of Artificial Sequence: Synthetic oligonucleotide
  Sense strand starting at position 3822 of SEQ ID NO: 587907
cagugauuccgagaugagc

SEQ ID NO: 827309 - RNA, 19 nt, Artificial Sequence
  Description of Artificial Sequence: Synthetic oligonucleotide
  Antisense strand to SEQ ID NO: 827308
gcucaucucggaaucacug

SEQ ID NO: 827310 - RNA, 19 nt, Artificial Sequence
  Description of Artificial Sequence: Synthetic oligonucleotide
  Sense strand starting at position 3831 of SEQ ID NO: 587907
cgagaugagcguaggguuu

SEQ ID NO: 827311 - RNA, 19 nt, Artificial Sequence
  Description of Artificial Sequence: Synthetic oligonucleotide
  Antisense strand to SEQ ID NO: 827310
aaacccuacgcucaucucg

SEQ ID NO: 827312 - RNA, 19 nt, Artificial Sequence
  Description of Artificial Sequence: Synthetic oligonucleotide
  Sense strand starting at position 3948 of SEQ ID NO: 587907
gaagauucuggugguccau

SEQ ID NO: 827313 - RNA, 19 nt, Artificial Sequence
  Description of Artificial Sequence: Synthetic oligonucleotide
  Antisense strand to SEQ ID NO: 827312
auggaccaccagaaucuuc

SEQ ID NO: 827314 - RNA, 19 nt, Artificial Sequence
  Description of Artificial Sequence: Synthetic oligonucleotide
  Sense strand starting at position 3957 of SEQ ID NO: 587907
ggugguccaucuuugggaa

SEQ ID NO: 827315 - RNA, 19 nt, Artificial Sequence
  Description of Artificial Sequence: Synthetic oligonucleotide
  Antisense strand to SEQ ID NO: 827314
uucccaaagauggaccacc

SEQ ID NO: 827316 - RNA, 19 nt, Artificial Sequence
  Description of Artificial Sequence: Synthetic oligonucleotide
  Sense strand starting at position 27 of SEQ ID NO: 587908
gcugacauagaacgguaaa

SEQ ID NO: 827317 - RNA, 19 nt, Artificial Sequence
  Description of Artificial Sequence: Synthetic oligonucleotide
  Antisense strand to SEQ ID NO: 827316
uuuaccguucuaugucagc

SEQ ID NO: 827318 - RNA, 19 nt, Artificial Sequence
  Description of Artificial Sequence: Synthetic oligonucleotide
  Sense strand starting at position 80 of SEQ ID NO: 587908
acaugauugguaugucaug

SEQ ID NO: 827319 - RNA, 19 nt, Artificial Sequence
  Description of Artificial Sequence: Synthetic oligonucleotide
  Antisense strand to SEQ ID NO: 827318
caugacauaccaaucaugu

SEQ ID NO: 827320 - RNA, 19 nt, Artificial Sequence
  Description of Artificial Sequence: Synthetic oligonucleotide
  Sense strand starting at position 81 of SEQ ID NO: 587908
caugauugguaugucauga

SEQ ID NO: 827321 - RNA, 19 nt, Artificial Sequence
  Description of Artificial Sequence: Synthetic oligonucleotide
  Antisense strand to SEQ ID NO: 827320
ucaugacauaccaaucaug

SEQ ID NO: 827322 - RNA, 19 nt, Artificial Sequence
  Description of Artificial Sequence: Synthetic oligonucleotide
  Sense strand starting at position 86 of SEQ ID NO: 587908
uugguaugucaugaaguca

SEQ ID NO: 827323 - RNA, 19 nt, Artificial Sequence
  Description of Artificial Sequence: Synthetic oligonucleotide
  Antisense strand to SEQ ID NO: 827322
ugacuucaugacauaccaa

SEQ ID NO: 827324 - RNA, 19 nt, Artificial Sequence
  Description of Artificial Sequence: Synthetic oligonucleotide
  Sense strand starting at position 204 of SEQ ID NO: 587908
ugaucaauggcaugacuuu

SEQ ID NO: 827325 - RNA, 19 nt, Artificial Sequence
  Description of Artificial Sequence: Synthetic oligonucleotide
  Antisense strand to SEQ ID NO: 827324
aaagucaugccauugauca

SEQ ID NO: 827326 - RNA, 19 nt, Artificial Sequence
  Description of Artificial Sequence: Synthetic oligonucleotide
  Sense strand starting at position 386 of SEQ ID NO: 587908
agccuuccucuggaaucua

SEQ ID NO: 827327 - RNA, 19 nt, Artificial Sequence
  Description of Artificial Sequence: Synthetic oligonucleotide
  Antisense strand to SEQ ID NO: 827326
uagauuccagaggaaggcu

SEQ ID NO: 827328 - RNA, 19 nt, Artificial Sequence
  Description of Artificial Sequence: Synthetic oligonucleotide
  Sense strand starting at position 669 of SEQ ID NO: 587908
cccagaaucgagggauucu

SEQ ID NO: 827329 - RNA, 19 nt, Artificial Sequence
  Description of Artificial Sequence: Synthetic oligonucleotide
  Antisense strand to SEQ ID NO: 827328
agaaucccucgauucuggg

SEQ ID NO: 827330 - RNA, 19 nt, Artificial Sequence
  Description of Artificial Sequence: Synthetic oligonucleotide
  Sense strand starting at position 916 of SEQ ID NO: 587908
ggacuaggucacuguauca

SEQ ID NO: 827331 - RNA, 19 nt, Artificial Sequence
  Description of Artificial Sequence: Synthetic oligonucleotide
  Antisense strand to SEQ ID NO: 827330
ugauacagugaccuagucc

SEQ ID NO: 827332 - RNA, 19 nt, Artificial Sequence
  Description of Artificial Sequence: Synthetic oligonucleotide
  Sense strand starting at position 975 of SEQ ID NO: 587908
ucacgucuaggugauucua

SEQ ID NO: 827333 - RNA, 19 nt, Artificial Sequence
  Description of Artificial Sequence: Synthetic oligonucleotide
  Antisense strand to SEQ ID NO: 827332
uagaaucaccuagacguga

SEQ ID NO: 827334 - RNA, 19 nt, Artificial Sequence
  Description of Artificial Sequence: Synthetic oligonucleotide
  Sense strand starting at position 1006 of SEQ ID NO: 587908
gcuugucaucgugccuuga

SEQ ID NO: 827335 - RNA, 19 nt, Artificial Sequence
  Description of Artificial Sequence: Synthetic oligonucleotide
  Antisense strand to SEQ ID NO: 827334
ucaaggcacgaugacaagc

SEQ ID NO: 827336 - RNA, 19 nt, Artificial Sequence
  Description of Artificial Sequence: Synthetic oligonucleotide
  Sense strand starting at position 1050 of SEQ ID NO: 587908
agaacuuuguuacuuugau

SEQ ID NO: 827337 - RNA, 19 nt, Artificial Sequence
  Description of Artificial Sequence: Synthetic oligonucleotide
  Antisense strand to SEQ ID NO: 827336
aucaaaguaacaaaguucu

SEQ ID NO: 827338 - RNA, 19 nt, Artificial Sequence
  Description of Artificial Sequence: Synthetic oligonucleotide
  Sense strand starting at position 1085 of SEQ ID NO: 587908
accacuuaguuccuagagu

SEQ ID NO: 827339 - RNA, 19 nt, Artificial Sequence
  Description of Artificial Sequence: Synthetic oligonucleotide
  Antisense strand to SEQ ID NO: 827338
acucuaggaacuaaguggu

SEQ ID NO: 827340 - RNA, 19 nt, Artificial Sequence
  Description of Artificial Sequence: Synthetic oligonucleotide
  Sense strand starting at position 1163 of SEQ ID NO: 587908
acacuaaaggcuugguauu

SEQ ID NO: 827341 - RNA, 19 nt, Artificial Sequence
  Description of Artificial Sequence: Synthetic oligonucleotide
  Antisense strand to SEQ ID NO: 827340
aauaccaagccuuuagugu

SEQ ID NO: 827342 - RNA, 19 nt, Artificial Sequence
  Description of Artificial Sequence: Synthetic oligonucleotide
  Sense strand starting at position 2009 of SEQ ID NO: 587908
ggucgguuuccggaugaaa

SEQ ID NO: 827343 - RNA, 19 nt, Artificial Sequence
  Description of Artificial Sequence: Synthetic oligonucleotide
  Antisense strand to SEQ ID NO: 827342
uuucauccggaaaccgacc

SEQ ID NO: 827344 - RNA, 19 nt, Artificial Sequence
  Description of Artificial Sequence: Synthetic oligonucleotide
  Sense strand starting at position 2630 of SEQ ID NO: 587908
ggauauggccaggaugcua

SEQ ID NO: 827345 - RNA, 19 nt, Artificial Sequence
  Description of Artificial Sequence: Synthetic oligonucleotide
  Antisense strand to SEQ ID NO: 827344
uagcauccuggccauaucc

SEQ ID NO: 827346 - RNA, 19 nt, Artificial Sequence
  Description of Artificial Sequence: Synthetic oligonucleotide
  Sense strand starting at position 2697 of SEQ ID NO: 587908
agugacuugacagaagugu

SEQ ID NO: 827347 - RNA, 19 nt, Artificial Sequence
  Description of Artificial Sequence: Synthetic oligonucleotide
  Antisense strand to SEQ ID NO: 827346
acacuucugucaagucacu

SEQ ID NO: 827348 - RNA, 19 nt, Artificial Sequence
  Description of Artificial Sequence: Synthetic oligonucleotide
  Sense strand starting at position 2760 of SEQ ID NO: 587908
ucaguauggaagugaucag

SEQ ID NO: 827349 - RNA, 19 nt, Artificial Sequence
  Description of Artificial Sequence: Synthetic oligonucleotide
  Antisense strand to SEQ ID NO: 827348
cugaucacuuccauacuga

SEQ ID NO: 827350 - RNA, 19 nt, Artificial Sequence
  Description of Artificial Sequence: Synthetic oligonucleotide
  Sense strand starting at position 2793 of SEQ ID NO: 587908
ugccaccuugcagauaaau

SEQ ID NO: 827351 - RNA, 19 nt, Artificial Sequence
  Description of Artificial Sequence: Synthetic oligonucleotide
  Antisense strand to SEQ ID NO: 827350
auuuaucugcaagguggca

SEQ ID NO: 827352 - RNA, 19 nt, Artificial Sequence
  Description of Artificial Sequence: Synthetic oligonucleotide
  Sense strand starting at position 2823 of SEQ ID NO: 587908
cacguaguucgucuuuacu

SEQ ID NO: 827353 - RNA, 19 nt, Artificial Sequence
  Description of Artificial Sequence: Synthetic oligonucleotide
  Antisense strand to SEQ ID NO: 827352
aguaaagacgaacuacgug

SEQ ID NO: 827354 - RNA, 19 nt, Artificial Sequence
  Description of Artificial Sequence: Synthetic oligonucleotide
  Sense strand starting at position 2849 of SEQ ID NO: 587908
uugauuaaguucucuagga

SEQ ID NO: 827355 - RNA, 19 nt, Artificial Sequence
  Description of Artificial Sequence: Synthetic oligonucleotide
  Antisense strand to SEQ ID NO: 827354
uccuagagaacuuaaucaa

SEQ ID NO: 827356 - RNA, 19 nt, Artificial Sequence
  Description of Artificial Sequence: Synthetic oligonucleotide
  Sense strand starting at position 2850 of SEQ ID NO: 587908
ugauuaaguucucuaggac

SEQ ID NO: 827357 - RNA, 19 nt, Artificial Sequence
  Description of Artificial Sequence: Synthetic oligonucleotide
  Antisense strand to SEQ ID NO: 827356
guccuagagaacuuaauca

SEQ ID NO: 827358 - RNA, 19 nt, Artificial Sequence
  Description of Artificial Sequence: Synthetic oligonucleotide
  Sense strand starting at position 2865 of SEQ ID NO: 587908
ggaccagcugacugguaau

SEQ ID NO: 827359 - RNA, 19 nt, Artificial Sequence
  Description of Artificial Sequence: Synthetic oligonucleotide
  Antisense strand to SEQ ID NO: 827358
auuaccagucagcuggucc

SEQ ID NO: 827360 - RNA, 19 nt, Artificial Sequence
  Description of Artificial Sequence: Synthetic oligonucleotide
  Sense strand starting at position 2871 of SEQ ID NO: 587908
gcugacugguaauuauaag

SEQ ID NO: 827361 - RNA, 19 nt, Artificial Sequence
  Description of Artificial Sequence: Synthetic oligonucleotide
  Antisense strand to SEQ ID NO: 827360
cuuauaauuaccagucagc

SEQ ID NO: 827362 - RNA, 19 nt, Artificial Sequence
  Description of Artificial Sequence: Synthetic oligonucleotide
  Sense strand starting at position 2877 of SEQ ID NO: 587908
ugguaauuauaagucacau

SEQ ID NO: 827363 - RNA, 19 nt, Artificial Sequence
  Description of Artificial Sequence: Synthetic oligonucleotide
  Antisense strand to SEQ ID NO: 827362
augugacuuauaauuacca

SEQ ID NO: 827364 - RNA, 19 nt, Artificial Sequence
  Description of Artificial Sequence: Synthetic oligonucleotide
  Sense strand starting at position 2995 of SEQ ID NO: 587908
agaccauuacuuuacgcaa

SEQ ID NO: 827365 - RNA, 19 nt, Artificial Sequence
  Description of Artificial Sequence: Synthetic oligonucleotide
  Antisense strand to SEQ ID NO: 827364
uugcguaaaguaauggucu

SEQ ID NO: 827366 - RNA, 19 nt, Artificial Sequence
  Description of Artificial Sequence: Synthetic oligonucleotide
  Sense strand starting at position 3096 of SEQ ID NO: 587908
uuaguuugacucuaaaguu

SEQ ID NO: 827367 - RNA, 19 nt, Artificial Sequence
  Description of Artificial Sequence: Synthetic oligonucleotide
  Antisense strand to SEQ ID NO: 827366
aacuuuagagucaaacuaa

SEQ ID NO: 827368 - RNA, 19 nt, Artificial Sequence
  Description of Artificial Sequence: Synthetic oligonucleotide
  Sense strand starting at position 3134 of SEQ ID NO: 587908
aggugauguugaguacuga

SEQ ID NO: 827369 - RNA, 19 nt, Artificial Sequence
  Description of Artificial Sequence: Synthetic oligonucleotide
  Antisense strand to SEQ ID NO: 827368
ucaguacucaacaucaccu

SEQ ID NO: 827370 - RNA, 19 nt, Artificial Sequence
  Description of Artificial Sequence: Synthetic oligonucleotide
  Sense strand starting at position 3135 of SEQ ID NO: 587908
ggugauguugaguacugau

SEQ ID NO: 827371 - RNA, 19 nt, Artificial Sequence
  Description of Artificial Sequence: Synthetic oligonucleotide
  Antisense strand to SEQ ID NO: 827370
aucaguacucaacaucacc

SEQ ID NO: 827372 - RNA, 19 nt, Artificial Sequence
  Description of Artificial Sequence: Synthetic oligonucleotide
  Sense strand starting at position 3219 of SEQ ID NO: 587908
acgugaguuugauuucagu

SEQ ID NO: 827373 - RNA, 19 nt, Artificial Sequence
  Description of Artificial Sequence: Synthetic oligonucleotide
  Antisense strand to SEQ ID NO: 827372
acugaaaucaaacucacgu

SEQ ID NO: 827374 - RNA, 19 nt, Artificial Sequence
  Description of Artificial Sequence: Synthetic oligonucleotide
  Sense strand starting at position 3225 of SEQ ID NO: 587908
guuugauuucagugugucc

SEQ ID NO: 827375 - RNA, 19 nt, Artificial Sequence
  Description of Artificial Sequence: Synthetic oligonucleotide
  Antisense strand to SEQ ID NO: 827374
ggacacacugaaaucaaac

SEQ ID NO: 827376 - RNA, 19 nt, Artificial Sequence
  Description of Artificial Sequence: Synthetic oligonucleotide
  Sense strand starting at position 3246 of SEQ ID NO: 587908
augugaaacguguacauua

SEQ ID NO: 827377 - RNA, 19 nt, Artificial Sequence
  Description of Artificial Sequence: Synthetic oligonucleotide
  Antisense strand to SEQ ID NO: 827376
uaauguacacguuucacau

SEQ ID NO: 827378 - RNA, 19 nt, Artificial Sequence
  Description of Artificial Sequence: Synthetic oligonucleotide
  Sense strand starting at position 3248 of SEQ ID NO: 587908
gugaaacguguacauuauu

SEQ ID NO: 827379 - RNA, 19 nt, Artificial Sequence
  Description of Artificial Sequence: Synthetic oligonucleotide
  Antisense strand to SEQ ID NO: 827378
aauaauguacacguuucac

SEQ ID NO: 827380 - RNA, 19 nt, Artificial Sequence
  Description of Artificial Sequence: Synthetic oligonucleotide
  Sense strand starting at position 3604 of SEQ ID NO: 587908
auaagaguguuggcaauau

SEQ ID NO: 827381 - RNA, 19 nt, Artificial Sequence
  Description of Artificial Sequence: Synthetic oligonucleotide
  Antisense strand to SEQ ID NO: 827380
auauugccaacacucuuau

SEQ ID NO: 827382 - RNA, 19 nt, Artificial Sequence
  Description of Artificial Sequence: Synthetic oligonucleotide
  Sense strand starting at position 3661 of SEQ ID NO: 587908
guuggaagauggcuuuaaa

SEQ ID NO: 827383 - RNA, 19 nt, Artificial Sequence
  Description of Artificial Sequence: Synthetic oligonucleotide
  Antisense strand to SEQ ID NO: 827382
uuuaaagccaucuuccaac

SEQ ID NO: 827384 - RNA, 19 nt, Artificial Sequence
  Description of Artificial Sequence: Synthetic oligonucleotide
  Sense strand starting at position 3736 of SEQ ID NO: 587908
ccgugucucuuauuuauca

SEQ ID NO: 827385 - RNA, 19 nt, Artificial Sequence
  Description of Artificial Sequence: Synthetic oligonucleotide
  Antisense strand to SEQ ID NO: 827384
ugauaaauaagagacacgg

SEQ ID NO: 827386 - RNA, 19 nt, Artificial Sequence
  Description of Artificial Sequence: Synthetic oligonucleotide
  Sense strand starting at position 3782 of SEQ ID NO: 587908
cagugaacaggcuaugcua

SEQ ID NO: 827387 - RNA, 19 nt, Artificial Sequence
  Description of Artificial Sequence: Synthetic oligonucleotide
  Antisense strand to SEQ ID NO: 827386
uagcauagccuguucacug

SEQ ID NO: 827388 - RNA, 19 nt, Artificial Sequence
  Description of Artificial Sequence: Synthetic oligonucleotide
  Sense strand starting at position 3823 of SEQ ID NO: 587908
uugagaaagcccuaauggu

SEQ ID NO: 827389 - RNA, 19 nt, Artificial Sequence
  Description of Artificial Sequence: Synthetic oligonucleotide
  Antisense strand to SEQ ID NO: 827388
accauuagggcuuucucaa

SEQ ID NO: 827390 - RNA, 19 nt, Artificial Sequence
  Description of Artificial Sequence: Synthetic oligonucleotide
  Sense strand starting at position 3973 of SEQ ID NO: 587908
uauuacuuuguugaugagu

SEQ ID NO: 827391 - RNA, 19 nt, Artificial Sequence
  Description of Artificial Sequence: Synthetic oligonucleotide
  Antisense strand to SEQ ID NO: 827390
acucaucaacaaaguaaua

SEQ ID NO: 827392 - RNA, 19 nt, Artificial Sequence
  Description of Artificial Sequence: Synthetic oligonucleotide
  Sense strand starting at position 3976 of SEQ ID NO: 587908
uacuuuguugaugagucua

SEQ ID NO: 827393 - RNA, 19 nt, Artificial Sequence
  Description of Artificial Sequence: Synthetic oligonucleotide
  Antisense strand to SEQ ID NO: 827392
uagacucaucaacaaagua

SEQ ID NO: 827394 - RNA, 19 nt, Artificial Sequence
  Description of Artificial Sequence: Synthetic oligonucleotide
  Sense strand starting at position 3981 of SEQ ID NO: 587908
uguugaugagucuagcaca

SEQ ID NO: 827395 - RNA, 19 nt, Artificial Sequence
  Description of Artificial Sequence: Synthetic oligonucleotide
  Antisense strand to SEQ ID NO: 827394
ugugcuagacucaucaaca

SEQ ID NO: 827396 - RNA, 19 nt, Artificial Sequence
  Description of Artificial Sequence: Synthetic oligonucleotide
  Sense strand starting at position 57 of SEQ ID NO: 587909
gcaagaauguaacuaacag

SEQ ID NO: 827397 - RNA, 19 nt, Artificial Sequence
  Description of Artificial Sequence: Synthetic oligonucleotide
  Antisense strand to SEQ ID NO: 827396
cuguuaguuacauucuugc

SEQ ID NO: 827398 - RNA, 19 nt, Artificial Sequence
  Description of Artificial Sequence: Synthetic oligonucleotide
  Sense strand starting at position 276 of SEQ ID NO: 587909
gguuguuagcaagaaaugg

SEQ ID NO: 827399 - RNA, 19 nt, Artificial Sequence
  Description of Artificial Sequence: Synthetic oligonucleotide
  Antisense strand to SEQ ID NO: 827398
ccauuucuugcuaacaacc

SEQ ID NO: 827400 - RNA, 19 nt, Artificial Sequence
  Description of Artificial Sequence: Synthetic oligonucleotide
  Sense strand starting at position 319 of SEQ ID NO: 587909
uugaguagucaggaaguag

SEQ ID NO: 827401 - RNA, 19 nt, Artificial Sequence
  Description of Artificial Sequence: Synthetic oligonucleotide
  Antisense strand to SEQ ID NO: 827400
cuacuuccugacuacucaa

SEQ ID NO: 827402 - RNA, 19 nt, Artificial Sequence
  Description of Artificial Sequence: Synthetic oligonucleotide
  Sense strand starting at position 414 of SEQ ID NO: 587909
uguaucucagaguaacauu

SEQ ID NO: 827403 - RNA, 19 nt, Artificial Sequence
  Description of Artificial Sequence: Synthetic oligonucleotide
  Antisense strand to SEQ ID NO: 827402
aauguuacucugagauaca

SEQ ID NO: 827404 - RNA, 19 nt, Artificial Sequence
  Description of Artificial Sequence: Synthetic oligonucleotide
  Sense strand starting at position 422 of SEQ ID NO: 587909
agaguaacauuccugccua

SEQ ID NO: 827405 - RNA, 19 nt, Artificial Sequence
  Description of Artificial Sequence: Synthetic oligonucleotide
  Antisense strand to SEQ ID NO: 827404
uaggcaggaauguuacucu

SEQ ID NO: 827406 - RNA, 19 nt, Artificial Sequence
  Description of Artificial Sequence: Synthetic oligonucleotide
  Sense strand starting at position 468 of SEQ ID NO: 587909
uaauguguccuugaagcaa

SEQ ID NO: 827407 - RNA, 19 nt, Artificial Sequence
  Description of Artificial Sequence: Synthetic oligonucleotide
  Antisense strand to SEQ ID NO: 827406
uugcuucaaggacacauua

SEQ ID NO: 827408 - RNA, 19 nt, Artificial Sequence
  Description of Artificial Sequence: Synthetic oligonucleotide
  Sense strand starting at position 662 of SEQ ID NO: 587909
aaaguugaauaggucuuau

SEQ ID NO: 827409 - RNA, 19 nt, Artificial Sequence
  Description of Artificial Sequence: Synthetic oligonucleotide
  Antisense strand to SEQ ID NO: 827408
auaagaccuauucaacuuu

SEQ ID NO: 827410 - RNA, 19 nt, Artificial Sequence
  Description of Artificial Sequence: Synthetic oligonucleotide
  Sense strand starting at position 673 of SEQ ID NO: 587909
ggucuuauugcauaaauug

SEQ ID NO: 827411 - RNA, 19 nt, Artificial Sequence
  Description of Artificial Sequence: Synthetic oligonucleotide
  Antisense strand to SEQ ID NO: 827410
caauuuaugcaauaagacc

SEQ ID NO: 827412 - RNA, 19 nt, Artificial Sequence
  Description of Artificial Sequence: Synthetic oligonucleotide
  Sense strand starting at position 780 of SEQ ID NO: 587909
cacugugguccuuggagga

SEQ ID NO: 827413 - RNA, 19 nt, Artificial Sequence
  Description of Artificial Sequence: Synthetic oligonucleotide
  Antisense strand to SEQ ID NO: 827412
uccuccaaggaccacagug

SEQ ID NO: 827414 - RNA, 19 nt, Artificial Sequence
  Description of Artificial Sequence: Synthetic oligonucleotide
  Sense strand starting at position 796 of SEQ ID NO: 587909
ggaggugucagauggagga

SEQ ID NO: 827415 - RNA, 19 nt, Artificial Sequence
  Description of Artificial Sequence: Synthetic oligonucleotide
  Antisense strand to SEQ ID NO: 827414
uccuccaucugacaccucc

SEQ ID NO: 827416 - RNA, 19 nt, Artificial Sequence
  Description of Artificial Sequence: Synthetic oligonucleotide
  Sense strand starting at position 918 of SEQ ID NO: 587909
ggcuguaugcuccugagcu

SEQ ID NO: 827417 - RNA, 19 nt, Artificial Sequence
  Description of Artificial Sequence: Synthetic oligonucleotide
  Antisense strand to SEQ ID NO: 827416
agcucaggagcauacagcc

SEQ ID NO: 827418 - RNA, 19 nt, Artificial Sequence
  Description of Artificial Sequence: Synthetic oligonucleotide
  Sense strand starting at position 954 of SEQ ID NO: 587909
guaugacaggcauggagua

SEQ ID NO: 827419 - RNA, 19 nt, Artificial Sequence
  Description of Artificial Sequence: Synthetic oligonucleotide
  Antisense strand to SEQ ID NO: 827418
uacuccaugccugucauac

SEQ ID NO: 827420 - RNA, 19 nt, Artificial Sequence
  Description of Artificial Sequence: Synthetic oligonucleotide
  Sense strand starting at position 1140 of SEQ ID NO: 587909
gggcauacacacugguaaa

SEQ ID NO: 827421 - RNA, 19 nt, Artificial Sequence
  Description of Artificial Sequence: Synthetic oligonucleotide
  Antisense strand to SEQ ID NO: 827420
uuuaccaguguguaugccc

SEQ ID NO: 827422 - RNA, 19 nt, Artificial Sequence
  Description of Artificial Sequence: Synthetic oligonucleotide
  Sense strand starting at position 1352 of SEQ ID NO: 587909
ugggcuauuuagguguauu

SEQ ID NO: 827423 - RNA, 19 nt, Artificial Sequence
  Description of Artificial Sequence: Synthetic oligonucleotide
  Antisense strand to SEQ ID NO: 827422
aauacaccuaaauagccca

SEQ ID NO: 827424 - RNA, 19 nt, Artificial Sequence
  Description of Artificial Sequence: Synthetic oligonucleotide
  Sense strand starting at position 1353 of SEQ ID NO: 587909
gggcuauuuagguguauua

SEQ ID NO: 827425 - RNA, 19 nt, Artificial Sequence
  Description of Artificial Sequence: Synthetic oligonucleotide
  Antisense strand to SEQ ID NO: 827424
uaauacaccuaaauagccc

SEQ ID NO: 827426 - RNA, 19 nt, Artificial Sequence
  Description of Artificial Sequence: Synthetic oligonucleotide
  Sense strand starting at position 1533 of SEQ ID NO: 587909
augaaauguuccuuguuag

SEQ ID NO: 827427 - RNA, 19 nt, Artificial Sequence
  Description of Artificial Sequence: Synthetic oligonucleotide
  Antisense strand to SEQ ID NO: 827426
cuaacaaggaacauuucau

SEQ ID NO: 827428 - RNA, 19 nt, Artificial Sequence
  Description of Artificial Sequence: Synthetic oligonucleotide
  Sense strand starting at position 1678 of SEQ ID NO: 587909
ggguaauacguagauucau

SEQ ID NO: 827429 - RNA, 19 nt, Artificial Sequence
  Description of Artificial Sequence: Synthetic oligonucleotide
  Antisense strand to SEQ ID NO: 827428
augaaucuacguauuaccc

SEQ ID NO: 827430 - RNA, 19 nt, Artificial Sequence
  Description of Artificial Sequence: Synthetic oligonucleotide
  Sense strand starting at position 1698 of SEQ ID NO: 587909
uuugcaaagcucuagauac

SEQ ID NO: 827431 - RNA, 19 nt, Artificial Sequence
  Description of Artificial Sequence: Synthetic oligonucleotide
  Antisense strand to SEQ ID NO: 827430
guaucuagagcuuugcaaa

SEQ ID NO: 827432 - RNA, 19 nt, Artificial Sequence
  Description of Artificial Sequence: Synthetic oligonucleotide
  Sense strand starting at position 1709 of SEQ ID NO: 587909
cuagauacguaguucuaga

SEQ ID NO: 827433 - RNA, 19 nt, Artificial Sequence
  Description of Artificial Sequence: Synthetic oligonucleotide
  Antisense strand to SEQ ID NO: 827432
ucuagaacuacguaucuag

SEQ ID NO: 827434 - RNA, 19 nt, Artificial Sequence
  Description of Artificial Sequence: Synthetic oligonucleotide
  Sense strand starting at position 1714 of SEQ ID NO: 587909
uacguaguucuagauauau

SEQ ID NO: 827435 - RNA, 19 nt, Artificial Sequence
  Description of Artificial Sequence: Synthetic oligonucleotide
  Antisense strand to SEQ ID NO: 827434
auauaucuagaacuacgua

SEQ ID NO: 827436 - RNA, 19 nt, Artificial Sequence
  Description of Artificial Sequence: Synthetic oligonucleotide
  Sense strand starting at position 1746 of SEQ ID NO: 587909
ccuguauguguguccaguu

SEQ ID NO: 827437 - RNA, 19 nt, Artificial Sequence
  Description of Artificial Sequence: Synthetic oligonucleotide
  Antisense strand to SEQ ID NO: 827436
aacuggacacacauacagg

SEQ ID NO: 827438 - RNA, 19 nt, Artificial Sequence
  Description of Artificial Sequence: Synthetic oligonucleotide
  Sense strand starting at position 1791 of SEQ ID NO: 587909
uugaaaugcuucuugacca

SEQ ID NO: 827439 - RNA, 19 nt, Artificial Sequence
  Description of Artificial Sequence: Synthetic oligonucleotide
  Antisense strand to SEQ ID NO: 827438
uggucaagaagcauuucaa

SEQ ID NO: 827440 - RNA, 19 nt, Artificial Sequence
  Description of Artificial Sequence: Synthetic oligonucleotide
  Sense strand starting at position 1798 of SEQ ID NO: 587909
gcuucuugaccaggaagga

SEQ ID NO: 827441 - RNA, 19 nt, Artificial Sequence
  Description of Artificial Sequence: Synthetic oligonucleotide
  Antisense strand to SEQ ID NO: 827440
uccuuccuggucaagaagc

SEQ ID NO: 827442 - RNA, 19 nt, Artificial Sequence
  Description of Artificial Sequence: Synthetic oligonucleotide
  Sense strand starting at position 2099 of SEQ ID NO: 587909
gaggaagaaucuguuguca

SEQ ID NO: 827443 - RNA, 19 nt, Artificial Sequence
  Description of Artificial Sequence: Synthetic oligonucleotide
  Antisense strand to SEQ ID NO: 827442
ugacaacagauucuuccuc

SEQ ID NO: 827444 - RNA, 19 nt, Artificial Sequence
  Description of Artificial Sequence: Synthetic oligonucleotide
  Sense strand starting at position 2103 of SEQ ID NO: 587909
aagaaucuguugucagacu

SEQ ID NO: 827445 - RNA, 19 nt, Artificial Sequence
  Description of Artificial Sequence: Synthetic oligonucleotide
  Antisense strand to SEQ ID NO: 827444
agucugacaacagauucuu

SEQ ID NO: 827446 - RNA, 19 nt, Artificial Sequence
  Description of Artificial Sequence: Synthetic oligonucleotide
  Sense strand starting at position 2117 of SEQ ID NO: 587909
agacuaaauuauucugguu

SEQ ID NO: 827447 - RNA, 19 nt, Artificial Sequence
  Description of Artificial Sequence: Synthetic oligonucleotide
  Antisense strand to SEQ ID NO: 827446
aaccagaauaauuuagucu

SEQ ID NO: 827448 - RNA, 19 nt, Artificial Sequence
  Description of Artificial Sequence: Synthetic oligonucleotide
  Sense strand starting at position 2410 of SEQ ID NO: 587909
guggcaucuggagagguuu

SEQ ID NO: 827449 - RNA, 19 nt, Artificial Sequence
  Description of Artificial Sequence: Synthetic oligonucleotide
  Antisense strand to SEQ ID NO: 827448
aaaccucuccagaugccac

SEQ ID NO: 827450 - RNA, 19 nt, Artificial Sequence
  Description of Artificial Sequence: Synthetic oligonucleotide
  Sense strand starting at position 2636 of SEQ ID NO: 587909
caugucaccguguuagcua

SEQ ID NO: 827451 - RNA, 19 nt, Artificial Sequence
  Description of Artificial Sequence: Synthetic oligonucleotide
  Antisense strand to SEQ ID NO: 827450
uagcuaacacggugacaug

SEQ ID NO: 827452 - RNA, 19 nt, Artificial Sequence
  Description of Artificial Sequence: Synthetic oligonucleotide
  Sense strand starting at position 2864 of SEQ ID NO: 587909
uuguaugggucuuuagaga

SEQ ID NO: 827453 - RNA, 19 nt, Artificial Sequence
  Description of Artificial Sequence: Synthetic oligonucleotide
  Antisense strand to SEQ ID NO: 827452
ucucuaaagacccauacaa

SEQ ID NO: 827454 - RNA, 19 nt, Artificial Sequence
  Description of Artificial Sequence: Synthetic oligonucleotide
  Sense strand starting at position 2969 of SEQ ID NO: 587909
accaguuuccuguauaaug

SEQ ID NO: 827455 - RNA, 19 nt, Artificial Sequence
  Description of Artificial Sequence: Synthetic oligonucleotide
  Antisense strand to SEQ ID NO: 827454
cauuauacaggaaacuggu

SEQ ID NO: 827456 - RNA, 19 nt, Artificial Sequence
  Description of Artificial Sequence: Synthetic oligonucleotide
  Sense strand starting at position 3285 of SEQ ID NO: 587909
uggugaugucaagacuugu

SEQ ID NO: 827457 - RNA, 19 nt, Artificial Sequence
  Description of Artificial Sequence: Synthetic oligonucleotide
  Antisense strand to SEQ ID NO: 827456
acaagucuugacaucacca

SEQ ID NO: 827458 - RNA, 19 nt, Artificial Sequence
  Description of Artificial Sequence: Synthetic oligonucleotide
  Sense strand starting at position 3291 of SEQ ID NO: 587909
ugucaagacuugucagaga

SEQ ID NO: 827459 - RNA, 19 nt, Artificial Sequence
  Description of Artificial Sequence: Synthetic oligonucleotide
  Antisense strand to SEQ ID NO: 827458
ucucugacaagucuugaca

SEQ ID NO: 827460 - RNA, 19 nt, Artificial Sequence
  Description of Artificial Sequence: Synthetic oligonucleotide
  Sense strand starting at position 3313 of SEQ ID NO: 587909
gugcauugucagguugcau

SEQ ID NO: 827461 - RNA, 19 nt, Artificial Sequence
  Description of Artificial Sequence: Synthetic oligonucleotide
  Antisense strand to SEQ ID NO: 827460
augcaaccugacaaugcac

SEQ ID NO: 827462 - RNA, 19 nt, Artificial Sequence
  Description of Artificial Sequence: Synthetic oligonucleotide
  Sense strand starting at position 3505 of SEQ ID NO: 587909
acuguacuugcaggagaga

SEQ ID NO: 827463 - RNA, 19 nt, Artificial Sequence
  Description of Artificial Sequence: Synthetic oligonucleotide
  Antisense strand to SEQ ID NO: 827462
ucucuccugcaaguacagu

SEQ ID NO: 827464 - RNA, 19 nt, Artificial Sequence
  Description of Artificial Sequence: Synthetic oligonucleotide
  Sense strand starting at position 3635 of SEQ ID NO: 587909
ggcaccuggguuuaugaga

SEQ ID NO: 827465 - RNA, 19 nt, Artificial Sequence
  Description of Artificial Sequence: Synthetic oligonucleotide
  Antisense strand to SEQ ID NO: 827464
ucucauaaacccaggugcc

SEQ ID NO: 827466 - RNA, 19 nt, Artificial Sequence
  Description of Artificial Sequence: Synthetic oligonucleotide
  Sense strand starting at position 3643 of SEQ ID NO: 587909
gguuuaugagagcaggagu

SEQ ID NO: 827467 - RNA, 19 nt, Artificial Sequence
  Description of Artificial Sequence: Synthetic oligonucleotide
  Antisense strand to SEQ ID NO: 827466
acuccugcucucauaaacc

SEQ ID NO: 827468 - RNA, 19 nt, Artificial Sequence
  Description of Artificial Sequence: Synthetic oligonucleotide
  Sense strand starting at position 3745 of SEQ ID NO: 587909
ggcuauuauuuccuuguuu

SEQ ID NO: 827469 - RNA, 19 nt, Artificial Sequence
  Description of Artificial Sequence: Synthetic oligonucleotide
  Antisense strand to SEQ ID NO: 827468
aaacaaggaaauaauagcc

SEQ ID NO: 827470 - RNA, 19 nt, Artificial Sequence
  Description of Artificial Sequence: Synthetic oligonucleotide
  Sense strand starting at position 3746 of SEQ ID NO: 587909
gcuauuauuuccuuguuuc

SEQ ID NO: 827471 - RNA, 19 nt, Artificial Sequence
  Description of Artificial Sequence: Synthetic oligonucleotide
  Antisense strand to SEQ ID NO: 827470
gaaacaaggaaauaauagc

SEQ ID NO: 827472 - RNA, 19 nt, Artificial Sequence
  Description of Artificial Sequence: Synthetic oligonucleotide
  Sense strand starting at position 3914 of SEQ ID NO: 587909
agcuuacauuuggaucaca

SEQ ID NO: 827473 - RNA, 19 nt, Artificial Sequence
  Description of Artificial Sequence: Synthetic oligonucleotide
  Antisense strand to SEQ ID NO: 827472
ugugauccaaauguaagcu

SEQ ID NO: 827474 - RNA, 19 nt, Artificial Sequence
  Description of Artificial Sequence: Synthetic oligonucleotide
  Sense strand starting at position 3923 of SEQ ID NO: 587909
uuggaucacagaggcauaa

SEQ ID NO: 827475 - RNA, 19 nt, Artificial Sequence
  Description of Artificial Sequence: Synthetic oligonucleotide
  Antisense strand to SEQ ID NO: 827474
uuaugccucugugauccaa

SEQ ID NO: 827476 - RNA, 19 nt, Artificial Sequence
  Description of Artificial Sequence: Synthetic oligonucleotide
  Sense strand starting at position 56 of SEQ ID NO: 587910
caugucauggagcaacuaa

SEQ ID NO: 827477 - RNA, 19 nt, Artificial Sequence
  Description of Artificial Sequence: Synthetic oligonucleotide
  Antisense strand to SEQ ID NO: 827476
uuaguugcuccaugacaug

SEQ ID NO: 827478 - RNA, 19 nt, Artificial Sequence
  Description of Artificial Sequence: Synthetic oligonucleotide
  Sense strand starting at position 128 of SEQ ID NO: 587910
cuaggcuaggcugaguaaa

SEQ ID NO: 827479 - RNA, 19 nt, Artificial Sequence
  Description of Artificial Sequence: Synthetic oligonucleotide
  Antisense strand to SEQ ID NO: 827478
uuuacucagccuagccuag

SEQ ID NO: 827480 - RNA, 19 nt, Artificial Sequence
  Description of Artificial Sequence: Synthetic oligonucleotide
  Sense strand starting at position 130 of SEQ ID NO: 587910
aggcuaggcugaguaaaua

SEQ ID NO: 827481 - RNA, 19 nt, Artificial Sequence
  Description of Artificial Sequence: Synthetic oligonucleotide
  Antisense strand to SEQ ID NO: 827480
uauuuacucagccuagccu

SEQ ID NO: 827482 - RNA, 19 nt, Artificial Sequence
  Description of Artificial Sequence: Synthetic oligonucleotide
  Sense strand starting at position 165 of SEQ ID NO: 587910
guuauuagugcugacagag

SEQ ID NO: 827483 - RNA, 19 nt, Artificial Sequence
  Description of Artificial Sequence: Synthetic oligonucleotide
  Antisense strand to SEQ ID NO: 827482
cucugucagcacuaauaac

SEQ ID NO: 827484 - RNA, 19 nt, Artificial Sequence
  Description of Artificial Sequence: Synthetic oligonucleotide
  Sense strand starting at position 184 of SEQ ID NO: 587910
guauguacacagcacuaaa

SEQ ID NO: 827485 - RNA, 19 nt, Artificial Sequence
  Description of Artificial Sequence: Synthetic oligonucleotide
  Antisense strand to SEQ ID NO: 827484
uuuagugcuguguacauac

SEQ ID NO: 827486 - RNA, 19 nt, Artificial Sequence
  Description of Artificial Sequence: Synthetic oligonucleotide
  Sense strand starting at position 588 of SEQ ID NO: 587910
ugacauaacucuccaggca

SEQ ID NO: 827487 - RNA, 19 nt, Artificial Sequence
  Description of Artificial Sequence: Synthetic oligonucleotide
  Antisense strand to SEQ ID NO: 827486
ugccuggagaguuauguca

SEQ ID NO: 827488 - RNA, 19 nt, Artificial Sequence
  Description of Artificial Sequence: Synthetic oligonucleotide
  Sense strand starting at position 727 of SEQ ID NO: 587910
caggcuuuggagugggaaa

SEQ ID NO: 827489 - RNA, 19 nt, Artificial Sequence
  Description of Artificial Sequence: Synthetic oligonucleotide
  Antisense strand to SEQ ID NO: 827488
uuucccacuccaaagccug

SEQ ID NO: 827490 - RNA, 19 nt, Artificial Sequence
  Description of Artificial Sequence: Synthetic oligonucleotide
  Sense strand starting at position 728 of SEQ ID NO: 587910
aggcuuuggagugggaaau

SEQ ID NO: 827491 - RNA, 19 nt, Artificial Sequence
  Description of Artificial Sequence: Synthetic oligonucleotide
  Antisense strand to SEQ ID NO: 827490
auuucccacuccaaagccu

SEQ ID NO: 827492 - RNA, 19 nt, Artificial Sequence
  Description of Artificial Sequence: Synthetic oligonucleotide
  Sense strand starting at position 729 of SEQ ID NO: 587910
ggcuuuggagugggaaauu

SEQ ID NO: 827493 - RNA, 19 nt, Artificial Sequence
  Description of Artificial Sequence: Synthetic oligonucleotide
  Antisense strand to SEQ ID NO: 827492
aauuucccacuccaaagcc

SEQ ID NO: 827494 - RNA, 19 nt, Artificial Sequence
  Description of Artificial Sequence: Synthetic oligonucleotide
  Sense strand starting at position 798 of SEQ ID NO: 587910
caacguuggauguaggaau

SEQ ID NO: 827495 - RNA, 19 nt, Artificial Sequence
  Description of Artificial Sequence: Synthetic oligonucleotide
  Antisense strand to SEQ ID NO: 827494
auuccuacauccaacguug

SEQ ID NO: 827496 - RNA, 19 nt, Artificial Sequence
  Description of Artificial Sequence: Synthetic oligonucleotide
  Sense strand starting at position 869 of SEQ ID NO: 587910
ccaggauuauccgcagaua

SEQ ID NO: 827497 - RNA, 19 nt, Artificial Sequence
  Description of Artificial Sequence: Synthetic oligonucleotide
  Antisense strand to SEQ ID NO: 827496
uaucugcggauaauccugg

SEQ ID NO: 827498 - RNA, 19 nt, Artificial Sequence
  Description of Artificial Sequence: Synthetic oligonucleotide
  Sense strand starting at position 870 of SEQ ID NO: 587910
caggauuauccgcagauaa

SEQ ID NO: 827499 - RNA, 19 nt, Artificial Sequence
  Description of Artificial Sequence: Synthetic oligonucleotide
  Antisense strand to SEQ ID NO: 827498
uuaucugcggauaauccug

SEQ ID NO: 827500 - RNA, 19 nt, Artificial Sequence
  Description of Artificial Sequence: Synthetic oligonucleotide
  Sense strand starting at position 912 of SEQ ID NO: 587910
aggcaauccggcugggaaa

SEQ ID NO: 827501 - RNA, 19 nt, Artificial Sequence
  Description of Artificial Sequence: Synthetic oligonucleotide
  Antisense strand to SEQ ID NO: 827500
uuucccagccggauugccu

SEQ ID NO: 827502 - RNA, 19 nt, Artificial Sequence
  Description of Artificial Sequence: Synthetic oligonucleotide
  Sense strand starting at position 1639 of SEQ ID NO: 587910
gggcguccucgcucaaguu

SEQ ID NO: 827503 - RNA, 19 nt, Artificial Sequence
  Description of Artificial Sequence: Synthetic oligonucleotide
  Antisense strand to SEQ ID NO: 827502
aacuugagcgaggacgccc

SEQ ID NO: 827504 - RNA, 19 nt, Artificial Sequence
  Description of Artificial Sequence: Synthetic oligonucleotide
  Sense strand starting at position 1792 of SEQ ID NO: 587910
aaugccaugugauuggaaa

SEQ ID NO: 827505 - RNA, 19 nt, Artificial Sequence
  Description of Artificial Sequence: Synthetic oligonucleotide
  Antisense strand to SEQ ID NO: 827504
uuuccaaucacauggcauu

SEQ ID NO: 827506 - RNA, 19 nt, Artificial Sequence
  Description of Artificial Sequence: Synthetic oligonucleotide
  Sense strand starting at position 2423 of SEQ ID NO: 587910
auacccagcccguagaauu

SEQ ID NO: 827507 - RNA, 19 nt, Artificial Sequence
  Description of Artificial Sequence: Synthetic oligonucleotide
  Antisense strand to SEQ ID NO: 827506
aauucuacgggcuggguau

SEQ ID NO: 827508 - RNA, 19 nt, Artificial Sequence
  Description of Artificial Sequence: Synthetic oligonucleotide
  Sense strand starting at position 2435 of SEQ ID NO: 587910
uagaauugucccugggucu

SEQ ID NO: 827509 - RNA, 19 nt, Artificial Sequence
  Description of Artificial Sequence: Synthetic oligonucleotide
  Antisense strand to SEQ ID NO: 827508
agacccagggacaauucua

SEQ ID NO: 827510 - RNA, 19 nt, Artificial Sequence
  Description of Artificial Sequence: Synthetic oligonucleotide
  Sense strand starting at position 2436 of SEQ ID NO: 587910
agaauugucccugggucuu

SEQ ID NO: 827511 - RNA, 19 nt, Artificial Sequence
  Description of Artificial Sequence: Synthetic oligonucleotide
  Antisense strand to SEQ ID NO: 827510
aagacccagggacaauucu

SEQ ID NO: 827512 - RNA, 19 nt, Artificial Sequence
  Description of Artificial Sequence: Synthetic oligonucleotide
  Sense strand starting at position 2438 of SEQ ID NO: 587910
aauugucccugggucuuaa

SEQ ID NO: 827513 - RNA, 19 nt, Artificial Sequence
  Description of Artificial Sequence: Synthetic oligonucleotide
  Antisense strand to SEQ ID NO: 827512
uuaagacccagggacaauu

SEQ ID NO: 827514 - RNA, 19 nt, Artificial Sequence
  Description of Artificial Sequence: Synthetic oligonucleotide
  Sense strand starting at position 2614 of SEQ ID NO: 587910
ggaauacgcugucccaaga

SEQ ID NO: 827515 - RNA, 19 nt, Artificial Sequence
  Description of Artificial Sequence: Synthetic oligonucleotide
  Antisense strand to SEQ ID NO: 827514
ucuugggacagcguauucc

SEQ ID NO: 827516 - RNA, 19 nt, Artificial Sequence
  Description of Artificial Sequence: Synthetic oligonucleotide
  Sense strand starting at position 2680 of SEQ ID NO: 587910
ccuuaaaugcaagaaaugu

SEQ ID NO: 827517 - RNA, 19 nt, Artificial Sequence
  Description of Artificial Sequence: Synthetic oligonucleotide
  Antisense strand to SEQ ID NO: 827516
acauuucuugcauuuaagg

SEQ ID NO: 827518 - RNA, 19 nt, Artificial Sequence
  Description of Artificial Sequence: Synthetic oligonucleotide
  Sense strand starting at position 2875 of SEQ ID NO: 587910
cuuccugaguucccauaua

SEQ ID NO: 827519 - RNA, 19 nt, Artificial Sequence
  Description of Artificial Sequence: Synthetic oligonucleotide
  Antisense strand to SEQ ID NO: 827518
uauaugggaacucaggaag

SEQ ID NO: 827520 - RNA, 19 nt, Artificial Sequence
  Description of Artificial Sequence: Synthetic oligonucleotide
  Sense strand starting at position 2942 of SEQ ID NO: 587910
guugcuuugcaaguuaguu

SEQ ID NO: 827521 - RNA, 19 nt, Artificial Sequence
  Description of Artificial Sequence: Synthetic oligonucleotide
  Antisense strand to SEQ ID NO: 827520
aacuaacuugcaaagcaac

SEQ ID NO: 827522 - RNA, 19 nt, Artificial Sequence
  Description of Artificial Sequence: Synthetic oligonucleotide
  Sense strand starting at position 2946 of SEQ ID NO: 587910
cuuugcaaguuaguuauuu

SEQ ID NO: 827523 - RNA, 19 nt, Artificial Sequence
  Description of Artificial Sequence: Synthetic oligonucleotide
  Antisense strand to SEQ ID NO: 827522
aaauaacuaacuugcaaag

SEQ ID NO: 827524 - RNA, 19 nt, Artificial Sequence
  Description of Artificial Sequence: Synthetic oligonucleotide
  Sense strand starting at position 3120 of SEQ ID NO: 587910
ggucucaugguccacucaa

SEQ ID NO: 827525 - RNA, 19 nt, Artificial Sequence
  Description of Artificial Sequence: Synthetic oligonucleotide
  Antisense strand to SEQ ID NO: 827524
uugaguggaccaugagacc

SEQ ID NO: 827526 - RNA, 19 nt, Artificial Sequence
  Description of Artificial Sequence: Synthetic oligonucleotide
  Sense strand starting at position 3223 of SEQ ID NO: 587910
uucuguuaauuccugaagu

SEQ ID NO: 827527 - RNA, 19 nt, Artificial Sequence
  Description of Artificial Sequence: Synthetic oligonucleotide
  Antisense strand to SEQ ID NO: 827526
acuucaggaauuaacagaa

SEQ ID NO: 827528 - RNA, 19 nt, Artificial Sequence
  Description of Artificial Sequence: Synthetic oligonucleotide
  Sense strand starting at position 3225 of SEQ ID NO: 587910
cuguuaauuccugaaguaa

SEQ ID NO: 827529 - RNA, 19 nt, Artificial Sequence
  Description of Artificial Sequence: Synthetic oligonucleotide
  Antisense strand to SEQ ID NO: 827528
uuacuucaggaauuaacag

SEQ ID NO: 827530 - RNA, 19 nt, Artificial Sequence
  Description of Artificial Sequence: Synthetic oligonucleotide
  Sense strand starting at position 3293 of SEQ ID NO: 587910
cccauugauguguaucauc

SEQ ID NO: 827531 - RNA, 19 nt, Artificial Sequence
  Description of Artificial Sequence: Synthetic oligonucleotide
  Antisense strand to SEQ ID NO: 827530
gaugauacacaucaauggg

SEQ ID NO: 827532 - RNA, 19 nt, Artificial Sequence
  Description of Artificial Sequence: Synthetic oligonucleotide
  Sense strand starting at position 3303 of SEQ ID NO: 587910
uguaucaucguugaaaguu

SEQ ID NO: 827533 - RNA, 19 nt, Artificial Sequence
  Description of Artificial Sequence: Synthetic oligonucleotide
  Antisense strand to SEQ ID NO: 827532
aacuuucaacgaugauaca

SEQ ID NO: 827534 - RNA, 19 nt, Artificial Sequence
  Description of Artificial Sequence: Synthetic oligonucleotide
  Sense strand starting at position 3313 of SEQ ID NO: 587910
uugaaaguucucuaagucu

SEQ ID NO: 827535 - RNA, 19 nt, Artificial Sequence
  Description of Artificial Sequence: Synthetic oligonucleotide
  Antisense strand to SEQ ID NO: 827534
agacuuagagaacuuucaa

SEQ ID NO: 827536 - RNA, 19 nt, Artificial Sequence
  Description of Artificial Sequence: Synthetic oligonucleotide
  Sense strand starting at position 3362 of SEQ ID NO: 587910
ggcuuaaaggcucagauga

SEQ ID NO: 827537 - RNA, 19 nt, Artificial Sequence
  Description of Artificial Sequence: Synthetic oligonucleotide
  Antisense strand to SEQ ID NO: 827536
ucaucugagccuuuaagcc

SEQ ID NO: 827538 - RNA, 19 nt, Artificial Sequence
  Description of Artificial Sequence: Synthetic oligonucleotide
  Sense strand starting at position 3609 of SEQ ID NO: 587910
cuuugugaugugcagaauc

SEQ ID NO: 827539 - RNA, 19 nt, Artificial Sequence
  Description of Artificial Sequence: Synthetic oligonucleotide
  Antisense strand to SEQ ID NO: 827538
gauucugcacaucacaaag

SEQ ID NO: 827540 - RNA, 19 nt, Artificial Sequence
  Description of Artificial Sequence: Synthetic oligonucleotide
  Sense strand starting at position 3611 of SEQ ID NO: 587910
uugugaugugcagaaucag

SEQ ID NO: 827541 - RNA, 19 nt, Artificial Sequence
  Description of Artificial Sequence: Synthetic oligonucleotide
  Antisense strand to SEQ ID NO: 827540
cugauucugcacaucacaa

SEQ ID NO: 827542 - RNA, 19 nt, Artificial Sequence
  Description of Artificial Sequence: Synthetic oligonucleotide
  Sense strand starting at position 3712 of SEQ ID NO: 587910
aggacucacgugcaucauu

SEQ ID NO: 827543 - RNA, 19 nt, Artificial Sequence
  Description of Artificial Sequence: Synthetic oligonucleotide
  Antisense strand to SEQ ID NO: 827542
aaugaugcacgugaguccu

SEQ ID NO: 827544 - RNA, 19 nt, Artificial Sequence
  Description of Artificial Sequence: Synthetic oligonucleotide
  Sense strand starting at position 3760 of SEQ ID NO: 587910
cguugaaauccagauacac

SEQ ID NO: 827545 - RNA, 19 nt, Artificial Sequence
  Description of Artificial Sequence: Synthetic oligonucleotide
  Antisense strand to SEQ ID NO: 827544
guguaucuggauuucaacg

SEQ ID NO: 827546 - RNA, 19 nt, Artificial Sequence
  Description of Artificial Sequence: Synthetic oligonucleotide
  Sense strand starting at position 3808 of SEQ ID NO: 587910
ugugaagauuuacaaauca

SEQ ID NO: 827547 - RNA, 19 nt, Artificial Sequence
  Description of Artificial Sequence: Synthetic oligonucleotide
  Antisense strand to SEQ ID NO: 827546
ugauuuguaaaucuucaca

SEQ ID NO: 827548 - RNA, 19 nt, Artificial Sequence
  Description of Artificial Sequence: Synthetic oligonucleotide
  Sense strand starting at position 3954 of SEQ ID NO: 587910
uaggcucugggaugagaau

SEQ ID NO: 827549 - RNA, 19 nt, Artificial Sequence
  Description of Artificial Sequence: Synthetic oligonucleotide
  Antisense strand to SEQ ID NO: 827548
auucucaucccagagccua

SEQ ID NO: 827550 - RNA, 19 nt, Artificial Sequence
  Description of Artificial Sequence: Synthetic oligonucleotide
  Sense strand starting at position 3973 of SEQ ID NO: 587910
uucucagaaucucugugau

SEQ ID NO: 827551 - RNA, 19 nt, Artificial Sequence
  Description of Artificial Sequence: Synthetic oligonucleotide
  Antisense strand to SEQ ID NO: 827550
aucacagagauucugagaa

SEQ ID NO: 827552 - RNA, 19 nt, Artificial Sequence
  Description of Artificial Sequence: Synthetic oligonucleotide
  Sense strand starting at position 3975 of SEQ ID NO: 587910
cucagaaucucugugauaa

SEQ ID NO: 827553 - RNA, 19 nt, Artificial Sequence
  Description of Artificial Sequence: Synthetic oligonucleotide
  Antisense strand to SEQ ID NO: 827552
uuaucacagagauucugag

SEQ ID NO: 827554 - RNA, 19 nt, Artificial Sequence
  Description of Artificial Sequence: Synthetic oligonucleotide
  Sense strand starting at position 3976 of SEQ ID NO: 587910
ucagaaucucugugauaag

SEQ ID NO: 827555 - RNA, 19 nt, Artificial Sequence
  Description of Artificial Sequence: Synthetic oligonucleotide
  Antisense strand to SEQ ID NO: 827554
cuuaucacagagauucuga

SEQ ID NO: 827556 - RNA, 19 nt, Artificial Sequence
  Description of Artificial Sequence: Synthetic oligonucleotide
  Sense strand starting at position 285 of SEQ ID NO: 587911
gugacaacguuucuggaaa

SEQ ID NO: 827557 - RNA, 19 nt, Artificial Sequence
  Description of Artificial Sequence: Synthetic oligonucleotide
  Antisense strand to SEQ ID NO: 827556
uuuccagaaacguugucac

SEQ ID NO: 827558 - RNA, 19 nt, Artificial Sequence
  Description of Artificial Sequence: Synthetic oligonucleotide
  Sense strand starting at position 489 of SEQ ID NO: 587911
uccagagcuucuuuggaaa

SEQ ID NO: 827559 - RNA, 19 nt, Artificial Sequence
  Description of Artificial Sequence: Synthetic oligonucleotide
  Antisense strand to SEQ ID NO: 827558
uuuccaaagaagcucugga

SEQ ID NO: 827560 - RNA, 19 nt, Artificial Sequence
  Description of Artificial Sequence: Synthetic oligonucleotide
  Sense strand starting at position 512 of SEQ ID NO: 587911
guggaucuuuaauuacaua

SEQ ID NO: 827561 - RNA, 19 nt, Artificial Sequence
  Description of Artificial Sequence: Synthetic oligonucleotide
  Antisense strand to SEQ ID NO: 827560
uauguaauuaaagauccac

SEQ ID NO: 827562 - RNA, 19 nt, Artificial Sequence
  Description of Artificial Sequence: Synthetic oligonucleotide
  Sense strand starting at position 559 of SEQ ID NO: 587911
cgcaaucuugauuaccaau

SEQ ID NO: 827563 - RNA, 19 nt, Artificial Sequence
  Description of Artificial Sequence: Synthetic oligonucleotide
  Antisense strand to SEQ ID NO: 827562
auugguaaucaagauugcg

SEQ ID NO: 827564 - RNA, 19 nt, Artificial Sequence
  Description of Artificial Sequence: Synthetic oligonucleotide
  Sense strand starting at position 658 of SEQ ID NO: 587911
cgcggaaacgauagguuau

SEQ ID NO: 827565 - RNA, 19 nt, Artificial Sequence
  Description of Artificial Sequence: Synthetic oligonucleotide
  Antisense strand to SEQ ID NO: 827564
auaaccuaucguuuccgcg

SEQ ID NO: 827566 - RNA, 19 nt, Artificial Sequence
  Description of Artificial Sequence: Synthetic oligonucleotide
  Sense strand starting at position 664 of SEQ ID NO: 587911
aacgauagguuauuguuaa

SEQ ID NO: 827567 - RNA, 19 nt, Artificial Sequence
  Description of Artificial Sequence: Synthetic oligonucleotide
  Antisense strand to SEQ ID NO: 827566
uuaacaauaaccuaucguu

SEQ ID NO: 827568 - RNA, 19 nt, Artificial Sequence
  Description of Artificial Sequence: Synthetic oligonucleotide
  Sense strand starting at position 961 of SEQ ID NO: 587911
gucagagggcucgacaauc

SEQ ID NO: 827569 - RNA, 19 nt, Artificial Sequence
  Description of Artificial Sequence: Synthetic oligonucleotide
  Antisense strand to SEQ ID NO: 827568
gauugucgagcccucugac

SEQ ID NO: 827570 - RNA, 19 nt, Artificial Sequence
  Description of Artificial Sequence: Synthetic oligonucleotide
  Sense strand starting at position 986 of SEQ ID NO: 587911
uuuguaaagccagagcaaa

SEQ ID NO: 827571 - RNA, 19 nt, Artificial Sequence
  Description of Artificial Sequence: Synthetic oligonucleotide
  Antisense strand to SEQ ID NO: 827570
uuugcucuggcuuuacaaa

SEQ ID NO: 827572 - RNA, 19 nt, Artificial Sequence
  Description of Artificial Sequence: Synthetic oligonucleotide
  Sense strand starting at position 1317 of SEQ ID NO: 587911
uuugaaacuauguggagua

SEQ ID NO: 827573 - RNA, 19 nt, Artificial Sequence
  Description of Artificial Sequence: Synthetic oligonucleotide
  Antisense strand to SEQ ID NO: 827572
uacuccacauaguuucaaa

SEQ ID NO: 827574 - RNA, 19 nt, Artificial Sequence
  Description of Artificial Sequence: Synthetic oligonucleotide
  Sense strand starting at position 1392 of SEQ ID NO: 587911
acuugugcaguguagauuu

SEQ ID NO: 827575 - RNA, 19 nt, Artificial Sequence
  Description of Artificial Sequence: Synthetic oligonucleotide
  Antisense strand to SEQ ID NO: 827574
aaaucuacacugcacaagu

SEQ ID NO: 827576 - RNA, 19 nt, Artificial Sequence
  Description of Artificial Sequence: Synthetic oligonucleotide
  Sense strand starting at position 1399 of SEQ ID NO: 587911
caguguagauuucugcaca

SEQ ID NO: 827577 - RNA, 19 nt, Artificial Sequence
  Description of Artificial Sequence: Synthetic oligonucleotide
  Antisense strand to SEQ ID NO: 827576
ugugcagaaaucuacacug

SEQ ID NO: 827578 - RNA, 19 nt, Artificial Sequence
  Description of Artificial Sequence: Synthetic oligonucleotide
  Sense strand starting at position 1648 of SEQ ID NO: 587911
gcuugcuuccaucaaggau

SEQ ID NO: 827579 - RNA, 19 nt, Artificial Sequence
  Description of Artificial Sequence: Synthetic oligonucleotide
  Antisense strand to SEQ ID NO: 827578
auccuugauggaagcaagc

SEQ ID NO: 827580 - RNA, 19 nt, Artificial Sequence
  Description of Artificial Sequence: Synthetic oligonucleotide
  Sense strand starting at position 2088 of SEQ ID NO: 587911
ggucaacuuucucuaacag

SEQ ID NO: 827581 - RNA, 19 nt, Artificial Sequence
  Description of Artificial Sequence: Synthetic oligonucleotide
  Antisense strand to SEQ ID NO: 827580
cuguuagagaaaguugacc

SEQ ID NO: 827582 - RNA, 19 nt, Artificial Sequence
  Description of Artificial Sequence: Synthetic oligonucleotide
  Sense strand starting at position 2089 of SEQ ID NO: 587911
gucaacuuucucuaacagu

SEQ ID NO: 827583 - RNA, 19 nt, Artificial Sequence
  Description of Artificial Sequence: Synthetic oligonucleotide
  Antisense strand to SEQ ID NO: 827582
acuguuagagaaaguugac

SEQ ID NO: 827584 - RNA, 19 nt, Artificial Sequence
  Description of Artificial Sequence: Synthetic oligonucleotide
  Sense strand starting at position 2124 of SEQ ID NO: 587911
ucuauuaaagguugugauu

SEQ ID NO: 827585 - RNA, 19 nt, Artificial Sequence
  Description of Artificial Sequence: Synthetic oligonucleotide
  Antisense strand to SEQ ID NO: 827584
aaucacaaccuuuaauaga

SEQ ID NO: 827586 - RNA, 19 nt, Artificial Sequence
  Description of Artificial Sequence: Synthetic oligonucleotide
  Sense strand starting at position 2277 of SEQ ID NO: 587911
gguuaugguaaaugaaguu

SEQ ID NO: 827587 - RNA, 19 nt, Artificial Sequence
  Description of Artificial Sequence: Synthetic oligonucleotide
  Antisense strand to SEQ ID NO: 827586
aacuucauuuaccauaacc

SEQ ID NO: 827588 - RNA, 19 nt, Artificial Sequence
  Description of Artificial Sequence: Synthetic oligonucleotide
  Sense strand starting at position 2305 of SEQ ID NO: 587911
cuuagacaaauguggugaa

SEQ ID NO: 827589 - RNA, 19 nt, Artificial Sequence
  Description of Artificial Sequence: Synthetic oligonucleotide
  Antisense strand to SEQ ID NO: 827588
uucaccacauuugucuaag

SEQ ID NO: 827590 - RNA, 19 nt, Artificial Sequence
  Description of Artificial Sequence: Synthetic oligonucleotide
  Sense strand starting at position 2673 of SEQ ID NO: 587911
cuuccugagcacugauuga

SEQ ID NO: 827591 - RNA, 19 nt, Artificial Sequence
  Description of Artificial Sequence: Synthetic oligonucleotide
  Antisense strand to SEQ ID NO: 827590
ucaaucagugcucaggaag

SEQ ID NO: 827592 - RNA, 19 nt, Artificial Sequence
  Description of Artificial Sequence: Synthetic oligonucleotide
  Sense strand starting at position 2755 of SEQ ID NO: 587911
agaaacaguugauuaaugu

SEQ ID NO: 827593 - RNA, 19 nt, Artificial Sequence
  Description of Artificial Sequence: Synthetic oligonucleotide
  Antisense strand to SEQ ID NO: 827592
acauuaaucaacuguuucu

SEQ ID NO: 827594 - RNA, 19 nt, Artificial Sequence
  Description of Artificial Sequence: Synthetic oligonucleotide
  Sense strand starting at position 2761 of SEQ ID NO: 587911
aguugauuaaugugaacug

SEQ ID NO: 827595 - RNA, 19 nt, Artificial Sequence
  Description of Artificial Sequence: Synthetic oligonucleotide
  Antisense strand to SEQ ID NO: 827594
caguucacauuaaucaacu

SEQ ID NO: 827596 - RNA, 19 nt, Artificial Sequence
  Description of Artificial Sequence: Synthetic oligonucleotide
  Sense strand starting at position 2783 of SEQ ID NO: 587911
gucccaguaugauuaugau

SEQ ID NO: 827597 - RNA, 19 nt, Artificial Sequence
  Description of Artificial Sequence: Synthetic oligonucleotide
  Antisense strand to SEQ ID NO: 827596
aucauaaucauacugggac

SEQ ID NO: 827598 - RNA, 19 nt, Artificial Sequence
  Description of Artificial Sequence: Synthetic oligonucleotide
  Sense strand starting at position 2792 of SEQ ID NO: 587911
ugauuaugauaguuugaug

SEQ ID NO: 827599 - RNA, 19 nt, Artificial Sequence
  Description of Artificial Sequence: Synthetic oligonucleotide
  Antisense strand to SEQ ID NO: 827598
caucaaacuaucauaauca

SEQ ID NO: 827600 - RNA, 19 nt, Artificial Sequence
  Description of Artificial Sequence: Synthetic oligonucleotide
  Sense strand starting at position 3271 of SEQ ID NO: 587911
aacauaauaguuuguggaa

SEQ ID NO: 827601 - RNA, 19 nt, Artificial Sequence
  Description of Artificial Sequence: Synthetic oligonucleotide
  Antisense strand to SEQ ID NO: 827600
uuccacaaacuauuauguu

SEQ ID NO: 827602 - RNA, 19 nt, Artificial Sequence
  Description of Artificial Sequence: Synthetic oligonucleotide
  Sense strand starting at position 3272 of SEQ ID NO: 587911
acauaauaguuuguggaac

SEQ ID NO: 827603 - RNA, 19 nt, Artificial Sequence
  Description of Artificial Sequence: Synthetic oligonucleotide
  Antisense strand to SEQ ID NO: 827602
guuccacaaacuauuaugu

SEQ ID NO: 827604 - RNA, 19 nt, Artificial Sequence
  Description of Artificial Sequence: Synthetic oligonucleotide
  Sense strand starting at position 3304 of SEQ ID NO: 587911
uuggaaguccuuuggguca

SEQ ID NO: 827605 - RNA, 19 nt, Artificial Sequence
  Description of Artificial Sequence: Synthetic oligonucleotide
  Antisense strand to SEQ ID NO: 827604
ugacccaaaggacuuccaa

SEQ ID NO: 827606 - RNA, 19 nt, Artificial Sequence
  Description of Artificial Sequence: Synthetic oligonucleotide
  Sense strand starting at position 3323 of SEQ ID NO: 587911
ggaaguuugaaauguaagu

SEQ ID NO: 827607 - RNA, 19 nt, Artificial Sequence
  Description of Artificial Sequence: Synthetic oligonucleotide
  Antisense strand to SEQ ID NO: 827606
acuuacauuucaaacuucc

SEQ ID NO: 827608 - RNA, 19 nt, Artificial Sequence
  Description of Artificial Sequence: Synthetic oligonucleotide
  Sense strand starting at position 3339 of SEQ ID NO: 587911
aguugaaaccgccauacaa

SEQ ID NO: 827609 - RNA, 19 nt, Artificial Sequence
  Description of Artificial Sequence: Synthetic oligonucleotide
  Antisense strand to SEQ ID NO: 827608
uuguauggcgguuucaacu

SEQ ID NO: 827610 - RNA, 19 nt, Artificial Sequence
  Description of Artificial Sequence: Synthetic oligonucleotide
  Sense strand starting at position 3341 of SEQ ID NO: 587911
uugaaaccgccauacaaua

SEQ ID NO: 827611 - RNA, 19 nt, Artificial Sequence
  Description of Artificial Sequence: Synthetic oligonucleotide
  Antisense strand to SEQ ID NO: 827610
uauuguauggcgguuucaa

SEQ ID NO: 827612 - RNA, 19 nt, Artificial Sequence
  Description of Artificial Sequence: Synthetic oligonucleotide
  Sense strand starting at position 3364 of SEQ ID NO: 587911
cuaaaugaaucgucauuau

SEQ ID NO: 827613 - RNA, 19 nt, Artificial Sequence
  Description of Artificial Sequence: Synthetic oligonucleotide
  Antisense strand to SEQ ID NO: 827612
auaaugacgauucauuuag

SEQ ID NO: 827614 - RNA, 19 nt, Artificial Sequence
  Description of Artificial Sequence: Synthetic oligonucleotide
  Sense strand starting at position 3368 of SEQ ID NO: 587911
augaaucgucauuauacac

SEQ ID NO: 827615 - RNA, 19 nt, Artificial Sequence
  Description of Artificial Sequence: Synthetic oligonucleotide
  Antisense strand to SEQ ID NO: 827614
guguauaaugacgauucau

SEQ ID NO: 827616 - RNA, 19 nt, Artificial Sequence
  Description of Artificial Sequence: Synthetic oligonucleotide
  Sense strand starting at position 3565 of SEQ ID NO: 587911
accuaucaucuguggagua

SEQ ID NO: 827617 - RNA, 19 nt, Artificial Sequence
  Description of Artificial Sequence: Synthetic oligonucleotide
  Antisense strand to SEQ ID NO: 827616
uacuccacagaugauaggu

SEQ ID NO: 827618 - RNA, 19 nt, Artificial Sequence
  Description of Artificial Sequence: Synthetic oligonucleotide
  Sense strand starting at position 3567 of SEQ ID NO: 587911
cuaucaucuguggaguauc

SEQ ID NO: 827619 - RNA, 19 nt, Artificial Sequence
  Description of Artificial Sequence: Synthetic oligonucleotide
  Antisense strand to SEQ ID NO: 827618
gauacuccacagaugauag

SEQ ID NO: 827620 - RNA, 19 nt, Artificial Sequence
  Description of Artificial Sequence: Synthetic oligonucleotide
  Sense strand starting at position 3570 of SEQ ID NO: 587911
ucaucuguggaguaucauu

SEQ ID NO: 827621 - RNA, 19 nt, Artificial Sequence
  Description of Artificial Sequence: Synthetic oligonucleotide
  Antisense strand to SEQ ID NO: 827620
aaugauacuccacagauga

SEQ ID NO: 827622 - RNA, 19 nt, Artificial Sequence
  Description of Artificial Sequence: Synthetic oligonucleotide
  Sense strand starting at position 3712 of SEQ ID NO: 587911
guaauaggccuauacccau

SEQ ID NO: 827623 - RNA, 19 nt, Artificial Sequence
  Description of Artificial Sequence: Synthetic oligonucleotide
  Antisense strand to SEQ ID NO: 827622
auggguauaggccuauuac

SEQ ID NO: 827624 - RNA, 19 nt, Artificial Sequence
  Description of Artificial Sequence: Synthetic oligonucleotide
  Sense strand starting at position 3718 of SEQ ID NO: 587911
ggccuauacccauaucuga

SEQ ID NO: 827625 - RNA, 19 nt, Artificial Sequence
  Description of Artificial Sequence: Synthetic oligonucleotide
  Antisense strand to SEQ ID NO: 827624
ucagauauggguauaggcc

SEQ ID NO: 827626 - RNA, 19 nt, Artificial Sequence
  Description of Artificial Sequence: Synthetic oligonucleotide
  Sense strand starting at position 3790 of SEQ ID NO: 587911
uuaaauuguguccaaguac

SEQ ID NO: 827627 - RNA, 19 nt, Artificial Sequence
  Description of Artificial Sequence: Synthetic oligonucleotide
  Antisense strand to SEQ ID NO: 827626
guacuuggacacaauuuaa

SEQ ID NO: 827628 - RNA, 19 nt, Artificial Sequence
  Description of Artificial Sequence: Synthetic oligonucleotide
  Sense strand starting at position 3847 of SEQ ID NO: 587911
uuggaacagugauccuauu

SEQ ID NO: 827629 - RNA, 19 nt, Artificial Sequence
  Description of Artificial Sequence: Synthetic oligonucleotide
  Antisense strand to SEQ ID NO: 827628
aauaggaucacuguuccaa

SEQ ID NO: 827630 - RNA, 19 nt, Artificial Sequence
  Description of Artificial Sequence: Synthetic oligonucleotide
  Sense strand starting at position 3892 of SEQ ID NO: 587911
gaugaaauguuacugaguu

SEQ ID NO: 827631 - RNA, 19 nt, Artificial Sequence
  Description of Artificial Sequence: Synthetic oligonucleotide
  Antisense strand to SEQ ID NO: 827630
aacucaguaacauuucauc

SEQ ID NO: 827632 - RNA, 19 nt, Artificial Sequence
  Description of Artificial Sequence: Synthetic oligonucleotide
  Sense strand starting at position 3894 of SEQ ID NO: 587911
ugaaauguuacugaguugu

SEQ ID NO: 827633 - RNA, 19 nt, Artificial Sequence
  Description of Artificial Sequence: Synthetic oligonucleotide
  Antisense strand to SEQ ID NO: 827632
acaacucaguaacauuuca

SEQ ID NO: 827634 - RNA, 19 nt, Artificial Sequence
  Description of Artificial Sequence: Synthetic oligonucleotide
  Sense strand starting at position 3898 of SEQ ID NO: 587911
auguuacugaguuguauuu

SEQ ID NO: 827635 - RNA, 19 nt, Artificial Sequence
  Description of Artificial Sequence: Synthetic oligonucleotide
  Antisense strand to SEQ ID NO: 827634
aaauacaacucaguaacau

SEQ ID NO: 827636 - RNA, 19 nt, Artificial Sequence
  Description of Artificial Sequence: Synthetic oligonucleotide
  Sense strand starting at position 25 of SEQ ID NO: 587912
augauuaagucuuccaugu

SEQ ID NO: 827637 - RNA, 19 nt, Artificial Sequence
  Description of Artificial Sequence: Synthetic oligonucleotide
  Antisense strand to SEQ ID NO: 827636
acauggaagacuuaaucau

SEQ ID NO: 827638 - RNA, 19 nt, Artificial Sequence
  Description of Artificial Sequence: Synthetic oligonucleotide
  Sense strand starting at position 29 of SEQ ID NO: 587912
uuaagucuuccaugugaua

SEQ ID NO: 827639 - RNA, 19 nt, Artificial Sequence
  Description of Artificial Sequence: Synthetic oligonucleotide
  Antisense strand to SEQ ID NO: 827638
uaucacauggaagacuuaa

SEQ ID NO: 827640 - RNA, 19 nt, Artificial Sequence
  Description of Artificial Sequence: Synthetic oligonucleotide
  Sense strand starting at position 89 of SEQ ID NO: 587912
guguuaagagcacauugua

SEQ ID NO: 827641 - RNA, 19 nt, Artificial Sequence
  Description of Artificial Sequence: Synthetic oligonucleotide
  Antisense strand to SEQ ID NO: 827640
uacaaugugcucuuaacac

SEQ ID NO: 827642 - RNA, 19 nt, Artificial Sequence
  Description of Artificial Sequence: Synthetic oligonucleotide
  Sense strand starting at position 195 of SEQ ID NO: 587912
caaggagcucagugacaua

SEQ ID NO: 827643 - RNA, 19 nt, Artificial Sequence
  Description of Artificial Sequence: Synthetic oligonucleotide
  Antisense strand to SEQ ID NO: 827642
uaugucacugagcuccuug

SEQ ID NO: 827644 - RNA, 19 nt, Artificial Sequence
  Description of Artificial Sequence: Synthetic oligonucleotide
  Sense strand starting at position 257 of SEQ ID NO: 587912
aguggugacaguuaagaau

SEQ ID NO: 827645 - RNA, 19 nt, Artificial Sequence
  Description of Artificial Sequence: Synthetic oligonucleotide
  Antisense strand to SEQ ID NO: 827644
auucuuaacugucaccacu

SEQ ID NO: 827646 - RNA, 19 nt, Artificial Sequence
  Description of Artificial Sequence: Synthetic oligonucleotide
  Sense strand starting at position 288 of SEQ ID NO: 587912
gaguaauugcuacacucag

SEQ ID NO: 827647 - RNA, 19 nt, Artificial Sequence
  Description of Artificial Sequence: Synthetic oligonucleotide
  Antisense strand to SEQ ID NO: 827646
cugaguguagcaauuacuc

SEQ ID NO: 827648 - RNA, 19 nt, Artificial Sequence
  Description of Artificial Sequence: Synthetic oligonucleotide
  Sense strand starting at position 386 of SEQ ID NO: 587912
gaaggaagguacguauaga

SEQ ID NO: 827649 - RNA, 19 nt, Artificial Sequence
  Description of Artificial Sequence: Synthetic oligonucleotide
  Antisense strand to SEQ ID NO: 827648
ucuauacguaccuuccuuc

SEQ ID NO: 827650 - RNA, 19 nt, Artificial Sequence
  Description of Artificial Sequence: Synthetic oligonucleotide
  Sense strand starting at position 397 of SEQ ID NO: 587912
cguauagauaugcauuaga

SEQ ID NO: 827651 - RNA, 19 nt, Artificial Sequence
  Description of Artificial Sequence: Synthetic oligonucleotide
  Antisense strand to SEQ ID NO: 827650
ucuaaugcauaucuauacg

SEQ ID NO: 827652 - RNA, 19 nt, Artificial Sequence
  Description of Artificial Sequence: Synthetic oligonucleotide
  Sense strand starting at position 590 of SEQ ID NO: 587912
gaauguacucauuggaauu

SEQ ID NO: 827653 - RNA, 19 nt, Artificial Sequence
  Description of Artificial Sequence: Synthetic oligonucleotide
  Antisense strand to SEQ ID NO: 827652
aauuccaaugaguacauuc

SEQ ID NO: 827654 - RNA, 19 nt, Artificial Sequence
  Description of Artificial Sequence: Synthetic oligonucleotide
  Sense strand starting at position 601 of SEQ ID NO: 587912
uuggaauugaucggauucu

SEQ ID NO: 827655 - RNA, 19 nt, Artificial Sequence
  Description of Artificial Sequence: Synthetic oligonucleotide
  Antisense strand to SEQ ID NO: 827654
agaauccgaucaauuccaa

SEQ ID NO: 827656 - RNA, 19 nt, Artificial Sequence
  Description of Artificial Sequence: Synthetic oligonucleotide
  Sense strand starting at position 607 of SEQ ID NO: 587912
uugaucggauucuuaguga

SEQ ID NO: 827657 - RNA, 19 nt, Artificial Sequence
  Description of Artificial Sequence: Synthetic oligonucleotide
  Antisense strand to SEQ ID NO: 827656
ucacuaagaauccgaucaa

SEQ ID NO: 827658 - RNA, 19 nt, Artificial Sequence
  Description of Artificial Sequence: Synthetic oligonucleotide
  Sense strand starting at position 610 of SEQ ID NO: 587912
aucggauucuuagugaaau

SEQ ID NO: 827659 - RNA, 19 nt, Artificial Sequence
  Description of Artificial Sequence: Synthetic oligonucleotide
  Antisense strand to SEQ ID NO: 827658
auuucacuaagaauccgau

SEQ ID NO: 827660 - RNA, 19 nt, Artificial Sequence
  Description of Artificial Sequence: Synthetic oligonucleotide
  Sense strand starting at position 612 of SEQ ID NO: 587912
cggauucuuagugaaaugu

SEQ ID NO: 827661 - RNA, 19 nt, Artificial Sequence
  Description of Artificial Sequence: Synthetic oligonucleotide
  Antisense strand to SEQ ID NO: 827660
acauuucacuaagaauccg

SEQ ID NO: 827662 - RNA, 19 nt, Artificial Sequence
  Description of Artificial Sequence: Synthetic oligonucleotide
  Sense strand starting at position 699 of SEQ ID NO: 587912
uaucaaggucacugugaaa

SEQ ID NO: 827663 - RNA, 19 nt, Artificial Sequence
  Description of Artificial Sequence: Synthetic oligonucleotide
  Antisense strand to SEQ ID NO: 827662
uuucacagugaccuugaua

SEQ ID NO: 827664 - RNA, 19 nt, Artificial Sequence
  Description of Artificial Sequence: Synthetic oligonucleotide
  Sense strand starting at position 706 of SEQ ID NO: 587912
gucacugugaaagauugua

SEQ ID NO: 827665 - RNA, 19 nt, Artificial Sequence
  Description of Artificial Sequence: Synthetic oligonucleotide
  Antisense strand to SEQ ID NO: 827664
uacaaucuuucacagugac

SEQ ID NO: 827666 - RNA, 19 nt, Artificial Sequence
  Description of Artificial Sequence: Synthetic oligonucleotide
  Sense strand starting at position 812 of SEQ ID NO: 587912
ccuacuggucccuaucacu

SEQ ID NO: 827667 - RNA, 19 nt, Artificial Sequence
  Description of Artificial Sequence: Synthetic oligonucleotide
  Antisense strand to SEQ ID NO: 827666
agugauagggaccaguagg

SEQ ID NO: 827668 - RNA, 19 nt, Artificial Sequence
  Description of Artificial Sequence: Synthetic oligonucleotide
  Sense strand starting at position 940 of SEQ ID NO: 587912
gcagaucagguuugagaaa

SEQ ID NO: 827669 - RNA, 19 nt, Artificial Sequence
  Description of Artificial Sequence: Synthetic oligonucleotide
  Antisense strand to SEQ ID NO: 827668
uuucucaaaccugaucugc

SEQ ID NO: 827670 - RNA, 19 nt, Artificial Sequence
  Description of Artificial Sequence: Synthetic oligonucleotide
  Sense strand starting at position 1054 of SEQ ID NO: 587912
guuggcauggagugagaaa

SEQ ID NO: 827671 - RNA, 19 nt, Artificial Sequence
  Description of Artificial Sequence: Synthetic oligonucleotide
  Antisense strand to SEQ ID NO: 827670
uuucucacuccaugccaac

SEQ ID NO: 827672 - RNA, 19 nt, Artificial Sequence
  Description of Artificial Sequence: Synthetic oligonucleotide
  Sense strand starting at position 1063 of SEQ ID NO: 587912
gagugagaaaucuggugua

SEQ ID NO: 827673 - RNA, 19 nt, Artificial Sequence
  Description of Artificial Sequence: Synthetic oligonucleotide
  Antisense strand to SEQ ID NO: 827672
uacaccagauuucucacuc

SEQ ID NO: 827674 - RNA, 19 nt, Artificial Sequence
  Description of Artificial Sequence: Synthetic oligonucleotide
  Sense strand starting at position 1068 of SEQ ID NO: 587912
agaaaucugguguauaugu

SEQ ID NO: 827675 - RNA, 19 nt, Artificial Sequence
  Description of Artificial Sequence: Synthetic oligonucleotide
  Antisense strand to SEQ ID NO: 827674
acauauacaccagauuucu

SEQ ID NO: 827676 - RNA, 19 nt, Artificial Sequence
  Description of Artificial Sequence: Synthetic oligonucleotide
  Sense strand starting at position 1070 of SEQ ID NO: 587912
aaaucugguguauauguau

SEQ ID NO: 827677 - RNA, 19 nt, Artificial Sequence
  Description of Artificial Sequence: Synthetic oligonucleotide
  Antisense strand to SEQ ID NO: 827676
auacauauacaccagauuu

SEQ ID NO: 827678 - RNA, 19 nt, Artificial Sequence
  Description of Artificial Sequence: Synthetic oligonucleotide
  Sense strand starting at position 1091 of SEQ ID NO: 587912
auguauuuguucccaugca

SEQ ID NO: 827679 - RNA, 19 nt, Artificial Sequence
  Description of Artificial Sequence: Synthetic oligonucleotide
  Antisense strand to SEQ ID NO: 827678
ugcaugggaacaaauacau

SEQ ID NO: 827680 - RNA, 19 nt, Artificial Sequence
  Description of Artificial Sequence: Synthetic oligonucleotide
  Sense strand starting at position 1103 of SEQ ID NO: 587912
ccaugcauaguuuaguaua

SEQ ID NO: 827681 - RNA, 19 nt, Artificial Sequence
  Description of Artificial Sequence: Synthetic oligonucleotide
  Antisense strand to SEQ ID NO: 827680
uauacuaaacuaugcaugg

SEQ ID NO: 827682 - RNA, 19 nt, Artificial Sequence
  Description of Artificial Sequence: Synthetic oligonucleotide
  Sense strand starting at position 1141 of SEQ ID NO: 587912
guuagagggcaugguuaaa

SEQ ID NO: 827683 - RNA, 19 nt, Artificial Sequence
  Description of Artificial Sequence: Synthetic oligonucleotide
  Antisense strand to SEQ ID NO: 827682
uuuaaccaugcccucuaac

SEQ ID NO: 827684 - RNA, 19 nt, Artificial Sequence
  Description of Artificial Sequence: Synthetic oligonucleotide
  Sense strand starting at position 1358 of SEQ ID NO: 587912
uauguaaggcaacauguau

SEQ ID NO: 827685 - RNA, 19 nt, Artificial Sequence
  Description of Artificial Sequence: Synthetic oligonucleotide
  Antisense strand to SEQ ID NO: 827684
auacauguugccuuacaua

SEQ ID NO: 827686 - RNA, 19 nt, Artificial Sequence
  Description of Artificial Sequence: Synthetic oligonucleotide
  Sense strand starting at position 1365 of SEQ ID NO: 587912
ggcaacauguauguuauuu

SEQ ID NO: 827687 - RNA, 19 nt, Artificial Sequence
  Description of Artificial Sequence: Synthetic oligonucleotide
  Antisense strand to SEQ ID NO: 827686
aaauaacauacauguugcc

SEQ ID NO: 827688 - RNA, 19 nt, Artificial Sequence
  Description of Artificial Sequence: Synthetic oligonucleotide
  Sense strand starting at position 1384 of SEQ ID NO: 587912
ugauucuucuugucacaca

SEQ ID NO: 827689 - RNA, 19 nt, Artificial Sequence
  Description of Artificial Sequence: Synthetic oligonucleotide
  Antisense strand to SEQ ID NO: 827688
ugugugacaagaagaauca

SEQ ID NO: 827690 - RNA, 19 nt, Artificial Sequence
  Description of Artificial Sequence: Synthetic oligonucleotide
  Sense strand starting at position 1433 of SEQ ID NO: 587912
auugcuugucuccucguua

SEQ ID NO: 827691 - RNA, 19 nt, Artificial Sequence
  Description of Artificial Sequence: Synthetic oligonucleotide
  Antisense strand to SEQ ID NO: 827690
uaacgaggagacaagcaau

SEQ ID NO: 827692 - RNA, 19 nt, Artificial Sequence
  Description of Artificial Sequence: Synthetic oligonucleotide
  Sense strand starting at position 2275 of SEQ ID NO: 587912
gugacaacguuucuggaaa

SEQ ID NO: 827693 - RNA, 19 nt, Artificial Sequence
  Description of Artificial Sequence: Synthetic oligonucleotide
  Antisense strand to SEQ ID NO: 827692
uuuccagaaacguugucac

SEQ ID NO: 827694 - RNA, 19 nt, Artificial Sequence
  Description of Artificial Sequence: Synthetic oligonucleotide
  Sense strand starting at position 2479 of SEQ ID NO: 587912
uccagagcuucuuuggaaa

SEQ ID NO: 827695 - RNA, 19 nt, Artificial Sequence
  Description of Artificial Sequence: Synthetic oligonucleotide
  Antisense strand to SEQ ID NO: 827694
uuuccaaagaagcucugga

SEQ ID NO: 827696 - RNA, 19 nt, Artificial Sequence
  Description of Artificial Sequence: Synthetic oligonucleotide
  Sense strand starting at position 2502 of SEQ ID NO: 587912
guggaucuuuaauuacaua

SEQ ID NO: 827697 - RNA, 19 nt, Artificial Sequence
  Description of Artificial Sequence: Synthetic oligonucleotide
  Antisense strand to SEQ ID NO: 827696
uauguaauuaaagauccac

SEQ ID NO: 827698 - RNA, 19 nt, Artificial Sequence
  Description of Artificial Sequence: Synthetic oligonucleotide
  Sense strand starting at position 2549 of SEQ ID NO: 587912
cgcaaucuugauuaccaau

SEQ ID NO: 827699 - RNA, 19 nt, Artificial Sequence
  Description of Artificial Sequence: Synthetic oligonucleotide
  Antisense strand to SEQ ID NO: 827698
auugguaaucaagauugcg

SEQ ID NO: 827700 - RNA, 19 nt, Artificial Sequence
  Description of Artificial Sequence: Synthetic oligonucleotide
  Sense strand starting at position 2648 of SEQ ID NO: 587912
cgcggaaacgauagguuau

SEQ ID NO: 827701 - RNA, 19 nt, Artificial Sequence
  Description of Artificial Sequence: Synthetic oligonucleotide
  Antisense strand to SEQ ID NO: 827700
auaaccuaucguuuccgcg

SEQ ID NO: 827702 - RNA, 19 nt, Artificial Sequence
  Description of Artificial Sequence: Synthetic oligonucleotide
  Sense strand starting at position 2654 of SEQ ID NO: 587912
aacgauagguuauuguuaa

SEQ ID NO: 827703 - RNA, 19 nt, Artificial Sequence
  Description of Artificial Sequence: Synthetic oligonucleotide
  Antisense strand to SEQ ID NO: 827702
uuaacaauaaccuaucguu

SEQ ID NO: 827704 - RNA, 19 nt, Artificial Sequence
  Description of Artificial Sequence: Synthetic oligonucleotide
  Sense strand starting at position 2951 of SEQ ID NO: 587912
gucagagggcucgacaauc

SEQ ID NO: 827705 - RNA, 19 nt, Artificial Sequence
  Description of Artificial Sequence: Synthetic oligonucleotide
  Antisense strand to SEQ ID NO: 827704
gauugucgagcccucugac

SEQ ID NO: 827706 - RNA, 19 nt, Artificial Sequence
  Description of Artificial Sequence: Synthetic oligonucleotide
  Sense strand starting at position 2976 of SEQ ID NO: 587912
uuuguaaagccagagcaaa

SEQ ID NO: 827707 - RNA, 19 nt, Artificial Sequence
  Description of Artificial Sequence: Synthetic oligonucleotide
  Antisense strand to SEQ ID NO: 827706
uuugcucuggcuuuacaaa

SEQ ID NO: 827708 - RNA, 19 nt, Artificial Sequence
  Description of Artificial Sequence: Synthetic oligonucleotide
  Sense strand starting at position 3307 of SEQ ID NO: 587912
uuugaaacuauguggagua

SEQ ID NO: 827709 - RNA, 19 nt, Artificial Sequence
  Description of Artificial Sequence: Synthetic oligonucleotide
  Antisense strand to SEQ ID NO: 827708
uacuccacauaguuucaaa

SEQ ID NO: 827710 - RNA, 19 nt, Artificial Sequence
  Description of Artificial Sequence: Synthetic oligonucleotide
  Sense strand starting at position 3382 of SEQ ID NO: 587912
acuugugcaguguagauuu

SEQ ID NO: 827711 - RNA, 19 nt, Artificial Sequence
  Description of Artificial Sequence: Synthetic oligonucleotide
  Antisense strand to SEQ ID NO: 827710
aaaucuacacugcacaagu

SEQ ID NO: 827712 - RNA, 19 nt, Artificial Sequence
  Description of Artificial Sequence: Synthetic oligonucleotide
  Sense strand starting at position 3389 of SEQ ID NO: 587912
caguguagauuucugcaca

SEQ ID NO: 827713 - RNA, 19 nt, Artificial Sequence
  Description of Artificial Sequence: Synthetic oligonucleotide
  Antisense strand to SEQ ID NO: 827712
ugugcagaaaucuacacug

SEQ ID NO: 827714 - RNA, 19 nt, Artificial Sequence
  Description of Artificial Sequence: Synthetic oligonucleotide
  Sense strand starting at position 3638 of SEQ ID NO: 587912
gcuugcuuccaucaaggau

SEQ ID NO: 827715 - RNA, 19 nt, Artificial Sequence
  Description of Artificial Sequence: Synthetic oligonucleotide
  Antisense strand to SEQ ID NO: 827714
auccuugauggaagcaagc

SEQ ID NO: 827716 - RNA, 19 nt, Artificial Sequence
  Description of Artificial Sequence: Synthetic oligonucleotide
  Sense strand starting at position 28 of SEQ ID NO: 587913
acuuuauucccuugugaag

SEQ ID NO: 827717 - RNA, 19 nt, Artificial Sequence
  Description of Artificial Sequence: Synthetic oligonucleotide
  Antisense strand to SEQ ID NO: 827716
cuucacaagggaauaaagu

SEQ ID NO: 827718 - RNA, 19 nt, Artificial Sequence
  Description of Artificial Sequence: Synthetic oligonucleotide
  Sense strand starting at position 139 of SEQ ID NO: 587913
gcuuaucaucuugacagua

SEQ ID NO: 827719 - RNA, 19 nt, Artificial Sequence
  Description of Artificial Sequence: Synthetic oligonucleotide
  Antisense strand to SEQ ID NO: 827718
uacugucaagaugauaagc

SEQ ID NO: 827720 - RNA, 19 nt, Artificial Sequence
  Description of Artificial Sequence: Synthetic oligonucleotide
  Sense strand starting at position 366 of SEQ ID NO: 587913
uuggucaaguuacucaaau

SEQ ID NO: 827721 - RNA, 19 nt, Artificial Sequence
  Description of Artificial Sequence: Synthetic oligonucleotide
  Antisense strand to SEQ ID NO: 827720
auuugaguaacuugaccaa

SEQ ID NO: 827722 - RNA, 19 nt, Artificial Sequence
  Description of Artificial Sequence: Synthetic oligonucleotide
  Sense strand starting at position 367 of SEQ ID NO: 587913
uggucaaguuacucaaaua

SEQ ID NO: 827723 - RNA, 19 nt, Artificial Sequence
  Description of Artificial Sequence: Synthetic oligonucleotide
  Antisense strand to SEQ ID NO: 827722
uauuugaguaacuugacca

SEQ ID NO: 827724 - RNA, 19 nt, Artificial Sequence
  Description of Artificial Sequence: Synthetic oligonucleotide
  Sense strand starting at position 389 of SEQ ID NO: 587913
cccagugaacacugaacuu

SEQ ID NO: 827725 - RNA, 19 nt, Artificial Sequence
  Description of Artificial Sequence: Synthetic oligonucleotide
  Antisense strand to SEQ ID NO: 827724
aaguucaguguucacuggg

SEQ ID NO: 827726 - RNA, 19 nt, Artificial Sequence
  Description of Artificial Sequence: Synthetic oligonucleotide
  Sense strand starting at position 453 of SEQ ID NO: 587913
gcuuacaggucaucacuaa

SEQ ID NO: 827727 - RNA, 19 nt, Artificial Sequence
  Description of Artificial Sequence: Synthetic oligonucleotide
  Antisense strand to SEQ ID NO: 827726
uuagugaugaccuguaagc

SEQ ID NO: 827728 - RNA, 19 nt, Artificial Sequence
  Description of Artificial Sequence: Synthetic oligonucleotide
  Sense strand starting at position 468 of SEQ ID NO: 587913
cuaauucugcucuacgaua

SEQ ID NO: 827729 - RNA, 19 nt, Artificial Sequence
  Description of Artificial Sequence: Synthetic oligonucleotide
  Antisense strand to SEQ ID NO: 827728
uaucguagagcagaauuag

SEQ ID NO: 827730 - RNA, 19 nt, Artificial Sequence
  Description of Artificial Sequence: Synthetic oligonucleotide
  Sense strand starting at position 545 of SEQ ID NO: 587913
aguauaucuugugucagaa

SEQ ID NO: 827731 - RNA, 19 nt, Artificial Sequence
  Description of Artificial Sequence: Synthetic oligonucleotide
  Antisense strand to SEQ ID NO: 827730
uucugacacaagauauacu

SEQ ID NO: 827732 - RNA, 19 nt, Artificial Sequence
  Description of Artificial Sequence: Synthetic oligonucleotide
  Sense strand starting at position 1276 of SEQ ID NO: 587913
gucgcauaucaauacauau

SEQ ID NO: 827733 - RNA, 19 nt, Artificial Sequence
  Description of Artificial Sequence: Synthetic oligonucleotide
  Antisense strand to SEQ ID NO: 827732
auauguauugauaugcgac

SEQ ID NO: 827734 - RNA, 19 nt, Artificial Sequence
  Description of Artificial Sequence: Synthetic oligonucleotide
  Sense strand starting at position 1317 of SEQ ID NO: 587913
agaugugagcgcuacccaa

SEQ ID NO: 827735 - RNA, 19 nt, Artificial Sequence
  Description of Artificial Sequence: Synthetic oligonucleotide
  Antisense strand to SEQ ID NO: 827734
uuggguagcgcucacaucu

SEQ ID NO: 827736 - RNA, 19 nt, Artificial Sequence
  Description of Artificial Sequence: Synthetic oligonucleotide
  Sense strand starting at position 1374 of SEQ ID NO: 587913
aaacgugcugugcucauua

SEQ ID NO: 827737 - RNA, 19 nt, Artificial Sequence
  Description of Artificial Sequence: Synthetic oligonucleotide
  Antisense strand to SEQ ID NO: 827736
uaaugagcacagcacguuu

SEQ ID NO: 827738 - RNA, 19 nt, Artificial Sequence
  Description of Artificial Sequence: Synthetic oligonucleotide
  Sense strand starting at position 2305 of SEQ ID NO: 587913
acaucucugccggaaguga

SEQ ID NO: 827739 - RNA, 19 nt, Artificial Sequence
  Description of Artificial Sequence: Synthetic oligonucleotide
  Antisense strand to SEQ ID NO: 827738
ucacuuccggcagagaugu

SEQ ID NO: 827740 - RNA, 19 nt, Artificial Sequence
  Description of Artificial Sequence: Synthetic oligonucleotide
  Sense strand starting at position 2382 of SEQ ID NO: 587913
ucagguagcgaagauaaau

SEQ ID NO: 827741 - RNA, 19 nt, Artificial Sequence
  Description of Artificial Sequence: Synthetic oligonucleotide
  Antisense strand to SEQ ID NO: 827740
auuuaucuucgcuaccuga

SEQ ID NO: 827742 - RNA, 19 nt, Artificial Sequence
  Description of Artificial Sequence: Synthetic oligonucleotide
  Sense strand starting at position 2388 of SEQ ID NO: 587913
agcgaagauaaauguaauc

SEQ ID NO: 827743 - RNA, 19 nt, Artificial Sequence
  Description of Artificial Sequence: Synthetic oligonucleotide
  Antisense strand to SEQ ID NO: 827742
gauuacauuuaucuucgcu

SEQ ID NO: 827744 - RNA, 19 nt, Artificial Sequence
  Description of Artificial Sequence: Synthetic oligonucleotide
  Sense strand starting at position 2393 of SEQ ID NO: 587913
agauaaauguaaucuugug

SEQ ID NO: 827745 - RNA, 19 nt, Artificial Sequence
  Description of Artificial Sequence: Synthetic oligonucleotide
  Antisense strand to SEQ ID NO: 827744
cacaagauuacauuuaucu

SEQ ID NO: 827746 - RNA, 19 nt, Artificial Sequence
  Description of Artificial Sequence: Synthetic oligonucleotide
  Sense strand starting at position 2403 of SEQ ID NO: 587913
aaucuuguggcaggaaauc

SEQ ID NO: 827747 - RNA, 19 nt, Artificial Sequence
  Description of Artificial Sequence: Synthetic oligonucleotide
  Antisense strand to SEQ ID NO: 827746
gauuuccugccacaagauu

SEQ ID NO: 827748 - RNA, 19 nt, Artificial Sequence
  Description of Artificial Sequence: Synthetic oligonucleotide
  Sense strand starting at position 2412 of SEQ ID NO: 587913
gcaggaaaucgacauucuc

SEQ ID NO: 827749 - RNA, 19 nt, Artificial Sequence
  Description of Artificial Sequence: Synthetic oligonucleotide
  Antisense strand to SEQ ID NO: 827748
gagaaugucgauuuccugc

SEQ ID NO: 827750 - RNA, 19 nt, Artificial Sequence
  Description of Artificial Sequence: Synthetic oligonucleotide
  Sense strand starting at position 2550 of SEQ ID NO: 587913
cauacuuugcaucauggga

SEQ ID NO: 827751 - RNA, 19 nt, Artificial Sequence
  Description of Artificial Sequence: Synthetic oligonucleotide
  Antisense strand to SEQ ID NO: 827750
ucccaugaugcaaaguaug

SEQ ID NO: 827752 - RNA, 19 nt, Artificial Sequence
  Description of Artificial Sequence: Synthetic oligonucleotide
  Sense strand starting at position 2631 of SEQ ID NO: 587913
agcgcuuuaagggaugaca

SEQ ID NO: 827753 - RNA, 19 nt, Artificial Sequence
  Description of Artificial Sequence: Synthetic oligonucleotide
  Antisense strand to SEQ ID NO: 827752
ugucaucccuuaaagcgcu

SEQ ID NO: 827754 - RNA, 19 nt, Artificial Sequence
  Description of Artificial Sequence: Synthetic oligonucleotide
  Sense strand starting at position 2633 of SEQ ID NO: 587913
cgcuuuaagggaugacaau

SEQ ID NO: 827755 - RNA, 19 nt, Artificial Sequence
  Description of Artificial Sequence: Synthetic oligonucleotide
  Antisense strand to SEQ ID NO: 827754
auugucaucccuuaaagcg

SEQ ID NO: 827756 - RNA, 19 nt, Artificial Sequence
  Description of Artificial Sequence: Synthetic oligonucleotide
  Sense strand starting at position 2691 of SEQ ID NO: 587913
ugauccguucuacauaauu

SEQ ID NO: 827757 - RNA, 19 nt, Artificial Sequence
  Description of Artificial Sequence: Synthetic oligonucleotide
  Antisense strand to SEQ ID NO: 827756
aauuauguagaacggauca

SEQ ID NO: 827758 - RNA, 19 nt, Artificial Sequence
  Description of Artificial Sequence: Synthetic oligonucleotide
  Sense strand starting at position 2711 of SEQ ID NO: 587913
agaaguucucauuggcaga

SEQ ID NO: 827759 - RNA, 19 nt, Artificial Sequence
  Description of Artificial Sequence: Synthetic oligonucleotide
  Antisense strand to SEQ ID NO: 827758
ucugccaaugagaacuucu

SEQ ID NO: 827760 - RNA, 19 nt, Artificial Sequence
  Description of Artificial Sequence: Synthetic oligonucleotide
  Sense strand starting at position 2713 of SEQ ID NO: 587913
aaguucucauuggcagaga

SEQ ID NO: 827761 - RNA, 19 nt, Artificial Sequence
  Description of Artificial Sequence: Synthetic oligonucleotide
  Antisense strand to SEQ ID NO: 827760
ucucugccaaugagaacuu

SEQ ID NO: 827762 - RNA, 19 nt, Artificial Sequence
  Description of Artificial Sequence: Synthetic oligonucleotide
  Sense strand starting at position 2757 of SEQ ID NO: 587913
uuacuauccggugagcaau

SEQ ID NO: 827763 - RNA, 19 nt, Artificial Sequence
  Description of Artificial Sequence: Synthetic oligonucleotide
  Antisense strand to SEQ ID NO: 827762
auugcucaccggauaguaa

SEQ ID NO: 827764 - RNA, 19 nt, Artificial Sequence
  Description of Artificial Sequence: Synthetic oligonucleotide
  Sense strand starting at position 2788 of SEQ ID NO: 587913
auggaauauuagccuuguu

SEQ ID NO: 827765 - RNA, 19 nt, Artificial Sequence
  Description of Artificial Sequence: Synthetic oligonucleotide
  Antisense strand to SEQ ID NO: 827764
aacaaggcuaauauuccau

SEQ ID NO: 827766 - RNA, 19 nt, Artificial Sequence
  Description of Artificial Sequence: Synthetic oligonucleotide
  Sense strand starting at position 2791 of SEQ ID NO: 587913
gaauauuagccuuguuaga

SEQ ID NO: 827767 - RNA, 19 nt, Artificial Sequence
  Description of Artificial Sequence: Synthetic oligonucleotide
  Antisense strand to SEQ ID NO: 827766
ucuaacaaggcuaauauuc

SEQ ID NO: 827768 - RNA, 19 nt, Artificial Sequence
  Description of Artificial Sequence: Synthetic oligonucleotide
  Sense strand starting at position 2793 of SEQ ID NO: 587913
auauuagccuuguuagaca

SEQ ID NO: 827769 - RNA, 19 nt, Artificial Sequence
  Description of Artificial Sequence: Synthetic oligonucleotide
  Antisense strand to SEQ ID NO: 827768
ugucuaacaaggcuaauau

SEQ ID NO: 827770 - RNA, 19 nt, Artificial Sequence
  Description of Artificial Sequence: Synthetic oligonucleotide
  Sense strand starting at position 3079 of SEQ ID NO: 587913
gauugaaaugacuguacac

SEQ ID NO: 827771 - RNA, 19 nt, Artificial Sequence
  Description of Artificial Sequence: Synthetic oligonucleotide
  Antisense strand to SEQ ID NO: 827770
guguacagucauuucaauc

SEQ ID NO: 827772 - RNA, 19 nt, Artificial Sequence
  Description of Artificial Sequence: Synthetic oligonucleotide
  Sense strand starting at position 3163 of SEQ ID NO: 587913
uuaaauauccgcuagagau

SEQ ID NO: 827773 - RNA, 19 nt, Artificial Sequence
  Description of Artificial Sequence: Synthetic oligonucleotide
  Antisense strand to SEQ ID NO: 827772
aucucuagcggauauuuaa

SEQ ID NO: 827774 - RNA, 19 nt, Artificial Sequence
  Description of Artificial Sequence: Synthetic oligonucleotide
  Sense strand starting at position 3220 of SEQ ID NO: 587913
aggaguagccugcaaccaa

SEQ ID NO: 827775 - RNA, 19 nt, Artificial Sequence
  Description of Artificial Sequence: Synthetic oligonucleotide
  Antisense strand to SEQ ID NO: 827774
uugguugcaggcuacuccu

SEQ ID NO: 827776 - RNA, 19 nt, Artificial Sequence
  Description of Artificial Sequence: Synthetic oligonucleotide
  Sense strand starting at position 3241 of SEQ ID NO: 587913
agaggcuaaaguuaaguua

SEQ ID NO: 827777 - RNA, 19 nt, Artificial Sequence
  Description of Artificial Sequence: Synthetic oligonucleotide
  Antisense strand to SEQ ID NO: 827776
uaacuuaacuuuagccucu

SEQ ID NO: 827778 - RNA, 19 nt, Artificial Sequence
  Description of Artificial Sequence: Synthetic oligonucleotide
  Sense strand starting at position 3244 of SEQ ID NO: 587913
ggcuaaaguuaaguuacaa

SEQ ID NO: 827779 - RNA, 19 nt, Artificial Sequence
  Description of Artificial Sequence: Synthetic oligonucleotide
  Antisense strand to SEQ ID NO: 827778
uuguaacuuaacuuuagcc

SEQ ID NO: 827780 - RNA, 19 nt, Artificial Sequence
  Description of Artificial Sequence: Synthetic oligonucleotide
  Sense strand starting at position 3264 of SEQ ID NO: 587913
guuguacuccuauggaaau

SEQ ID NO: 827781 - RNA, 19 nt, Artificial Sequence
  Description of Artificial Sequence: Synthetic oligonucleotide
  Antisense strand to SEQ ID NO: 827780
auuuccauaggaguacaac

SEQ ID NO: 827782 - RNA, 19 nt, Artificial Sequence
  Description of Artificial Sequence: Synthetic oligonucleotide
  Sense strand starting at position 3459 of SEQ ID NO: 587913
cccgacuaagagugagaaa

SEQ ID NO: 827783 - RNA, 19 nt, Artificial Sequence
  Description of Artificial Sequence: Synthetic oligonucleotide
  Antisense strand to SEQ ID NO: 827782
uuucucacucuuagucggg

SEQ ID NO: 827784 - RNA, 19 nt, Artificial Sequence
  Description of Artificial Sequence: Synthetic oligonucleotide
  Sense strand starting at position 3520 of SEQ ID NO: 587913
ugguuugugacaugaugau

SEQ ID NO: 827785 - RNA, 19 nt, Artificial Sequence
  Description of Artificial Sequence: Synthetic oligonucleotide
  Antisense strand to SEQ ID NO: 827784
aucaucaugucacaaacca

SEQ ID NO: 827786 - RNA, 19 nt, Artificial Sequence
  Description of Artificial Sequence: Synthetic oligonucleotide
  Sense strand starting at position 3548 of SEQ ID NO: 587913
uuaagagauucugcccuuu

SEQ ID NO: 827787 - RNA, 19 nt, Artificial Sequence
  Description of Artificial Sequence: Synthetic oligonucleotide
  Antisense strand to SEQ ID NO: 827786
aaagggcagaaucucuuaa

SEQ ID NO: 827788 - RNA, 19 nt, Artificial Sequence
  Description of Artificial Sequence: Synthetic oligonucleotide
  Sense strand starting at position 3603 of SEQ ID NO: 587913
caauguuagguaggagaau

SEQ ID NO: 827789 - RNA, 19 nt, Artificial Sequence
  Description of Artificial Sequence: Synthetic oligonucleotide
  Antisense strand to SEQ ID NO: 827788
auucuccuaccuaacauug

SEQ ID NO: 827790 - RNA, 19 nt, Artificial Sequence
  Description of Artificial Sequence: Synthetic oligonucleotide
  Sense strand starting at position 3764 of SEQ ID NO: 587913
gaaagaaccucugauagag

SEQ ID NO: 827791 - RNA, 19 nt, Artificial Sequence
  Description of Artificial Sequence: Synthetic oligonucleotide
  Antisense strand to SEQ ID NO: 827790
cucuaucagagguucuuuc

SEQ ID NO: 827792 - RNA, 19 nt, Artificial Sequence
  Description of Artificial Sequence: Synthetic oligonucleotide
  Sense strand starting at position 3949 of SEQ ID NO: 587913
uuuccuucuguggaguaua

SEQ ID NO: 827793 - RNA, 19 nt, Artificial Sequence
  Description of Artificial Sequence: Synthetic oligonucleotide
  Antisense strand to SEQ ID NO: 827792
uauacuccacagaaggaaa

SEQ ID NO: 827794 - RNA, 19 nt, Artificial Sequence
  Description of Artificial Sequence: Synthetic oligonucleotide
  Sense strand starting at position 3952 of SEQ ID NO: 587913
ccuucuguggaguauacuu

SEQ ID NO: 827795 - RNA, 19 nt, Artificial Sequence
  Description of Artificial Sequence: Synthetic oligonucleotide
  Antisense strand to SEQ ID NO: 827794
aaguauacuccacagaagg

SEQ ID NO: 827796 - RNA, 19 nt, Artificial Sequence
  Description of Artificial Sequence: Synthetic oligonucleotide
  Sense strand starting at position 6 of SEQ ID NO: 587914
aauugaagaucagaggaga

SEQ ID NO: 827797 - RNA, 19 nt, Artificial Sequence
  Description of Artificial Sequence: Synthetic oligonucleotide
  Antisense strand to SEQ ID NO: 827796
ucuccucugaucuucaauu

SEQ ID NO: 827798 - RNA, 19 nt, Artificial Sequence
  Description of Artificial Sequence: Synthetic oligonucleotide
  Sense strand starting at position 258 of SEQ ID NO: 587914
cuuccagaagucugaaucu

SEQ ID NO: 827799 - RNA, 19 nt, Artificial Sequence
  Description of Artificial Sequence: Synthetic oligonucleotide
  Antisense strand to SEQ ID NO: 827798
agauucagacuucuggaag

SEQ ID NO: 827800 - RNA, 19 nt, Artificial Sequence
  Description of Artificial Sequence: Synthetic oligonucleotide
  Sense strand starting at position 300 of SEQ ID NO: 587914
ugacaaucguuccuaagga

SEQ ID NO: 827801 - RNA, 19 nt, Artificial Sequence
  Description of Artificial Sequence: Synthetic oligonucleotide
  Antisense strand to SEQ ID NO: 827800
uccuuaggaacgauuguca

SEQ ID NO: 827802 - RNA, 19 nt, Artificial Sequence
  Description of Artificial Sequence: Synthetic oligonucleotide
  Sense strand starting at position 325 of SEQ ID NO: 587914
gggucacagcacuaguaau

SEQ ID NO: 827803 - RNA, 19 nt, Artificial Sequence
  Description of Artificial Sequence: Synthetic oligonucleotide
  Antisense strand to SEQ ID NO: 827802
auuacuagugcugugaccc

SEQ ID NO: 827804 - RNA, 19 nt, Artificial Sequence
  Description of Artificial Sequence: Synthetic oligonucleotide
  Sense strand starting at position 387 of SEQ ID NO: 587914
guucuugguugacuccaaa

SEQ ID NO: 827805 - RNA, 19 nt, Artificial Sequence
  Description of Artificial Sequence: Synthetic oligonucleotide
  Antisense strand to SEQ ID NO: 827804
uuuggagucaaccaagaac

SEQ ID NO: 827806 - RNA, 19 nt, Artificial Sequence
  Description of Artificial Sequence: Synthetic oligonucleotide
  Sense strand starting at position 444 of SEQ ID NO: 587914
cacugugauguaugagcaa

SEQ ID NO: 827807 - RNA, 19 nt, Artificial Sequence
  Description of Artificial Sequence: Synthetic oligonucleotide
  Antisense strand to SEQ ID NO: 827806
uugcucauacaucacagug

SEQ ID NO: 827808 - RNA, 19 nt, Artificial Sequence
  Description of Artificial Sequence: Synthetic oligonucleotide
  Sense strand starting at position 447 of SEQ ID NO: 587914
ugugauguaugagcaagaa

SEQ ID NO: 827809 - RNA, 19 nt, Artificial Sequence
  Description of Artificial Sequence: Synthetic oligonucleotide
  Antisense strand to SEQ ID NO: 827808
uucuugcucauacaucaca

SEQ ID NO: 827810 - RNA, 19 nt, Artificial Sequence
  Description of Artificial Sequence: Synthetic oligonucleotide
  Sense strand starting at position 477 of SEQ ID NO: 587914
gugacaauuuaauagcaga

SEQ ID NO: 827811 - RNA, 19 nt, Artificial Sequence
  Description of Artificial Sequence: Synthetic oligonucleotide
  Antisense strand to SEQ ID NO: 827810
ucugcuauuaaauugucac

SEQ ID NO: 827812 - RNA, 19 nt, Artificial Sequence
  Description of Artificial Sequence: Synthetic oligonucleotide
  Sense strand starting at position 506 of SEQ ID NO: 587914
uaagcugucggucaacaga

SEQ ID NO: 827813 - RNA, 19 nt, Artificial Sequence
  Description of Artificial Sequence: Synthetic oligonucleotide
  Antisense strand to SEQ ID NO: 827812
ucuguugaccgacagcuua

SEQ ID NO: 827814 - RNA, 19 nt, Artificial Sequence
  Description of Artificial Sequence: Synthetic oligonucleotide
  Sense strand starting at position 543 of SEQ ID NO: 587914
ugguguaucuaacucacua

SEQ ID NO: 827815 - RNA, 19 nt, Artificial Sequence
  Description of Artificial Sequence: Synthetic oligonucleotide
  Antisense strand to SEQ ID NO: 827814
uagugaguuagauacacca

SEQ ID NO: 827816 - RNA, 19 nt, Artificial Sequence
  Description of Artificial Sequence: Synthetic oligonucleotide
  Sense strand starting at position 617 of SEQ ID NO: 587914
agcuguuaccucugggaaa

SEQ ID NO: 827817 - RNA, 19 nt, Artificial Sequence
  Description of Artificial Sequence: Synthetic oligonucleotide
  Antisense strand to SEQ ID NO: 827816
uuucccagagguaacagcu

SEQ ID NO: 827818 - RNA, 19 nt, Artificial Sequence
  Description of Artificial Sequence: Synthetic oligonucleotide
  Sense strand starting at position 619 of SEQ ID NO: 587914
cuguuaccucugggaaagu

SEQ ID NO: 827819 - RNA, 19 nt, Artificial Sequence
  Description of Artificial Sequence: Synthetic oligonucleotide
  Antisense strand to SEQ ID NO: 827818
acuuucccagagguaacag

SEQ ID NO: 827820 - RNA, 19 nt, Artificial Sequence
  Description of Artificial Sequence: Synthetic oligonucleotide
  Sense strand starting at position 1210 of SEQ ID NO: 587914
gacucuaggccuugaucua

SEQ ID NO: 827821 - RNA, 19 nt, Artificial Sequence
  Description of Artificial Sequence: Synthetic oligonucleotide
  Antisense strand to SEQ ID NO: 827820
uagaucaaggccuagaguc

SEQ ID NO: 827822 - RNA, 19 nt, Artificial Sequence
  Description of Artificial Sequence: Synthetic oligonucleotide
  Sense strand starting at position 2207 of SEQ ID NO: 587914
ccugcagugcacuaauuaa

SEQ ID NO: 827823 - RNA, 19 nt, Artificial Sequence
  Description of Artificial Sequence: Synthetic oligonucleotide
  Antisense strand to SEQ ID NO: 827822
uuaauuagugcacugcagg

SEQ ID NO: 827824 - RNA, 19 nt, Artificial Sequence
  Description of Artificial Sequence: Synthetic oligonucleotide
  Sense strand starting at position 2246 of SEQ ID NO: 587914
ucuaguaacugccuuauga

SEQ ID NO: 827825 - RNA, 19 nt, Artificial Sequence
  Description of Artificial Sequence: Synthetic oligonucleotide
  Antisense strand to SEQ ID NO: 827824
ucauaaggcaguuacuaga

SEQ ID NO: 827826 - RNA, 19 nt, Artificial Sequence
  Description of Artificial Sequence: Synthetic oligonucleotide
  Sense strand starting at position 2254 of SEQ ID NO: 587914
cugccuuaugauuagcaga

SEQ ID NO: 827827 - RNA, 19 nt, Artificial Sequence
  Description of Artificial Sequence: Synthetic oligonucleotide
  Antisense strand to SEQ ID NO: 827826
ucugcuaaucauaaggcag

SEQ ID NO: 827828 - RNA, 19 nt, Artificial Sequence
  Description of Artificial Sequence: Synthetic oligonucleotide
  Sense strand starting at position 2259 of SEQ ID NO: 587914
uuaugauuagcagaguuau

SEQ ID NO: 827829 - RNA, 19 nt, Artificial Sequence
  Description of Artificial Sequence: Synthetic oligonucleotide
  Antisense strand to SEQ ID NO: 827828
auaacucugcuaaucauaa

SEQ ID NO: 827830 - RNA, 19 nt, Artificial Sequence
  Description of Artificial Sequence: Synthetic oligonucleotide
  Sense strand starting at position 2269 of SEQ ID NO: 587914
cagaguuauguuuggucag

SEQ ID NO: 827831 - RNA, 19 nt, Artificial Sequence
  Description of Artificial Sequence: Synthetic oligonucleotide
  Antisense strand to SEQ ID NO: 827830
cugaccaaacauaacucug

SEQ ID NO: 827832 - RNA, 19 nt, Artificial Sequence
  Description of Artificial Sequence: Synthetic oligonucleotide
  Sense strand starting at position 2340 of SEQ ID NO: 587914
gcaaccuugcuuucguauu

SEQ ID NO: 827833 - RNA, 19 nt, Artificial Sequence
  Description of Artificial Sequence: Synthetic oligonucleotide
  Antisense strand to SEQ ID NO: 827832
aauacgaaagcaagguugc

SEQ ID NO: 827834 - RNA, 19 nt, Artificial Sequence
  Description of Artificial Sequence: Synthetic oligonucleotide
  Sense strand starting at position 2409 of SEQ ID NO: 587914
auggaaauggcuuggguuu

SEQ ID NO: 827835 - RNA, 19 nt, Artificial Sequence
  Description of Artificial Sequence: Synthetic oligonucleotide
  Antisense strand to SEQ ID NO: 827834
aaacccaagccauuuccau

SEQ ID NO: 827836 - RNA, 19 nt, Artificial Sequence
  Description of Artificial Sequence: Synthetic oligonucleotide
  Sense strand starting at position 2423 of SEQ ID NO: 587914
gguuucucuugaucccuga

SEQ ID NO: 827837 - RNA, 19 nt, Artificial Sequence
  Description of Artificial Sequence: Synthetic oligonucleotide
  Antisense strand to SEQ ID NO: 827836
ucagggaucaagagaaacc

SEQ ID NO: 827838 - RNA, 19 nt, Artificial Sequence
  Description of Artificial Sequence: Synthetic oligonucleotide
  Sense strand starting at position 2427 of SEQ ID NO: 587914
ucucuugaucccugagaag

SEQ ID NO: 827839 - RNA, 19 nt, Artificial Sequence
  Description of Artificial Sequence: Synthetic oligonucleotide
  Antisense strand to SEQ ID NO: 827838
cuucucagggaucaagaga

SEQ ID NO: 827840 - RNA, 19 nt, Artificial Sequence
  Description of Artificial Sequence: Synthetic oligonucleotide
  Sense strand starting at position 2700 of SEQ ID NO: 587914
guaacucuuccagguaaac

SEQ ID NO: 827841 - RNA, 19 nt, Artificial Sequence
  Description of Artificial Sequence: Synthetic oligonucleotide
  Antisense strand to SEQ ID NO: 827840
guuuaccuggaagaguuac

SEQ ID NO: 827842 - RNA, 19 nt, Artificial Sequence
  Description of Artificial Sequence: Synthetic oligonucleotide
  Sense strand starting at position 2755 of SEQ ID NO: 587914
gguggaggaacuuguccaa

SEQ ID NO: 827843 - RNA, 19 nt, Artificial Sequence
  Description of Artificial Sequence: Synthetic oligonucleotide
  Antisense strand to SEQ ID NO: 827842
uuggacaaguuccuccacc

SEQ ID NO: 827844 - RNA, 19 nt, Artificial Sequence
  Description of Artificial Sequence: Synthetic oligonucleotide
  Sense strand starting at position 2758 of SEQ ID NO: 587914
ggaggaacuuguccaagcu

SEQ ID NO: 827845 - RNA, 19 nt, Artificial Sequence
  Description of Artificial Sequence: Synthetic oligonucleotide
  Antisense strand to SEQ ID NO: 827844
agcuuggacaaguuccucc

SEQ ID NO: 827846 - RNA, 19 nt, Artificial Sequence
  Description of Artificial Sequence: Synthetic oligonucleotide
  Sense strand starting at position 2958 of SEQ ID NO: 587914
gugccaggaccugacauau

SEQ ID NO: 827847 - RNA, 19 nt, Artificial Sequence
  Description of Artificial Sequence: Synthetic oligonucleotide
  Antisense strand to SEQ ID NO: 827846
auaugucagguccuggcac

SEQ ID NO: 827848 - RNA, 19 nt, Artificial Sequence
  Description of Artificial Sequence: Synthetic oligonucleotide
  Sense strand starting at position 3011 of SEQ ID NO: 587914
cuaggagccauugacaguu

SEQ ID NO: 827849 - RNA, 19 nt, Artificial Sequence
  Description of Artificial Sequence: Synthetic oligonucleotide
  Antisense strand to SEQ ID NO: 827848
aacugucaauggcuccuag

SEQ ID NO: 827850 - RNA, 19 nt, Artificial Sequence
  Description of Artificial Sequence: Synthetic oligonucleotide
  Sense strand starting at position 3078 of SEQ ID NO: 587914
agcaguaucauauaguagu

SEQ ID NO: 827851 - RNA, 19 nt, Artificial Sequence
  Description of Artificial Sequence: Synthetic oligonucleotide
  Antisense strand to SEQ ID NO: 827850
acuacuauaugauacugcu

SEQ ID NO: 827852 - RNA, 19 nt, Artificial Sequence
  Description of Artificial Sequence: Synthetic oligonucleotide
  Sense strand starting at position 3084 of SEQ ID NO: 587914
aucauauaguaguuaagag

SEQ ID NO: 827853 - RNA, 19 nt, Artificial Sequence
  Description of Artificial Sequence: Synthetic oligonucleotide
  Antisense strand to SEQ ID NO: 827852
cucuuaacuacuauaugau

SEQ ID NO: 827854 - RNA, 19 nt, Artificial Sequence
  Description of Artificial Sequence: Synthetic oligonucleotide
  Sense strand starting at position 3144 of SEQ ID NO: 587914
uugagaggccuugggcaaa

SEQ ID NO: 827855 - RNA, 19 nt, Artificial Sequence
  Description of Artificial Sequence: Synthetic oligonucleotide
  Antisense strand to SEQ ID NO: 827854
uuugcccaaggccucucaa

SEQ ID NO: 827856 - RNA, 19 nt, Artificial Sequence
  Description of Artificial Sequence: Synthetic oligonucleotide
  Sense strand starting at position 3456 of SEQ ID NO: 587914
agauuacaagugugaaauu

SEQ ID NO: 827857 - RNA, 19 nt, Artificial Sequence
  Description of Artificial Sequence: Synthetic oligonucleotide
  Antisense strand to SEQ ID NO: 827856
aauuucacacuuguaaucu

SEQ ID NO: 827858 - RNA, 19 nt, Artificial Sequence
  Description of Artificial Sequence: Synthetic oligonucleotide
  Sense strand starting at position 3467 of SEQ ID NO: 587914
gugaaauuagugcacucuu

SEQ ID NO: 827859 - RNA, 19 nt, Artificial Sequence
  Description of Artificial Sequence: Synthetic oligonucleotide
  Antisense strand to SEQ ID NO: 827858
aagagugcacuaauuucac

SEQ ID NO: 827860 - RNA, 19 nt, Artificial Sequence
  Description of Artificial Sequence: Synthetic oligonucleotide
  Sense strand starting at position 3551 of SEQ ID NO: 587914
ccaggauagaugggccuua

SEQ ID NO: 827861 - RNA, 19 nt, Artificial Sequence
  Description of Artificial Sequence: Synthetic oligonucleotide
  Antisense strand to SEQ ID NO: 827860
uaaggcccaucuauccugg

SEQ ID NO: 827862 - RNA, 19 nt, Artificial Sequence
  Description of Artificial Sequence: Synthetic oligonucleotide
  Sense strand starting at position 3556 of SEQ ID NO: 587914
auagaugggccuuagggua

SEQ ID NO: 827863 - RNA, 19 nt, Artificial Sequence
  Description of Artificial Sequence: Synthetic oligonucleotide
  Antisense strand to SEQ ID NO: 827862
uacccuaaggcccaucuau

SEQ ID NO: 827864 - RNA, 19 nt, Artificial Sequence
  Description of Artificial Sequence: Synthetic oligonucleotide
  Sense strand starting at position 3590 of SEQ ID NO: 587914
ggccaucucugaucuggaa

SEQ ID NO: 827865 - RNA, 19 nt, Artificial Sequence
  Description of Artificial Sequence: Synthetic oligonucleotide
  Antisense strand to SEQ ID NO: 827864
uuccagaucagagauggcc

SEQ ID NO: 827866 - RNA, 19 nt, Artificial Sequence
  Description of Artificial Sequence: Synthetic oligonucleotide
  Sense strand starting at position 3676 of SEQ ID NO: 587914
ucuggaaucuggucugauc

SEQ ID NO: 827867 - RNA, 19 nt, Artificial Sequence
  Description of Artificial Sequence: Synthetic oligonucleotide
  Antisense strand to SEQ ID NO: 827866
gaucagaccagauuccaga

SEQ ID NO: 827868 - RNA, 19 nt, Artificial Sequence
  Description of Artificial Sequence: Synthetic oligonucleotide
  Sense strand starting at position 3678 of SEQ ID NO: 587914
uggaaucuggucugaucuu

SEQ ID NO: 827869 - RNA, 19 nt, Artificial Sequence
  Description of Artificial Sequence: Synthetic oligonucleotide
  Antisense strand to SEQ ID NO: 827868
aagaucagaccagauucca

SEQ ID NO: 827870 - RNA, 19 nt, Artificial Sequence
  Description of Artificial Sequence: Synthetic oligonucleotide
  Sense strand starting at position 3737 of SEQ ID NO: 587914
cccagcuuuccuggaacuu

SEQ ID NO: 827871 - RNA, 19 nt, Artificial Sequence
  Description of Artificial Sequence: Synthetic oligonucleotide
  Antisense strand to SEQ ID NO: 827870
aaguuccaggaaagcuggg

SEQ ID NO: 827872 - RNA, 19 nt, Artificial Sequence
  Description of Artificial Sequence: Synthetic oligonucleotide
  Sense strand starting at position 3738 of SEQ ID NO: 587914
ccagcuuuccuggaacuuu

SEQ ID NO: 827873 - RNA, 19 nt, Artificial Sequence
  Description of Artificial Sequence: Synthetic oligonucleotide
  Antisense strand to SEQ ID NO: 827872
aaaguuccaggaaagcugg

SEQ ID NO: 827874 - RNA, 19 nt, Artificial Sequence
  Description of Artificial Sequence: Synthetic oligonucleotide
  Sense strand starting at position 3939 of SEQ ID NO: 587914
ucagucagugaacauuauu

SEQ ID NO: 827875 - RNA, 19 nt, Artificial Sequence
  Description of Artificial Sequence: Synthetic oligonucleotide
  Antisense strand to SEQ ID NO: 827874
aauaauguucacugacuga

SEQ ID NO: 827876 - RNA, 19 nt, Artificial Sequence
  Description of Artificial Sequence: Synthetic oligonucleotide
  Sense strand starting at position 108 of SEQ ID NO: 587915
cgguaauacaccugaaaga

SEQ ID NO: 827877 - RNA, 19 nt, Artificial Sequence
  Description of Artificial Sequence: Synthetic oligonucleotide
  Antisense strand to SEQ ID NO: 827876
ucuuucagguguauuaccg

SEQ ID NO: 827878 - RNA, 19 nt, Artificial Sequence
  Description of Artificial Sequence: Synthetic oligonucleotide
  Sense strand starting at position 121 of SEQ ID NO: 587915
gaaagagguuaugcgugua

SEQ ID NO: 827879 - RNA, 19 nt, Artificial Sequence
  Description of Artificial Sequence: Synthetic oligonucleotide
  Antisense strand to SEQ ID NO: 827878
uacacgcauaaccucuuuc

SEQ ID NO: 827880 - RNA, 19 nt, Artificial Sequence
  Description of Artificial Sequence: Synthetic oligonucleotide
  Sense strand starting at position 124 of SEQ ID NO: 587915
agagguuaugcguguauac

SEQ ID NO: 827881 - RNA, 19 nt, Artificial Sequence
  Description of Artificial Sequence: Synthetic oligonucleotide
  Antisense strand to SEQ ID NO: 827880
guauacacgcauaaccucu

SEQ ID NO: 827882 - RNA, 19 nt, Artificial Sequence
  Description of Artificial Sequence: Synthetic oligonucleotide
  Sense strand starting at position 126 of SEQ ID NO: 587915
agguuaugcguguauacgu

SEQ ID NO: 827883 - RNA, 19 nt, Artificial Sequence
  Description of Artificial Sequence: Synthetic oligonucleotide
  Antisense strand to SEQ ID NO: 827882
acguauacacgcauaaccu

SEQ ID NO: 827884 - RNA, 19 nt, Artificial Sequence
  Description of Artificial Sequence: Synthetic oligonucleotide
  Sense strand starting at position 131 of SEQ ID NO: 587915
augcguguauacgugauuu

SEQ ID NO: 827885 - RNA, 19 nt, Artificial Sequence
  Description of Artificial Sequence: Synthetic oligonucleotide
  Antisense strand to SEQ ID NO: 827884
aaaucacguauacacgcau

SEQ ID NO: 827886 - RNA, 19 nt, Artificial Sequence
  Description of Artificial Sequence: Synthetic oligonucleotide
  Sense strand starting at position 133 of SEQ ID NO: 587915
gcguguauacgugauuuau

SEQ ID NO: 827887 - RNA, 19 nt, Artificial Sequence
  Description of Artificial Sequence: Synthetic oligonucleotide
  Antisense strand to SEQ ID NO: 827886
auaaaucacguauacacgc

SEQ ID NO: 827888 - RNA, 19 nt, Artificial Sequence
  Description of Artificial Sequence: Synthetic oligonucleotide
  Sense strand starting at position 135 of SEQ ID NO: 587915
guguauacgugauuuauaa

SEQ ID NO: 827889 - RNA, 19 nt, Artificial Sequence
  Description of Artificial Sequence: Synthetic oligonucleotide
  Antisense strand to SEQ ID NO: 827888
uuauaaaucacguauacac

SEQ ID NO: 827890 - RNA, 19 nt, Artificial Sequence
  Description of Artificial Sequence: Synthetic oligonucleotide
  Sense strand starting at position 139 of SEQ ID NO: 587915
auacgugauuuauaaacug

SEQ ID NO: 827891 - RNA, 19 nt, Artificial Sequence
  Description of Artificial Sequence: Synthetic oligonucleotide
  Antisense strand to SEQ ID NO: 827890
caguuuauaaaucacguau

SEQ ID NO: 827892 - RNA, 19 nt, Artificial Sequence
  Description of Artificial Sequence: Synthetic oligonucleotide
  Sense strand starting at position 177 of SEQ ID NO: 587915
gcuaguugccauuaggaug

SEQ ID NO: 827893 - RNA, 19 nt, Artificial Sequence
  Description of Artificial Sequence: Synthetic oligonucleotide
  Antisense strand to SEQ ID NO: 827892
cauccuaauggcaacuagc

SEQ ID NO: 827894 - RNA, 19 nt, Artificial Sequence
  Description of Artificial Sequence: Synthetic oligonucleotide
  Sense strand starting at position 219 of SEQ ID NO: 587915
gacggaucugaauggugaa

SEQ ID NO: 827895 - RNA, 19 nt, Artificial Sequence
  Description of Artificial Sequence: Synthetic oligonucleotide
  Antisense strand to SEQ ID NO: 827894
uucaccauucagauccguc

SEQ ID NO: 827896 - RNA, 19 nt, Artificial Sequence
  Description of Artificial Sequence: Synthetic oligonucleotide
  Sense strand starting at position 415 of SEQ ID NO: 587915
caagguuugcacuaagucu

SEQ ID NO: 827897 - RNA, 19 nt, Artificial Sequence
  Description of Artificial Sequence: Synthetic oligonucleotide
  Antisense strand to SEQ ID NO: 827896
agacuuagugcaaaccuug

SEQ ID NO: 827898 - RNA, 19 nt, Artificial Sequence
  Description of Artificial Sequence: Synthetic oligonucleotide
  Sense strand starting at position 755 of SEQ ID NO: 587915
agagauugccuugggugga

SEQ ID NO: 827899 - RNA, 19 nt, Artificial Sequence
  Description of Artificial Sequence: Synthetic oligonucleotide
  Antisense strand to SEQ ID NO: 827898
uccacccaaggcaaucucu

SEQ ID NO: 827900 - RNA, 19 nt, Artificial Sequence
  Description of Artificial Sequence: Synthetic oligonucleotide
  Sense strand starting at position 1141 of SEQ ID NO: 587915
gugggcaucuccgugagaa

SEQ ID NO: 827901 - RNA, 19 nt, Artificial Sequence
  Description of Artificial Sequence: Synthetic oligonucleotide
  Antisense strand to SEQ ID NO: 827900
uucucacggagaugcccac

SEQ ID NO: 827902 - RNA, 19 nt, Artificial Sequence
  Description of Artificial Sequence: Synthetic oligonucleotide
  Sense strand starting at position 1142 of SEQ ID NO: 587915
ugggcaucuccgugagaaa

SEQ ID NO: 827903 - RNA, 19 nt, Artificial Sequence
  Description of Artificial Sequence: Synthetic oligonucleotide
  Antisense strand to SEQ ID NO: 827902
uuucucacggagaugccca

SEQ ID NO: 827904 - RNA, 19 nt, Artificial Sequence
  Description of Artificial Sequence: Synthetic oligonucleotide
  Sense strand starting at position 1143 of SEQ ID NO: 587915
gggcaucuccgugagaaag

SEQ ID NO: 827905 - RNA, 19 nt, Artificial Sequence
  Description of Artificial Sequence: Synthetic oligonucleotide
  Antisense strand to SEQ ID NO: 827904
cuuucucacggagaugccc

SEQ ID NO: 827906 - RNA, 19 nt, Artificial Sequence
  Description of Artificial Sequence: Synthetic oligonucleotide
  Sense strand starting at position 1584 of SEQ ID NO: 587915
gguccucugcuaggaguua

SEQ ID NO: 827907 - RNA, 19 nt, Artificial Sequence
  Description of Artificial Sequence: Synthetic oligonucleotide
  Antisense strand to SEQ ID NO: 827906
uaacuccuagcagaggacc

SEQ ID NO: 827908 - RNA, 19 nt, Artificial Sequence
  Description of Artificial Sequence: Synthetic oligonucleotide
  Sense strand starting at position 2450 of SEQ ID NO: 587915
ggaggcagcggucaaagau

SEQ ID NO: 827909 - RNA, 19 nt, Artificial Sequence
  Description of Artificial Sequence: Synthetic oligonucleotide
  Antisense strand to SEQ ID NO: 827908
aucuuugaccgcugccucc

SEQ ID NO: 827910 - RNA, 19 nt, Artificial Sequence
  Description of Artificial Sequence: Synthetic oligonucleotide
  Sense strand starting at position 2665 of SEQ ID NO: 587915
caaguugugucucuguuac

SEQ ID NO: 827911 - RNA, 19 nt, Artificial Sequence
  Description of Artificial Sequence: Synthetic oligonucleotide
  Antisense strand to SEQ ID NO: 827910
guaacagagacacaacuug

SEQ ID NO: 827912 - RNA, 19 nt, Artificial Sequence
  Description of Artificial Sequence: Synthetic oligonucleotide
  Sense strand starting at position 2667 of SEQ ID NO: 587915
aguugugucucuguuacag

SEQ ID NO: 827913 - RNA, 19 nt, Artificial Sequence
  Description of Artificial Sequence: Synthetic oligonucleotide
  Antisense strand to SEQ ID NO: 827912
cuguaacagagacacaacu

SEQ ID NO: 827914 - RNA, 19 nt, Artificial Sequence
  Description of Artificial Sequence: Synthetic oligonucleotide
  Sense strand starting at position 2823 of SEQ ID NO: 587915
augggucuucgccgaauca

SEQ ID NO: 827915 - RNA, 19 nt, Artificial Sequence
  Description of Artificial Sequence: Synthetic oligonucleotide
  Antisense strand to SEQ ID NO: 827914
ugauucggcgaagacccau

SEQ ID NO: 827916 - RNA, 19 nt, Artificial Sequence
  Description of Artificial Sequence: Synthetic oligonucleotide
  Sense strand starting at position 2932 of SEQ ID NO: 587915
ugcuuuggccaacacauau

SEQ ID NO: 827917 - RNA, 19 nt, Artificial Sequence
  Description of Artificial Sequence: Synthetic oligonucleotide
  Antisense strand to SEQ ID NO: 827916
auauguguuggccaaagca

SEQ ID NO: 827918 - RNA, 19 nt, Artificial Sequence
  Description of Artificial Sequence: Synthetic oligonucleotide
  Sense strand starting at position 3047 of SEQ ID NO: 587915
cucuuaguucguggccuau

SEQ ID NO: 827919 - RNA, 19 nt, Artificial Sequence
  Description of Artificial Sequence: Synthetic oligonucleotide
  Antisense strand to SEQ ID NO: 827918
auaggccacgaacuaagag

SEQ ID NO: 827920 - RNA, 19 nt, Artificial Sequence
  Description of Artificial Sequence: Synthetic oligonucleotide
  Sense strand starting at position 3187 of SEQ ID NO: 587915
gcgguuucuugggcugaag

SEQ ID NO: 827921 - RNA, 19 nt, Artificial Sequence
  Description of Artificial Sequence: Synthetic oligonucleotide
  Antisense strand to SEQ ID NO: 827920
cuucagcccaagaaaccgc

SEQ ID NO: 827922 - RNA, 19 nt, Artificial Sequence
  Description of Artificial Sequence: Synthetic oligonucleotide
  Sense strand starting at position 3207 of SEQ ID NO: 587915
guagaaagggugugucaga

SEQ ID NO: 827923 - RNA, 19 nt, Artificial Sequence
  Description of Artificial Sequence: Synthetic oligonucleotide
  Antisense strand to SEQ ID NO: 827922
ucugacacacccuuucuac

SEQ ID NO: 827924 - RNA, 19 nt, Artificial Sequence
  Description of Artificial Sequence: Synthetic oligonucleotide
  Sense strand starting at position 3246 of SEQ ID NO: 587915
aaauguaucagcugagggu

SEQ ID NO: 827925 - RNA, 19 nt, Artificial Sequence
  Description of Artificial Sequence: Synthetic oligonucleotide
  Antisense strand to SEQ ID NO: 827924
acccucagcugauacauuu

SEQ ID NO: 827926 - RNA, 19 nt, Artificial Sequence
  Description of Artificial Sequence: Synthetic oligonucleotide
  Sense strand starting at position 3667 of SEQ ID NO: 587915
ggucccagcuucuucuaaa

SEQ ID NO: 827927 - RNA, 19 nt, Artificial Sequence
  Description of Artificial Sequence: Synthetic oligonucleotide
  Antisense strand to SEQ ID NO: 827926
uuuagaagaagcugggacc

SEQ ID NO: 827928 - RNA, 19 nt, Artificial Sequence
  Description of Artificial Sequence: Synthetic oligonucleotide
  Sense strand starting at position 3668 of SEQ ID NO: 587915
gucccagcuucuucuaaag

SEQ ID NO: 827929 - RNA, 19 nt, Artificial Sequence
  Description of Artificial Sequence: Synthetic oligonucleotide
  Antisense strand to SEQ ID NO: 827928
cuuuagaagaagcugggac

SEQ ID NO: 827930 - RNA, 19 nt, Artificial Sequence
  Description of Artificial Sequence: Synthetic oligonucleotide
  Sense strand starting at position 3804 of SEQ ID NO: 587915
gccguuacucuggaagcaa

SEQ ID NO: 827931 - RNA, 19 nt, Artificial Sequence
  Description of Artificial Sequence: Synthetic oligonucleotide
  Antisense strand to SEQ ID NO: 827930
uugcuuccagaguaacggc

SEQ ID NO: 827932 - RNA, 19 nt, Artificial Sequence
  Description of Artificial Sequence: Synthetic oligonucleotide
  Sense strand starting at position 3819 of SEQ ID NO: 587915
gcaagauuaaacuguggaa

SEQ ID NO: 827933 - RNA, 19 nt, Artificial Sequence
  Description of Artificial Sequence: Synthetic oligonucleotide
  Antisense strand to SEQ ID NO: 827932
uuccacaguuuaaucuugc

SEQ ID NO: 827934 - RNA, 19 nt, Artificial Sequence
  Description of Artificial Sequence: Synthetic oligonucleotide
  Sense strand starting at position 3821 of SEQ ID NO: 587915
aagauuaaacuguggaagu

SEQ ID NO: 827935 - RNA, 19 nt, Artificial Sequence
  Description of Artificial Sequence: Synthetic oligonucleotide
  Antisense strand to SEQ ID NO: 827934
acuuccacaguuuaaucuu

SEQ ID NO: 827936 - RNA, 19 nt, Artificial Sequence
  Description of Artificial Sequence: Synthetic oligonucleotide
  Sense strand starting at position 3823 of SEQ ID NO: 587915
gauuaaacuguggaagugu

SEQ ID NO: 827937 - RNA, 19 nt, Artificial Sequence
  Description of Artificial Sequence: Synthetic oligonucleotide
  Antisense strand to SEQ ID NO: 827936
acacuuccacaguuuaauc

SEQ ID NO: 827938 - RNA, 19 nt, Artificial Sequence
  Description of Artificial Sequence: Synthetic oligonucleotide
  Sense strand starting at position 3834 of SEQ ID NO: 587915
ggaagugugugagcuccaa

SEQ ID NO: 827939 - RNA, 19 nt, Artificial Sequence
  Description of Artificial Sequence: Synthetic oligonucleotide
  Antisense strand to SEQ ID NO: 827938
uuggagcucacacacuucc

SEQ ID NO: 827940 - RNA, 19 nt, Artificial Sequence
  Description of Artificial Sequence: Synthetic oligonucleotide
  Sense strand starting at position 3838 of SEQ ID NO: 587915
gugugugagcuccaagcuu

SEQ ID NO: 827941 - RNA, 19 nt, Artificial Sequence
  Description of Artificial Sequence: Synthetic oligonucleotide
  Antisense strand to SEQ ID NO: 827940
aagcuuggagcucacacac

SEQ ID NO: 827942 - RNA, 19 nt, Artificial Sequence
  Description of Artificial Sequence: Synthetic oligonucleotide
  Sense strand starting at position 3871 of SEQ ID NO: 587915
cuguuuaguggauguguaa

SEQ ID NO: 827943 - RNA, 19 nt, Artificial Sequence
  Description of Artificial Sequence: Synthetic oligonucleotide
  Antisense strand to SEQ ID NO: 827942
uuacacauccacuaaacag

SEQ ID NO: 827944 - RNA, 19 nt, Artificial Sequence
  Description of Artificial Sequence: Synthetic oligonucleotide
  Sense strand starting at position 3878 of SEQ ID NO: 587915
guggauguguaaccuuuga

SEQ ID NO: 827945 - RNA, 19 nt, Artificial Sequence
  Description of Artificial Sequence: Synthetic oligonucleotide
  Antisense strand to SEQ ID NO: 827944
ucaaagguuacacauccac

SEQ ID NO: 827946 - RNA, 19 nt, Artificial Sequence
  Description of Artificial Sequence: Synthetic oligonucleotide
  Sense strand starting at position 3882 of SEQ ID NO: 587915
auguguaaccuuugaacaa

SEQ ID NO: 827947 - RNA, 19 nt, Artificial Sequence
  Description of Artificial Sequence: Synthetic oligonucleotide
  Antisense strand to SEQ ID NO: 827946
uuguucaaagguuacacau

SEQ ID NO: 827948 - RNA, 19 nt, Artificial Sequence
  Description of Artificial Sequence: Synthetic oligonucleotide
  Sense strand starting at position 3883 of SEQ ID NO: 587915
uguguaaccuuugaacaag

SEQ ID NO: 827949 - RNA, 19 nt, Artificial Sequence
  Description of Artificial Sequence: Synthetic oligonucleotide
  Antisense strand to SEQ ID NO: 827948
cuuguucaaagguuacaca

SEQ ID NO: 827950 - RNA, 19 nt, Artificial Sequence
  Description of Artificial Sequence: Synthetic oligonucleotide
  Sense strand starting at position 3886 of SEQ ID NO: 587915
guaaccuuugaacaaguua

SEQ ID NO: 827951 - RNA, 19 nt, Artificial Sequence
  Description of Artificial Sequence: Synthetic oligonucleotide
  Antisense strand to SEQ ID NO: 827950
uaacuuguucaaagguuac

SEQ ID NO: 827952 - RNA, 19 nt, Artificial Sequence
  Description of Artificial Sequence: Synthetic oligonucleotide
  Sense strand starting at position 3942 of SEQ ID NO: 587915
uagaaaugauuuggugaga

SEQ ID NO: 827953 - RNA, 19 nt, Artificial Sequence
  Description of Artificial Sequence: Synthetic oligonucleotide
  Antisense strand to SEQ ID NO: 827952
ucucaccaaaucauuucua

SEQ ID NO: 827954 - RNA, 19 nt, Artificial Sequence
  Description of Artificial Sequence: Synthetic oligonucleotide
  Sense strand starting at position 3947 of SEQ ID NO: 587915
augauuuggugagagaaca

SEQ ID NO: 827955 - RNA, 19 nt, Artificial Sequence
  Description of Artificial Sequence: Synthetic oligonucleotide
  Antisense strand to SEQ ID NO: 827954
uguucucucaccaaaucau

SEQ ID NO: 827956 - RNA, 19 nt, Artificial Sequence
  Description of Artificial Sequence: Synthetic oligonucleotide
  Sense strand starting at position 28 of SEQ ID NO: 587916
ggcaaaugugcacgcacau

SEQ ID NO: 827957 - RNA, 19 nt, Artificial Sequence
  Description of Artificial Sequence: Synthetic oligonucleotide
  Antisense strand to SEQ ID NO: 827956
augugcgugcacauuugcc

SEQ ID NO: 827958 - RNA, 19 nt, Artificial Sequence
  Description of Artificial Sequence: Synthetic oligonucleotide
  Sense strand starting at position 443 of SEQ ID NO: 587916
cgggaggagcuguguguau

SEQ ID NO: 827959 - RNA, 19 nt, Artificial Sequence
  Description of Artificial Sequence: Synthetic oligonucleotide
  Antisense strand to SEQ ID NO: 827958
auacacacagcuccucccg

SEQ ID NO: 827960 - RNA, 19 nt, Artificial Sequence
  Description of Artificial Sequence: Synthetic oligonucleotide
  Sense strand starting at position 445 of SEQ ID NO: 587916
ggaggagcuguguguaugu

SEQ ID NO: 827961 - RNA, 19 nt, Artificial Sequence
  Description of Artificial Sequence: Synthetic oligonucleotide
  Antisense strand to SEQ ID NO: 827960
acauacacacagcuccucc

SEQ ID NO: 827962 - RNA, 19 nt, Artificial Sequence
  Description of Artificial Sequence: Synthetic oligonucleotide
  Sense strand starting at position 468 of SEQ ID NO: 587916
guuggaaucugggugcaga

SEQ ID NO: 827963 - RNA, 19 nt, Artificial Sequence
  Description of Artificial Sequence: Synthetic oligonucleotide
  Antisense strand to SEQ ID NO: 827962
ucugcacccagauuccaac

SEQ ID NO: 827964 - RNA, 19 nt, Artificial Sequence
  Description of Artificial Sequence: Synthetic oligonucleotide
  Sense strand starting at position 479 of SEQ ID NO: 587916
ggugcagagcugcgaauau

SEQ ID NO: 827965 - RNA, 19 nt, Artificial Sequence
  Description of Artificial Sequence: Synthetic oligonucleotide
  Antisense strand to SEQ ID NO: 827964
auauucgcagcucugcacc

SEQ ID NO: 827966 - RNA, 19 nt, Artificial Sequence
  Description of Artificial Sequence: Synthetic oligonucleotide
  Sense strand starting at position 583 of SEQ ID NO: 587916
ggugcagucaugugagcag

SEQ ID NO: 827967 - RNA, 19 nt, Artificial Sequence
  Description of Artificial Sequence: Synthetic oligonucleotide
  Antisense strand to SEQ ID NO: 827966
cugcucacaugacugcacc

SEQ ID NO: 827968 - RNA, 19 nt, Artificial Sequence
  Description of Artificial Sequence: Synthetic oligonucleotide
  Sense strand starting at position 590 of SEQ ID NO: 587916
ucaugugagcaguggaaga

SEQ ID NO: 827969 - RNA, 19 nt, Artificial Sequence
  Description of Artificial Sequence: Synthetic oligonucleotide
  Antisense strand to SEQ ID NO: 827968
ucuuccacugcucacauga

SEQ ID NO: 827970 - RNA, 19 nt, Artificial Sequence
  Description of Artificial Sequence: Synthetic oligonucleotide
  Sense strand starting at position 633 of SEQ ID NO: 587916
guagaauaaggcugggaug

SEQ ID NO: 827971 - RNA, 19 nt, Artificial Sequence
  Description of Artificial Sequence: Synthetic oligonucleotide
  Antisense strand to SEQ ID NO: 827970
caucccagccuuauucuac

SEQ ID NO: 827972 - RNA, 19 nt, Artificial Sequence
  Description of Artificial Sequence: Synthetic oligonucleotide
  Sense strand starting at position 636 of SEQ ID NO: 587916
gaauaaggcugggaugacu

SEQ ID NO: 827973 - RNA, 19 nt, Artificial Sequence
  Description of Artificial Sequence: Synthetic oligonucleotide
  Antisense strand to SEQ ID NO: 827972
agucaucccagccuuauuc

SEQ ID NO: 827974 - RNA, 19 nt, Artificial Sequence
  Description of Artificial Sequence: Synthetic oligonucleotide
  Sense strand starting at position 717 of SEQ ID NO: 587916
ccuugucucugguuugagu

SEQ ID NO: 827975 - RNA, 19 nt, Artificial Sequence
  Description of Artificial Sequence: Synthetic oligonucleotide
  Antisense strand to SEQ ID NO: 827974
acucaaaccagagacaagg

SEQ ID NO: 827976 - RNA, 19 nt, Artificial Sequence
  Description of Artificial Sequence: Synthetic oligonucleotide
  Sense strand starting at position 719 of SEQ ID NO: 587916
uugucucugguuugaguuu

SEQ ID NO: 827977 - RNA, 19 nt, Artificial Sequence
  Description of Artificial Sequence: Synthetic oligonucleotide
  Antisense strand to SEQ ID NO: 827976
aaacucaaaccagagacaa

SEQ ID NO: 827978 - RNA, 19 nt, Artificial Sequence
  Description of Artificial Sequence: Synthetic oligonucleotide
  Sense strand starting at position 1085 of SEQ ID NO: 587916
ccucgugcucggugagaac

SEQ ID NO: 827979 - RNA, 19 nt, Artificial Sequence
  Description of Artificial Sequence: Synthetic oligonucleotide
  Antisense strand to SEQ ID NO: 827978
guucucaccgagcacgagg

SEQ ID NO: 827980 - RNA, 19 nt, Artificial Sequence
  Description of Artificial Sequence: Synthetic oligonucleotide
  Sense strand starting at position 1101 of SEQ ID NO: 587916
aacugcucucuuggaggau

SEQ ID NO: 827981 - RNA, 19 nt, Artificial Sequence
  Description of Artificial Sequence: Synthetic oligonucleotide
  Antisense strand to SEQ ID NO: 827980
auccuccaagagagcaguu

SEQ ID NO: 827982 - RNA, 19 nt, Artificial Sequence
  Description of Artificial Sequence: Synthetic oligonucleotide
  Sense strand starting at position 1500 of SEQ ID NO: 587916
cuaagagcuuucccaggua

SEQ ID NO: 827983 - RNA, 19 nt, Artificial Sequence
  Description of Artificial Sequence: Synthetic oligonucleotide
  Antisense strand to SEQ ID NO: 827982
uaccugggaaagcucuuag

SEQ ID NO: 827984 - RNA, 19 nt, Artificial Sequence
  Description of Artificial Sequence: Synthetic oligonucleotide
  Sense strand starting at position 1593 of SEQ ID NO: 587916
ggagguacuucccagaguu

SEQ ID NO: 827985 - RNA, 19 nt, Artificial Sequence
  Description of Artificial Sequence: Synthetic oligonucleotide
  Antisense strand to SEQ ID NO: 827984
aacucugggaaguaccucc

SEQ ID NO: 827986 - RNA, 19 nt, Artificial Sequence
  Description of Artificial Sequence: Synthetic oligonucleotide
  Sense strand starting at position 2212 of SEQ ID NO: 587916
cagaguuuccagcgacauu

SEQ ID NO: 827987 - RNA, 19 nt, Artificial Sequence
  Description of Artificial Sequence: Synthetic oligonucleotide
  Antisense strand to SEQ ID NO: 827986
aaugucgcuggaaacucug

SEQ ID NO: 827988 - RNA, 19 nt, Artificial Sequence
  Description of Artificial Sequence: Synthetic oligonucleotide
  Sense strand starting at position 2464 of SEQ ID NO: 587916
gccggucgugugcaaacaa

SEQ ID NO: 827989 - RNA, 19 nt, Artificial Sequence
  Description of Artificial Sequence: Synthetic oligonucleotide
  Antisense strand to SEQ ID NO: 827988
uuguuugcacacgaccggc

SEQ ID NO: 827990 - RNA, 19 nt, Artificial Sequence
  Description of Artificial Sequence: Synthetic oligonucleotide
  Sense strand starting at position 2624 of SEQ ID NO: 587916
uuaggagggucuugguguu

SEQ ID NO: 827991 - RNA, 19 nt, Artificial Sequence
  Description of Artificial Sequence: Synthetic oligonucleotide
  Antisense strand to SEQ ID NO: 827990
aacaccaagacccuccuaa

SEQ ID NO: 827992 - RNA, 19 nt, Artificial Sequence
  Description of Artificial Sequence: Synthetic oligonucleotide
  Sense strand starting at position 2630 of SEQ ID NO: 587916
gggucuugguguucccaga

SEQ ID NO: 827993 - RNA, 19 nt, Artificial Sequence
  Description of Artificial Sequence: Synthetic oligonucleotide
  Antisense strand to SEQ ID NO: 827992
ucugggaacaccaagaccc

SEQ ID NO: 827994 - RNA, 19 nt, Artificial Sequence
  Description of Artificial Sequence: Synthetic oligonucleotide
  Sense strand starting at position 2800 of SEQ ID NO: 587916
gggaaugcuuaaggaacau

SEQ ID NO: 827995 - RNA, 19 nt, Artificial Sequence
  Description of Artificial Sequence: Synthetic oligonucleotide
  Antisense strand to SEQ ID NO: 827994
auguuccuuaagcauuccc

SEQ ID NO: 827996 - RNA, 19 nt, Artificial Sequence
  Description of Artificial Sequence: Synthetic oligonucleotide
  Sense strand starting at position 2828 of SEQ ID NO: 587916
guggaaacacucuggaauc

SEQ ID NO: 827997 - RNA, 19 nt, Artificial Sequence
  Description of Artificial Sequence: Synthetic oligonucleotide
  Antisense strand to SEQ ID NO: 827996
gauuccagaguguuuccac

SEQ ID NO: 827998 - RNA, 19 nt, Artificial Sequence
  Description of Artificial Sequence: Synthetic oligonucleotide
  Sense strand starting at position 2928 of SEQ ID NO: 587916
acgagcugggagugaucaa

SEQ ID NO: 827999 - RNA, 19 nt, Artificial Sequence
  Description of Artificial Sequence: Synthetic oligonucleotide
  Antisense strand to SEQ ID NO: 827998
uugaucacucccagcucgu

SEQ ID NO: 828000 - RNA, 19 nt, Artificial Sequence
  Description of Artificial Sequence: Synthetic oligonucleotide
  Sense strand starting at position 2929 of SEQ ID NO: 587916
cgagcugggagugaucaau

SEQ ID NO: 828001 - RNA, 19 nt, Artificial Sequence
  Description of Artificial Sequence: Synthetic oligonucleotide
  Antisense strand to SEQ ID NO: 828000
auugaucacucccagcucg

SEQ ID NO: 828002 - RNA, 19 nt, Artificial Sequence
  Description of Artificial Sequence: Synthetic oligonucleotide
  Sense strand starting at position 2935 of SEQ ID NO: 587916
gggagugaucaaugcuaaa

SEQ ID NO: 828003 - RNA, 19 nt, Artificial Sequence
  Description of Artificial Sequence: Synthetic oligonucleotide
  Antisense strand to SEQ ID NO: 828002
uuuagcauugaucacuccc

SEQ ID NO: 828004 - RNA, 19 nt, Artificial Sequence
  Description of Artificial Sequence: Synthetic oligonucleotide
  Sense strand starting at position 2938 of SEQ ID NO: 587916
agugaucaaugcuaaauua

SEQ ID NO: 828005 - RNA, 19 nt, Artificial Sequence
  Description of Artificial Sequence: Synthetic oligonucleotide
  Antisense strand to SEQ ID NO: 828004
uaauuuagcauugaucacu

SEQ ID NO: 828006 - RNA, 19 nt, Artificial Sequence
  Description of Artificial Sequence: Synthetic oligonucleotide
  Sense strand starting at position 2980 of SEQ ID NO: 587916
auuccuacugggugucaga

SEQ ID NO: 828007 - RNA, 19 nt, Artificial Sequence
  Description of Artificial Sequence: Synthetic oligonucleotide
  Antisense strand to SEQ ID NO: 828006
ucugacacccaguaggaau

SEQ ID NO: 828008 - RNA, 19 nt, Artificial Sequence
  Description of Artificial Sequence: Synthetic oligonucleotide
  Sense strand starting at position 3052 of SEQ ID NO: 587916
acucaaaguuuggaaagaa

SEQ ID NO: 828009 - RNA, 19 nt, Artificial Sequence
  Description of Artificial Sequence: Synthetic oligonucleotide
  Antisense strand to SEQ ID NO: 828008
uucuuuccaaacuuugagu

SEQ ID NO: 828010 - RNA, 19 nt, Artificial Sequence
  Description of Artificial Sequence: Synthetic oligonucleotide
  Sense strand starting at position 3112 of SEQ ID NO: 587916
ccauuacugcuuuagucuu

SEQ ID NO: 828011 - RNA, 19 nt, Artificial Sequence
  Description of Artificial Sequence: Synthetic oligonucleotide
  Antisense strand to SEQ ID NO: 828010
aagacuaaagcaguaaugg

SEQ ID NO: 828012 - RNA, 19 nt, Artificial Sequence
  Description of Artificial Sequence: Synthetic oligonucleotide
  Sense strand starting at position 3171 of SEQ ID NO: 587916
cuugaaacaucacauguga

SEQ ID NO: 828013 - RNA, 19 nt, Artificial Sequence
  Description of Artificial Sequence: Synthetic oligonucleotide
  Antisense strand to SEQ ID NO: 828012
ucacaugugauguuucaag

SEQ ID NO: 828014 - RNA, 19 nt, Artificial Sequence
  Description of Artificial Sequence: Synthetic oligonucleotide
  Sense strand starting at position 3185 of SEQ ID NO: 587916
ugugaaagcuggaggagau

SEQ ID NO: 828015 - RNA, 19 nt, Artificial Sequence
  Description of Artificial Sequence: Synthetic oligonucleotide
  Antisense strand to SEQ ID NO: 828014
aucuccuccagcuuucaca

SEQ ID NO: 828016 - RNA, 19 nt, Artificial Sequence
  Description of Artificial Sequence: Synthetic oligonucleotide
  Sense strand starting at position 3197 of SEQ ID NO: 587916
aggagauguuuggguugag

SEQ ID NO: 828017 - RNA, 19 nt, Artificial Sequence
  Description of Artificial Sequence: Synthetic oligonucleotide
  Antisense strand to SEQ ID NO: 828016
cucaacccaaacaucuccu

SEQ ID NO: 828018 - RNA, 19 nt, Artificial Sequence
  Description of Artificial Sequence: Synthetic oligonucleotide
  Sense strand starting at position 3198 of SEQ ID NO: 587916
ggagauguuuggguugaga

SEQ ID NO: 828019 - RNA, 19 nt, Artificial Sequence
  Description of Artificial Sequence: Synthetic oligonucleotide
  Antisense strand to SEQ ID NO: 828018
ucucaacccaaacaucucc

SEQ ID NO: 828020 - RNA, 19 nt, Artificial Sequence
  Description of Artificial Sequence: Synthetic oligonucleotide
  Sense strand starting at position 3200 of SEQ ID NO: 587916
agauguuuggguugagaag

SEQ ID NO: 828021 - RNA, 19 nt, Artificial Sequence
  Description of Artificial Sequence: Synthetic oligonucleotide
  Antisense strand to SEQ ID NO: 828020
cuucucaacccaaacaucu

SEQ ID NO: 828022 - RNA, 19 nt, Artificial Sequence
  Description of Artificial Sequence: Synthetic oligonucleotide
  Sense strand starting at position 3364 of SEQ ID NO: 587916
gguucugagucugccaguu

SEQ ID NO: 828023 - RNA, 19 nt, Artificial Sequence
  Description of Artificial Sequence: Synthetic oligonucleotide
  Antisense strand to SEQ ID NO: 828022
aacuggcagacucagaacc

SEQ ID NO: 828024 - RNA, 19 nt, Artificial Sequence
  Description of Artificial Sequence: Synthetic oligonucleotide
  Sense strand starting at position 3440 of SEQ ID NO: 587916
cuugaagacuccuuccaag

SEQ ID NO: 828025 - RNA, 19 nt, Artificial Sequence
  Description of Artificial Sequence: Synthetic oligonucleotide
  Antisense strand to SEQ ID NO: 828024
cuuggaaggagucuucaag

SEQ ID NO: 828026 - RNA, 19 nt, Artificial Sequence
  Description of Artificial Sequence: Synthetic oligonucleotide
  Sense strand starting at position 3541 of SEQ ID NO: 587916
ugggacacuucuugaggga

SEQ ID NO: 828027 - RNA, 19 nt, Artificial Sequence
  Description of Artificial Sequence: Synthetic oligonucleotide
  Antisense strand to SEQ ID NO: 828026
ucccucaagaaguguccca

SEQ ID NO: 828028 - RNA, 19 nt, Artificial Sequence
  Description of Artificial Sequence: Synthetic oligonucleotide
  Sense strand starting at position 3624 of SEQ ID NO: 587916
uucccucccucagggauaa

SEQ ID NO: 828029 - RNA, 19 nt, Artificial Sequence
  Description of Artificial Sequence: Synthetic oligonucleotide
  Antisense strand to SEQ ID NO: 828028
uuaucccugagggagggaa

SEQ ID NO: 828030 - RNA, 19 nt, Artificial Sequence
  Description of Artificial Sequence: Synthetic oligonucleotide
  Sense strand starting at position 3625 of SEQ ID NO: 587916
ucccucccucagggauaaa

SEQ ID NO: 828031 - RNA, 19 nt, Artificial Sequence
  Description of Artificial Sequence: Synthetic oligonucleotide
  Antisense strand to SEQ ID NO: 828030
uuuaucccugagggaggga

SEQ ID NO: 828032 - RNA, 19 nt, Artificial Sequence
  Description of Artificial Sequence: Synthetic oligonucleotide
  Sense strand starting at position 3800 of SEQ ID NO: 587916
gcagcaagcuucucuuauu

SEQ ID NO: 828033 - RNA, 19 nt, Artificial Sequence
  Description of Artificial Sequence: Synthetic oligonucleotide
  Antisense strand to SEQ ID NO: 828032
aauaagagaagcuugcugc

SEQ ID NO: 828034 - RNA, 19 nt, Artificial Sequence
  Description of Artificial Sequence: Synthetic oligonucleotide
  Sense strand starting at position 3968 of SEQ ID NO: 587916
ggaaucgggcguugaguaa

SEQ ID NO: 828035 - RNA, 19 nt, Artificial Sequence
  Description of Artificial Sequence: Synthetic oligonucleotide
  Antisense strand to SEQ ID NO: 828034
uuacucaacgcccgauucc

SEQ ID NO: 828036 - RNA, 19 nt, Artificial Sequence
  Description of Artificial Sequence: Synthetic oligonucleotide
  Sense strand starting at position 1422 of SEQ ID NO: 587917
gguuuaagaaaucggccua

SEQ ID NO: 828037 - RNA, 19 nt, Artificial Sequence
  Description of Artificial Sequence: Synthetic oligonucleotide
  Antisense strand to SEQ ID NO: 828036
uaggccgauuucuuaaacc

SEQ ID NO: 828038 - RNA, 19 nt, Artificial Sequence
  Description of Artificial Sequence: Synthetic oligonucleotide
  Sense strand starting at position 1427 of SEQ ID NO: 587917
aagaaaucggccuagcgau

SEQ ID NO: 828039 - RNA, 19 nt, Artificial Sequence
  Description of Artificial Sequence: Synthetic oligonucleotide
  Antisense strand to SEQ ID NO: 828038
aucgcuaggccgauuucuu

SEQ ID NO: 828040 - RNA, 19 nt, Artificial Sequence
  Description of Artificial Sequence: Synthetic oligonucleotide
  Sense strand starting at position 2264 of SEQ ID NO: 587917
ggcugauuguaccuuggaa

SEQ ID NO: 828041 - RNA, 19 nt, Artificial Sequence
  Description of Artificial Sequence: Synthetic oligonucleotide
  Antisense strand to SEQ ID NO: 828040
uuccaagguacaaucagcc

SEQ ID NO: 828042 - RNA, 19 nt, Artificial Sequence
  Description of Artificial Sequence: Synthetic oligonucleotide
  Sense strand starting at position 2266 of SEQ ID NO: 587917
cugauuguaccuuggaauc

SEQ ID NO: 828043 - RNA, 19 nt, Artificial Sequence
  Description of Artificial Sequence: Synthetic oligonucleotide
  Antisense strand to SEQ ID NO: 828042
gauuccaagguacaaucag

SEQ ID NO: 828044 - RNA, 19 nt, Artificial Sequence
  Description of Artificial Sequence: Synthetic oligonucleotide
  Sense strand starting at position 2272 of SEQ ID NO: 587917
guaccuuggaaucgacgua

SEQ ID NO: 828045 - RNA, 19 nt, Artificial Sequence
  Description of Artificial Sequence: Synthetic oligonucleotide
  Antisense strand to SEQ ID NO: 828044
uacgucgauuccaagguac

SEQ ID NO: 828046 - RNA, 19 nt, Artificial Sequence
  Description of Artificial Sequence: Synthetic oligonucleotide
  Sense strand starting at position 2300 of SEQ ID NO: 587917
ggucguuuagaugaacaua

SEQ ID NO: 828047 - RNA, 19 nt, Artificial Sequence
  Description of Artificial Sequence: Synthetic oligonucleotide
  Antisense strand to SEQ ID NO: 828046
uauguucaucuaaacgacc

SEQ ID NO: 828048 - RNA, 19 nt, Artificial Sequence
  Description of Artificial Sequence: Synthetic oligonucleotide
  Sense strand starting at position 2446 of SEQ ID NO: 587917
gaaagacaccguugauaau

SEQ ID NO: 828049 - RNA, 19 nt, Artificial Sequence
  Description of Artificial Sequence: Synthetic oligonucleotide
  Antisense strand to SEQ ID NO: 828048
auuaucaacggugucuuuc

SEQ ID NO: 828050 - RNA, 19 nt, Artificial Sequence
  Description of Artificial Sequence: Synthetic oligonucleotide
  Sense strand starting at position 2494 of SEQ ID NO: 587917
acucaacuugccuguguua

SEQ ID NO: 828051 - RNA, 19 nt, Artificial Sequence
  Description of Artificial Sequence: Synthetic oligonucleotide
  Antisense strand to SEQ ID NO: 828050
uaacacaggcaaguugagu

SEQ ID NO: 828052 - RNA, 19 nt, Artificial Sequence
  Description of Artificial Sequence: Synthetic oligonucleotide
  Sense strand starting at position 2496 of SEQ ID NO: 587917
ucaacuugccuguguuaua

SEQ ID NO: 828053 - RNA, 19 nt, Artificial Sequence
  Description of Artificial Sequence: Synthetic oligonucleotide
  Antisense strand to SEQ ID NO: 828052
uauaacacaggcaaguuga

SEQ ID NO: 828054 - RNA, 19 nt, Artificial Sequence
  Description of Artificial Sequence: Synthetic oligonucleotide
  Sense strand starting at position 2557 of SEQ ID NO: 587917
aagauuaaauauggaacga

SEQ ID NO: 828055 - RNA, 19 nt, Artificial Sequence
  Description of Artificial Sequence: Synthetic oligonucleotide
  Antisense strand to SEQ ID NO: 828054
ucguuccauauuuaaucuu

SEQ ID NO: 828056 - RNA, 19 nt, Artificial Sequence
  Description of Artificial Sequence: Synthetic oligonucleotide
  Sense strand starting at position 2574 of SEQ ID NO: 587917
gacguucuguauccaauau

SEQ ID NO: 828057 - RNA, 19 nt, Artificial Sequence
  Description of Artificial Sequence: Synthetic oligonucleotide
  Antisense strand to SEQ ID NO: 828056
auauuggauacagaacguc

SEQ ID NO: 828058 - RNA, 19 nt, Artificial Sequence
  Description of Artificial Sequence: Synthetic oligonucleotide
  Sense strand starting at position 2613 of SEQ ID NO: 587917
agcauuuacucaugacaag

SEQ ID NO: 828059 - RNA, 19 nt, Artificial Sequence
  Description of Artificial Sequence: Synthetic oligonucleotide
  Antisense strand to SEQ ID NO: 828058
cuugucaugaguaaaugcu

SEQ ID NO: 828060 - RNA, 19 nt, Artificial Sequence
  Description of Artificial Sequence: Synthetic oligonucleotide
  Sense strand starting at position 2727 of SEQ ID NO: 587917
cucguauguguucaguaac

SEQ ID NO: 828061 - RNA, 19 nt, Artificial Sequence
  Description of Artificial Sequence: Synthetic oligonucleotide
  Antisense strand to SEQ ID NO: 828060
guuacugaacacauacgag

SEQ ID NO: 828062 - RNA, 19 nt, Artificial Sequence
  Description of Artificial Sequence: Synthetic oligonucleotide
  Sense strand starting at position 2730 of SEQ ID NO: 587917
guauguguucaguaacagg

SEQ ID NO: 828063 - RNA, 19 nt, Artificial Sequence
  Description of Artificial Sequence: Synthetic oligonucleotide
  Antisense strand to SEQ ID NO: 828062
ccuguuacugaacacauac

SEQ ID NO: 828064 - RNA, 19 nt, Artificial Sequence
  Description of Artificial Sequence: Synthetic oligonucleotide
  Sense strand starting at position 2744 of SEQ ID NO: 587917
acaggugagccuuaauacu

SEQ ID NO: 828065 - RNA, 19 nt, Artificial Sequence
  Description of Artificial Sequence: Synthetic oligonucleotide
  Antisense strand to SEQ ID NO: 828064
aguauuaaggcucaccugu

SEQ ID NO: 828066 - RNA, 19 nt, Artificial Sequence
  Description of Artificial Sequence: Synthetic oligonucleotide
  Sense strand starting at position 2858 of SEQ ID NO: 587917
gguucuuacagucaguuua

SEQ ID NO: 828067 - RNA, 19 nt, Artificial Sequence
  Description of Artificial Sequence: Synthetic oligonucleotide
  Antisense strand to SEQ ID NO: 828066
uaaacugacuguaagaacc

SEQ ID NO: 828068 - RNA, 19 nt, Artificial Sequence
  Description of Artificial Sequence: Synthetic oligonucleotide
  Sense strand starting at position 2860 of SEQ ID NO: 587917
uucuuacagucaguuuaaa

SEQ ID NO: 828069 - RNA, 19 nt, Artificial Sequence
  Description of Artificial Sequence: Synthetic oligonucleotide
  Antisense strand to SEQ ID NO: 828068
uuuaaacugacuguaagaa

SEQ ID NO: 828070 - RNA, 19 nt, Artificial Sequence
  Description of Artificial Sequence: Synthetic oligonucleotide
  Sense strand starting at position 2872 of SEQ ID NO: 587917
guuuaaagcgguuauucug

SEQ ID NO: 828071 - RNA, 19 nt, Artificial Sequence
  Description of Artificial Sequence: Synthetic oligonucleotide
  Antisense strand to SEQ ID NO: 828070
cagaauaaccgcuuuaaac

SEQ ID NO: 828072 - RNA, 19 nt, Artificial Sequence
  Description of Artificial Sequence: Synthetic oligonucleotide
  Sense strand starting at position 2882 of SEQ ID NO: 587917
guuauucuggcagauaauu

SEQ ID NO: 828073 - RNA, 19 nt, Artificial Sequence
  Description of Artificial Sequence: Synthetic oligonucleotide
  Antisense strand to SEQ ID NO: 828072
aauuaucugccagaauaac

SEQ ID NO: 828074 - RNA, 19 nt, Artificial Sequence
  Description of Artificial Sequence: Synthetic oligonucleotide
  Sense strand starting at position 2887 of SEQ ID NO: 587917
ucuggcagauaauuagauu

SEQ ID NO: 828075 - RNA, 19 nt, Artificial Sequence
  Description of Artificial Sequence: Synthetic oligonucleotide
  Antisense strand to SEQ ID NO: 828074
aaucuaauuaucugccaga

SEQ ID NO: 828076 - RNA, 19 nt, Artificial Sequence
  Description of Artificial Sequence: Synthetic oligonucleotide
  Sense strand starting at position 2890 of SEQ ID NO: 587917
ggcagauaauuagauuucu

SEQ ID NO: 828077 - RNA, 19 nt, Artificial Sequence
  Description of Artificial Sequence: Synthetic oligonucleotide
  Antisense strand to SEQ ID NO: 828076
agaaaucuaauuaucugcc

SEQ ID NO: 828078 - RNA, 19 nt, Artificial Sequence
  Description of Artificial Sequence: Synthetic oligonucleotide
  Sense strand starting at position 2913 of SEQ ID NO: 587917
guuucuuuagacuggaaug

SEQ ID NO: 828079 - RNA, 19 nt, Artificial Sequence
  Description of Artificial Sequence: Synthetic oligonucleotide
  Antisense strand to SEQ ID NO: 828078
cauuccagucuaaagaaac

SEQ ID NO: 828080 - RNA, 19 nt, Artificial Sequence
  Description of Artificial Sequence: Synthetic oligonucleotide
  Sense strand starting at position 2945 of SEQ ID NO: 587917
uauuaaacuuguguuucga

SEQ ID NO: 828081 - RNA, 19 nt, Artificial Sequence
  Description of Artificial Sequence: Synthetic oligonucleotide
  Antisense strand to SEQ ID NO: 828080
ucgaaacacaaguuuaaua

SEQ ID NO: 828082 - RNA, 19 nt, Artificial Sequence
  Description of Artificial Sequence: Synthetic oligonucleotide
  Sense strand starting at position 3011 of SEQ ID NO: 587917
auacaacacugagaaauga

SEQ ID NO: 828083 - RNA, 19 nt, Artificial Sequence
  Description of Artificial Sequence: Synthetic oligonucleotide
  Antisense strand to SEQ ID NO: 828082
ucauuucucaguguuguau

SEQ ID NO: 828084 - RNA, 19 nt, Artificial Sequence
  Description of Artificial Sequence: Synthetic oligonucleotide
  Sense strand starting at position 3086 of SEQ ID NO: 587917
ucauauuaacccugaggua

SEQ ID NO: 828085 - RNA, 19 nt, Artificial Sequence
  Description of Artificial Sequence: Synthetic oligonucleotide
  Antisense strand to SEQ ID NO: 828084
uaccucaggguuaauauga

SEQ ID NO: 828086 - RNA, 19 nt, Artificial Sequence
  Description of Artificial Sequence: Synthetic oligonucleotide
  Sense strand starting at position 3101 of SEQ ID NO: 587917
gguagacucuaucuuacag

SEQ ID NO: 828087 - RNA, 19 nt, Artificial Sequence
  Description of Artificial Sequence: Synthetic oligonucleotide
  Antisense strand to SEQ ID NO: 828086
cuguaagauagagucuacc

SEQ ID NO: 828088 - RNA, 19 nt, Artificial Sequence
  Description of Artificial Sequence: Synthetic oligonucleotide
  Sense strand starting at position 3159 of SEQ ID NO: 587917
agacuacagcguugagaag

SEQ ID NO: 828089 - RNA, 19 nt, Artificial Sequence
  Description of Artificial Sequence: Synthetic oligonucleotide
  Antisense strand to SEQ ID NO: 828088
cuucucaacgcuguagucu

SEQ ID NO: 828090 - RNA, 19 nt, Artificial Sequence
  Description of Artificial Sequence: Synthetic oligonucleotide
  Sense strand starting at position 3285 of SEQ ID NO: 587917
gccauuccugcauaauuag

SEQ ID NO: 828091 - RNA, 19 nt, Artificial Sequence
  Description of Artificial Sequence: Synthetic oligonucleotide
  Antisense strand to SEQ ID NO: 828090
cuaauuaugcaggaauggc

SEQ ID NO: 828092 - RNA, 19 nt, Artificial Sequence
  Description of Artificial Sequence: Synthetic oligonucleotide
  Sense strand starting at position 3288 of SEQ ID NO: 587917
auuccugcauaauuagaga

SEQ ID NO: 828093 - RNA, 19 nt, Artificial Sequence
  Description of Artificial Sequence: Synthetic oligonucleotide
  Antisense strand to SEQ ID NO: 828092
ucucuaauuaugcaggaau

SEQ ID NO: 828094 - RNA, 19 nt, Artificial Sequence
  Description of Artificial Sequence: Synthetic oligonucleotide
  Sense strand starting at position 3352 of SEQ ID NO: 587917
cuuuauuaugaaggcguga

SEQ ID NO: 828095 - RNA, 19 nt, Artificial Sequence
  Description of Artificial Sequence: Synthetic oligonucleotide
  Antisense strand to SEQ ID NO: 828094
ucacgccuucauaauaaag

SEQ ID NO: 828096 - RNA, 19 nt, Artificial Sequence
  Description of Artificial Sequence: Synthetic oligonucleotide
  Sense strand starting at position 3354 of SEQ ID NO: 587917
uuauuaugaaggcgugaua

SEQ ID NO: 828097 - RNA, 19 nt, Artificial Sequence
  Description of Artificial Sequence: Synthetic oligonucleotide
  Antisense strand to SEQ ID NO: 828096
uaucacgccuucauaauaa

SEQ ID NO: 828098 - RNA, 19 nt, Artificial Sequence
  Description of Artificial Sequence: Synthetic oligonucleotide
  Sense strand starting at position 3390 of SEQ ID NO: 587917
ccuggaaucugagaaguaa

SEQ ID NO: 828099 - RNA, 19 nt, Artificial Sequence
  Description of Artificial Sequence: Synthetic oligonucleotide
  Antisense strand to SEQ ID NO: 828098
uuacuucucagauuccagg

SEQ ID NO: 828100 - RNA, 19 nt, Artificial Sequence
  Description of Artificial Sequence: Synthetic oligonucleotide
  Sense strand starting at position 3416 of SEQ ID NO: 587917
cugcuuugagugugauacu

SEQ ID NO: 828101 - RNA, 19 nt, Artificial Sequence
  Description of Artificial Sequence: Synthetic oligonucleotide
  Antisense strand to SEQ ID NO: 828100
aguaucacacucaaagcag

SEQ ID NO: 828102 - RNA, 19 nt, Artificial Sequence
  Description of Artificial Sequence: Synthetic oligonucleotide
  Sense strand starting at position 3449 of SEQ ID NO: 587917
gucuguccagucuugcuua

SEQ ID NO: 828103 - RNA, 19 nt, Artificial Sequence
  Description of Artificial Sequence: Synthetic oligonucleotide
  Antisense strand to SEQ ID NO: 828102
uaagcaagacuggacagac

SEQ ID NO: 828104 - RNA, 19 nt, Artificial Sequence
  Description of Artificial Sequence: Synthetic oligonucleotide
  Sense strand starting at position 3454 of SEQ ID NO: 587917
uccagucuugcuuauuagu

SEQ ID NO: 828105 - RNA, 19 nt, Artificial Sequence
  Description of Artificial Sequence: Synthetic oligonucleotide
  Antisense strand to SEQ ID NO: 828104
acuaauaagcaagacugga

SEQ ID NO: 828106 - RNA, 19 nt, Artificial Sequence
  Description of Artificial Sequence: Synthetic oligonucleotide
  Sense strand starting at position 3585 of SEQ ID NO: 587917
ucugcaaguaucugugaag

SEQ ID NO: 828107 - RNA, 19 nt, Artificial Sequence
  Description of Artificial Sequence: Synthetic oligonucleotide
  Antisense strand to SEQ ID NO: 828106
cuucacagauacuugcaga

SEQ ID NO: 828108 - RNA, 19 nt, Artificial Sequence
  Description of Artificial Sequence: Synthetic oligonucleotide
  Sense strand starting at position 3622 of SEQ ID NO: 587917
uuaagaaaguguuucuagu

SEQ ID NO: 828109 - RNA, 19 nt, Artificial Sequence
  Description of Artificial Sequence: Synthetic oligonucleotide
  Antisense strand to SEQ ID NO: 828108
acuagaaacacuuucuuaa

SEQ ID NO: 828110 - RNA, 19 nt, Artificial Sequence
  Description of Artificial Sequence: Synthetic oligonucleotide
  Sense strand starting at position 3624 of SEQ ID NO: 587917
aagaaaguguuucuaguuc

SEQ ID NO: 828111 - RNA, 19 nt, Artificial Sequence
  Description of Artificial Sequence: Synthetic oligonucleotide
  Antisense strand to SEQ ID NO: 828110
gaacuagaaacacuuucuu

SEQ ID NO: 828112 - RNA, 19 nt, Artificial Sequence
  Description of Artificial Sequence: Synthetic oligonucleotide
  Sense strand starting at position 3639 of SEQ ID NO: 587917
guuccugggucucuaagau

SEQ ID NO: 828113 - RNA, 19 nt, Artificial Sequence
  Description of Artificial Sequence: Synthetic oligonucleotide
  Antisense strand to SEQ ID NO: 828112
aucuuagagacccaggaac

SEQ ID NO: 828114 - RNA, 19 nt, Artificial Sequence
  Description of Artificial Sequence: Synthetic oligonucleotide
  Sense strand starting at position 3693 of SEQ ID NO: 587917
aucauagagagguguuacu

SEQ ID NO: 828115 - RNA, 19 nt, Artificial Sequence
  Description of Artificial Sequence: Synthetic oligonucleotide
  Antisense strand to SEQ ID NO: 828114
aguaacaccucucuaugau

SEQ ID NO: 828116 - RNA, 19 nt, Artificial Sequence
  Description of Artificial Sequence: Synthetic oligonucleotide
  Sense strand starting at position 4 of SEQ ID NO: 587918
acuguaaccuccugaagcu

SEQ ID NO: 828117 - RNA, 19 nt, Artificial Sequence
  Description of Artificial Sequence: Synthetic oligonucleotide
  Antisense strand to SEQ ID NO: 828116
agcuucaggagguuacagu

SEQ ID NO: 828118 - RNA, 19 nt, Artificial Sequence
  Description of Artificial Sequence: Synthetic oligonucleotide
  Sense strand starting at position 570 of SEQ ID NO: 587918
ggcuuuagccagcagaaag

SEQ ID NO: 828119 - RNA, 19 nt, Artificial Sequence
  Description of Artificial Sequence: Synthetic oligonucleotide
  Antisense strand to SEQ ID NO: 828118
cuuucugcuggcuaaagcc

SEQ ID NO: 828120 - RNA, 19 nt, Artificial Sequence
  Description of Artificial Sequence: Synthetic oligonucleotide
  Sense strand starting at position 610 of SEQ ID NO: 587918
aaaguuccgccucgggaaa

SEQ ID NO: 828121 - RNA, 19 nt, Artificial Sequence
  Description of Artificial Sequence: Synthetic oligonucleotide
  Antisense strand to SEQ ID NO: 828120
uuucccgaggcggaacuuu

SEQ ID NO: 828122 - RNA, 19 nt, Artificial Sequence
  Description of Artificial Sequence: Synthetic oligonucleotide
  Sense strand starting at position 748 of SEQ ID NO: 587918
ugcaccaagugcuuugaaa

SEQ ID NO: 828123 - RNA, 19 nt, Artificial Sequence
  Description of Artificial Sequence: Synthetic oligonucleotide
  Antisense strand to SEQ ID NO: 828122
uuucaaagcacuuggugca

SEQ ID NO: 828124 - RNA, 19 nt, Artificial Sequence
  Description of Artificial Sequence: Synthetic oligonucleotide
  Sense strand starting at position 750 of SEQ ID NO: 587918
caccaagugcuuugaaagu

SEQ ID NO: 828125 - RNA, 19 nt, Artificial Sequence
  Description of Artificial Sequence: Synthetic oligonucleotide
  Antisense strand to SEQ ID NO: 828124
acuuucaaagcacuuggug

SEQ ID NO: 828126 - RNA, 19 nt, Artificial Sequence
  Description of Artificial Sequence: Synthetic oligonucleotide
  Sense strand starting at position 1083 of SEQ ID NO: 587918
ccucuuaauuguuuaguua

SEQ ID NO: 828127 - RNA, 19 nt, Artificial Sequence
  Description of Artificial Sequence: Synthetic oligonucleotide
  Antisense strand to SEQ ID NO: 828126
uaacuaaacaauuaagagg

SEQ ID NO: 828128 - RNA, 19 nt, Artificial Sequence
  Description of Artificial Sequence: Synthetic oligonucleotide
  Sense strand starting at position 1120 of SEQ ID NO: 587918
cagggucucucuucgggaa

SEQ ID NO: 828129 - RNA, 19 nt, Artificial Sequence
  Description of Artificial Sequence: Synthetic oligonucleotide
  Antisense strand to SEQ ID NO: 828128
uucccgaagagagacccug

SEQ ID NO: 828130 - RNA, 19 nt, Artificial Sequence
  Description of Artificial Sequence: Synthetic oligonucleotide
  Sense strand starting at position 1121 of SEQ ID NO: 587918
agggucucucuucgggaau

SEQ ID NO: 828131 - RNA, 19 nt, Artificial Sequence
  Description of Artificial Sequence: Synthetic oligonucleotide
  Antisense strand to SEQ ID NO: 828130
auucccgaagagagacccu

SEQ ID NO: 828132 - RNA, 19 nt, Artificial Sequence
  Description of Artificial Sequence: Synthetic oligonucleotide
  Sense strand starting at position 1122 of SEQ ID NO: 587918
gggucucucuucgggaaua

SEQ ID NO: 828133 - RNA, 19 nt, Artificial Sequence
  Description of Artificial Sequence: Synthetic oligonucleotide
  Antisense strand to SEQ ID NO: 828132
uauucccgaagagagaccc

SEQ ID NO: 828134 - RNA, 19 nt, Artificial Sequence
  Description of Artificial Sequence: Synthetic oligonucleotide
  Sense strand starting at position 1123 of SEQ ID NO: 587918
ggucucucuucgggaauau

SEQ ID NO: 828135 - RNA, 19 nt, Artificial Sequence
  Description of Artificial Sequence: Synthetic oligonucleotide
  Antisense strand to SEQ ID NO: 828134
auauucccgaagagagacc

SEQ ID NO: 828136 - RNA, 19 nt, Artificial Sequence
  Description of Artificial Sequence: Synthetic oligonucleotide
  Sense strand starting at position 1124 of SEQ ID NO: 587918
gucucucuucgggaauauu

SEQ ID NO: 828137 - RNA, 19 nt, Artificial Sequence
  Description of Artificial Sequence: Synthetic oligonucleotide
  Antisense strand to SEQ ID NO: 828136
aauauucccgaagagagac

SEQ ID NO: 828138 - RNA, 19 nt, Artificial Sequence
  Description of Artificial Sequence: Synthetic oligonucleotide
  Sense strand starting at position 1132 of SEQ ID NO: 587918
ucgggaauauucguuaauu

SEQ ID NO: 828139 - RNA, 19 nt, Artificial Sequence
  Description of Artificial Sequence: Synthetic oligonucleotide
  Antisense strand to SEQ ID NO: 828138
aauuaacgaauauucccga

SEQ ID NO: 828140 - RNA, 19 nt, Artificial Sequence
  Description of Artificial Sequence: Synthetic oligonucleotide
  Sense strand starting at position 1133 of SEQ ID NO: 587918
cgggaauauucguuaauua

SEQ ID NO: 828141 - RNA, 19 nt, Artificial Sequence
  Description of Artificial Sequence: Synthetic oligonucleotide
  Antisense strand to SEQ ID NO: 828140
uaauuaacgaauauucccg

SEQ ID NO: 828142 - RNA, 19 nt, Artificial Sequence
  Description of Artificial Sequence: Synthetic oligonucleotide
  Sense strand starting at position 1134 of SEQ ID NO: 587918
gggaauauucguuaauuau

SEQ ID NO: 828143 - RNA, 19 nt, Artificial Sequence
  Description of Artificial Sequence: Synthetic oligonucleotide
  Antisense strand to SEQ ID NO: 828142
auaauuaacgaauauuccc

SEQ ID NO: 828144 - RNA, 19 nt, Artificial Sequence
  Description of Artificial Sequence: Synthetic oligonucleotide
  Sense strand starting at position 1166 of SEQ ID NO: 587918
acagccuuccucugagaug

SEQ ID NO: 828145 - RNA, 19 nt, Artificial Sequence
  Description of Artificial Sequence: Synthetic oligonucleotide
  Antisense strand to SEQ ID NO: 828144
caucucagaggaaggcugu

SEQ ID NO: 828146 - RNA, 19 nt, Artificial Sequence
  Description of Artificial Sequence: Synthetic oligonucleotide
  Sense strand starting at position 1191 of SEQ ID NO: 587918
uuguaagguccagggaaug

SEQ ID NO: 828147 - RNA, 19 nt, Artificial Sequence
  Description of Artificial Sequence: Synthetic oligonucleotide
  Antisense strand to SEQ ID NO: 828146
cauucccuggaccuuacaa

SEQ ID NO: 828148 - RNA, 19 nt, Artificial Sequence
  Description of Artificial Sequence: Synthetic oligonucleotide
  Sense strand starting at position 1234 of SEQ ID NO: 587918
cuaguaaacgccuguucca

SEQ ID NO: 828149 - RNA, 19 nt, Artificial Sequence
  Description of Artificial Sequence: Synthetic oligonucleotide
  Antisense strand to SEQ ID NO: 828148
uggaacaggcguuuacuag

SEQ ID NO: 828150 - RNA, 19 nt, Artificial Sequence
  Description of Artificial Sequence: Synthetic oligonucleotide
  Sense strand starting at position 2312 of SEQ ID NO: 587918
gcgcguguggccucagaaa

SEQ ID NO: 828151 - RNA, 19 nt, Artificial Sequence
  Description of Artificial Sequence: Synthetic oligonucleotide
  Antisense strand to SEQ ID NO: 828150
uuucugaggccacacgcgc

SEQ ID NO: 828152 - RNA, 19 nt, Artificial Sequence
  Description of Artificial Sequence: Synthetic oligonucleotide
  Sense strand starting at position 2971 of SEQ ID NO: 587918
guucccgcgcucucauaua

SEQ ID NO: 828153 - RNA, 19 nt, Artificial Sequence
  Description of Artificial Sequence: Synthetic oligonucleotide
  Antisense strand to SEQ ID NO: 828152
uauaugagagcgcgggaac

SEQ ID NO: 828154 - RNA, 19 nt, Artificial Sequence
  Description of Artificial Sequence: Synthetic oligonucleotide
  Sense strand starting at position 3020 of SEQ ID NO: 587918
ugcagaaugagugagcaaa

SEQ ID NO: 828155 - RNA, 19 nt, Artificial Sequence
  Description of Artificial Sequence: Synthetic oligonucleotide
  Antisense strand to SEQ ID NO: 828154
uuugcucacucauucugca

SEQ ID NO: 828156 - RNA, 19 nt, Artificial Sequence
  Description of Artificial Sequence: Synthetic oligonucleotide
  Sense strand starting at position 3022 of SEQ ID NO: 587918
cagaaugagugagcaaaua

SEQ ID NO: 828157 - RNA, 19 nt, Artificial Sequence
  Description of Artificial Sequence: Synthetic oligonucleotide
  Antisense strand to SEQ ID NO: 828156
uauuugcucacucauucug

SEQ ID NO: 828158 - RNA, 19 nt, Artificial Sequence
  Description of Artificial Sequence: Synthetic oligonucleotide
  Sense strand starting at position 3058 of SEQ ID NO: 587918
gaaugaaagucggcagguu

SEQ ID NO: 828159 - RNA, 19 nt, Artificial Sequence
  Description of Artificial Sequence: Synthetic oligonucleotide
  Antisense strand to SEQ ID NO: 828158
aaccugccgacuuucauuc

SEQ ID NO: 828160 - RNA, 19 nt, Artificial Sequence
  Description of Artificial Sequence: Synthetic oligonucleotide
  Sense strand starting at position 3059 of SEQ ID NO: 587918
aaugaaagucggcagguuu

SEQ ID NO: 828161 - RNA, 19 nt, Artificial Sequence
  Description of Artificial Sequence: Synthetic oligonucleotide
  Antisense strand to SEQ ID NO: 828160
aaaccugccgacuuucauu

SEQ ID NO: 828162 - RNA, 19 nt, Artificial Sequence
  Description of Artificial Sequence: Synthetic oligonucleotide
  Sense strand starting at position 3076 of SEQ ID NO: 587918
uugacuagauccuggaauu

SEQ ID NO: 828163 - RNA, 19 nt, Artificial Sequence
  Description of Artificial Sequence: Synthetic oligonucleotide
  Antisense strand to SEQ ID NO: 828162
aauuccaggaucuagucaa

SEQ ID NO: 828164 - RNA, 19 nt, Artificial Sequence
  Description of Artificial Sequence: Synthetic oligonucleotide
  Sense strand starting at position 3190 of SEQ ID NO: 587918
gagucagaaccuuaguguu

SEQ ID NO: 828165 - RNA, 19 nt, Artificial Sequence
  Description of Artificial Sequence: Synthetic oligonucleotide
  Antisense strand to SEQ ID NO: 828164
aacacuaagguucugacuc

SEQ ID NO: 828166 - RNA, 19 nt, Artificial Sequence
  Description of Artificial Sequence: Synthetic oligonucleotide
  Sense strand starting at position 3238 of SEQ ID NO: 587918
gucacaucucucuggaucu

SEQ ID NO: 828167 - RNA, 19 nt, Artificial Sequence
  Description of Artificial Sequence: Synthetic oligonucleotide
  Antisense strand to SEQ ID NO: 828166
agauccagagagaugugac

SEQ ID NO: 828168 - RNA, 19 nt, Artificial Sequence
  Description of Artificial Sequence: Synthetic oligonucleotide
  Sense strand starting at position 3308 of SEQ ID NO: 587918
uugugaagauucggugaga

SEQ ID NO: 828169 - RNA, 19 nt, Artificial Sequence
  Description of Artificial Sequence: Synthetic oligonucleotide
  Antisense strand to SEQ ID NO: 828168
ucucaccgaaucuucacaa

SEQ ID NO: 828170 - RNA, 19 nt, Artificial Sequence
  Description of Artificial Sequence: Synthetic oligonucleotide
  Sense strand starting at position 3309 of SEQ ID NO: 587918
ugugaagauucggugagau

SEQ ID NO: 828171 - RNA, 19 nt, Artificial Sequence
  Description of Artificial Sequence: Synthetic oligonucleotide
  Antisense strand to SEQ ID NO: 828170
aucucaccgaaucuucaca

SEQ ID NO: 828172 - RNA, 19 nt, Artificial Sequence
  Description of Artificial Sequence: Synthetic oligonucleotide
  Sense strand starting at position 3313 of SEQ ID NO: 587918
aagauucggugagauaaau

SEQ ID NO: 828173 - RNA, 19 nt, Artificial Sequence
  Description of Artificial Sequence: Synthetic oligonucleotide
  Antisense strand to SEQ ID NO: 828172
auuuaucucaccgaaucuu

SEQ ID NO: 828174 - RNA, 19 nt, Artificial Sequence
  Description of Artificial Sequence: Synthetic oligonucleotide
  Sense strand starting at position 3355 of SEQ ID NO: 587918
ugugaugcuugauguuaau

SEQ ID NO: 828175 - RNA, 19 nt, Artificial Sequence
  Description of Artificial Sequence: Synthetic oligonucleotide
  Antisense strand to SEQ ID NO: 828174
auuaacaucaagcaucaca

SEQ ID NO: 828176 - RNA, 19 nt, Artificial Sequence
  Description of Artificial Sequence: Synthetic oligonucleotide
  Sense strand starting at position 3358 of SEQ ID NO: 587918
gaugcuugauguuaauaua

SEQ ID NO: 828177 - RNA, 19 nt, Artificial Sequence
  Description of Artificial Sequence: Synthetic oligonucleotide
  Antisense strand to SEQ ID NO: 828176
uauauuaacaucaagcauc

SEQ ID NO: 828178 - RNA, 19 nt, Artificial Sequence
  Description of Artificial Sequence: Synthetic oligonucleotide
  Sense strand starting at position 3361 of SEQ ID NO: 587918
gcuugauguuaauauaacu

SEQ ID NO: 828179 - RNA, 19 nt, Artificial Sequence
  Description of Artificial Sequence: Synthetic oligonucleotide
  Antisense strand to SEQ ID NO: 828178
aguuauauuaacaucaagc

SEQ ID NO: 828180 - RNA, 19 nt, Artificial Sequence
  Description of Artificial Sequence: Synthetic oligonucleotide
  Sense strand starting at position 3372 of SEQ ID NO: 587918
auauaacucuaggcaugaa

SEQ ID NO: 828181 - RNA, 19 nt, Artificial Sequence
  Description of Artificial Sequence: Synthetic oligonucleotide
  Antisense strand to SEQ ID NO: 828180
uucaugccuagaguuauau

SEQ ID NO: 828182 - RNA, 19 nt, Artificial Sequence
  Description of Artificial Sequence: Synthetic oligonucleotide
  Sense strand starting at position 3562 of SEQ ID NO: 587918
agaauuagcuuuccgcaca

SEQ ID NO: 828183 - RNA, 19 nt, Artificial Sequence
  Description of Artificial Sequence: Synthetic oligonucleotide
  Antisense strand to SEQ ID NO: 828182
ugugcggaaagcuaauucu

SEQ ID NO: 828184 - RNA, 19 nt, Artificial Sequence
  Description of Artificial Sequence: Synthetic oligonucleotide
  Sense strand starting at position 3847 of SEQ ID NO: 587918
ggccauuuccacuggccaa

SEQ ID NO: 828185 - RNA, 19 nt, Artificial Sequence
  Description of Artificial Sequence: Synthetic oligonucleotide
  Antisense strand to SEQ ID NO: 828184
uuggccaguggaaauggcc

SEQ ID NO: 828186 - RNA, 19 nt, Artificial Sequence
  Description of Artificial Sequence: Synthetic oligonucleotide
  Sense strand starting at position 3875 of SEQ ID NO: 587918
cgcauaugccuccagcaaa

SEQ ID NO: 828187 - RNA, 19 nt, Artificial Sequence
  Description of Artificial Sequence: Synthetic oligonucleotide
  Antisense strand to SEQ ID NO: 828186
uuugcuggaggcauaugcg

SEQ ID NO: 828188 - RNA, 19 nt, Artificial Sequence
  Description of Artificial Sequence: Synthetic oligonucleotide
  Sense strand starting at position 41 of SEQ ID NO: 587919
ucccuucuaguuugugaaa

SEQ ID NO: 828189 - RNA, 19 nt, Artificial Sequence
  Description of Artificial Sequence: Synthetic oligonucleotide
  Antisense strand to SEQ ID NO: 828188
uuucacaaacuagaaggga

SEQ ID NO: 828190 - RNA, 19 nt, Artificial Sequence
  Description of Artificial Sequence: Synthetic oligonucleotide
  Sense strand starting at position 124 of SEQ ID NO: 587919
agaaacauucgcugcauuu

SEQ ID NO: 828191 - RNA, 19 nt, Artificial Sequence
  Description of Artificial Sequence: Synthetic oligonucleotide
  Antisense strand to SEQ ID NO: 828190
aaaugcagcgaauguuucu

SEQ ID NO: 828192 - RNA, 19 nt, Artificial Sequence
  Description of Artificial Sequence: Synthetic oligonucleotide
  Sense strand starting at position 133 of SEQ ID NO: 587919
cgcugcauuuaauugaauu

SEQ ID NO: 828193 - RNA, 19 nt, Artificial Sequence
  Description of Artificial Sequence: Synthetic oligonucleotide
  Antisense strand to SEQ ID NO: 828192
aauucaauuaaaugcagcg

SEQ ID NO: 828194 - RNA, 19 nt, Artificial Sequence
  Description of Artificial Sequence: Synthetic oligonucleotide
  Sense strand starting at position 444 of SEQ ID NO: 587919
ugagcaagucgacauguga

SEQ ID NO: 828195 - RNA, 19 nt, Artificial Sequence
  Description of Artificial Sequence: Synthetic oligonucleotide
  Antisense strand to SEQ ID NO: 828194
ucacaugucgacuugcuca

SEQ ID NO: 828196 - RNA, 19 nt, Artificial Sequence
  Description of Artificial Sequence: Synthetic oligonucleotide
  Sense strand starting at position 683 of SEQ ID NO: 587919
auggaaauuauguguguau

SEQ ID NO: 828197 - RNA, 19 nt, Artificial Sequence
  Description of Artificial Sequence: Synthetic oligonucleotide
  Antisense strand to SEQ ID NO: 828196
auacacacauaauuuccau

SEQ ID NO: 828198 - RNA, 19 nt, Artificial Sequence
  Description of Artificial Sequence: Synthetic oligonucleotide
  Sense strand starting at position 699 of SEQ ID NO: 587919
uauauaaaugcacgagguu

SEQ ID NO: 828199 - RNA, 19 nt, Artificial Sequence
  Description of Artificial Sequence: Synthetic oligonucleotide
  Antisense strand to SEQ ID NO: 828198
aaccucgugcauuuauaua

SEQ ID NO: 828200 - RNA, 19 nt, Artificial Sequence
  Description of Artificial Sequence: Synthetic oligonucleotide
  Sense strand starting at position 700 of SEQ ID NO: 587919
auauaaaugcacgagguua

SEQ ID NO: 828201 - RNA, 19 nt, Artificial Sequence
  Description of Artificial Sequence: Synthetic oligonucleotide
  Antisense strand to SEQ ID NO: 828200
uaaccucgugcauuuauau

SEQ ID NO: 828202 - RNA, 19 nt, Artificial Sequence
  Description of Artificial Sequence: Synthetic oligonucleotide
  Sense strand starting at position 738 of SEQ ID NO: 587919
uauugugggucacugucaa

SEQ ID NO: 828203 - RNA, 19 nt, Artificial Sequence
  Description of Artificial Sequence: Synthetic oligonucleotide
  Antisense strand to SEQ ID NO: 828202
uugacagugacccacaaua

SEQ ID NO: 828204 - RNA, 19 nt, Artificial Sequence
  Description of Artificial Sequence: Synthetic oligonucleotide
  Sense strand starting at position 772 of SEQ ID NO: 587919
cacuguacuugggcaauga

SEQ ID NO: 828205 - RNA, 19 nt, Artificial Sequence
  Description of Artificial Sequence: Synthetic oligonucleotide
  Antisense strand to SEQ ID NO: 828204
ucauugcccaaguacagug

SEQ ID NO: 828206 - RNA, 19 nt, Artificial Sequence
  Description of Artificial Sequence: Synthetic oligonucleotide
  Sense strand starting at position 773 of SEQ ID NO: 587919
acuguacuugggcaaugau

SEQ ID NO: 828207 - RNA, 19 nt, Artificial Sequence
  Description of Artificial Sequence: Synthetic oligonucleotide
  Antisense strand to SEQ ID NO: 828206
aucauugcccaaguacagu

SEQ ID NO: 828208 - RNA, 19 nt, Artificial Sequence
  Description of Artificial Sequence: Synthetic oligonucleotide
  Sense strand starting at position 802 of SEQ ID NO: 587919
agaaguagcaaugggucua

SEQ ID NO: 828209 - RNA, 19 nt, Artificial Sequence
  Description of Artificial Sequence: Synthetic oligonucleotide
  Antisense strand to SEQ ID NO: 828208
uagacccauugcuacuucu

SEQ ID NO: 828210 - RNA, 19 nt, Artificial Sequence
  Description of Artificial Sequence: Synthetic oligonucleotide
  Sense strand starting at position 848 of SEQ ID NO: 587919
cugggagucuggucauaua

SEQ ID NO: 828211 - RNA, 19 nt, Artificial Sequence
  Description of Artificial Sequence: Synthetic oligonucleotide
  Antisense strand to SEQ ID NO: 828210
uauaugaccagacucccag

SEQ ID NO: 828212 - RNA, 19 nt, Artificial Sequence
  Description of Artificial Sequence: Synthetic oligonucleotide
  Sense strand starting at position 864 of SEQ ID NO: 587919
auaucagaccucugcagaa

SEQ ID NO: 828213 - RNA, 19 nt, Artificial Sequence
  Description of Artificial Sequence: Synthetic oligonucleotide
  Antisense strand to SEQ ID NO: 828212
uucugcagaggucugauau

SEQ ID NO: 828214 - RNA, 19 nt, Artificial Sequence
  Description of Artificial Sequence: Synthetic oligonucleotide
  Sense strand starting at position 916 of SEQ ID NO: 587919
ccggcuuugacuuagguau

SEQ ID NO: 828215 - RNA, 19 nt, Artificial Sequence
  Description of Artificial Sequence: Synthetic oligonucleotide
  Antisense strand to SEQ ID NO: 828214
auaccuaagucaaagccgg

SEQ ID NO: 828216 - RNA, 19 nt, Artificial Sequence
  Description of Artificial Sequence: Synthetic oligonucleotide
  Sense strand starting at position 942 of SEQ ID NO: 587919
agaugacaguucuuaggcu

SEQ ID NO: 828217 - RNA, 19 nt, Artificial Sequence
  Description of Artificial Sequence: Synthetic oligonucleotide
  Antisense strand to SEQ ID NO: 828216
agccuaagaacugucaucu

SEQ ID NO: 828218 - RNA, 19 nt, Artificial Sequence
  Description of Artificial Sequence: Synthetic oligonucleotide
  Sense strand starting at position 955 of SEQ ID NO: 587919
uaggcuuccggaugagauc

SEQ ID NO: 828219 - RNA, 19 nt, Artificial Sequence
  Description of Artificial Sequence: Synthetic oligonucleotide
  Antisense strand to SEQ ID NO: 828218
gaucucauccggaagccua

SEQ ID NO: 828220 - RNA, 19 nt, Artificial Sequence
  Description of Artificial Sequence: Synthetic oligonucleotide
  Sense strand starting at position 962 of SEQ ID NO: 587919
ccggaugagaucuagcuga

SEQ ID NO: 828221 - RNA, 19 nt, Artificial Sequence
  Description of Artificial Sequence: Synthetic oligonucleotide
  Antisense strand to SEQ ID NO: 828220
ucagcuagaucucauccgg

SEQ ID NO: 828222 - RNA, 19 nt, Artificial Sequence
  Description of Artificial Sequence: Synthetic oligonucleotide
  Sense strand starting at position 978 of SEQ ID NO: 587919
ugagaaauuagauguggcu

SEQ ID NO: 828223 - RNA, 19 nt, Artificial Sequence
  Description of Artificial Sequence: Synthetic oligonucleotide
  Antisense strand to SEQ ID NO: 828222
agccacaucuaauuucuca

SEQ ID NO: 828224 - RNA, 19 nt, Artificial Sequence
  Description of Artificial Sequence: Synthetic oligonucleotide
  Sense strand starting at position 980 of SEQ ID NO: 587919
agaaauuagauguggcuuu

SEQ ID NO: 828225 - RNA, 19 nt, Artificial Sequence
  Description of Artificial Sequence: Synthetic oligonucleotide
  Antisense strand to SEQ ID NO: 828224
aaagccacaucuaauuucu

SEQ ID NO: 828226 - RNA, 19 nt, Artificial Sequence
  Description of Artificial Sequence: Synthetic oligonucleotide
  Sense strand starting at position 1078 of SEQ ID NO: 587919
agaugaagaacucguaaau

SEQ ID NO: 828227 - RNA, 19 nt, Artificial Sequence
  Description of Artificial Sequence: Synthetic oligonucleotide
  Antisense strand to SEQ ID NO: 828226
auuuacgaguucuucaucu

SEQ ID NO: 828228 - RNA, 19 nt, Artificial Sequence
  Description of Artificial Sequence: Synthetic oligonucleotide
  Sense strand starting at position 1100 of SEQ ID NO: 587919
ugaugcugcccagaauaga

SEQ ID NO: 828229 - RNA, 19 nt, Artificial Sequence
  Description of Artificial Sequence: Synthetic oligonucleotide
  Antisense strand to SEQ ID NO: 828228
ucuauucugggcagcauca

SEQ ID NO: 828230 - RNA, 19 nt, Artificial Sequence
  Description of Artificial Sequence: Synthetic oligonucleotide
  Sense strand starting at position 1113 of SEQ ID NO: 587919
aauagaauggguugccuua

SEQ ID NO: 828231 - RNA, 19 nt, Artificial Sequence
  Description of Artificial Sequence: Synthetic oligonucleotide
  Antisense strand to SEQ ID NO: 828230
uaaggcaacccauucuauu

SEQ ID NO: 828232 - RNA, 19 nt, Artificial Sequence
  Description of Artificial Sequence: Synthetic oligonucleotide
  Sense strand starting at position 1115 of SEQ ID NO: 587919
uagaauggguugccuuaga

SEQ ID NO: 828233 - RNA, 19 nt, Artificial Sequence
  Description of Artificial Sequence: Synthetic oligonucleotide
  Antisense strand to SEQ ID NO: 828232
ucuaaggcaacccauucua

SEQ ID NO: 828234 - RNA, 19 nt, Artificial Sequence
  Description of Artificial Sequence: Synthetic oligonucleotide
  Sense strand starting at position 1414 of SEQ ID NO: 587919
guggaucuauaacugaaca

SEQ ID NO: 828235 - RNA, 19 nt, Artificial Sequence
  Description of Artificial Sequence: Synthetic oligonucleotide
  Antisense strand to SEQ ID NO: 828234
uguucaguuauagauccac

SEQ ID NO: 828236 - RNA, 19 nt, Artificial Sequence
  Description of Artificial Sequence: Synthetic oligonucleotide
  Sense strand starting at position 1460 of SEQ ID NO: 587919
gaccaagucucucugagaa

SEQ ID NO: 828237 - RNA, 19 nt, Artificial Sequence
  Description of Artificial Sequence: Synthetic oligonucleotide
  Antisense strand to SEQ ID NO: 828236
uucucagagagacuugguc

SEQ ID NO: 828238 - RNA, 19 nt, Artificial Sequence
  Description of Artificial Sequence: Synthetic oligonucleotide
  Sense strand starting at position 1509 of SEQ ID NO: 587919
uucuuucuuucuguaggau

SEQ ID NO: 828239 - RNA, 19 nt, Artificial Sequence
  Description of Artificial Sequence: Synthetic oligonucleotide
  Antisense strand to SEQ ID NO: 828238
auccuacagaaagaaagaa

SEQ ID NO: 828240 - RNA, 19 nt, Artificial Sequence
  Description of Artificial Sequence: Synthetic oligonucleotide
  Sense strand starting at position 1510 of SEQ ID NO: 587919
ucuuucuuucuguaggaua

SEQ ID NO: 828241 - RNA, 19 nt, Artificial Sequence
  Description of Artificial Sequence: Synthetic oligonucleotide
  Antisense strand to SEQ ID NO: 828240
uauccuacagaaagaaaga

SEQ ID NO: 828242 - RNA, 19 nt, Artificial Sequence
  Description of Artificial Sequence: Synthetic oligonucleotide
  Sense strand starting at position 1512 of SEQ ID NO: 587919
uuucuuucuguaggauaca

SEQ ID NO: 828243 - RNA, 19 nt, Artificial Sequence
  Description of Artificial Sequence: Synthetic oligonucleotide
  Antisense strand to SEQ ID NO: 828242
uguauccuacagaaagaaa

SEQ ID NO: 828244 - RNA, 19 nt, Artificial Sequence
  Description of Artificial Sequence: Synthetic oligonucleotide
  Sense strand starting at position 1617 of SEQ ID NO: 587919
cuuuguuucuaauugggaa

SEQ ID NO: 828245 - RNA, 19 nt, Artificial Sequence
  Description of Artificial Sequence: Synthetic oligonucleotide
  Antisense strand to SEQ ID NO: 828244
uucccaauuagaaacaaag

SEQ ID NO: 828246 - RNA, 19 nt, Artificial Sequence
  Description of Artificial Sequence: Synthetic oligonucleotide
  Sense strand starting at position 1697 of SEQ ID NO: 587919
uuucguagccagcuuagua

SEQ ID NO: 828247 - RNA, 19 nt, Artificial Sequence
  Description of Artificial Sequence: Synthetic oligonucleotide
  Antisense strand to SEQ ID NO: 828246
uacuaagcuggcuacgaaa

SEQ ID NO: 828248 - RNA, 19 nt, Artificial Sequence
  Description of Artificial Sequence: Synthetic oligonucleotide
  Sense strand starting at position 1698 of SEQ ID NO: 587919
uucguagccagcuuaguaa

SEQ ID NO: 828249 - RNA, 19 nt, Artificial Sequence
  Description of Artificial Sequence: Synthetic oligonucleotide
  Antisense strand to SEQ ID NO: 828248
uuacuaagcuggcuacgaa

SEQ ID NO: 828250 - RNA, 19 nt, Artificial Sequence
  Description of Artificial Sequence: Synthetic oligonucleotide
  Sense strand starting at position 2448 of SEQ ID NO: 587919
ggcauaagaguugguguga

SEQ ID NO: 828251 - RNA, 19 nt, Artificial Sequence
  Description of Artificial Sequence: Synthetic oligonucleotide
  Antisense strand to SEQ ID NO: 828250
ucacaccaacucuuaugcc

SEQ ID NO: 828252 - RNA, 19 nt, Artificial Sequence
  Description of Artificial Sequence: Synthetic oligonucleotide
  Sense strand starting at position 2494 of SEQ ID NO: 587919
caguuuguuguagaguuaa

SEQ ID NO: 828253 - RNA, 19 nt, Artificial Sequence
  Description of Artificial Sequence: Synthetic oligonucleotide
  Antisense strand to SEQ ID NO: 828252
uuaacucuacaacaaacug

SEQ ID NO: 828254 - RNA, 19 nt, Artificial Sequence
  Description of Artificial Sequence: Synthetic oligonucleotide
  Sense strand starting at position 3100 of SEQ ID NO: 587919
gcugcuacuguucuguuau

SEQ ID NO: 828255 - RNA, 19 nt, Artificial Sequence
  Description of Artificial Sequence: Synthetic oligonucleotide
  Antisense strand to SEQ ID NO: 828254
auaacagaacaguagcagc

SEQ ID NO: 828256 - RNA, 19 nt, Artificial Sequence
  Description of Artificial Sequence: Synthetic oligonucleotide
  Sense strand starting at position 3127 of SEQ ID NO: 587919
gcuguauucccugcuaagu

SEQ ID NO: 828257 - RNA, 19 nt, Artificial Sequence
  Description of Artificial Sequence: Synthetic oligonucleotide
  Antisense strand to SEQ ID NO: 828256
acuuagcagggaauacagc

SEQ ID NO: 828258 - RNA, 19 nt, Artificial Sequence
  Description of Artificial Sequence: Synthetic oligonucleotide
  Sense strand starting at position 3293 of SEQ ID NO: 587919
cugagugcugguuaugagu

SEQ ID NO: 828259 - RNA, 19 nt, Artificial Sequence
  Description of Artificial Sequence: Synthetic oligonucleotide
  Antisense strand to SEQ ID NO: 828258
acucauaaccagcacucag

SEQ ID NO: 828260 - RNA, 19 nt, Artificial Sequence
  Description of Artificial Sequence: Synthetic oligonucleotide
  Sense strand starting at position 3388 of SEQ ID NO: 587919
agagguuacuugucaggaa

SEQ ID NO: 828261 - RNA, 19 nt, Artificial Sequence
  Description of Artificial Sequence: Synthetic oligonucleotide
  Antisense strand to SEQ ID NO: 828260
uuccugacaaguaaccucu

SEQ ID NO: 828262 - RNA, 19 nt, Artificial Sequence
  Description of Artificial Sequence: Synthetic oligonucleotide
  Sense strand starting at position 3789 of SEQ ID NO: 587919
aggucacuuagccagguaa

SEQ ID NO: 828263 - RNA, 19 nt, Artificial Sequence
  Description of Artificial Sequence: Synthetic oligonucleotide
  Antisense strand to SEQ ID NO: 828262
uuaccuggcuaagugaccu

SEQ ID NO: 828264 - RNA, 19 nt, Artificial Sequence
  Description of Artificial Sequence: Synthetic oligonucleotide
  Sense strand starting at position 3791 of SEQ ID NO: 587919
gucacuuagccagguaaca

SEQ ID NO: 828265 - RNA, 19 nt, Artificial Sequence
  Description of Artificial Sequence: Synthetic oligonucleotide
  Antisense strand to SEQ ID NO: 828264
uguuaccuggcuaagugac

SEQ ID NO: 828266 - RNA, 19 nt, Artificial Sequence
  Description of Artificial Sequence: Synthetic oligonucleotide
  Sense strand starting at position 3858 of SEQ ID NO: 587919
uuguuuacugagcacuuaa

SEQ ID NO: 828267 - RNA, 19 nt, Artificial Sequence
  Description of Artificial Sequence: Synthetic oligonucleotide
  Antisense strand to SEQ ID NO: 828266
uuaagugcucaguaaacaa

SEQ ID NO: 828268 - RNA, 19 nt, Artificial Sequence
  Description of Artificial Sequence: Synthetic oligonucleotide
  Sense strand starting at position 144 of SEQ ID NO: 587920
ugagcaagucgacauguga

SEQ ID NO: 828269 - RNA, 19 nt, Artificial Sequence
  Description of Artificial Sequence: Synthetic oligonucleotide
  Antisense strand to SEQ ID NO: 828268
ucacaugucgacuugcuca

SEQ ID NO: 828270 - RNA, 19 nt, Artificial Sequence
  Description of Artificial Sequence: Synthetic oligonucleotide
  Sense strand starting at position 383 of SEQ ID NO: 587920
auggaaauuauguguguau

SEQ ID NO: 828271 - RNA, 19 nt, Artificial Sequence
  Description of Artificial Sequence: Synthetic oligonucleotide
  Antisense strand to SEQ ID NO: 828270
auacacacauaauuuccau

SEQ ID NO: 828272 - RNA, 19 nt, Artificial Sequence
  Description of Artificial Sequence: Synthetic oligonucleotide
  Sense strand starting at position 399 of SEQ ID NO: 587920
uauauaaaugcacgagguu

SEQ ID NO: 828273 - RNA, 19 nt, Artificial Sequence
  Description of Artificial Sequence: Synthetic oligonucleotide
  Antisense strand to SEQ ID NO: 828272
aaccucgugcauuuauaua

SEQ ID NO: 828274 - RNA, 19 nt, Artificial Sequence
  Description of Artificial Sequence: Synthetic oligonucleotide
  Sense strand starting at position 400 of SEQ ID NO: 587920
auauaaaugcacgagguua

SEQ ID NO: 828275 - RNA, 19 nt, Artificial Sequence
  Description of Artificial Sequence: Synthetic oligonucleotide
  Antisense strand to SEQ ID NO: 828274
uaaccucgugcauuuauau

SEQ ID NO: 828276 - RNA, 19 nt, Artificial Sequence
  Description of Artificial Sequence: Synthetic oligonucleotide
  Sense strand starting at position 438 of SEQ ID NO: 587920
uauugugggucacugucaa

SEQ ID NO: 828277 - RNA, 19 nt, Artificial Sequence
  Description of Artificial Sequence: Synthetic oligonucleotide
  Antisense strand to SEQ ID NO: 828276
uugacagugacccacaaua

SEQ ID NO: 828278 - RNA, 19 nt, Artificial Sequence
  Description of Artificial Sequence: Synthetic oligonucleotide
  Sense strand starting at position 472 of SEQ ID NO: 587920
cacuguacuugggcaauga

SEQ ID NO: 828279 - RNA, 19 nt, Artificial Sequence
  Description of Artificial Sequence: Synthetic oligonucleotide
  Antisense strand to SEQ ID NO: 828278
ucauugcccaaguacagug

SEQ ID NO: 828280 - RNA, 19 nt, Artificial Sequence
  Description of Artificial Sequence: Synthetic oligonucleotide
  Sense strand starting at position 473 of SEQ ID NO: 587920
acuguacuugggcaaugau

SEQ ID NO: 828281 - RNA, 19 nt, Artificial Sequence
  Description of Artificial Sequence: Synthetic oligonucleotide
  Antisense strand to SEQ ID NO: 828280
aucauugcccaaguacagu

SEQ ID NO: 828282 - RNA, 19 nt, Artificial Sequence
  Description of Artificial Sequence: Synthetic oligonucleotide
  Sense strand starting at position 502 of SEQ ID NO: 587920
agaaguagcaaugggucua

SEQ ID NO: 828283 - RNA, 19 nt, Artificial Sequence
  Description of Artificial Sequence: Synthetic oligonucleotide
  Antisense strand to SEQ ID NO: 828282
uagacccauugcuacuucu

SEQ ID NO: 828284 - RNA, 19 nt, Artificial Sequence
  Description of Artificial Sequence: Synthetic oligonucleotide
  Sense strand starting at position 548 of SEQ ID NO: 587920
cugggagucuggucauaua

SEQ ID NO: 828285 - RNA, 19 nt, Artificial Sequence
  Description of Artificial Sequence: Synthetic oligonucleotide
  Antisense strand to SEQ ID NO: 828284
uauaugaccagacucccag

SEQ ID NO: 828286 - RNA, 19 nt, Artificial Sequence
  Description of Artificial Sequence: Synthetic oligonucleotide
  Sense strand starting at position 564 of SEQ ID NO: 587920
auaucagaccucugcagaa

SEQ ID NO: 828287 - RNA, 19 nt, Artificial Sequence
  Description of Artificial Sequence: Synthetic oligonucleotide
  Antisense strand to SEQ ID NO: 828286
uucugcagaggucugauau

SEQ ID NO: 828288 - RNA, 19 nt, Artificial Sequence
  Description of Artificial Sequence: Synthetic oligonucleotide
  Sense strand starting at position 616 of SEQ ID NO: 587920
ccggcuuugacuuagguau

SEQ ID NO: 828289 - RNA, 19 nt, Artificial Sequence
  Description of Artificial Sequence: Synthetic oligonucleotide
  Antisense strand to SEQ ID NO: 828288
auaccuaagucaaagccgg

SEQ ID NO: 828290 - RNA, 19 nt, Artificial Sequence
  Description of Artificial Sequence: Synthetic oligonucleotide
  Sense strand starting at position 642 of SEQ ID NO: 587920
agaugacaguucuuaggcu

SEQ ID NO: 828291 - RNA, 19 nt, Artificial Sequence
  Description of Artificial Sequence: Synthetic oligonucleotide
  Antisense strand to SEQ ID NO: 828290
agccuaagaacugucaucu

SEQ ID NO: 828292 - RNA, 19 nt, Artificial Sequence
  Description of Artificial Sequence: Synthetic oligonucleotide
  Sense strand starting at position 655 of SEQ ID NO: 587920
uaggcuuccggaugagauc

SEQ ID NO: 828293 - RNA, 19 nt, Artificial Sequence
  Description of Artificial Sequence: Synthetic oligonucleotide
  Antisense strand to SEQ ID NO: 828292
gaucucauccggaagccua

SEQ ID NO: 828294 - RNA, 19 nt, Artificial Sequence
  Description of Artificial Sequence: Synthetic oligonucleotide
  Sense strand starting at position 662 of SEQ ID NO: 587920
ccggaugagaucuagcuga

SEQ ID NO: 828295 - RNA, 19 nt, Artificial Sequence
  Description of Artificial Sequence: Synthetic oligonucleotide
  Antisense strand to SEQ ID NO: 828294
ucagcuagaucucauccgg

SEQ ID NO: 828296 - RNA, 19 nt, Artificial Sequence
  Description of Artificial Sequence: Synthetic oligonucleotide
  Sense strand starting at position 678 of SEQ ID NO: 587920
ugagaaauuagauguggcu

SEQ ID NO: 828297 - RNA, 19 nt, Artificial Sequence
  Description of Artificial Sequence: Synthetic oligonucleotide
  Antisense strand to SEQ ID NO: 828296
agccacaucuaauuucuca

SEQ ID NO: 828298 - RNA, 19 nt, Artificial Sequence
  Description of Artificial Sequence: Synthetic oligonucleotide
  Sense strand starting at position 680 of SEQ ID NO: 587920
agaaauuagauguggcuuu

SEQ ID NO: 828299 - RNA, 19 nt, Artificial Sequence
  Description of Artificial Sequence: Synthetic oligonucleotide
  Antisense strand to SEQ ID NO: 828298
aaagccacaucuaauuucu

SEQ ID NO: 828300 - RNA, 19 nt, Artificial Sequence
  Description of Artificial Sequence: Synthetic oligonucleotide
  Sense strand starting at position 778 of SEQ ID NO: 587920
agaugaagaacucguaaau

SEQ ID NO: 828301 - RNA, 19 nt, Artificial Sequence
  Description of Artificial Sequence: Synthetic oligonucleotide
  Antisense strand to SEQ ID NO: 828300
auuuacgaguucuucaucu

SEQ ID NO: 828302 - RNA, 19 nt, Artificial Sequence
  Description of Artificial Sequence: Synthetic oligonucleotide
  Sense strand starting at position 800 of SEQ ID NO: 587920
ugaugcugcccagaauaga

SEQ ID NO: 828303 - RNA, 19 nt, Artificial Sequence
  Description of Artificial Sequence: Synthetic oligonucleotide
  Antisense strand to SEQ ID NO: 828302
ucuauucugggcagcauca

SEQ ID NO: 828304 - RNA, 19 nt, Artificial Sequence
  Description of Artificial Sequence: Synthetic oligonucleotide
  Sense strand starting at position 813 of SEQ ID NO: 587920
aauagaauggguugccuua

SEQ ID NO: 828305 - RNA, 19 nt, Artificial Sequence
  Description of Artificial Sequence: Synthetic oligonucleotide
  Antisense strand to SEQ ID NO: 828304
uaaggcaacccauucuauu

SEQ ID NO: 828306 - RNA, 19 nt, Artificial Sequence
  Description of Artificial Sequence: Synthetic oligonucleotide
  Sense strand starting at position 815 of SEQ ID NO: 587920
uagaauggguugccuuaga

SEQ ID NO: 828307 - RNA, 19 nt, Artificial Sequence
  Description of Artificial Sequence: Synthetic oligonucleotide
  Antisense strand to SEQ ID NO: 828306
ucuaaggcaacccauucua

SEQ ID NO: 828308 - RNA, 19 nt, Artificial Sequence
  Description of Artificial Sequence: Synthetic oligonucleotide
  Sense strand starting at position 1114 of SEQ ID NO: 587920
guggaucuauaacugaaca

SEQ ID NO: 828309 - RNA, 19 nt, Artificial Sequence
  Description of Artificial Sequence: Synthetic oligonucleotide
  Antisense strand to SEQ ID NO: 828308
uguucaguuauagauccac

SEQ ID NO: 828310 - RNA, 19 nt, Artificial Sequence
  Description of Artificial Sequence: Synthetic oligonucleotide
  Sense strand starting at position 1160 of SEQ ID NO: 587920
gaccaagucucucugagaa

SEQ ID NO: 828311 - RNA, 19 nt, Artificial Sequence
  Description of Artificial Sequence: Synthetic oligonucleotide
  Antisense strand to SEQ ID NO: 828310
uucucagagagacuugguc

SEQ ID NO: 828312 - RNA, 19 nt, Artificial Sequence
  Description of Artificial Sequence: Synthetic oligonucleotide
  Sense strand starting at position 1209 of SEQ ID NO: 587920
uucuuucuuucuguaggau

SEQ ID NO: 828313 - RNA, 19 nt, Artificial Sequence
  Description of Artificial Sequence: Synthetic oligonucleotide
  Antisense strand to SEQ ID NO: 828312
auccuacagaaagaaagaa

SEQ ID NO: 828314 - RNA, 19 nt, Artificial Sequence
  Description of Artificial Sequence: Synthetic oligonucleotide
  Sense strand starting at position 1210 of SEQ ID NO: 587920
ucuuucuuucuguaggaua

SEQ ID NO: 828315 - RNA, 19 nt, Artificial Sequence
  Description of Artificial Sequence: Synthetic oligonucleotide
  Antisense strand to SEQ ID NO: 828314
uauccuacagaaagaaaga

SEQ ID NO: 828316 - RNA, 19 nt, Artificial Sequence
  Description of Artificial Sequence: Synthetic oligonucleotide
  Sense strand starting at position 1212 of SEQ ID NO: 587920
uuucuuucuguaggauaca

SEQ ID NO: 828317 - RNA, 19 nt, Artificial Sequence
  Description of Artificial Sequence: Synthetic oligonucleotide
  Antisense strand to SEQ ID NO: 828316
uguauccuacagaaagaaa

SEQ ID NO: 828318 - RNA, 19 nt, Artificial Sequence
  Description of Artificial Sequence: Synthetic oligonucleotide
  Sense strand starting at position 1317 of SEQ ID NO: 587920
cuuuguuucuaauugggaa

SEQ ID NO: 828319 - RNA, 19 nt, Artificial Sequence
  Description of Artificial Sequence: Synthetic oligonucleotide
  Antisense strand to SEQ ID NO: 828318
uucccaauuagaaacaaag

SEQ ID NO: 828320 - RNA, 19 nt, Artificial Sequence
  Description of Artificial Sequence: Synthetic oligonucleotide
  Sense strand starting at position 1397 of SEQ ID NO: 587920
uuucguagccagcuuagua

SEQ ID NO: 828321 - RNA, 19 nt, Artificial Sequence
  Description of Artificial Sequence: Synthetic oligonucleotide
  Antisense strand to SEQ ID NO: 828320
uacuaagcuggcuacgaaa

SEQ ID NO: 828322 - RNA, 19 nt, Artificial Sequence
  Description of Artificial Sequence: Synthetic oligonucleotide
  Sense strand starting at position 1398 of SEQ ID NO: 587920
uucguagccagcuuaguaa

SEQ ID NO: 828323 - RNA, 19 nt, Artificial Sequence
  Description of Artificial Sequence: Synthetic oligonucleotide
  Antisense strand to SEQ ID NO: 828322
uuacuaagcuggcuacgaa

SEQ ID NO: 828324 - RNA, 19 nt, Artificial Sequence
  Description of Artificial Sequence: Synthetic oligonucleotide
  Sense strand starting at position 2148 of SEQ ID NO: 587920
ggcauaagaguugguguga

SEQ ID NO: 828325 - RNA, 19 nt, Artificial Sequence
  Description of Artificial Sequence: Synthetic oligonucleotide
  Antisense strand to SEQ ID NO: 828324
ucacaccaacucuuaugcc

SEQ ID NO: 828326 - RNA, 19 nt, Artificial Sequence
  Description of Artificial Sequence: Synthetic oligonucleotide
  Sense strand starting at position 2194 of SEQ ID NO: 587920
caguuuguuguagaguuaa

SEQ ID NO: 828327 - RNA, 19 nt, Artificial Sequence
  Description of Artificial Sequence: Synthetic oligonucleotide
  Antisense strand to SEQ ID NO: 828326
uuaacucuacaacaaacug

SEQ ID NO: 828328 - RNA, 19 nt, Artificial Sequence
  Description of Artificial Sequence: Synthetic oligonucleotide
  Sense strand starting at position 2800 of SEQ ID NO: 587920
gcugcuacuguucuguuau

SEQ ID NO: 828329 - RNA, 19 nt, Artificial Sequence
  Description of Artificial Sequence: Synthetic oligonucleotide
  Antisense strand to SEQ ID NO: 828328
auaacagaacaguagcagc

SEQ ID NO: 828330 - RNA, 19 nt, Artificial Sequence
  Description of Artificial Sequence: Synthetic oligonucleotide
  Sense strand starting at position 2827 of SEQ ID NO: 587920
gcuguauucccugcuaagu

SEQ ID NO: 828331 - RNA, 19 nt, Artificial Sequence
  Description of Artificial Sequence: Synthetic oligonucleotide
  Antisense strand to SEQ ID NO: 828330
acuuagcagggaauacagc

SEQ ID NO: 828332 - RNA, 19 nt, Artificial Sequence
  Description of Artificial Sequence: Synthetic oligonucleotide
  Sense strand starting at position 2993 of SEQ ID NO: 587920
cugagugcugguuaugagu

SEQ ID NO: 828333 - RNA, 19 nt, Artificial Sequence
  Description of Artificial Sequence: Synthetic oligonucleotide
  Antisense strand to SEQ ID NO: 828332
acucauaaccagcacucag

SEQ ID NO: 828334 - RNA, 19 nt, Artificial Sequence
  Description of Artificial Sequence: Synthetic oligonucleotide
  Sense strand starting at position 3088 of SEQ ID NO: 587920
agagguuacuugucaggaa

SEQ ID NO: 828335 - RNA, 19 nt, Artificial Sequence
  Description of Artificial Sequence: Synthetic oligonucleotide
  Antisense strand to SEQ ID NO: 828334
uuccugacaaguaaccucu

SEQ ID NO: 828336 - RNA, 19 nt, Artificial Sequence
  Description of Artificial Sequence: Synthetic oligonucleotide
  Sense strand starting at position 3489 of SEQ ID NO: 587920
aggucacuuagccagguaa

SEQ ID NO: 828337 - RNA, 19 nt, Artificial Sequence
  Description of Artificial Sequence: Synthetic oligonucleotide
  Antisense strand to SEQ ID NO: 828336
uuaccuggcuaagugaccu

SEQ ID NO: 828338 - RNA, 19 nt, Artificial Sequence
  Description of Artificial Sequence: Synthetic oligonucleotide
  Sense strand starting at position 3491 of SEQ ID NO: 587920
gucacuuagccagguaaca

SEQ ID NO: 828339 - RNA, 19 nt, Artificial Sequence
  Description of Artificial Sequence: Synthetic oligonucleotide
  Antisense strand to SEQ ID NO: 828338
uguuaccuggcuaagugac

SEQ ID NO: 828340 - RNA, 19 nt, Artificial Sequence
  Description of Artificial Sequence: Synthetic oligonucleotide
  Sense strand starting at position 3558 of SEQ ID NO: 587920
uuguuuacugagcacuuaa

SEQ ID NO: 828341 - RNA, 19 nt, Artificial Sequence
  Description of Artificial Sequence: Synthetic oligonucleotide
  Antisense strand to SEQ ID NO: 828340
uuaagugcucaguaaacaa

SEQ ID NO: 828342 - RNA, 19 nt, Artificial Sequence
  Description of Artificial Sequence: Synthetic oligonucleotide
  Sense strand starting at position 3724 of SEQ ID NO: 587920
acacaacagccugguaauu

SEQ ID NO: 828343 - RNA, 19 nt, Artificial Sequence
  Description of Artificial Sequence: Synthetic oligonucleotide
  Antisense strand to SEQ ID NO: 828342
aauuaccaggcuguugugu

SEQ ID NO: 828344 - RNA, 19 nt, Artificial Sequence
  Description of Artificial Sequence: Synthetic oligonucleotide
  Sense strand starting at position 3783 of SEQ ID NO: 587920
auggcuuugcaucacaaca

SEQ ID NO: 828345 - RNA, 19 nt, Artificial Sequence
  Description of Artificial Sequence: Synthetic oligonucleotide
  Antisense strand to SEQ ID NO: 828344
uguugugaugcaaagccau

SEQ ID NO: 828346 - RNA, 19 nt, Artificial Sequence
  Description of Artificial Sequence: Synthetic oligonucleotide
  Sense strand starting at position 3861 of SEQ ID NO: 587920
ugucauaaaguuugaguca

SEQ ID NO: 828347 - RNA, 19 nt, Artificial Sequence
  Description of Artificial Sequence: Synthetic oligonucleotide
  Antisense strand to SEQ ID NO: 828346
ugacucaaacuuuaugaca

SEQ ID NO: 828348 - RNA, 19 nt, Artificial Sequence
  Description of Artificial Sequence: Synthetic oligonucleotide
  Sense strand starting at position 79 of SEQ ID NO: 587921
ccugucucacaggaauacu

SEQ ID NO: 828349 - RNA, 19 nt, Artificial Sequence
  Description of Artificial Sequence: Synthetic oligonucleotide
  Antisense strand to SEQ ID NO: 828348
aguauuccugugagacagg

SEQ ID NO: 828350 - RNA, 19 nt, Artificial Sequence
  Description of Artificial Sequence: Synthetic oligonucleotide
  Sense strand starting at position 194 of SEQ ID NO: 587921
augaaugaguccuuuggaa

SEQ ID NO: 828351 - RNA, 19 nt, Artificial Sequence
  Description of Artificial Sequence: Synthetic oligonucleotide
  Antisense strand to SEQ ID NO: 828350
uuccaaaggacucauucau

SEQ ID NO: 828352 - RNA, 19 nt, Artificial Sequence
  Description of Artificial Sequence: Synthetic oligonucleotide
  Sense strand starting at position 196 of SEQ ID NO: 587921
gaaugaguccuuuggaacu

SEQ ID NO: 828353 - RNA, 19 nt, Artificial Sequence
  Description of Artificial Sequence: Synthetic oligonucleotide
  Antisense strand to SEQ ID NO: 828352
aguuccaaaggacucauuc

SEQ ID NO: 828354 - RNA, 19 nt, Artificial Sequence
  Description of Artificial Sequence: Synthetic oligonucleotide
  Sense strand starting at position 249 of SEQ ID NO: 587921
ggaugcugcaggcaucaaa

SEQ ID NO: 828355 - RNA, 19 nt, Artificial Sequence
  Description of Artificial Sequence: Synthetic oligonucleotide
  Antisense strand to SEQ ID NO: 828354
uuugaugccugcagcaucc

SEQ ID NO: 828356 - RNA, 19 nt, Artificial Sequence
  Description of Artificial Sequence: Synthetic oligonucleotide
  Sense strand starting at position 363 of SEQ ID NO: 587921
cugucuuagggucagcaau

SEQ ID NO: 828357 - RNA, 19 nt, Artificial Sequence
  Description of Artificial Sequence: Synthetic oligonucleotide
  Antisense strand to SEQ ID NO: 828356
auugcugacccuaagacag

SEQ ID NO: 828358 - RNA, 19 nt, Artificial Sequence
  Description of Artificial Sequence: Synthetic oligonucleotide
  Sense strand starting at position 556 of SEQ ID NO: 587921
gccugaguagacugacaau

SEQ ID NO: 828359 - RNA, 19 nt, Artificial Sequence
  Description of Artificial Sequence: Synthetic oligonucleotide
  Antisense strand to SEQ ID NO: 828358
auugucagucuacucaggc

SEQ ID NO: 828360 - RNA, 19 nt, Artificial Sequence
  Description of Artificial Sequence: Synthetic oligonucleotide
  Sense strand starting at position 602 of SEQ ID NO: 587921
ggaagcauuucccagaccu

SEQ ID NO: 828361 - RNA, 19 nt, Artificial Sequence
  Description of Artificial Sequence: Synthetic oligonucleotide
  Antisense strand to SEQ ID NO: 828360
aggucugggaaaugcuucc

SEQ ID NO: 828362 - RNA, 19 nt, Artificial Sequence
  Description of Artificial Sequence: Synthetic oligonucleotide
  Sense strand starting at position 629 of SEQ ID NO: 587921
accugaaacuuaguaggua

SEQ ID NO: 828363 - RNA, 19 nt, Artificial Sequence
  Description of Artificial Sequence: Synthetic oligonucleotide
  Antisense strand to SEQ ID NO: 828362
uaccuacuaaguuucaggu

SEQ ID NO: 828364 - RNA, 19 nt, Artificial Sequence
  Description of Artificial Sequence: Synthetic oligonucleotide
  Sense strand starting at position 633 of SEQ ID NO: 587921
gaaacuuaguagguaggua

SEQ ID NO: 828365 - RNA, 19 nt, Artificial Sequence
  Description of Artificial Sequence: Synthetic oligonucleotide
  Antisense strand to SEQ ID NO: 828364
uaccuaccuacuaaguuuc

SEQ ID NO: 828366 - RNA, 19 nt, Artificial Sequence
  Description of Artificial Sequence: Synthetic oligonucleotide
  Sense strand starting at position 653 of SEQ ID NO: 587921
ucaguaaauuccuugaacg

SEQ ID NO: 828367 - RNA, 19 nt, Artificial Sequence
  Description of Artificial Sequence: Synthetic oligonucleotide
  Antisense strand to SEQ ID NO: 828366
cguucaaggaauuuacuga

SEQ ID NO: 828368 - RNA, 19 nt, Artificial Sequence
  Description of Artificial Sequence: Synthetic oligonucleotide
  Sense strand starting at position 746 of SEQ ID NO: 587921
gcaccuguucuuggaggaa

SEQ ID NO: 828369 - RNA, 19 nt, Artificial Sequence
  Description of Artificial Sequence: Synthetic oligonucleotide
  Antisense strand to SEQ ID NO: 828368
uuccuccaagaacaggugc

SEQ ID NO: 828370 - RNA, 19 nt, Artificial Sequence
  Description of Artificial Sequence: Synthetic oligonucleotide
  Sense strand starting at position 827 of SEQ ID NO: 587921
ccacaaggcccucaaugau

SEQ ID NO: 828371 - RNA, 19 nt, Artificial Sequence
  Description of Artificial Sequence: Synthetic oligonucleotide
  Antisense strand to SEQ ID NO: 828370
aucauugagggccuugugg

SEQ ID NO: 828372 - RNA, 19 nt, Artificial Sequence
  Description of Artificial Sequence: Synthetic oligonucleotide
  Sense strand starting at position 1384 of SEQ ID NO: 587921
aggugaaugaaguguaaga

SEQ ID NO: 828373 - RNA, 19 nt, Artificial Sequence
  Description of Artificial Sequence: Synthetic oligonucleotide
  Antisense strand to SEQ ID NO: 828372
ucuuacacuucauucaccu

SEQ ID NO: 828374 - RNA, 19 nt, Artificial Sequence
  Description of Artificial Sequence: Synthetic oligonucleotide
  Sense strand starting at position 1395 of SEQ ID NO: 587921
guguaagaaauguaugcca

SEQ ID NO: 828375 - RNA, 19 nt, Artificial Sequence
  Description of Artificial Sequence: Synthetic oligonucleotide
  Antisense strand to SEQ ID NO: 828374
uggcauacauuucuuacac

SEQ ID NO: 828376 - RNA, 19 nt, Artificial Sequence
  Description of Artificial Sequence: Synthetic oligonucleotide
  Sense strand starting at position 1397 of SEQ ID NO: 587921
guaagaaauguaugccaug

SEQ ID NO: 828377 - RNA, 19 nt, Artificial Sequence
  Description of Artificial Sequence: Synthetic oligonucleotide
  Antisense strand to SEQ ID NO: 828376
cauggcauacauuucuuac

SEQ ID NO: 828378 - RNA, 19 nt, Artificial Sequence
  Description of Artificial Sequence: Synthetic oligonucleotide
  Sense strand starting at position 1398 of SEQ ID NO: 587921
uaagaaauguaugccauga

SEQ ID NO: 828379 - RNA, 19 nt, Artificial Sequence
  Description of Artificial Sequence: Synthetic oligonucleotide
  Antisense strand to SEQ ID NO: 828378
ucauggcauacauuucuua

SEQ ID NO: 828380 - RNA, 19 nt, Artificial Sequence
  Description of Artificial Sequence: Synthetic oligonucleotide
  Sense strand starting at position 1403 of SEQ ID NO: 587921
aauguaugccaugaauggu

SEQ ID NO: 828381 - RNA, 19 nt, Artificial Sequence
  Description of Artificial Sequence: Synthetic oligonucleotide
  Antisense strand to SEQ ID NO: 828380
accauucauggcauacauu

SEQ ID NO: 828382 - RNA, 19 nt, Artificial Sequence
  Description of Artificial Sequence: Synthetic oligonucleotide
  Sense strand starting at position 1444 of SEQ ID NO: 587921
ccagcacagccagagaauu

SEQ ID NO: 828383 - RNA, 19 nt, Artificial Sequence
  Description of Artificial Sequence: Synthetic oligonucleotide
  Antisense strand to SEQ ID NO: 828382
aauucucuggcugugcugg

SEQ ID NO: 828384 - RNA, 19 nt, Artificial Sequence
  Description of Artificial Sequence: Synthetic oligonucleotide
  Sense strand starting at position 1570 of SEQ ID NO: 587921
gacacucuucccugggaag

SEQ ID NO: 828385 - RNA, 19 nt, Artificial Sequence
  Description of Artificial Sequence: Synthetic oligonucleotide
  Antisense strand to SEQ ID NO: 828384
cuucccagggaagaguguc

SEQ ID NO: 828386 - RNA, 19 nt, Artificial Sequence
  Description of Artificial Sequence: Synthetic oligonucleotide
  Sense strand starting at position 2064 of SEQ ID NO: 587921
uggguggguuuggugaaua

SEQ ID NO: 828387 - RNA, 19 nt, Artificial Sequence
  Description of Artificial Sequence: Synthetic oligonucleotide
  Antisense strand to SEQ ID NO: 828386
uauucaccaaacccaccca

SEQ ID NO: 828388 - RNA, 19 nt, Artificial Sequence
  Description of Artificial Sequence: Synthetic oligonucleotide
  Sense strand starting at position 2066 of SEQ ID NO: 587921
gguggguuuggugaauaag

SEQ ID NO: 828389 - RNA, 19 nt, Artificial Sequence
  Description of Artificial Sequence: Synthetic oligonucleotide
  Antisense strand to SEQ ID NO: 828388
cuuauucaccaaacccacc

SEQ ID NO: 828390 - RNA, 19 nt, Artificial Sequence
  Description of Artificial Sequence: Synthetic oligonucleotide
  Sense strand starting at position 2531 of SEQ ID NO: 587921
ugaugucacuggguccaau

SEQ ID NO: 828391 - RNA, 19 nt, Artificial Sequence
  Description of Artificial Sequence: Synthetic oligonucleotide
  Antisense strand to SEQ ID NO: 828390
auuggacccagugacauca

SEQ ID NO: 828392 - RNA, 19 nt, Artificial Sequence
  Description of Artificial Sequence: Synthetic oligonucleotide
  Sense strand starting at position 2696 of SEQ ID NO: 587921
agcucagguaugcauguaa

SEQ ID NO: 828393 - RNA, 19 nt, Artificial Sequence
  Description of Artificial Sequence: Synthetic oligonucleotide
  Antisense strand to SEQ ID NO: 828392
uuacaugcauaccugagcu

SEQ ID NO: 828394 - RNA, 19 nt, Artificial Sequence
  Description of Artificial Sequence: Synthetic oligonucleotide
  Sense strand starting at position 2721 of SEQ ID NO: 587921
cagucugcucuggacuuaa

SEQ ID NO: 828395 - RNA, 19 nt, Artificial Sequence
  Description of Artificial Sequence: Synthetic oligonucleotide
  Antisense strand to SEQ ID NO: 828394
uuaaguccagagcagacug

SEQ ID NO: 828396 - RNA, 19 nt, Artificial Sequence
  Description of Artificial Sequence: Synthetic oligonucleotide
  Sense strand starting at position 2750 of SEQ ID NO: 587921
gaaggcuuugguugaagag

SEQ ID NO: 828397 - RNA, 19 nt, Artificial Sequence
  Description of Artificial Sequence: Synthetic oligonucleotide
  Antisense strand to SEQ ID NO: 828396
cucuucaaccaaagccuuc

SEQ ID NO: 828398 - RNA, 19 nt, Artificial Sequence
  Description of Artificial Sequence: Synthetic oligonucleotide
  Sense strand starting at position 2751 of SEQ ID NO: 587921
aaggcuuugguugaagagu

SEQ ID NO: 828399 - RNA, 19 nt, Artificial Sequence
  Description of Artificial Sequence: Synthetic oligonucleotide
  Antisense strand to SEQ ID NO: 828398
acucuucaaccaaagccuu

SEQ ID NO: 828400 - RNA, 19 nt, Artificial Sequence
  Description of Artificial Sequence: Synthetic oligonucleotide
  Sense strand starting at position 2790 of SEQ ID NO: 587921
aauguaacaucagugaugu

SEQ ID NO: 828401 - RNA, 19 nt, Artificial Sequence
  Description of Artificial Sequence: Synthetic oligonucleotide
  Antisense strand to SEQ ID NO: 828400
acaucacugauguuacauu

SEQ ID NO: 828402 - RNA, 19 nt, Artificial Sequence
  Description of Artificial Sequence: Synthetic oligonucleotide
  Sense strand starting at position 2791 of SEQ ID NO: 587921
auguaacaucagugauguc

SEQ ID NO: 828403 - RNA, 19 nt, Artificial Sequence
  Description of Artificial Sequence: Synthetic oligonucleotide
  Antisense strand to SEQ ID NO: 828402
gacaucacugauguuacau

SEQ ID NO: 828404 - RNA, 19 nt, Artificial Sequence
  Description of Artificial Sequence: Synthetic oligonucleotide
  Sense strand starting at position 2836 of SEQ ID NO: 587921
gucucauuugcauguauau

SEQ ID NO: 828405 - RNA, 19 nt, Artificial Sequence
  Description of Artificial Sequence: Synthetic oligonucleotide
  Antisense strand to SEQ ID NO: 828404
auauacaugcaaaugagac

SEQ ID NO: 828406 - RNA, 19 nt, Artificial Sequence
  Description of Artificial Sequence: Synthetic oligonucleotide
  Sense strand starting at position 2875 of SEQ ID NO: 587921
caacuuaggucauuugugu

SEQ ID NO: 828407 - RNA, 19 nt, Artificial Sequence
  Description of Artificial Sequence: Synthetic oligonucleotide
  Antisense strand to SEQ ID NO: 828406
acacaaaugaccuaaguug

SEQ ID NO: 828408 - RNA, 19 nt, Artificial Sequence
  Description of Artificial Sequence: Synthetic oligonucleotide
  Sense strand starting at position 3213 of SEQ ID NO: 587921
acaacuggcccaugauaag

SEQ ID NO: 828409 - RNA, 19 nt, Artificial Sequence
  Description of Artificial Sequence: Synthetic oligonucleotide
  Antisense strand to SEQ ID NO: 828408
cuuaucaugggccaguugu

SEQ ID NO: 828410 - RNA, 19 nt, Artificial Sequence
  Description of Artificial Sequence: Synthetic oligonucleotide
  Sense strand starting at position 3260 of SEQ ID NO: 587921
cugauaauuggauguugga

SEQ ID NO: 828411 - RNA, 19 nt, Artificial Sequence
  Description of Artificial Sequence: Synthetic oligonucleotide
  Antisense strand to SEQ ID NO: 828410
uccaacauccaauuaucag

SEQ ID NO: 828412 - RNA, 19 nt, Artificial Sequence
  Description of Artificial Sequence: Synthetic oligonucleotide
  Sense strand starting at position 3463 of SEQ ID NO: 587921
uggaguauauugguaacuu

SEQ ID NO: 828413 - RNA, 19 nt, Artificial Sequence
  Description of Artificial Sequence: Synthetic oligonucleotide
  Antisense strand to SEQ ID NO: 828412
aaguuaccaauauacucca

SEQ ID NO: 828414 - RNA, 19 nt, Artificial Sequence
  Description of Artificial Sequence: Synthetic oligonucleotide
  Sense strand starting at position 3594 of SEQ ID NO: 587921
auaacagcauuugaguaau

SEQ ID NO: 828415 - RNA, 19 nt, Artificial Sequence
  Description of Artificial Sequence: Synthetic oligonucleotide
  Antisense strand to SEQ ID NO: 828414
auuacucaaaugcuguuau

SEQ ID NO: 828416 - RNA, 19 nt, Artificial Sequence
  Description of Artificial Sequence: Synthetic oligonucleotide
  Sense strand starting at position 3625 of SEQ ID NO: 587921
aacggaaucuucuuugaag

SEQ ID NO: 828417 - RNA, 19 nt, Artificial Sequence
  Description of Artificial Sequence: Synthetic oligonucleotide
  Antisense strand to SEQ ID NO: 828416
cuucaaagaagauuccguu

SEQ ID NO: 828418 - RNA, 19 nt, Artificial Sequence
  Description of Artificial Sequence: Synthetic oligonucleotide
  Sense strand starting at position 3626 of SEQ ID NO: 587921
acggaaucuucuuugaagu

SEQ ID NO: 828419 - RNA, 19 nt, Artificial Sequence
  Description of Artificial Sequence: Synthetic oligonucleotide
  Antisense strand to SEQ ID NO: 828418
acuucaaagaagauuccgu

SEQ ID NO: 828420 - RNA, 19 nt, Artificial Sequence
  Description of Artificial Sequence: Synthetic oligonucleotide
  Sense strand starting at position 3627 of SEQ ID NO: 587921
cggaaucuucuuugaaguc

SEQ ID NO: 828421 - RNA, 19 nt, Artificial Sequence
  Description of Artificial Sequence: Synthetic oligonucleotide
  Antisense strand to SEQ ID NO: 828420
gacuucaaagaagauuccg

SEQ ID NO: 828422 - RNA, 19 nt, Artificial Sequence
  Description of Artificial Sequence: Synthetic oligonucleotide
  Sense strand starting at position 3636 of SEQ ID NO: 587921
cuuugaagucguuagaauu

SEQ ID NO: 828423 - RNA, 19 nt, Artificial Sequence
  Description of Artificial Sequence: Synthetic oligonucleotide
  Antisense strand to SEQ ID NO: 828422
aauucuaacgacuucaaag

SEQ ID NO: 828424 - RNA, 19 nt, Artificial Sequence
  Description of Artificial Sequence: Synthetic oligonucleotide
  Sense strand starting at position 3712 of SEQ ID NO: 587921
ugucuacgucuugagauaa

SEQ ID NO: 828425 - RNA, 19 nt, Artificial Sequence
  Description of Artificial Sequence: Synthetic oligonucleotide
  Antisense strand to SEQ ID NO: 828424
uuaucucaagacguagaca

SEQ ID NO: 828426 - RNA, 19 nt, Artificial Sequence
  Description of Artificial Sequence: Synthetic oligonucleotide
  Sense strand starting at position 3897 of SEQ ID NO: 587921
gccagauuucuguguccua

SEQ ID NO: 828427 - RNA, 19 nt, Artificial Sequence
  Description of Artificial Sequence: Synthetic oligonucleotide
  Antisense strand to SEQ ID NO: 828426
uaggacacagaaaucuggc

SEQ ID NO: 828428 - RNA, 19 nt, Artificial Sequence
  Description of Artificial Sequence: Synthetic oligonucleotide
  Sense strand starting at position 78 of SEQ ID NO: 587922
ccugucucacaggaauacu

SEQ ID NO: 828429 - RNA, 19 nt, Artificial Sequence
  Description of Artificial Sequence: Synthetic oligonucleotide
  Antisense strand to SEQ ID NO: 828428
aguauuccugugagacagg

SEQ ID NO: 828430 - RNA, 19 nt, Artificial Sequence
  Description of Artificial Sequence: Synthetic oligonucleotide
  Sense strand starting at position 193 of SEQ ID NO: 587922
augaaugaguccuuuggaa

SEQ ID NO: 828431 - RNA, 19 nt, Artificial Sequence
  Description of Artificial Sequence: Synthetic oligonucleotide
  Antisense strand to SEQ ID NO: 828430
uuccaaaggacucauucau

SEQ ID NO: 828432 - RNA, 19 nt, Artificial Sequence
  Description of Artificial Sequence: Synthetic oligonucleotide
  Sense strand starting at position 195 of SEQ ID NO: 587922
gaaugaguccuuuggaacu

SEQ ID NO: 828433 - RNA, 19 nt, Artificial Sequence
  Description of Artificial Sequence: Synthetic oligonucleotide
  Antisense strand to SEQ ID NO: 828432
aguuccaaaggacucauuc

SEQ ID NO: 828434 - RNA, 19 nt, Artificial Sequence
  Description of Artificial Sequence: Synthetic oligonucleotide
  Sense strand starting at position 248 of SEQ ID NO: 587922
ggaugcugcaggcaucaaa

SEQ ID NO: 828435 - RNA, 19 nt, Artificial Sequence
  Description of Artificial Sequence: Synthetic oligonucleotide
  Antisense strand to SEQ ID NO: 828434
uuugaugccugcagcaucc

SEQ ID NO: 828436 - RNA, 19 nt, Artificial Sequence
  Description of Artificial Sequence: Synthetic oligonucleotide
  Sense strand starting at position 362 of SEQ ID NO: 587922
cugucuuagggucagcaau

SEQ ID NO: 828437 - RNA, 19 nt, Artificial Sequence
  Description of Artificial Sequence: Synthetic oligonucleotide
  Antisense strand to SEQ ID NO: 828436
auugcugacccuaagacag

SEQ ID NO: 828438 - RNA, 19 nt, Artificial Sequence
  Description of Artificial Sequence: Synthetic oligonucleotide
  Sense strand starting at position 380 of SEQ ID NO: 587922
ucagcuuggcauuaaagaa

SEQ ID NO: 828439 - RNA, 19 nt, Artificial Sequence
  Description of Artificial Sequence: Synthetic oligonucleotide
  Antisense strand to SEQ ID NO: 828438
uucuuuaaugccaagcuga

SEQ ID NO: 828440 - RNA, 19 nt, Artificial Sequence
  Description of Artificial Sequence: Synthetic oligonucleotide
  Sense strand starting at position 555 of SEQ ID NO: 587922
gccugaguagacugacaau

SEQ ID NO: 828441 - RNA, 19 nt, Artificial Sequence
  Description of Artificial Sequence: Synthetic oligonucleotide
  Antisense strand to SEQ ID NO: 828440
auugucagucuacucaggc

SEQ ID NO: 828442 - RNA, 19 nt, Artificial Sequence
  Description of Artificial Sequence: Synthetic oligonucleotide
  Sense strand starting at position 628 of SEQ ID NO: 587922
accugaaacuuaguaggua

SEQ ID NO: 828443 - RNA, 19 nt, Artificial Sequence
  Description of Artificial Sequence: Synthetic oligonucleotide
  Antisense strand to SEQ ID NO: 828442
uaccuacuaaguuucaggu

SEQ ID NO: 828444 - RNA, 19 nt, Artificial Sequence
  Description of Artificial Sequence: Synthetic oligonucleotide
  Sense strand starting at position 632 of SEQ ID NO: 587922
gaaacuuaguagguaggua

SEQ ID NO: 828445 - RNA, 19 nt, Artificial Sequence
  Description of Artificial Sequence: Synthetic oligonucleotide
  Antisense strand to SEQ ID NO: 828444
uaccuaccuacuaaguuuc

SEQ ID NO: 828446 - RNA, 19 nt, Artificial Sequence
  Description of Artificial Sequence: Synthetic oligonucleotide
  Sense strand starting at position 652 of SEQ ID NO: 587922
ucaguaaauuccuugaacg

SEQ ID NO: 828447 - RNA, 19 nt, Artificial Sequence
  Description of Artificial Sequence: Synthetic oligonucleotide
  Antisense strand to SEQ ID NO: 828446
cguucaaggaauuuacuga

SEQ ID NO: 828448 - RNA, 19 nt, Artificial Sequence
  Description of Artificial Sequence: Synthetic oligonucleotide
  Sense strand starting at position 745 of SEQ ID NO: 587922
gcaccuguucuuggaggaa

SEQ ID NO: 828449 - RNA, 19 nt, Artificial Sequence
  Description of Artificial Sequence: Synthetic oligonucleotide
  Antisense strand to SEQ ID NO: 828448
uuccuccaagaacaggugc

SEQ ID NO: 828450 - RNA, 19 nt, Artificial Sequence
  Description of Artificial Sequence: Synthetic oligonucleotide
  Sense strand starting at position 826 of SEQ ID NO: 587922
ccacaaggcccucaaugau

SEQ ID NO: 828451 - RNA, 19 nt, Artificial Sequence
  Description of Artificial Sequence: Synthetic oligonucleotide
  Antisense strand to SEQ ID NO: 828450
aucauugagggccuugugg

SEQ ID NO: 828452 - RNA, 19 nt, Artificial Sequence
  Description of Artificial Sequence: Synthetic oligonucleotide
  Sense strand starting at position 1201 of SEQ ID NO: 587922
gaaacacacgucugaggau

SEQ ID NO: 828453 - RNA, 19 nt, Artificial Sequence
  Description of Artificial Sequence: Synthetic oligonucleotide
  Antisense strand to SEQ ID NO: 828452
auccucagacguguguuuc

SEQ ID NO: 828454 - RNA, 19 nt, Artificial Sequence
  Description of Artificial Sequence: Synthetic oligonucleotide
  Sense strand starting at position 1383 of SEQ ID NO: 587922
aggugaaugaaguguaaga

SEQ ID NO: 828455 - RNA, 19 nt, Artificial Sequence
  Description of Artificial Sequence: Synthetic oligonucleotide
  Antisense strand to SEQ ID NO: 828454
ucuuacacuucauucaccu

SEQ ID NO: 828456 - RNA, 19 nt, Artificial Sequence
  Description of Artificial Sequence: Synthetic oligonucleotide
  Sense strand starting at position 1394 of SEQ ID NO: 587922
guguaagaaauguaugcca

SEQ ID NO: 828457 - RNA, 19 nt, Artificial Sequence
  Description of Artificial Sequence: Synthetic oligonucleotide
  Antisense strand to SEQ ID NO: 828456
uggcauacauuucuuacac

SEQ ID NO: 828458 - RNA, 19 nt, Artificial Sequence
  Description of Artificial Sequence: Synthetic oligonucleotide
  Sense strand starting at position 1396 of SEQ ID NO: 587922
guaagaaauguaugccaug

SEQ ID NO: 828459 - RNA, 19 nt, Artificial Sequence
  Description of Artificial Sequence: Synthetic oligonucleotide
  Antisense strand to SEQ ID NO: 828458
cauggcauacauuucuuac

SEQ ID NO: 828460 - RNA, 19 nt, Artificial Sequence
  Description of Artificial Sequence: Synthetic oligonucleotide
  Sense strand starting at position 1397 of SEQ ID NO: 587922
uaagaaauguaugccauga

SEQ ID NO: 828461 - RNA, 19 nt, Artificial Sequence
  Description of Artificial Sequence: Synthetic oligonucleotide
  Antisense strand to SEQ ID NO: 828460
ucauggcauacauuucuua

SEQ ID NO: 828462 - RNA, 19 nt, Artificial Sequence
  Description of Artificial Sequence: Synthetic oligonucleotide
  Sense strand starting at position 1402 of SEQ ID NO: 587922
aauguaugccaugaauggu

SEQ ID NO: 828463 - RNA, 19 nt, Artificial Sequence
  Description of Artificial Sequence: Synthetic oligonucleotide
  Antisense strand to SEQ ID NO: 828462
accauucauggcauacauu

SEQ ID NO: 828464 - RNA, 19 nt, Artificial Sequence
  Description of Artificial Sequence: Synthetic oligonucleotide
  Sense strand starting at position 1509 of SEQ ID NO: 587922
uguucuucucuguaaggga

SEQ ID NO: 828465 - RNA, 19 nt, Artificial Sequence
  Description of Artificial Sequence: Synthetic oligonucleotide
  Antisense strand to SEQ ID NO: 828464
ucccuuacagagaagaaca

SEQ ID NO: 828466 - RNA, 19 nt, Artificial Sequence
  Description of Artificial Sequence: Synthetic oligonucleotide
  Sense strand starting at position 1568 of SEQ ID NO: 587922
ggacacucuucccugggaa

SEQ ID NO: 828467 - RNA, 19 nt, Artificial Sequence
  Description of Artificial Sequence: Synthetic oligonucleotide
  Antisense strand to SEQ ID NO: 828466
uucccagggaagagugucc

SEQ ID NO: 828468 - RNA, 19 nt, Artificial Sequence
  Description of Artificial Sequence: Synthetic oligonucleotide
  Sense strand starting at position 1569 of SEQ ID NO: 587922
gacacucuucccugggaag

SEQ ID NO: 828469 - RNA, 19 nt, Artificial Sequence
  Description of Artificial Sequence: Synthetic oligonucleotide
  Antisense strand to SEQ ID NO: 828468
cuucccagggaagaguguc

SEQ ID NO: 828470 - RNA, 19 nt, Artificial Sequence
  Description of Artificial Sequence: Synthetic oligonucleotide
  Sense strand starting at position 2039 of SEQ ID NO: 587922
aguaaauaauacgccugaa

SEQ ID NO: 828471 - RNA, 19 nt, Artificial Sequence
  Description of Artificial Sequence: Synthetic oligonucleotide
  Antisense strand to SEQ ID NO: 828470
uucaggcguauuauuuacu

SEQ ID NO: 828472 - RNA, 19 nt, Artificial Sequence
  Description of Artificial Sequence: Synthetic oligonucleotide
  Sense strand starting at position 2063 of SEQ ID NO: 587922
uggguggguuuggugaaua

SEQ ID NO: 828473 - RNA, 19 nt, Artificial Sequence
  Description of Artificial Sequence: Synthetic oligonucleotide
  Antisense strand to SEQ ID NO: 828472
uauucaccaaacccaccca

SEQ ID NO: 828474 - RNA, 19 nt, Artificial Sequence
  Description of Artificial Sequence: Synthetic oligonucleotide
  Sense strand starting at position 2065 of SEQ ID NO: 587922
gguggguuuggugaauaag

SEQ ID NO: 828475 - RNA, 19 nt, Artificial Sequence
  Description of Artificial Sequence: Synthetic oligonucleotide
  Antisense strand to SEQ ID NO: 828474
cuuauucaccaaacccacc

SEQ ID NO: 828476 - RNA, 19 nt, Artificial Sequence
  Description of Artificial Sequence: Synthetic oligonucleotide
  Sense strand starting at position 2530 of SEQ ID NO: 587922
ugaugucacuggguccaau

SEQ ID NO: 828477 - RNA, 19 nt, Artificial Sequence
  Description of Artificial Sequence: Synthetic oligonucleotide
  Antisense strand to SEQ ID NO: 828476
auuggacccagugacauca

SEQ ID NO: 828478 - RNA, 19 nt, Artificial Sequence
  Description of Artificial Sequence: Synthetic oligonucleotide
  Sense strand starting at position 2720 of SEQ ID NO: 587922
cagucugcucuggacuuaa

SEQ ID NO: 828479 - RNA, 19 nt, Artificial Sequence
  Description of Artificial Sequence: Synthetic oligonucleotide
  Antisense strand to SEQ ID NO: 828478
uuaaguccagagcagacug

SEQ ID NO: 828480 - RNA, 19 nt, Artificial Sequence
  Description of Artificial Sequence: Synthetic oligonucleotide
  Sense strand starting at position 2745 of SEQ ID NO: 587922
ugaagaaggcuuugguuga

SEQ ID NO: 828481 - RNA, 19 nt, Artificial Sequence
  Description of Artificial Sequence: Synthetic oligonucleotide
  Antisense strand to SEQ ID NO: 828480
ucaaccaaagccuucuuca

SEQ ID NO: 828482 - RNA, 19 nt, Artificial Sequence
  Description of Artificial Sequence: Synthetic oligonucleotide
  Sense strand starting at position 2749 of SEQ ID NO: 587922
gaaggcuuugguugaagag

SEQ ID NO: 828483 - RNA, 19 nt, Artificial Sequence
  Description of Artificial Sequence: Synthetic oligonucleotide
  Antisense strand to SEQ ID NO: 828482
cucuucaaccaaagccuuc

SEQ ID NO: 828484 - RNA, 19 nt, Artificial Sequence
  Description of Artificial Sequence: Synthetic oligonucleotide
  Sense strand starting at position 2750 of SEQ ID NO: 587922
aaggcuuugguugaagagu

SEQ ID NO: 828485 - RNA, 19 nt, Artificial Sequence
  Description of Artificial Sequence: Synthetic oligonucleotide
  Antisense strand to SEQ ID NO: 828484
acucuucaaccaaagccuu

SEQ ID NO: 828486 - RNA, 19 nt, Artificial Sequence
  Description of Artificial Sequence: Synthetic oligonucleotide
  Sense strand starting at position 2789 of SEQ ID NO: 587922
aauguaacaucagugaugu

SEQ ID NO: 828487 - RNA, 19 nt, Artificial Sequence
  Description of Artificial Sequence: Synthetic oligonucleotide
  Antisense strand to SEQ ID NO: 828486
acaucacugauguuacauu

SEQ ID NO: 828488 - RNA, 19 nt, Artificial Sequence
  Description of Artificial Sequence: Synthetic oligonucleotide
  Sense strand starting at position 2835 of SEQ ID NO: 587922
gucucauuugcauguauau

SEQ ID NO: 828489 - RNA, 19 nt, Artificial Sequence
  Description of Artificial Sequence: Synthetic oligonucleotide
  Antisense strand to SEQ ID NO: 828488
auauacaugcaaaugagac

SEQ ID NO: 828490 - RNA, 19 nt, Artificial Sequence
  Description of Artificial Sequence: Synthetic oligonucleotide
  Sense strand starting at position 2874 of SEQ ID NO: 587922
caacuuaggucauuugugu

SEQ ID NO: 828491 - RNA, 19 nt, Artificial Sequence
  Description of Artificial Sequence: Synthetic oligonucleotide
  Antisense strand to SEQ ID NO: 828490
acacaaaugaccuaaguug

SEQ ID NO: 828492 - RNA, 19 nt, Artificial Sequence
  Description of Artificial Sequence: Synthetic oligonucleotide
  Sense strand starting at position 3212 of SEQ ID NO: 587922
acaacuggcccaugauaag

SEQ ID NO: 828493 - RNA, 19 nt, Artificial Sequence
  Description of Artificial Sequence: Synthetic oligonucleotide
  Antisense strand to SEQ ID NO: 828492
cuuaucaugggccaguugu

SEQ ID NO: 828494 - RNA, 19 nt, Artificial Sequence
  Description of Artificial Sequence: Synthetic oligonucleotide
  Sense strand starting at position 3259 of SEQ ID NO: 587922
cugauaauuggauguugga

SEQ ID NO: 828495 - RNA, 19 nt, Artificial Sequence
  Description of Artificial Sequence: Synthetic oligonucleotide
  Antisense strand to SEQ ID NO: 828494
uccaacauccaauuaucag

SEQ ID NO: 828496 - RNA, 19 nt, Artificial Sequence
  Description of Artificial Sequence: Synthetic oligonucleotide
  Sense strand starting at position 3462 of SEQ ID NO: 587922
uggaguauauugguaacuu

SEQ ID NO: 828497 - RNA, 19 nt, Artificial Sequence
  Description of Artificial Sequence: Synthetic oligonucleotide
  Antisense strand to SEQ ID NO: 828496
aaguuaccaauauacucca

SEQ ID NO: 828498 - RNA, 19 nt, Artificial Sequence
  Description of Artificial Sequence: Synthetic oligonucleotide
  Sense strand starting at position 3624 of SEQ ID NO: 587922
aacggaaucuucuuugaag

SEQ ID NO: 828499 - RNA, 19 nt, Artificial Sequence
  Description of Artificial Sequence: Synthetic oligonucleotide
  Antisense strand to SEQ ID NO: 828498
cuucaaagaagauuccguu

SEQ ID NO: 828500 - RNA, 19 nt, Artificial Sequence
  Description of Artificial Sequence: Synthetic oligonucleotide
  Sense strand starting at position 3625 of SEQ ID NO: 587922
acggaaucuucuuugaagu

SEQ ID NO: 828501 - RNA, 19 nt, Artificial Sequence
  Description of Artificial Sequence: Synthetic oligonucleotide
  Antisense strand to SEQ ID NO: 828500
acuucaaagaagauuccgu

SEQ ID NO: 828502 - RNA, 19 nt, Artificial Sequence
  Description of Artificial Sequence: Synthetic oligonucleotide
  Sense strand starting at position 3635 of SEQ ID NO: 587922
cuuugaagucguuagaauu

SEQ ID NO: 828503 - RNA, 19 nt, Artificial Sequence
  Description of Artificial Sequence: Synthetic oligonucleotide
  Antisense strand to SEQ ID NO: 828502
aauucuaacgacuucaaag

SEQ ID NO: 828504 - RNA, 19 nt, Artificial Sequence
  Description of Artificial Sequence: Synthetic oligonucleotide
  Sense strand starting at position 3711 of SEQ ID NO: 587922
ugucuacgucuugagauaa

SEQ ID NO: 828505 - RNA, 19 nt, Artificial Sequence
  Description of Artificial Sequence: Synthetic oligonucleotide
  Antisense strand to SEQ ID NO: 828504
uuaucucaagacguagaca

SEQ ID NO: 828506 - RNA, 19 nt, Artificial Sequence
  Description of Artificial Sequence: Synthetic oligonucleotide
  Sense strand starting at position 3896 of SEQ ID NO: 587922
gccagauuucuguguccua

SEQ ID NO: 828507 - RNA, 19 nt, Artificial Sequence
  Description of Artificial Sequence: Synthetic oligonucleotide
  Antisense strand to SEQ ID NO: 828506
uaggacacagaaaucuggc

SEQ ID NO: 828508 - RNA, 19 nt, Artificial Sequence
  Description of Artificial Sequence: Synthetic oligonucleotide
  Sense strand starting at position 79 of SEQ ID NO: 587923
ccugucucacaggaauacu

SEQ ID NO: 828509 - RNA, 19 nt, Artificial Sequence
  Description of Artificial Sequence: Synthetic oligonucleotide
  Antisense strand to SEQ ID NO: 828508
aguauuccugugagacagg

SEQ ID NO: 828510 - RNA, 19 nt, Artificial Sequence
  Description of Artificial Sequence: Synthetic oligonucleotide
  Sense strand starting at position 194 of SEQ ID NO: 587923
augaaugaguccuuuggaa

SEQ ID NO: 828511 - RNA, 19 nt, Artificial Sequence
  Description of Artificial Sequence: Synthetic oligonucleotide
  Antisense strand to SEQ ID NO: 828510
uuccaaaggacucauucau

SEQ ID NO: 828512 - RNA, 19 nt, Artificial Sequence
  Description of Artificial Sequence: Synthetic oligonucleotide
  Sense strand starting at position 196 of SEQ ID NO: 587923
gaaugaguccuuuggaacu

SEQ ID NO: 828513 - RNA, 19 nt, Artificial Sequence
  Description of Artificial Sequence: Synthetic oligonucleotide
  Antisense strand to SEQ ID NO: 828512
aguuccaaaggacucauuc

SEQ ID NO: 828514 - RNA, 19 nt, Artificial Sequence
  Description of Artificial Sequence: Synthetic oligonucleotide
  Sense strand starting at position 249 of SEQ ID NO: 587923
ggaugcugcaggcaucaaa

SEQ ID NO: 828515 - RNA, 19 nt, Artificial Sequence
  Description of Artificial Sequence: Synthetic oligonucleotide
  Antisense strand to SEQ ID NO: 828514
uuugaugccugcagcaucc

SEQ ID NO: 828516 - RNA, 19 nt, Artificial Sequence
  Description of Artificial Sequence: Synthetic oligonucleotide
  Sense strand starting at position 363 of SEQ ID NO: 587923
cugucuuagggucagcaau

SEQ ID NO: 828517 - RNA, 19 nt, Artificial Sequence
  Description of Artificial Sequence: Synthetic oligonucleotide
  Antisense strand to SEQ ID NO: 828516
auugcugacccuaagacag

SEQ ID NO: 828518 - RNA, 19 nt, Artificial Sequence
  Description of Artificial Sequence: Synthetic oligonucleotide
  Sense strand starting at position 556 of SEQ ID NO: 587923
gccugaguagacugacaau

SEQ ID NO: 828519 - RNA, 19 nt, Artificial Sequence
  Description of Artificial Sequence: Synthetic oligonucleotide
  Antisense strand to SEQ ID NO: 828518
auugucagucuacucaggc

SEQ ID NO: 828520 - RNA, 19 nt, Artificial Sequence
  Description of Artificial Sequence: Synthetic oligonucleotide
  Sense strand starting at position 602 of SEQ ID NO: 587923
ggaagcauuucccagaccu

SEQ ID NO: 828521 - RNA, 19 nt, Artificial Sequence
  Description of Artificial Sequence: Synthetic oligonucleotide
  Antisense strand to SEQ ID NO: 828520
aggucugggaaaugcuucc

SEQ ID NO: 828522 - RNA, 19 nt, Artificial Sequence
  Description of Artificial Sequence: Synthetic oligonucleotide
  Sense strand starting at position 629 of SEQ ID NO: 587923
accugaaacuuaguaggua

SEQ ID NO: 828523 - RNA, 19 nt, Artificial Sequence
  Description of Artificial Sequence: Synthetic oligonucleotide
  Antisense strand to SEQ ID NO: 828522
uaccuacuaaguuucaggu

SEQ ID NO: 828524 - RNA, 19 nt, Artificial Sequence
  Description of Artificial Sequence: Synthetic oligonucleotide
  Sense strand starting at position 633 of SEQ ID NO: 587923
gaaacuuaguagguaggua

SEQ ID NO: 828525 - RNA, 19 nt, Artificial Sequence
  Description of Artificial Sequence: Synthetic oligonucleotide
  Antisense strand to SEQ ID NO: 828524
uaccuaccuacuaaguuuc

SEQ ID NO: 828526 - RNA, 19 nt, Artificial Sequence
  Description of Artificial Sequence: Synthetic oligonucleotide
  Sense strand starting at position 653 of SEQ ID NO: 587923
ucaguaaauuccuugaacg

SEQ ID NO: 828527 - RNA, 19 nt, Artificial Sequence
  Description of Artificial Sequence: Synthetic oligonucleotide
  Antisense strand to SEQ ID NO: 828526
cguucaaggaauuuacuga

SEQ ID NO: 828528 - RNA, 19 nt, Artificial Sequence
  Description of Artificial Sequence: Synthetic oligonucleotide
  Sense strand starting at position 746 of SEQ ID NO: 587923
gcaccuguucuuggaggaa

SEQ ID NO: 828529 - RNA, 19 nt, Artificial Sequence
  Description of Artificial Sequence: Synthetic oligonucleotide
  Antisense strand to SEQ ID NO: 828528
uuccuccaagaacaggugc

SEQ ID NO: 828530 - RNA, 19 nt, Artificial Sequence
  Description of Artificial Sequence: Synthetic oligonucleotide
  Sense strand starting at position 827 of SEQ ID NO: 587923
ccacaaggcccucaaugau

SEQ ID NO: 828531 - RNA, 19 nt, Artificial Sequence
  Description of Artificial Sequence: Synthetic oligonucleotide
  Antisense strand to SEQ ID NO: 828530
aucauugagggccuugugg

SEQ ID NO: 828532 - RNA, 19 nt, Artificial Sequence
  Description of Artificial Sequence: Synthetic oligonucleotide
  Sense strand starting at position 1384 of SEQ ID NO: 587923
aggugaaugaaguguaaga

SEQ ID NO: 828533 - RNA, 19 nt, Artificial Sequence
  Description of Artificial Sequence: Synthetic oligonucleotide
  Antisense strand to SEQ ID NO: 828532
ucuuacacuucauucaccu

SEQ ID NO: 828534 - RNA, 19 nt, Artificial Sequence
  Description of Artificial Sequence: Synthetic oligonucleotide
  Sense strand starting at position 1395 of SEQ ID NO: 587923
guguaagaaauguaugcca

SEQ ID NO: 828535 - RNA, 19 nt, Artificial Sequence
  Description of Artificial Sequence: Synthetic oligonucleotide
  Antisense strand to SEQ ID NO: 828534
uggcauacauuucuuacac

SEQ ID NO: 828536 - RNA, 19 nt, Artificial Sequence
  Description of Artificial Sequence: Synthetic oligonucleotide
  Sense strand starting at position 1397 of SEQ ID NO: 587923
guaagaaauguaugccaug

SEQ ID NO: 828537 - RNA, 19 nt, Artificial Sequence
  Description of Artificial Sequence: Synthetic oligonucleotide
  Antisense strand to SEQ ID NO: 828536
cauggcauacauuucuuac

SEQ ID NO: 828538 - RNA, 19 nt, Artificial Sequence
  Description of Artificial Sequence: Synthetic oligonucleotide
  Sense strand starting at position 1398 of SEQ ID NO: 587923
uaagaaauguaugccauga

SEQ ID NO: 828539 - RNA, 19 nt, Artificial Sequence
  Description of Artificial Sequence: Synthetic oligonucleotide
  Antisense strand to SEQ ID NO: 828538
ucauggcauacauuucuua

SEQ ID NO: 828540 - RNA, 19 nt, Artificial Sequence
  Description of Artificial Sequence: Synthetic oligonucleotide
  Sense strand starting at position 1403 of SEQ ID NO: 587923
aauguaugccaugaauggu

SEQ ID NO: 828541 - RNA, 19 nt, Artificial Sequence
  Description of Artificial Sequence: Synthetic oligonucleotide
  Antisense strand to SEQ ID NO: 828540
accauucauggcauacauu

SEQ ID NO: 828542 - RNA, 19 nt, Artificial Sequence
  Description of Artificial Sequence: Synthetic oligonucleotide
  Sense strand starting at position 1444 of SEQ ID NO: 587923
ccagcacagccagagaauu

SEQ ID NO: 828543 - RNA, 19 nt, Artificial Sequence
  Description of Artificial Sequence: Synthetic oligonucleotide
  Antisense strand to SEQ ID NO: 828542
aauucucuggcugugcugg

SEQ ID NO: 828544 - RNA, 19 nt, Artificial Sequence
  Description of Artificial Sequence: Synthetic oligonucleotide
  Sense strand starting at position 1570 of SEQ ID NO: 587923
gacacucuucccugggaag

SEQ ID NO: 828545 - RNA, 19 nt, Artificial Sequence
  Description of Artificial Sequence: Synthetic oligonucleotide
  Antisense strand to SEQ ID NO: 828544
cuucccagggaagaguguc

SEQ ID NO: 828546 - RNA, 19 nt, Artificial Sequence
  Description of Artificial Sequence: Synthetic oligonucleotide
  Sense strand starting at position 2064 of SEQ ID NO: 587923
uggguggguuuggugaaua

SEQ ID NO: 828547 - RNA, 19 nt, Artificial Sequence
  Description of Artificial Sequence: Synthetic oligonucleotide
  Antisense strand to SEQ ID NO: 828546
uauucaccaaacccaccca

SEQ ID NO: 828548 - RNA, 19 nt, Artificial Sequence
  Description of Artificial Sequence: Synthetic oligonucleotide
  Sense strand starting at position 2066 of SEQ ID NO: 587923
gguggguuuggugaauaag

SEQ ID NO: 828549 - RNA, 19 nt, Artificial Sequence
  Description of Artificial Sequence: Synthetic oligonucleotide
  Antisense strand to SEQ ID NO: 828548
cuuauucaccaaacccacc

SEQ ID NO: 828550 - RNA, 19 nt, Artificial Sequence
  Description of Artificial Sequence: Synthetic oligonucleotide
  Sense strand starting at position 2531 of SEQ ID NO: 587923
ugaugucacuggguccaau

SEQ ID NO: 828551 - RNA, 19 nt, Artificial Sequence
  Description of Artificial Sequence: Synthetic oligonucleotide
  Antisense strand to SEQ ID NO: 828550
auuggacccagugacauca

SEQ ID NO: 828552 - RNA, 19 nt, Artificial Sequence
  Description of Artificial Sequence: Synthetic oligonucleotide
  Sense strand starting at position 2696 of SEQ ID NO: 587923
agcucagguaugcauguaa

SEQ ID NO: 828553 - RNA, 19 nt, Artificial Sequence
  Description of Artificial Sequence: Synthetic oligonucleotide
  Antisense strand to SEQ ID NO: 828552
uuacaugcauaccugagcu

SEQ ID NO: 828554 - RNA, 19 nt, Artificial Sequence
  Description of Artificial Sequence: Synthetic oligonucleotide
  Sense strand starting at position 2721 of SEQ ID NO: 587923
cagucugcucuggacuuaa

SEQ ID NO: 828555 - RNA, 19 nt, Artificial Sequence
  Description of Artificial Sequence: Synthetic oligonucleotide
  Antisense strand to SEQ ID NO: 828554
uuaaguccagagcagacug

SEQ ID NO: 828556 - RNA, 19 nt, Artificial Sequence
  Description of Artificial Sequence: Synthetic oligonucleotide
  Sense strand starting at position 2750 of SEQ ID NO: 587923
gaaggcuuugguugaagag

SEQ ID NO: 828557 - RNA, 19 nt, Artificial Sequence
  Description of Artificial Sequence: Synthetic oligonucleotide
  Antisense strand to SEQ ID NO: 828556
cucuucaaccaaagccuuc

SEQ ID NO: 828558 - RNA, 19 nt, Artificial Sequence
  Description of Artificial Sequence: Synthetic oligonucleotide
  Sense strand starting at position 2751 of SEQ ID NO: 587923
aaggcuuugguugaagagu

SEQ ID NO: 828559 - RNA, 19 nt, Artificial Sequence
  Description of Artificial Sequence: Synthetic oligonucleotide
  Antisense strand to SEQ ID NO: 828558
acucuucaaccaaagccuu

SEQ ID NO: 828560 - RNA, 19 nt, Artificial Sequence
  Description of Artificial Sequence: Synthetic oligonucleotide
  Sense strand starting at position 2790 of SEQ ID NO: 587923
aauguaacaucagugaugu

SEQ ID NO: 828561 - RNA, 19 nt, Artificial Sequence
  Description of Artificial Sequence: Synthetic oligonucleotide
  Antisense strand to SEQ ID NO: 828560
acaucacugauguuacauu

SEQ ID NO: 828562 - RNA, 19 nt, Artificial Sequence
  Description of Artificial Sequence: Synthetic oligonucleotide
  Sense strand starting at position 2791 of SEQ ID NO: 587923
auguaacaucagugauguc

SEQ ID NO: 828563 - RNA, 19 nt, Artificial Sequence
  Description of Artificial Sequence: Synthetic oligonucleotide
  Antisense strand to SEQ ID NO: 828562
gacaucacugauguuacau

SEQ ID NO: 828564 - RNA, 19 nt, Artificial Sequence
  Description of Artificial Sequence: Synthetic oligonucleotide
  Sense strand starting at position 2836 of SEQ ID NO: 587923
gucucauuugcauguauau

SEQ ID NO: 828565 - RNA, 19 nt, Artificial Sequence
  Description of Artificial Sequence: Synthetic oligonucleotide
  Antisense strand to SEQ ID NO: 828564
auauacaugcaaaugagac

SEQ ID NO: 828566 - RNA, 19 nt, Artificial Sequence
  Description of Artificial Sequence: Synthetic oligonucleotide
  Sense strand starting at position 2875 of SEQ ID NO: 587923
caacuuaggucauuugugu

SEQ ID NO: 828567 - RNA, 19 nt, Artificial Sequence
  Description of Artificial Sequence: Synthetic oligonucleotide
  Antisense strand to SEQ ID NO: 828566
acacaaaugaccuaaguug

SEQ ID NO: 828568 - RNA, 19 nt, Artificial Sequence
  Description of Artificial Sequence: Synthetic oligonucleotide
  Sense strand starting at position 3213 of SEQ ID NO: 587923
acaacuggcccaugauaag

SEQ ID NO: 828569 - RNA, 19 nt, Artificial Sequence
  Description of Artificial Sequence: Synthetic oligonucleotide
  Antisense strand to SEQ ID NO: 828568
cuuaucaugggccaguugu

SEQ ID NO: 828570 - RNA, 19 nt, Artificial Sequence
  Description of Artificial Sequence: Synthetic oligonucleotide
  Sense strand starting at position 3260 of SEQ ID NO: 587923
cugauaauuggauguugga

SEQ ID NO: 828571 - RNA, 19 nt, Artificial Sequence
  Description of Artificial Sequence: Synthetic oligonucleotide
  Antisense strand to SEQ ID NO: 828570
uccaacauccaauuaucag

SEQ ID NO: 828572 - RNA, 19 nt, Artificial Sequence
  Description of Artificial Sequence: Synthetic oligonucleotide
  Sense strand starting at position 3463 of SEQ ID NO: 587923
uggaguauauugguaacuu

SEQ ID NO: 828573 - RNA, 19 nt, Artificial Sequence
  Description of Artificial Sequence: Synthetic oligonucleotide
  Antisense strand to SEQ ID NO: 828572
aaguuaccaauauacucca

SEQ ID NO: 828574 - RNA, 19 nt, Artificial Sequence
  Description of Artificial Sequence: Synthetic oligonucleotide
  Sense strand starting at position 3594 of SEQ ID NO: 587923
auaacagcauuugaguaau

SEQ ID NO: 828575 - RNA, 19 nt, Artificial Sequence
  Description of Artificial Sequence: Synthetic oligonucleotide
  Antisense strand to SEQ ID NO: 828574
auuacucaaaugcuguuau

SEQ ID NO: 828576 - RNA, 19 nt, Artificial Sequence
  Description of Artificial Sequence: Synthetic oligonucleotide
  Sense strand starting at position 3625 of SEQ ID NO: 587923
aacggaaucuucuuugaag

SEQ ID NO: 828577 - RNA, 19 nt, Artificial Sequence
  Description of Artificial Sequence: Synthetic oligonucleotide
  Antisense strand to SEQ ID NO: 828576
cuucaaagaagauuccguu

SEQ ID NO: 828578 - RNA, 19 nt, Artificial Sequence
  Description of Artificial Sequence: Synthetic oligonucleotide
  Sense strand starting at position 3626 of SEQ ID NO: 587923
acggaaucuucuuugaagu

SEQ ID NO: 828579 - RNA, 19 nt, Artificial Sequence
  Description of Artificial Sequence: Synthetic oligonucleotide
  Antisense strand to SEQ ID NO: 828578
acuucaaagaagauuccgu

SEQ ID NO: 828580 - RNA, 19 nt, Artificial Sequence
  Description of Artificial Sequence: Synthetic oligonucleotide
  Sense strand starting at position 3627 of SEQ ID NO: 587923
cggaaucuucuuugaaguc

SEQ ID NO: 828581 - RNA, 19 nt, Artificial Sequence
  Description of Artificial Sequence: Synthetic oligonucleotide
  Antisense strand to SEQ ID NO: 828580
gacuucaaagaagauuccg

SEQ ID NO: 828582 - RNA, 19 nt, Artificial Sequence
  Description of Artificial Sequence: Synthetic oligonucleotide
  Sense strand starting at position 3636 of SEQ ID NO: 587923
cuuugaagucguuagaauu

SEQ ID NO: 828583 - RNA, 19 nt, Artificial Sequence
  Description of Artificial Sequence: Synthetic oligonucleotide
  Antisense strand to SEQ ID NO: 828582
aauucuaacgacuucaaag

SEQ ID NO: 828584 - RNA, 19 nt, Artificial Sequence
  Description of Artificial Sequence: Synthetic oligonucleotide
  Sense strand starting at position 3712 of SEQ ID NO: 587923
ugucuacgucuugagauaa

SEQ ID NO: 828585 - RNA, 19 nt, Artificial Sequence
  Description of Artificial Sequence: Synthetic oligonucleotide
  Antisense strand to SEQ ID NO: 828584
uuaucucaagacguagaca

SEQ ID NO: 828586 - RNA, 19 nt, Artificial Sequence
  Description of Artificial Sequence: Synthetic oligonucleotide
  Sense strand starting at position 3897 of SEQ ID NO: 587923
gccagauuucuguguccua

SEQ ID NO: 828587 - RNA, 19 nt, Artificial Sequence
  Description of Artificial Sequence: Synthetic oligonucleotide
  Antisense strand to SEQ ID NO: 828586
uaggacacagaaaucuggc

SEQ ID NO: 828588 - RNA, 19 nt, Artificial Sequence
  Description of Artificial Sequence: Synthetic oligonucleotide
  Sense strand starting at position 2 of SEQ ID NO: 587924
ugguaagaaagaugucauc

SEQ ID NO: 828589 - RNA, 19 nt, Artificial Sequence
  Description of Artificial Sequence: Synthetic oligonucleotide
  Antisense strand to SEQ ID NO: 828588
gaugacaucuuucuuacca

SEQ ID NO: 828590 - RNA, 19 nt, Artificial Sequence
  Description of Artificial Sequence: Synthetic oligonucleotide
  Sense strand starting at position 49 of SEQ ID NO: 587924
gcauuuaugucucucugaa

SEQ ID NO: 828591 - RNA, 19 nt, Artificial Sequence
  Description of Artificial Sequence: Synthetic oligonucleotide
  Antisense strand to SEQ ID NO: 828590
uucagagagacauaaaugc

SEQ ID NO: 828592 - RNA, 19 nt, Artificial Sequence
  Description of Artificial Sequence: Synthetic oligonucleotide
  Sense strand starting at position 118 of SEQ ID NO: 587924
gagauauucccuugacuag

SEQ ID NO: 828593 - RNA, 19 nt, Artificial Sequence
  Description of Artificial Sequence: Synthetic oligonucleotide
  Antisense strand to SEQ ID NO: 828592
cuagucaagggaauaucuc

SEQ ID NO: 828594 - RNA, 19 nt, Artificial Sequence
  Description of Artificial Sequence: Synthetic oligonucleotide
  Sense strand starting at position 414 of SEQ ID NO: 587924
acaccuauuccagggauca

SEQ ID NO: 828595 - RNA, 19 nt, Artificial Sequence
  Description of Artificial Sequence: Synthetic oligonucleotide
  Antisense strand to SEQ ID NO: 828594
ugaucccuggaauaggugu

SEQ ID NO: 828596 - RNA, 19 nt, Artificial Sequence
  Description of Artificial Sequence: Synthetic oligonucleotide
  Sense strand starting at position 415 of SEQ ID NO: 587924
caccuauuccagggaucag

SEQ ID NO: 828597 - RNA, 19 nt, Artificial Sequence
  Description of Artificial Sequence: Synthetic oligonucleotide
  Antisense strand to SEQ ID NO: 828596
cugaucccuggaauaggug

SEQ ID NO: 828598 - RNA, 19 nt, Artificial Sequence
  Description of Artificial Sequence: Synthetic oligonucleotide
  Sense strand starting at position 613 of SEQ ID NO: 587924
aggguuauauauucugaca

SEQ ID NO: 828599 - RNA, 19 nt, Artificial Sequence
  Description of Artificial Sequence: Synthetic oligonucleotide
  Antisense strand to SEQ ID NO: 828598
ugucagaauauauaacccu

SEQ ID NO: 828600 - RNA, 19 nt, Artificial Sequence
  Description of Artificial Sequence: Synthetic oligonucleotide
  Sense strand starting at position 811 of SEQ ID NO: 587924
gagccucccggugagagau

SEQ ID NO: 828601 - RNA, 19 nt, Artificial Sequence
  Description of Artificial Sequence: Synthetic oligonucleotide
  Antisense strand to SEQ ID NO: 828600
aucucucaccgggaggcuc

SEQ ID NO: 828602 - RNA, 19 nt, Artificial Sequence
  Description of Artificial Sequence: Synthetic oligonucleotide
  Sense strand starting at position 821 of SEQ ID NO: 587924
gugagagaugugcacuaga

SEQ ID NO: 828603 - RNA, 19 nt, Artificial Sequence
  Description of Artificial Sequence: Synthetic oligonucleotide
  Antisense strand to SEQ ID NO: 828602
ucuagugcacaucucucac

SEQ ID NO: 828604 - RNA, 19 nt, Artificial Sequence
  Description of Artificial Sequence: Synthetic oligonucleotide
  Sense strand starting at position 887 of SEQ ID NO: 587924
aggucuuggucucuaagga

SEQ ID NO: 828605 - RNA, 19 nt, Artificial Sequence
  Description of Artificial Sequence: Synthetic oligonucleotide
  Antisense strand to SEQ ID NO: 828604
uccuuagagaccaagaccu

SEQ ID NO: 828606 - RNA, 19 nt, Artificial Sequence
  Description of Artificial Sequence: Synthetic oligonucleotide
  Sense strand starting at position 888 of SEQ ID NO: 587924
ggucuuggucucuaaggaa

SEQ ID NO: 828607 - RNA, 19 nt, Artificial Sequence
  Description of Artificial Sequence: Synthetic oligonucleotide
  Antisense strand to SEQ ID NO: 828606
uuccuuagagaccaagacc

SEQ ID NO: 828608 - RNA, 19 nt, Artificial Sequence
  Description of Artificial Sequence: Synthetic oligonucleotide
  Sense strand starting at position 1008 of SEQ ID NO: 587924
gggcuuguaagucacaaau

SEQ ID NO: 828609 - RNA, 19 nt, Artificial Sequence
  Description of Artificial Sequence: Synthetic oligonucleotide
  Antisense strand to SEQ ID NO: 828608
auuugugacuuacaagccc

SEQ ID NO: 828610 - RNA, 19 nt, Artificial Sequence
  Description of Artificial Sequence: Synthetic oligonucleotide
  Sense strand starting at position 1163 of SEQ ID NO: 587924
aguguuggucuugcgugau

SEQ ID NO: 828611 - RNA, 19 nt, Artificial Sequence
  Description of Artificial Sequence: Synthetic oligonucleotide
  Antisense strand to SEQ ID NO: 828610
aucacgcaagaccaacacu

SEQ ID NO: 828612 - RNA, 19 nt, Artificial Sequence
  Description of Artificial Sequence: Synthetic oligonucleotide
  Sense strand starting at position 1221 of SEQ ID NO: 587924
ggucuaaucccugauucug

SEQ ID NO: 828613 - RNA, 19 nt, Artificial Sequence
  Description of Artificial Sequence: Synthetic oligonucleotide
  Antisense strand to SEQ ID NO: 828612
cagaaucagggauuagacc

SEQ ID NO: 828614 - RNA, 19 nt, Artificial Sequence
  Description of Artificial Sequence: Synthetic oligonucleotide
  Sense strand starting at position 1898 of SEQ ID NO: 587924
guuuguuuggaccaaacaa

SEQ ID NO: 828615 - RNA, 19 nt, Artificial Sequence
  Description of Artificial Sequence: Synthetic oligonucleotide
  Antisense strand to SEQ ID NO: 828614
uuguuugguccaaacaaac

SEQ ID NO: 828616 - RNA, 19 nt, Artificial Sequence
  Description of Artificial Sequence: Synthetic oligonucleotide
  Sense strand starting at position 1981 of SEQ ID NO: 587924
cgugaaggagcacaaauau

SEQ ID NO: 828617 - RNA, 19 nt, Artificial Sequence
  Description of Artificial Sequence: Synthetic oligonucleotide
  Antisense strand to SEQ ID NO: 828616
auauuugugcuccuucacg

SEQ ID NO: 828618 - RNA, 19 nt, Artificial Sequence
  Description of Artificial Sequence: Synthetic oligonucleotide
  Sense strand starting at position 2059 of SEQ ID NO: 587924
ugggaauacugaucagcau

SEQ ID NO: 828619 - RNA, 19 nt, Artificial Sequence
  Description of Artificial Sequence: Synthetic oligonucleotide
  Antisense strand to SEQ ID NO: 828618
augcugaucaguauuccca

SEQ ID NO: 828620 - RNA, 19 nt, Artificial Sequence
  Description of Artificial Sequence: Synthetic oligonucleotide
  Sense strand starting at position 2066 of SEQ ID NO: 587924
acugaucagcaugagcaua

SEQ ID NO: 828621 - RNA, 19 nt, Artificial Sequence
  Description of Artificial Sequence: Synthetic oligonucleotide
  Antisense strand to SEQ ID NO: 828620
uaugcucaugcugaucagu

SEQ ID NO: 828622 - RNA, 19 nt, Artificial Sequence
  Description of Artificial Sequence: Synthetic oligonucleotide
  Sense strand starting at position 2113 of SEQ ID NO: 587924
ggcagaagguuacugacua

SEQ ID NO: 828623 - RNA, 19 nt, Artificial Sequence
  Description of Artificial Sequence: Synthetic oligonucleotide
  Antisense strand to SEQ ID NO: 828622
uagucaguaaccuucugcc

SEQ ID NO: 828624 - RNA, 19 nt, Artificial Sequence
  Description of Artificial Sequence: Synthetic oligonucleotide
  Sense strand starting at position 2117 of SEQ ID NO: 587924
gaagguuacugacuacucu

SEQ ID NO: 828625 - RNA, 19 nt, Artificial Sequence
  Description of Artificial Sequence: Synthetic oligonucleotide
  Antisense strand to SEQ ID NO: 828624
agaguagucaguaaccuuc

SEQ ID NO: 828626 - RNA, 19 nt, Artificial Sequence
  Description of Artificial Sequence: Synthetic oligonucleotide
  Sense strand starting at position 2281 of SEQ ID NO: 587924
agacaugguuguguaaaga

SEQ ID NO: 828627 - RNA, 19 nt, Artificial Sequence
  Description of Artificial Sequence: Synthetic oligonucleotide
  Antisense strand to SEQ ID NO: 828626
ucuuuacacaaccaugucu

SEQ ID NO: 828628 - RNA, 19 nt, Artificial Sequence
  Description of Artificial Sequence: Synthetic oligonucleotide
  Sense strand starting at position 2335 of SEQ ID NO: 587924
cacaguugagcagauaauu

SEQ ID NO: 828629 - RNA, 19 nt, Artificial Sequence
  Description of Artificial Sequence: Synthetic oligonucleotide
  Antisense strand to SEQ ID NO: 828628
aauuaucugcucaacugug

SEQ ID NO: 828630 - RNA, 19 nt, Artificial Sequence
  Description of Artificial Sequence: Synthetic oligonucleotide
  Sense strand starting at position 2575 of SEQ ID NO: 587924
aaacgcuaugcugaaagaa

SEQ ID NO: 828631 - RNA, 19 nt, Artificial Sequence
  Description of Artificial Sequence: Synthetic oligonucleotide
  Antisense strand to SEQ ID NO: 828630
uucuuucagcauagcguuu

SEQ ID NO: 828632 - RNA, 19 nt, Artificial Sequence
  Description of Artificial Sequence: Synthetic oligonucleotide
  Sense strand starting at position 2653 of SEQ ID NO: 587924
uaugaagagccaggauauu

SEQ ID NO: 828633 - RNA, 19 nt, Artificial Sequence
  Description of Artificial Sequence: Synthetic oligonucleotide
  Antisense strand to SEQ ID NO: 828632
aauauccuggcucuucaua

SEQ ID NO: 828634 - RNA, 19 nt, Artificial Sequence
  Description of Artificial Sequence: Synthetic oligonucleotide
  Sense strand starting at position 2666 of SEQ ID NO: 587924
gauauugucuacuuuggag

SEQ ID NO: 828635 - RNA, 19 nt, Artificial Sequence
  Description of Artificial Sequence: Synthetic oligonucleotide
  Antisense strand to SEQ ID NO: 828634
cuccaaaguagacaauauc

SEQ ID NO: 828636 - RNA, 19 nt, Artificial Sequence
  Description of Artificial Sequence: Synthetic oligonucleotide
  Sense strand starting at position 2668 of SEQ ID NO: 587924
uauugucuacuuuggagga

SEQ ID NO: 828637 - RNA, 19 nt, Artificial Sequence
  Description of Artificial Sequence: Synthetic oligonucleotide
  Antisense strand to SEQ ID NO: 828636
uccuccaaaguagacaaua

SEQ ID NO: 828638 - RNA, 19 nt, Artificial Sequence
  Description of Artificial Sequence: Synthetic oligonucleotide
  Sense strand starting at position 2696 of SEQ ID NO: 587924
gcucuucucucauuugaug

SEQ ID NO: 828639 - RNA, 19 nt, Artificial Sequence
  Description of Artificial Sequence: Synthetic oligonucleotide
  Antisense strand to SEQ ID NO: 828638
caucaaaugagagaagagc

SEQ ID NO: 828640 - RNA, 19 nt, Artificial Sequence
  Description of Artificial Sequence: Synthetic oligonucleotide
  Sense strand starting at position 2944 of SEQ ID NO: 587924
gucccaggaucacuuagau

SEQ ID NO: 828641 - RNA, 19 nt, Artificial Sequence
  Description of Artificial Sequence: Synthetic oligonucleotide
  Antisense strand to SEQ ID NO: 828640
aucuaagugauccugggac

SEQ ID NO: 828642 - RNA, 19 nt, Artificial Sequence
  Description of Artificial Sequence: Synthetic oligonucleotide
  Sense strand starting at position 3085 of SEQ ID NO: 587924
uguguauggaagcagagau

SEQ ID NO: 828643 - RNA, 19 nt, Artificial Sequence
  Description of Artificial Sequence: Synthetic oligonucleotide
  Antisense strand to SEQ ID NO: 828642
aucucugcuuccauacaca

SEQ ID NO: 828644 - RNA, 19 nt, Artificial Sequence
  Description of Artificial Sequence: Synthetic oligonucleotide
  Sense strand starting at position 3121 of SEQ ID NO: 587924
uuauguaagcaauagcaga

SEQ ID NO: 828645 - RNA, 19 nt, Artificial Sequence
  Description of Artificial Sequence: Synthetic oligonucleotide
  Antisense strand to SEQ ID NO: 828644
ucugcuauugcuuacauaa

SEQ ID NO: 828646 - RNA, 19 nt, Artificial Sequence
  Description of Artificial Sequence: Synthetic oligonucleotide
  Sense strand starting at position 3153 of SEQ ID NO: 587924
ucuggacuugccuauauua

SEQ ID NO: 828647 - RNA, 19 nt, Artificial Sequence
  Description of Artificial Sequence: Synthetic oligonucleotide
  Antisense strand to SEQ ID NO: 828646
uaauauaggcaaguccaga

SEQ ID NO: 828648 - RNA, 19 nt, Artificial Sequence
  Description of Artificial Sequence: Synthetic oligonucleotide
  Sense strand starting at position 3155 of SEQ ID NO: 587924
uggacuugccuauauuacu

SEQ ID NO: 828649 - RNA, 19 nt, Artificial Sequence
  Description of Artificial Sequence: Synthetic oligonucleotide
  Antisense strand to SEQ ID NO: 828648
aguaauauaggcaagucca

SEQ ID NO: 828650 - RNA, 19 nt, Artificial Sequence
  Description of Artificial Sequence: Synthetic oligonucleotide
  Sense strand starting at position 3181 of SEQ ID NO: 587924
gcuugcagagccuuguuau

SEQ ID NO: 828651 - RNA, 19 nt, Artificial Sequence
  Description of Artificial Sequence: Synthetic oligonucleotide
  Antisense strand to SEQ ID NO: 828650
auaacaaggcucugcaagc

SEQ ID NO: 828652 - RNA, 19 nt, Artificial Sequence
  Description of Artificial Sequence: Synthetic oligonucleotide
  Sense strand starting at position 3234 of SEQ ID NO: 587924
ugucuucugcguuauuuaa

SEQ ID NO: 828653 - RNA, 19 nt, Artificial Sequence
  Description of Artificial Sequence: Synthetic oligonucleotide
  Antisense strand to SEQ ID NO: 828652
uuaaauaacgcagaagaca

SEQ ID NO: 828654 - RNA, 19 nt, Artificial Sequence
  Description of Artificial Sequence: Synthetic oligonucleotide
  Sense strand starting at position 3269 of SEQ ID NO: 587924
auaucucaccaugagucuu

SEQ ID NO: 828655 - RNA, 19 nt, Artificial Sequence
  Description of Artificial Sequence: Synthetic oligonucleotide
  Antisense strand to SEQ ID NO: 828654
aagacucauggugagauau

SEQ ID NO: 828656 - RNA, 19 nt, Artificial Sequence
  Description of Artificial Sequence: Synthetic oligonucleotide
  Sense strand starting at position 3277 of SEQ ID NO: 587924
ccaugagucuuaccuagac

SEQ ID NO: 828657 - RNA, 19 nt, Artificial Sequence
  Description of Artificial Sequence: Synthetic oligonucleotide
  Antisense strand to SEQ ID NO: 828656
gucuagguaagacucaugg

SEQ ID NO: 828658 - RNA, 19 nt, Artificial Sequence
  Description of Artificial Sequence: Synthetic oligonucleotide
  Sense strand starting at position 3629 of SEQ ID NO: 587924
gguccaacucaguacuuua

SEQ ID NO: 828659 - RNA, 19 nt, Artificial Sequence
  Description of Artificial Sequence: Synthetic oligonucleotide
  Antisense strand to SEQ ID NO: 828658
uaaaguacugaguuggacc

SEQ ID NO: 828660 - RNA, 19 nt, Artificial Sequence
  Description of Artificial Sequence: Synthetic oligonucleotide
  Sense strand starting at position 3666 of SEQ ID NO: 587924
gaaauucuuucucugugga

SEQ ID NO: 828661 - RNA, 19 nt, Artificial Sequence
  Description of Artificial Sequence: Synthetic oligonucleotide
  Antisense strand to SEQ ID NO: 828660
uccacagagaaagaauuuc

SEQ ID NO: 828662 - RNA, 19 nt, Artificial Sequence
  Description of Artificial Sequence: Synthetic oligonucleotide
  Sense strand starting at position 3790 of SEQ ID NO: 587924
ccaagaugauacccuaagu

SEQ ID NO: 828663 - RNA, 19 nt, Artificial Sequence
  Description of Artificial Sequence: Synthetic oligonucleotide
  Antisense strand to SEQ ID NO: 828662
acuuaggguaucaucuugg

SEQ ID NO: 828664 - RNA, 19 nt, Artificial Sequence
  Description of Artificial Sequence: Synthetic oligonucleotide
  Sense strand starting at position 3878 of SEQ ID NO: 587924
augaaccauuguuugauaa

SEQ ID NO: 828665 - RNA, 19 nt, Artificial Sequence
  Description of Artificial Sequence: Synthetic oligonucleotide
  Antisense strand to SEQ ID NO: 828664
uuaucaaacaaugguucau

SEQ ID NO: 828666 - RNA, 19 nt, Artificial Sequence
  Description of Artificial Sequence: Synthetic oligonucleotide
  Sense strand starting at position 3879 of SEQ ID NO: 587924
ugaaccauuguuugauaaa

SEQ ID NO: 828667 - RNA, 19 nt, Artificial Sequence
  Description of Artificial Sequence: Synthetic oligonucleotide
  Antisense strand to SEQ ID NO: 828666
uuuaucaaacaaugguuca

SEQ ID NO: 828668 - RNA, 19 nt, Artificial Sequence
  Description of Artificial Sequence: Synthetic oligonucleotide
  Sense strand starting at position 812 of SEQ ID NO: 587925
ggugucuaugugcucguaa

SEQ ID NO: 828669 - RNA, 19 nt, Artificial Sequence
  Description of Artificial Sequence: Synthetic oligonucleotide
  Antisense strand to SEQ ID NO: 828668
uuacgagcacauagacacc

SEQ ID NO: 828670 - RNA, 19 nt, Artificial Sequence
  Description of Artificial Sequence: Synthetic oligonucleotide
  Sense strand starting at position 815 of SEQ ID NO: 587925
gucuaugugcucguaauca

SEQ ID NO: 828671 - RNA, 19 nt, Artificial Sequence
  Description of Artificial Sequence: Synthetic oligonucleotide
  Antisense strand to SEQ ID NO: 828670
ugauuacgagcacauagac

SEQ ID NO: 828672 - RNA, 19 nt, Artificial Sequence
  Description of Artificial Sequence: Synthetic oligonucleotide
  Sense strand starting at position 823 of SEQ ID NO: 587925
gcucguaaucaguaaggga

SEQ ID NO: 828673 - RNA, 19 nt, Artificial Sequence
  Description of Artificial Sequence: Synthetic oligonucleotide
  Antisense strand to SEQ ID NO: 828672
ucccuuacugauuacgagc

SEQ ID NO: 828674 - RNA, 19 nt, Artificial Sequence
  Description of Artificial Sequence: Synthetic oligonucleotide
  Sense strand starting at position 980 of SEQ ID NO: 587925
ucagaaacaugucuaguuu

SEQ ID NO: 828675 - RNA, 19 nt, Artificial Sequence
  Description of Artificial Sequence: Synthetic oligonucleotide
  Antisense strand to SEQ ID NO: 828674
aaacuagacauguuucuga

SEQ ID NO: 828676 - RNA, 19 nt, Artificial Sequence
  Description of Artificial Sequence: Synthetic oligonucleotide
  Sense strand starting at position 991 of SEQ ID NO: 587925
ucuaguuuggagugagcua

SEQ ID NO: 828677 - RNA, 19 nt, Artificial Sequence
  Description of Artificial Sequence: Synthetic oligonucleotide
  Antisense strand to SEQ ID NO: 828676
uagcucacuccaaacuaga

SEQ ID NO: 828678 - RNA, 19 nt, Artificial Sequence
  Description of Artificial Sequence: Synthetic oligonucleotide
  Sense strand starting at position 992 of SEQ ID NO: 587925
cuaguuuggagugagcuaa

SEQ ID NO: 828679 - RNA, 19 nt, Artificial Sequence
  Description of Artificial Sequence: Synthetic oligonucleotide
  Antisense strand to SEQ ID NO: 828678
uuagcucacuccaaacuag

SEQ ID NO: 828680 - RNA, 19 nt, Artificial Sequence
  Description of Artificial Sequence: Synthetic oligonucleotide
  Sense strand starting at position 1011 of SEQ ID NO: 587925
guuccagugacucauugag

SEQ ID NO: 828681 - RNA, 19 nt, Artificial Sequence
  Description of Artificial Sequence: Synthetic oligonucleotide
  Antisense strand to SEQ ID NO: 828680
cucaaugagucacuggaac

SEQ ID NO: 828682 - RNA, 19 nt, Artificial Sequence
  Description of Artificial Sequence: Synthetic oligonucleotide
  Sense strand starting at position 1052 of SEQ ID NO: 587925
uugaguucuaguggagagu

SEQ ID NO: 828683 - RNA, 19 nt, Artificial Sequence
  Description of Artificial Sequence: Synthetic oligonucleotide
  Antisense strand to SEQ ID NO: 828682
acucuccacuagaacucaa

SEQ ID NO: 828684 - RNA, 19 nt, Artificial Sequence
  Description of Artificial Sequence: Synthetic oligonucleotide
  Sense strand starting at position 1053 of SEQ ID NO: 587925
ugaguucuaguggagaguu

SEQ ID NO: 828685 - RNA, 19 nt, Artificial Sequence
  Description of Artificial Sequence: Synthetic oligonucleotide
  Antisense strand to SEQ ID NO: 828684
aacucuccacuagaacuca

SEQ ID NO: 828686 - RNA, 19 nt, Artificial Sequence
  Description of Artificial Sequence: Synthetic oligonucleotide
  Sense strand starting at position 1055 of SEQ ID NO: 587925
aguucuaguggagaguuga

SEQ ID NO: 828687 - RNA, 19 nt, Artificial Sequence
  Description of Artificial Sequence: Synthetic oligonucleotide
  Antisense strand to SEQ ID NO: 828686
ucaacucuccacuagaacu

SEQ ID NO: 828688 - RNA, 19 nt, Artificial Sequence
  Description of Artificial Sequence: Synthetic oligonucleotide
  Sense strand starting at position 1168 of SEQ ID NO: 587925
acaagauggcuugggaacu

SEQ ID NO: 828689 - RNA, 19 nt, Artificial Sequence
  Description of Artificial Sequence: Synthetic oligonucleotide
  Antisense strand to SEQ ID NO: 828688
aguucccaagccaucuugu

SEQ ID NO: 828690 - RNA, 19 nt, Artificial Sequence
  Description of Artificial Sequence: Synthetic oligonucleotide
  Sense strand starting at position 1310 of SEQ ID NO: 587925
gcuguagaggcuuaaauaa

SEQ ID NO: 828691 - RNA, 19 nt, Artificial Sequence
  Description of Artificial Sequence: Synthetic oligonucleotide
  Antisense strand to SEQ ID NO: 828690
uuauuuaagccucuacagc

SEQ ID NO: 828692 - RNA, 19 nt, Artificial Sequence
  Description of Artificial Sequence: Synthetic oligonucleotide
  Sense strand starting at position 1351 of SEQ ID NO: 587925
guguccuuucagggaagga

SEQ ID NO: 828693 - RNA, 19 nt, Artificial Sequence
  Description of Artificial Sequence: Synthetic oligonucleotide
  Antisense strand to SEQ ID NO: 828692
uccuucccugaaaggacac

SEQ ID NO: 828694 - RNA, 19 nt, Artificial Sequence
  Description of Artificial Sequence: Synthetic oligonucleotide
  Sense strand starting at position 2127 of SEQ ID NO: 587925
cuggaauguccugaccuuu

SEQ ID NO: 828695 - RNA, 19 nt, Artificial Sequence
  Description of Artificial Sequence: Synthetic oligonucleotide
  Antisense strand to SEQ ID NO: 828694
aaaggucaggacauuccag

SEQ ID NO: 828696 - RNA, 19 nt, Artificial Sequence
  Description of Artificial Sequence: Synthetic oligonucleotide
  Sense strand starting at position 2175 of SEQ ID NO: 587925
ugccucuuccgugaaacuu

SEQ ID NO: 828697 - RNA, 19 nt, Artificial Sequence
  Description of Artificial Sequence: Synthetic oligonucleotide
  Antisense strand to SEQ ID NO: 828696
aaguuucacggaagaggca

SEQ ID NO: 828698 - RNA, 19 nt, Artificial Sequence
  Description of Artificial Sequence: Synthetic oligonucleotide
  Sense strand starting at position 2283 of SEQ ID NO: 587925
gugcuagcuccuuaacauu

SEQ ID NO: 828699 - RNA, 19 nt, Artificial Sequence
  Description of Artificial Sequence: Synthetic oligonucleotide
  Antisense strand to SEQ ID NO: 828698
aauguuaaggagcuagcac

SEQ ID NO: 828700 - RNA, 19 nt, Artificial Sequence
  Description of Artificial Sequence: Synthetic oligonucleotide
  Sense strand starting at position 2308 of SEQ ID NO: 587925
uggcuuuacagugagguca

SEQ ID NO: 828701 - RNA, 19 nt, Artificial Sequence
  Description of Artificial Sequence: Synthetic oligonucleotide
  Antisense strand to SEQ ID NO: 828700
ugaccucacuguaaagcca

SEQ ID NO: 828702 - RNA, 19 nt, Artificial Sequence
  Description of Artificial Sequence: Synthetic oligonucleotide
  Sense strand starting at position 2320 of SEQ ID NO: 587925
gaggucagggauuguaaca

SEQ ID NO: 828703 - RNA, 19 nt, Artificial Sequence
  Description of Artificial Sequence: Synthetic oligonucleotide
  Antisense strand to SEQ ID NO: 828702
uguuacaaucccugaccuc

SEQ ID NO: 828704 - RNA, 19 nt, Artificial Sequence
  Description of Artificial Sequence: Synthetic oligonucleotide
  Sense strand starting at position 2332 of SEQ ID NO: 587925
uguaacacguuccuggaaa

SEQ ID NO: 828705 - RNA, 19 nt, Artificial Sequence
  Description of Artificial Sequence: Synthetic oligonucleotide
  Antisense strand to SEQ ID NO: 828704
uuuccaggaacguguuaca

SEQ ID NO: 828706 - RNA, 19 nt, Artificial Sequence
  Description of Artificial Sequence: Synthetic oligonucleotide
  Sense strand starting at position 2378 of SEQ ID NO: 587925
caauguuuguagguaaaca

SEQ ID NO: 828707 - RNA, 19 nt, Artificial Sequence
  Description of Artificial Sequence: Synthetic oligonucleotide
  Antisense strand to SEQ ID NO: 828706
uguuuaccuacaaacauug

SEQ ID NO: 828708 - RNA, 19 nt, Artificial Sequence
  Description of Artificial Sequence: Synthetic oligonucleotide
  Sense strand starting at position 2450 of SEQ ID NO: 587925
ccuucuuggugaucuugaa

SEQ ID NO: 828709 - RNA, 19 nt, Artificial Sequence
  Description of Artificial Sequence: Synthetic oligonucleotide
  Antisense strand to SEQ ID NO: 828708
uucaagaucaccaagaagg

SEQ ID NO: 828710 - RNA, 19 nt, Artificial Sequence
  Description of Artificial Sequence: Synthetic oligonucleotide
  Sense strand starting at position 2522 of SEQ ID NO: 587925
uggacacucgcccaugauu

SEQ ID NO: 828711 - RNA, 19 nt, Artificial Sequence
  Description of Artificial Sequence: Synthetic oligonucleotide
  Antisense strand to SEQ ID NO: 828710
aaucaugggcgagugucca

SEQ ID NO: 828712 - RNA, 19 nt, Artificial Sequence
  Description of Artificial Sequence: Synthetic oligonucleotide
  Sense strand starting at position 2530 of SEQ ID NO: 587925
cgcccaugauuucuucuga

SEQ ID NO: 828713 - RNA, 19 nt, Artificial Sequence
  Description of Artificial Sequence: Synthetic oligonucleotide
  Antisense strand to SEQ ID NO: 828712
ucagaagaaaucaugggcg

SEQ ID NO: 828714 - RNA, 19 nt, Artificial Sequence
  Description of Artificial Sequence: Synthetic oligonucleotide
  Sense strand starting at position 2583 of SEQ ID NO: 587925
ccaggagcucucuauaacu

SEQ ID NO: 828715 - RNA, 19 nt, Artificial Sequence
  Description of Artificial Sequence: Synthetic oligonucleotide
  Antisense strand to SEQ ID NO: 828714
aguuauagagagcuccugg

SEQ ID NO: 828716 - RNA, 19 nt, Artificial Sequence
  Description of Artificial Sequence: Synthetic oligonucleotide
  Sense strand starting at position 2591 of SEQ ID NO: 587925
ucucuauaacuuggaguuu

SEQ ID NO: 828717 - RNA, 19 nt, Artificial Sequence
  Description of Artificial Sequence: Synthetic oligonucleotide
  Antisense strand to SEQ ID NO: 828716
aaacuccaaguuauagaga

SEQ ID NO: 828718 - RNA, 19 nt, Artificial Sequence
  Description of Artificial Sequence: Synthetic oligonucleotide
  Sense strand starting at position 2759 of SEQ ID NO: 587925
aggacucaguccucaugau

SEQ ID NO: 828719 - RNA, 19 nt, Artificial Sequence
  Description of Artificial Sequence: Synthetic oligonucleotide
  Antisense strand to SEQ ID NO: 828718
aucaugaggacugaguccu

SEQ ID NO: 828720 - RNA, 19 nt, Artificial Sequence
  Description of Artificial Sequence: Synthetic oligonucleotide
  Sense strand starting at position 2816 of SEQ ID NO: 587925
gguacugaccuugaguacu

SEQ ID NO: 828721 - RNA, 19 nt, Artificial Sequence
  Description of Artificial Sequence: Synthetic oligonucleotide
  Antisense strand to SEQ ID NO: 828720
aguacucaaggucaguacc

SEQ ID NO: 828722 - RNA, 19 nt, Artificial Sequence
  Description of Artificial Sequence: Synthetic oligonucleotide
  Sense strand starting at position 2948 of SEQ ID NO: 587925
ccugguagaaugugggaau

SEQ ID NO: 828723 - RNA, 19 nt, Artificial Sequence
  Description of Artificial Sequence: Synthetic oligonucleotide
  Antisense strand to SEQ ID NO: 828722
auucccacauucuaccagg

SEQ ID NO: 828724 - RNA, 19 nt, Artificial Sequence
  Description of Artificial Sequence: Synthetic oligonucleotide
  Sense strand starting at position 2993 of SEQ ID NO: 587925
gcugggaucgcugugaguu

SEQ ID NO: 828725 - RNA, 19 nt, Artificial Sequence
  Description of Artificial Sequence: Synthetic oligonucleotide
  Antisense strand to SEQ ID NO: 828724
aacucacagcgaucccagc

SEQ ID NO: 828726 - RNA, 19 nt, Artificial Sequence
  Description of Artificial Sequence: Synthetic oligonucleotide
  Sense strand starting at position 3240 of SEQ ID NO: 587925
gguugaugcagucagugau

SEQ ID NO: 828727 - RNA, 19 nt, Artificial Sequence
  Description of Artificial Sequence: Synthetic oligonucleotide
  Antisense strand to SEQ ID NO: 828726
aucacugacugcaucaacc

SEQ ID NO: 828728 - RNA, 19 nt, Artificial Sequence
  Description of Artificial Sequence: Synthetic oligonucleotide
  Sense strand starting at position 3244 of SEQ ID NO: 587925
gaugcagucagugaugguu

SEQ ID NO: 828729 - RNA, 19 nt, Artificial Sequence
  Description of Artificial Sequence: Synthetic oligonucleotide
  Antisense strand to SEQ ID NO: 828728
aaccaucacugacugcauc

SEQ ID NO: 828730 - RNA, 19 nt, Artificial Sequence
  Description of Artificial Sequence: Synthetic oligonucleotide
  Sense strand starting at position 3359 of SEQ ID NO: 587925
auuaaucacgucuauuaga

SEQ ID NO: 828731 - RNA, 19 nt, Artificial Sequence
  Description of Artificial Sequence: Synthetic oligonucleotide
  Antisense strand to SEQ ID NO: 828730
ucuaauagacgugauuaau

SEQ ID NO: 828732 - RNA, 19 nt, Artificial Sequence
  Description of Artificial Sequence: Synthetic oligonucleotide
  Sense strand starting at position 3370 of SEQ ID NO: 587925
cuauuagacgucuaauaga

SEQ ID NO: 828733 - RNA, 19 nt, Artificial Sequence
  Description of Artificial Sequence: Synthetic oligonucleotide
  Antisense strand to SEQ ID NO: 828732
ucuauuagacgucuaauag

SEQ ID NO: 828734 - RNA, 19 nt, Artificial Sequence
  Description of Artificial Sequence: Synthetic oligonucleotide
  Sense strand starting at position 3377 of SEQ ID NO: 587925
acgucuaauagacgugauu

SEQ ID NO: 828735 - RNA, 19 nt, Artificial Sequence
  Description of Artificial Sequence: Synthetic oligonucleotide
  Antisense strand to SEQ ID NO: 828734
aaucacgucuauuagacgu

SEQ ID NO: 828736 - RNA, 19 nt, Artificial Sequence
  Description of Artificial Sequence: Synthetic oligonucleotide
  Sense strand starting at position 3379 of SEQ ID NO: 587925
gucuaauagacgugauuaa

SEQ ID NO: 828737 - RNA, 19 nt, Artificial Sequence
  Description of Artificial Sequence: Synthetic oligonucleotide
  Antisense strand to SEQ ID NO: 828736
uuaaucacgucuauuagac

SEQ ID NO: 828738 - RNA, 19 nt, Artificial Sequence
  Description of Artificial Sequence: Synthetic oligonucleotide
  Sense strand starting at position 3380 of SEQ ID NO: 587925
ucuaauagacgugauuaau

SEQ ID NO: 828739 - RNA, 19 nt, Artificial Sequence
  Description of Artificial Sequence: Synthetic oligonucleotide
  Antisense strand to SEQ ID NO: 828738
auuaaucacgucuauuaga

SEQ ID NO: 828740 - RNA, 19 nt, Artificial Sequence
  Description of Artificial Sequence: Synthetic oligonucleotide
  Sense strand starting at position 3389 of SEQ ID NO: 587925
cgugauuaauagcuacaag

SEQ ID NO: 828741 - RNA, 19 nt, Artificial Sequence
  Description of Artificial Sequence: Synthetic oligonucleotide
  Antisense strand to SEQ ID NO: 828740
cuuguagcuauuaaucacg

SEQ ID NO: 828742 - RNA, 19 nt, Artificial Sequence
  Description of Artificial Sequence: Synthetic oligonucleotide
  Sense strand starting at position 3822 of SEQ ID NO: 587925
agaagaacuuaagagugaa

SEQ ID NO: 828743 - RNA, 19 nt, Artificial Sequence
  Description of Artificial Sequence: Synthetic oligonucleotide
  Antisense strand to SEQ ID NO: 828742
uucacucuuaaguucuucu

SEQ ID NO: 828744 - RNA, 19 nt, Artificial Sequence
  Description of Artificial Sequence: Synthetic oligonucleotide
  Sense strand starting at position 3866 of SEQ ID NO: 587925
aaggaauucugccugaaga

SEQ ID NO: 828745 - RNA, 19 nt, Artificial Sequence
  Description of Artificial Sequence: Synthetic oligonucleotide
  Antisense strand to SEQ ID NO: 828744
ucuucaggcagaauuccuu

SEQ ID NO: 828746 - RNA, 19 nt, Artificial Sequence
  Description of Artificial Sequence: Synthetic oligonucleotide
  Sense strand starting at position 3867 of SEQ ID NO: 587925
aggaauucugccugaagau

SEQ ID NO: 828747 - RNA, 19 nt, Artificial Sequence
  Description of Artificial Sequence: Synthetic oligonucleotide
  Antisense strand to SEQ ID NO: 828746
aucuucaggcagaauuccu

SEQ ID NO: 828748 - RNA, 19 nt, Artificial Sequence
  Description of Artificial Sequence: Synthetic oligonucleotide
  Sense strand starting at position 215 of SEQ ID NO: 587926
uucugaguuuaggcuauaa

SEQ ID NO: 828749 - RNA, 19 nt, Artificial Sequence
  Description of Artificial Sequence: Synthetic oligonucleotide
  Antisense strand to SEQ ID NO: 828748
uuauagccuaaacucagaa

SEQ ID NO: 828750 - RNA, 19 nt, Artificial Sequence
  Description of Artificial Sequence: Synthetic oligonucleotide
  Sense strand starting at position 310 of SEQ ID NO: 587926
ugcagcugucaagaaacaa

SEQ ID NO: 828751 - RNA, 19 nt, Artificial Sequence
  Description of Artificial Sequence: Synthetic oligonucleotide
  Antisense strand to SEQ ID NO: 828750
uuguuucuugacagcugca

SEQ ID NO: 828752 - RNA, 19 nt, Artificial Sequence
  Description of Artificial Sequence: Synthetic oligonucleotide
  Sense strand starting at position 587 of SEQ ID NO: 587926
accagaagugaacgucaau

SEQ ID NO: 828753 - RNA, 19 nt, Artificial Sequence
  Description of Artificial Sequence: Synthetic oligonucleotide
  Antisense strand to SEQ ID NO: 828752
auugacguucacuucuggu

SEQ ID NO: 828754 - RNA, 19 nt, Artificial Sequence
  Description of Artificial Sequence: Synthetic oligonucleotide
  Sense strand starting at position 663 of SEQ ID NO: 587926
gugagaugaugauuaugug

SEQ ID NO: 828755 - RNA, 19 nt, Artificial Sequence
  Description of Artificial Sequence: Synthetic oligonucleotide
  Antisense strand to SEQ ID NO: 828754
cacauaaucaucaucucac

SEQ ID NO: 828756 - RNA, 19 nt, Artificial Sequence
  Description of Artificial Sequence: Synthetic oligonucleotide
  Sense strand starting at position 691 of SEQ ID NO: 587926
guuugagcucuagggaaag

SEQ ID NO: 828757 - RNA, 19 nt, Artificial Sequence
  Description of Artificial Sequence: Synthetic oligonucleotide
  Antisense strand to SEQ ID NO: 828756
cuuucccuagagcucaaac

SEQ ID NO: 828758 - RNA, 19 nt, Artificial Sequence
  Description of Artificial Sequence: Synthetic oligonucleotide
  Sense strand starting at position 899 of SEQ ID NO: 587926
gguggugaaugugucaaac

SEQ ID NO: 828759 - RNA, 19 nt, Artificial Sequence
  Description of Artificial Sequence: Synthetic oligonucleotide
  Antisense strand to SEQ ID NO: 828758
guuugacacauucaccacc

SEQ ID NO: 828760 - RNA, 19 nt, Artificial Sequence
  Description of Artificial Sequence: Synthetic oligonucleotide
  Sense strand starting at position 910 of SEQ ID NO: 587926
ugucaaacgcuccaaugau

SEQ ID NO: 828761 - RNA, 19 nt, Artificial Sequence
  Description of Artificial Sequence: Synthetic oligonucleotide
  Antisense strand to SEQ ID NO: 828760
aucauuggagcguuugaca

SEQ ID NO: 828762 - RNA, 19 nt, Artificial Sequence
  Description of Artificial Sequence: Synthetic oligonucleotide
  Sense strand starting at position 917 of SEQ ID NO: 587926
cgcuccaaugaucaaguaa

SEQ ID NO: 828763 - RNA, 19 nt, Artificial Sequence
  Description of Artificial Sequence: Synthetic oligonucleotide
  Antisense strand to SEQ ID NO: 828762
uuacuugaucauuggagcg

SEQ ID NO: 828764 - RNA, 19 nt, Artificial Sequence
  Description of Artificial Sequence: Synthetic oligonucleotide
  Sense strand starting at position 1011 of SEQ ID NO: 587926
uguaucuuauaaucaagag

SEQ ID NO: 828765 - RNA, 19 nt, Artificial Sequence
  Description of Artificial Sequence: Synthetic oligonucleotide
  Antisense strand to SEQ ID NO: 828764
cucuugauuauaagauaca

SEQ ID NO: 828766 - RNA, 19 nt, Artificial Sequence
  Description of Artificial Sequence: Synthetic oligonucleotide
  Sense strand starting at position 1023 of SEQ ID NO: 587926
ucaagaggugccugaaaug

SEQ ID NO: 828767 - RNA, 19 nt, Artificial Sequence
  Description of Artificial Sequence: Synthetic oligonucleotide
  Antisense strand to SEQ ID NO: 828766
cauuucaggcaccucuuga

SEQ ID NO: 828768 - RNA, 19 nt, Artificial Sequence
  Description of Artificial Sequence: Synthetic oligonucleotide
  Sense strand starting at position 1074 of SEQ ID NO: 587926
cugauagugugggcugaua

SEQ ID NO: 828769 - RNA, 19 nt, Artificial Sequence
  Description of Artificial Sequence: Synthetic oligonucleotide
  Antisense strand to SEQ ID NO: 828768
uaucagcccacacuaucag

SEQ ID NO: 828770 - RNA, 19 nt, Artificial Sequence
  Description of Artificial Sequence: Synthetic oligonucleotide
  Sense strand starting at position 1076 of SEQ ID NO: 587926
gauagugugggcugauaau

SEQ ID NO: 828771 - RNA, 19 nt, Artificial Sequence
  Description of Artificial Sequence: Synthetic oligonucleotide
  Antisense strand to SEQ ID NO: 828770
auuaucagcccacacuauc

SEQ ID NO: 828772 - RNA, 19 nt, Artificial Sequence
  Description of Artificial Sequence: Synthetic oligonucleotide
  Sense strand starting at position 1086 of SEQ ID NO: 587926
gcugauaaucaaugguauu

SEQ ID NO: 828773 - RNA, 19 nt, Artificial Sequence
  Description of Artificial Sequence: Synthetic oligonucleotide
  Antisense strand to SEQ ID NO: 828772
aauaccauugauuaucagc

SEQ ID NO: 828774 - RNA, 19 nt, Artificial Sequence
  Description of Artificial Sequence: Synthetic oligonucleotide
  Sense strand starting at position 1089 of SEQ ID NO: 587926
gauaaucaaugguauuuga

SEQ ID NO: 828775 - RNA, 19 nt, Artificial Sequence
  Description of Artificial Sequence: Synthetic oligonucleotide
  Antisense strand to SEQ ID NO: 828774
ucaaauaccauugauuauc

SEQ ID NO: 828776 - RNA, 19 nt, Artificial Sequence
  Description of Artificial Sequence: Synthetic oligonucleotide
  Sense strand starting at position 1145 of SEQ ID NO: 587926
caguauauguggucuauuu

SEQ ID NO: 828777 - RNA, 19 nt, Artificial Sequence
  Description of Artificial Sequence: Synthetic oligonucleotide
  Antisense strand to SEQ ID NO: 828776
aaauagaccacauauacug

SEQ ID NO: 828778 - RNA, 19 nt, Artificial Sequence
  Description of Artificial Sequence: Synthetic oligonucleotide
  Sense strand starting at position 1484 of SEQ ID NO: 587926
cagaguugacaguggauua

SEQ ID NO: 828779 - RNA, 19 nt, Artificial Sequence
  Description of Artificial Sequence: Synthetic oligonucleotide
  Antisense strand to SEQ ID NO: 828778
uaauccacugucaacucug

SEQ ID NO: 828780 - RNA, 19 nt, Artificial Sequence
  Description of Artificial Sequence: Synthetic oligonucleotide
  Sense strand starting at position 1485 of SEQ ID NO: 587926
agaguugacaguggauuau

SEQ ID NO: 828781 - RNA, 19 nt, Artificial Sequence
  Description of Artificial Sequence: Synthetic oligonucleotide
  Antisense strand to SEQ ID NO: 828780
auaauccacugucaacucu

SEQ ID NO: 828782 - RNA, 19 nt, Artificial Sequence
  Description of Artificial Sequence: Synthetic oligonucleotide
  Sense strand starting at position 2285 of SEQ ID NO: 587926
uguguugucaggcaacaac

SEQ ID NO: 828783 - RNA, 19 nt, Artificial Sequence
  Description of Artificial Sequence: Synthetic oligonucleotide
  Antisense strand to SEQ ID NO: 828782
guuguugccugacaacaca

SEQ ID NO: 828784 - RNA, 19 nt, Artificial Sequence
  Description of Artificial Sequence: Synthetic oligonucleotide
  Sense strand starting at position 2295 of SEQ ID NO: 587926
ggcaacaacugaccuuaaa

SEQ ID NO: 828785 - RNA, 19 nt, Artificial Sequence
  Description of Artificial Sequence: Synthetic oligonucleotide
  Antisense strand to SEQ ID NO: 828784
uuuaaggucaguuguugcc

SEQ ID NO: 828786 - RNA, 19 nt, Artificial Sequence
  Description of Artificial Sequence: Synthetic oligonucleotide
  Sense strand starting at position 2326 of SEQ ID NO: 587926
ccagaaguaggcuacacau

SEQ ID NO: 828787 - RNA, 19 nt, Artificial Sequence
  Description of Artificial Sequence: Synthetic oligonucleotide
  Antisense strand to SEQ ID NO: 828786
auguguagccuacuucugg

SEQ ID NO: 828788 - RNA, 19 nt, Artificial Sequence
  Description of Artificial Sequence: Synthetic oligonucleotide
  Sense strand starting at position 2502 of SEQ ID NO: 587926
gggagaacucguggagccu

SEQ ID NO: 828789 - RNA, 19 nt, Artificial Sequence
  Description of Artificial Sequence: Synthetic oligonucleotide
  Antisense strand to SEQ ID NO: 828788
aggcuccacgaguucuccc

SEQ ID NO: 828790 - RNA, 19 nt, Artificial Sequence
  Description of Artificial Sequence: Synthetic oligonucleotide
  Sense strand starting at position 2703 of SEQ ID NO: 587926
guccgaguacugugaagaa

SEQ ID NO: 828791 - RNA, 19 nt, Artificial Sequence
  Description of Artificial Sequence: Synthetic oligonucleotide
  Antisense strand to SEQ ID NO: 828790
uucuucacaguacucggac

SEQ ID NO: 828792 - RNA, 19 nt, Artificial Sequence
  Description of Artificial Sequence: Synthetic oligonucleotide
  Sense strand starting at position 2738 of SEQ ID NO: 587926
aaagcuaccggguaguuua

SEQ ID NO: 828793 - RNA, 19 nt, Artificial Sequence
  Description of Artificial Sequence: Synthetic oligonucleotide
  Antisense strand to SEQ ID NO: 828792
uaaacuacccgguagcuuu

SEQ ID NO: 828794 - RNA, 19 nt, Artificial Sequence
  Description of Artificial Sequence: Synthetic oligonucleotide
  Sense strand starting at position 2749 of SEQ ID NO: 587926
guaguuuaacaagguggaa

SEQ ID NO: 828795 - RNA, 19 nt, Artificial Sequence
  Description of Artificial Sequence: Synthetic oligonucleotide
  Antisense strand to SEQ ID NO: 828794
uuccaccuuguuaaacuac

SEQ ID NO: 828796 - RNA, 19 nt, Artificial Sequence
  Description of Artificial Sequence: Synthetic oligonucleotide
  Sense strand starting at position 2798 of SEQ ID NO: 587926
cucagaaaguugccucaaa

SEQ ID NO: 828797 - RNA, 19 nt, Artificial Sequence
  Description of Artificial Sequence: Synthetic oligonucleotide
  Antisense strand to SEQ ID NO: 828796
uuugaggcaacuuucugag

SEQ ID NO: 828798 - RNA, 19 nt, Artificial Sequence
  Description of Artificial Sequence: Synthetic oligonucleotide
  Sense strand starting at position 2821 of SEQ ID NO: 587926
cgcagaaguggaggugaau

SEQ ID NO: 828799 - RNA, 19 nt, Artificial Sequence
  Description of Artificial Sequence: Synthetic oligonucleotide
  Antisense strand to SEQ ID NO: 828798
auucaccuccacuucugcg

SEQ ID NO: 828800 - RNA, 19 nt, Artificial Sequence
  Description of Artificial Sequence: Synthetic oligonucleotide
  Sense strand starting at position 2830 of SEQ ID NO: 587926
ggaggugaaucuucuguuu

SEQ ID NO: 828801 - RNA, 19 nt, Artificial Sequence
  Description of Artificial Sequence: Synthetic oligonucleotide
  Antisense strand to SEQ ID NO: 828800
aaacagaagauucaccucc

SEQ ID NO: 828802 - RNA, 19 nt, Artificial Sequence
  Description of Artificial Sequence: Synthetic oligonucleotide
  Sense strand starting at position 2938 of SEQ ID NO: 587926
ccaccauucuguguuugaa

SEQ ID NO: 828803 - RNA, 19 nt, Artificial Sequence
  Description of Artificial Sequence: Synthetic oligonucleotide
  Antisense strand to SEQ ID NO: 828802
uucaaacacagaauggugg

SEQ ID NO: 828804 - RNA, 19 nt, Artificial Sequence
  Description of Artificial Sequence: Synthetic oligonucleotide
  Sense strand starting at position 2940 of SEQ ID NO: 587926
accauucuguguuugaauc

SEQ ID NO: 828805 - RNA, 19 nt, Artificial Sequence
  Description of Artificial Sequence: Synthetic oligonucleotide
  Antisense strand to SEQ ID NO: 828804
gauucaaacacagaauggu

SEQ ID NO: 828806 - RNA, 19 nt, Artificial Sequence
  Description of Artificial Sequence: Synthetic oligonucleotide
  Sense strand starting at position 3058 of SEQ ID NO: 587926
uugcuagugccauuacugu

SEQ ID NO: 828807 - RNA, 19 nt, Artificial Sequence
  Description of Artificial Sequence: Synthetic oligonucleotide
  Antisense strand to SEQ ID NO: 828806
acaguaauggcacuagcaa

SEQ ID NO: 828808 - RNA, 19 nt, Artificial Sequence
  Description of Artificial Sequence: Synthetic oligonucleotide
  Sense strand starting at position 3103 of SEQ ID NO: 587926
ugcccaaucuaguugagga

SEQ ID NO: 828809 - RNA, 19 nt, Artificial Sequence
  Description of Artificial Sequence: Synthetic oligonucleotide
  Antisense strand to SEQ ID NO: 828808
uccucaacuagauugggca

SEQ ID NO: 828810 - RNA, 19 nt, Artificial Sequence
  Description of Artificial Sequence: Synthetic oligonucleotide
  Sense strand starting at position 3104 of SEQ ID NO: 587926
gcccaaucuaguugaggau

SEQ ID NO: 828811 - RNA, 19 nt, Artificial Sequence
  Description of Artificial Sequence: Synthetic oligonucleotide
  Antisense strand to SEQ ID NO: 828810
auccucaacuagauugggc

SEQ ID NO: 828812 - RNA, 19 nt, Artificial Sequence
  Description of Artificial Sequence: Synthetic oligonucleotide
  Sense strand starting at position 3143 of SEQ ID NO: 587926
cugggacuccgccgagaaa

SEQ ID NO: 828813 - RNA, 19 nt, Artificial Sequence
  Description of Artificial Sequence: Synthetic oligonucleotide
  Antisense strand to SEQ ID NO: 828812
uuucucggcggagucccag

SEQ ID NO: 828814 - RNA, 19 nt, Artificial Sequence
  Description of Artificial Sequence: Synthetic oligonucleotide
  Sense strand starting at position 3297 of SEQ ID NO: 587926
ggugcuguccugccgaaau

SEQ ID NO: 828815 - RNA, 19 nt, Artificial Sequence
  Description of Artificial Sequence: Synthetic oligonucleotide
  Antisense strand to SEQ ID NO: 828814
auuucggcaggacagcacc

SEQ ID NO: 828816 - RNA, 19 nt, Artificial Sequence
  Description of Artificial Sequence: Synthetic oligonucleotide
  Sense strand starting at position 3424 of SEQ ID NO: 587926
cacguuugugugucuuacu

SEQ ID NO: 828817 - RNA, 19 nt, Artificial Sequence
  Description of Artificial Sequence: Synthetic oligonucleotide
  Antisense strand to SEQ ID NO: 828816
aguaagacacacaaacgug

SEQ ID NO: 828818 - RNA, 19 nt, Artificial Sequence
  Description of Artificial Sequence: Synthetic oligonucleotide
  Sense strand starting at position 3722 of SEQ ID NO: 587926
uuuccuaugcgccugucaa

SEQ ID NO: 828819 - RNA, 19 nt, Artificial Sequence
  Description of Artificial Sequence: Synthetic oligonucleotide
  Antisense strand to SEQ ID NO: 828818
uugacaggcgcauaggaaa

SEQ ID NO: 828820 - RNA, 19 nt, Artificial Sequence
  Description of Artificial Sequence: Synthetic oligonucleotide
  Sense strand starting at position 3816 of SEQ ID NO: 587926
ugcucuguugaagauguua

SEQ ID NO: 828821 - RNA, 19 nt, Artificial Sequence
  Description of Artificial Sequence: Synthetic oligonucleotide
  Antisense strand to SEQ ID NO: 828820
uaacaucuucaacagagca

SEQ ID NO: 828822 - RNA, 19 nt, Artificial Sequence
  Description of Artificial Sequence: Synthetic oligonucleotide
  Sense strand starting at position 3867 of SEQ ID NO: 587926
auuuguuuaccaugugguu

SEQ ID NO: 828823 - RNA, 19 nt, Artificial Sequence
  Description of Artificial Sequence: Synthetic oligonucleotide
  Antisense strand to SEQ ID NO: 828822
aaccacaugguaaacaaau

SEQ ID NO: 828824 - RNA, 19 nt, Artificial Sequence
  Description of Artificial Sequence: Synthetic oligonucleotide
  Sense strand starting at position 3888 of SEQ ID NO: 587926
accuccaugcuguaaggua

SEQ ID NO: 828825 - RNA, 19 nt, Artificial Sequence
  Description of Artificial Sequence: Synthetic oligonucleotide
  Antisense strand to SEQ ID NO: 828824
uaccuuacagcauggaggu

SEQ ID NO: 828826 - RNA, 19 nt, Artificial Sequence
  Description of Artificial Sequence: Synthetic oligonucleotide
  Sense strand starting at position 3976 of SEQ ID NO: 587926
ucaguuauuuacuauggau

SEQ ID NO: 828827 - RNA, 19 nt, Artificial Sequence
  Description of Artificial Sequence: Synthetic oligonucleotide
  Antisense strand to SEQ ID NO: 828826
auccauaguaaauaacuga

SEQ ID NO: 828828 - RNA, 19 nt, Artificial Sequence
  Description of Artificial Sequence: Synthetic oligonucleotide
  Sense strand starting at position 41 of SEQ ID NO: 587927
guaaacaccgaauaaaguu

SEQ ID NO: 828829 - RNA, 19 nt, Artificial Sequence
  Description of Artificial Sequence: Synthetic oligonucleotide
  Antisense strand to SEQ ID NO: 828828
aacuuuauucgguguuuac

SEQ ID NO: 828830 - RNA, 19 nt, Artificial Sequence
  Description of Artificial Sequence: Synthetic oligonucleotide
  Sense strand starting at position 49 of SEQ ID NO: 587927
cgaauaaaguuacucccau

SEQ ID NO: 828831 - RNA, 19 nt, Artificial Sequence
  Description of Artificial Sequence: Synthetic oligonucleotide
  Antisense strand to SEQ ID NO: 828830
augggaguaacuuuauucg

SEQ ID NO: 828832 - RNA, 19 nt, Artificial Sequence
  Description of Artificial Sequence: Synthetic oligonucleotide
  Sense strand starting at position 79 of SEQ ID NO: 587927
uccaguguucuugggagaa

SEQ ID NO: 828833 - RNA, 19 nt, Artificial Sequence
  Description of Artificial Sequence: Synthetic oligonucleotide
  Antisense strand to SEQ ID NO: 828832
uucucccaagaacacugga

SEQ ID NO: 828834 - RNA, 19 nt, Artificial Sequence
  Description of Artificial Sequence: Synthetic oligonucleotide
  Sense strand starting at position 83 of SEQ ID NO: 587927
guguucuugggagaacucu

SEQ ID NO: 828835 - RNA, 19 nt, Artificial Sequence
  Description of Artificial Sequence: Synthetic oligonucleotide
  Antisense strand to SEQ ID NO: 828834
agaguucucccaagaacac

SEQ ID NO: 828836 - RNA, 19 nt, Artificial Sequence
  Description of Artificial Sequence: Synthetic oligonucleotide
  Sense strand starting at position 112 of SEQ ID NO: 587927
cccgaacacucauugccaa

SEQ ID NO: 828837 - RNA, 19 nt, Artificial Sequence
  Description of Artificial Sequence: Synthetic oligonucleotide
  Antisense strand to SEQ ID NO: 828836
uuggcaaugaguguucggg

SEQ ID NO: 828838 - RNA, 19 nt, Artificial Sequence
  Description of Artificial Sequence: Synthetic oligonucleotide
  Sense strand starting at position 126 of SEQ ID NO: 587927
gccaacaugcccuaaauga

SEQ ID NO: 828839 - RNA, 19 nt, Artificial Sequence
  Description of Artificial Sequence: Synthetic oligonucleotide
  Antisense strand to SEQ ID NO: 828838
ucauuuagggcauguuggc

SEQ ID NO: 828840 - RNA, 19 nt, Artificial Sequence
  Description of Artificial Sequence: Synthetic oligonucleotide
  Sense strand starting at position 229 of SEQ ID NO: 587927
agaccuggccuuuauguua

SEQ ID NO: 828841 - RNA, 19 nt, Artificial Sequence
  Description of Artificial Sequence: Synthetic oligonucleotide
  Antisense strand to SEQ ID NO: 828840
uaacauaaaggccaggucu

SEQ ID NO: 828842 - RNA, 19 nt, Artificial Sequence
  Description of Artificial Sequence: Synthetic oligonucleotide
  Sense strand starting at position 293 of SEQ ID NO: 587927
ggagaacuuugagcccaau

SEQ ID NO: 828843 - RNA, 19 nt, Artificial Sequence
  Description of Artificial Sequence: Synthetic oligonucleotide
  Antisense strand to SEQ ID NO: 828842
auugggcucaaaguucucc

SEQ ID NO: 828844 - RNA, 19 nt, Artificial Sequence
  Description of Artificial Sequence: Synthetic oligonucleotide
  Sense strand starting at position 377 of SEQ ID NO: 587927
agcugucacuucuuacaag

SEQ ID NO: 828845 - RNA, 19 nt, Artificial Sequence
  Description of Artificial Sequence: Synthetic oligonucleotide
  Antisense strand to SEQ ID NO: 828844
cuuguaagaagugacagcu

SEQ ID NO: 828846 - RNA, 19 nt, Artificial Sequence
  Description of Artificial Sequence: Synthetic oligonucleotide
  Sense strand starting at position 480 of SEQ ID NO: 587927
cauggaaagugguuguucu

SEQ ID NO: 828847 - RNA, 19 nt, Artificial Sequence
  Description of Artificial Sequence: Synthetic oligonucleotide
  Antisense strand to SEQ ID NO: 828846
agaacaaccacuuuccaug

SEQ ID NO: 828848 - RNA, 19 nt, Artificial Sequence
  Description of Artificial Sequence: Synthetic oligonucleotide
  Sense strand starting at position 481 of SEQ ID NO: 587927
auggaaagugguuguucuu

SEQ ID NO: 828849 - RNA, 19 nt, Artificial Sequence
  Description of Artificial Sequence: Synthetic oligonucleotide
  Antisense strand to SEQ ID NO: 828848
aagaacaaccacuuuccau

SEQ ID NO: 828850 - RNA, 19 nt, Artificial Sequence
  Description of Artificial Sequence: Synthetic oligonucleotide
  Sense strand starting at position 566 of SEQ ID NO: 587927
aggcucaaccaaugcuaaa

SEQ ID NO: 828851 - RNA, 19 nt, Artificial Sequence
  Description of Artificial Sequence: Synthetic oligonucleotide
  Antisense strand to SEQ ID NO: 828850
uuuagcauugguugagccu

SEQ ID NO: 828852 - RNA, 19 nt, Artificial Sequence
  Description of Artificial Sequence: Synthetic oligonucleotide
  Sense strand starting at position 2139 of SEQ ID NO: 587927
ccgcguuuggccaaucgga

SEQ ID NO: 828853 - RNA, 19 nt, Artificial Sequence
  Description of Artificial Sequence: Synthetic oligonucleotide
  Antisense strand to SEQ ID NO: 828852
uccgauuggccaaacgcgg

SEQ ID NO: 828854 - RNA, 19 nt, Artificial Sequence
  Description of Artificial Sequence: Synthetic oligonucleotide
  Sense strand starting at position 2366 of SEQ ID NO: 587927
ugaggugugcucgcuuuga

SEQ ID NO: 828855 - RNA, 19 nt, Artificial Sequence
  Description of Artificial Sequence: Synthetic oligonucleotide
  Antisense strand to SEQ ID NO: 828854
ucaaagcgagcacaccuca

SEQ ID NO: 828856 - RNA, 19 nt, Artificial Sequence
  Description of Artificial Sequence: Synthetic oligonucleotide
  Sense strand starting at position 2369 of SEQ ID NO: 587927
ggugugcucgcuuugagga

SEQ ID NO: 828857 - RNA, 19 nt, Artificial Sequence
  Description of Artificial Sequence: Synthetic oligonucleotide
  Antisense strand to SEQ ID NO: 828856
uccucaaagcgagcacacc

SEQ ID NO: 828858 - RNA, 19 nt, Artificial Sequence
  Description of Artificial Sequence: Synthetic oligonucleotide
  Sense strand starting at position 2385 of SEQ ID NO: 587927
ggagaagccuggagugauc

SEQ ID NO: 828859 - RNA, 19 nt, Artificial Sequence
  Description of Artificial Sequence: Synthetic oligonucleotide
  Antisense strand to SEQ ID NO: 828858
gaucacuccaggcuucucc

SEQ ID NO: 828860 - RNA, 19 nt, Artificial Sequence
  Description of Artificial Sequence: Synthetic oligonucleotide
  Sense strand starting at position 2631 of SEQ ID NO: 587927
aggugcucaggcuagagau

SEQ ID NO: 828861 - RNA, 19 nt, Artificial Sequence
  Description of Artificial Sequence: Synthetic oligonucleotide
  Antisense strand to SEQ ID NO: 828860
aucucuagccugagcaccu

SEQ ID NO: 828862 - RNA, 19 nt, Artificial Sequence
  Description of Artificial Sequence: Synthetic oligonucleotide
  Sense strand starting at position 2667 of SEQ ID NO: 587927
ccguucucucaagaccaga

SEQ ID NO: 828863 - RNA, 19 nt, Artificial Sequence
  Description of Artificial Sequence: Synthetic oligonucleotide
  Antisense strand to SEQ ID NO: 828862
ucuggucuugagagaacgg

SEQ ID NO: 828864 - RNA, 19 nt, Artificial Sequence
  Description of Artificial Sequence: Synthetic oligonucleotide
  Sense strand starting at position 2730 of SEQ ID NO: 587927
ugucauagguguccugaga

SEQ ID NO: 828865 - RNA, 19 nt, Artificial Sequence
  Description of Artificial Sequence: Synthetic oligonucleotide
  Antisense strand to SEQ ID NO: 828864
ucucaggacaccuaugaca

SEQ ID NO: 828866 - RNA, 19 nt, Artificial Sequence
  Description of Artificial Sequence: Synthetic oligonucleotide
  Sense strand starting at position 2883 of SEQ ID NO: 587927
aaagucucggagugagaca

SEQ ID NO: 828867 - RNA, 19 nt, Artificial Sequence
  Description of Artificial Sequence: Synthetic oligonucleotide
  Antisense strand to SEQ ID NO: 828866
ugucucacuccgagacuuu

SEQ ID NO: 828868 - RNA, 19 nt, Artificial Sequence
  Description of Artificial Sequence: Synthetic oligonucleotide
  Sense strand starting at position 2895 of SEQ ID NO: 587927
ugagacagcccuuauucua

SEQ ID NO: 828869 - RNA, 19 nt, Artificial Sequence
  Description of Artificial Sequence: Synthetic oligonucleotide
  Antisense strand to SEQ ID NO: 828868
uagaauaagggcugucuca

SEQ ID NO: 828870 - RNA, 19 nt, Artificial Sequence
  Description of Artificial Sequence: Synthetic oligonucleotide
  Sense strand starting at position 2905 of SEQ ID NO: 587927
cuuauucuacuacgaugaa

SEQ ID NO: 828871 - RNA, 19 nt, Artificial Sequence
  Description of Artificial Sequence: Synthetic oligonucleotide
  Antisense strand to SEQ ID NO: 828870
uucaucguaguagaauaag

SEQ ID NO: 828872 - RNA, 19 nt, Artificial Sequence
  Description of Artificial Sequence: Synthetic oligonucleotide
  Sense strand starting at position 2908 of SEQ ID NO: 587927
auucuacuacgaugaaacu

SEQ ID NO: 828873 - RNA, 19 nt, Artificial Sequence
  Description of Artificial Sequence: Synthetic oligonucleotide
  Antisense strand to SEQ ID NO: 828872
aguuucaucguaguagaau

SEQ ID NO: 828874 - RNA, 19 nt, Artificial Sequence
  Description of Artificial Sequence: Synthetic oligonucleotide
  Sense strand starting at position 2947 of SEQ ID NO: 587927
uuaagaccucagugucuuu

SEQ ID NO: 828875 - RNA, 19 nt, Artificial Sequence
  Description of Artificial Sequence: Synthetic oligonucleotide
  Antisense strand to SEQ ID NO: 828874
aaagacacugaggucuuaa

SEQ ID NO: 828876 - RNA, 19 nt, Artificial Sequence
  Description of Artificial Sequence: Synthetic oligonucleotide
  Sense strand starting at position 2975 of SEQ ID NO: 587927
guuucuuaacucuggacuu

SEQ ID NO: 828877 - RNA, 19 nt, Artificial Sequence
  Description of Artificial Sequence: Synthetic oligonucleotide
  Antisense strand to SEQ ID NO: 828876
aaguccagaguuaagaaac

SEQ ID NO: 828878 - RNA, 19 nt, Artificial Sequence
  Description of Artificial Sequence: Synthetic oligonucleotide
  Sense strand starting at position 3007 of SEQ ID NO: 587927
cuaugauaauaggugcaaa

SEQ ID NO: 828879 - RNA, 19 nt, Artificial Sequence
  Description of Artificial Sequence: Synthetic oligonucleotide
  Antisense strand to SEQ ID NO: 828878
uuugcaccuauuaucauag

SEQ ID NO: 828880 - RNA, 19 nt, Artificial Sequence
  Description of Artificial Sequence: Synthetic oligonucleotide
  Sense strand starting at position 3134 of SEQ ID NO: 587927
ccuaaagaucugugucuga

SEQ ID NO: 828881 - RNA, 19 nt, Artificial Sequence
  Description of Artificial Sequence: Synthetic oligonucleotide
  Antisense strand to SEQ ID NO: 828880
ucagacacagaucuuuagg

SEQ ID NO: 828882 - RNA, 19 nt, Artificial Sequence
  Description of Artificial Sequence: Synthetic oligonucleotide
  Sense strand starting at position 3137 of SEQ ID NO: 587927
aaagaucugugucugauaa

SEQ ID NO: 828883 - RNA, 19 nt, Artificial Sequence
  Description of Artificial Sequence: Synthetic oligonucleotide
  Antisense strand to SEQ ID NO: 828882
uuaucagacacagaucuuu

SEQ ID NO: 828884 - RNA, 19 nt, Artificial Sequence
  Description of Artificial Sequence: Synthetic oligonucleotide
  Sense strand starting at position 3138 of SEQ ID NO: 587927
aagaucugugucugauaag

SEQ ID NO: 828885 - RNA, 19 nt, Artificial Sequence
  Description of Artificial Sequence: Synthetic oligonucleotide
  Antisense strand to SEQ ID NO: 828884
cuuaucagacacagaucuu

SEQ ID NO: 828886 - RNA, 19 nt, Artificial Sequence
  Description of Artificial Sequence: Synthetic oligonucleotide
  Sense strand starting at position 3368 of SEQ ID NO: 587927
acucgaacauccuuugcaa

SEQ ID NO: 828887 - RNA, 19 nt, Artificial Sequence
  Description of Artificial Sequence: Synthetic oligonucleotide
  Antisense strand to SEQ ID NO: 828886
uugcaaaggauguucgagu

SEQ ID NO: 828888 - RNA, 19 nt, Artificial Sequence
  Description of Artificial Sequence: Synthetic oligonucleotide
  Sense strand starting at position 3370 of SEQ ID NO: 587927
ucgaacauccuuugcaauu

SEQ ID NO: 828889 - RNA, 19 nt, Artificial Sequence
  Description of Artificial Sequence: Synthetic oligonucleotide
  Antisense strand to SEQ ID NO: 828888
aauugcaaaggauguucga

SEQ ID NO: 828890 - RNA, 19 nt, Artificial Sequence
  Description of Artificial Sequence: Synthetic oligonucleotide
  Sense strand starting at position 3380 of SEQ ID NO: 587927
uuugcaauucuguaucaga

SEQ ID NO: 828891 - RNA, 19 nt, Artificial Sequence
  Description of Artificial Sequence: Synthetic oligonucleotide
  Antisense strand to SEQ ID NO: 828890
ucugauacagaauugcaaa

SEQ ID NO: 828892 - RNA, 19 nt, Artificial Sequence
  Description of Artificial Sequence: Synthetic oligonucleotide
  Sense strand starting at position 3396 of SEQ ID NO: 587927
agauacuuggcaggguuua

SEQ ID NO: 828893 - RNA, 19 nt, Artificial Sequence
  Description of Artificial Sequence: Synthetic oligonucleotide
  Antisense strand to SEQ ID NO: 828892
uaaacccugccaaguaucu

SEQ ID NO: 828894 - RNA, 19 nt, Artificial Sequence
  Description of Artificial Sequence: Synthetic oligonucleotide
  Sense strand starting at position 3397 of SEQ ID NO: 587927
gauacuuggcaggguuuaa

SEQ ID NO: 828895 - RNA, 19 nt, Artificial Sequence
  Description of Artificial Sequence: Synthetic oligonucleotide
  Antisense strand to SEQ ID NO: 828894
uuaaacccugccaaguauc

SEQ ID NO: 828896 - RNA, 19 nt, Artificial Sequence
  Description of Artificial Sequence: Synthetic oligonucleotide
  Sense strand starting at position 3563 of SEQ ID NO: 587927
gagguuaaauggcuugacu

SEQ ID NO: 828897 - RNA, 19 nt, Artificial Sequence
  Description of Artificial Sequence: Synthetic oligonucleotide
  Antisense strand to SEQ ID NO: 828896
agucaagccauuuaaccuc

SEQ ID NO: 828898 - RNA, 19 nt, Artificial Sequence
  Description of Artificial Sequence: Synthetic oligonucleotide
  Sense strand starting at position 3565 of SEQ ID NO: 587927
gguuaaauggcuugacuaa

SEQ ID NO: 828899 - RNA, 19 nt, Artificial Sequence
  Description of Artificial Sequence: Synthetic oligonucleotide
  Antisense strand to SEQ ID NO: 828898
uuagucaagccauuuaacc

SEQ ID NO: 828900 - RNA, 19 nt, Artificial Sequence
  Description of Artificial Sequence: Synthetic oligonucleotide
  Sense strand starting at position 3566 of SEQ ID NO: 587927
guuaaauggcuugacuaaa

SEQ ID NO: 828901 - RNA, 19 nt, Artificial Sequence
  Description of Artificial Sequence: Synthetic oligonucleotide
  Antisense strand to SEQ ID NO: 828900
uuuagucaagccauuuaac

SEQ ID NO: 828902 - RNA, 19 nt, Artificial Sequence
  Description of Artificial Sequence: Synthetic oligonucleotide
  Sense strand starting at position 3591 of SEQ ID NO: 587927
cugugauuaaaucguaaug

SEQ ID NO: 828903 - RNA, 19 nt, Artificial Sequence
  Description of Artificial Sequence: Synthetic oligonucleotide
  Antisense strand to SEQ ID NO: 828902
cauuacgauuuaaucacag

SEQ ID NO: 828904 - RNA, 19 nt, Artificial Sequence
  Description of Artificial Sequence: Synthetic oligonucleotide
  Sense strand starting at position 3627 of SEQ ID NO: 587927
aguccuggucuccaaaucu

SEQ ID NO: 828905 - RNA, 19 nt, Artificial Sequence
  Description of Artificial Sequence: Synthetic oligonucleotide
  Antisense strand to SEQ ID NO: 828904
agauuuggagaccaggacu

SEQ ID NO: 828906 - RNA, 19 nt, Artificial Sequence
  Description of Artificial Sequence: Synthetic oligonucleotide
  Sense strand starting at position 3720 of SEQ ID NO: 587927
uccucacuguuaccaguaa

SEQ ID NO: 828907 - RNA, 19 nt, Artificial Sequence
  Description of Artificial Sequence: Synthetic oligonucleotide
  Antisense strand to SEQ ID NO: 828906
uuacugguaacagugagga

SEQ ID NO: 828908 - RNA, 19 nt, Artificial Sequence
  Description of Artificial Sequence: Synthetic oligonucleotide
  Sense strand starting at position 217 of SEQ ID NO: 587928
guuacaaagucaguaagaa

SEQ ID NO: 828909 - RNA, 19 nt, Artificial Sequence
  Description of Artificial Sequence: Synthetic oligonucleotide
  Antisense strand to SEQ ID NO: 828908
uucuuacugacuuuguaac

SEQ ID NO: 828910 - RNA, 19 nt, Artificial Sequence
  Description of Artificial Sequence: Synthetic oligonucleotide
  Sense strand starting at position 386 of SEQ ID NO: 587928
gguuuaucugaagggacca

SEQ ID NO: 828911 - RNA, 19 nt, Artificial Sequence
  Description of Artificial Sequence: Synthetic oligonucleotide
  Antisense strand to SEQ ID NO: 828910
uggucccuucagauaaacc

SEQ ID NO: 828912 - RNA, 19 nt, Artificial Sequence
  Description of Artificial Sequence: Synthetic oligonucleotide
  Sense strand starting at position 387 of SEQ ID NO: 587928
guuuaucugaagggaccau

SEQ ID NO: 828913 - RNA, 19 nt, Artificial Sequence
  Description of Artificial Sequence: Synthetic oligonucleotide
  Antisense strand to SEQ ID NO: 828912
auggucccuucagauaaac

SEQ ID NO: 828914 - RNA, 19 nt, Artificial Sequence
  Description of Artificial Sequence: Synthetic oligonucleotide
  Sense strand starting at position 421 of SEQ ID NO: 587928
agcaauuuaucugaaauag

SEQ ID NO: 828915 - RNA, 19 nt, Artificial Sequence
  Description of Artificial Sequence: Synthetic oligonucleotide
  Antisense strand to SEQ ID NO: 828914
cuauuucagauaaauugcu

SEQ ID NO: 828916 - RNA, 19 nt, Artificial Sequence
  Description of Artificial Sequence: Synthetic oligonucleotide
  Sense strand starting at position 457 of SEQ ID NO: 587928
ccaaguugugugcaauaaa

SEQ ID NO: 828917 - RNA, 19 nt, Artificial Sequence
  Description of Artificial Sequence: Synthetic oligonucleotide
  Antisense strand to SEQ ID NO: 828916
uuuauugcacacaacuugg

SEQ ID NO: 828918 - RNA, 19 nt, Artificial Sequence
  Description of Artificial Sequence: Synthetic oligonucleotide
  Sense strand starting at position 505 of SEQ ID NO: 587928
gcucuuccugacuggaaca

SEQ ID NO: 828919 - RNA, 19 nt, Artificial Sequence
  Description of Artificial Sequence: Synthetic oligonucleotide
  Antisense strand to SEQ ID NO: 828918
uguuccagucaggaagagc

SEQ ID NO: 828920 - RNA, 19 nt, Artificial Sequence
  Description of Artificial Sequence: Synthetic oligonucleotide
  Sense strand starting at position 597 of SEQ ID NO: 587928
acuguacaacccugagaau

SEQ ID NO: 828921 - RNA, 19 nt, Artificial Sequence
  Description of Artificial Sequence: Synthetic oligonucleotide
  Antisense strand to SEQ ID NO: 828920
auucucaggguuguacagu

SEQ ID NO: 828922 - RNA, 19 nt, Artificial Sequence
  Description of Artificial Sequence: Synthetic oligonucleotide
  Sense strand starting at position 627 of SEQ ID NO: 587928
uucuaugugaacuggaaga

SEQ ID NO: 828923 - RNA, 19 nt, Artificial Sequence
  Description of Artificial Sequence: Synthetic oligonucleotide
  Antisense strand to SEQ ID NO: 828922
ucuuccaguucacauagaa

SEQ ID NO: 828924 - RNA, 19 nt, Artificial Sequence
  Description of Artificial Sequence: Synthetic oligonucleotide
  Sense strand starting at position 643 of SEQ ID NO: 587928
agaacaaucuugucauagu

SEQ ID NO: 828925 - RNA, 19 nt, Artificial Sequence
  Description of Artificial Sequence: Synthetic oligonucleotide
  Antisense strand to SEQ ID NO: 828924
acuaugacaagauuguucu

SEQ ID NO: 828926 - RNA, 19 nt, Artificial Sequence
  Description of Artificial Sequence: Synthetic oligonucleotide
  Sense strand starting at position 707 of SEQ ID NO: 587928
uuaugcuuugcucaagaaa

SEQ ID NO: 828927 - RNA, 19 nt, Artificial Sequence
  Description of Artificial Sequence: Synthetic oligonucleotide
  Antisense strand to SEQ ID NO: 828926
uuucuugagcaaagcauaa

SEQ ID NO: 828928 - RNA, 19 nt, Artificial Sequence
  Description of Artificial Sequence: Synthetic oligonucleotide
  Sense strand starting at position 710 of SEQ ID NO: 587928
ugcuuugcucaagaaacuc

SEQ ID NO: 828929 - RNA, 19 nt, Artificial Sequence
  Description of Artificial Sequence: Synthetic oligonucleotide
  Antisense strand to SEQ ID NO: 828928
gaguuucuugagcaaagca

SEQ ID NO: 828930 - RNA, 19 nt, Artificial Sequence
  Description of Artificial Sequence: Synthetic oligonucleotide
  Sense strand starting at position 905 of SEQ ID NO: 587928
ccuguauuccaguaaacag

SEQ ID NO: 828931 - RNA, 19 nt, Artificial Sequence
  Description of Artificial Sequence: Synthetic oligonucleotide
  Antisense strand to SEQ ID NO: 828930
cuguuuacuggaauacagg

SEQ ID NO: 828932 - RNA, 19 nt, Artificial Sequence
  Description of Artificial Sequence: Synthetic oligonucleotide
  Sense strand starting at position 922 of SEQ ID NO: 587928
agacauauagcaugcauau

SEQ ID NO: 828933 - RNA, 19 nt, Artificial Sequence
  Description of Artificial Sequence: Synthetic oligonucleotide
  Antisense strand to SEQ ID NO: 828932
auaugcaugcuauaugucu

SEQ ID NO: 828934 - RNA, 19 nt, Artificial Sequence
  Description of Artificial Sequence: Synthetic oligonucleotide
  Sense strand starting at position 997 of SEQ ID NO: 587928
gaugcuuauuaugugaaag

SEQ ID NO: 828935 - RNA, 19 nt, Artificial Sequence
  Description of Artificial Sequence: Synthetic oligonucleotide
  Antisense strand to SEQ ID NO: 828934
cuuucacauaauaagcauc

SEQ ID NO: 828936 - RNA, 19 nt, Artificial Sequence
  Description of Artificial Sequence: Synthetic oligonucleotide
  Sense strand starting at position 1027 of SEQ ID NO: 587928
cuucucaucugagcacaga

SEQ ID NO: 828937 - RNA, 19 nt, Artificial Sequence
  Description of Artificial Sequence: Synthetic oligonucleotide
  Antisense strand to SEQ ID NO: 828936
ucugugcucagaugagaag

SEQ ID NO: 828938 - RNA, 19 nt, Artificial Sequence
  Description of Artificial Sequence: Synthetic oligonucleotide
  Sense strand starting at position 1028 of SEQ ID NO: 587928
uucucaucugagcacagaa

SEQ ID NO: 828939 - RNA, 19 nt, Artificial Sequence
  Description of Artificial Sequence: Synthetic oligonucleotide
  Antisense strand to SEQ ID NO: 828938
uucugugcucagaugagaa

SEQ ID NO: 828940 - RNA, 19 nt, Artificial Sequence
  Description of Artificial Sequence: Synthetic oligonucleotide
  Sense strand starting at position 1117 of SEQ ID NO: 587928
uuccuuacuguacaaguaa

SEQ ID NO: 828941 - RNA, 19 nt, Artificial Sequence
  Description of Artificial Sequence: Synthetic oligonucleotide
  Antisense strand to SEQ ID NO: 828940
uuacuuguacaguaaggaa

SEQ ID NO: 828942 - RNA, 19 nt, Artificial Sequence
  Description of Artificial Sequence: Synthetic oligonucleotide
  Sense strand starting at position 1184 of SEQ ID NO: 587928
guaucauacucagucagau

SEQ ID NO: 828943 - RNA, 19 nt, Artificial Sequence
  Description of Artificial Sequence: Synthetic oligonucleotide
  Antisense strand to SEQ ID NO: 828942
aucugacugaguaugauac

SEQ ID NO: 828944 - RNA, 19 nt, Artificial Sequence
  Description of Artificial Sequence: Synthetic oligonucleotide
  Sense strand starting at position 1357 of SEQ ID NO: 587928
caucuugcgccagugguau

SEQ ID NO: 828945 - RNA, 19 nt, Artificial Sequence
  Description of Artificial Sequence: Synthetic oligonucleotide
  Antisense strand to SEQ ID NO: 828944
auaccacuggcgcaagaug

SEQ ID NO: 828946 - RNA, 19 nt, Artificial Sequence
  Description of Artificial Sequence: Synthetic oligonucleotide
  Sense strand starting at position 1470 of SEQ ID NO: 587928
aggugugucgaaaguuauc

SEQ ID NO: 828947 - RNA, 19 nt, Artificial Sequence
  Description of Artificial Sequence: Synthetic oligonucleotide
  Antisense strand to SEQ ID NO: 828946
gauaacuuucgacacaccu

SEQ ID NO: 828948 - RNA, 19 nt, Artificial Sequence
  Description of Artificial Sequence: Synthetic oligonucleotide
  Sense strand starting at position 1746 of SEQ ID NO: 587928
caugguuuccgagauguaa

SEQ ID NO: 828949 - RNA, 19 nt, Artificial Sequence
  Description of Artificial Sequence: Synthetic oligonucleotide
  Antisense strand to SEQ ID NO: 828948
uuacaucucggaaaccaug

SEQ ID NO: 828950 - RNA, 19 nt, Artificial Sequence
  Description of Artificial Sequence: Synthetic oligonucleotide
  Sense strand starting at position 1901 of SEQ ID NO: 587928
gcuaacuuugcucuguguu

SEQ ID NO: 828951 - RNA, 19 nt, Artificial Sequence
  Description of Artificial Sequence: Synthetic oligonucleotide
  Antisense strand to SEQ ID NO: 828950
aacacagagcaaaguuagc

SEQ ID NO: 828952 - RNA, 19 nt, Artificial Sequence
  Description of Artificial Sequence: Synthetic oligonucleotide
  Sense strand starting at position 1909 of SEQ ID NO: 587928
ugcucuguguuauuuacca

SEQ ID NO: 828953 - RNA, 19 nt, Artificial Sequence
  Description of Artificial Sequence: Synthetic oligonucleotide
  Antisense strand to SEQ ID NO: 828952
ugguaaauaacacagagca

SEQ ID NO: 828954 - RNA, 19 nt, Artificial Sequence
  Description of Artificial Sequence: Synthetic oligonucleotide
  Sense strand starting at position 2126 of SEQ ID NO: 587928
gccggugggagucaagaaa

SEQ ID NO: 828955 - RNA, 19 nt, Artificial Sequence
  Description of Artificial Sequence: Synthetic oligonucleotide
  Antisense strand to SEQ ID NO: 828954
uuucuugacucccaccggc

SEQ ID NO: 828956 - RNA, 19 nt, Artificial Sequence
  Description of Artificial Sequence: Synthetic oligonucleotide
  Sense strand starting at position 2304 of SEQ ID NO: 587928
uggauuugaggccgagcua

SEQ ID NO: 828957 - RNA, 19 nt, Artificial Sequence
  Description of Artificial Sequence: Synthetic oligonucleotide
  Antisense strand to SEQ ID NO: 828956
uagcucggccucaaaucca

SEQ ID NO: 828958 - RNA, 19 nt, Artificial Sequence
  Description of Artificial Sequence: Synthetic oligonucleotide
  Sense strand starting at position 2788 of SEQ ID NO: 587928
gagaguauggacggauaca

SEQ ID NO: 828959 - RNA, 19 nt, Artificial Sequence
  Description of Artificial Sequence: Synthetic oligonucleotide
  Antisense strand to SEQ ID NO: 828958
uguauccguccauacucuc

SEQ ID NO: 828960 - RNA, 19 nt, Artificial Sequence
  Description of Artificial Sequence: Synthetic oligonucleotide
  Sense strand starting at position 2970 of SEQ ID NO: 587928
gagguuauccacuggacag

SEQ ID NO: 828961 - RNA, 19 nt, Artificial Sequence
  Description of Artificial Sequence: Synthetic oligonucleotide
  Antisense strand to SEQ ID NO: 828960
cuguccaguggauaaccuc

SEQ ID NO: 828962 - RNA, 19 nt, Artificial Sequence
  Description of Artificial Sequence: Synthetic oligonucleotide
  Sense strand starting at position 3107 of SEQ ID NO: 587928
cagcgaguccaucauagag

SEQ ID NO: 828963 - RNA, 19 nt, Artificial Sequence
  Description of Artificial Sequence: Synthetic oligonucleotide
  Antisense strand to SEQ ID NO: 828962
cucuaugauggacucgcug

SEQ ID NO: 828964 - RNA, 19 nt, Artificial Sequence
  Description of Artificial Sequence: Synthetic oligonucleotide
  Sense strand starting at position 3372 of SEQ ID NO: 587928
ugauuauugcauggaacca

SEQ ID NO: 828965 - RNA, 19 nt, Artificial Sequence
  Description of Artificial Sequence: Synthetic oligonucleotide
  Antisense strand to SEQ ID NO: 828964
ugguuccaugcaauaauca

SEQ ID NO: 828966 - RNA, 19 nt, Artificial Sequence
  Description of Artificial Sequence: Synthetic oligonucleotide
  Sense strand starting at position 3394 of SEQ ID NO: 587928
acuguaagugcugaaauga

SEQ ID NO: 828967 - RNA, 19 nt, Artificial Sequence
  Description of Artificial Sequence: Synthetic oligonucleotide
  Antisense strand to SEQ ID NO: 828966
ucauuucagcacuuacagu

SEQ ID NO: 828968 - RNA, 19 nt, Artificial Sequence
  Description of Artificial Sequence: Synthetic oligonucleotide
  Sense strand starting at position 3408 of SEQ ID NO: 587928
aaugaaacuguguauguga

SEQ ID NO: 828969 - RNA, 19 nt, Artificial Sequence
  Description of Artificial Sequence: Synthetic oligonucleotide
  Antisense strand to SEQ ID NO: 828968
ucacauacacaguuucauu

SEQ ID NO: 828970 - RNA, 19 nt, Artificial Sequence
  Description of Artificial Sequence: Synthetic oligonucleotide
  Sense strand starting at position 3609 of SEQ ID NO: 587928
uuacuugagcuauacauga

SEQ ID NO: 828971 - RNA, 19 nt, Artificial Sequence
  Description of Artificial Sequence: Synthetic oligonucleotide
  Antisense strand to SEQ ID NO: 828970
ucauguauagcucaaguaa

SEQ ID NO: 828972 - RNA, 19 nt, Artificial Sequence
  Description of Artificial Sequence: Synthetic oligonucleotide
  Sense strand starting at position 3631 of SEQ ID NO: 587928
acucuucugcuagacuaga

SEQ ID NO: 828973 - RNA, 19 nt, Artificial Sequence
  Description of Artificial Sequence: Synthetic oligonucleotide
  Antisense strand to SEQ ID NO: 828972
ucuagucuagcagaagagu

SEQ ID NO: 828974 - RNA, 19 nt, Artificial Sequence
  Description of Artificial Sequence: Synthetic oligonucleotide
  Sense strand starting at position 3689 of SEQ ID NO: 587928
gagguuucccuagagucaa

SEQ ID NO: 828975 - RNA, 19 nt, Artificial Sequence
  Description of Artificial Sequence: Synthetic oligonucleotide
  Antisense strand to SEQ ID NO: 828974
uugacucuagggaaaccuc

SEQ ID NO: 828976 - RNA, 19 nt, Artificial Sequence
  Description of Artificial Sequence: Synthetic oligonucleotide
  Sense strand starting at position 3741 of SEQ ID NO: 587928
gccuguucuuauuugauug

SEQ ID NO: 828977 - RNA, 19 nt, Artificial Sequence
  Description of Artificial Sequence: Synthetic oligonucleotide
  Antisense strand to SEQ ID NO: 828976
caaucaaauaagaacaggc

SEQ ID NO: 828978 - RNA, 19 nt, Artificial Sequence
  Description of Artificial Sequence: Synthetic oligonucleotide
  Sense strand starting at position 3777 of SEQ ID NO: 587928
ccugucuuucuagagaaau

SEQ ID NO: 828979 - RNA, 19 nt, Artificial Sequence
  Description of Artificial Sequence: Synthetic oligonucleotide
  Antisense strand to SEQ ID NO: 828978
auuucucuagaaagacagg

SEQ ID NO: 828980 - RNA, 19 nt, Artificial Sequence
  Description of Artificial Sequence: Synthetic oligonucleotide
  Sense strand starting at position 3844 of SEQ ID NO: 587928
ugcugaauacuacauuagu

SEQ ID NO: 828981 - RNA, 19 nt, Artificial Sequence
  Description of Artificial Sequence: Synthetic oligonucleotide
  Antisense strand to SEQ ID NO: 828980
acuaauguaguauucagca

SEQ ID NO: 828982 - RNA, 19 nt, Artificial Sequence
  Description of Artificial Sequence: Synthetic oligonucleotide
  Sense strand starting at position 3978 of SEQ ID NO: 587928
accuuuaaugauuggucau

SEQ ID NO: 828983 - RNA, 19 nt, Artificial Sequence
  Description of Artificial Sequence: Synthetic oligonucleotide
  Antisense strand to SEQ ID NO: 828982
augaccaaucauuaaaggu

SEQ ID NO: 828984 - RNA, 19 nt, Artificial Sequence
  Description of Artificial Sequence: Synthetic oligonucleotide
  Sense strand starting at position 3980 of SEQ ID NO: 587928
cuuuaaugauuggucauca

SEQ ID NO: 828985 - RNA, 19 nt, Artificial Sequence
  Description of Artificial Sequence: Synthetic oligonucleotide
  Antisense strand to SEQ ID NO: 828984
ugaugaccaaucauuaaag

SEQ ID NO: 828986 - RNA, 19 nt, Artificial Sequence
  Description of Artificial Sequence: Synthetic oligonucleotide
  Sense strand starting at position 3981 of SEQ ID NO: 587928
uuuaaugauuggucaucaa

SEQ ID NO: 828987 - RNA, 19 nt, Artificial Sequence
  Description of Artificial Sequence: Synthetic oligonucleotide
  Antisense strand to SEQ ID NO: 828986
uugaugaccaaucauuaaa

SEQ ID NO: 828988 - RNA, 19 nt, Artificial Sequence
  Description of Artificial Sequence: Synthetic oligonucleotide
  Sense strand starting at position 86 of SEQ ID NO: 587929
gggccuugucaaugaacac

SEQ ID NO: 828989 - RNA, 19 nt, Artificial Sequence
  Description of Artificial Sequence: Synthetic oligonucleotide
  Antisense strand to SEQ ID NO: 828988
guguucauugacaaggccc

SEQ ID NO: 828990 - RNA, 19 nt, Artificial Sequence
  Description of Artificial Sequence: Synthetic oligonucleotide
  Sense strand starting at position 93 of SEQ ID NO: 587929
gucaaugaacacugcguua

SEQ ID NO: 828991 - RNA, 19 nt, Artificial Sequence
  Description of Artificial Sequence: Synthetic oligonucleotide
  Antisense strand to SEQ ID NO: 828990
uaacgcaguguucauugac

SEQ ID NO: 828992 - RNA, 19 nt, Artificial Sequence
  Description of Artificial Sequence: Synthetic oligonucleotide
  Sense strand starting at position 952 of SEQ ID NO: 587929
gauuauuucuugggagcug

SEQ ID NO: 828993 - RNA, 19 nt, Artificial Sequence
  Description of Artificial Sequence: Synthetic oligonucleotide
  Antisense strand to SEQ ID NO: 828992
cagcucccaagaaauaauc

SEQ ID NO: 828994 - RNA, 19 nt, Artificial Sequence
  Description of Artificial Sequence: Synthetic oligonucleotide
  Sense strand starting at position 999 of SEQ ID NO: 587929
agaguuucgaguugccacu

SEQ ID NO: 828995 - RNA, 19 nt, Artificial Sequence
  Description of Artificial Sequence: Synthetic oligonucleotide
  Antisense strand to SEQ ID NO: 828994
aguggcaacucgaaacucu

SEQ ID NO: 828996 - RNA, 19 nt, Artificial Sequence
  Description of Artificial Sequence: Synthetic oligonucleotide
  Sense strand starting at position 1545 of SEQ ID NO: 587929
cuucgaaugucuuccacua

SEQ ID NO: 828997 - RNA, 19 nt, Artificial Sequence
  Description of Artificial Sequence: Synthetic oligonucleotide
  Antisense strand to SEQ ID NO: 828996
uaguggaagacauucgaag

SEQ ID NO: 828998 - RNA, 19 nt, Artificial Sequence
  Description of Artificial Sequence: Synthetic oligonucleotide
  Sense strand starting at position 1821 of SEQ ID NO: 587929
gugggugucccggacacuu

SEQ ID NO: 828999 - RNA, 19 nt, Artificial Sequence
  Description of Artificial Sequence: Synthetic oligonucleotide
  Antisense strand to SEQ ID NO: 828998
aaguguccgggacacccac

SEQ ID NO: 829000 - RNA, 19 nt, Artificial Sequence
  Description of Artificial Sequence: Synthetic oligonucleotide
  Sense strand starting at position 1916 of SEQ ID NO: 587929
cucuuugucuuugcaaagu

SEQ ID NO: 829001 - RNA, 19 nt, Artificial Sequence
  Description of Artificial Sequence: Synthetic oligonucleotide
  Antisense strand to SEQ ID NO: 829000
acuuugcaaagacaaagag

SEQ ID NO: 829002 - RNA, 19 nt, Artificial Sequence
  Description of Artificial Sequence: Synthetic oligonucleotide
  Sense strand starting at position 1934 of SEQ ID NO: 587929
ugucgaaacugucuggcau

SEQ ID NO: 829003 - RNA, 19 nt, Artificial Sequence
  Description of Artificial Sequence: Synthetic oligonucleotide
  Antisense strand to SEQ ID NO: 829002
augccagacaguuucgaca

SEQ ID NO: 829004 - RNA, 19 nt, Artificial Sequence
  Description of Artificial Sequence: Synthetic oligonucleotide
  Sense strand starting at position 1935 of SEQ ID NO: 587929
gucgaaacugucuggcaua

SEQ ID NO: 829005 - RNA, 19 nt, Artificial Sequence
  Description of Artificial Sequence: Synthetic oligonucleotide
  Antisense strand to SEQ ID NO: 829004
uaugccagacaguuucgac

SEQ ID NO: 829006 - RNA, 19 nt, Artificial Sequence
  Description of Artificial Sequence: Synthetic oligonucleotide
  Sense strand starting at position 2260 of SEQ ID NO: 587929
cgaauuuagcucugccaag

SEQ ID NO: 829007 - RNA, 19 nt, Artificial Sequence
  Description of Artificial Sequence: Synthetic oligonucleotide
  Antisense strand to SEQ ID NO: 829006
cuuggcagagcuaaauucg

SEQ ID NO: 829008 - RNA, 19 nt, Artificial Sequence
  Description of Artificial Sequence: Synthetic oligonucleotide
  Sense strand starting at position 2974 of SEQ ID NO: 587929
ggaggaauguuagaggaaa

SEQ ID NO: 829009 - RNA, 19 nt, Artificial Sequence
  Description of Artificial Sequence: Synthetic oligonucleotide
  Antisense strand to SEQ ID NO: 829008
uuuccucuaacauuccucc

SEQ ID NO: 829010 - RNA, 19 nt, Artificial Sequence
  Description of Artificial Sequence: Synthetic oligonucleotide
  Sense strand starting at position 3114 of SEQ ID NO: 587929
gcuguaguacagggauuca

SEQ ID NO: 829011 - RNA, 19 nt, Artificial Sequence
  Description of Artificial Sequence: Synthetic oligonucleotide
  Antisense strand to SEQ ID NO: 829010
ugaaucccuguacuacagc

SEQ ID NO: 829012 - RNA, 19 nt, Artificial Sequence
  Description of Artificial Sequence: Synthetic oligonucleotide
  Sense strand starting at position 3149 of SEQ ID NO: 587929
gccggacuucuugguucaa

SEQ ID NO: 829013 - RNA, 19 nt, Artificial Sequence
  Description of Artificial Sequence: Synthetic oligonucleotide
  Antisense strand to SEQ ID NO: 829012
uugaaccaagaaguccggc

SEQ ID NO: 829014 - RNA, 19 nt, Artificial Sequence
  Description of Artificial Sequence: Synthetic oligonucleotide
  Sense strand starting at position 3246 of SEQ ID NO: 587929
guguccucaucugugagaa

SEQ ID NO: 829015 - RNA, 19 nt, Artificial Sequence
  Description of Artificial Sequence: Synthetic oligonucleotide
  Antisense strand to SEQ ID NO: 829014
uucucacagaugaggacac

SEQ ID NO: 829016 - RNA, 19 nt, Artificial Sequence
  Description of Artificial Sequence: Synthetic oligonucleotide
  Sense strand starting at position 3247 of SEQ ID NO: 587929
uguccucaucugugagaac

SEQ ID NO: 829017 - RNA, 19 nt, Artificial Sequence
  Description of Artificial Sequence: Synthetic oligonucleotide
  Antisense strand to SEQ ID NO: 829016
guucucacagaugaggaca

SEQ ID NO: 829018 - RNA, 19 nt, Artificial Sequence
  Description of Artificial Sequence: Synthetic oligonucleotide
  Sense strand starting at position 3266 of SEQ ID NO: 587929
cgaccuaagaagugucugu

SEQ ID NO: 829019 - RNA, 19 nt, Artificial Sequence
  Description of Artificial Sequence: Synthetic oligonucleotide
  Antisense strand to SEQ ID NO: 829018
acagacacuucuuaggucg

SEQ ID NO: 829020 - RNA, 19 nt, Artificial Sequence
  Description of Artificial Sequence: Synthetic oligonucleotide
  Sense strand starting at position 3270 of SEQ ID NO: 587929
cuaagaagugucugucuga

SEQ ID NO: 829021 - RNA, 19 nt, Artificial Sequence
  Description of Artificial Sequence: Synthetic oligonucleotide
  Antisense strand to SEQ ID NO: 829020
ucagacagacacuucuuag

SEQ ID NO: 829022 - RNA, 19 nt, Artificial Sequence
  Description of Artificial Sequence: Synthetic oligonucleotide
  Sense strand starting at position 3273 of SEQ ID NO: 587929
agaagugucugucugauaa

SEQ ID NO: 829023 - RNA, 19 nt, Artificial Sequence
  Description of Artificial Sequence: Synthetic oligonucleotide
  Antisense strand to SEQ ID NO: 829022
uuaucagacagacacuucu

SEQ ID NO: 829024 - RNA, 19 nt, Artificial Sequence
  Description of Artificial Sequence: Synthetic oligonucleotide
  Sense strand starting at position 3298 of SEQ ID NO: 587929
ugugaugaguuagugaauu

SEQ ID NO: 829025 - RNA, 19 nt, Artificial Sequence
  Description of Artificial Sequence: Synthetic oligonucleotide
  Antisense strand to SEQ ID NO: 829024
aauucacuaacucaucaca

SEQ ID NO: 829026 - RNA, 19 nt, Artificial Sequence
  Description of Artificial Sequence: Synthetic oligonucleotide
  Sense strand starting at position 3306 of SEQ ID NO: 587929
guuagugaauucguacaca

SEQ ID NO: 829027 - RNA, 19 nt, Artificial Sequence
  Description of Artificial Sequence: Synthetic oligonucleotide
  Antisense strand to SEQ ID NO: 829026
uguguacgaauucacuaac

SEQ ID NO: 829028 - RNA, 19 nt, Artificial Sequence
  Description of Artificial Sequence: Synthetic oligonucleotide
  Sense strand starting at position 3309 of SEQ ID NO: 587929
agugaauucguacacauag

SEQ ID NO: 829029 - RNA, 19 nt, Artificial Sequence
  Description of Artificial Sequence: Synthetic oligonucleotide
  Antisense strand to SEQ ID NO: 829028
cuauguguacgaauucacu

SEQ ID NO: 829030 - RNA, 19 nt, Artificial Sequence
  Description of Artificial Sequence: Synthetic oligonucleotide
  Sense strand starting at position 3333 of SEQ ID NO: 587929
uuagaacugucuuugacau

SEQ ID NO: 829031 - RNA, 19 nt, Artificial Sequence
  Description of Artificial Sequence: Synthetic oligonucleotide
  Antisense strand to SEQ ID NO: 829030
augucaaagacaguucuaa

SEQ ID NO: 829032 - RNA, 19 nt, Artificial Sequence
  Description of Artificial Sequence: Synthetic oligonucleotide
  Sense strand starting at position 3334 of SEQ ID NO: 587929
uagaacugucuuugacaug

SEQ ID NO: 829033 - RNA, 19 nt, Artificial Sequence
  Description of Artificial Sequence: Synthetic oligonucleotide
  Antisense strand to SEQ ID NO: 829032
caugucaaagacaguucua

SEQ ID NO: 829034 - RNA, 19 nt, Artificial Sequence
  Description of Artificial Sequence: Synthetic oligonucleotide
  Sense strand starting at position 3339 of SEQ ID NO: 587929
cugucuuugacauguagua

SEQ ID NO: 829035 - RNA, 19 nt, Artificial Sequence
  Description of Artificial Sequence: Synthetic oligonucleotide
  Antisense strand to SEQ ID NO: 829034
uacuacaugucaaagacag

SEQ ID NO: 829036 - RNA, 19 nt, Artificial Sequence
  Description of Artificial Sequence: Synthetic oligonucleotide
  Sense strand starting at position 3341 of SEQ ID NO: 587929
gucuuugacauguaguaag

SEQ ID NO: 829037 - RNA, 19 nt, Artificial Sequence
  Description of Artificial Sequence: Synthetic oligonucleotide
  Antisense strand to SEQ ID NO: 829036
cuuacuacaugucaaagac

SEQ ID NO: 829038 - RNA, 19 nt, Artificial Sequence
  Description of Artificial Sequence: Synthetic oligonucleotide
  Sense strand starting at position 3412 of SEQ ID NO: 587929
gaagaugaccugugcuaga

SEQ ID NO: 829039 - RNA, 19 nt, Artificial Sequence
  Description of Artificial Sequence: Synthetic oligonucleotide
  Antisense strand to SEQ ID NO: 829038
ucuagcacaggucaucuuc

SEQ ID NO: 829040 - RNA, 19 nt, Artificial Sequence
  Description of Artificial Sequence: Synthetic oligonucleotide
  Sense strand starting at position 3417 of SEQ ID NO: 587929
ugaccugugcuagaagaug

SEQ ID NO: 829041 - RNA, 19 nt, Artificial Sequence
  Description of Artificial Sequence: Synthetic oligonucleotide
  Antisense strand to SEQ ID NO: 829040
caucuucuagcacagguca

SEQ ID NO: 829042 - RNA, 19 nt, Artificial Sequence
  Description of Artificial Sequence: Synthetic oligonucleotide
  Sense strand starting at position 3644 of SEQ ID NO: 587929
uugauagaauucuagagaa

SEQ ID NO: 829043 - RNA, 19 nt, Artificial Sequence
  Description of Artificial Sequence: Synthetic oligonucleotide
  Antisense strand to SEQ ID NO: 829042
uucucuagaauucuaucaa

SEQ ID NO: 829044 - RNA, 19 nt, Artificial Sequence
  Description of Artificial Sequence: Synthetic oligonucleotide
  Sense strand starting at position 3686 of SEQ ID NO: 587929
ggacacauccugugggcuu

SEQ ID NO: 829045 - RNA, 19 nt, Artificial Sequence
  Description of Artificial Sequence: Synthetic oligonucleotide
  Antisense strand to SEQ ID NO: 829044
aagcccacaggaugugucc

SEQ ID NO: 829046 - RNA, 19 nt, Artificial Sequence
  Description of Artificial Sequence: Synthetic oligonucleotide
  Sense strand starting at position 3699 of SEQ ID NO: 587929
gggcuuuccucuuucugaa

SEQ ID NO: 829047 - RNA, 19 nt, Artificial Sequence
  Description of Artificial Sequence: Synthetic oligonucleotide
  Antisense strand to SEQ ID NO: 829046
uucagaaagaggaaagccc

SEQ ID NO: 829048 - RNA, 19 nt, Artificial Sequence
  Description of Artificial Sequence: Synthetic oligonucleotide
  Sense strand starting at position 3779 of SEQ ID NO: 587929
gagaguucugcuuacaucg

SEQ ID NO: 829049 - RNA, 19 nt, Artificial Sequence
  Description of Artificial Sequence: Synthetic oligonucleotide
  Antisense strand to SEQ ID NO: 829048
cgauguaagcagaacucuc

SEQ ID NO: 829050 - RNA, 19 nt, Artificial Sequence
  Description of Artificial Sequence: Synthetic oligonucleotide
  Sense strand starting at position 3819 of SEQ ID NO: 587929
agcgucuuccagcaaagaa

SEQ ID NO: 829051 - RNA, 19 nt, Artificial Sequence
  Description of Artificial Sequence: Synthetic oligonucleotide
  Antisense strand to SEQ ID NO: 829050
uucuuugcuggaagacgcu

SEQ ID NO: 829052 - RNA, 19 nt, Artificial Sequence
  Description of Artificial Sequence: Synthetic oligonucleotide
  Sense strand starting at position 3861 of SEQ ID NO: 587929
uuuagcuuuggcugggaau

SEQ ID NO: 829053 - RNA, 19 nt, Artificial Sequence
  Description of Artificial Sequence: Synthetic oligonucleotide
  Antisense strand to SEQ ID NO: 829052
auucccagccaaagcuaaa

SEQ ID NO: 829054 - RNA, 19 nt, Artificial Sequence
  Description of Artificial Sequence: Synthetic oligonucleotide
  Sense strand starting at position 3862 of SEQ ID NO: 587929
uuagcuuuggcugggaaua

SEQ ID NO: 829055 - RNA, 19 nt, Artificial Sequence
  Description of Artificial Sequence: Synthetic oligonucleotide
  Antisense strand to SEQ ID NO: 829054
uauucccagccaaagcuaa

SEQ ID NO: 829056 - RNA, 19 nt, Artificial Sequence
  Description of Artificial Sequence: Synthetic oligonucleotide
  Sense strand starting at position 3863 of SEQ ID NO: 587929
uagcuuuggcugggaauau

SEQ ID NO: 829057 - RNA, 19 nt, Artificial Sequence
  Description of Artificial Sequence: Synthetic oligonucleotide
  Antisense strand to SEQ ID NO: 829056
auauucccagccaaagcua

SEQ ID NO: 829058 - RNA, 19 nt, Artificial Sequence
  Description of Artificial Sequence: Synthetic oligonucleotide
  Sense strand starting at position 3874 of SEQ ID NO: 587929
gggaauaucgucugggcca

SEQ ID NO: 829059 - RNA, 19 nt, Artificial Sequence
  Description of Artificial Sequence: Synthetic oligonucleotide
  Antisense strand to SEQ ID NO: 829058
uggcccagacgauauuccc

SEQ ID NO: 829060 - RNA, 19 nt, Artificial Sequence
  Description of Artificial Sequence: Synthetic oligonucleotide
  Sense strand starting at position 3876 of SEQ ID NO: 587929
gaauaucgucugggccaau

SEQ ID NO: 829061 - RNA, 19 nt, Artificial Sequence
  Description of Artificial Sequence: Synthetic oligonucleotide
  Antisense strand to SEQ ID NO: 829060
auuggcccagacgauauuc

SEQ ID NO: 829062 - RNA, 19 nt, Artificial Sequence
  Description of Artificial Sequence: Synthetic oligonucleotide
  Sense strand starting at position 3877 of SEQ ID NO: 587929
aauaucgucugggccaaua

SEQ ID NO: 829063 - RNA, 19 nt, Artificial Sequence
  Description of Artificial Sequence: Synthetic oligonucleotide
  Antisense strand to SEQ ID NO: 829062
uauuggcccagacgauauu

SEQ ID NO: 829064 - RNA, 19 nt, Artificial Sequence
  Description of Artificial Sequence: Synthetic oligonucleotide
  Sense strand starting at position 3879 of SEQ ID NO: 587929
uaucgucugggccaauaaa

SEQ ID NO: 829065 - RNA, 19 nt, Artificial Sequence
  Description of Artificial Sequence: Synthetic oligonucleotide
  Antisense strand to SEQ ID NO: 829064
uuuauuggcccagacgaua

SEQ ID NO: 829066 - RNA, 19 nt, Artificial Sequence
  Description of Artificial Sequence: Synthetic oligonucleotide
  Sense strand starting at position 3925 of SEQ ID NO: 587929
uuguuuauuguauggauca

SEQ ID NO: 829067 - RNA, 19 nt, Artificial Sequence
  Description of Artificial Sequence: Synthetic oligonucleotide
  Antisense strand to SEQ ID NO: 829066
ugauccauacaauaaacaa

SEQ ID NO: 829068 - RNA, 19 nt, Artificial Sequence
  Description of Artificial Sequence: Synthetic oligonucleotide
  Sense strand starting at position 73 of SEQ ID NO: 587930
gucugugugcuugccagaa

SEQ ID NO: 829069 - RNA, 19 nt, Artificial Sequence
  Description of Artificial Sequence: Synthetic oligonucleotide
  Antisense strand to SEQ ID NO: 829068
uucuggcaagcacacagac

SEQ ID NO: 829070 - RNA, 19 nt, Artificial Sequence
  Description of Artificial Sequence: Synthetic oligonucleotide
  Sense strand starting at position 85 of SEQ ID NO: 587930
gccagaaucugauugcaug

SEQ ID NO: 829071 - RNA, 19 nt, Artificial Sequence
  Description of Artificial Sequence: Synthetic oligonucleotide
  Antisense strand to SEQ ID NO: 829070
caugcaaucagauucuggc

SEQ ID NO: 829072 - RNA, 19 nt, Artificial Sequence
  Description of Artificial Sequence: Synthetic oligonucleotide
  Sense strand starting at position 86 of SEQ ID NO: 587930
ccagaaucugauugcauga

SEQ ID NO: 829073 - RNA, 19 nt, Artificial Sequence
  Description of Artificial Sequence: Synthetic oligonucleotide
  Antisense strand to SEQ ID NO: 829072
ucaugcaaucagauucugg

SEQ ID NO: 829074 - RNA, 19 nt, Artificial Sequence
  Description of Artificial Sequence: Synthetic oligonucleotide
  Sense strand starting at position 99 of SEQ ID NO: 587930
gcaugaaucugugcuucug

SEQ ID NO: 829075 - RNA, 19 nt, Artificial Sequence
  Description of Artificial Sequence: Synthetic oligonucleotide
  Antisense strand to SEQ ID NO: 829074
cagaagcacagauucaugc

SEQ ID NO: 829076 - RNA, 19 nt, Artificial Sequence
  Description of Artificial Sequence: Synthetic oligonucleotide
  Sense strand starting at position 234 of SEQ ID NO: 587930
ggcuucucgcucuaaaggu

SEQ ID NO: 829077 - RNA, 19 nt, Artificial Sequence
  Description of Artificial Sequence: Synthetic oligonucleotide
  Antisense strand to SEQ ID NO: 829076
accuuuagagcgagaagcc

SEQ ID NO: 829078 - RNA, 19 nt, Artificial Sequence
  Description of Artificial Sequence: Synthetic oligonucleotide
  Sense strand starting at position 262 of SEQ ID NO: 587930
aauccaguguaauuggaaa

SEQ ID NO: 829079 - RNA, 19 nt, Artificial Sequence
  Description of Artificial Sequence: Synthetic oligonucleotide
  Antisense strand to SEQ ID NO: 829078
uuuccaauuacacuggauu

SEQ ID NO: 829080 - RNA, 19 nt, Artificial Sequence
  Description of Artificial Sequence: Synthetic oligonucleotide
  Sense strand starting at position 264 of SEQ ID NO: 587930
uccaguguaauuggaaaga

SEQ ID NO: 829081 - RNA, 19 nt, Artificial Sequence
  Description of Artificial Sequence: Synthetic oligonucleotide
  Antisense strand to SEQ ID NO: 829080
ucuuuccaauuacacugga

SEQ ID NO: 829082 - RNA, 19 nt, Artificial Sequence
  Description of Artificial Sequence: Synthetic oligonucleotide
  Sense strand starting at position 277 of SEQ ID NO: 587930
gaaagaucgugccuagauu

SEQ ID NO: 829083 - RNA, 19 nt, Artificial Sequence
  Description of Artificial Sequence: Synthetic oligonucleotide
  Antisense strand to SEQ ID NO: 829082
aaucuaggcacgaucuuuc

SEQ ID NO: 829084 - RNA, 19 nt, Artificial Sequence
  Description of Artificial Sequence: Synthetic oligonucleotide
  Sense strand starting at position 278 of SEQ ID NO: 587930
aaagaucgugccuagauug

SEQ ID NO: 829085 - RNA, 19 nt, Artificial Sequence
  Description of Artificial Sequence: Synthetic oligonucleotide
  Antisense strand to SEQ ID NO: 829084
caaucuaggcacgaucuuu

SEQ ID NO: 829086 - RNA, 19 nt, Artificial Sequence
  Description of Artificial Sequence: Synthetic oligonucleotide
  Sense strand starting at position 292 of SEQ ID NO: 587930
gauugacuuguguacccuu

SEQ ID NO: 829087 - RNA, 19 nt, Artificial Sequence
  Description of Artificial Sequence: Synthetic oligonucleotide
  Antisense strand to SEQ ID NO: 829086
aaggguacacaagucaauc

SEQ ID NO: 829088 - RNA, 19 nt, Artificial Sequence
  Description of Artificial Sequence: Synthetic oligonucleotide
  Sense strand starting at position 426 of SEQ ID NO: 587930
gucuuaucucuuuaccuug

SEQ ID NO: 829089 - RNA, 19 nt, Artificial Sequence
  Description of Artificial Sequence: Synthetic oligonucleotide
  Antisense strand to SEQ ID NO: 829088
caagguaaagagauaagac

SEQ ID NO: 829090 - RNA, 19 nt, Artificial Sequence
  Description of Artificial Sequence: Synthetic oligonucleotide
  Sense strand starting at position 497 of SEQ ID NO: 587930
agucaagucuaauauuuac

SEQ ID NO: 829091 - RNA, 19 nt, Artificial Sequence
  Description of Artificial Sequence: Synthetic oligonucleotide
  Antisense strand to SEQ ID NO: 829090
guaaauauuagacuugacu

SEQ ID NO: 829092 - RNA, 19 nt, Artificial Sequence
  Description of Artificial Sequence: Synthetic oligonucleotide
  Sense strand starting at position 527 of SEQ ID NO: 587930
gggcaagacuuuccugugu

SEQ ID NO: 829093 - RNA, 19 nt, Artificial Sequence
  Description of Artificial Sequence: Synthetic oligonucleotide
  Antisense strand to SEQ ID NO: 829092
acacaggaaagucuugccc

SEQ ID NO: 829094 - RNA, 19 nt, Artificial Sequence
  Description of Artificial Sequence: Synthetic oligonucleotide
  Sense strand starting at position 1103 of SEQ ID NO: 587930
cagcgugaccaauauagca

SEQ ID NO: 829095 - RNA, 19 nt, Artificial Sequence
  Description of Artificial Sequence: Synthetic oligonucleotide
  Antisense strand to SEQ ID NO: 829094
ugcuauauuggucacgcug

SEQ ID NO: 829096 - RNA, 19 nt, Artificial Sequence
  Description of Artificial Sequence: Synthetic oligonucleotide
  Sense strand starting at position 1108 of SEQ ID NO: 587930
ugaccaauauagcaagaca

SEQ ID NO: 829097 - RNA, 19 nt, Artificial Sequence
  Description of Artificial Sequence: Synthetic oligonucleotide
  Antisense strand to SEQ ID NO: 829096
ugucuugcuauauugguca

SEQ ID NO: 829098 - RNA, 19 nt, Artificial Sequence
  Description of Artificial Sequence: Synthetic oligonucleotide
  Sense strand starting at position 1496 of SEQ ID NO: 587930
ggauauaucuuaguaacca

SEQ ID NO: 829099 - RNA, 19 nt, Artificial Sequence
  Description of Artificial Sequence: Synthetic oligonucleotide
  Antisense strand to SEQ ID NO: 829098
ugguuacuaagauauaucc

SEQ ID NO: 829100 - RNA, 19 nt, Artificial Sequence
  Description of Artificial Sequence: Synthetic oligonucleotide
  Sense strand starting at position 1731 of SEQ ID NO: 587930
cagcauuguuuccuggcaa

SEQ ID NO: 829101 - RNA, 19 nt, Artificial Sequence
  Description of Artificial Sequence: Synthetic oligonucleotide
  Antisense strand to SEQ ID NO: 829100
uugccaggaaacaaugcug

SEQ ID NO: 829102 - RNA, 19 nt, Artificial Sequence
  Description of Artificial Sequence: Synthetic oligonucleotide
  Sense strand starting at position 1841 of SEQ ID NO: 587930
ucaagcuucgccucugagu

SEQ ID NO: 829103 - RNA, 19 nt, Artificial Sequence
  Description of Artificial Sequence: Synthetic oligonucleotide
  Antisense strand to SEQ ID NO: 829102
acucagaggcgaagcuuga

SEQ ID NO: 829104 - RNA, 19 nt, Artificial Sequence
  Description of Artificial Sequence: Synthetic oligonucleotide
  Sense strand starting at position 1881 of SEQ ID NO: 587930
ugguguucugcgucuuaaa

SEQ ID NO: 829105 - RNA, 19 nt, Artificial Sequence
  Description of Artificial Sequence: Synthetic oligonucleotide
  Antisense strand to SEQ ID NO: 829104
uuuaagacgcagaacacca

SEQ ID NO: 829106 - RNA, 19 nt, Artificial Sequence
  Description of Artificial Sequence: Synthetic oligonucleotide
  Sense strand starting at position 1882 of SEQ ID NO: 587930
gguguucugcgucuuaaau

SEQ ID NO: 829107 - RNA, 19 nt, Artificial Sequence
  Description of Artificial Sequence: Synthetic oligonucleotide
  Antisense strand to SEQ ID NO: 829106
auuuaagacgcagaacacc

SEQ ID NO: 829108 - RNA, 19 nt, Artificial Sequence
  Description of Artificial Sequence: Synthetic oligonucleotide
  Sense strand starting at position 1883 of SEQ ID NO: 587930
guguucugcgucuuaaaug

SEQ ID NO: 829109 - RNA, 19 nt, Artificial Sequence
  Description of Artificial Sequence: Synthetic oligonucleotide
  Antisense strand to SEQ ID NO: 829108
cauuuaagacgcagaacac

SEQ ID NO: 829110 - RNA, 19 nt, Artificial Sequence
  Description of Artificial Sequence: Synthetic oligonucleotide
  Sense strand starting at position 1944 of SEQ ID NO: 587930
gccaucacucacugugcaa

SEQ ID NO: 829111 - RNA, 19 nt, Artificial Sequence
  Description of Artificial Sequence: Synthetic oligonucleotide
  Antisense strand to SEQ ID NO: 829110
uugcacagugagugauggc

SEQ ID NO: 829112 - RNA, 19 nt, Artificial Sequence
  Description of Artificial Sequence: Synthetic oligonucleotide
  Sense strand starting at position 1970 of SEQ ID NO: 587930
ggucaaggauagagcgauu

SEQ ID NO: 829113 - RNA, 19 nt, Artificial Sequence
  Description of Artificial Sequence: Synthetic oligonucleotide
  Antisense strand to SEQ ID NO: 829112
aaucgcucuauccuugacc

SEQ ID NO: 829114 - RNA, 19 nt, Artificial Sequence
  Description of Artificial Sequence: Synthetic oligonucleotide
  Sense strand starting at position 1981 of SEQ ID NO: 587930
gagcgauugccucacacug

SEQ ID NO: 829115 - RNA, 19 nt, Artificial Sequence
  Description of Artificial Sequence: Synthetic oligonucleotide
  Antisense strand to SEQ ID NO: 829114
cagugugaggcaaucgcuc

SEQ ID NO: 829116 - RNA, 19 nt, Artificial Sequence
  Description of Artificial Sequence: Synthetic oligonucleotide
  Sense strand starting at position 2142 of SEQ ID NO: 587930
gcagauuucuagcccuugu

SEQ ID NO: 829117 - RNA, 19 nt, Artificial Sequence
  Description of Artificial Sequence: Synthetic oligonucleotide
  Antisense strand to SEQ ID NO: 829116
acaagggcuagaaaucugc

SEQ ID NO: 829118 - RNA, 19 nt, Artificial Sequence
  Description of Artificial Sequence: Synthetic oligonucleotide
  Sense strand starting at position 2197 of SEQ ID NO: 587930
ggcucagaaaccuguguua

SEQ ID NO: 829119 - RNA, 19 nt, Artificial Sequence
  Description of Artificial Sequence: Synthetic oligonucleotide
  Antisense strand to SEQ ID NO: 829118
uaacacagguuucugagcc

SEQ ID NO: 829120 - RNA, 19 nt, Artificial Sequence
  Description of Artificial Sequence: Synthetic oligonucleotide
  Sense strand starting at position 2199 of SEQ ID NO: 587930
cucagaaaccuguguuaaa

SEQ ID NO: 829121 - RNA, 19 nt, Artificial Sequence
  Description of Artificial Sequence: Synthetic oligonucleotide
  Antisense strand to SEQ ID NO: 829120
uuuaacacagguuucugag

SEQ ID NO: 829122 - RNA, 19 nt, Artificial Sequence
  Description of Artificial Sequence: Synthetic oligonucleotide
  Sense strand starting at position 2635 of SEQ ID NO: 587930
agguguuguguggacuaca

SEQ ID NO: 829123 - RNA, 19 nt, Artificial Sequence
  Description of Artificial Sequence: Synthetic oligonucleotide
  Antisense strand to SEQ ID NO: 829122
uguaguccacacaacaccu

SEQ ID NO: 829124 - RNA, 19 nt, Artificial Sequence
  Description of Artificial Sequence: Synthetic oligonucleotide
  Sense strand starting at position 2694 of SEQ ID NO: 587930
ggguguuuaccaggcagua

SEQ ID NO: 829125 - RNA, 19 nt, Artificial Sequence
  Description of Artificial Sequence: Synthetic oligonucleotide
  Antisense strand to SEQ ID NO: 829124
uacugccugguaaacaccc

SEQ ID NO: 829126 - RNA, 19 nt, Artificial Sequence
  Description of Artificial Sequence: Synthetic oligonucleotide
  Sense strand starting at position 2696 of SEQ ID NO: 587930
guguuuaccaggcaguaga

SEQ ID NO: 829127 - RNA, 19 nt, Artificial Sequence
  Description of Artificial Sequence: Synthetic oligonucleotide
  Antisense strand to SEQ ID NO: 829126
ucuacugccugguaaacac

SEQ ID NO: 829128 - RNA, 19 nt, Artificial Sequence
  Description of Artificial Sequence: Synthetic oligonucleotide
  Sense strand starting at position 2728 of SEQ ID NO: 587930
cucuucuucugggugagga

SEQ ID NO: 829129 - RNA, 19 nt, Artificial Sequence
  Description of Artificial Sequence: Synthetic oligonucleotide
  Antisense strand to SEQ ID NO: 829128
uccucacccagaagaagag

SEQ ID NO: 829130 - RNA, 19 nt, Artificial Sequence
  Description of Artificial Sequence: Synthetic oligonucleotide
  Sense strand starting at position 2870 of SEQ ID NO: 587930
ccaggacgcuugguauauu

SEQ ID NO: 829131 - RNA, 19 nt, Artificial Sequence
  Description of Artificial Sequence: Synthetic oligonucleotide
  Antisense strand to SEQ ID NO: 829130
aauauaccaagcguccugg

SEQ ID NO: 829132 - RNA, 19 nt, Artificial Sequence
  Description of Artificial Sequence: Synthetic oligonucleotide
  Sense strand starting at position 2873 of SEQ ID NO: 587930
ggacgcuugguauauucaa

SEQ ID NO: 829133 - RNA, 19 nt, Artificial Sequence
  Description of Artificial Sequence: Synthetic oligonucleotide
  Antisense strand to SEQ ID NO: 829132
uugaauauaccaagcgucc

SEQ ID NO: 829134 - RNA, 19 nt, Artificial Sequence
  Description of Artificial Sequence: Synthetic oligonucleotide
  Sense strand starting at position 3105 of SEQ ID NO: 587930
aguagcuuugucugaguga

SEQ ID NO: 829135 - RNA, 19 nt, Artificial Sequence
  Description of Artificial Sequence: Synthetic oligonucleotide
  Antisense strand to SEQ ID NO: 829134
ucacucagacaaagcuacu

SEQ ID NO: 829136 - RNA, 19 nt, Artificial Sequence
  Description of Artificial Sequence: Synthetic oligonucleotide
  Sense strand starting at position 3134 of SEQ ID NO: 587930
gggucuugguaugugcaga

SEQ ID NO: 829137 - RNA, 19 nt, Artificial Sequence
  Description of Artificial Sequence: Synthetic oligonucleotide
  Antisense strand to SEQ ID NO: 829136
ucugcacauaccaagaccc

SEQ ID NO: 829138 - RNA, 19 nt, Artificial Sequence
  Description of Artificial Sequence: Synthetic oligonucleotide
  Sense strand starting at position 3135 of SEQ ID NO: 587930
ggucuugguaugugcagaa

SEQ ID NO: 829139 - RNA, 19 nt, Artificial Sequence
  Description of Artificial Sequence: Synthetic oligonucleotide
  Antisense strand to SEQ ID NO: 829138
uucugcacauaccaagacc

SEQ ID NO: 829140 - RNA, 19 nt, Artificial Sequence
  Description of Artificial Sequence: Synthetic oligonucleotide
  Sense strand starting at position 3139 of SEQ ID NO: 587930
uugguaugugcagaaagcu

SEQ ID NO: 829141 - RNA, 19 nt, Artificial Sequence
  Description of Artificial Sequence: Synthetic oligonucleotide
  Antisense strand to SEQ ID NO: 829140
agcuuucugcacauaccaa

SEQ ID NO: 829142 - RNA, 19 nt, Artificial Sequence
  Description of Artificial Sequence: Synthetic oligonucleotide
  Sense strand starting at position 3726 of SEQ ID NO: 587930
ccacgaggccucugcauuu

SEQ ID NO: 829143 - RNA, 19 nt, Artificial Sequence
  Description of Artificial Sequence: Synthetic oligonucleotide
  Antisense strand to SEQ ID NO: 829142
aaaugcagaggccucgugg

SEQ ID NO: 829144 - RNA, 19 nt, Artificial Sequence
  Description of Artificial Sequence: Synthetic oligonucleotide
  Sense strand starting at position 3850 of SEQ ID NO: 587930
caagaauauugggagugga

SEQ ID NO: 829145 - RNA, 19 nt, Artificial Sequence
  Description of Artificial Sequence: Synthetic oligonucleotide
  Antisense strand to SEQ ID NO: 829144
uccacucccaauauucuug

SEQ ID NO: 829146 - RNA, 19 nt, Artificial Sequence
  Description of Artificial Sequence: Synthetic oligonucleotide
  Sense strand starting at position 3916 of SEQ ID NO: 587930
gagggaguucuguguccug

SEQ ID NO: 829147 - RNA, 19 nt, Artificial Sequence
  Description of Artificial Sequence: Synthetic oligonucleotide
  Antisense strand to SEQ ID NO: 829146
caggacacagaacucccuc

SEQ ID NO: 829148 - RNA, 19 nt, Artificial Sequence
  Description of Artificial Sequence: Synthetic oligonucleotide
  Sense strand starting at position 185 of SEQ ID NO: 587931
uggcaauagugacuugacu

SEQ ID NO: 829149 - RNA, 19 nt, Artificial Sequence
  Description of Artificial Sequence: Synthetic oligonucleotide
  Antisense strand to SEQ ID NO: 829148
agucaagucacuauugcca

SEQ ID NO: 829150 - RNA, 19 nt, Artificial Sequence
  Description of Artificial Sequence: Synthetic oligonucleotide
  Sense strand starting at position 187 of SEQ ID NO: 587931
gcaauagugacuugacuug

SEQ ID NO: 829151 - RNA, 19 nt, Artificial Sequence
  Description of Artificial Sequence: Synthetic oligonucleotide
  Antisense strand to SEQ ID NO: 829150
caagucaagucacuauugc

SEQ ID NO: 829152 - RNA, 19 nt, Artificial Sequence
  Description of Artificial Sequence: Synthetic oligonucleotide
  Sense strand starting at position 233 of SEQ ID NO: 587931
ccagauaguuuggcauaac

SEQ ID NO: 829153 - RNA, 19 nt, Artificial Sequence
  Description of Artificial Sequence: Synthetic oligonucleotide
  Antisense strand to SEQ ID NO: 829152
guuaugccaaacuaucugg

SEQ ID NO: 829154 - RNA, 19 nt, Artificial Sequence
  Description of Artificial Sequence: Synthetic oligonucleotide
  Sense strand starting at position 314 of SEQ ID NO: 587931
ugauaucucuuguuugcag

SEQ ID NO: 829155 - RNA, 19 nt, Artificial Sequence
  Description of Artificial Sequence: Synthetic oligonucleotide
  Antisense strand to SEQ ID NO: 829154
cugcaaacaagagauauca

SEQ ID NO: 829156 - RNA, 19 nt, Artificial Sequence
  Description of Artificial Sequence: Synthetic oligonucleotide
  Sense strand starting at position 321 of SEQ ID NO: 587931
ucuuguuugcaguaagaua

SEQ ID NO: 829157 - RNA, 19 nt, Artificial Sequence
  Description of Artificial Sequence: Synthetic oligonucleotide
  Antisense strand to SEQ ID NO: 829156
uaucuuacugcaaacaaga

SEQ ID NO: 829158 - RNA, 19 nt, Artificial Sequence
  Description of Artificial Sequence: Synthetic oligonucleotide
  Sense strand starting at position 453 of SEQ ID NO: 587931
guacuugaaucaucuaaag

SEQ ID NO: 829159 - RNA, 19 nt, Artificial Sequence
  Description of Artificial Sequence: Synthetic oligonucleotide
  Antisense strand to SEQ ID NO: 829158
cuuuagaugauucaaguac

SEQ ID NO: 829160 - RNA, 19 nt, Artificial Sequence
  Description of Artificial Sequence: Synthetic oligonucleotide
  Sense strand starting at position 575 of SEQ ID NO: 587931
ucacgaugcuggucugaaa

SEQ ID NO: 829161 - RNA, 19 nt, Artificial Sequence
  Description of Artificial Sequence: Synthetic oligonucleotide
  Antisense strand to SEQ ID NO: 829160
uuucagaccagcaucguga

SEQ ID NO: 829162 - RNA, 19 nt, Artificial Sequence
  Description of Artificial Sequence: Synthetic oligonucleotide
  Sense strand starting at position 612 of SEQ ID NO: 587931
ccaaguaaugcucagcaaa

SEQ ID NO: 829163 - RNA, 19 nt, Artificial Sequence
  Description of Artificial Sequence: Synthetic oligonucleotide
  Antisense strand to SEQ ID NO: 829162
uuugcugagcauuacuugg

SEQ ID NO: 829164 - RNA, 19 nt, Artificial Sequence
  Description of Artificial Sequence: Synthetic oligonucleotide
  Sense strand starting at position 753 of SEQ ID NO: 587931
gguaaauucccaggucuac

SEQ ID NO: 829165 - RNA, 19 nt, Artificial Sequence
  Description of Artificial Sequence: Synthetic oligonucleotide
  Antisense strand to SEQ ID NO: 829164
guagaccugggaauuuacc

SEQ ID NO: 829166 - RNA, 19 nt, Artificial Sequence
  Description of Artificial Sequence: Synthetic oligonucleotide
  Sense strand starting at position 762 of SEQ ID NO: 587931
ccaggucuacccuaauuga

SEQ ID NO: 829167 - RNA, 19 nt, Artificial Sequence
  Description of Artificial Sequence: Synthetic oligonucleotide
  Antisense strand to SEQ ID NO: 829166
ucaauuaggguagaccugg

SEQ ID NO: 829168 - RNA, 19 nt, Artificial Sequence
  Description of Artificial Sequence: Synthetic oligonucleotide
  Sense strand starting at position 765 of SEQ ID NO: 587931
ggucuacccuaauugaaug

SEQ ID NO: 829169 - RNA, 19 nt, Artificial Sequence
  Description of Artificial Sequence: Synthetic oligonucleotide
  Antisense strand to SEQ ID NO: 829168
cauucaauuaggguagacc

SEQ ID NO: 829170 - RNA, 19 nt, Artificial Sequence
  Description of Artificial Sequence: Synthetic oligonucleotide
  Sense strand starting at position 776 of SEQ ID NO: 587931
auugaauggucccucucua

SEQ ID NO: 829171 - RNA, 19 nt, Artificial Sequence
  Description of Artificial Sequence: Synthetic oligonucleotide
  Antisense strand to SEQ ID NO: 829170
uagagagggaccauucaau

SEQ ID NO: 829172 - RNA, 19 nt, Artificial Sequence
  Description of Artificial Sequence: Synthetic oligonucleotide
  Sense strand starting at position 1151 of SEQ ID NO: 587931
gagccaucacgguaggagu

SEQ ID NO: 829173 - RNA, 19 nt, Artificial Sequence
  Description of Artificial Sequence: Synthetic oligonucleotide
  Antisense strand to SEQ ID NO: 829172
acuccuaccgugauggcuc

SEQ ID NO: 829174 - RNA, 19 nt, Artificial Sequence
  Description of Artificial Sequence: Synthetic oligonucleotide
  Sense strand starting at position 1159 of SEQ ID NO: 587931
acgguaggaguucguaaca

SEQ ID NO: 829175 - RNA, 19 nt, Artificial Sequence
  Description of Artificial Sequence: Synthetic oligonucleotide
  Antisense strand to SEQ ID NO: 829174
uguuacgaacuccuaccgu

SEQ ID NO: 829176 - RNA, 19 nt, Artificial Sequence
  Description of Artificial Sequence: Synthetic oligonucleotide
  Sense strand starting at position 1183 of SEQ ID NO: 587931
agcagaacuugccugucau

SEQ ID NO: 829177 - RNA, 19 nt, Artificial Sequence
  Description of Artificial Sequence: Synthetic oligonucleotide
  Antisense strand to SEQ ID NO: 829176
augacaggcaaguucugcu

SEQ ID NO: 829178 - RNA, 19 nt, Artificial Sequence
  Description of Artificial Sequence: Synthetic oligonucleotide
  Sense strand starting at position 1184 of SEQ ID NO: 587931
gcagaacuugccugucaua

SEQ ID NO: 829179 - RNA, 19 nt, Artificial Sequence
  Description of Artificial Sequence: Synthetic oligonucleotide
  Antisense strand to SEQ ID NO: 829178
uaugacaggcaaguucugc

SEQ ID NO: 829180 - RNA, 19 nt, Artificial Sequence
  Description of Artificial Sequence: Synthetic oligonucleotide
  Sense strand starting at position 1245 of SEQ ID NO: 587931
cggcaaguuacgucuuuac

SEQ ID NO: 829181 - RNA, 19 nt, Artificial Sequence
  Description of Artificial Sequence: Synthetic oligonucleotide
  Antisense strand to SEQ ID NO: 829180
guaaagacguaacuugccg

SEQ ID NO: 829182 - RNA, 19 nt, Artificial Sequence
  Description of Artificial Sequence: Synthetic oligonucleotide
  Sense strand starting at position 1875 of SEQ ID NO: 587931
ugcagacggcuccaacauu

SEQ ID NO: 829183 - RNA, 19 nt, Artificial Sequence
  Description of Artificial Sequence: Synthetic oligonucleotide
  Antisense strand to SEQ ID NO: 829182
aauguuggagccgucugca

SEQ ID NO: 829184 - RNA, 19 nt, Artificial Sequence
  Description of Artificial Sequence: Synthetic oligonucleotide
  Sense strand starting at position 2750 of SEQ ID NO: 587931
ugcccugaauccuagauuu

SEQ ID NO: 829185 - RNA, 19 nt, Artificial Sequence
  Description of Artificial Sequence: Synthetic oligonucleotide
  Antisense strand to SEQ ID NO: 829184
aaaucuaggauucagggca

SEQ ID NO: 829186 - RNA, 19 nt, Artificial Sequence
  Description of Artificial Sequence: Synthetic oligonucleotide
  Sense strand starting at position 2758 of SEQ ID NO: 587931
auccuagauuuaugaggca

SEQ ID NO: 829187 - RNA, 19 nt, Artificial Sequence
  Description of Artificial Sequence: Synthetic oligonucleotide
  Antisense strand to SEQ ID NO: 829186
ugccucauaaaucuaggau

SEQ ID NO: 829188 - RNA, 19 nt, Artificial Sequence
  Description of Artificial Sequence: Synthetic oligonucleotide
  Sense strand starting at position 2761 of SEQ ID NO: 587931
cuagauuuaugaggcaaga

SEQ ID NO: 829189 - RNA, 19 nt, Artificial Sequence
  Description of Artificial Sequence: Synthetic oligonucleotide
  Antisense strand to SEQ ID NO: 829188
ucuugccucauaaaucuag

SEQ ID NO: 829190 - RNA, 19 nt, Artificial Sequence
  Description of Artificial Sequence: Synthetic oligonucleotide
  Sense strand starting at position 2854 of SEQ ID NO: 587931
cccaguuaagcucaaugaa

SEQ ID NO: 829191 - RNA, 19 nt, Artificial Sequence
  Description of Artificial Sequence: Synthetic oligonucleotide
  Antisense strand to SEQ ID NO: 829190
uucauugagcuuaacuggg

SEQ ID NO: 829192 - RNA, 19 nt, Artificial Sequence
  Description of Artificial Sequence: Synthetic oligonucleotide
  Sense strand starting at position 2857 of SEQ ID NO: 587931
aguuaagcucaaugaaacu

SEQ ID NO: 829193 - RNA, 19 nt, Artificial Sequence
  Description of Artificial Sequence: Synthetic oligonucleotide
  Antisense strand to SEQ ID NO: 829192
aguuucauugagcuuaacu

SEQ ID NO: 829194 - RNA, 19 nt, Artificial Sequence
  Description of Artificial Sequence: Synthetic oligonucleotide
  Sense strand starting at position 2873 of SEQ ID NO: 587931
acugaacacuucguuuagu

SEQ ID NO: 829195 - RNA, 19 nt, Artificial Sequence
  Description of Artificial Sequence: Synthetic oligonucleotide
  Antisense strand to SEQ ID NO: 829194
acuaaacgaaguguucagu

SEQ ID NO: 829196 - RNA, 19 nt, Artificial Sequence
  Description of Artificial Sequence: Synthetic oligonucleotide
  Sense strand starting at position 2874 of SEQ ID NO: 587931
cugaacacuucguuuagua

SEQ ID NO: 829197 - RNA, 19 nt, Artificial Sequence
  Description of Artificial Sequence: Synthetic oligonucleotide
  Antisense strand to SEQ ID NO: 829196
uacuaaacgaaguguucag

SEQ ID NO: 829198 - RNA, 19 nt, Artificial Sequence
  Description of Artificial Sequence: Synthetic oligonucleotide
  Sense strand starting at position 2876 of SEQ ID NO: 587931
gaacacuucguuuaguaac

SEQ ID NO: 829199 - RNA, 19 nt, Artificial Sequence
  Description of Artificial Sequence: Synthetic oligonucleotide
  Antisense strand to SEQ ID NO: 829198
guuacuaaacgaaguguuc

SEQ ID NO: 829200 - RNA, 19 nt, Artificial Sequence
  Description of Artificial Sequence: Synthetic oligonucleotide
  Sense strand starting at position 2971 of SEQ ID NO: 587931
acguuauuucuaggguuuc

SEQ ID NO: 829201 - RNA, 19 nt, Artificial Sequence
  Description of Artificial Sequence: Synthetic oligonucleotide
  Antisense strand to SEQ ID NO: 829200
gaaacccuagaaauaacgu

SEQ ID NO: 829202 - RNA, 19 nt, Artificial Sequence
  Description of Artificial Sequence: Synthetic oligonucleotide
  Sense strand starting at position 2996 of SEQ ID NO: 587931
gugucacuucucugacuga

SEQ ID NO: 829203 - RNA, 19 nt, Artificial Sequence
  Description of Artificial Sequence: Synthetic oligonucleotide
  Antisense strand to SEQ ID NO: 829202
ucagucagagaagugacac

SEQ ID NO: 829204 - RNA, 19 nt, Artificial Sequence
  Description of Artificial Sequence: Synthetic oligonucleotide
  Sense strand starting at position 2999 of SEQ ID NO: 587931
ucacuucucugacugagaa

SEQ ID NO: 829205 - RNA, 19 nt, Artificial Sequence
  Description of Artificial Sequence: Synthetic oligonucleotide
  Antisense strand to SEQ ID NO: 829204
uucucagucagagaaguga

SEQ ID NO: 829206 - RNA, 19 nt, Artificial Sequence
  Description of Artificial Sequence: Synthetic oligonucleotide
  Sense strand starting at position 3132 of SEQ ID NO: 587931
gcuggauauccgcuugcua

SEQ ID NO: 829207 - RNA, 19 nt, Artificial Sequence
  Description of Artificial Sequence: Synthetic oligonucleotide
  Antisense strand to SEQ ID NO: 829206
uagcaagcggauauccagc

SEQ ID NO: 829208 - RNA, 19 nt, Artificial Sequence
  Description of Artificial Sequence: Synthetic oligonucleotide
  Sense strand starting at position 3207 of SEQ ID NO: 587931
ugugauagauaguucguau

SEQ ID NO: 829209 - RNA, 19 nt, Artificial Sequence
  Description of Artificial Sequence: Synthetic oligonucleotide
  Antisense strand to SEQ ID NO: 829208
auacgaacuaucuaucaca

SEQ ID NO: 829210 - RNA, 19 nt, Artificial Sequence
  Description of Artificial Sequence: Synthetic oligonucleotide
  Sense strand starting at position 3271 of SEQ ID NO: 587931
uguaguaccucuccuggua

SEQ ID NO: 829211 - RNA, 19 nt, Artificial Sequence
  Description of Artificial Sequence: Synthetic oligonucleotide
  Antisense strand to SEQ ID NO: 829210
uaccaggagagguacuaca

SEQ ID NO: 829212 - RNA, 19 nt, Artificial Sequence
  Description of Artificial Sequence: Synthetic oligonucleotide
  Sense strand starting at position 3274 of SEQ ID NO: 587931
aguaccucuccugguacaa

SEQ ID NO: 829213 - RNA, 19 nt, Artificial Sequence
  Description of Artificial Sequence: Synthetic oligonucleotide
  Antisense strand to SEQ ID NO: 829212
uuguaccaggagagguacu

SEQ ID NO: 829214 - RNA, 19 nt, Artificial Sequence
  Description of Artificial Sequence: Synthetic oligonucleotide
  Sense strand starting at position 3361 of SEQ ID NO: 587931
gccaguucccucggauuua

SEQ ID NO: 829215 - RNA, 19 nt, Artificial Sequence
  Description of Artificial Sequence: Synthetic oligonucleotide
  Antisense strand to SEQ ID NO: 829214
uaaauccgagggaacuggc

SEQ ID NO: 829216 - RNA, 19 nt, Artificial Sequence
  Description of Artificial Sequence: Synthetic oligonucleotide
  Sense strand starting at position 3362 of SEQ ID NO: 587931
ccaguucccucggauuuaa

SEQ ID NO: 829217 - RNA, 19 nt, Artificial Sequence
  Description of Artificial Sequence: Synthetic oligonucleotide
  Antisense strand to SEQ ID NO: 829216
uuaaauccgagggaacugg

SEQ ID NO: 829218 - RNA, 19 nt, Artificial Sequence
  Description of Artificial Sequence: Synthetic oligonucleotide
  Sense strand starting at position 3371 of SEQ ID NO: 587931
ucggauuuaacauguugca

SEQ ID NO: 829219 - RNA, 19 nt, Artificial Sequence
  Description of Artificial Sequence: Synthetic oligonucleotide
  Antisense strand to SEQ ID NO: 829218
ugcaacauguuaaauccga

SEQ ID NO: 829220 - RNA, 19 nt, Artificial Sequence
  Description of Artificial Sequence: Synthetic oligonucleotide
  Sense strand starting at position 3481 of SEQ ID NO: 587931
uucugaggaacgugucauu

SEQ ID NO: 829221 - RNA, 19 nt, Artificial Sequence
  Description of Artificial Sequence: Synthetic oligonucleotide
  Antisense strand to SEQ ID NO: 829220
aaugacacguuccucagaa

SEQ ID NO: 829222 - RNA, 19 nt, Artificial Sequence
  Description of Artificial Sequence: Synthetic oligonucleotide
  Sense strand starting at position 3490 of SEQ ID NO: 587931
acgugucauuaagcgauuu

SEQ ID NO: 829223 - RNA, 19 nt, Artificial Sequence
  Description of Artificial Sequence: Synthetic oligonucleotide
  Antisense strand to SEQ ID NO: 829222
aaaucgcuuaaugacacgu

SEQ ID NO: 829224 - RNA, 19 nt, Artificial Sequence
  Description of Artificial Sequence: Synthetic oligonucleotide
  Sense strand starting at position 3550 of SEQ ID NO: 587931
uagguagucuagccaacua

SEQ ID NO: 829225 - RNA, 19 nt, Artificial Sequence
  Description of Artificial Sequence: Synthetic oligonucleotide
  Antisense strand to SEQ ID NO: 829224
uaguuggcuagacuaccua

SEQ ID NO: 829226 - RNA, 19 nt, Artificial Sequence
  Description of Artificial Sequence: Synthetic oligonucleotide
  Sense strand starting at position 3570 of SEQ ID NO: 587931
uugcuuuggcuauauggua

SEQ ID NO: 829227 - RNA, 19 nt, Artificial Sequence
  Description of Artificial Sequence: Synthetic oligonucleotide
  Antisense strand to SEQ ID NO: 829226
uaccauauagccaaagcaa

SEQ ID NO: 829228 - RNA, 19 nt, Artificial Sequence
  Description of Artificial Sequence: Synthetic oligonucleotide
  Sense strand starting at position 370 of SEQ ID NO: 587932
gagccaucacgguaggagu

SEQ ID NO: 829229 - RNA, 19 nt, Artificial Sequence
  Description of Artificial Sequence: Synthetic oligonucleotide
  Antisense strand to SEQ ID NO: 829228
acuccuaccgugauggcuc

SEQ ID NO: 829230 - RNA, 19 nt, Artificial Sequence
  Description of Artificial Sequence: Synthetic oligonucleotide
  Sense strand starting at position 378 of SEQ ID NO: 587932
acgguaggaguucguaaca

SEQ ID NO: 829231 - RNA, 19 nt, Artificial Sequence
  Description of Artificial Sequence: Synthetic oligonucleotide
  Antisense strand to SEQ ID NO: 829230
uguuacgaacuccuaccgu

SEQ ID NO: 829232 - RNA, 19 nt, Artificial Sequence
  Description of Artificial Sequence: Synthetic oligonucleotide
  Sense strand starting at position 402 of SEQ ID NO: 587932
agcagaacuugccugucau

SEQ ID NO: 829233 - RNA, 19 nt, Artificial Sequence
  Description of Artificial Sequence: Synthetic oligonucleotide
  Antisense strand to SEQ ID NO: 829232
augacaggcaaguucugcu

SEQ ID NO: 829234 - RNA, 19 nt, Artificial Sequence
  Description of Artificial Sequence: Synthetic oligonucleotide
  Sense strand starting at position 403 of SEQ ID NO: 587932
gcagaacuugccugucaua

SEQ ID NO: 829235 - RNA, 19 nt, Artificial Sequence
  Description of Artificial Sequence: Synthetic oligonucleotide
  Antisense strand to SEQ ID NO: 829234
uaugacaggcaaguucugc

SEQ ID NO: 829236 - RNA, 19 nt, Artificial Sequence
  Description of Artificial Sequence: Synthetic oligonucleotide
  Sense strand starting at position 464 of SEQ ID NO: 587932
cggcaaguuacgucuuuac

SEQ ID NO: 829237 - RNA, 19 nt, Artificial Sequence
  Description of Artificial Sequence: Synthetic oligonucleotide
  Antisense strand to SEQ ID NO: 829236
guaaagacguaacuugccg

SEQ ID NO: 829238 - RNA, 19 nt, Artificial Sequence
  Description of Artificial Sequence: Synthetic oligonucleotide
  Sense strand starting at position 1094 of SEQ ID NO: 587932
ugcagacggcuccaacauu

SEQ ID NO: 829239 - RNA, 19 nt, Artificial Sequence
  Description of Artificial Sequence: Synthetic oligonucleotide
  Antisense strand to SEQ ID NO: 829238
aauguuggagccgucugca

SEQ ID NO: 829240 - RNA, 19 nt, Artificial Sequence
  Description of Artificial Sequence: Synthetic oligonucleotide
  Sense strand starting at position 1969 of SEQ ID NO: 587932
ugcccugaauccuagauuu

SEQ ID NO: 829241 - RNA, 19 nt, Artificial Sequence
  Description of Artificial Sequence: Synthetic oligonucleotide
  Antisense strand to SEQ ID NO: 829240
aaaucuaggauucagggca

SEQ ID NO: 829242 - RNA, 19 nt, Artificial Sequence
  Description of Artificial Sequence: Synthetic oligonucleotide
  Sense strand starting at position 1977 of SEQ ID NO: 587932
auccuagauuuaugaggca

SEQ ID NO: 829243 - RNA, 19 nt, Artificial Sequence
  Description of Artificial Sequence: Synthetic oligonucleotide
  Antisense strand to SEQ ID NO: 829242
ugccucauaaaucuaggau

SEQ ID NO: 829244 - RNA, 19 nt, Artificial Sequence
  Description of Artificial Sequence: Synthetic oligonucleotide
  Sense strand starting at position 1980 of SEQ ID NO: 587932
cuagauuuaugaggcaaga

SEQ ID NO: 829245 - RNA, 19 nt, Artificial Sequence
  Description of Artificial Sequence: Synthetic oligonucleotide
  Antisense strand to SEQ ID NO: 829244
ucuugccucauaaaucuag

SEQ ID NO: 829246 - RNA, 19 nt, Artificial Sequence
  Description of Artificial Sequence: Synthetic oligonucleotide
  Sense strand starting at position 2073 of SEQ ID NO: 587932
cccaguuaagcucaaugaa

SEQ ID NO: 829247 - RNA, 19 nt, Artificial Sequence
  Description of Artificial Sequence: Synthetic oligonucleotide
  Antisense strand to SEQ ID NO: 829246
uucauugagcuuaacuggg

SEQ ID NO: 829248 - RNA, 19 nt, Artificial Sequence
  Description of Artificial Sequence: Synthetic oligonucleotide
  Sense strand starting at position 2076 of SEQ ID NO: 587932
aguuaagcucaaugaaacu

SEQ ID NO: 829249 - RNA, 19 nt, Artificial Sequence
  Description of Artificial Sequence: Synthetic oligonucleotide
  Antisense strand to SEQ ID NO: 829248
aguuucauugagcuuaacu

SEQ ID NO: 829250 - RNA, 19 nt, Artificial Sequence
  Description of Artificial Sequence: Synthetic oligonucleotide
  Sense strand starting at position 2092 of SEQ ID NO: 587932
acugaacacuucguuuagu

SEQ ID NO: 829251 - RNA, 19 nt, Artificial Sequence
  Description of Artificial Sequence: Synthetic oligonucleotide
  Antisense strand to SEQ ID NO: 829250
acuaaacgaaguguucagu

SEQ ID NO: 829252 - RNA, 19 nt, Artificial Sequence
  Description of Artificial Sequence: Synthetic oligonucleotide
  Sense strand starting at position 2093 of SEQ ID NO: 587932
cugaacacuucguuuagua

SEQ ID NO: 829253 - RNA, 19 nt, Artificial Sequence
  Description of Artificial Sequence: Synthetic oligonucleotide
  Antisense strand to SEQ ID NO: 829252
uacuaaacgaaguguucag

SEQ ID NO: 829254 - RNA, 19 nt, Artificial Sequence
  Description of Artificial Sequence: Synthetic oligonucleotide
  Sense strand starting at position 2095 of SEQ ID NO: 587932
gaacacuucguuuaguaac

SEQ ID NO: 829255 - RNA, 19 nt, Artificial Sequence
  Description of Artificial Sequence: Synthetic oligonucleotide
  Antisense strand to SEQ ID NO: 829254
guuacuaaacgaaguguuc

SEQ ID NO: 829256 - RNA, 19 nt, Artificial Sequence
  Description of Artificial Sequence: Synthetic oligonucleotide
  Sense strand starting at position 2190 of SEQ ID NO: 587932
acguuauuucuaggguuuc

SEQ ID NO: 829257 - RNA, 19 nt, Artificial Sequence
  Description of Artificial Sequence: Synthetic oligonucleotide
  Antisense strand to SEQ ID NO: 829256
gaaacccuagaaauaacgu

SEQ ID NO: 829258 - RNA, 19 nt, Artificial Sequence
  Description of Artificial Sequence: Synthetic oligonucleotide
  Sense strand starting at position 2215 of SEQ ID NO: 587932
gugucacuucucugacuga

SEQ ID NO: 829259 - RNA, 19 nt, Artificial Sequence
  Description of Artificial Sequence: Synthetic oligonucleotide
  Antisense strand to SEQ ID NO: 829258
ucagucagagaagugacac

SEQ ID NO: 829260 - RNA, 19 nt, Artificial Sequence
  Description of Artificial Sequence: Synthetic oligonucleotide
  Sense strand starting at position 2218 of SEQ ID NO: 587932
ucacuucucugacugagaa

SEQ ID NO: 829261 - RNA, 19 nt, Artificial Sequence
  Description of Artificial Sequence: Synthetic oligonucleotide
  Antisense strand to SEQ ID NO: 829260
uucucagucagagaaguga

SEQ ID NO: 829262 - RNA, 19 nt, Artificial Sequence
  Description of Artificial Sequence: Synthetic oligonucleotide
  Sense strand starting at position 2351 of SEQ ID NO: 587932
gcuggauauccgcuugcua

SEQ ID NO: 829263 - RNA, 19 nt, Artificial Sequence
  Description of Artificial Sequence: Synthetic oligonucleotide
  Antisense strand to SEQ ID NO: 829262
uagcaagcggauauccagc

SEQ ID NO: 829264 - RNA, 19 nt, Artificial Sequence
  Description of Artificial Sequence: Synthetic oligonucleotide
  Sense strand starting at position 2426 of SEQ ID NO: 587932
ugugauagauaguucguau

SEQ ID NO: 829265 - RNA, 19 nt, Artificial Sequence
  Description of Artificial Sequence: Synthetic oligonucleotide
  Antisense strand to SEQ ID NO: 829264
auacgaacuaucuaucaca

SEQ ID NO: 829266 - RNA, 19 nt, Artificial Sequence
  Description of Artificial Sequence: Synthetic oligonucleotide
  Sense strand starting at position 2490 of SEQ ID NO: 587932
uguaguaccucuccuggua

SEQ ID NO: 829267 - RNA, 19 nt, Artificial Sequence
  Description of Artificial Sequence: Synthetic oligonucleotide
  Antisense strand to SEQ ID NO: 829266
uaccaggagagguacuaca

SEQ ID NO: 829268 - RNA, 19 nt, Artificial Sequence
  Description of Artificial Sequence: Synthetic oligonucleotide
  Sense strand starting at position 2493 of SEQ ID NO: 587932
aguaccucuccugguacaa

SEQ ID NO: 829269 - RNA, 19 nt, Artificial Sequence
  Description of Artificial Sequence: Synthetic oligonucleotide
  Antisense strand to SEQ ID NO: 829268
uuguaccaggagagguacu

SEQ ID NO: 829270 - RNA, 19 nt, Artificial Sequence
  Description of Artificial Sequence: Synthetic oligonucleotide
  Sense strand starting at position 2580 of SEQ ID NO: 587932
gccaguucccucggauuua

SEQ ID NO: 829271 - RNA, 19 nt, Artificial Sequence
  Description of Artificial Sequence: Synthetic oligonucleotide
  Antisense strand to SEQ ID NO: 829270
uaaauccgagggaacuggc

SEQ ID NO: 829272 - RNA, 19 nt, Artificial Sequence
  Description of Artificial Sequence: Synthetic oligonucleotide
  Sense strand starting at position 2581 of SEQ ID NO: 587932
ccaguucccucggauuuaa

SEQ ID NO: 829273 - RNA, 19 nt, Artificial Sequence
  Description of Artificial Sequence: Synthetic oligonucleotide
  Antisense strand to SEQ ID NO: 829272
uuaaauccgagggaacugg

SEQ ID NO: 829274 - RNA, 19 nt, Artificial Sequence
  Description of Artificial Sequence: Synthetic oligonucleotide
  Sense strand starting at position 2590 of SEQ ID NO: 587932
ucggauuuaacauguugca

SEQ ID NO: 829275 - RNA, 19 nt, Artificial Sequence
  Description of Artificial Sequence: Synthetic oligonucleotide
  Antisense strand to SEQ ID NO: 829274
ugcaacauguuaaauccga

SEQ ID NO: 829276 - RNA, 19 nt, Artificial Sequence
  Description of Artificial Sequence: Synthetic oligonucleotide
  Sense strand starting at position 2700 of SEQ ID NO: 587932
uucugaggaacgugucauu

SEQ ID NO: 829277 - RNA, 19 nt, Artificial Sequence
  Description of Artificial Sequence: Synthetic oligonucleotide
  Antisense strand to SEQ ID NO: 829276
aaugacacguuccucagaa

SEQ ID NO: 829278 - RNA, 19 nt, Artificial Sequence
  Description of Artificial Sequence: Synthetic oligonucleotide
  Sense strand starting at position 2709 of SEQ ID NO: 587932
acgugucauuaagcgauuu

SEQ ID NO: 829279 - RNA, 19 nt, Artificial Sequence
  Description of Artificial Sequence: Synthetic oligonucleotide
  Antisense strand to SEQ ID NO: 829278
aaaucgcuuaaugacacgu

SEQ ID NO: 829280 - RNA, 19 nt, Artificial Sequence
  Description of Artificial Sequence: Synthetic oligonucleotide
  Sense strand starting at position 2769 of SEQ ID NO: 587932
uagguagucuagccaacua

SEQ ID NO: 829281 - RNA, 19 nt, Artificial Sequence
  Description of Artificial Sequence: Synthetic oligonucleotide
  Antisense strand to SEQ ID NO: 829280
uaguuggcuagacuaccua

SEQ ID NO: 829282 - RNA, 19 nt, Artificial Sequence
  Description of Artificial Sequence: Synthetic oligonucleotide
  Sense strand starting at position 2789 of SEQ ID NO: 587932
uugcuuuggcuauauggua

SEQ ID NO: 829283 - RNA, 19 nt, Artificial Sequence
  Description of Artificial Sequence: Synthetic oligonucleotide
  Antisense strand to SEQ ID NO: 829282
uaccauauagccaaagcaa

SEQ ID NO: 829284 - RNA, 19 nt, Artificial Sequence
  Description of Artificial Sequence: Synthetic oligonucleotide
  Sense strand starting at position 3296 of SEQ ID NO: 587932
guccaucauugacugaaag

SEQ ID NO: 829285 - RNA, 19 nt, Artificial Sequence
  Description of Artificial Sequence: Synthetic oligonucleotide
  Antisense strand to SEQ ID NO: 829284
cuuucagucaaugauggac

SEQ ID NO: 829286 - RNA, 19 nt, Artificial Sequence
  Description of Artificial Sequence: Synthetic oligonucleotide
  Sense strand starting at position 3392 of SEQ ID NO: 587932
accucugugucuuuccaua

SEQ ID NO: 829287 - RNA, 19 nt, Artificial Sequence
  Description of Artificial Sequence: Synthetic oligonucleotide
  Antisense strand to SEQ ID NO: 829286
uauggaaagacacagaggu

SEQ ID NO: 829288 - RNA, 19 nt, Artificial Sequence
  Description of Artificial Sequence: Synthetic oligonucleotide
  Sense strand starting at position 3397 of SEQ ID NO: 587932
ugugucuuuccauaggcua

SEQ ID NO: 829289 - RNA, 19 nt, Artificial Sequence
  Description of Artificial Sequence: Synthetic oligonucleotide
  Antisense strand to SEQ ID NO: 829288
uagccuauggaaagacaca

SEQ ID NO: 829290 - RNA, 19 nt, Artificial Sequence
  Description of Artificial Sequence: Synthetic oligonucleotide
  Sense strand starting at position 3444 of SEQ ID NO: 587932
ucgccuggugaacaaauaa

SEQ ID NO: 829291 - RNA, 19 nt, Artificial Sequence
  Description of Artificial Sequence: Synthetic oligonucleotide
  Antisense strand to SEQ ID NO: 829290
uuauuuguucaccaggcga

SEQ ID NO: 829292 - RNA, 19 nt, Artificial Sequence
  Description of Artificial Sequence: Synthetic oligonucleotide
  Sense strand starting at position 3804 of SEQ ID NO: 587932
agaggcauucucuaacacu

SEQ ID NO: 829293 - RNA, 19 nt, Artificial Sequence
  Description of Artificial Sequence: Synthetic oligonucleotide
  Antisense strand to SEQ ID NO: 829292
aguguuagagaaugccucu

SEQ ID NO: 829294 - RNA, 19 nt, Artificial Sequence
  Description of Artificial Sequence: Synthetic oligonucleotide
  Sense strand starting at position 3832 of SEQ ID NO: 587932
aggcgagugcucuucucuu

SEQ ID NO: 829295 - RNA, 19 nt, Artificial Sequence
  Description of Artificial Sequence: Synthetic oligonucleotide
  Antisense strand to SEQ ID NO: 829294
aagagaagagcacucgccu

SEQ ID NO: 829296 - RNA, 19 nt, Artificial Sequence
  Description of Artificial Sequence: Synthetic oligonucleotide
  Sense strand starting at position 3834 of SEQ ID NO: 587932
gcgagugcucuucucuugu

SEQ ID NO: 829297 - RNA, 19 nt, Artificial Sequence
  Description of Artificial Sequence: Synthetic oligonucleotide
  Antisense strand to SEQ ID NO: 829296
acaagagaagagcacucgc

SEQ ID NO: 829298 - RNA, 19 nt, Artificial Sequence
  Description of Artificial Sequence: Synthetic oligonucleotide
  Sense strand starting at position 3851 of SEQ ID NO: 587932
guaccucucuucucugaua

SEQ ID NO: 829299 - RNA, 19 nt, Artificial Sequence
  Description of Artificial Sequence: Synthetic oligonucleotide
  Antisense strand to SEQ ID NO: 829298
uaucagagaagagagguac

SEQ ID NO: 829300 - RNA, 19 nt, Artificial Sequence
  Description of Artificial Sequence: Synthetic oligonucleotide
  Sense strand starting at position 3863 of SEQ ID NO: 587932
ucugauauuguagguaugu

SEQ ID NO: 829301 - RNA, 19 nt, Artificial Sequence
  Description of Artificial Sequence: Synthetic oligonucleotide
  Antisense strand to SEQ ID NO: 829300
acauaccuacaauaucaga

SEQ ID NO: 829302 - RNA, 19 nt, Artificial Sequence
  Description of Artificial Sequence: Synthetic oligonucleotide
  Sense strand starting at position 3864 of SEQ ID NO: 587932
cugauauuguagguauguu

SEQ ID NO: 829303 - RNA, 19 nt, Artificial Sequence
  Description of Artificial Sequence: Synthetic oligonucleotide
  Antisense strand to SEQ ID NO: 829302
aacauaccuacaauaucag

SEQ ID NO: 829304 - RNA, 19 nt, Artificial Sequence
  Description of Artificial Sequence: Synthetic oligonucleotide
  Sense strand starting at position 3865 of SEQ ID NO: 587932
ugauauuguagguauguua

SEQ ID NO: 829305 - RNA, 19 nt, Artificial Sequence
  Description of Artificial Sequence: Synthetic oligonucleotide
  Antisense strand to SEQ ID NO: 829304
uaacauaccuacaauauca

SEQ ID NO: 829306 - RNA, 19 nt, Artificial Sequence
  Description of Artificial Sequence: Synthetic oligonucleotide
  Sense strand starting at position 3868 of SEQ ID NO: 587932
uauuguagguauguuagaa

SEQ ID NO: 829307 - RNA, 19 nt, Artificial Sequence
  Description of Artificial Sequence: Synthetic oligonucleotide
  Antisense strand to SEQ ID NO: 829306
uucuaacauaccuacaaua

SEQ ID NO: 829308 - RNA, 19 nt, Artificial Sequence
  Description of Artificial Sequence: Synthetic oligonucleotide
  Sense strand starting at position 15 of SEQ ID NO: 587933
aaaugcacucccgaguaaa

SEQ ID NO: 829309 - RNA, 19 nt, Artificial Sequence
  Description of Artificial Sequence: Synthetic oligonucleotide
  Antisense strand to SEQ ID NO: 829308
uuuacucgggagugcauuu

SEQ ID NO: 829310 - RNA, 19 nt, Artificial Sequence
  Description of Artificial Sequence: Synthetic oligonucleotide
  Sense strand starting at position 111 of SEQ ID NO: 587933
uuaacuuaccgucauauug

SEQ ID NO: 829311 - RNA, 19 nt, Artificial Sequence
  Description of Artificial Sequence: Synthetic oligonucleotide
  Antisense strand to SEQ ID NO: 829310
caauaugacgguaaguuaa

SEQ ID NO: 829312 - RNA, 19 nt, Artificial Sequence
  Description of Artificial Sequence: Synthetic oligonucleotide
  Sense strand starting at position 134 of SEQ ID NO: 587933
aaagaaaucugauccguuc

SEQ ID NO: 829313 - RNA, 19 nt, Artificial Sequence
  Description of Artificial Sequence: Synthetic oligonucleotide
  Antisense strand to SEQ ID NO: 829312
gaacggaucagauuucuuu

SEQ ID NO: 829314 - RNA, 19 nt, Artificial Sequence
  Description of Artificial Sequence: Synthetic oligonucleotide
  Sense strand starting at position 418 of SEQ ID NO: 587933
aggaaugaucugcagccuu

SEQ ID NO: 829315 - RNA, 19 nt, Artificial Sequence
  Description of Artificial Sequence: Synthetic oligonucleotide
  Antisense strand to SEQ ID NO: 829314
aaggcugcagaucauuccu

SEQ ID NO: 829316 - RNA, 19 nt, Artificial Sequence
  Description of Artificial Sequence: Synthetic oligonucleotide
  Sense strand starting at position 443 of SEQ ID NO: 587933
auaggauucuccucugaga

SEQ ID NO: 829317 - RNA, 19 nt, Artificial Sequence
  Description of Artificial Sequence: Synthetic oligonucleotide
  Antisense strand to SEQ ID NO: 829316
ucucagaggagaauccuau

SEQ ID NO: 829318 - RNA, 19 nt, Artificial Sequence
  Description of Artificial Sequence: Synthetic oligonucleotide
  Sense strand starting at position 445 of SEQ ID NO: 587933
aggauucuccucugagauc

SEQ ID NO: 829319 - RNA, 19 nt, Artificial Sequence
  Description of Artificial Sequence: Synthetic oligonucleotide
  Antisense strand to SEQ ID NO: 829318
gaucucagaggagaauccu

SEQ ID NO: 829320 - RNA, 19 nt, Artificial Sequence
  Description of Artificial Sequence: Synthetic oligonucleotide
  Sense strand starting at position 549 of SEQ ID NO: 587933
uuuccacggguuuaaauua

SEQ ID NO: 829321 - RNA, 19 nt, Artificial Sequence
  Description of Artificial Sequence: Synthetic oligonucleotide
  Antisense strand to SEQ ID NO: 829320
uaauuuaaacccguggaaa

SEQ ID NO: 829322 - RNA, 19 nt, Artificial Sequence
  Description of Artificial Sequence: Synthetic oligonucleotide
  Sense strand starting at position 626 of SEQ ID NO: 587933
cgaauugugaaucacugca

SEQ ID NO: 829323 - RNA, 19 nt, Artificial Sequence
  Description of Artificial Sequence: Synthetic oligonucleotide
  Antisense strand to SEQ ID NO: 829322
ugcagugauucacaauucg

SEQ ID NO: 829324 - RNA, 19 nt, Artificial Sequence
  Description of Artificial Sequence: Synthetic oligonucleotide
  Sense strand starting at position 1075 of SEQ ID NO: 587933
cugaauccgcccuggauuu

SEQ ID NO: 829325 - RNA, 19 nt, Artificial Sequence
  Description of Artificial Sequence: Synthetic oligonucleotide
  Antisense strand to SEQ ID NO: 829324
aaauccagggcggauucag

SEQ ID NO: 829326 - RNA, 19 nt, Artificial Sequence
  Description of Artificial Sequence: Synthetic oligonucleotide
  Sense strand starting at position 1081 of SEQ ID NO: 587933
ccgcccuggauuugucaga

SEQ ID NO: 829327 - RNA, 19 nt, Artificial Sequence
  Description of Artificial Sequence: Synthetic oligonucleotide
  Antisense strand to SEQ ID NO: 829326
ucugacaaauccagggcgg

SEQ ID NO: 829328 - RNA, 19 nt, Artificial Sequence
  Description of Artificial Sequence: Synthetic oligonucleotide
  Sense strand starting at position 1086 of SEQ ID NO: 587933
cuggauuugucagacuuga

SEQ ID NO: 829329 - RNA, 19 nt, Artificial Sequence
  Description of Artificial Sequence: Synthetic oligonucleotide
  Antisense strand to SEQ ID NO: 829328
ucaagucugacaaauccag

SEQ ID NO: 829330 - RNA, 19 nt, Artificial Sequence
  Description of Artificial Sequence: Synthetic oligonucleotide
  Sense strand starting at position 1097 of SEQ ID NO: 587933
agacuugagggcuaugguu

SEQ ID NO: 829331 - RNA, 19 nt, Artificial Sequence
  Description of Artificial Sequence: Synthetic oligonucleotide
  Antisense strand to SEQ ID NO: 829330
aaccauagcccucaagucu

SEQ ID NO: 829332 - RNA, 19 nt, Artificial Sequence
  Description of Artificial Sequence: Synthetic oligonucleotide
  Sense strand starting at position 1149 of SEQ ID NO: 587933
guauucucuuagguagaga

SEQ ID NO: 829333 - RNA, 19 nt, Artificial Sequence
  Description of Artificial Sequence: Synthetic oligonucleotide
  Antisense strand to SEQ ID NO: 829332
ucucuaccuaagagaauac

SEQ ID NO: 829334 - RNA, 19 nt, Artificial Sequence
  Description of Artificial Sequence: Synthetic oligonucleotide
  Sense strand starting at position 1152 of SEQ ID NO: 587933
uucucuuagguagagaagu

SEQ ID NO: 829335 - RNA, 19 nt, Artificial Sequence
  Description of Artificial Sequence: Synthetic oligonucleotide
  Antisense strand to SEQ ID NO: 829334
acuucucuaccuaagagaa

SEQ ID NO: 829336 - RNA, 19 nt, Artificial Sequence
  Description of Artificial Sequence: Synthetic oligonucleotide
  Sense strand starting at position 1360 of SEQ ID NO: 587933
aggcuuaugcaaugaaaua

SEQ ID NO: 829337 - RNA, 19 nt, Artificial Sequence
  Description of Artificial Sequence: Synthetic oligonucleotide
  Antisense strand to SEQ ID NO: 829336
uauuucauugcauaagccu

SEQ ID NO: 829338 - RNA, 19 nt, Artificial Sequence
  Description of Artificial Sequence: Synthetic oligonucleotide
  Sense strand starting at position 1707 of SEQ ID NO: 587933
uuuggagcauucucugaga

SEQ ID NO: 829339 - RNA, 19 nt, Artificial Sequence
  Description of Artificial Sequence: Synthetic oligonucleotide
  Antisense strand to SEQ ID NO: 829338
ucucagagaaugcuccaaa

SEQ ID NO: 829340 - RNA, 19 nt, Artificial Sequence
  Description of Artificial Sequence: Synthetic oligonucleotide
  Sense strand starting at position 1709 of SEQ ID NO: 587933
uggagcauucucugagaag

SEQ ID NO: 829341 - RNA, 19 nt, Artificial Sequence
  Description of Artificial Sequence: Synthetic oligonucleotide
  Antisense strand to SEQ ID NO: 829340
cuucucagagaaugcucca

SEQ ID NO: 829342 - RNA, 19 nt, Artificial Sequence
  Description of Artificial Sequence: Synthetic oligonucleotide
  Sense strand starting at position 2239 of SEQ ID NO: 587933
aagagauaacucuguauug

SEQ ID NO: 829343 - RNA, 19 nt, Artificial Sequence
  Description of Artificial Sequence: Synthetic oligonucleotide
  Antisense strand to SEQ ID NO: 829342
caauacagaguuaucucuu

SEQ ID NO: 829344 - RNA, 19 nt, Artificial Sequence
  Description of Artificial Sequence: Synthetic oligonucleotide
  Sense strand starting at position 2240 of SEQ ID NO: 587933
agagauaacucuguauuga

SEQ ID NO: 829345 - RNA, 19 nt, Artificial Sequence
  Description of Artificial Sequence: Synthetic oligonucleotide
  Antisense strand to SEQ ID NO: 829344
ucaauacagaguuaucucu

SEQ ID NO: 829346 - RNA, 19 nt, Artificial Sequence
  Description of Artificial Sequence: Synthetic oligonucleotide
  Sense strand starting at position 2248 of SEQ ID NO: 587933
cucuguauugauugaacua

SEQ ID NO: 829347 - RNA, 19 nt, Artificial Sequence
  Description of Artificial Sequence: Synthetic oligonucleotide
  Antisense strand to SEQ ID NO: 829346
uaguucaaucaauacagag

SEQ ID NO: 829348 - RNA, 19 nt, Artificial Sequence
  Description of Artificial Sequence: Synthetic oligonucleotide
  Sense strand starting at position 2388 of SEQ ID NO: 587933
augagaacuuaaccugcuu

SEQ ID NO: 829349 - RNA, 19 nt, Artificial Sequence
  Description of Artificial Sequence: Synthetic oligonucleotide
  Antisense strand to SEQ ID NO: 829348
aagcagguuaaguucucau

SEQ ID NO: 829350 - RNA, 19 nt, Artificial Sequence
  Description of Artificial Sequence: Synthetic oligonucleotide
  Sense strand starting at position 2433 of SEQ ID NO: 587933
gcacauucucgguucuguu

SEQ ID NO: 829351 - RNA, 19 nt, Artificial Sequence
  Description of Artificial Sequence: Synthetic oligonucleotide
  Antisense strand to SEQ ID NO: 829350
aacagaaccgagaaugugc

SEQ ID NO: 829352 - RNA, 19 nt, Artificial Sequence
  Description of Artificial Sequence: Synthetic oligonucleotide
  Sense strand starting at position 2575 of SEQ ID NO: 587933
gggaauuuaugugagugga

SEQ ID NO: 829353 - RNA, 19 nt, Artificial Sequence
  Description of Artificial Sequence: Synthetic oligonucleotide
  Antisense strand to SEQ ID NO: 829352
uccacucacauaaauuccc

SEQ ID NO: 829354 - RNA, 19 nt, Artificial Sequence
  Description of Artificial Sequence: Synthetic oligonucleotide
  Sense strand starting at position 2719 of SEQ ID NO: 587933
aaaguuggacucugacauu

SEQ ID NO: 829355 - RNA, 19 nt, Artificial Sequence
  Description of Artificial Sequence: Synthetic oligonucleotide
  Antisense strand to SEQ ID NO: 829354
aaugucagaguccaacuuu

SEQ ID NO: 829356 - RNA, 19 nt, Artificial Sequence
  Description of Artificial Sequence: Synthetic oligonucleotide
  Sense strand starting at position 3063 of SEQ ID NO: 587933
ccagaauguguaggagaga

SEQ ID NO: 829357 - RNA, 19 nt, Artificial Sequence
  Description of Artificial Sequence: Synthetic oligonucleotide
  Antisense strand to SEQ ID NO: 829356
ucucuccuacacauucugg

SEQ ID NO: 829358 - RNA, 19 nt, Artificial Sequence
  Description of Artificial Sequence: Synthetic oligonucleotide
  Sense strand starting at position 3126 of SEQ ID NO: 587933
acaaaucaugccugguaua

SEQ ID NO: 829359 - RNA, 19 nt, Artificial Sequence
  Description of Artificial Sequence: Synthetic oligonucleotide
  Antisense strand to SEQ ID NO: 829358
uauaccaggcaugauuugu

SEQ ID NO: 829360 - RNA, 19 nt, Artificial Sequence
  Description of Artificial Sequence: Synthetic oligonucleotide
  Sense strand starting at position 3127 of SEQ ID NO: 587933
caaaucaugccugguauag

SEQ ID NO: 829361 - RNA, 19 nt, Artificial Sequence
  Description of Artificial Sequence: Synthetic oligonucleotide
  Antisense strand to SEQ ID NO: 829360
cuauaccaggcaugauuug

SEQ ID NO: 829362 - RNA, 19 nt, Artificial Sequence
  Description of Artificial Sequence: Synthetic oligonucleotide
  Sense strand starting at position 3156 of SEQ ID NO: 587933
uuucuuauaagugaguugu

SEQ ID NO: 829363 - RNA, 19 nt, Artificial Sequence
  Description of Artificial Sequence: Synthetic oligonucleotide
  Antisense strand to SEQ ID NO: 829362
acaacucacuuauaagaaa

SEQ ID NO: 829364 - RNA, 19 nt, Artificial Sequence
  Description of Artificial Sequence: Synthetic oligonucleotide
  Sense strand starting at position 3199 of SEQ ID NO: 587933
acaugugaaggagguuaau

SEQ ID NO: 829365 - RNA, 19 nt, Artificial Sequence
  Description of Artificial Sequence: Synthetic oligonucleotide
  Antisense strand to SEQ ID NO: 829364
auuaaccuccuucacaugu

SEQ ID NO: 829366 - RNA, 19 nt, Artificial Sequence
  Description of Artificial Sequence: Synthetic oligonucleotide
  Sense strand starting at position 3208 of SEQ ID NO: 587933
ggagguuaaugagccagaa

SEQ ID NO: 829367 - RNA, 19 nt, Artificial Sequence
  Description of Artificial Sequence: Synthetic oligonucleotide
  Antisense strand to SEQ ID NO: 829366
uucuggcucauuaaccucc

SEQ ID NO: 829368 - RNA, 19 nt, Artificial Sequence
  Description of Artificial Sequence: Synthetic oligonucleotide
  Sense strand starting at position 3245 of SEQ ID NO: 587933
gaagguggugaagguauua

SEQ ID NO: 829369 - RNA, 19 nt, Artificial Sequence
  Description of Artificial Sequence: Synthetic oligonucleotide
  Antisense strand to SEQ ID NO: 829368
uaauaccuucaccaccuuc

SEQ ID NO: 829370 - RNA, 19 nt, Artificial Sequence
  Description of Artificial Sequence: Synthetic oligonucleotide
  Sense strand starting at position 3301 of SEQ ID NO: 587933
agaaauggccacuggugau

SEQ ID NO: 829371 - RNA, 19 nt, Artificial Sequence
  Description of Artificial Sequence: Synthetic oligonucleotide
  Antisense strand to SEQ ID NO: 829370
aucaccaguggccauuucu

SEQ ID NO: 829372 - RNA, 19 nt, Artificial Sequence
  Description of Artificial Sequence: Synthetic oligonucleotide
  Sense strand starting at position 3507 of SEQ ID NO: 587933
ggacgguucugggugauga

SEQ ID NO: 829373 - RNA, 19 nt, Artificial Sequence
  Description of Artificial Sequence: Synthetic oligonucleotide
  Antisense strand to SEQ ID NO: 829372
ucaucacccagaaccgucc

SEQ ID NO: 829374 - RNA, 19 nt, Artificial Sequence
  Description of Artificial Sequence: Synthetic oligonucleotide
  Sense strand starting at position 3508 of SEQ ID NO: 587933
gacgguucugggugaugau

SEQ ID NO: 829375 - RNA, 19 nt, Artificial Sequence
  Description of Artificial Sequence: Synthetic oligonucleotide
  Antisense strand to SEQ ID NO: 829374
aucaucacccagaaccguc

SEQ ID NO: 829376 - RNA, 19 nt, Artificial Sequence
  Description of Artificial Sequence: Synthetic oligonucleotide
  Sense strand starting at position 3509 of SEQ ID NO: 587933
acgguucugggugaugaua

SEQ ID NO: 829377 - RNA, 19 nt, Artificial Sequence
  Description of Artificial Sequence: Synthetic oligonucleotide
  Antisense strand to SEQ ID NO: 829376
uaucaucacccagaaccgu

SEQ ID NO: 829378 - RNA, 19 nt, Artificial Sequence
  Description of Artificial Sequence: Synthetic oligonucleotide
  Sense strand starting at position 3550 of SEQ ID NO: 587933
uuguuugguaaguaugaaa

SEQ ID NO: 829379 - RNA, 19 nt, Artificial Sequence
  Description of Artificial Sequence: Synthetic oligonucleotide
  Antisense strand to SEQ ID NO: 829378
uuucauacuuaccaaacaa

SEQ ID NO: 829380 - RNA, 19 nt, Artificial Sequence
  Description of Artificial Sequence: Synthetic oligonucleotide
  Sense strand starting at position 3561 of SEQ ID NO: 587933
guaugaaaguuugcuagaa

SEQ ID NO: 829381 - RNA, 19 nt, Artificial Sequence
  Description of Artificial Sequence: Synthetic oligonucleotide
  Antisense strand to SEQ ID NO: 829380
uucuagcaaacuuucauac

SEQ ID NO: 829382 - RNA, 19 nt, Artificial Sequence
  Description of Artificial Sequence: Synthetic oligonucleotide
  Sense strand starting at position 3562 of SEQ ID NO: 587933
uaugaaaguuugcuagaaa

SEQ ID NO: 829383 - RNA, 19 nt, Artificial Sequence
  Description of Artificial Sequence: Synthetic oligonucleotide
  Antisense strand to SEQ ID NO: 829382
uuucuagcaaacuuucaua

SEQ ID NO: 829384 - RNA, 19 nt, Artificial Sequence
  Description of Artificial Sequence: Synthetic oligonucleotide
  Sense strand starting at position 3740 of SEQ ID NO: 587933
gaggauaaaugagaagaca

SEQ ID NO: 829385 - RNA, 19 nt, Artificial Sequence
  Description of Artificial Sequence: Synthetic oligonucleotide
  Antisense strand to SEQ ID NO: 829384
ugucuucucauuuauccuc

SEQ ID NO: 829386 - RNA, 19 nt, Artificial Sequence
  Description of Artificial Sequence: Synthetic oligonucleotide
  Sense strand starting at position 3780 of SEQ ID NO: 587933
uauucuuguccugaaggua

SEQ ID NO: 829387 - RNA, 19 nt, Artificial Sequence
  Description of Artificial Sequence: Synthetic oligonucleotide
  Antisense strand to SEQ ID NO: 829386
uaccuucaggacaagaaua

SEQ ID NO: 829388 - RNA, 19 nt, Artificial Sequence
  Description of Artificial Sequence: Synthetic oligonucleotide
  Sense strand starting at position 340 of SEQ ID NO: 587934
gcuuauuggcccugagaau

SEQ ID NO: 829389 - RNA, 19 nt, Artificial Sequence
  Description of Artificial Sequence: Synthetic oligonucleotide
  Antisense strand to SEQ ID NO: 829388
auucucagggccaauaagc

SEQ ID NO: 829390 - RNA, 19 nt, Artificial Sequence
  Description of Artificial Sequence: Synthetic oligonucleotide
  Sense strand starting at position 341 of SEQ ID NO: 587934
cuuauuggcccugagaaua

SEQ ID NO: 829391 - RNA, 19 nt, Artificial Sequence
  Description of Artificial Sequence: Synthetic oligonucleotide
  Antisense strand to SEQ ID NO: 829390
uauucucagggccaauaag

SEQ ID NO: 829392 - RNA, 19 nt, Artificial Sequence
  Description of Artificial Sequence: Synthetic oligonucleotide
  Sense strand starting at position 1027 of SEQ ID NO: 587934
gagucaacuccagggaagu

SEQ ID NO: 829393 - RNA, 19 nt, Artificial Sequence
  Description of Artificial Sequence: Synthetic oligonucleotide
  Antisense strand to SEQ ID NO: 829392
acuucccuggaguugacuc

SEQ ID NO: 829394 - RNA, 19 nt, Artificial Sequence
  Description of Artificial Sequence: Synthetic oligonucleotide
  Sense strand starting at position 1037 of SEQ ID NO: 587934
cagggaagucugugucuga

SEQ ID NO: 829395 - RNA, 19 nt, Artificial Sequence
  Description of Artificial Sequence: Synthetic oligonucleotide
  Antisense strand to SEQ ID NO: 829394
ucagacacagacuucccug

SEQ ID NO: 829396 - RNA, 19 nt, Artificial Sequence
  Description of Artificial Sequence: Synthetic oligonucleotide
  Sense strand starting at position 1245 of SEQ ID NO: 587934
uagccauuucccugagagc

SEQ ID NO: 829397 - RNA, 19 nt, Artificial Sequence
  Description of Artificial Sequence: Synthetic oligonucleotide
  Antisense strand to SEQ ID NO: 829396
gcucucagggaaauggcua

SEQ ID NO: 829398 - RNA, 19 nt, Artificial Sequence
  Description of Artificial Sequence: Synthetic oligonucleotide
  Sense strand starting at position 1590 of SEQ ID NO: 587934
ugggucugagccuggagaa

SEQ ID NO: 829399 - RNA, 19 nt, Artificial Sequence
  Description of Artificial Sequence: Synthetic oligonucleotide
  Antisense strand to SEQ ID NO: 829398
uucuccaggcucagaccca

SEQ ID NO: 829400 - RNA, 19 nt, Artificial Sequence
  Description of Artificial Sequence: Synthetic oligonucleotide
  Sense strand starting at position 1591 of SEQ ID NO: 587934
gggucugagccuggagaaa

SEQ ID NO: 829401 - RNA, 19 nt, Artificial Sequence
  Description of Artificial Sequence: Synthetic oligonucleotide
  Antisense strand to SEQ ID NO: 829400
uuucuccaggcucagaccc

SEQ ID NO: 829402 - RNA, 19 nt, Artificial Sequence
  Description of Artificial Sequence: Synthetic oligonucleotide
  Sense strand starting at position 1818 of SEQ ID NO: 587934
accguagucgugcccagaa

SEQ ID NO: 829403 - RNA, 19 nt, Artificial Sequence
  Description of Artificial Sequence: Synthetic oligonucleotide
  Antisense strand to SEQ ID NO: 829402
uucugggcacgacuacggu

SEQ ID NO: 829404 - RNA, 19 nt, Artificial Sequence
  Description of Artificial Sequence: Synthetic oligonucleotide
  Sense strand starting at position 1918 of SEQ ID NO: 587934
guuaggagguuugcggaaa

SEQ ID NO: 829405 - RNA, 19 nt, Artificial Sequence
  Description of Artificial Sequence: Synthetic oligonucleotide
  Antisense strand to SEQ ID NO: 829404
uuuccgcaaaccuccuaac

SEQ ID NO: 829406 - RNA, 19 nt, Artificial Sequence
  Description of Artificial Sequence: Synthetic oligonucleotide
  Sense strand starting at position 2011 of SEQ ID NO: 587934
cauacuuaagggcgggaaa

SEQ ID NO: 829407 - RNA, 19 nt, Artificial Sequence
  Description of Artificial Sequence: Synthetic oligonucleotide
  Antisense strand to SEQ ID NO: 829406
uuucccgcccuuaaguaug

SEQ ID NO: 829408 - RNA, 19 nt, Artificial Sequence
  Description of Artificial Sequence: Synthetic oligonucleotide
  Sense strand starting at position 2146 of SEQ ID NO: 587934
agagaaagcucccuccaaa

SEQ ID NO: 829409 - RNA, 19 nt, Artificial Sequence
  Description of Artificial Sequence: Synthetic oligonucleotide
  Antisense strand to SEQ ID NO: 829408
uuuggagggagcuuucucu

SEQ ID NO: 829410 - RNA, 19 nt, Artificial Sequence
  Description of Artificial Sequence: Synthetic oligonucleotide
  Sense strand starting at position 2349 of SEQ ID NO: 587934
ugucaaaucuacuuugaag

SEQ ID NO: 829411 - RNA, 19 nt, Artificial Sequence
  Description of Artificial Sequence: Synthetic oligonucleotide
  Antisense strand to SEQ ID NO: 829410
cuucaaaguagauuugaca

SEQ ID NO: 829412 - RNA, 19 nt, Artificial Sequence
  Description of Artificial Sequence: Synthetic oligonucleotide
  Sense strand starting at position 2369 of SEQ ID NO: 587934
aguuaaguacugcaggaua

SEQ ID NO: 829413 - RNA, 19 nt, Artificial Sequence
  Description of Artificial Sequence: Synthetic oligonucleotide
  Antisense strand to SEQ ID NO: 829412
uauccugcaguacuuaacu

SEQ ID NO: 829414 - RNA, 19 nt, Artificial Sequence
  Description of Artificial Sequence: Synthetic oligonucleotide
  Sense strand starting at position 2371 of SEQ ID NO: 587934
uuaaguacugcaggauauu

SEQ ID NO: 829415 - RNA, 19 nt, Artificial Sequence
  Description of Artificial Sequence: Synthetic oligonucleotide
  Antisense strand to SEQ ID NO: 829414
aauauccugcaguacuuaa

SEQ ID NO: 829416 - RNA, 19 nt, Artificial Sequence
  Description of Artificial Sequence: Synthetic oligonucleotide
  Sense strand starting at position 2372 of SEQ ID NO: 587934
uaaguacugcaggauauua

SEQ ID NO: 829417 - RNA, 19 nt, Artificial Sequence
  Description of Artificial Sequence: Synthetic oligonucleotide
  Antisense strand to SEQ ID NO: 829416
uaauauccugcaguacuua

SEQ ID NO: 829418 - RNA, 19 nt, Artificial Sequence
  Description of Artificial Sequence: Synthetic oligonucleotide
  Sense strand starting at position 2505 of SEQ ID NO: 587934
ucuccaccucggcauaaau

SEQ ID NO: 829419 - RNA, 19 nt, Artificial Sequence
  Description of Artificial Sequence: Synthetic oligonucleotide
  Antisense strand to SEQ ID NO: 829418
auuuaugccgagguggaga

SEQ ID NO: 829420 - RNA, 19 nt, Artificial Sequence
  Description of Artificial Sequence: Synthetic oligonucleotide
  Sense strand starting at position 2507 of SEQ ID NO: 587934
uccaccucggcauaaauaa

SEQ ID NO: 829421 - RNA, 19 nt, Artificial Sequence
  Description of Artificial Sequence: Synthetic oligonucleotide
  Antisense strand to SEQ ID NO: 829420
uuauuuaugccgaggugga

SEQ ID NO: 829422 - RNA, 19 nt, Artificial Sequence
  Description of Artificial Sequence: Synthetic oligonucleotide
  Sense strand starting at position 2688 of SEQ ID NO: 587934
accaucuuucgacggaaca

SEQ ID NO: 829423 - RNA, 19 nt, Artificial Sequence
  Description of Artificial Sequence: Synthetic oligonucleotide
  Antisense strand to SEQ ID NO: 829422
uguuccgucgaaagauggu

SEQ ID NO: 829424 - RNA, 19 nt, Artificial Sequence
  Description of Artificial Sequence: Synthetic oligonucleotide
  Sense strand starting at position 2719 of SEQ ID NO: 587934
acagccucuugguugaaga

SEQ ID NO: 829425 - RNA, 19 nt, Artificial Sequence
  Description of Artificial Sequence: Synthetic oligonucleotide
  Antisense strand to SEQ ID NO: 829424
ucuucaaccaagaggcugu

SEQ ID NO: 829426 - RNA, 19 nt, Artificial Sequence
  Description of Artificial Sequence: Synthetic oligonucleotide
  Sense strand starting at position 2720 of SEQ ID NO: 587934
cagccucuugguugaagau

SEQ ID NO: 829427 - RNA, 19 nt, Artificial Sequence
  Description of Artificial Sequence: Synthetic oligonucleotide
  Antisense strand to SEQ ID NO: 829426
aucuucaaccaagaggcug

SEQ ID NO: 829428 - RNA, 19 nt, Artificial Sequence
  Description of Artificial Sequence: Synthetic oligonucleotide
  Sense strand starting at position 2735 of SEQ ID NO: 587934
agaucuacguccucaaagu

SEQ ID NO: 829429 - RNA, 19 nt, Artificial Sequence
  Description of Artificial Sequence: Synthetic oligonucleotide
  Antisense strand to SEQ ID NO: 829428
acuuugaggacguagaucu

SEQ ID NO: 829430 - RNA, 19 nt, Artificial Sequence
  Description of Artificial Sequence: Synthetic oligonucleotide
  Sense strand starting at position 2819 of SEQ ID NO: 587934
cuuaguguugaucacgcaa

SEQ ID NO: 829431 - RNA, 19 nt, Artificial Sequence
  Description of Artificial Sequence: Synthetic oligonucleotide
  Antisense strand to SEQ ID NO: 829430
uugcgugaucaacacuaag

SEQ ID NO: 829432 - RNA, 19 nt, Artificial Sequence
  Description of Artificial Sequence: Synthetic oligonucleotide
  Sense strand starting at position 2904 of SEQ ID NO: 587934
cuauuccagagagguugaa

SEQ ID NO: 829433 - RNA, 19 nt, Artificial Sequence
  Description of Artificial Sequence: Synthetic oligonucleotide
  Antisense strand to SEQ ID NO: 829432
uucaaccucucuggaauag

SEQ ID NO: 829434 - RNA, 19 nt, Artificial Sequence
  Description of Artificial Sequence: Synthetic oligonucleotide
  Sense strand starting at position 2999 of SEQ ID NO: 587934
cuauuaacuuuccuggaga

SEQ ID NO: 829435 - RNA, 19 nt, Artificial Sequence
  Description of Artificial Sequence: Synthetic oligonucleotide
  Antisense strand to SEQ ID NO: 829434
ucuccaggaaaguuaauag

SEQ ID NO: 829436 - RNA, 19 nt, Artificial Sequence
  Description of Artificial Sequence: Synthetic oligonucleotide
  Sense strand starting at position 3001 of SEQ ID NO: 587934
auuaacuuuccuggagacu

SEQ ID NO: 829437 - RNA, 19 nt, Artificial Sequence
  Description of Artificial Sequence: Synthetic oligonucleotide
  Antisense strand to SEQ ID NO: 829436
agucuccaggaaaguuaau

SEQ ID NO: 829438 - RNA, 19 nt, Artificial Sequence
  Description of Artificial Sequence: Synthetic oligonucleotide
  Sense strand starting at position 3121 of SEQ ID NO: 587934
ccagauggauucuuuauuc

SEQ ID NO: 829439 - RNA, 19 nt, Artificial Sequence
  Description of Artificial Sequence: Synthetic oligonucleotide
  Antisense strand to SEQ ID NO: 829438
gaauaaagaauccaucugg

SEQ ID NO: 829440 - RNA, 19 nt, Artificial Sequence
  Description of Artificial Sequence: Synthetic oligonucleotide
  Sense strand starting at position 3180 of SEQ ID NO: 587934
ugguuuacugcguaugaaa

SEQ ID NO: 829441 - RNA, 19 nt, Artificial Sequence
  Description of Artificial Sequence: Synthetic oligonucleotide
  Antisense strand to SEQ ID NO: 829440
uuucauacgcaguaaacca

SEQ ID NO: 829442 - RNA, 19 nt, Artificial Sequence
  Description of Artificial Sequence: Synthetic oligonucleotide
  Sense strand starting at position 3187 of SEQ ID NO: 587934
cugcguaugaaaugaacau

SEQ ID NO: 829443 - RNA, 19 nt, Artificial Sequence
  Description of Artificial Sequence: Synthetic oligonucleotide
  Antisense strand to SEQ ID NO: 829442
auguucauuucauacgcag

SEQ ID NO: 829444 - RNA, 19 nt, Artificial Sequence
  Description of Artificial Sequence: Synthetic oligonucleotide
  Sense strand starting at position 3188 of SEQ ID NO: 587934
ugcguaugaaaugaacauu

SEQ ID NO: 829445 - RNA, 19 nt, Artificial Sequence
  Description of Artificial Sequence: Synthetic oligonucleotide
  Antisense strand to SEQ ID NO: 829444
aauguucauuucauacgca

SEQ ID NO: 829446 - RNA, 19 nt, Artificial Sequence
  Description of Artificial Sequence: Synthetic oligonucleotide
  Sense strand starting at position 3209 of SEQ ID NO: 587934
ccgauuaaagcuuaaauau

SEQ ID NO: 829447 - RNA, 19 nt, Artificial Sequence
  Description of Artificial Sequence: Synthetic oligonucleotide
  Antisense strand to SEQ ID NO: 829446
auauuuaagcuuuaaucgg

SEQ ID NO: 829448 - RNA, 19 nt, Artificial Sequence
  Description of Artificial Sequence: Synthetic oligonucleotide
  Sense strand starting at position 3339 of SEQ ID NO: 587934
cuacacauguagucauaau

SEQ ID NO: 829449 - RNA, 19 nt, Artificial Sequence
  Description of Artificial Sequence: Synthetic oligonucleotide
  Antisense strand to SEQ ID NO: 829448
auuaugacuacauguguag

SEQ ID NO: 829450 - RNA, 19 nt, Artificial Sequence
  Description of Artificial Sequence: Synthetic oligonucleotide
  Sense strand starting at position 3439 of SEQ ID NO: 587934
uuuacuuuacggugaaggu

SEQ ID NO: 829451 - RNA, 19 nt, Artificial Sequence
  Description of Artificial Sequence: Synthetic oligonucleotide
  Antisense strand to SEQ ID NO: 829450
accuucaccguaaaguaaa

SEQ ID NO: 829452 - RNA, 19 nt, Artificial Sequence
  Description of Artificial Sequence: Synthetic oligonucleotide
  Sense strand starting at position 3440 of SEQ ID NO: 587934
uuacuuuacggugaaggua

SEQ ID NO: 829453 - RNA, 19 nt, Artificial Sequence
  Description of Artificial Sequence: Synthetic oligonucleotide
  Antisense strand to SEQ ID NO: 829452
uaccuucaccguaaaguaa

SEQ ID NO: 829454 - RNA, 19 nt, Artificial Sequence
  Description of Artificial Sequence: Synthetic oligonucleotide
  Sense strand starting at position 3461 of SEQ ID NO: 587934
uguauugaauguguuaaga

SEQ ID NO: 829455 - RNA, 19 nt, Artificial Sequence
  Description of Artificial Sequence: Synthetic oligonucleotide
  Antisense strand to SEQ ID NO: 829454
ucuuaacacauucaauaca

SEQ ID NO: 829456 - RNA, 19 nt, Artificial Sequence
  Description of Artificial Sequence: Synthetic oligonucleotide
  Sense strand starting at position 3471 of SEQ ID NO: 587934
guguuaagaugugcaaauu

SEQ ID NO: 829457 - RNA, 19 nt, Artificial Sequence
  Description of Artificial Sequence: Synthetic oligonucleotide
  Antisense strand to SEQ ID NO: 829456
aauuugcacaucuuaacac

SEQ ID NO: 829458 - RNA, 19 nt, Artificial Sequence
  Description of Artificial Sequence: Synthetic oligonucleotide
  Sense strand starting at position 3472 of SEQ ID NO: 587934
uguuaagaugugcaaauua

SEQ ID NO: 829459 - RNA, 19 nt, Artificial Sequence
  Description of Artificial Sequence: Synthetic oligonucleotide
  Antisense strand to SEQ ID NO: 829458
uaauuugcacaucuuaaca

SEQ ID NO: 829460 - RNA, 19 nt, Artificial Sequence
  Description of Artificial Sequence: Synthetic oligonucleotide
  Sense strand starting at position 3518 of SEQ ID NO: 587934
cuaaaugcccuuugggauu

SEQ ID NO: 829461 - RNA, 19 nt, Artificial Sequence
  Description of Artificial Sequence: Synthetic oligonucleotide
  Antisense strand to SEQ ID NO: 829460
aaucccaaagggcauuuag

SEQ ID NO: 829462 - RNA, 19 nt, Artificial Sequence
  Description of Artificial Sequence: Synthetic oligonucleotide
  Sense strand starting at position 3529 of SEQ ID NO: 587934
uugggauucucuguggagu

SEQ ID NO: 829463 - RNA, 19 nt, Artificial Sequence
  Description of Artificial Sequence: Synthetic oligonucleotide
  Antisense strand to SEQ ID NO: 829462
acuccacagagaaucccaa

SEQ ID NO: 829464 - RNA, 19 nt, Artificial Sequence
  Description of Artificial Sequence: Synthetic oligonucleotide
  Sense strand starting at position 3660 of SEQ ID NO: 587934
uacggcugcgucucuauaa

SEQ ID NO: 829465 - RNA, 19 nt, Artificial Sequence
  Description of Artificial Sequence: Synthetic oligonucleotide
  Antisense strand to SEQ ID NO: 829464
uuauagagacgcagccgua

SEQ ID NO: 829466 - RNA, 19 nt, Artificial Sequence
  Description of Artificial Sequence: Synthetic oligonucleotide
  Sense strand starting at position 3705 of SEQ ID NO: 587934
cuuuaagacucaguugcua

SEQ ID NO: 829467 - RNA, 19 nt, Artificial Sequence
  Description of Artificial Sequence: Synthetic oligonucleotide
  Antisense strand to SEQ ID NO: 829466
uagcaacugagucuuaaag

SEQ ID NO: 829468 - RNA, 19 nt, Artificial Sequence
  Description of Artificial Sequence: Synthetic oligonucleotide
  Sense strand starting at position 309 of SEQ ID NO: 587935
guggcaaacucucucaaca

SEQ ID NO: 829469 - RNA, 19 nt, Artificial Sequence
  Description of Artificial Sequence: Synthetic oligonucleotide
  Antisense strand to SEQ ID NO: 829468
uguugagagaguuugccac

SEQ ID NO: 829470 - RNA, 19 nt, Artificial Sequence
  Description of Artificial Sequence: Synthetic oligonucleotide
  Sense strand starting at position 643 of SEQ ID NO: 587935
gggcaaggauucucuuaca

SEQ ID NO: 829471 - RNA, 19 nt, Artificial Sequence
  Description of Artificial Sequence: Synthetic oligonucleotide
  Antisense strand to SEQ ID NO: 829470
uguaagagaauccuugccc

SEQ ID NO: 829472 - RNA, 19 nt, Artificial Sequence
  Description of Artificial Sequence: Synthetic oligonucleotide
  Sense strand starting at position 836 of SEQ ID NO: 587935
guagaaugcagguaacuua

SEQ ID NO: 829473 - RNA, 19 nt, Artificial Sequence
  Description of Artificial Sequence: Synthetic oligonucleotide
  Antisense strand to SEQ ID NO: 829472
uaaguuaccugcauucuac

SEQ ID NO: 829474 - RNA, 19 nt, Artificial Sequence
  Description of Artificial Sequence: Synthetic oligonucleotide
  Sense strand starting at position 877 of SEQ ID NO: 587935
ucaauugacuugcucaagu

SEQ ID NO: 829475 - RNA, 19 nt, Artificial Sequence
  Description of Artificial Sequence: Synthetic oligonucleotide
  Antisense strand to SEQ ID NO: 829474
acuugagcaagucaauuga

SEQ ID NO: 829476 - RNA, 19 nt, Artificial Sequence
  Description of Artificial Sequence: Synthetic oligonucleotide
  Sense strand starting at position 886 of SEQ ID NO: 587935
uugcucaagugcucugaca

SEQ ID NO: 829477 - RNA, 19 nt, Artificial Sequence
  Description of Artificial Sequence: Synthetic oligonucleotide
  Antisense strand to SEQ ID NO: 829476
ugucagagcacuugagcaa

SEQ ID NO: 829478 - RNA, 19 nt, Artificial Sequence
  Description of Artificial Sequence: Synthetic oligonucleotide
  Sense strand starting at position 980 of SEQ ID NO: 587935
ucacaugucuagucacaca

SEQ ID NO: 829479 - RNA, 19 nt, Artificial Sequence
  Description of Artificial Sequence: Synthetic oligonucleotide
  Antisense strand to SEQ ID NO: 829478
ugugugacuagacauguga

SEQ ID NO: 829480 - RNA, 19 nt, Artificial Sequence
  Description of Artificial Sequence: Synthetic oligonucleotide
  Sense strand starting at position 1063 of SEQ ID NO: 587935
ucuaaagaucucuagcugu

SEQ ID NO: 829481 - RNA, 19 nt, Artificial Sequence
  Description of Artificial Sequence: Synthetic oligonucleotide
  Antisense strand to SEQ ID NO: 829480
acagcuagagaucuuuaga

SEQ ID NO: 829482 - RNA, 19 nt, Artificial Sequence
  Description of Artificial Sequence: Synthetic oligonucleotide
  Sense strand starting at position 1111 of SEQ ID NO: 587935
acagcacuaucugagagau

SEQ ID NO: 829483 - RNA, 19 nt, Artificial Sequence
  Description of Artificial Sequence: Synthetic oligonucleotide
  Antisense strand to SEQ ID NO: 829482
aucucucagauagugcugu

SEQ ID NO: 829484 - RNA, 19 nt, Artificial Sequence
  Description of Artificial Sequence: Synthetic oligonucleotide
  Sense strand starting at position 1113 of SEQ ID NO: 587935
agcacuaucugagagauua

SEQ ID NO: 829485 - RNA, 19 nt, Artificial Sequence
  Description of Artificial Sequence: Synthetic oligonucleotide
  Antisense strand to SEQ ID NO: 829484
uaaucucucagauagugcu

SEQ ID NO: 829486 - RNA, 19 nt, Artificial Sequence
  Description of Artificial Sequence: Synthetic oligonucleotide
  Sense strand starting at position 1121 of SEQ ID NO: 587935
cugagagauuacuauccuu

SEQ ID NO: 829487 - RNA, 19 nt, Artificial Sequence
  Description of Artificial Sequence: Synthetic oligonucleotide
  Antisense strand to SEQ ID NO: 829486
aaggauaguaaucucucag

SEQ ID NO: 829488 - RNA, 19 nt, Artificial Sequence
  Description of Artificial Sequence: Synthetic oligonucleotide
  Sense strand starting at position 1156 of SEQ ID NO: 587935
augaaagacugagguuaaa

SEQ ID NO: 829489 - RNA, 19 nt, Artificial Sequence
  Description of Artificial Sequence: Synthetic oligonucleotide
  Antisense strand to SEQ ID NO: 829488
uuuaaccucagucuuucau

SEQ ID NO: 829490 - RNA, 19 nt, Artificial Sequence
  Description of Artificial Sequence: Synthetic oligonucleotide
  Sense strand starting at position 1232 of SEQ ID NO: 587935
uuaugaacuucugucaaug

SEQ ID NO: 829491 - RNA, 19 nt, Artificial Sequence
  Description of Artificial Sequence: Synthetic oligonucleotide
  Antisense strand to SEQ ID NO: 829490
cauugacagaaguucauaa

SEQ ID NO: 829492 - RNA, 19 nt, Artificial Sequence
  Description of Artificial Sequence: Synthetic oligonucleotide
  Sense strand starting at position 1234 of SEQ ID NO: 587935
augaacuucugucaaugga

SEQ ID NO: 829493 - RNA, 19 nt, Artificial Sequence
  Description of Artificial Sequence: Synthetic oligonucleotide
  Antisense strand to SEQ ID NO: 829492
uccauugacagaaguucau

SEQ ID NO: 829494 - RNA, 19 nt, Artificial Sequence
  Description of Artificial Sequence: Synthetic oligonucleotide
  Sense strand starting at position 1305 of SEQ ID NO: 587935
ccacucuuguaugcauaca

SEQ ID NO: 829495 - RNA, 19 nt, Artificial Sequence
  Description of Artificial Sequence: Synthetic oligonucleotide
  Antisense strand to SEQ ID NO: 829494
uguaugcauacaagagugg

SEQ ID NO: 829496 - RNA, 19 nt, Artificial Sequence
  Description of Artificial Sequence: Synthetic oligonucleotide
  Sense strand starting at position 1328 of SEQ ID NO: 587935
caacacaggugucaaagau

SEQ ID NO: 829497 - RNA, 19 nt, Artificial Sequence
  Description of Artificial Sequence: Synthetic oligonucleotide
  Antisense strand to SEQ ID NO: 829496
aucuuugacaccuguguug

SEQ ID NO: 829498 - RNA, 19 nt, Artificial Sequence
  Description of Artificial Sequence: Synthetic oligonucleotide
  Sense strand starting at position 1508 of SEQ ID NO: 587935
gcagcacauccacaauguu

SEQ ID NO: 829499 - RNA, 19 nt, Artificial Sequence
  Description of Artificial Sequence: Synthetic oligonucleotide
  Antisense strand to SEQ ID NO: 829498
aacauuguggaugugcugc

SEQ ID NO: 829500 - RNA, 19 nt, Artificial Sequence
  Description of Artificial Sequence: Synthetic oligonucleotide
  Sense strand starting at position 1530 of SEQ ID NO: 587935
cagacuguguagcuauuaa

SEQ ID NO: 829501 - RNA, 19 nt, Artificial Sequence
  Description of Artificial Sequence: Synthetic oligonucleotide
  Antisense strand to SEQ ID NO: 829500
uuaauagcuacacagucug

SEQ ID NO: 829502 - RNA, 19 nt, Artificial Sequence
  Description of Artificial Sequence: Synthetic oligonucleotide
  Sense strand starting at position 1831 of SEQ ID NO: 587935
cccgauucguuaccucuua

SEQ ID NO: 829503 - RNA, 19 nt, Artificial Sequence
  Description of Artificial Sequence: Synthetic oligonucleotide
  Antisense strand to SEQ ID NO: 829502
uaagagguaacgaaucggg

SEQ ID NO: 829504 - RNA, 19 nt, Artificial Sequence
  Description of Artificial Sequence: Synthetic oligonucleotide
  Sense strand starting at position 2380 of SEQ ID NO: 587935
ggagaagguuccgcuagag

SEQ ID NO: 829505 - RNA, 19 nt, Artificial Sequence
  Description of Artificial Sequence: Synthetic oligonucleotide
  Antisense strand to SEQ ID NO: 829504
cucuagcggaaccuucucc

SEQ ID NO: 829506 - RNA, 19 nt, Artificial Sequence
  Description of Artificial Sequence: Synthetic oligonucleotide
  Sense strand starting at position 2487 of SEQ ID NO: 587935
uacgguuugcccugaucca

SEQ ID NO: 829507 - RNA, 19 nt, Artificial Sequence
  Description of Artificial Sequence: Synthetic oligonucleotide
  Antisense strand to SEQ ID NO: 829506
uggaucagggcaaaccgua

SEQ ID NO: 829508 - RNA, 19 nt, Artificial Sequence
  Description of Artificial Sequence: Synthetic oligonucleotide
  Sense strand starting at position 2488 of SEQ ID NO: 587935
acgguuugcccugauccaa

SEQ ID NO: 829509 - RNA, 19 nt, Artificial Sequence
  Description of Artificial Sequence: Synthetic oligonucleotide
  Antisense strand to SEQ ID NO: 829508
uuggaucagggcaaaccgu

SEQ ID NO: 829510 - RNA, 19 nt, Artificial Sequence
  Description of Artificial Sequence: Synthetic oligonucleotide
  Sense strand starting at position 2509 of SEQ ID NO: 587935
ugacucauuucuuuggcuu

SEQ ID NO: 829511 - RNA, 19 nt, Artificial Sequence
  Description of Artificial Sequence: Synthetic oligonucleotide
  Antisense strand to SEQ ID NO: 829510
aagccaaagaaaugaguca

SEQ ID NO: 829512 - RNA, 19 nt, Artificial Sequence
  Description of Artificial Sequence: Synthetic oligonucleotide
  Sense strand starting at position 2522 of SEQ ID NO: 587935
uggcuuucccaacgacaca

SEQ ID NO: 829513 - RNA, 19 nt, Artificial Sequence
  Description of Artificial Sequence: Synthetic oligonucleotide
  Antisense strand to SEQ ID NO: 829512
ugugucguugggaaagcca

SEQ ID NO: 829514 - RNA, 19 nt, Artificial Sequence
  Description of Artificial Sequence: Synthetic oligonucleotide
  Sense strand starting at position 2552 of SEQ ID NO: 587935
ugugaauccguuugaagua

SEQ ID NO: 829515 - RNA, 19 nt, Artificial Sequence
  Description of Artificial Sequence: Synthetic oligonucleotide
  Antisense strand to SEQ ID NO: 829514
uacuucaaacggauucaca

SEQ ID NO: 829516 - RNA, 19 nt, Artificial Sequence
  Description of Artificial Sequence: Synthetic oligonucleotide
  Sense strand starting at position 2596 of SEQ ID NO: 587935
cucucuaguucuguuuaua

SEQ ID NO: 829517 - RNA, 19 nt, Artificial Sequence
  Description of Artificial Sequence: Synthetic oligonucleotide
  Antisense strand to SEQ ID NO: 829516
uauaaacagaacuagagag

SEQ ID NO: 829518 - RNA, 19 nt, Artificial Sequence
  Description of Artificial Sequence: Synthetic oligonucleotide
  Sense strand starting at position 2667 of SEQ ID NO: 587935
agggauacuucuggaaauu

SEQ ID NO: 829519 - RNA, 19 nt, Artificial Sequence
  Description of Artificial Sequence: Synthetic oligonucleotide
  Antisense strand to SEQ ID NO: 829518
aauuuccagaaguaucccu

SEQ ID NO: 829520 - RNA, 19 nt, Artificial Sequence
  Description of Artificial Sequence: Synthetic oligonucleotide
  Sense strand starting at position 2678 of SEQ ID NO: 587935
uggaaauucuuguuugauu

SEQ ID NO: 829521 - RNA, 19 nt, Artificial Sequence
  Description of Artificial Sequence: Synthetic oligonucleotide
  Antisense strand to SEQ ID NO: 829520
aaucaaacaagaauuucca

SEQ ID NO: 829522 - RNA, 19 nt, Artificial Sequence
  Description of Artificial Sequence: Synthetic oligonucleotide
  Sense strand starting at position 2707 of SEQ ID NO: 587935
acaagcuccucgcuacauu

SEQ ID NO: 829523 - RNA, 19 nt, Artificial Sequence
  Description of Artificial Sequence: Synthetic oligonucleotide
  Antisense strand to SEQ ID NO: 829522
aauguagcgaggagcuugu

SEQ ID NO: 829524 - RNA, 19 nt, Artificial Sequence
  Description of Artificial Sequence: Synthetic oligonucleotide
  Sense strand starting at position 2754 of SEQ ID NO: 587935
aaauaauucguacagugag

SEQ ID NO: 829525 - RNA, 19 nt, Artificial Sequence
  Description of Artificial Sequence: Synthetic oligonucleotide
  Antisense strand to SEQ ID NO: 829524
cucacuguacgaauuauuu

SEQ ID NO: 829526 - RNA, 19 nt, Artificial Sequence
  Description of Artificial Sequence: Synthetic oligonucleotide
  Sense strand starting at position 2757 of SEQ ID NO: 587935
uaauucguacagugagauc

SEQ ID NO: 829527 - RNA, 19 nt, Artificial Sequence
  Description of Artificial Sequence: Synthetic oligonucleotide
  Antisense strand to SEQ ID NO: 829526
gaucucacuguacgaauua

SEQ ID NO: 829528 - RNA, 19 nt, Artificial Sequence
  Description of Artificial Sequence: Synthetic oligonucleotide
  Sense strand starting at position 2768 of SEQ ID NO: 587935
gugagaucucucgguacac

SEQ ID NO: 829529 - RNA, 19 nt, Artificial Sequence
  Description of Artificial Sequence: Synthetic oligonucleotide
  Antisense strand to SEQ ID NO: 829528
guguaccgagagaucucac

SEQ ID NO: 829530 - RNA, 19 nt, Artificial Sequence
  Description of Artificial Sequence: Synthetic oligonucleotide
  Sense strand starting at position 2770 of SEQ ID NO: 587935
gagaucucucgguacacca

SEQ ID NO: 829531 - RNA, 19 nt, Artificial Sequence
  Description of Artificial Sequence: Synthetic oligonucleotide
  Antisense strand to SEQ ID NO: 829530
ugguguaccgagagaucuc

SEQ ID NO: 829532 - RNA, 19 nt, Artificial Sequence
  Description of Artificial Sequence: Synthetic oligonucleotide
  Sense strand starting at position 2851 of SEQ ID NO: 587935
uuaugcugccaggaagaau

SEQ ID NO: 829533 - RNA, 19 nt, Artificial Sequence
  Description of Artificial Sequence: Synthetic oligonucleotide
  Antisense strand to SEQ ID NO: 829532
auucuuccuggcagcauaa

SEQ ID NO: 829534 - RNA, 19 nt, Artificial Sequence
  Description of Artificial Sequence: Synthetic oligonucleotide
  Sense strand starting at position 2964 of SEQ ID NO: 587935
uccauauuguggguauacu

SEQ ID NO: 829535 - RNA, 19 nt, Artificial Sequence
  Description of Artificial Sequence: Synthetic oligonucleotide
  Antisense strand to SEQ ID NO: 829534
aguauacccacaauaugga

SEQ ID NO: 829536 - RNA, 19 nt, Artificial Sequence
  Description of Artificial Sequence: Synthetic oligonucleotide
  Sense strand starting at position 2965 of SEQ ID NO: 587935
ccauauuguggguauacuu

SEQ ID NO: 829537 - RNA, 19 nt, Artificial Sequence
  Description of Artificial Sequence: Synthetic oligonucleotide
  Antisense strand to SEQ ID NO: 829536
aaguauacccacaauaugg

SEQ ID NO: 829538 - RNA, 19 nt, Artificial Sequence
  Description of Artificial Sequence: Synthetic oligonucleotide
  Sense strand starting at position 3678 of SEQ ID NO: 587935
gaaagaaauugucaagaug

SEQ ID NO: 829539 - RNA, 19 nt, Artificial Sequence
  Description of Artificial Sequence: Synthetic oligonucleotide
  Antisense strand to SEQ ID NO: 829538
caucuugacaauuucuuuc

SEQ ID NO: 829540 - RNA, 19 nt, Artificial Sequence
  Description of Artificial Sequence: Synthetic oligonucleotide
  Sense strand starting at position 3685 of SEQ ID NO: 587935
auugucaagauguagaguu

SEQ ID NO: 829541 - RNA, 19 nt, Artificial Sequence
  Description of Artificial Sequence: Synthetic oligonucleotide
  Antisense strand to SEQ ID NO: 829540
aacucuacaucuugacaau

SEQ ID NO: 829542 - RNA, 19 nt, Artificial Sequence
  Description of Artificial Sequence: Synthetic oligonucleotide
  Sense strand starting at position 3693 of SEQ ID NO: 587935
gauguagaguuacauagaa

SEQ ID NO: 829543 - RNA, 19 nt, Artificial Sequence
  Description of Artificial Sequence: Synthetic oligonucleotide
  Antisense strand to SEQ ID NO: 829542
uucuauguaacucuacauc

SEQ ID NO: 829544 - RNA, 19 nt, Artificial Sequence
  Description of Artificial Sequence: Synthetic oligonucleotide
  Sense strand starting at position 3770 of SEQ ID NO: 587935
ugaagagaauguugaauaa

SEQ ID NO: 829545 - RNA, 19 nt, Artificial Sequence
  Description of Artificial Sequence: Synthetic oligonucleotide
  Antisense strand to SEQ ID NO: 829544
uuauucaacauucucuuca

SEQ ID NO: 829546 - RNA, 19 nt, Artificial Sequence
  Description of Artificial Sequence: Synthetic oligonucleotide
  Sense strand starting at position 3956 of SEQ ID NO: 587935
cucuaauucugagaacaag

SEQ ID NO: 829547 - RNA, 19 nt, Artificial Sequence
  Description of Artificial Sequence: Synthetic oligonucleotide
  Antisense strand to SEQ ID NO: 829546
cuuguucucagaauuagag

SEQ ID NO: 829548 - RNA, 19 nt, Artificial Sequence
  Description of Artificial Sequence: Synthetic oligonucleotide
  Sense strand starting at position 299 of SEQ ID NO: 587936
guggcaaacucucucaaca

SEQ ID NO: 829549 - RNA, 19 nt, Artificial Sequence
  Description of Artificial Sequence: Synthetic oligonucleotide
  Antisense strand to SEQ ID NO: 829548
uguugagagaguuugccac

SEQ ID NO: 829550 - RNA, 19 nt, Artificial Sequence
  Description of Artificial Sequence: Synthetic oligonucleotide
  Sense strand starting at position 633 of SEQ ID NO: 587936
gggcaaggauucucuuaca

SEQ ID NO: 829551 - RNA, 19 nt, Artificial Sequence
  Description of Artificial Sequence: Synthetic oligonucleotide
  Antisense strand to SEQ ID NO: 829550
uguaagagaauccuugccc

SEQ ID NO: 829552 - RNA, 19 nt, Artificial Sequence
  Description of Artificial Sequence: Synthetic oligonucleotide
  Sense strand starting at position 826 of SEQ ID NO: 587936
guagaaugcagguaacuua

SEQ ID NO: 829553 - RNA, 19 nt, Artificial Sequence
  Description of Artificial Sequence: Synthetic oligonucleotide
  Antisense strand to SEQ ID NO: 829552
uaaguuaccugcauucuac

SEQ ID NO: 829554 - RNA, 19 nt, Artificial Sequence
  Description of Artificial Sequence: Synthetic oligonucleotide
  Sense strand starting at position 867 of SEQ ID NO: 587936
ucaauugacuugcucaagu

SEQ ID NO: 829555 - RNA, 19 nt, Artificial Sequence
  Description of Artificial Sequence: Synthetic oligonucleotide
  Antisense strand to SEQ ID NO: 829554
acuugagcaagucaauuga

SEQ ID NO: 829556 - RNA, 19 nt, Artificial Sequence
  Description of Artificial Sequence: Synthetic oligonucleotide
  Sense strand starting at position 876 of SEQ ID NO: 587936
uugcucaagugcucugaca

SEQ ID NO: 829557 - RNA, 19 nt, Artificial Sequence
  Description of Artificial Sequence: Synthetic oligonucleotide
  Antisense strand to SEQ ID NO: 829556
ugucagagcacuugagcaa

SEQ ID NO: 829558 - RNA, 19 nt, Artificial Sequence
  Description of Artificial Sequence: Synthetic oligonucleotide
  Sense strand starting at position 970 of SEQ ID NO: 587936
ucacaugucuagucacaca

SEQ ID NO: 829559 - RNA, 19 nt, Artificial Sequence
  Description of Artificial Sequence: Synthetic oligonucleotide
  Antisense strand to SEQ ID NO: 829558
ugugugacuagacauguga

SEQ ID NO: 829560 - RNA, 19 nt, Artificial Sequence
  Description of Artificial Sequence: Synthetic oligonucleotide
  Sense strand starting at position 1053 of SEQ ID NO: 587936
ucuaaagaucucuagcugu

SEQ ID NO: 829561 - RNA, 19 nt, Artificial Sequence
  Description of Artificial Sequence: Synthetic oligonucleotide
  Antisense strand to SEQ ID NO: 829560
acagcuagagaucuuuaga

SEQ ID NO: 829562 - RNA, 19 nt, Artificial Sequence
  Description of Artificial Sequence: Synthetic oligonucleotide
  Sense strand starting at position 1101 of SEQ ID NO: 587936
acagcacuaucugagagau

SEQ ID NO: 829563 - RNA, 19 nt, Artificial Sequence
  Description of Artificial Sequence: Synthetic oligonucleotide
  Antisense strand to SEQ ID NO: 829562
aucucucagauagugcugu

SEQ ID NO: 829564 - RNA, 19 nt, Artificial Sequence
  Description of Artificial Sequence: Synthetic oligonucleotide
  Sense strand starting at position 1103 of SEQ ID NO: 587936
agcacuaucugagagauua

SEQ ID NO: 829565 - RNA, 19 nt, Artificial Sequence
  Description of Artificial Sequence: Synthetic oligonucleotide
  Antisense strand to SEQ ID NO: 829564
uaaucucucagauagugcu

SEQ ID NO: 829566 - RNA, 19 nt, Artificial Sequence
  Description of Artificial Sequence: Synthetic oligonucleotide
  Sense strand starting at position 1111 of SEQ ID NO: 587936
cugagagauuacuauccuu

SEQ ID NO: 829567 - RNA, 19 nt, Artificial Sequence
  Description of Artificial Sequence: Synthetic oligonucleotide
  Antisense strand to SEQ ID NO: 829566
aaggauaguaaucucucag

SEQ ID NO: 829568 - RNA, 19 nt, Artificial Sequence
  Description of Artificial Sequence: Synthetic oligonucleotide
  Sense strand starting at position 1146 of SEQ ID NO: 587936
augaaagacugagguuaaa

SEQ ID NO: 829569 - RNA, 19 nt, Artificial Sequence
  Description of Artificial Sequence: Synthetic oligonucleotide
  Antisense strand to SEQ ID NO: 829568
uuuaaccucagucuuucau

SEQ ID NO: 829570 - RNA, 19 nt, Artificial Sequence
  Description of Artificial Sequence: Synthetic oligonucleotide
  Sense strand starting at position 1222 of SEQ ID NO: 587936
uuaugaacuucugucaaug

SEQ ID NO: 829571 - RNA, 19 nt, Artificial Sequence
  Description of Artificial Sequence: Synthetic oligonucleotide
  Antisense strand to SEQ ID NO: 829570
cauugacagaaguucauaa

SEQ ID NO: 829572 - RNA, 19 nt, Artificial Sequence
  Description of Artificial Sequence: Synthetic oligonucleotide
  Sense strand starting at position 1224 of SEQ ID NO: 587936
augaacuucugucaaugga

SEQ ID NO: 829573 - RNA, 19 nt, Artificial Sequence
  Description of Artificial Sequence: Synthetic oligonucleotide
  Antisense strand to SEQ ID NO: 829572
uccauugacagaaguucau

SEQ ID NO: 829574 - RNA, 19 nt, Artificial Sequence
  Description of Artificial Sequence: Synthetic oligonucleotide
  Sense strand starting at position 1295 of SEQ ID NO: 587936
ccacucuuguaugcauaca

SEQ ID NO: 829575 - RNA, 19 nt, Artificial Sequence
  Description of Artificial Sequence: Synthetic oligonucleotide
  Antisense strand to SEQ ID NO: 829574
uguaugcauacaagagugg

SEQ ID NO: 829576 - RNA, 19 nt, Artificial Sequence
  Description of Artificial Sequence: Synthetic oligonucleotide
  Sense strand starting at position 1318 of SEQ ID NO: 587936
caacacaggugucaaagau

SEQ ID NO: 829577 - RNA, 19 nt, Artificial Sequence
  Description of Artificial Sequence: Synthetic oligonucleotide
  Antisense strand to SEQ ID NO: 829576
aucuuugacaccuguguug

SEQ ID NO: 829578 - RNA, 19 nt, Artificial Sequence
  Description of Artificial Sequence: Synthetic oligonucleotide
  Sense strand starting at position 1498 of SEQ ID NO: 587936
gcagcacauccacaauguu

SEQ ID NO: 829579 - RNA, 19 nt, Artificial Sequence
  Description of Artificial Sequence: Synthetic oligonucleotide
  Antisense strand to SEQ ID NO: 829578
aacauuguggaugugcugc

SEQ ID NO: 829580 - RNA, 19 nt, Artificial Sequence
  Description of Artificial Sequence: Synthetic oligonucleotide
  Sense strand starting at position 1520 of SEQ ID NO: 587936
cagacuguguagcuauuaa

SEQ ID NO: 829581 - RNA, 19 nt, Artificial Sequence
  Description of Artificial Sequence: Synthetic oligonucleotide
  Antisense strand to SEQ ID NO: 829580
uuaauagcuacacagucug

SEQ ID NO: 829582 - RNA, 19 nt, Artificial Sequence
  Description of Artificial Sequence: Synthetic oligonucleotide
  Sense strand starting at position 1821 of SEQ ID NO: 587936
cccgauucguuaccucuua

SEQ ID NO: 829583 - RNA, 19 nt, Artificial Sequence
  Description of Artificial Sequence: Synthetic oligonucleotide
  Antisense strand to SEQ ID NO: 829582
uaagagguaacgaaucggg

SEQ ID NO: 829584 - RNA, 19 nt, Artificial Sequence
  Description of Artificial Sequence: Synthetic oligonucleotide
  Sense strand starting at position 2370 of SEQ ID NO: 587936
ggagaagguuccgcuagag

SEQ ID NO: 829585 - RNA, 19 nt, Artificial Sequence
  Description of Artificial Sequence: Synthetic oligonucleotide
  Antisense strand to SEQ ID NO: 829584
cucuagcggaaccuucucc

SEQ ID NO: 829586 - RNA, 19 nt, Artificial Sequence
  Description of Artificial Sequence: Synthetic oligonucleotide
  Sense strand starting at position 2477 of SEQ ID NO: 587936
uacgguuugcccugaucca

SEQ ID NO: 829587 - RNA, 19 nt, Artificial Sequence
  Description of Artificial Sequence: Synthetic oligonucleotide
  Antisense strand to SEQ ID NO: 829586
uggaucagggcaaaccgua

SEQ ID NO: 829588 - RNA, 19 nt, Artificial Sequence
  Description of Artificial Sequence: Synthetic oligonucleotide
  Sense strand starting at position 2478 of SEQ ID NO: 587936
acgguuugcccugauccaa

SEQ ID NO: 829589 - RNA, 19 nt, Artificial Sequence
  Description of Artificial Sequence: Synthetic oligonucleotide
  Antisense strand to SEQ ID NO: 829588
uuggaucagggcaaaccgu

SEQ ID NO: 829590 - RNA, 19 nt, Artificial Sequence
  Description of Artificial Sequence: Synthetic oligonucleotide
  Sense strand starting at position 2499 of SEQ ID NO: 587936
ugacucauuucuuuggcuu

SEQ ID NO: 829591 - RNA, 19 nt, Artificial Sequence
  Description of Artificial Sequence: Synthetic oligonucleotide
  Antisense strand to SEQ ID NO: 829590
aagccaaagaaaugaguca

SEQ ID NO: 829592 - RNA, 19 nt, Artificial Sequence
  Description of Artificial Sequence: Synthetic oligonucleotide
  Sense strand starting at position 2512 of SEQ ID NO: 587936
uggcuuucccaacgacaca

SEQ ID NO: 829593 - RNA, 19 nt, Artificial Sequence
  Description of Artificial Sequence: Synthetic oligonucleotide
  Antisense strand to SEQ ID NO: 829592
ugugucguugggaaagcca

SEQ ID NO: 829594 - RNA, 19 nt, Artificial Sequence
  Description of Artificial Sequence: Synthetic oligonucleotide
  Sense strand starting at position 2542 of SEQ ID NO: 587936
ugugaauccguuugaagua

SEQ ID NO: 829595 - RNA, 19 nt, Artificial Sequence
  Description of Artificial Sequence: Synthetic oligonucleotide
  Antisense strand to SEQ ID NO: 829594
uacuucaaacggauucaca

SEQ ID NO: 829596 - RNA, 19 nt, Artificial Sequence
  Description of Artificial Sequence: Synthetic oligonucleotide
  Sense strand starting at position 2586 of SEQ ID NO: 587936
cucucuaguucuguuuaua

SEQ ID NO: 829597 - RNA, 19 nt, Artificial Sequence
  Description of Artificial Sequence: Synthetic oligonucleotide
  Antisense strand to SEQ ID NO: 829596
uauaaacagaacuagagag

SEQ ID NO: 829598 - RNA, 19 nt, Artificial Sequence
  Description of Artificial Sequence: Synthetic oligonucleotide
  Sense strand starting at position 2657 of SEQ ID NO: 587936
agggauacuucuggaaauu

SEQ ID NO: 829599 - RNA, 19 nt, Artificial Sequence
  Description of Artificial Sequence: Synthetic oligonucleotide
  Antisense strand to SEQ ID NO: 829598
aauuuccagaaguaucccu

SEQ ID NO: 829600 - RNA, 19 nt, Artificial Sequence
  Description of Artificial Sequence: Synthetic oligonucleotide
  Sense strand starting at position 2668 of SEQ ID NO: 587936
uggaaauucuuguuugauu

SEQ ID NO: 829601 - RNA, 19 nt, Artificial Sequence
  Description of Artificial Sequence: Synthetic oligonucleotide
  Antisense strand to SEQ ID NO: 829600
aaucaaacaagaauuucca

SEQ ID NO: 829602 - RNA, 19 nt, Artificial Sequence
  Description of Artificial Sequence: Synthetic oligonucleotide
  Sense strand starting at position 2697 of SEQ ID NO: 587936
acaagcuccucgcuacauu

SEQ ID NO: 829603 - RNA, 19 nt, Artificial Sequence
  Description of Artificial Sequence: Synthetic oligonucleotide
  Antisense strand to SEQ ID NO: 829602
aauguagcgaggagcuugu

SEQ ID NO: 829604 - RNA, 19 nt, Artificial Sequence
  Description of Artificial Sequence: Synthetic oligonucleotide
  Sense strand starting at position 2744 of SEQ ID NO: 587936
aaauaauucguacagugag

SEQ ID NO: 829605 - RNA, 19 nt, Artificial Sequence
  Description of Artificial Sequence: Synthetic oligonucleotide
  Antisense strand to SEQ ID NO: 829604
cucacuguacgaauuauuu

SEQ ID NO: 829606 - RNA, 19 nt, Artificial Sequence
  Description of Artificial Sequence: Synthetic oligonucleotide
  Sense strand starting at position 2747 of SEQ ID NO: 587936
uaauucguacagugagauc

SEQ ID NO: 829607 - RNA, 19 nt, Artificial Sequence
  Description of Artificial Sequence: Synthetic oligonucleotide
  Antisense strand to SEQ ID NO: 829606
gaucucacuguacgaauua

SEQ ID NO: 829608 - RNA, 19 nt, Artificial Sequence
  Description of Artificial Sequence: Synthetic oligonucleotide
  Sense strand starting at position 2758 of SEQ ID NO: 587936
gugagaucucucgguacac

SEQ ID NO: 829609 - RNA, 19 nt, Artificial Sequence
  Description of Artificial Sequence: Synthetic oligonucleotide
  Antisense strand to SEQ ID NO: 829608
guguaccgagagaucucac

SEQ ID NO: 829610 - RNA, 19 nt, Artificial Sequence
  Description of Artificial Sequence: Synthetic oligonucleotide
  Sense strand starting at position 2760 of SEQ ID NO: 587936
gagaucucucgguacacca

SEQ ID NO: 829611 - RNA, 19 nt, Artificial Sequence
  Description of Artificial Sequence: Synthetic oligonucleotide
  Antisense strand to SEQ ID NO: 829610
ugguguaccgagagaucuc

SEQ ID NO: 829612 - RNA, 19 nt, Artificial Sequence
  Description of Artificial Sequence: Synthetic oligonucleotide
  Sense strand starting at position 2841 of SEQ ID NO: 587936
uuaugcugccaggaagaau

SEQ ID NO: 829613 - RNA, 19 nt, Artificial Sequence
  Description of Artificial Sequence: Synthetic oligonucleotide
  Antisense strand to SEQ ID NO: 829612
auucuuccuggcagcauaa

SEQ ID NO: 829614 - RNA, 19 nt, Artificial Sequence
  Description of Artificial Sequence: Synthetic oligonucleotide
  Sense strand starting at position 2954 of SEQ ID NO: 587936
uccauauuguggguauacu

SEQ ID NO: 829615 - RNA, 19 nt, Artificial Sequence
  Description of Artificial Sequence: Synthetic oligonucleotide
  Antisense strand to SEQ ID NO: 829614
aguauacccacaauaugga

SEQ ID NO: 829616 - RNA, 19 nt, Artificial Sequence
  Description of Artificial Sequence: Synthetic oligonucleotide
  Sense strand starting at position 2955 of SEQ ID NO: 587936
ccauauuguggguauacuu

SEQ ID NO: 829617 - RNA, 19 nt, Artificial Sequence
  Description of Artificial Sequence: Synthetic oligonucleotide
  Antisense strand to SEQ ID NO: 829616
aaguauacccacaauaugg

SEQ ID NO: 829618 - RNA, 19 nt, Artificial Sequence
  Description of Artificial Sequence: Synthetic oligonucleotide
  Sense strand starting at position 3668 of SEQ ID NO: 587936
gaaagaaauugucaagaug

SEQ ID NO: 829619 - RNA, 19 nt, Artificial Sequence
  Description of Artificial Sequence: Synthetic oligonucleotide
  Antisense strand to SEQ ID NO: 829618
caucuugacaauuucuuuc

SEQ ID NO: 829620 - RNA, 19 nt, Artificial Sequence
  Description of Artificial Sequence: Synthetic oligonucleotide
  Sense strand starting at position 3675 of SEQ ID NO: 587936
auugucaagauguagaguu

SEQ ID NO: 829621 - RNA, 19 nt, Artificial Sequence
  Description of Artificial Sequence: Synthetic oligonucleotide
  Antisense strand to SEQ ID NO: 829620
aacucuacaucuugacaau

SEQ ID NO: 829622 - RNA, 19 nt, Artificial Sequence
  Description of Artificial Sequence: Synthetic oligonucleotide
  Sense strand starting at position 3683 of SEQ ID NO: 587936
gauguagaguuacauagaa

SEQ ID NO: 829623 - RNA, 19 nt, Artificial Sequence
  Description of Artificial Sequence: Synthetic oligonucleotide
  Antisense strand to SEQ ID NO: 829622
uucuauguaacucuacauc

SEQ ID NO: 829624 - RNA, 19 nt, Artificial Sequence
  Description of Artificial Sequence: Synthetic oligonucleotide
  Sense strand starting at position 3760 of SEQ ID NO: 587936
ugaagagaauguugaauaa

SEQ ID NO: 829625 - RNA, 19 nt, Artificial Sequence
  Description of Artificial Sequence: Synthetic oligonucleotide
  Antisense strand to SEQ ID NO: 829624
uuauucaacauucucuuca

SEQ ID NO: 829626 - RNA, 19 nt, Artificial Sequence
  Description of Artificial Sequence: Synthetic oligonucleotide
  Sense strand starting at position 3946 of SEQ ID NO: 587936
cucuaauucugagaacaag

SEQ ID NO: 829627 - RNA, 19 nt, Artificial Sequence
  Description of Artificial Sequence: Synthetic oligonucleotide
  Antisense strand to SEQ ID NO: 829626
cuuguucucagaauuagag

SEQ ID NO: 829628 - RNA, 19 nt, Artificial Sequence
  Description of Artificial Sequence: Synthetic oligonucleotide
  Sense strand starting at position 275 of SEQ ID NO: 587937
ucucucugagcuuaugaaa

SEQ ID NO: 829629 - RNA, 19 nt, Artificial Sequence
  Description of Artificial Sequence: Synthetic oligonucleotide
  Antisense strand to SEQ ID NO: 829628
uuucauaagcucagagaga

SEQ ID NO: 829630 - RNA, 19 nt, Artificial Sequence
  Description of Artificial Sequence: Synthetic oligonucleotide
  Sense strand starting at position 328 of SEQ ID NO: 587937
ggaaauuucgcguggcuua

SEQ ID NO: 829631 - RNA, 19 nt, Artificial Sequence
  Description of Artificial Sequence: Synthetic oligonucleotide
  Antisense strand to SEQ ID NO: 829630
uaagccacgcgaaauuucc

SEQ ID NO: 829632 - RNA, 19 nt, Artificial Sequence
  Description of Artificial Sequence: Synthetic oligonucleotide
  Sense strand starting at position 329 of SEQ ID NO: 587937
gaaauuucgcguggcuuaa

SEQ ID NO: 829633 - RNA, 19 nt, Artificial Sequence
  Description of Artificial Sequence: Synthetic oligonucleotide
  Antisense strand to SEQ ID NO: 829632
uuaagccacgcgaaauuuc

SEQ ID NO: 829634 - RNA, 19 nt, Artificial Sequence
  Description of Artificial Sequence: Synthetic oligonucleotide
  Sense strand starting at position 338 of SEQ ID NO: 587937
cguggcuuaacuuaagacu

SEQ ID NO: 829635 - RNA, 19 nt, Artificial Sequence
  Description of Artificial Sequence: Synthetic oligonucleotide
  Antisense strand to SEQ ID NO: 829634
agucuuaaguuaagccacg

SEQ ID NO: 829636 - RNA, 19 nt, Artificial Sequence
  Description of Artificial Sequence: Synthetic oligonucleotide
  Sense strand starting at position 483 of SEQ ID NO: 587937
gucuaaacacucuauguaa

SEQ ID NO: 829637 - RNA, 19 nt, Artificial Sequence
  Description of Artificial Sequence: Synthetic oligonucleotide
  Antisense strand to SEQ ID NO: 829636
uuacauagaguguuuagac

SEQ ID NO: 829638 - RNA, 19 nt, Artificial Sequence
  Description of Artificial Sequence: Synthetic oligonucleotide
  Sense strand starting at position 494 of SEQ ID NO: 587937
cuauguaauuugcuuccga

SEQ ID NO: 829639 - RNA, 19 nt, Artificial Sequence
  Description of Artificial Sequence: Synthetic oligonucleotide
  Antisense strand to SEQ ID NO: 829638
ucggaagcaaauuacauag

SEQ ID NO: 829640 - RNA, 19 nt, Artificial Sequence
  Description of Artificial Sequence: Synthetic oligonucleotide
  Sense strand starting at position 495 of SEQ ID NO: 587937
uauguaauuugcuuccgaa

SEQ ID NO: 829641 - RNA, 19 nt, Artificial Sequence
  Description of Artificial Sequence: Synthetic oligonucleotide
  Antisense strand to SEQ ID NO: 829640
uucggaagcaaauuacaua

SEQ ID NO: 829642 - RNA, 19 nt, Artificial Sequence
  Description of Artificial Sequence: Synthetic oligonucleotide
  Sense strand starting at position 1049 of SEQ ID NO: 587937
gcgguuucuucgacgagac

SEQ ID NO: 829643 - RNA, 19 nt, Artificial Sequence
  Description of Artificial Sequence: Synthetic oligonucleotide
  Antisense strand to SEQ ID NO: 829642
gucucgucgaagaaaccgc

SEQ ID NO: 829644 - RNA, 19 nt, Artificial Sequence
  Description of Artificial Sequence: Synthetic oligonucleotide
  Sense strand starting at position 1051 of SEQ ID NO: 587937
gguuucuucgacgagacaa

SEQ ID NO: 829645 - RNA, 19 nt, Artificial Sequence
  Description of Artificial Sequence: Synthetic oligonucleotide
  Antisense strand to SEQ ID NO: 829644
uugucucgucgaagaaacc

SEQ ID NO: 829646 - RNA, 19 nt, Artificial Sequence
  Description of Artificial Sequence: Synthetic oligonucleotide
  Sense strand starting at position 1053 of SEQ ID NO: 587937
uuucuucgacgagacaaua

SEQ ID NO: 829647 - RNA, 19 nt, Artificial Sequence
  Description of Artificial Sequence: Synthetic oligonucleotide
  Antisense strand to SEQ ID NO: 829646
uauugucucgucgaagaaa

SEQ ID NO: 829648 - RNA, 19 nt, Artificial Sequence
  Description of Artificial Sequence: Synthetic oligonucleotide
  Sense strand starting at position 1144 of SEQ ID NO: 587937
cgcuuugacuuugcaauuu

SEQ ID NO: 829649 - RNA, 19 nt, Artificial Sequence
  Description of Artificial Sequence: Synthetic oligonucleotide
  Antisense strand to SEQ ID NO: 829648
aaauugcaaagucaaagcg

SEQ ID NO: 829650 - RNA, 19 nt, Artificial Sequence
  Description of Artificial Sequence: Synthetic oligonucleotide
  Sense strand starting at position 1400 of SEQ ID NO: 587937
agaaauucuucgcuuuaga

SEQ ID NO: 829651 - RNA, 19 nt, Artificial Sequence
  Description of Artificial Sequence: Synthetic oligonucleotide
  Antisense strand to SEQ ID NO: 829650
ucuaaagcgaagaauuucu

SEQ ID NO: 829652 - RNA, 19 nt, Artificial Sequence
  Description of Artificial Sequence: Synthetic oligonucleotide
  Sense strand starting at position 1480 of SEQ ID NO: 587937
cuguguuaccauuaacauc

SEQ ID NO: 829653 - RNA, 19 nt, Artificial Sequence
  Description of Artificial Sequence: Synthetic oligonucleotide
  Antisense strand to SEQ ID NO: 829652
gauguuaaugguaacacag

SEQ ID NO: 829654 - RNA, 19 nt, Artificial Sequence
  Description of Artificial Sequence: Synthetic oligonucleotide
  Sense strand starting at position 1515 of SEQ ID NO: 587937
aucucugaaugcuucuaga

SEQ ID NO: 829655 - RNA, 19 nt, Artificial Sequence
  Description of Artificial Sequence: Synthetic oligonucleotide
  Antisense strand to SEQ ID NO: 829654
ucuagaagcauucagagau

SEQ ID NO: 829656 - RNA, 19 nt, Artificial Sequence
  Description of Artificial Sequence: Synthetic oligonucleotide
  Sense strand starting at position 1525 of SEQ ID NO: 587937
gcuucuagagcucaagaga

SEQ ID NO: 829657 - RNA, 19 nt, Artificial Sequence
  Description of Artificial Sequence: Synthetic oligonucleotide
  Antisense strand to SEQ ID NO: 829656
ucucuugagcucuagaagc

SEQ ID NO: 829658 - RNA, 19 nt, Artificial Sequence
  Description of Artificial Sequence: Synthetic oligonucleotide
  Sense strand starting at position 2301 of SEQ ID NO: 587937
ucuugaaggucucucagga

SEQ ID NO: 829659 - RNA, 19 nt, Artificial Sequence
  Description of Artificial Sequence: Synthetic oligonucleotide
  Antisense strand to SEQ ID NO: 829658
uccugagagaccuucaaga

SEQ ID NO: 829660 - RNA, 19 nt, Artificial Sequence
  Description of Artificial Sequence: Synthetic oligonucleotide
  Sense strand starting at position 2370 of SEQ ID NO: 587937
guugcuugggaauagggau

SEQ ID NO: 829661 - RNA, 19 nt, Artificial Sequence
  Description of Artificial Sequence: Synthetic oligonucleotide
  Antisense strand to SEQ ID NO: 829660
aucccuauucccaagcaac

SEQ ID NO: 829662 - RNA, 19 nt, Artificial Sequence
  Description of Artificial Sequence: Synthetic oligonucleotide
  Sense strand starting at position 2495 of SEQ ID NO: 587937
ugguuugggcauuaaggaa

SEQ ID NO: 829663 - RNA, 19 nt, Artificial Sequence
  Description of Artificial Sequence: Synthetic oligonucleotide
  Antisense strand to SEQ ID NO: 829662
uuccuuaaugcccaaacca

SEQ ID NO: 829664 - RNA, 19 nt, Artificial Sequence
  Description of Artificial Sequence: Synthetic oligonucleotide
  Sense strand starting at position 2537 of SEQ ID NO: 587937
ccugaagguguaggauuaa

SEQ ID NO: 829665 - RNA, 19 nt, Artificial Sequence
  Description of Artificial Sequence: Synthetic oligonucleotide
  Antisense strand to SEQ ID NO: 829664
uuaauccuacaccuucagg

SEQ ID NO: 829666 - RNA, 19 nt, Artificial Sequence
  Description of Artificial Sequence: Synthetic oligonucleotide
  Sense strand starting at position 2546 of SEQ ID NO: 587937
guaggauuaagugggucaa

SEQ ID NO: 829667 - RNA, 19 nt, Artificial Sequence
  Description of Artificial Sequence: Synthetic oligonucleotide
  Antisense strand to SEQ ID NO: 829666
uugacccacuuaauccuac

SEQ ID NO: 829668 - RNA, 19 nt, Artificial Sequence
  Description of Artificial Sequence: Synthetic oligonucleotide
  Sense strand starting at position 2547 of SEQ ID NO: 587937
uaggauuaagugggucaaa

SEQ ID NO: 829669 - RNA, 19 nt, Artificial Sequence
  Description of Artificial Sequence: Synthetic oligonucleotide
  Antisense strand to SEQ ID NO: 829668
uuugacccacuuaauccua

SEQ ID NO: 829670 - RNA, 19 nt, Artificial Sequence
  Description of Artificial Sequence: Synthetic oligonucleotide
  Sense strand starting at position 2587 of SEQ ID NO: 587937
cucuaaggagaaugcuuua

SEQ ID NO: 829671 - RNA, 19 nt, Artificial Sequence
  Description of Artificial Sequence: Synthetic oligonucleotide
  Antisense strand to SEQ ID NO: 829670
uaaagcauucuccuuagag

SEQ ID NO: 829672 - RNA, 19 nt, Artificial Sequence
  Description of Artificial Sequence: Synthetic oligonucleotide
  Sense strand starting at position 2633 of SEQ ID NO: 587937
uguggucugggucauuauu

SEQ ID NO: 829673 - RNA, 19 nt, Artificial Sequence
  Description of Artificial Sequence: Synthetic oligonucleotide
  Antisense strand to SEQ ID NO: 829672
aauaaugacccagaccaca

SEQ ID NO: 829674 - RNA, 19 nt, Artificial Sequence
  Description of Artificial Sequence: Synthetic oligonucleotide
  Sense strand starting at position 2663 of SEQ ID NO: 587937
cagagagacuacguuuaug

SEQ ID NO: 829675 - RNA, 19 nt, Artificial Sequence
  Description of Artificial Sequence: Synthetic oligonucleotide
  Antisense strand to SEQ ID NO: 829674
cauaaacguagucucucug

SEQ ID NO: 829676 - RNA, 19 nt, Artificial Sequence
  Description of Artificial Sequence: Synthetic oligonucleotide
  Sense strand starting at position 2728 of SEQ ID NO: 587937
augugaggaucuuugagac

SEQ ID NO: 829677 - RNA, 19 nt, Artificial Sequence
  Description of Artificial Sequence: Synthetic oligonucleotide
  Antisense strand to SEQ ID NO: 829676
gucucaaagauccucacau

SEQ ID NO: 829678 - RNA, 19 nt, Artificial Sequence
  Description of Artificial Sequence: Synthetic oligonucleotide
  Sense strand starting at position 2738 of SEQ ID NO: 587937
cuuugagacuaguugcaaa

SEQ ID NO: 829679 - RNA, 19 nt, Artificial Sequence
  Description of Artificial Sequence: Synthetic oligonucleotide
  Antisense strand to SEQ ID NO: 829678
uuugcaacuagucucaaag

SEQ ID NO: 829680 - RNA, 19 nt, Artificial Sequence
  Description of Artificial Sequence: Synthetic oligonucleotide
  Sense strand starting at position 2859 of SEQ ID NO: 587937
gagcauuuaccaugugcac

SEQ ID NO: 829681 - RNA, 19 nt, Artificial Sequence
  Description of Artificial Sequence: Synthetic oligonucleotide
  Antisense strand to SEQ ID NO: 829680
gugcacaugguaaaugcuc

SEQ ID NO: 829682 - RNA, 19 nt, Artificial Sequence
  Description of Artificial Sequence: Synthetic oligonucleotide
  Sense strand starting at position 2968 of SEQ ID NO: 587937
agucuaauuccaugcagaa

SEQ ID NO: 829683 - RNA, 19 nt, Artificial Sequence
  Description of Artificial Sequence: Synthetic oligonucleotide
  Antisense strand to SEQ ID NO: 829682
uucugcauggaauuagacu

SEQ ID NO: 829684 - RNA, 19 nt, Artificial Sequence
  Description of Artificial Sequence: Synthetic oligonucleotide
  Sense strand starting at position 3250 of SEQ ID NO: 587937
cuccuuggugcugaaauga

SEQ ID NO: 829685 - RNA, 19 nt, Artificial Sequence
  Description of Artificial Sequence: Synthetic oligonucleotide
  Antisense strand to SEQ ID NO: 829684
ucauuucagcaccaaggag

SEQ ID NO: 829686 - RNA, 19 nt, Artificial Sequence
  Description of Artificial Sequence: Synthetic oligonucleotide
  Sense strand starting at position 3450 of SEQ ID NO: 587937
uuugaacaggucugugacu

SEQ ID NO: 829687 - RNA, 19 nt, Artificial Sequence
  Description of Artificial Sequence: Synthetic oligonucleotide
  Antisense strand to SEQ ID NO: 829686
agucacagaccuguucaaa

SEQ ID NO: 829688 - RNA, 19 nt, Artificial Sequence
  Description of Artificial Sequence: Synthetic oligonucleotide
  Sense strand starting at position 3451 of SEQ ID NO: 587937
uugaacaggucugugacua

SEQ ID NO: 829689 - RNA, 19 nt, Artificial Sequence
  Description of Artificial Sequence: Synthetic oligonucleotide
  Antisense strand to SEQ ID NO: 829688
uagucacagaccuguucaa

SEQ ID NO: 829690 - RNA, 19 nt, Artificial Sequence
  Description of Artificial Sequence: Synthetic oligonucleotide
  Sense strand starting at position 3452 of SEQ ID NO: 587937
ugaacaggucugugacuau

SEQ ID NO: 829691 - RNA, 19 nt, Artificial Sequence
  Description of Artificial Sequence: Synthetic oligonucleotide
  Antisense strand to SEQ ID NO: 829690
auagucacagaccuguuca

SEQ ID NO: 829692 - RNA, 19 nt, Artificial Sequence
  Description of Artificial Sequence: Synthetic oligonucleotide
  Sense strand starting at position 3456 of SEQ ID NO: 587937
caggucugugacuaugaca

SEQ ID NO: 829693 - RNA, 19 nt, Artificial Sequence
  Description of Artificial Sequence: Synthetic oligonucleotide
  Antisense strand to SEQ ID NO: 829692
ugucauagucacagaccug

SEQ ID NO: 829694 - RNA, 19 nt, Artificial Sequence
  Description of Artificial Sequence: Synthetic oligonucleotide
  Sense strand starting at position 3575 of SEQ ID NO: 587937
cucucacuggaguaguuau

SEQ ID NO: 829695 - RNA, 19 nt, Artificial Sequence
  Description of Artificial Sequence: Synthetic oligonucleotide
  Antisense strand to SEQ ID NO: 829694
auaacuacuccagugagag

SEQ ID NO: 829696 - RNA, 19 nt, Artificial Sequence
  Description of Artificial Sequence: Synthetic oligonucleotide
  Sense strand starting at position 3586 of SEQ ID NO: 587937
guaguuaucacucaugagg

SEQ ID NO: 829697 - RNA, 19 nt, Artificial Sequence
  Description of Artificial Sequence: Synthetic oligonucleotide
  Antisense strand to SEQ ID NO: 829696
ccucaugagugauaacuac

SEQ ID NO: 829698 - RNA, 19 nt, Artificial Sequence
  Description of Artificial Sequence: Synthetic oligonucleotide
  Sense strand starting at position 3589 of SEQ ID NO: 587937
guuaucacucaugagguga

SEQ ID NO: 829699 - RNA, 19 nt, Artificial Sequence
  Description of Artificial Sequence: Synthetic oligonucleotide
  Antisense strand to SEQ ID NO: 829698
ucaccucaugagugauaac

SEQ ID NO: 829700 - RNA, 19 nt, Artificial Sequence
  Description of Artificial Sequence: Synthetic oligonucleotide
  Sense strand starting at position 3603 of SEQ ID NO: 587937
ggugaaggaucuucagcau

SEQ ID NO: 829701 - RNA, 19 nt, Artificial Sequence
  Description of Artificial Sequence: Synthetic oligonucleotide
  Antisense strand to SEQ ID NO: 829700
augcugaagauccuucacc

SEQ ID NO: 829702 - RNA, 19 nt, Artificial Sequence
  Description of Artificial Sequence: Synthetic oligonucleotide
  Sense strand starting at position 3686 of SEQ ID NO: 587937
gugugucaucucuacacau

SEQ ID NO: 829703 - RNA, 19 nt, Artificial Sequence
  Description of Artificial Sequence: Synthetic oligonucleotide
  Antisense strand to SEQ ID NO: 829702
auguguagagaugacacac

SEQ ID NO: 829704 - RNA, 19 nt, Artificial Sequence
  Description of Artificial Sequence: Synthetic oligonucleotide
  Sense strand starting at position 3688 of SEQ ID NO: 587937
gugucaucucuacacauuc

SEQ ID NO: 829705 - RNA, 19 nt, Artificial Sequence
  Description of Artificial Sequence: Synthetic oligonucleotide
  Antisense strand to SEQ ID NO: 829704
gaauguguagagaugacac

SEQ ID NO: 829706 - RNA, 19 nt, Artificial Sequence
  Description of Artificial Sequence: Synthetic oligonucleotide
  Sense strand starting at position 3833 of SEQ ID NO: 587937
ugcccuaagggucacauau

SEQ ID NO: 829707 - RNA, 19 nt, Artificial Sequence
  Description of Artificial Sequence: Synthetic oligonucleotide
  Antisense strand to SEQ ID NO: 829706
auaugugacccuuagggca

SEQ ID NO: 829708 - RNA, 19 nt, Artificial Sequence
  Description of Artificial Sequence: Synthetic oligonucleotide
  Sense strand starting at position 11 of SEQ ID NO: 587938
agaagucacuuagccuaau

SEQ ID NO: 829709 - RNA, 19 nt, Artificial Sequence
  Description of Artificial Sequence: Synthetic oligonucleotide
  Antisense strand to SEQ ID NO: 829708
auuaggcuaagugacuucu

SEQ ID NO: 829710 - RNA, 19 nt, Artificial Sequence
  Description of Artificial Sequence: Synthetic oligonucleotide
  Sense strand starting at position 14 of SEQ ID NO: 587938
agucacuuagccuaauguu

SEQ ID NO: 829711 - RNA, 19 nt, Artificial Sequence
  Description of Artificial Sequence: Synthetic oligonucleotide
  Antisense strand to SEQ ID NO: 829710
aacauuaggcuaagugacu

SEQ ID NO: 829712 - RNA, 19 nt, Artificial Sequence
  Description of Artificial Sequence: Synthetic oligonucleotide
  Sense strand starting at position 86 of SEQ ID NO: 587938
uccaguauguauuugucau

SEQ ID NO: 829713 - RNA, 19 nt, Artificial Sequence
  Description of Artificial Sequence: Synthetic oligonucleotide
  Antisense strand to SEQ ID NO: 829712
augacaaauacauacugga

SEQ ID NO: 829714 - RNA, 19 nt, Artificial Sequence
  Description of Artificial Sequence: Synthetic oligonucleotide
  Sense strand starting at position 87 of SEQ ID NO: 587938
ccaguauguauuugucaug

SEQ ID NO: 829715 - RNA, 19 nt, Artificial Sequence
  Description of Artificial Sequence: Synthetic oligonucleotide
  Antisense strand to SEQ ID NO: 829714
caugacaaauacauacugg

SEQ ID NO: 829716 - RNA, 19 nt, Artificial Sequence
  Description of Artificial Sequence: Synthetic oligonucleotide
  Sense strand starting at position 140 of SEQ ID NO: 587938
acagacauauauguacauu

SEQ ID NO: 829717 - RNA, 19 nt, Artificial Sequence
  Description of Artificial Sequence: Synthetic oligonucleotide
  Antisense strand to SEQ ID NO: 829716
aauguacauauaugucugu

SEQ ID NO: 829718 - RNA, 19 nt, Artificial Sequence
  Description of Artificial Sequence: Synthetic oligonucleotide
  Sense strand starting at position 231 of SEQ ID NO: 587938
ugagaugugcucuaauuau

SEQ ID NO: 829719 - RNA, 19 nt, Artificial Sequence
  Description of Artificial Sequence: Synthetic oligonucleotide
  Antisense strand to SEQ ID NO: 829718
auaauuagagcacaucuca

SEQ ID NO: 829720 - RNA, 19 nt, Artificial Sequence
  Description of Artificial Sequence: Synthetic oligonucleotide
  Sense strand starting at position 463 of SEQ ID NO: 587938
ggcagcaugcucuauggua

SEQ ID NO: 829721 - RNA, 19 nt, Artificial Sequence
  Description of Artificial Sequence: Synthetic oligonucleotide
  Antisense strand to SEQ ID NO: 829720
uaccauagagcaugcugcc

SEQ ID NO: 829722 - RNA, 19 nt, Artificial Sequence
  Description of Artificial Sequence: Synthetic oligonucleotide
  Sense strand starting at position 660 of SEQ ID NO: 587938
gcagcauugcugggagacu

SEQ ID NO: 829723 - RNA, 19 nt, Artificial Sequence
  Description of Artificial Sequence: Synthetic oligonucleotide
  Antisense strand to SEQ ID NO: 829722
agucucccagcaaugcugc

SEQ ID NO: 829724 - RNA, 19 nt, Artificial Sequence
  Description of Artificial Sequence: Synthetic oligonucleotide
  Sense strand starting at position 671 of SEQ ID NO: 587938
gggagacucuggcuuccuu

SEQ ID NO: 829725 - RNA, 19 nt, Artificial Sequence
  Description of Artificial Sequence: Synthetic oligonucleotide
  Antisense strand to SEQ ID NO: 829724
aaggaagccagagucuccc

SEQ ID NO: 829726 - RNA, 19 nt, Artificial Sequence
  Description of Artificial Sequence: Synthetic oligonucleotide
  Sense strand starting at position 734 of SEQ ID NO: 587938
gcuccagcacuaugauuau

SEQ ID NO: 829727 - RNA, 19 nt, Artificial Sequence
  Description of Artificial Sequence: Synthetic oligonucleotide
  Antisense strand to SEQ ID NO: 829726
auaaucauagugcuggagc

SEQ ID NO: 829728 - RNA, 19 nt, Artificial Sequence
  Description of Artificial Sequence: Synthetic oligonucleotide
  Sense strand starting at position 751 of SEQ ID NO: 587938
auuuccucaucugaaggau

SEQ ID NO: 829729 - RNA, 19 nt, Artificial Sequence
  Description of Artificial Sequence: Synthetic oligonucleotide
  Antisense strand to SEQ ID NO: 829728
auccuucagaugaggaaau

SEQ ID NO: 829730 - RNA, 19 nt, Artificial Sequence
  Description of Artificial Sequence: Synthetic oligonucleotide
  Sense strand starting at position 754 of SEQ ID NO: 587938
uccucaucugaaggaugau

SEQ ID NO: 829731 - RNA, 19 nt, Artificial Sequence
  Description of Artificial Sequence: Synthetic oligonucleotide
  Antisense strand to SEQ ID NO: 829730
aucauccuucagaugagga

SEQ ID NO: 829732 - RNA, 19 nt, Artificial Sequence
  Description of Artificial Sequence: Synthetic oligonucleotide
  Sense strand starting at position 760 of SEQ ID NO: 587938
ucugaaggaugaucucauu

SEQ ID NO: 829733 - RNA, 19 nt, Artificial Sequence
  Description of Artificial Sequence: Synthetic oligonucleotide
  Antisense strand to SEQ ID NO: 829732
aaugagaucauccuucaga

SEQ ID NO: 829734 - RNA, 19 nt, Artificial Sequence
  Description of Artificial Sequence: Synthetic oligonucleotide
  Sense strand starting at position 922 of SEQ ID NO: 587938
uuguauucucuuggucuua

SEQ ID NO: 829735 - RNA, 19 nt, Artificial Sequence
  Description of Artificial Sequence: Synthetic oligonucleotide
  Antisense strand to SEQ ID NO: 829734
uaagaccaagagaauacaa

SEQ ID NO: 829736 - RNA, 19 nt, Artificial Sequence
  Description of Artificial Sequence: Synthetic oligonucleotide
  Sense strand starting at position 923 of SEQ ID NO: 587938
uguauucucuuggucuuaa

SEQ ID NO: 829737 - RNA, 19 nt, Artificial Sequence
  Description of Artificial Sequence: Synthetic oligonucleotide
  Antisense strand to SEQ ID NO: 829736
uuaagaccaagagaauaca

SEQ ID NO: 829738 - RNA, 19 nt, Artificial Sequence
  Description of Artificial Sequence: Synthetic oligonucleotide
  Sense strand starting at position 924 of SEQ ID NO: 587938
guauucucuuggucuuaag

SEQ ID NO: 829739 - RNA, 19 nt, Artificial Sequence
  Description of Artificial Sequence: Synthetic oligonucleotide
  Antisense strand to SEQ ID NO: 829738
cuuaagaccaagagaauac

SEQ ID NO: 829740 - RNA, 19 nt, Artificial Sequence
  Description of Artificial Sequence: Synthetic oligonucleotide
  Sense strand starting at position 1116 of SEQ ID NO: 587938
uugugucuuccugggagaa

SEQ ID NO: 829741 - RNA, 19 nt, Artificial Sequence
  Description of Artificial Sequence: Synthetic oligonucleotide
  Antisense strand to SEQ ID NO: 829740
uucucccaggaagacacaa

SEQ ID NO: 829742 - RNA, 19 nt, Artificial Sequence
  Description of Artificial Sequence: Synthetic oligonucleotide
  Sense strand starting at position 1219 of SEQ ID NO: 587938
gccuaaacuccuggcaagu

SEQ ID NO: 829743 - RNA, 19 nt, Artificial Sequence
  Description of Artificial Sequence: Synthetic oligonucleotide
  Antisense strand to SEQ ID NO: 829742
acuugccaggaguuuaggc

SEQ ID NO: 829744 - RNA, 19 nt, Artificial Sequence
  Description of Artificial Sequence: Synthetic oligonucleotide
  Sense strand starting at position 1629 of SEQ ID NO: 587938
gcagaaauagcucaccaua

SEQ ID NO: 829745 - RNA, 19 nt, Artificial Sequence
  Description of Artificial Sequence: Synthetic oligonucleotide
  Antisense strand to SEQ ID NO: 829744
uauggugagcuauuucugc

SEQ ID NO: 829746 - RNA, 19 nt, Artificial Sequence
  Description of Artificial Sequence: Synthetic oligonucleotide
  Sense strand starting at position 1676 of SEQ ID NO: 587938
ucuccugagcucuggaaua

SEQ ID NO: 829747 - RNA, 19 nt, Artificial Sequence
  Description of Artificial Sequence: Synthetic oligonucleotide
  Antisense strand to SEQ ID NO: 829746
uauuccagagcucaggaga

SEQ ID NO: 829748 - RNA, 19 nt, Artificial Sequence
  Description of Artificial Sequence: Synthetic oligonucleotide
  Sense strand starting at position 1778 of SEQ ID NO: 587938
aguuuaaaugauugaguag

SEQ ID NO: 829749 - RNA, 19 nt, Artificial Sequence
  Description of Artificial Sequence: Synthetic oligonucleotide
  Antisense strand to SEQ ID NO: 829748
cuacucaaucauuuaaacu

SEQ ID NO: 829750 - RNA, 19 nt, Artificial Sequence
  Description of Artificial Sequence: Synthetic oligonucleotide
  Sense strand starting at position 2084 of SEQ ID NO: 587938
cagggauugccugagugag

SEQ ID NO: 829751 - RNA, 19 nt, Artificial Sequence
  Description of Artificial Sequence: Synthetic oligonucleotide
  Antisense strand to SEQ ID NO: 829750
cucacucaggcaaucccug

SEQ ID NO: 829752 - RNA, 19 nt, Artificial Sequence
  Description of Artificial Sequence: Synthetic oligonucleotide
  Sense strand starting at position 2086 of SEQ ID NO: 587938
gggauugccugagugagua

SEQ ID NO: 829753 - RNA, 19 nt, Artificial Sequence
  Description of Artificial Sequence: Synthetic oligonucleotide
  Antisense strand to SEQ ID NO: 829752
uacucacucaggcaauccc

SEQ ID NO: 829754 - RNA, 19 nt, Artificial Sequence
  Description of Artificial Sequence: Synthetic oligonucleotide
  Sense strand starting at position 2126 of SEQ ID NO: 587938
gaaagaugaugucagacaa

SEQ ID NO: 829755 - RNA, 19 nt, Artificial Sequence
  Description of Artificial Sequence: Synthetic oligonucleotide
  Antisense strand to SEQ ID NO: 829754
uugucugacaucaucuuuc

SEQ ID NO: 829756 - RNA, 19 nt, Artificial Sequence
  Description of Artificial Sequence: Synthetic oligonucleotide
  Sense strand starting at position 2394 of SEQ ID NO: 587938
guuuccagcucugucagaa

SEQ ID NO: 829757 - RNA, 19 nt, Artificial Sequence
  Description of Artificial Sequence: Synthetic oligonucleotide
  Antisense strand to SEQ ID NO: 829756
uucugacagagcuggaaac

SEQ ID NO: 829758 - RNA, 19 nt, Artificial Sequence
  Description of Artificial Sequence: Synthetic oligonucleotide
  Sense strand starting at position 2419 of SEQ ID NO: 587938
guggguuugaacgaugacu

SEQ ID NO: 829759 - RNA, 19 nt, Artificial Sequence
  Description of Artificial Sequence: Synthetic oligonucleotide
  Antisense strand to SEQ ID NO: 829758
agucaucguucaaacccac

SEQ ID NO: 829760 - RNA, 19 nt, Artificial Sequence
  Description of Artificial Sequence: Synthetic oligonucleotide
  Sense strand starting at position 2421 of SEQ ID NO: 587938
ggguuugaacgaugacuca

SEQ ID NO: 829761 - RNA, 19 nt, Artificial Sequence
  Description of Artificial Sequence: Synthetic oligonucleotide
  Antisense strand to SEQ ID NO: 829760
ugagucaucguucaaaccc

SEQ ID NO: 829762 - RNA, 19 nt, Artificial Sequence
  Description of Artificial Sequence: Synthetic oligonucleotide
  Sense strand starting at position 2637 of SEQ ID NO: 587938
ggaagauggacuggucauu

SEQ ID NO: 829763 - RNA, 19 nt, Artificial Sequence
  Description of Artificial Sequence: Synthetic oligonucleotide
  Antisense strand to SEQ ID NO: 829762
aaugaccaguccaucuucc

SEQ ID NO: 829764 - RNA, 19 nt, Artificial Sequence
  Description of Artificial Sequence: Synthetic oligonucleotide
  Sense strand starting at position 2642 of SEQ ID NO: 587938
auggacuggucauuacacu

SEQ ID NO: 829765 - RNA, 19 nt, Artificial Sequence
  Description of Artificial Sequence: Synthetic oligonucleotide
  Antisense strand to SEQ ID NO: 829764
aguguaaugaccaguccau

SEQ ID NO: 829766 - RNA, 19 nt, Artificial Sequence
  Description of Artificial Sequence: Synthetic oligonucleotide
  Sense strand starting at position 2648 of SEQ ID NO: 587938
uggucauuacacuggugau

SEQ ID NO: 829767 - RNA, 19 nt, Artificial Sequence
  Description of Artificial Sequence: Synthetic oligonucleotide
  Antisense strand to SEQ ID NO: 829766
aucaccaguguaaugacca

SEQ ID NO: 829768 - RNA, 19 nt, Artificial Sequence
  Description of Artificial Sequence: Synthetic oligonucleotide
  Sense strand starting at position 2649 of SEQ ID NO: 587938
ggucauuacacuggugauu

SEQ ID NO: 829769 - RNA, 19 nt, Artificial Sequence
  Description of Artificial Sequence: Synthetic oligonucleotide
  Antisense strand to SEQ ID NO: 829768
aaucaccaguguaaugacc

SEQ ID NO: 829770 - RNA, 19 nt, Artificial Sequence
  Description of Artificial Sequence: Synthetic oligonucleotide
  Sense strand starting at position 2667 of SEQ ID NO: 587938
ucccaaauaugguggauuu

SEQ ID NO: 829771 - RNA, 19 nt, Artificial Sequence
  Description of Artificial Sequence: Synthetic oligonucleotide
  Antisense strand to SEQ ID NO: 829770
aaauccaccauauuuggga

SEQ ID NO: 829772 - RNA, 19 nt, Artificial Sequence
  Description of Artificial Sequence: Synthetic oligonucleotide
  Sense strand starting at position 2854 of SEQ ID NO: 587938
uccuaagucccuuguauca

SEQ ID NO: 829773 - RNA, 19 nt, Artificial Sequence
  Description of Artificial Sequence: Synthetic oligonucleotide
  Antisense strand to SEQ ID NO: 829772
ugauacaagggacuuagga

SEQ ID NO: 829774 - RNA, 19 nt, Artificial Sequence
  Description of Artificial Sequence: Synthetic oligonucleotide
  Sense strand starting at position 3241 of SEQ ID NO: 587938
gguggaucaaaugguagau

SEQ ID NO: 829775 - RNA, 19 nt, Artificial Sequence
  Description of Artificial Sequence: Synthetic oligonucleotide
  Antisense strand to SEQ ID NO: 829774
aucuaccauuugauccacc

SEQ ID NO: 829776 - RNA, 19 nt, Artificial Sequence
  Description of Artificial Sequence: Synthetic oligonucleotide
  Sense strand starting at position 3318 of SEQ ID NO: 587938
acauuuccauaugguggaa

SEQ ID NO: 829777 - RNA, 19 nt, Artificial Sequence
  Description of Artificial Sequence: Synthetic oligonucleotide
  Antisense strand to SEQ ID NO: 829776
uuccaccauauggaaaugu

SEQ ID NO: 829778 - RNA, 19 nt, Artificial Sequence
  Description of Artificial Sequence: Synthetic oligonucleotide
  Sense strand starting at position 3322 of SEQ ID NO: 587938
uuccauaugguggaaucuu

SEQ ID NO: 829779 - RNA, 19 nt, Artificial Sequence
  Description of Artificial Sequence: Synthetic oligonucleotide
  Antisense strand to SEQ ID NO: 829778
aagauuccaccauauggaa

SEQ ID NO: 829780 - RNA, 19 nt, Artificial Sequence
  Description of Artificial Sequence: Synthetic oligonucleotide
  Sense strand starting at position 3532 of SEQ ID NO: 587938
ccaagauguguccaucauc

SEQ ID NO: 829781 - RNA, 19 nt, Artificial Sequence
  Description of Artificial Sequence: Synthetic oligonucleotide
  Antisense strand to SEQ ID NO: 829780
gaugauggacacaucuugg

SEQ ID NO: 829782 - RNA, 19 nt, Artificial Sequence
  Description of Artificial Sequence: Synthetic oligonucleotide
  Sense strand starting at position 3806 of SEQ ID NO: 587938
ccauauuggucagucugga

SEQ ID NO: 829783 - RNA, 19 nt, Artificial Sequence
  Description of Artificial Sequence: Synthetic oligonucleotide
  Antisense strand to SEQ ID NO: 829782
uccagacugaccaauaugg

SEQ ID NO: 829784 - RNA, 19 nt, Artificial Sequence
  Description of Artificial Sequence: Synthetic oligonucleotide
  Sense strand starting at position 3927 of SEQ ID NO: 587938
ggcugaacauguccaacau

SEQ ID NO: 829785 - RNA, 19 nt, Artificial Sequence
  Description of Artificial Sequence: Synthetic oligonucleotide
  Antisense strand to SEQ ID NO: 829784
auguuggacauguucagcc

SEQ ID NO: 829786 - RNA, 19 nt, Artificial Sequence
  Description of Artificial Sequence: Synthetic oligonucleotide
  Sense strand starting at position 3928 of SEQ ID NO: 587938
gcugaacauguccaacaua

SEQ ID NO: 829787 - RNA, 19 nt, Artificial Sequence
  Description of Artificial Sequence: Synthetic oligonucleotide
  Antisense strand to SEQ ID NO: 829786
uauguuggacauguucagc

SEQ ID NO: 829788 - RNA, 19 nt, Artificial Sequence
  Description of Artificial Sequence: Synthetic oligonucleotide
  Sense strand starting at position 22 of SEQ ID NO: 587939
gcuuaugaacuuggaucua

SEQ ID NO: 829789 - RNA, 19 nt, Artificial Sequence
  Description of Artificial Sequence: Synthetic oligonucleotide
  Antisense strand to SEQ ID NO: 829788
uagauccaaguucauaagc

SEQ ID NO: 829790 - RNA, 19 nt, Artificial Sequence
  Description of Artificial Sequence: Synthetic oligonucleotide
  Sense strand starting at position 66 of SEQ ID NO: 587939
agauaauacucagucggaa

SEQ ID NO: 829791 - RNA, 19 nt, Artificial Sequence
  Description of Artificial Sequence: Synthetic oligonucleotide
  Antisense strand to SEQ ID NO: 829790
uuccgacugaguauuaucu

SEQ ID NO: 829792 - RNA, 19 nt, Artificial Sequence
  Description of Artificial Sequence: Synthetic oligonucleotide
  Sense strand starting at position 81 of SEQ ID NO: 587939
ggaauaacugccuggguau

SEQ ID NO: 829793 - RNA, 19 nt, Artificial Sequence
  Description of Artificial Sequence: Synthetic oligonucleotide
  Antisense strand to SEQ ID NO: 829792
auacccaggcaguuauucc

SEQ ID NO: 829794 - RNA, 19 nt, Artificial Sequence
  Description of Artificial Sequence: Synthetic oligonucleotide
  Sense strand starting at position 82 of SEQ ID NO: 587939
gaauaacugccuggguauu

SEQ ID NO: 829795 - RNA, 19 nt, Artificial Sequence
  Description of Artificial Sequence: Synthetic oligonucleotide
  Antisense strand to SEQ ID NO: 829794
aauacccaggcaguuauuc

SEQ ID NO: 829796 - RNA, 19 nt, Artificial Sequence
  Description of Artificial Sequence: Synthetic oligonucleotide
  Sense strand starting at position 92 of SEQ ID NO: 587939
cuggguauuuaugaggaua

SEQ ID NO: 829797 - RNA, 19 nt, Artificial Sequence
  Description of Artificial Sequence: Synthetic oligonucleotide
  Antisense strand to SEQ ID NO: 829796
uauccucauaaauacccag

SEQ ID NO: 829798 - RNA, 19 nt, Artificial Sequence
  Description of Artificial Sequence: Synthetic oligonucleotide
  Sense strand starting at position 94 of SEQ ID NO: 587939
ggguauuuaugaggauaau

SEQ ID NO: 829799 - RNA, 19 nt, Artificial Sequence
  Description of Artificial Sequence: Synthetic oligonucleotide
  Antisense strand to SEQ ID NO: 829798
auuauccucauaaauaccc

SEQ ID NO: 829800 - RNA, 19 nt, Artificial Sequence
  Description of Artificial Sequence: Synthetic oligonucleotide
  Sense strand starting at position 105 of SEQ ID NO: 587939
aggauaauuucucauugaa

SEQ ID NO: 829801 - RNA, 19 nt, Artificial Sequence
  Description of Artificial Sequence: Synthetic oligonucleotide
  Antisense strand to SEQ ID NO: 829800
uucaaugagaaauuauccu

SEQ ID NO: 829802 - RNA, 19 nt, Artificial Sequence
  Description of Artificial Sequence: Synthetic oligonucleotide
  Sense strand starting at position 428 of SEQ ID NO: 587939
gcuggauuucucugccaaa

SEQ ID NO: 829803 - RNA, 19 nt, Artificial Sequence
  Description of Artificial Sequence: Synthetic oligonucleotide
  Antisense strand to SEQ ID NO: 829802
uuuggcagagaaauccagc

SEQ ID NO: 829804 - RNA, 19 nt, Artificial Sequence
  Description of Artificial Sequence: Synthetic oligonucleotide
  Sense strand starting at position 515 of SEQ ID NO: 587939
aguauauuaggguagcaga

SEQ ID NO: 829805 - RNA, 19 nt, Artificial Sequence
  Description of Artificial Sequence: Synthetic oligonucleotide
  Antisense strand to SEQ ID NO: 829804
ucugcuacccuaauauacu

SEQ ID NO: 829806 - RNA, 19 nt, Artificial Sequence
  Description of Artificial Sequence: Synthetic oligonucleotide
  Sense strand starting at position 737 of SEQ ID NO: 587939
cgcauauaugaugacaacu

SEQ ID NO: 829807 - RNA, 19 nt, Artificial Sequence
  Description of Artificial Sequence: Synthetic oligonucleotide
  Antisense strand to SEQ ID NO: 829806
aguugucaucauauaugcg

SEQ ID NO: 829808 - RNA, 19 nt, Artificial Sequence
  Description of Artificial Sequence: Synthetic oligonucleotide
  Sense strand starting at position 772 of SEQ ID NO: 587939
ggcaccagaugacuauuaa

SEQ ID NO: 829809 - RNA, 19 nt, Artificial Sequence
  Description of Artificial Sequence: Synthetic oligonucleotide
  Antisense strand to SEQ ID NO: 829808
uuaauagucaucuggugcc

SEQ ID NO: 829810 - RNA, 19 nt, Artificial Sequence
  Description of Artificial Sequence: Synthetic oligonucleotide
  Sense strand starting at position 929 of SEQ ID NO: 587939
cagagaugcuacuuuaguu

SEQ ID NO: 829811 - RNA, 19 nt, Artificial Sequence
  Description of Artificial Sequence: Synthetic oligonucleotide
  Antisense strand to SEQ ID NO: 829810
aacuaaaguagcaucucug

SEQ ID NO: 829812 - RNA, 19 nt, Artificial Sequence
  Description of Artificial Sequence: Synthetic oligonucleotide
  Sense strand starting at position 1016 of SEQ ID NO: 587939
cugcaagagggcuauguua

SEQ ID NO: 829813 - RNA, 19 nt, Artificial Sequence
  Description of Artificial Sequence: Synthetic oligonucleotide
  Antisense strand to SEQ ID NO: 829812
uaacauagcccucuugcag

SEQ ID NO: 829814 - RNA, 19 nt, Artificial Sequence
  Description of Artificial Sequence: Synthetic oligonucleotide
  Sense strand starting at position 1018 of SEQ ID NO: 587939
gcaagagggcuauguuaaa

SEQ ID NO: 829815 - RNA, 19 nt, Artificial Sequence
  Description of Artificial Sequence: Synthetic oligonucleotide
  Antisense strand to SEQ ID NO: 829814
uuuaacauagcccucuugc

SEQ ID NO: 829816 - RNA, 19 nt, Artificial Sequence
  Description of Artificial Sequence: Synthetic oligonucleotide
  Sense strand starting at position 1025 of SEQ ID NO: 587939
ggcuauguuaaagagcauu

SEQ ID NO: 829817 - RNA, 19 nt, Artificial Sequence
  Description of Artificial Sequence: Synthetic oligonucleotide
  Antisense strand to SEQ ID NO: 829816
aaugcucuuuaacauagcc

SEQ ID NO: 829818 - RNA, 19 nt, Artificial Sequence
  Description of Artificial Sequence: Synthetic oligonucleotide
  Sense strand starting at position 1221 of SEQ ID NO: 587939
uugcacaaaucggugaaga

SEQ ID NO: 829819 - RNA, 19 nt, Artificial Sequence
  Description of Artificial Sequence: Synthetic oligonucleotide
  Antisense strand to SEQ ID NO: 829818
ucuucaccgauuugugcaa

SEQ ID NO: 829820 - RNA, 19 nt, Artificial Sequence
  Description of Artificial Sequence: Synthetic oligonucleotide
  Sense strand starting at position 1222 of SEQ ID NO: 587939
ugcacaaaucggugaagaa

SEQ ID NO: 829821 - RNA, 19 nt, Artificial Sequence
  Description of Artificial Sequence: Synthetic oligonucleotide
  Antisense strand to SEQ ID NO: 829820
uucuucaccgauuugugca

SEQ ID NO: 829822 - RNA, 19 nt, Artificial Sequence
  Description of Artificial Sequence: Synthetic oligonucleotide
  Sense strand starting at position 1257 of SEQ ID NO: 587939
ccagcaacucaguaauaga

SEQ ID NO: 829823 - RNA, 19 nt, Artificial Sequence
  Description of Artificial Sequence: Synthetic oligonucleotide
  Antisense strand to SEQ ID NO: 829822
ucuauuacugaguugcugg

SEQ ID NO: 829824 - RNA, 19 nt, Artificial Sequence
  Description of Artificial Sequence: Synthetic oligonucleotide
  Sense strand starting at position 1309 of SEQ ID NO: 587939
aaugcaacaguuugaaagu

SEQ ID NO: 829825 - RNA, 19 nt, Artificial Sequence
  Description of Artificial Sequence: Synthetic oligonucleotide
  Antisense strand to SEQ ID NO: 829824
acuuucaaacuguugcauu

SEQ ID NO: 829826 - RNA, 19 nt, Artificial Sequence
  Description of Artificial Sequence: Synthetic oligonucleotide
  Sense strand starting at position 1493 of SEQ ID NO: 587939
guguuaguucuacaaagac

SEQ ID NO: 829827 - RNA, 19 nt, Artificial Sequence
  Description of Artificial Sequence: Synthetic oligonucleotide
  Antisense strand to SEQ ID NO: 829826
gucuuuguagaacuaacac

SEQ ID NO: 829828 - RNA, 19 nt, Artificial Sequence
  Description of Artificial Sequence: Synthetic oligonucleotide
  Sense strand starting at position 1537 of SEQ ID NO: 587939
gucaucugucagccguaca

SEQ ID NO: 829829 - RNA, 19 nt, Artificial Sequence
  Description of Artificial Sequence: Synthetic oligonucleotide
  Antisense strand to SEQ ID NO: 829828
uguacggcugacagaugac

SEQ ID NO: 829830 - RNA, 19 nt, Artificial Sequence
  Description of Artificial Sequence: Synthetic oligonucleotide
  Sense strand starting at position 1551 of SEQ ID NO: 587939
guacaauagcagcauugau

SEQ ID NO: 829831 - RNA, 19 nt, Artificial Sequence
  Description of Artificial Sequence: Synthetic oligonucleotide
  Antisense strand to SEQ ID NO: 829830
aucaaugcugcuauuguac

SEQ ID NO: 829832 - RNA, 19 nt, Artificial Sequence
  Description of Artificial Sequence: Synthetic oligonucleotide
  Sense strand starting at position 2089 of SEQ ID NO: 587939
accaguugugcguuacuuu

SEQ ID NO: 829833 - RNA, 19 nt, Artificial Sequence
  Description of Artificial Sequence: Synthetic oligonucleotide
  Antisense strand to SEQ ID NO: 829832
aaaguaacgcacaacuggu

SEQ ID NO: 829834 - RNA, 19 nt, Artificial Sequence
  Description of Artificial Sequence: Synthetic oligonucleotide
  Sense strand starting at position 2246 of SEQ ID NO: 587939
ucuugacuugcugauaaag

SEQ ID NO: 829835 - RNA, 19 nt, Artificial Sequence
  Description of Artificial Sequence: Synthetic oligonucleotide
  Antisense strand to SEQ ID NO: 829834
cuuuaucagcaagucaaga

SEQ ID NO: 829836 - RNA, 19 nt, Artificial Sequence
  Description of Artificial Sequence: Synthetic oligonucleotide
  Sense strand starting at position 2278 of SEQ ID NO: 587939
guaguuggcacugaaaugu

SEQ ID NO: 829837 - RNA, 19 nt, Artificial Sequence
  Description of Artificial Sequence: Synthetic oligonucleotide
  Antisense strand to SEQ ID NO: 829836
acauuucagugccaacuac

SEQ ID NO: 829838 - RNA, 19 nt, Artificial Sequence
  Description of Artificial Sequence: Synthetic oligonucleotide
  Sense strand starting at position 2355 of SEQ ID NO: 587939
ccaacauucuuggcaagga

SEQ ID NO: 829839 - RNA, 19 nt, Artificial Sequence
  Description of Artificial Sequence: Synthetic oligonucleotide
  Antisense strand to SEQ ID NO: 829838
uccuugccaagaauguugg

SEQ ID NO: 829840 - RNA, 19 nt, Artificial Sequence
  Description of Artificial Sequence: Synthetic oligonucleotide
  Sense strand starting at position 2766 of SEQ ID NO: 587939
gaaaguaaguacuuugaca

SEQ ID NO: 829841 - RNA, 19 nt, Artificial Sequence
  Description of Artificial Sequence: Synthetic oligonucleotide
  Antisense strand to SEQ ID NO: 829840
ugucaaaguacuuacuuuc

SEQ ID NO: 829842 - RNA, 19 nt, Artificial Sequence
  Description of Artificial Sequence: Synthetic oligonucleotide
  Sense strand starting at position 2812 of SEQ ID NO: 587939
uuguuacaguacuuuaaga

SEQ ID NO: 829843 - RNA, 19 nt, Artificial Sequence
  Description of Artificial Sequence: Synthetic oligonucleotide
  Antisense strand to SEQ ID NO: 829842
ucuuaaaguacuguaacaa

SEQ ID NO: 829844 - RNA, 19 nt, Artificial Sequence
  Description of Artificial Sequence: Synthetic oligonucleotide
  Sense strand starting at position 2884 of SEQ ID NO: 587939
ucagauaucuaaggaauuu

SEQ ID NO: 829845 - RNA, 19 nt, Artificial Sequence
  Description of Artificial Sequence: Synthetic oligonucleotide
  Antisense strand to SEQ ID NO: 829844
aaauuccuuagauaucuga

SEQ ID NO: 829846 - RNA, 19 nt, Artificial Sequence
  Description of Artificial Sequence: Synthetic oligonucleotide
  Sense strand starting at position 2949 of SEQ ID NO: 587939
cugacagugucugugggaa

SEQ ID NO: 829847 - RNA, 19 nt, Artificial Sequence
  Description of Artificial Sequence: Synthetic oligonucleotide
  Antisense strand to SEQ ID NO: 829846
uucccacagacacugucag

SEQ ID NO: 829848 - RNA, 19 nt, Artificial Sequence
  Description of Artificial Sequence: Synthetic oligonucleotide
  Sense strand starting at position 3090 of SEQ ID NO: 587939
aucuaauaugggcaugcua

SEQ ID NO: 829849 - RNA, 19 nt, Artificial Sequence
  Description of Artificial Sequence: Synthetic oligonucleotide
  Antisense strand to SEQ ID NO: 829848
uagcaugcccauauuagau

SEQ ID NO: 829850 - RNA, 19 nt, Artificial Sequence
  Description of Artificial Sequence: Synthetic oligonucleotide
  Sense strand starting at position 3131 of SEQ ID NO: 587939
aguuucuagcaacauugau

SEQ ID NO: 829851 - RNA, 19 nt, Artificial Sequence
  Description of Artificial Sequence: Synthetic oligonucleotide
  Antisense strand to SEQ ID NO: 829850
aucaauguugcuagaaacu

SEQ ID NO: 829852 - RNA, 19 nt, Artificial Sequence
  Description of Artificial Sequence: Synthetic oligonucleotide
  Sense strand starting at position 3208 of SEQ ID NO: 587939
aaauuauucugggugcaau

SEQ ID NO: 829853 - RNA, 19 nt, Artificial Sequence
  Description of Artificial Sequence: Synthetic oligonucleotide
  Antisense strand to SEQ ID NO: 829852
auugcacccagaauaauuu

SEQ ID NO: 829854 - RNA, 19 nt, Artificial Sequence
  Description of Artificial Sequence: Synthetic oligonucleotide
  Sense strand starting at position 3346 of SEQ ID NO: 587939
cucaauugcuucucagaag

SEQ ID NO: 829855 - RNA, 19 nt, Artificial Sequence
  Description of Artificial Sequence: Synthetic oligonucleotide
  Antisense strand to SEQ ID NO: 829854
cuucugagaagcaauugag

SEQ ID NO: 829856 - RNA, 19 nt, Artificial Sequence
  Description of Artificial Sequence: Synthetic oligonucleotide
  Sense strand starting at position 3580 of SEQ ID NO: 587939
cagacccaugucuggaaau

SEQ ID NO: 829857 - RNA, 19 nt, Artificial Sequence
  Description of Artificial Sequence: Synthetic oligonucleotide
  Antisense strand to SEQ ID NO: 829856
auuuccagacaugggucug

SEQ ID NO: 829858 - RNA, 19 nt, Artificial Sequence
  Description of Artificial Sequence: Synthetic oligonucleotide
  Sense strand starting at position 3669 of SEQ ID NO: 587939
acuguaaauugaguuacaa

SEQ ID NO: 829859 - RNA, 19 nt, Artificial Sequence
  Description of Artificial Sequence: Synthetic oligonucleotide
  Antisense strand to SEQ ID NO: 829858
uuguaacucaauuuacagu

SEQ ID NO: 829860 - RNA, 19 nt, Artificial Sequence
  Description of Artificial Sequence: Synthetic oligonucleotide
  Sense strand starting at position 3706 of SEQ ID NO: 587939
uguacagaugcggaaucaa

SEQ ID NO: 829861 - RNA, 19 nt, Artificial Sequence
  Description of Artificial Sequence: Synthetic oligonucleotide
  Antisense strand to SEQ ID NO: 829860
uugauuccgcaucuguaca

SEQ ID NO: 829862 - RNA, 19 nt, Artificial Sequence
  Description of Artificial Sequence: Synthetic oligonucleotide
  Sense strand starting at position 3785 of SEQ ID NO: 587939
gguucugaccuacauuauu

SEQ ID NO: 829863 - RNA, 19 nt, Artificial Sequence
  Description of Artificial Sequence: Synthetic oligonucleotide
  Antisense strand to SEQ ID NO: 829862
aauaauguaggucagaacc

SEQ ID NO: 829864 - RNA, 19 nt, Artificial Sequence
  Description of Artificial Sequence: Synthetic oligonucleotide
  Sense strand starting at position 3790 of SEQ ID NO: 587939
ugaccuacauuauuguuua

SEQ ID NO: 829865 - RNA, 19 nt, Artificial Sequence
  Description of Artificial Sequence: Synthetic oligonucleotide
  Antisense strand to SEQ ID NO: 829864
uaaacaauaauguagguca

SEQ ID NO: 829866 - RNA, 19 nt, Artificial Sequence
  Description of Artificial Sequence: Synthetic oligonucleotide
  Sense strand starting at position 3946 of SEQ ID NO: 587939
ggaugcaauagaugugguu

SEQ ID NO: 829867 - RNA, 19 nt, Artificial Sequence
  Description of Artificial Sequence: Synthetic oligonucleotide
  Antisense strand to SEQ ID NO: 829866
aaccacaucuauugcaucc

SEQ ID NO: 829868 - RNA, 19 nt, Artificial Sequence
  Description of Artificial Sequence: Synthetic oligonucleotide
  Sense strand starting at position 45 of SEQ ID NO: 587940
ugucacaaggcucaguuaa

SEQ ID NO: 829869 - RNA, 19 nt, Artificial Sequence
  Description of Artificial Sequence: Synthetic oligonucleotide
  Antisense strand to SEQ ID NO: 829868
uuaacugagccuugugaca

SEQ ID NO: 829870 - RNA, 19 nt, Artificial Sequence
  Description of Artificial Sequence: Synthetic oligonucleotide
  Sense strand starting at position 47 of SEQ ID NO: 587940
ucacaaggcucaguuaauu

SEQ ID NO: 829871 - RNA, 19 nt, Artificial Sequence
  Description of Artificial Sequence: Synthetic oligonucleotide
  Antisense strand to SEQ ID NO: 829870
aauuaacugagccuuguga

SEQ ID NO: 829872 - RNA, 19 nt, Artificial Sequence
  Description of Artificial Sequence: Synthetic oligonucleotide
  Sense strand starting at position 83 of SEQ ID NO: 587940
gccugaaauccagaucuca

SEQ ID NO: 829873 - RNA, 19 nt, Artificial Sequence
  Description of Artificial Sequence: Synthetic oligonucleotide
  Antisense strand to SEQ ID NO: 829872
ugagaucuggauuucaggc

SEQ ID NO: 829874 - RNA, 19 nt, Artificial Sequence
  Description of Artificial Sequence: Synthetic oligonucleotide
  Sense strand starting at position 117 of SEQ ID NO: 587940
cuucuauuaugauugaguu

SEQ ID NO: 829875 - RNA, 19 nt, Artificial Sequence
  Description of Artificial Sequence: Synthetic oligonucleotide
  Antisense strand to SEQ ID NO: 829874
aacucaaucauaauagaag

SEQ ID NO: 829876 - RNA, 19 nt, Artificial Sequence
  Description of Artificial Sequence: Synthetic oligonucleotide
  Sense strand starting at position 127 of SEQ ID NO: 587940
gauugaguuugccuuugag

SEQ ID NO: 829877 - RNA, 19 nt, Artificial Sequence
  Description of Artificial Sequence: Synthetic oligonucleotide
  Antisense strand to SEQ ID NO: 829876
cucaaaggcaaacucaauc

SEQ ID NO: 829878 - RNA, 19 nt, Artificial Sequence
  Description of Artificial Sequence: Synthetic oligonucleotide
  Sense strand starting at position 143 of SEQ ID NO: 587940
gaggcuaaugcugagauua

SEQ ID NO: 829879 - RNA, 19 nt, Artificial Sequence
  Description of Artificial Sequence: Synthetic oligonucleotide
  Antisense strand to SEQ ID NO: 829878
uaaucucagcauuagccuc

SEQ ID NO: 829880 - RNA, 19 nt, Artificial Sequence
  Description of Artificial Sequence: Synthetic oligonucleotide
  Sense strand starting at position 299 of SEQ ID NO: 587940
cacagagaauucuaaggga

SEQ ID NO: 829881 - RNA, 19 nt, Artificial Sequence
  Description of Artificial Sequence: Synthetic oligonucleotide
  Antisense strand to SEQ ID NO: 829880
ucccuuagaauucucugug

SEQ ID NO: 829882 - RNA, 19 nt, Artificial Sequence
  Description of Artificial Sequence: Synthetic oligonucleotide
  Sense strand starting at position 913 of SEQ ID NO: 587940
ugagcauaaucucugagaa

SEQ ID NO: 829883 - RNA, 19 nt, Artificial Sequence
  Description of Artificial Sequence: Synthetic oligonucleotide
  Antisense strand to SEQ ID NO: 829882
uucucagagauuaugcuca

SEQ ID NO: 829884 - RNA, 19 nt, Artificial Sequence
  Description of Artificial Sequence: Synthetic oligonucleotide
  Sense strand starting at position 914 of SEQ ID NO: 587940
gagcauaaucucugagaag

SEQ ID NO: 829885 - RNA, 19 nt, Artificial Sequence
  Description of Artificial Sequence: Synthetic oligonucleotide
  Antisense strand to SEQ ID NO: 829884
cuucucagagauuaugcuc

SEQ ID NO: 829886 - RNA, 19 nt, Artificial Sequence
  Description of Artificial Sequence: Synthetic oligonucleotide
  Sense strand starting at position 926 of SEQ ID NO: 587940
ugagaagaguacucuguua

SEQ ID NO: 829887 - RNA, 19 nt, Artificial Sequence
  Description of Artificial Sequence: Synthetic oligonucleotide
  Antisense strand to SEQ ID NO: 829886
uaacagaguacucuucuca

SEQ ID NO: 829888 - RNA, 19 nt, Artificial Sequence
  Description of Artificial Sequence: Synthetic oligonucleotide
  Sense strand starting at position 928 of SEQ ID NO: 587940
agaagaguacucuguuaau

SEQ ID NO: 829889 - RNA, 19 nt, Artificial Sequence
  Description of Artificial Sequence: Synthetic oligonucleotide
  Antisense strand to SEQ ID NO: 829888
auuaacagaguacucuucu

SEQ ID NO: 829890 - RNA, 19 nt, Artificial Sequence
  Description of Artificial Sequence: Synthetic oligonucleotide
  Sense strand starting at position 974 of SEQ ID NO: 587940
auaacagggcuuugaguuu

SEQ ID NO: 829891 - RNA, 19 nt, Artificial Sequence
  Description of Artificial Sequence: Synthetic oligonucleotide
  Antisense strand to SEQ ID NO: 829890
aaacucaaagcccuguuau

SEQ ID NO: 829892 - RNA, 19 nt, Artificial Sequence
  Description of Artificial Sequence: Synthetic oligonucleotide
  Sense strand starting at position 1137 of SEQ ID NO: 587940
ugcacugaaagaugggauu

SEQ ID NO: 829893 - RNA, 19 nt, Artificial Sequence
  Description of Artificial Sequence: Synthetic oligonucleotide
  Antisense strand to SEQ ID NO: 829892
aaucccaucuuucagugca

SEQ ID NO: 829894 - RNA, 19 nt, Artificial Sequence
  Description of Artificial Sequence: Synthetic oligonucleotide
  Sense strand starting at position 1149 of SEQ ID NO: 587940
ugggauuuauuucguagug

SEQ ID NO: 829895 - RNA, 19 nt, Artificial Sequence
  Description of Artificial Sequence: Synthetic oligonucleotide
  Antisense strand to SEQ ID NO: 829894
cacuacgaaauaaauccca

SEQ ID NO: 829896 - RNA, 19 nt, Artificial Sequence
  Description of Artificial Sequence: Synthetic oligonucleotide
  Sense strand starting at position 1151 of SEQ ID NO: 587940
ggauuuauuucguagugug

SEQ ID NO: 829897 - RNA, 19 nt, Artificial Sequence
  Description of Artificial Sequence: Synthetic oligonucleotide
  Antisense strand to SEQ ID NO: 829896
cacacuacgaaauaaaucc

SEQ ID NO: 829898 - RNA, 19 nt, Artificial Sequence
  Description of Artificial Sequence: Synthetic oligonucleotide
  Sense strand starting at position 1193 of SEQ ID NO: 587940
acugauugaaauugugagu

SEQ ID NO: 829899 - RNA, 19 nt, Artificial Sequence
  Description of Artificial Sequence: Synthetic oligonucleotide
  Antisense strand to SEQ ID NO: 829898
acucacaauuucaaucagu

SEQ ID NO: 829900 - RNA, 19 nt, Artificial Sequence
  Description of Artificial Sequence: Synthetic oligonucleotide
  Sense strand starting at position 1198 of SEQ ID NO: 587940
uugaaauugugaguaccca

SEQ ID NO: 829901 - RNA, 19 nt, Artificial Sequence
  Description of Artificial Sequence: Synthetic oligonucleotide
  Antisense strand to SEQ ID NO: 829900
uggguacucacaauuucaa

SEQ ID NO: 829902 - RNA, 19 nt, Artificial Sequence
  Description of Artificial Sequence: Synthetic oligonucleotide
  Sense strand starting at position 1501 of SEQ ID NO: 587940
ggaccaaauuuggguggaa

SEQ ID NO: 829903 - RNA, 19 nt, Artificial Sequence
  Description of Artificial Sequence: Synthetic oligonucleotide
  Antisense strand to SEQ ID NO: 829902
uuccacccaaauuuggucc

SEQ ID NO: 829904 - RNA, 19 nt, Artificial Sequence
  Description of Artificial Sequence: Synthetic oligonucleotide
  Sense strand starting at position 1615 of SEQ ID NO: 587940
gaaggaaaguuugucuucu

SEQ ID NO: 829905 - RNA, 19 nt, Artificial Sequence
  Description of Artificial Sequence: Synthetic oligonucleotide
  Antisense strand to SEQ ID NO: 829904
agaagacaaacuuuccuuc

SEQ ID NO: 829906 - RNA, 19 nt, Artificial Sequence
  Description of Artificial Sequence: Synthetic oligonucleotide
  Sense strand starting at position 1616 of SEQ ID NO: 587940
aaggaaaguuugucuucuu

SEQ ID NO: 829907 - RNA, 19 nt, Artificial Sequence
  Description of Artificial Sequence: Synthetic oligonucleotide
  Antisense strand to SEQ ID NO: 829906
aagaagacaaacuuuccuu

SEQ ID NO: 829908 - RNA, 19 nt, Artificial Sequence
  Description of Artificial Sequence: Synthetic oligonucleotide
  Sense strand starting at position 1617 of SEQ ID NO: 587940
aggaaaguuugucuucuuu

SEQ ID NO: 829909 - RNA, 19 nt, Artificial Sequence
  Description of Artificial Sequence: Synthetic oligonucleotide
  Antisense strand to SEQ ID NO: 829908
aaagaagacaaacuuuccu

SEQ ID NO: 829910 - RNA, 19 nt, Artificial Sequence
  Description of Artificial Sequence: Synthetic oligonucleotide
  Sense strand starting at position 1653 of SEQ ID NO: 587940
agagcacgauacuuacaaa

SEQ ID NO: 829911 - RNA, 19 nt, Artificial Sequence
  Description of Artificial Sequence: Synthetic oligonucleotide
  Antisense strand to SEQ ID NO: 829910
uuuguaaguaucgugcucu

SEQ ID NO: 829912 - RNA, 19 nt, Artificial Sequence
  Description of Artificial Sequence: Synthetic oligonucleotide
  Sense strand starting at position 2132 of SEQ ID NO: 587940
acugaauaugugcaugcaa

SEQ ID NO: 829913 - RNA, 19 nt, Artificial Sequence
  Description of Artificial Sequence: Synthetic oligonucleotide
  Antisense strand to SEQ ID NO: 829912
uugcaugcacauauucagu

SEQ ID NO: 829914 - RNA, 19 nt, Artificial Sequence
  Description of Artificial Sequence: Synthetic oligonucleotide
  Sense strand starting at position 2319 of SEQ ID NO: 587940
gagaccaagugcuuaguaa

SEQ ID NO: 829915 - RNA, 19 nt, Artificial Sequence
  Description of Artificial Sequence: Synthetic oligonucleotide
  Antisense strand to SEQ ID NO: 829914
uuacuaagcacuuggucuc

SEQ ID NO: 829916 - RNA, 19 nt, Artificial Sequence
  Description of Artificial Sequence: Synthetic oligonucleotide
  Sense strand starting at position 2320 of SEQ ID NO: 587940
agaccaagugcuuaguaaa

SEQ ID NO: 829917 - RNA, 19 nt, Artificial Sequence
  Description of Artificial Sequence: Synthetic oligonucleotide
  Antisense strand to SEQ ID NO: 829916
uuuacuaagcacuuggucu

SEQ ID NO: 829918 - RNA, 19 nt, Artificial Sequence
  Description of Artificial Sequence: Synthetic oligonucleotide
  Sense strand starting at position 2330 of SEQ ID NO: 587940
cuuaguaaacacugauguu

SEQ ID NO: 829919 - RNA, 19 nt, Artificial Sequence
  Description of Artificial Sequence: Synthetic oligonucleotide
  Antisense strand to SEQ ID NO: 829918
aacaucaguguuuacuaag

SEQ ID NO: 829920 - RNA, 19 nt, Artificial Sequence
  Description of Artificial Sequence: Synthetic oligonucleotide
  Sense strand starting at position 2552 of SEQ ID NO: 587940
ugauuauucugagcaccaa

SEQ ID NO: 829921 - RNA, 19 nt, Artificial Sequence
  Description of Artificial Sequence: Synthetic oligonucleotide
  Antisense strand to SEQ ID NO: 829920
uuggugcucagaauaauca

SEQ ID NO: 829922 - RNA, 19 nt, Artificial Sequence
  Description of Artificial Sequence: Synthetic oligonucleotide
  Sense strand starting at position 2769 of SEQ ID NO: 587940
ugugaaucauucucuaaag

SEQ ID NO: 829923 - RNA, 19 nt, Artificial Sequence
  Description of Artificial Sequence: Synthetic oligonucleotide
  Antisense strand to SEQ ID NO: 829922
cuuuagagaaugauucaca

SEQ ID NO: 829924 - RNA, 19 nt, Artificial Sequence
  Description of Artificial Sequence: Synthetic oligonucleotide
  Sense strand starting at position 2770 of SEQ ID NO: 587940
gugaaucauucucuaaaga

SEQ ID NO: 829925 - RNA, 19 nt, Artificial Sequence
  Description of Artificial Sequence: Synthetic oligonucleotide
  Antisense strand to SEQ ID NO: 829924
ucuuuagagaaugauucac

SEQ ID NO: 829926 - RNA, 19 nt, Artificial Sequence
  Description of Artificial Sequence: Synthetic oligonucleotide
  Sense strand starting at position 2928 of SEQ ID NO: 587940
cucuguugucauuccgcau

SEQ ID NO: 829927 - RNA, 19 nt, Artificial Sequence
  Description of Artificial Sequence: Synthetic oligonucleotide
  Antisense strand to SEQ ID NO: 829926
augcggaaugacaacagag

SEQ ID NO: 829928 - RNA, 19 nt, Artificial Sequence
  Description of Artificial Sequence: Synthetic oligonucleotide
  Sense strand starting at position 2945 of SEQ ID NO: 587940
augcguugucugucuccau

SEQ ID NO: 829929 - RNA, 19 nt, Artificial Sequence
  Description of Artificial Sequence: Synthetic oligonucleotide
  Antisense strand to SEQ ID NO: 829928
auggagacagacaacgcau

SEQ ID NO: 829930 - RNA, 19 nt, Artificial Sequence
  Description of Artificial Sequence: Synthetic oligonucleotide
  Sense strand starting at position 3088 of SEQ ID NO: 587940
gcuauaugggcauagguga

SEQ ID NO: 829931 - RNA, 19 nt, Artificial Sequence
  Description of Artificial Sequence: Synthetic oligonucleotide
  Antisense strand to SEQ ID NO: 829930
ucaccuaugcccauauagc

SEQ ID NO: 829932 - RNA, 19 nt, Artificial Sequence
  Description of Artificial Sequence: Synthetic oligonucleotide
  Sense strand starting at position 3136 of SEQ ID NO: 587940
gguugucggauauaugcaa

SEQ ID NO: 829933 - RNA, 19 nt, Artificial Sequence
  Description of Artificial Sequence: Synthetic oligonucleotide
  Antisense strand to SEQ ID NO: 829932
uugcauauauccgacaacc

SEQ ID NO: 829934 - RNA, 19 nt, Artificial Sequence
  Description of Artificial Sequence: Synthetic oligonucleotide
  Sense strand starting at position 3143 of SEQ ID NO: 587940
ggauauaugcaauagguuc

SEQ ID NO: 829935 - RNA, 19 nt, Artificial Sequence
  Description of Artificial Sequence: Synthetic oligonucleotide
  Antisense strand to SEQ ID NO: 829934
gaaccuauugcauauaucc

SEQ ID NO: 829936 - RNA, 19 nt, Artificial Sequence
  Description of Artificial Sequence: Synthetic oligonucleotide
  Sense strand starting at position 3160 of SEQ ID NO: 587940
ucaugaggguguguaaauu

SEQ ID NO: 829937 - RNA, 19 nt, Artificial Sequence
  Description of Artificial Sequence: Synthetic oligonucleotide
  Antisense strand to SEQ ID NO: 829936
aauuuacacacccucauga

SEQ ID NO: 829938 - RNA, 19 nt, Artificial Sequence
  Description of Artificial Sequence: Synthetic oligonucleotide
  Sense strand starting at position 3475 of SEQ ID NO: 587940
acaacugcucucuggugaa

SEQ ID NO: 829939 - RNA, 19 nt, Artificial Sequence
  Description of Artificial Sequence: Synthetic oligonucleotide
  Antisense strand to SEQ ID NO: 829938
uucaccagagagcaguugu

SEQ ID NO: 829940 - RNA, 19 nt, Artificial Sequence
  Description of Artificial Sequence: Synthetic oligonucleotide
  Sense strand starting at position 3526 of SEQ ID NO: 587940
ugagcugucagauacugaa

SEQ ID NO: 829941 - RNA, 19 nt, Artificial Sequence
  Description of Artificial Sequence: Synthetic oligonucleotide
  Antisense strand to SEQ ID NO: 829940
uucaguaucugacagcuca

SEQ ID NO: 829942 - RNA, 19 nt, Artificial Sequence
  Description of Artificial Sequence: Synthetic oligonucleotide
  Sense strand starting at position 3650 of SEQ ID NO: 587940
ggugucauuuaagagacuu

SEQ ID NO: 829943 - RNA, 19 nt, Artificial Sequence
  Description of Artificial Sequence: Synthetic oligonucleotide
  Antisense strand to SEQ ID NO: 829942
aagucucuuaaaugacacc

SEQ ID NO: 829944 - RNA, 19 nt, Artificial Sequence
  Description of Artificial Sequence: Synthetic oligonucleotide
  Sense strand starting at position 3803 of SEQ ID NO: 587940
aggauucggcuucaggaau

SEQ ID NO: 829945 - RNA, 19 nt, Artificial Sequence
  Description of Artificial Sequence: Synthetic oligonucleotide
  Antisense strand to SEQ ID NO: 829944
auuccugaagccgaauccu

SEQ ID NO: 829946 - RNA, 19 nt, Artificial Sequence
  Description of Artificial Sequence: Synthetic oligonucleotide
  Sense strand starting at position 3815 of SEQ ID NO: 587940
caggaaugacagcgaucuu

SEQ ID NO: 829947 - RNA, 19 nt, Artificial Sequence
  Description of Artificial Sequence: Synthetic oligonucleotide
  Antisense strand to SEQ ID NO: 829946
aagaucgcugucauuccug

SEQ ID NO: 829948 - RNA, 19 nt, Artificial Sequence
  Description of Artificial Sequence: Synthetic oligonucleotide
  Sense strand starting at position 95 of SEQ ID NO: 587941
ugugccacuggcuaaauua

SEQ ID NO: 829949 - RNA, 19 nt, Artificial Sequence
  Description of Artificial Sequence: Synthetic oligonucleotide
  Antisense strand to SEQ ID NO: 829948
uaauuuagccaguggcaca

SEQ ID NO: 829950 - RNA, 19 nt, Artificial Sequence
  Description of Artificial Sequence: Synthetic oligonucleotide
  Sense strand starting at position 134 of SEQ ID NO: 587941
cucaguagaucaucuguaa

SEQ ID NO: 829951 - RNA, 19 nt, Artificial Sequence
  Description of Artificial Sequence: Synthetic oligonucleotide
  Antisense strand to SEQ ID NO: 829950
uuacagaugaucuacugag

SEQ ID NO: 829952 - RNA, 19 nt, Artificial Sequence
  Description of Artificial Sequence: Synthetic oligonucleotide
  Sense strand starting at position 305 of SEQ ID NO: 587941
uuaugaauugaagagcgua

SEQ ID NO: 829953 - RNA, 19 nt, Artificial Sequence
  Description of Artificial Sequence: Synthetic oligonucleotide
  Antisense strand to SEQ ID NO: 829952
uacgcucuucaauucauaa

SEQ ID NO: 829954 - RNA, 19 nt, Artificial Sequence
  Description of Artificial Sequence: Synthetic oligonucleotide
  Sense strand starting at position 572 of SEQ ID NO: 587941
cuaacaugugccuacugaa

SEQ ID NO: 829955 - RNA, 19 nt, Artificial Sequence
  Description of Artificial Sequence: Synthetic oligonucleotide
  Antisense strand to SEQ ID NO: 829954
uucaguaggcacauguuag

SEQ ID NO: 829956 - RNA, 19 nt, Artificial Sequence
  Description of Artificial Sequence: Synthetic oligonucleotide
  Sense strand starting at position 587 of SEQ ID NO: 587941
ugaagaaucugaucuggca

SEQ ID NO: 829957 - RNA, 19 nt, Artificial Sequence
  Description of Artificial Sequence: Synthetic oligonucleotide
  Antisense strand to SEQ ID NO: 829956
ugccagaucagauucuuca

SEQ ID NO: 829958 - RNA, 19 nt, Artificial Sequence
  Description of Artificial Sequence: Synthetic oligonucleotide
  Sense strand starting at position 594 of SEQ ID NO: 587941
ucugaucuggcagaaacuu

SEQ ID NO: 829959 - RNA, 19 nt, Artificial Sequence
  Description of Artificial Sequence: Synthetic oligonucleotide
  Antisense strand to SEQ ID NO: 829958
aaguuucugccagaucaga

SEQ ID NO: 829960 - RNA, 19 nt, Artificial Sequence
  Description of Artificial Sequence: Synthetic oligonucleotide
  Sense strand starting at position 618 of SEQ ID NO: 587941
ugaagauucugaucuguag

SEQ ID NO: 829961 - RNA, 19 nt, Artificial Sequence
  Description of Artificial Sequence: Synthetic oligonucleotide
  Antisense strand to SEQ ID NO: 829960
cuacagaucagaaucuuca

SEQ ID NO: 829962 - RNA, 19 nt, Artificial Sequence
  Description of Artificial Sequence: Synthetic oligonucleotide
  Sense strand starting at position 622 of SEQ ID NO: 587941
gauucugaucuguaggguu

SEQ ID NO: 829963 - RNA, 19 nt, Artificial Sequence
  Description of Artificial Sequence: Synthetic oligonucleotide
  Antisense strand to SEQ ID NO: 829962
aacccuacagaucagaauc

SEQ ID NO: 829964 - RNA, 19 nt, Artificial Sequence
  Description of Artificial Sequence: Synthetic oligonucleotide
  Sense strand starting at position 1025 of SEQ ID NO: 587941
cuggaauagucuuuaagaa

SEQ ID NO: 829965 - RNA, 19 nt, Artificial Sequence
  Description of Artificial Sequence: Synthetic oligonucleotide
  Antisense strand to SEQ ID NO: 829964
uucuuaaagacuauuccag

SEQ ID NO: 829966 - RNA, 19 nt, Artificial Sequence
  Description of Artificial Sequence: Synthetic oligonucleotide
  Sense strand starting at position 1038 of SEQ ID NO: 587941
uaagaaaguuucuccagga

SEQ ID NO: 829967 - RNA, 19 nt, Artificial Sequence
  Description of Artificial Sequence: Synthetic oligonucleotide
  Antisense strand to SEQ ID NO: 829966
uccuggagaaacuuucuua

SEQ ID NO: 829968 - RNA, 19 nt, Artificial Sequence
  Description of Artificial Sequence: Synthetic oligonucleotide
  Sense strand starting at position 1042 of SEQ ID NO: 587941
aaaguuucuccaggaagca

SEQ ID NO: 829969 - RNA, 19 nt, Artificial Sequence
  Description of Artificial Sequence: Synthetic oligonucleotide
  Antisense strand to SEQ ID NO: 829968
ugcuuccuggagaaacuuu

SEQ ID NO: 829970 - RNA, 19 nt, Artificial Sequence
  Description of Artificial Sequence: Synthetic oligonucleotide
  Sense strand starting at position 1975 of SEQ ID NO: 587941
aggaucuguuucuugaaga

SEQ ID NO: 829971 - RNA, 19 nt, Artificial Sequence
  Description of Artificial Sequence: Synthetic oligonucleotide
  Antisense strand to SEQ ID NO: 829970
ucuucaagaaacagauccu

SEQ ID NO: 829972 - RNA, 19 nt, Artificial Sequence
  Description of Artificial Sequence: Synthetic oligonucleotide
  Sense strand starting at position 2241 of SEQ ID NO: 587941
aggacagucucccugggaa

SEQ ID NO: 829973 - RNA, 19 nt, Artificial Sequence
  Description of Artificial Sequence: Synthetic oligonucleotide
  Antisense strand to SEQ ID NO: 829972
uucccagggagacuguccu

SEQ ID NO: 829974 - RNA, 19 nt, Artificial Sequence
  Description of Artificial Sequence: Synthetic oligonucleotide
  Sense strand starting at position 2514 of SEQ ID NO: 587941
uagcaagugcaauagagau

SEQ ID NO: 829975 - RNA, 19 nt, Artificial Sequence
  Description of Artificial Sequence: Synthetic oligonucleotide
  Antisense strand to SEQ ID NO: 829974
aucucuauugcacuugcua

SEQ ID NO: 829976 - RNA, 19 nt, Artificial Sequence
  Description of Artificial Sequence: Synthetic oligonucleotide
  Sense strand starting at position 2516 of SEQ ID NO: 587941
gcaagugcaauagagauau

SEQ ID NO: 829977 - RNA, 19 nt, Artificial Sequence
  Description of Artificial Sequence: Synthetic oligonucleotide
  Antisense strand to SEQ ID NO: 829976
auaucucuauugcacuugc

SEQ ID NO: 829978 - RNA, 19 nt, Artificial Sequence
  Description of Artificial Sequence: Synthetic oligonucleotide
  Sense strand starting at position 2580 of SEQ ID NO: 587941
aaaggauaauguguucuaa

SEQ ID NO: 829979 - RNA, 19 nt, Artificial Sequence
  Description of Artificial Sequence: Synthetic oligonucleotide
  Antisense strand to SEQ ID NO: 829978
uuagaacacauuauccuuu

SEQ ID NO: 829980 - RNA, 19 nt, Artificial Sequence
  Description of Artificial Sequence: Synthetic oligonucleotide
  Sense strand starting at position 2582 of SEQ ID NO: 587941
aggauaauguguucuaauu

SEQ ID NO: 829981 - RNA, 19 nt, Artificial Sequence
  Description of Artificial Sequence: Synthetic oligonucleotide
  Antisense strand to SEQ ID NO: 829980
aauuagaacacauuauccu

SEQ ID NO: 829982 - RNA, 19 nt, Artificial Sequence
  Description of Artificial Sequence: Synthetic oligonucleotide
  Sense strand starting at position 2659 of SEQ ID NO: 587941
gguuucuaaagagacuguu

SEQ ID NO: 829983 - RNA, 19 nt, Artificial Sequence
  Description of Artificial Sequence: Synthetic oligonucleotide
  Antisense strand to SEQ ID NO: 829982
aacagucucuuuagaaacc

SEQ ID NO: 829984 - RNA, 19 nt, Artificial Sequence
  Description of Artificial Sequence: Synthetic oligonucleotide
  Sense strand starting at position 2685 of SEQ ID NO: 587941
ggcuuucucccucagaauu

SEQ ID NO: 829985 - RNA, 19 nt, Artificial Sequence
  Description of Artificial Sequence: Synthetic oligonucleotide
  Antisense strand to SEQ ID NO: 829984
aauucugagggagaaagcc

SEQ ID NO: 829986 - RNA, 19 nt, Artificial Sequence
  Description of Artificial Sequence: Synthetic oligonucleotide
  Sense strand starting at position 2693 of SEQ ID NO: 587941
cccucagaauugccagagu

SEQ ID NO: 829987 - RNA, 19 nt, Artificial Sequence
  Description of Artificial Sequence: Synthetic oligonucleotide
  Antisense strand to SEQ ID NO: 829986
acucuggcaauucugaggg

SEQ ID NO: 829988 - RNA, 19 nt, Artificial Sequence
  Description of Artificial Sequence: Synthetic oligonucleotide
  Sense strand starting at position 2786 of SEQ ID NO: 587941
aucauagcuaagggugaaa

SEQ ID NO: 829989 - RNA, 19 nt, Artificial Sequence
  Description of Artificial Sequence: Synthetic oligonucleotide
  Antisense strand to SEQ ID NO: 829988
uuucacccuuagcuaugau

SEQ ID NO: 829990 - RNA, 19 nt, Artificial Sequence
  Description of Artificial Sequence: Synthetic oligonucleotide
  Sense strand starting at position 2813 of SEQ ID NO: 587941
accacaguuuggcuaaaga

SEQ ID NO: 829991 - RNA, 19 nt, Artificial Sequence
  Description of Artificial Sequence: Synthetic oligonucleotide
  Antisense strand to SEQ ID NO: 829990
ucuuuagccaaacuguggu

SEQ ID NO: 829992 - RNA, 19 nt, Artificial Sequence
  Description of Artificial Sequence: Synthetic oligonucleotide
  Sense strand starting at position 2824 of SEQ ID NO: 587941
gcuaaagacucuucuaggu

SEQ ID NO: 829993 - RNA, 19 nt, Artificial Sequence
  Description of Artificial Sequence: Synthetic oligonucleotide
  Antisense strand to SEQ ID NO: 829992
accuagaagagucuuuagc

SEQ ID NO: 829994 - RNA, 19 nt, Artificial Sequence
  Description of Artificial Sequence: Synthetic oligonucleotide
  Sense strand starting at position 2828 of SEQ ID NO: 587941
aagacucuucuaggugaga

SEQ ID NO: 829995 - RNA, 19 nt, Artificial Sequence
  Description of Artificial Sequence: Synthetic oligonucleotide
  Antisense strand to SEQ ID NO: 829994
ucucaccuagaagagucuu

SEQ ID NO: 829996 - RNA, 19 nt, Artificial Sequence
  Description of Artificial Sequence: Synthetic oligonucleotide
  Sense strand starting at position 2829 of SEQ ID NO: 587941
agacucuucuaggugagau

SEQ ID NO: 829997 - RNA, 19 nt, Artificial Sequence
  Description of Artificial Sequence: Synthetic oligonucleotide
  Antisense strand to SEQ ID NO: 829996
aucucaccuagaagagucu

SEQ ID NO: 829998 - RNA, 19 nt, Artificial Sequence
  Description of Artificial Sequence: Synthetic oligonucleotide
  Sense strand starting at position 3183 of SEQ ID NO: 587941
aaggcuuagacgugaagau

SEQ ID NO: 829999 - RNA, 19 nt, Artificial Sequence
  Description of Artificial Sequence: Synthetic oligonucleotide
  Antisense strand to SEQ ID NO: 829998
aucuucacgucuaagccuu

SEQ ID NO: 830000 - RNA, 19 nt, Artificial Sequence
  Description of Artificial Sequence: Synthetic oligonucleotide
  Sense strand starting at position 3184 of SEQ ID NO: 587941
aggcuuagacgugaagauu

SEQ ID NO: 830001 - RNA, 19 nt, Artificial Sequence
  Description of Artificial Sequence: Synthetic oligonucleotide
  Antisense strand to SEQ ID NO: 830000
aaucuucacgucuaagccu

SEQ ID NO: 830002 - RNA, 19 nt, Artificial Sequence
  Description of Artificial Sequence: Synthetic oligonucleotide
  Sense strand starting at position 3199 of SEQ ID NO: 587941
gauuucuucucuguagugu

SEQ ID NO: 830003 - RNA, 19 nt, Artificial Sequence
  Description of Artificial Sequence: Synthetic oligonucleotide
  Antisense strand to SEQ ID NO: 830002
acacuacagagaagaaauc

SEQ ID NO: 830004 - RNA, 19 nt, Artificial Sequence
  Description of Artificial Sequence: Synthetic oligonucleotide
  Sense strand starting at position 3200 of SEQ ID NO: 587941
auuucuucucuguaguguu

SEQ ID NO: 830005 - RNA, 19 nt, Artificial Sequence
  Description of Artificial Sequence: Synthetic oligonucleotide
  Antisense strand to SEQ ID NO: 830004
aacacuacagagaagaaau

SEQ ID NO: 830006 - RNA, 19 nt, Artificial Sequence
  Description of Artificial Sequence: Synthetic oligonucleotide
  Sense strand starting at position 3399 of SEQ ID NO: 587941
uuugccaaacugugacaua

SEQ ID NO: 830007 - RNA, 19 nt, Artificial Sequence
  Description of Artificial Sequence: Synthetic oligonucleotide
  Antisense strand to SEQ ID NO: 830006
uaugucacaguuuggcaaa

SEQ ID NO: 830008 - RNA, 19 nt, Artificial Sequence
  Description of Artificial Sequence: Synthetic oligonucleotide
  Sense strand starting at position 3409 of SEQ ID NO: 587941
ugugacauaggaggucuua

SEQ ID NO: 830009 - RNA, 19 nt, Artificial Sequence
  Description of Artificial Sequence: Synthetic oligonucleotide
  Antisense strand to SEQ ID NO: 830008
uaagaccuccuaugucaca

SEQ ID NO: 830010 - RNA, 19 nt, Artificial Sequence
  Description of Artificial Sequence: Synthetic oligonucleotide
  Sense strand starting at position 3488 of SEQ ID NO: 587941
ugaguuuaauccuccuuug

SEQ ID NO: 830011 - RNA, 19 nt, Artificial Sequence
  Description of Artificial Sequence: Synthetic oligonucleotide
  Antisense strand to SEQ ID NO: 830010
caaaggaggauuaaacuca

SEQ ID NO: 830012 - RNA, 19 nt, Artificial Sequence
  Description of Artificial Sequence: Synthetic oligonucleotide
  Sense strand starting at position 3504 of SEQ ID NO: 587941
uuggccuuaaagggauaua

SEQ ID NO: 830013 - RNA, 19 nt, Artificial Sequence
  Description of Artificial Sequence: Synthetic oligonucleotide
  Antisense strand to SEQ ID NO: 830012
uauaucccuuuaaggccaa

SEQ ID NO: 830014 - RNA, 19 nt, Artificial Sequence
  Description of Artificial Sequence: Synthetic oligonucleotide
  Sense strand starting at position 3575 of SEQ ID NO: 587941
accagauuagcuuauguuc

SEQ ID NO: 830015 - RNA, 19 nt, Artificial Sequence
  Description of Artificial Sequence: Synthetic oligonucleotide
  Antisense strand to SEQ ID NO: 830014
gaacauaagcuaaucuggu

SEQ ID NO: 830016 - RNA, 19 nt, Artificial Sequence
  Description of Artificial Sequence: Synthetic oligonucleotide
  Sense strand starting at position 3598 of SEQ ID NO: 587941
cgaacuaugcucuaggaac

SEQ ID NO: 830017 - RNA, 19 nt, Artificial Sequence
  Description of Artificial Sequence: Synthetic oligonucleotide
  Antisense strand to SEQ ID NO: 830016
guuccuagagcauaguucg

SEQ ID NO: 830018 - RNA, 19 nt, Artificial Sequence
  Description of Artificial Sequence: Synthetic oligonucleotide
  Sense strand starting at position 3658 of SEQ ID NO: 587941
ggaccucugcaucagguau

SEQ ID NO: 830019 - RNA, 19 nt, Artificial Sequence
  Description of Artificial Sequence: Synthetic oligonucleotide
  Antisense strand to SEQ ID NO: 830018
auaccugaugcagaggucc

SEQ ID NO: 830020 - RNA, 19 nt, Artificial Sequence
  Description of Artificial Sequence: Synthetic oligonucleotide
  Sense strand starting at position 3670 of SEQ ID NO: 587941
cagguauuccuggauuguu

SEQ ID NO: 830021 - RNA, 19 nt, Artificial Sequence
  Description of Artificial Sequence: Synthetic oligonucleotide
  Antisense strand to SEQ ID NO: 830020
aacaauccaggaauaccug

SEQ ID NO: 830022 - RNA, 19 nt, Artificial Sequence
  Description of Artificial Sequence: Synthetic oligonucleotide
  Sense strand starting at position 3812 of SEQ ID NO: 587941
guaaacaguuuccuuuaga

SEQ ID NO: 830023 - RNA, 19 nt, Artificial Sequence
  Description of Artificial Sequence: Synthetic oligonucleotide
  Antisense strand to SEQ ID NO: 830022
ucuaaaggaaacuguuuac

SEQ ID NO: 830024 - RNA, 19 nt, Artificial Sequence
  Description of Artificial Sequence: Synthetic oligonucleotide
  Sense strand starting at position 3848 of SEQ ID NO: 587941
ucuggaaggaaaugucauu

SEQ ID NO: 830025 - RNA, 19 nt, Artificial Sequence
  Description of Artificial Sequence: Synthetic oligonucleotide
  Antisense strand to SEQ ID NO: 830024
aaugacauuuccuuccaga

SEQ ID NO: 830026 - RNA, 19 nt, Artificial Sequence
  Description of Artificial Sequence: Synthetic oligonucleotide
  Sense strand starting at position 3971 of SEQ ID NO: 587941
uggaguuccugagcgggaa

SEQ ID NO: 830027 - RNA, 19 nt, Artificial Sequence
  Description of Artificial Sequence: Synthetic oligonucleotide
  Antisense strand to SEQ ID NO: 830026
uucccgcucaggaacucca

SEQ ID NO: 830028 - RNA, 19 nt, Artificial Sequence
  Description of Artificial Sequence: Synthetic oligonucleotide
  Sense strand starting at position 75 of SEQ ID NO: 587942
gugacuucuggucauccuu

SEQ ID NO: 830029 - RNA, 19 nt, Artificial Sequence
  Description of Artificial Sequence: Synthetic oligonucleotide
  Antisense strand to SEQ ID NO: 830028
aaggaugaccagaagucac

SEQ ID NO: 830030 - RNA, 19 nt, Artificial Sequence
  Description of Artificial Sequence: Synthetic oligonucleotide
  Sense strand starting at position 222 of SEQ ID NO: 587942
cccuaaauuccgggaauug

SEQ ID NO: 830031 - RNA, 19 nt, Artificial Sequence
  Description of Artificial Sequence: Synthetic oligonucleotide
  Antisense strand to SEQ ID NO: 830030
caauucccggaauuuaggg

SEQ ID NO: 830032 - RNA, 19 nt, Artificial Sequence
  Description of Artificial Sequence: Synthetic oligonucleotide
  Sense strand starting at position 399 of SEQ ID NO: 587942
auguuacucuaugaauuug

SEQ ID NO: 830033 - RNA, 19 nt, Artificial Sequence
  Description of Artificial Sequence: Synthetic oligonucleotide
  Antisense strand to SEQ ID NO: 830032
caaauucauagaguaacau

SEQ ID NO: 830034 - RNA, 19 nt, Artificial Sequence
  Description of Artificial Sequence: Synthetic oligonucleotide
  Sense strand starting at position 482 of SEQ ID NO: 587942
cugguaacaucuuccaaug

SEQ ID NO: 830035 - RNA, 19 nt, Artificial Sequence
  Description of Artificial Sequence: Synthetic oligonucleotide
  Antisense strand to SEQ ID NO: 830034
cauuggaagauguuaccag

SEQ ID NO: 830036 - RNA, 19 nt, Artificial Sequence
  Description of Artificial Sequence: Synthetic oligonucleotide
  Sense strand starting at position 528 of SEQ ID NO: 587942
uuaguuuguccgcacaaua

SEQ ID NO: 830037 - RNA, 19 nt, Artificial Sequence
  Description of Artificial Sequence: Synthetic oligonucleotide
  Antisense strand to SEQ ID NO: 830036
uauugugcggacaaacuaa

SEQ ID NO: 830038 - RNA, 19 nt, Artificial Sequence
  Description of Artificial Sequence: Synthetic oligonucleotide
  Sense strand starting at position 547 of SEQ ID NO: 587942
auggcacuauucuuaugua

SEQ ID NO: 830039 - RNA, 19 nt, Artificial Sequence
  Description of Artificial Sequence: Synthetic oligonucleotide
  Antisense strand to SEQ ID NO: 830038
uacauaagaauagugccau

SEQ ID NO: 830040 - RNA, 19 nt, Artificial Sequence
  Description of Artificial Sequence: Synthetic oligonucleotide
  Sense strand starting at position 656 of SEQ ID NO: 587942
acagcucucuauguuauua

SEQ ID NO: 830041 - RNA, 19 nt, Artificial Sequence
  Description of Artificial Sequence: Synthetic oligonucleotide
  Antisense strand to SEQ ID NO: 830040
uaauaacauagagagcugu

SEQ ID NO: 830042 - RNA, 19 nt, Artificial Sequence
  Description of Artificial Sequence: Synthetic oligonucleotide
  Sense strand starting at position 660 of SEQ ID NO: 587942
cucucuauguuauuaggaa

SEQ ID NO: 830043 - RNA, 19 nt, Artificial Sequence
  Description of Artificial Sequence: Synthetic oligonucleotide
  Antisense strand to SEQ ID NO: 830042
uuccuaauaacauagagag

SEQ ID NO: 830044 - RNA, 19 nt, Artificial Sequence
  Description of Artificial Sequence: Synthetic oligonucleotide
  Sense strand starting at position 667 of SEQ ID NO: 587942
uguuauuaggaacgagaug

SEQ ID NO: 830045 - RNA, 19 nt, Artificial Sequence
  Description of Artificial Sequence: Synthetic oligonucleotide
  Antisense strand to SEQ ID NO: 830044
caucucguuccuaauaaca

SEQ ID NO: 830046 - RNA, 19 nt, Artificial Sequence
  Description of Artificial Sequence: Synthetic oligonucleotide
  Sense strand starting at position 678 of SEQ ID NO: 587942
acgagaugacucugacagu

SEQ ID NO: 830047 - RNA, 19 nt, Artificial Sequence
  Description of Artificial Sequence: Synthetic oligonucleotide
  Antisense strand to SEQ ID NO: 830046
acugucagagucaucucgu

SEQ ID NO: 830048 - RNA, 19 nt, Artificial Sequence
  Description of Artificial Sequence: Synthetic oligonucleotide
  Sense strand starting at position 718 of SEQ ID NO: 587942
aggauagauuucugaaugc

SEQ ID NO: 830049 - RNA, 19 nt, Artificial Sequence
  Description of Artificial Sequence: Synthetic oligonucleotide
  Antisense strand to SEQ ID NO: 830048
gcauucagaaaucuauccu

SEQ ID NO: 830050 - RNA, 19 nt, Artificial Sequence
  Description of Artificial Sequence: Synthetic oligonucleotide
  Sense strand starting at position 748 of SEQ ID NO: 587942
uuauaagucuugcuagaga

SEQ ID NO: 830051 - RNA, 19 nt, Artificial Sequence
  Description of Artificial Sequence: Synthetic oligonucleotide
  Antisense strand to SEQ ID NO: 830050
ucucuagcaagacuuauaa

SEQ ID NO: 830052 - RNA, 19 nt, Artificial Sequence
  Description of Artificial Sequence: Synthetic oligonucleotide
  Sense strand starting at position 751 of SEQ ID NO: 587942
uaagucuugcuagagauaa

SEQ ID NO: 830053 - RNA, 19 nt, Artificial Sequence
  Description of Artificial Sequence: Synthetic oligonucleotide
  Antisense strand to SEQ ID NO: 830052
uuaucucuagcaagacuua

SEQ ID NO: 830054 - RNA, 19 nt, Artificial Sequence
  Description of Artificial Sequence: Synthetic oligonucleotide
  Sense strand starting at position 899 of SEQ ID NO: 587942
cugcaagagucuccaaguu

SEQ ID NO: 830055 - RNA, 19 nt, Artificial Sequence
  Description of Artificial Sequence: Synthetic oligonucleotide
  Antisense strand to SEQ ID NO: 830054
aacuuggagacucuugcag

SEQ ID NO: 830056 - RNA, 19 nt, Artificial Sequence
  Description of Artificial Sequence: Synthetic oligonucleotide
  Sense strand starting at position 996 of SEQ ID NO: 587942
acauuuacuuaagagcaga

SEQ ID NO: 830057 - RNA, 19 nt, Artificial Sequence
  Description of Artificial Sequence: Synthetic oligonucleotide
  Antisense strand to SEQ ID NO: 830056
ucugcucuuaaguaaaugu

SEQ ID NO: 830058 - RNA, 19 nt, Artificial Sequence
  Description of Artificial Sequence: Synthetic oligonucleotide
  Sense strand starting at position 1153 of SEQ ID NO: 587942
uuucuagaucaagagcauu

SEQ ID NO: 830059 - RNA, 19 nt, Artificial Sequence
  Description of Artificial Sequence: Synthetic oligonucleotide
  Antisense strand to SEQ ID NO: 830058
aaugcucuugaucuagaaa

SEQ ID NO: 830060 - RNA, 19 nt, Artificial Sequence
  Description of Artificial Sequence: Synthetic oligonucleotide
  Sense strand starting at position 1345 of SEQ ID NO: 587942
cagagagacucagagugaa

SEQ ID NO: 830061 - RNA, 19 nt, Artificial Sequence
  Description of Artificial Sequence: Synthetic oligonucleotide
  Antisense strand to SEQ ID NO: 830060
uucacucugagucucucug

SEQ ID NO: 830062 - RNA, 19 nt, Artificial Sequence
  Description of Artificial Sequence: Synthetic oligonucleotide
  Sense strand starting at position 1416 of SEQ ID NO: 587942
augacaaauuaggaacaau

SEQ ID NO: 830063 - RNA, 19 nt, Artificial Sequence
  Description of Artificial Sequence: Synthetic oligonucleotide
  Antisense strand to SEQ ID NO: 830062
auuguuccuaauuugucau

SEQ ID NO: 830064 - RNA, 19 nt, Artificial Sequence
  Description of Artificial Sequence: Synthetic oligonucleotide
  Sense strand starting at position 1452 of SEQ ID NO: 587942
acaauuucuuugcaggaaa

SEQ ID NO: 830065 - RNA, 19 nt, Artificial Sequence
  Description of Artificial Sequence: Synthetic oligonucleotide
  Antisense strand to SEQ ID NO: 830064
uuuccugcaaagaaauugu

SEQ ID NO: 830066 - RNA, 19 nt, Artificial Sequence
  Description of Artificial Sequence: Synthetic oligonucleotide
  Sense strand starting at position 1558 of SEQ ID NO: 587942
cuaggcuuauuuggaauau

SEQ ID NO: 830067 - RNA, 19 nt, Artificial Sequence
  Description of Artificial Sequence: Synthetic oligonucleotide
  Antisense strand to SEQ ID NO: 830066
auauuccaaauaagccuag

SEQ ID NO: 830068 - RNA, 19 nt, Artificial Sequence
  Description of Artificial Sequence: Synthetic oligonucleotide
  Sense strand starting at position 1567 of SEQ ID NO: 587942
uuuggaauaucagcaacau

SEQ ID NO: 830069 - RNA, 19 nt, Artificial Sequence
  Description of Artificial Sequence: Synthetic oligonucleotide
  Antisense strand to SEQ ID NO: 830068
auguugcugauauuccaaa

SEQ ID NO: 830070 - RNA, 19 nt, Artificial Sequence
  Description of Artificial Sequence: Synthetic oligonucleotide
  Sense strand starting at position 1732 of SEQ ID NO: 587942
auuacuggcucagccaaau

SEQ ID NO: 830071 - RNA, 19 nt, Artificial Sequence
  Description of Artificial Sequence: Synthetic oligonucleotide
  Antisense strand to SEQ ID NO: 830070
auuuggcugagccaguaau

SEQ ID NO: 830072 - RNA, 19 nt, Artificial Sequence
  Description of Artificial Sequence: Synthetic oligonucleotide
  Sense strand starting at position 1788 of SEQ ID NO: 587942
acuggugacuuguuuaaau

SEQ ID NO: 830073 - RNA, 19 nt, Artificial Sequence
  Description of Artificial Sequence: Synthetic oligonucleotide
  Antisense strand to SEQ ID NO: 830072
auuuaaacaagucaccagu

SEQ ID NO: 830074 - RNA, 19 nt, Artificial Sequence
  Description of Artificial Sequence: Synthetic oligonucleotide
  Sense strand starting at position 1790 of SEQ ID NO: 587942
uggugacuuguuuaaauaa

SEQ ID NO: 830075 - RNA, 19 nt, Artificial Sequence
  Description of Artificial Sequence: Synthetic oligonucleotide
  Antisense strand to SEQ ID NO: 830074
uuauuuaaacaagucacca

SEQ ID NO: 830076 - RNA, 19 nt, Artificial Sequence
  Description of Artificial Sequence: Synthetic oligonucleotide
  Sense strand starting at position 2026 of SEQ ID NO: 587942
ucccuugugcacuaguaaa

SEQ ID NO: 830077 - RNA, 19 nt, Artificial Sequence
  Description of Artificial Sequence: Synthetic oligonucleotide
  Antisense strand to SEQ ID NO: 830076
uuuacuagugcacaaggga

SEQ ID NO: 830078 - RNA, 19 nt, Artificial Sequence
  Description of Artificial Sequence: Synthetic oligonucleotide
  Sense strand starting at position 2052 of SEQ ID NO: 587942
acacgaugaauguguaaau

SEQ ID NO: 830079 - RNA, 19 nt, Artificial Sequence
  Description of Artificial Sequence: Synthetic oligonucleotide
  Antisense strand to SEQ ID NO: 830078
auuuacacauucaucgugu

SEQ ID NO: 830080 - RNA, 19 nt, Artificial Sequence
  Description of Artificial Sequence: Synthetic oligonucleotide
  Sense strand starting at position 2053 of SEQ ID NO: 587942
cacgaugaauguguaaauu

SEQ ID NO: 830081 - RNA, 19 nt, Artificial Sequence
  Description of Artificial Sequence: Synthetic oligonucleotide
  Antisense strand to SEQ ID NO: 830080
aauuuacacauucaucgug

SEQ ID NO: 830082 - RNA, 19 nt, Artificial Sequence
  Description of Artificial Sequence: Synthetic oligonucleotide
  Sense strand starting at position 2081 of SEQ ID NO: 587942
ggaaguuuguggucacauu

SEQ ID NO: 830083 - RNA, 19 nt, Artificial Sequence
  Description of Artificial Sequence: Synthetic oligonucleotide
  Antisense strand to SEQ ID NO: 830082
aaugugaccacaaacuucc

SEQ ID NO: 830084 - RNA, 19 nt, Artificial Sequence
  Description of Artificial Sequence: Synthetic oligonucleotide
  Sense strand starting at position 2082 of SEQ ID NO: 587942
gaaguuuguggucacauua

SEQ ID NO: 830085 - RNA, 19 nt, Artificial Sequence
  Description of Artificial Sequence: Synthetic oligonucleotide
  Antisense strand to SEQ ID NO: 830084
uaaugugaccacaaacuuc

SEQ ID NO: 830086 - RNA, 19 nt, Artificial Sequence
  Description of Artificial Sequence: Synthetic oligonucleotide
  Sense strand starting at position 2313 of SEQ ID NO: 587942
uuaguauaaugggaugaaa

SEQ ID NO: 830087 - RNA, 19 nt, Artificial Sequence
  Description of Artificial Sequence: Synthetic oligonucleotide
  Antisense strand to SEQ ID NO: 830086
uuucaucccauuauacuaa

SEQ ID NO: 830088 - RNA, 19 nt, Artificial Sequence
  Description of Artificial Sequence: Synthetic oligonucleotide
  Sense strand starting at position 2486 of SEQ ID NO: 587942
agggauugcuauguaaugu

SEQ ID NO: 830089 - RNA, 19 nt, Artificial Sequence
  Description of Artificial Sequence: Synthetic oligonucleotide
  Antisense strand to SEQ ID NO: 830088
acauuacauagcaaucccu

SEQ ID NO: 830090 - RNA, 19 nt, Artificial Sequence
  Description of Artificial Sequence: Synthetic oligonucleotide
  Sense strand starting at position 2487 of SEQ ID NO: 587942
gggauugcuauguaauguc

SEQ ID NO: 830091 - RNA, 19 nt, Artificial Sequence
  Description of Artificial Sequence: Synthetic oligonucleotide
  Antisense strand to SEQ ID NO: 830090
gacauuacauagcaauccc

SEQ ID NO: 830092 - RNA, 19 nt, Artificial Sequence
  Description of Artificial Sequence: Synthetic oligonucleotide
  Sense strand starting at position 2516 of SEQ ID NO: 587942
gaagaaauuuaagaugugu

SEQ ID NO: 830093 - RNA, 19 nt, Artificial Sequence
  Description of Artificial Sequence: Synthetic oligonucleotide
  Antisense strand to SEQ ID NO: 830092
acacaucuuaaauuucuuc

SEQ ID NO: 830094 - RNA, 19 nt, Artificial Sequence
  Description of Artificial Sequence: Synthetic oligonucleotide
  Sense strand starting at position 2611 of SEQ ID NO: 587942
uggauaacagcauacguaa

SEQ ID NO: 830095 - RNA, 19 nt, Artificial Sequence
  Description of Artificial Sequence: Synthetic oligonucleotide
  Antisense strand to SEQ ID NO: 830094
uuacguaugcuguuaucca

SEQ ID NO: 830096 - RNA, 19 nt, Artificial Sequence
  Description of Artificial Sequence: Synthetic oligonucleotide
  Sense strand starting at position 2846 of SEQ ID NO: 587942
gaaucauggugucuguuac

SEQ ID NO: 830097 - RNA, 19 nt, Artificial Sequence
  Description of Artificial Sequence: Synthetic oligonucleotide
  Antisense strand to SEQ ID NO: 830096
guaacagacaccaugauuc

SEQ ID NO: 830098 - RNA, 19 nt, Artificial Sequence
  Description of Artificial Sequence: Synthetic oligonucleotide
  Sense strand starting at position 3073 of SEQ ID NO: 587942
ccuagugucagauaugucu

SEQ ID NO: 830099 - RNA, 19 nt, Artificial Sequence
  Description of Artificial Sequence: Synthetic oligonucleotide
  Antisense strand to SEQ ID NO: 830098
agacauaucugacacuagg

SEQ ID NO: 830100 - RNA, 19 nt, Artificial Sequence
  Description of Artificial Sequence: Synthetic oligonucleotide
  Sense strand starting at position 3680 of SEQ ID NO: 587942
caaggagcccaguguuaau

SEQ ID NO: 830101 - RNA, 19 nt, Artificial Sequence
  Description of Artificial Sequence: Synthetic oligonucleotide
  Antisense strand to SEQ ID NO: 830100
auuaacacugggcuccuug

SEQ ID NO: 830102 - RNA, 19 nt, Artificial Sequence
  Description of Artificial Sequence: Synthetic oligonucleotide
  Sense strand starting at position 3733 of SEQ ID NO: 587942
aucaaagaucuuugcagca

SEQ ID NO: 830103 - RNA, 19 nt, Artificial Sequence
  Description of Artificial Sequence: Synthetic oligonucleotide
  Antisense strand to SEQ ID NO: 830102
ugcugcaaagaucuuugau

SEQ ID NO: 830104 - RNA, 19 nt, Artificial Sequence
  Description of Artificial Sequence: Synthetic oligonucleotide
  Sense strand starting at position 3863 of SEQ ID NO: 587942
uguucuaagccauggcuaa

SEQ ID NO: 830105 - RNA, 19 nt, Artificial Sequence
  Description of Artificial Sequence: Synthetic oligonucleotide
  Antisense strand to SEQ ID NO: 830104
uuagccauggcuuagaaca

SEQ ID NO: 830106 - RNA, 19 nt, Artificial Sequence
  Description of Artificial Sequence: Synthetic oligonucleotide
  Sense strand starting at position 3864 of SEQ ID NO: 587942
guucuaagccauggcuaaa

SEQ ID NO: 830107 - RNA, 19 nt, Artificial Sequence
  Description of Artificial Sequence: Synthetic oligonucleotide
  Antisense strand to SEQ ID NO: 830106
uuuagccauggcuuagaac

SEQ ID NO: 830108 - RNA, 19 nt, Artificial Sequence
  Description of Artificial Sequence: Synthetic oligonucleotide
  Sense strand starting at position 38 of SEQ ID NO: 587943
agauuauugcaauaguggu

SEQ ID NO: 830109 - RNA, 19 nt, Artificial Sequence
  Description of Artificial Sequence: Synthetic oligonucleotide
  Antisense strand to SEQ ID NO: 830108
accacuauugcaauaaucu

SEQ ID NO: 830110 - RNA, 19 nt, Artificial Sequence
  Description of Artificial Sequence: Synthetic oligonucleotide
  Sense strand starting at position 46 of SEQ ID NO: 587943
gcaauaguggucuaacuca

SEQ ID NO: 830111 - RNA, 19 nt, Artificial Sequence
  Description of Artificial Sequence: Synthetic oligonucleotide
  Antisense strand to SEQ ID NO: 830110
ugaguuagaccacuauugc

SEQ ID NO: 830112 - RNA, 19 nt, Artificial Sequence
  Description of Artificial Sequence: Synthetic oligonucleotide
  Sense strand starting at position 190 of SEQ ID NO: 587943
cugauuguccuccagguaa

SEQ ID NO: 830113 - RNA, 19 nt, Artificial Sequence
  Description of Artificial Sequence: Synthetic oligonucleotide
  Antisense strand to SEQ ID NO: 830112
uuaccuggaggacaaucag

SEQ ID NO: 830114 - RNA, 19 nt, Artificial Sequence
  Description of Artificial Sequence: Synthetic oligonucleotide
  Sense strand starting at position 526 of SEQ ID NO: 587943
agcuucuuccaggaaaccu

SEQ ID NO: 830115 - RNA, 19 nt, Artificial Sequence
  Description of Artificial Sequence: Synthetic oligonucleotide
  Antisense strand to SEQ ID NO: 830114
agguuuccuggaagaagcu

SEQ ID NO: 830116 - RNA, 19 nt, Artificial Sequence
  Description of Artificial Sequence: Synthetic oligonucleotide
  Sense strand starting at position 587 of SEQ ID NO: 587943
cuguuaugaucuccucaga

SEQ ID NO: 830117 - RNA, 19 nt, Artificial Sequence
  Description of Artificial Sequence: Synthetic oligonucleotide
  Antisense strand to SEQ ID NO: 830116
ucugaggagaucauaacag

SEQ ID NO: 830118 - RNA, 19 nt, Artificial Sequence
  Description of Artificial Sequence: Synthetic oligonucleotide
  Sense strand starting at position 610 of SEQ ID NO: 587943
cccauuuacuuguuuguuu

SEQ ID NO: 830119 - RNA, 19 nt, Artificial Sequence
  Description of Artificial Sequence: Synthetic oligonucleotide
  Antisense strand to SEQ ID NO: 830118
aaacaaacaaguaaauggg

SEQ ID NO: 830120 - RNA, 19 nt, Artificial Sequence
  Description of Artificial Sequence: Synthetic oligonucleotide
  Sense strand starting at position 700 of SEQ ID NO: 587943
augaauuaaugccugaaug

SEQ ID NO: 830121 - RNA, 19 nt, Artificial Sequence
  Description of Artificial Sequence: Synthetic oligonucleotide
  Antisense strand to SEQ ID NO: 830120
cauucaggcauuaauucau

SEQ ID NO: 830122 - RNA, 19 nt, Artificial Sequence
  Description of Artificial Sequence: Synthetic oligonucleotide
  Sense strand starting at position 701 of SEQ ID NO: 587943
ugaauuaaugccugaauga

SEQ ID NO: 830123 - RNA, 19 nt, Artificial Sequence
  Description of Artificial Sequence: Synthetic oligonucleotide
  Antisense strand to SEQ ID NO: 830122
ucauucaggcauuaauuca

SEQ ID NO: 830124 - RNA, 19 nt, Artificial Sequence
  Description of Artificial Sequence: Synthetic oligonucleotide
  Sense strand starting at position 708 of SEQ ID NO: 587943
augccugaaugagugaauu

SEQ ID NO: 830125 - RNA, 19 nt, Artificial Sequence
  Description of Artificial Sequence: Synthetic oligonucleotide
  Antisense strand to SEQ ID NO: 830124
aauucacucauucaggcau

SEQ ID NO: 830126 - RNA, 19 nt, Artificial Sequence
  Description of Artificial Sequence: Synthetic oligonucleotide
  Sense strand starting at position 710 of SEQ ID NO: 587943
gccugaaugagugaauucu

SEQ ID NO: 830127 - RNA, 19 nt, Artificial Sequence
  Description of Artificial Sequence: Synthetic oligonucleotide
  Antisense strand to SEQ ID NO: 830126
agaauucacucauucaggc

SEQ ID NO: 830128 - RNA, 19 nt, Artificial Sequence
  Description of Artificial Sequence: Synthetic oligonucleotide
  Sense strand starting at position 743 of SEQ ID NO: 587943
ggcccaucagugcaagaua

SEQ ID NO: 830129 - RNA, 19 nt, Artificial Sequence
  Description of Artificial Sequence: Synthetic oligonucleotide
  Antisense strand to SEQ ID NO: 830128
uaucuugcacugaugggcc

SEQ ID NO: 830130 - RNA, 19 nt, Artificial Sequence
  Description of Artificial Sequence: Synthetic oligonucleotide
  Sense strand starting at position 1082 of SEQ ID NO: 587943
uuucucaugucauuagaag

SEQ ID NO: 830131 - RNA, 19 nt, Artificial Sequence
  Description of Artificial Sequence: Synthetic oligonucleotide
  Antisense strand to SEQ ID NO: 830130
cuucuaaugacaugagaaa

SEQ ID NO: 830132 - RNA, 19 nt, Artificial Sequence
  Description of Artificial Sequence: Synthetic oligonucleotide
  Sense strand starting at position 1413 of SEQ ID NO: 587943
gguauuguagacugggaag

SEQ ID NO: 830133 - RNA, 19 nt, Artificial Sequence
  Description of Artificial Sequence: Synthetic oligonucleotide
  Antisense strand to SEQ ID NO: 830132
cuucccagucuacaauacc

SEQ ID NO: 830134 - RNA, 19 nt, Artificial Sequence
  Description of Artificial Sequence: Synthetic oligonucleotide
  Sense strand starting at position 1468 of SEQ ID NO: 587943
ugggauaaguuacuugauu

SEQ ID NO: 830135 - RNA, 19 nt, Artificial Sequence
  Description of Artificial Sequence: Synthetic oligonucleotide
  Antisense strand to SEQ ID NO: 830134
aaucaaguaacuuauccca

SEQ ID NO: 830136 - RNA, 19 nt, Artificial Sequence
  Description of Artificial Sequence: Synthetic oligonucleotide
  Sense strand starting at position 1469 of SEQ ID NO: 587943
gggauaaguuacuugauug

SEQ ID NO: 830137 - RNA, 19 nt, Artificial Sequence
  Description of Artificial Sequence: Synthetic oligonucleotide
  Antisense strand to SEQ ID NO: 830136
caaucaaguaacuuauccc

SEQ ID NO: 830138 - RNA, 19 nt, Artificial Sequence
  Description of Artificial Sequence: Synthetic oligonucleotide
  Sense strand starting at position 1470 of SEQ ID NO: 587943
ggauaaguuacuugauugu

SEQ ID NO: 830139 - RNA, 19 nt, Artificial Sequence
  Description of Artificial Sequence: Synthetic oligonucleotide
  Antisense strand to SEQ ID NO: 830138
acaaucaaguaacuuaucc

SEQ ID NO: 830140 - RNA, 19 nt, Artificial Sequence
  Description of Artificial Sequence: Synthetic oligonucleotide
  Sense strand starting at position 1811 of SEQ ID NO: 587943
cucaaucagggcugacaaa

SEQ ID NO: 830141 - RNA, 19 nt, Artificial Sequence
  Description of Artificial Sequence: Synthetic oligonucleotide
  Antisense strand to SEQ ID NO: 830140
uuugucagcccugauugag

SEQ ID NO: 830142 - RNA, 19 nt, Artificial Sequence
  Description of Artificial Sequence: Synthetic oligonucleotide
  Sense strand starting at position 1884 of SEQ ID NO: 587943
ugaccuaauguugggugau

SEQ ID NO: 830143 - RNA, 19 nt, Artificial Sequence
  Description of Artificial Sequence: Synthetic oligonucleotide
  Antisense strand to SEQ ID NO: 830142
aucacccaacauuagguca

SEQ ID NO: 830144 - RNA, 19 nt, Artificial Sequence
  Description of Artificial Sequence: Synthetic oligonucleotide
  Sense strand starting at position 1896 of SEQ ID NO: 587943
gggugaucugcacagcaac

SEQ ID NO: 830145 - RNA, 19 nt, Artificial Sequence
  Description of Artificial Sequence: Synthetic oligonucleotide
  Antisense strand to SEQ ID NO: 830144
guugcugugcagaucaccc

SEQ ID NO: 830146 - RNA, 19 nt, Artificial Sequence
  Description of Artificial Sequence: Synthetic oligonucleotide
  Sense strand starting at position 2063 of SEQ ID NO: 587943
gcaugugugauugaucaac

SEQ ID NO: 830147 - RNA, 19 nt, Artificial Sequence
  Description of Artificial Sequence: Synthetic oligonucleotide
  Antisense strand to SEQ ID NO: 830146
guugaucaaucacacaugc

SEQ ID NO: 830148 - RNA, 19 nt, Artificial Sequence
  Description of Artificial Sequence: Synthetic oligonucleotide
  Sense strand starting at position 2419 of SEQ ID NO: 587943
guguguuaucauuacuaua

SEQ ID NO: 830149 - RNA, 19 nt, Artificial Sequence
  Description of Artificial Sequence: Synthetic oligonucleotide
  Antisense strand to SEQ ID NO: 830148
uauaguaaugauaacacac

SEQ ID NO: 830150 - RNA, 19 nt, Artificial Sequence
  Description of Artificial Sequence: Synthetic oligonucleotide
  Sense strand starting at position 2421 of SEQ ID NO: 587943
guguuaucauuacuauagg

SEQ ID NO: 830151 - RNA, 19 nt, Artificial Sequence
  Description of Artificial Sequence: Synthetic oligonucleotide
  Antisense strand to SEQ ID NO: 830150
ccuauaguaaugauaacac

SEQ ID NO: 830152 - RNA, 19 nt, Artificial Sequence
  Description of Artificial Sequence: Synthetic oligonucleotide
  Sense strand starting at position 2429 of SEQ ID NO: 587943
auuacuauagguugaggua

SEQ ID NO: 830153 - RNA, 19 nt, Artificial Sequence
  Description of Artificial Sequence: Synthetic oligonucleotide
  Antisense strand to SEQ ID NO: 830152
uaccucaaccuauaguaau

SEQ ID NO: 830154 - RNA, 19 nt, Artificial Sequence
  Description of Artificial Sequence: Synthetic oligonucleotide
  Sense strand starting at position 2625 of SEQ ID NO: 587943
aguauucucucagugaaua

SEQ ID NO: 830155 - RNA, 19 nt, Artificial Sequence
  Description of Artificial Sequence: Synthetic oligonucleotide
  Antisense strand to SEQ ID NO: 830154
uauucacugagagaauacu

SEQ ID NO: 830156 - RNA, 19 nt, Artificial Sequence
  Description of Artificial Sequence: Synthetic oligonucleotide
  Sense strand starting at position 2626 of SEQ ID NO: 587943
guauucucucagugaauaa

SEQ ID NO: 830157 - RNA, 19 nt, Artificial Sequence
  Description of Artificial Sequence: Synthetic oligonucleotide
  Antisense strand to SEQ ID NO: 830156
uuauucacugagagaauac

SEQ ID NO: 830158 - RNA, 19 nt, Artificial Sequence
  Description of Artificial Sequence: Synthetic oligonucleotide
  Sense strand starting at position 2838 of SEQ ID NO: 587943
cggugauugcauuaaacaa

SEQ ID NO: 830159 - RNA, 19 nt, Artificial Sequence
  Description of Artificial Sequence: Synthetic oligonucleotide
  Antisense strand to SEQ ID NO: 830158
uuguuuaaugcaaucaccg

SEQ ID NO: 830160 - RNA, 19 nt, Artificial Sequence
  Description of Artificial Sequence: Synthetic oligonucleotide
  Sense strand starting at position 2883 of SEQ ID NO: 587943
gguguacacuuauuaggaa

SEQ ID NO: 830161 - RNA, 19 nt, Artificial Sequence
  Description of Artificial Sequence: Synthetic oligonucleotide
  Antisense strand to SEQ ID NO: 830160
uuccuaauaaguguacacc

SEQ ID NO: 830162 - RNA, 19 nt, Artificial Sequence
  Description of Artificial Sequence: Synthetic oligonucleotide
  Sense strand starting at position 3054 of SEQ ID NO: 587943
aaaggauguuaucuguaag

SEQ ID NO: 830163 - RNA, 19 nt, Artificial Sequence
  Description of Artificial Sequence: Synthetic oligonucleotide
  Antisense strand to SEQ ID NO: 830162
cuuacagauaacauccuuu

SEQ ID NO: 830164 - RNA, 19 nt, Artificial Sequence
  Description of Artificial Sequence: Synthetic oligonucleotide
  Sense strand starting at position 3087 of SEQ ID NO: 587943
gccuaaauccaguagauga

SEQ ID NO: 830165 - RNA, 19 nt, Artificial Sequence
  Description of Artificial Sequence: Synthetic oligonucleotide
  Antisense strand to SEQ ID NO: 830164
ucaucuacuggauuuaggc

SEQ ID NO: 830166 - RNA, 19 nt, Artificial Sequence
  Description of Artificial Sequence: Synthetic oligonucleotide
  Sense strand starting at position 3206 of SEQ ID NO: 587943
agaggaugcuucucagaca

SEQ ID NO: 830167 - RNA, 19 nt, Artificial Sequence
  Description of Artificial Sequence: Synthetic oligonucleotide
  Antisense strand to SEQ ID NO: 830166
ugucugagaagcauccucu

SEQ ID NO: 830168 - RNA, 19 nt, Artificial Sequence
  Description of Artificial Sequence: Synthetic oligonucleotide
  Sense strand starting at position 3311 of SEQ ID NO: 587943
uaaucuggguuccuggaaa

SEQ ID NO: 830169 - RNA, 19 nt, Artificial Sequence
  Description of Artificial Sequence: Synthetic oligonucleotide
  Antisense strand to SEQ ID NO: 830168
uuuccaggaacccagauua

SEQ ID NO: 830170 - RNA, 19 nt, Artificial Sequence
  Description of Artificial Sequence: Synthetic oligonucleotide
  Sense strand starting at position 3450 of SEQ ID NO: 587943
gucuuuauuucugcugaga

SEQ ID NO: 830171 - RNA, 19 nt, Artificial Sequence
  Description of Artificial Sequence: Synthetic oligonucleotide
  Antisense strand to SEQ ID NO: 830170
ucucagcagaaauaaagac

SEQ ID NO: 830172 - RNA, 19 nt, Artificial Sequence
  Description of Artificial Sequence: Synthetic oligonucleotide
  Sense strand starting at position 3488 of SEQ ID NO: 587943
agaggaagacuuugagugu

SEQ ID NO: 830173 - RNA, 19 nt, Artificial Sequence
  Description of Artificial Sequence: Synthetic oligonucleotide
  Antisense strand to SEQ ID NO: 830172
acacucaaagucuuccucu

SEQ ID NO: 830174 - RNA, 19 nt, Artificial Sequence
  Description of Artificial Sequence: Synthetic oligonucleotide
  Sense strand starting at position 3501 of SEQ ID NO: 587943
gagugucucuucucaaaga

SEQ ID NO: 830175 - RNA, 19 nt, Artificial Sequence
  Description of Artificial Sequence: Synthetic oligonucleotide
  Antisense strand to SEQ ID NO: 830174
ucuuugagaagagacacuc

SEQ ID NO: 830176 - RNA, 19 nt, Artificial Sequence
  Description of Artificial Sequence: Synthetic oligonucleotide
  Sense strand starting at position 3631 of SEQ ID NO: 587943
aguuguagagcugaggaua

SEQ ID NO: 830177 - RNA, 19 nt, Artificial Sequence
  Description of Artificial Sequence: Synthetic oligonucleotide
  Antisense strand to SEQ ID NO: 830176
uauccucagcucuacaacu

SEQ ID NO: 830178 - RNA, 19 nt, Artificial Sequence
  Description of Artificial Sequence: Synthetic oligonucleotide
  Sense strand starting at position 3634 of SEQ ID NO: 587943
uguagagcugaggauaguu

SEQ ID NO: 830179 - RNA, 19 nt, Artificial Sequence
  Description of Artificial Sequence: Synthetic oligonucleotide
  Antisense strand to SEQ ID NO: 830178
aacuauccucagcucuaca

SEQ ID NO: 830180 - RNA, 19 nt, Artificial Sequence
  Description of Artificial Sequence: Synthetic oligonucleotide
  Sense strand starting at position 3680 of SEQ ID NO: 587943
agguuauuccugugaacca

SEQ ID NO: 830181 - RNA, 19 nt, Artificial Sequence
  Description of Artificial Sequence: Synthetic oligonucleotide
  Antisense strand to SEQ ID NO: 830180
ugguucacaggaauaaccu

SEQ ID NO: 830182 - RNA, 19 nt, Artificial Sequence
  Description of Artificial Sequence: Synthetic oligonucleotide
  Sense strand starting at position 3723 of SEQ ID NO: 587943
ugaccuugugaguaaagcu

SEQ ID NO: 830183 - RNA, 19 nt, Artificial Sequence
  Description of Artificial Sequence: Synthetic oligonucleotide
  Antisense strand to SEQ ID NO: 830182
agcuuuacucacaagguca

SEQ ID NO: 830184 - RNA, 19 nt, Artificial Sequence
  Description of Artificial Sequence: Synthetic oligonucleotide
  Sense strand starting at position 3806 of SEQ ID NO: 587943
acuagaauuugggaaucug

SEQ ID NO: 830185 - RNA, 19 nt, Artificial Sequence
  Description of Artificial Sequence: Synthetic oligonucleotide
  Antisense strand to SEQ ID NO: 830184
cagauucccaaauucuagu

SEQ ID NO: 830186 - RNA, 19 nt, Artificial Sequence
  Description of Artificial Sequence: Synthetic oligonucleotide
  Sense strand starting at position 3816 of SEQ ID NO: 587943
gggaaucuggccuauguag

SEQ ID NO: 830187 - RNA, 19 nt, Artificial Sequence
  Description of Artificial Sequence: Synthetic oligonucleotide
  Antisense strand to SEQ ID NO: 830186
cuacauaggccagauuccc

SEQ ID NO: 830188 - RNA, 19 nt, Artificial Sequence
  Description of Artificial Sequence: Synthetic oligonucleotide
  Sense strand starting at position 4 of SEQ ID NO: 587944
ggacauccauaagaagaga

SEQ ID NO: 830189 - RNA, 19 nt, Artificial Sequence
  Description of Artificial Sequence: Synthetic oligonucleotide
  Antisense strand to SEQ ID NO: 830188
ucucuucuuauggaugucc

SEQ ID NO: 830190 - RNA, 19 nt, Artificial Sequence
  Description of Artificial Sequence: Synthetic oligonucleotide
  Sense strand starting at position 229 of SEQ ID NO: 587944
gguagagaugcuuaggcaa

SEQ ID NO: 830191 - RNA, 19 nt, Artificial Sequence
  Description of Artificial Sequence: Synthetic oligonucleotide
  Antisense strand to SEQ ID NO: 830190
uugccuaagcaucucuacc

SEQ ID NO: 830192 - RNA, 19 nt, Artificial Sequence
  Description of Artificial Sequence: Synthetic oligonucleotide
  Sense strand starting at position 262 of SEQ ID NO: 587944
ccagaaguagaacgaaauu

SEQ ID NO: 830193 - RNA, 19 nt, Artificial Sequence
  Description of Artificial Sequence: Synthetic oligonucleotide
  Antisense strand to SEQ ID NO: 830192
aauuucguucuacuucugg

SEQ ID NO: 830194 - RNA, 19 nt, Artificial Sequence
  Description of Artificial Sequence: Synthetic oligonucleotide
  Sense strand starting at position 392 of SEQ ID NO: 587944
gacucuuuggcuuagguaa

SEQ ID NO: 830195 - RNA, 19 nt, Artificial Sequence
  Description of Artificial Sequence: Synthetic oligonucleotide
  Antisense strand to SEQ ID NO: 830194
uuaccuaagccaaagaguc

SEQ ID NO: 830196 - RNA, 19 nt, Artificial Sequence
  Description of Artificial Sequence: Synthetic oligonucleotide
  Sense strand starting at position 506 of SEQ ID NO: 587944
gcauaaauugaaggguaaa

SEQ ID NO: 830197 - RNA, 19 nt, Artificial Sequence
  Description of Artificial Sequence: Synthetic oligonucleotide
  Antisense strand to SEQ ID NO: 830196
uuuacccuucaauuuaugc

SEQ ID NO: 830198 - RNA, 19 nt, Artificial Sequence
  Description of Artificial Sequence: Synthetic oligonucleotide
  Sense strand starting at position 596 of SEQ ID NO: 587944
cucggauucgcccugcaca

SEQ ID NO: 830199 - RNA, 19 nt, Artificial Sequence
  Description of Artificial Sequence: Synthetic oligonucleotide
  Antisense strand to SEQ ID NO: 830198
ugugcagggcgaauccgag

SEQ ID NO: 830200 - RNA, 19 nt, Artificial Sequence
  Description of Artificial Sequence: Synthetic oligonucleotide
  Sense strand starting at position 1629 of SEQ ID NO: 587944
ggucuuaagucagccuaca

SEQ ID NO: 830201 - RNA, 19 nt, Artificial Sequence
  Description of Artificial Sequence: Synthetic oligonucleotide
  Antisense strand to SEQ ID NO: 830200
uguaggcugacuuaagacc

SEQ ID NO: 830202 - RNA, 19 nt, Artificial Sequence
  Description of Artificial Sequence: Synthetic oligonucleotide
  Sense strand starting at position 1666 of SEQ ID NO: 587944
gcccgagagcugcagagau

SEQ ID NO: 830203 - RNA, 19 nt, Artificial Sequence
  Description of Artificial Sequence: Synthetic oligonucleotide
  Antisense strand to SEQ ID NO: 830202
aucucugcagcucucgggc

SEQ ID NO: 830204 - RNA, 19 nt, Artificial Sequence
  Description of Artificial Sequence: Synthetic oligonucleotide
  Sense strand starting at position 1843 of SEQ ID NO: 587944
cugcuauguagccagagaa

SEQ ID NO: 830205 - RNA, 19 nt, Artificial Sequence
  Description of Artificial Sequence: Synthetic oligonucleotide
  Antisense strand to SEQ ID NO: 830204
uucucuggcuacauagcag

SEQ ID NO: 830206 - RNA, 19 nt, Artificial Sequence
  Description of Artificial Sequence: Synthetic oligonucleotide
  Sense strand starting at position 2266 of SEQ ID NO: 587944
gagggauaauaauagugau

SEQ ID NO: 830207 - RNA, 19 nt, Artificial Sequence
  Description of Artificial Sequence: Synthetic oligonucleotide
  Antisense strand to SEQ ID NO: 830206
aucacuauuauuaucccuc

SEQ ID NO: 830208 - RNA, 19 nt, Artificial Sequence
  Description of Artificial Sequence: Synthetic oligonucleotide
  Sense strand starting at position 2293 of SEQ ID NO: 587944
cuaggauagcugugagggu

SEQ ID NO: 830209 - RNA, 19 nt, Artificial Sequence
  Description of Artificial Sequence: Synthetic oligonucleotide
  Antisense strand to SEQ ID NO: 830208
acccucacagcuauccuag

SEQ ID NO: 830210 - RNA, 19 nt, Artificial Sequence
  Description of Artificial Sequence: Synthetic oligonucleotide
  Sense strand starting at position 2332 of SEQ ID NO: 587944
cucuauccagcugauugaa

SEQ ID NO: 830211 - RNA, 19 nt, Artificial Sequence
  Description of Artificial Sequence: Synthetic oligonucleotide
  Antisense strand to SEQ ID NO: 830210
uucaaucagcuggauagag

SEQ ID NO: 830212 - RNA, 19 nt, Artificial Sequence
  Description of Artificial Sequence: Synthetic oligonucleotide
  Sense strand starting at position 2554 of SEQ ID NO: 587944
aucuuaucuggugguggaa

SEQ ID NO: 830213 - RNA, 19 nt, Artificial Sequence
  Description of Artificial Sequence: Synthetic oligonucleotide
  Antisense strand to SEQ ID NO: 830212
uuccaccaccagauaagau

SEQ ID NO: 830214 - RNA, 19 nt, Artificial Sequence
  Description of Artificial Sequence: Synthetic oligonucleotide
  Sense strand starting at position 2633 of SEQ ID NO: 587944
gcgacacucugauccuuau

SEQ ID NO: 830215 - RNA, 19 nt, Artificial Sequence
  Description of Artificial Sequence: Synthetic oligonucleotide
  Antisense strand to SEQ ID NO: 830214
auaaggaucagagugucgc

SEQ ID NO: 830216 - RNA, 19 nt, Artificial Sequence
  Description of Artificial Sequence: Synthetic oligonucleotide
  Sense strand starting at position 2654 of SEQ ID NO: 587944
accaguguccuacauagga

SEQ ID NO: 830217 - RNA, 19 nt, Artificial Sequence
  Description of Artificial Sequence: Synthetic oligonucleotide
  Antisense strand to SEQ ID NO: 830216
uccuauguaggacacuggu

SEQ ID NO: 830218 - RNA, 19 nt, Artificial Sequence
  Description of Artificial Sequence: Synthetic oligonucleotide
  Sense strand starting at position 2757 of SEQ ID NO: 587944
cuaagaauauauguuguga

SEQ ID NO: 830219 - RNA, 19 nt, Artificial Sequence
  Description of Artificial Sequence: Synthetic oligonucleotide
  Antisense strand to SEQ ID NO: 830218
ucacaacauauauucuuag

SEQ ID NO: 830220 - RNA, 19 nt, Artificial Sequence
  Description of Artificial Sequence: Synthetic oligonucleotide
  Sense strand starting at position 2794 of SEQ ID NO: 587944
gccagaggauuaguggaau

SEQ ID NO: 830221 - RNA, 19 nt, Artificial Sequence
  Description of Artificial Sequence: Synthetic oligonucleotide
  Antisense strand to SEQ ID NO: 830220
auuccacuaauccucuggc

SEQ ID NO: 830222 - RNA, 19 nt, Artificial Sequence
  Description of Artificial Sequence: Synthetic oligonucleotide
  Sense strand starting at position 2917 of SEQ ID NO: 587944
gauucuuuauuugggaaga

SEQ ID NO: 830223 - RNA, 19 nt, Artificial Sequence
  Description of Artificial Sequence: Synthetic oligonucleotide
  Antisense strand to SEQ ID NO: 830222
ucuucccaaauaaagaauc

SEQ ID NO: 830224 - RNA, 19 nt, Artificial Sequence
  Description of Artificial Sequence: Synthetic oligonucleotide
  Sense strand starting at position 2918 of SEQ ID NO: 587944
auucuuuauuugggaagaa

SEQ ID NO: 830225 - RNA, 19 nt, Artificial Sequence
  Description of Artificial Sequence: Synthetic oligonucleotide
  Antisense strand to SEQ ID NO: 830224
uucuucccaaauaaagaau

SEQ ID NO: 830226 - RNA, 19 nt, Artificial Sequence
  Description of Artificial Sequence: Synthetic oligonucleotide
  Sense strand starting at position 2919 of SEQ ID NO: 587944
uucuuuauuugggaagaag

SEQ ID NO: 830227 - RNA, 19 nt, Artificial Sequence
  Description of Artificial Sequence: Synthetic oligonucleotide
  Antisense strand to SEQ ID NO: 830226
cuucuucccaaauaaagaa

SEQ ID NO: 830228 - RNA, 19 nt, Artificial Sequence
  Description of Artificial Sequence: Synthetic oligonucleotide
  Sense strand starting at position 2995 of SEQ ID NO: 587944
agugaugguccaggaugau

SEQ ID NO: 830229 - RNA, 19 nt, Artificial Sequence
  Description of Artificial Sequence: Synthetic oligonucleotide
  Antisense strand to SEQ ID NO: 830228
aucauccuggaccaucacu

SEQ ID NO: 830230 - RNA, 19 nt, Artificial Sequence
  Description of Artificial Sequence: Synthetic oligonucleotide
  Sense strand starting at position 3035 of SEQ ID NO: 587944
aaauuaugagccugggauc

SEQ ID NO: 830231 - RNA, 19 nt, Artificial Sequence
  Description of Artificial Sequence: Synthetic oligonucleotide
  Antisense strand to SEQ ID NO: 830230
gaucccaggcucauaauuu

SEQ ID NO: 830232 - RNA, 19 nt, Artificial Sequence
  Description of Artificial Sequence: Synthetic oligonucleotide
  Sense strand starting at position 3036 of SEQ ID NO: 587944
aauuaugagccugggauca

SEQ ID NO: 830233 - RNA, 19 nt, Artificial Sequence
  Description of Artificial Sequence: Synthetic oligonucleotide
  Antisense strand to SEQ ID NO: 830232
ugaucccaggcucauaauu

SEQ ID NO: 830234 - RNA, 19 nt, Artificial Sequence
  Description of Artificial Sequence: Synthetic oligonucleotide
  Sense strand starting at position 3050 of SEQ ID NO: 587944
gaucauauacugugagaua

SEQ ID NO: 830235 - RNA, 19 nt, Artificial Sequence
  Description of Artificial Sequence: Synthetic oligonucleotide
  Antisense strand to SEQ ID NO: 830234
uaucucacaguauaugauc

SEQ ID NO: 830236 - RNA, 19 nt, Artificial Sequence
  Description of Artificial Sequence: Synthetic oligonucleotide
  Sense strand starting at position 3097 of SEQ ID NO: 587944
uucugaguucccuacuuag

SEQ ID NO: 830237 - RNA, 19 nt, Artificial Sequence
  Description of Artificial Sequence: Synthetic oligonucleotide
  Antisense strand to SEQ ID NO: 830236
cuaaguagggaacucagaa

SEQ ID NO: 830238 - RNA, 19 nt, Artificial Sequence
  Description of Artificial Sequence: Synthetic oligonucleotide
  Sense strand starting at position 3100 of SEQ ID NO: 587944
ugaguucccuacuuagaau

SEQ ID NO: 830239 - RNA, 19 nt, Artificial Sequence
  Description of Artificial Sequence: Synthetic oligonucleotide
  Antisense strand to SEQ ID NO: 830238
auucuaaguagggaacuca

SEQ ID NO: 830240 - RNA, 19 nt, Artificial Sequence
  Description of Artificial Sequence: Synthetic oligonucleotide
  Sense strand starting at position 3174 of SEQ ID NO: 587944
gucagaaccucagugucau

SEQ ID NO: 830241 - RNA, 19 nt, Artificial Sequence
  Description of Artificial Sequence: Synthetic oligonucleotide
  Antisense strand to SEQ ID NO: 830240
augacacugagguucugac

SEQ ID NO: 830242 - RNA, 19 nt, Artificial Sequence
  Description of Artificial Sequence: Synthetic oligonucleotide
  Sense strand starting at position 3175 of SEQ ID NO: 587944
ucagaaccucagugucauc

SEQ ID NO: 830243 - RNA, 19 nt, Artificial Sequence
  Description of Artificial Sequence: Synthetic oligonucleotide
  Antisense strand to SEQ ID NO: 830242
gaugacacugagguucuga

SEQ ID NO: 830244 - RNA, 19 nt, Artificial Sequence
  Description of Artificial Sequence: Synthetic oligonucleotide
  Sense strand starting at position 3241 of SEQ ID NO: 587944
ccaagugaucucuaugcca

SEQ ID NO: 830245 - RNA, 19 nt, Artificial Sequence
  Description of Artificial Sequence: Synthetic oligonucleotide
  Antisense strand to SEQ ID NO: 830244
uggcauagagaucacuugg

SEQ ID NO: 830246 - RNA, 19 nt, Artificial Sequence
  Description of Artificial Sequence: Synthetic oligonucleotide
  Sense strand starting at position 3272 of SEQ ID NO: 587944
cggucuugaaucugauuac

SEQ ID NO: 830247 - RNA, 19 nt, Artificial Sequence
  Description of Artificial Sequence: Synthetic oligonucleotide
  Antisense strand to SEQ ID NO: 830246
guaaucagauucaagaccg

SEQ ID NO: 830248 - RNA, 19 nt, Artificial Sequence
  Description of Artificial Sequence: Synthetic oligonucleotide
  Sense strand starting at position 3283 of SEQ ID NO: 587944
cugauuacuucuguccacu

SEQ ID NO: 830249 - RNA, 19 nt, Artificial Sequence
  Description of Artificial Sequence: Synthetic oligonucleotide
  Antisense strand to SEQ ID NO: 830248
aguggacagaaguaaucag

SEQ ID NO: 830250 - RNA, 19 nt, Artificial Sequence
  Description of Artificial Sequence: Synthetic oligonucleotide
  Sense strand starting at position 3348 of SEQ ID NO: 587944
agauuauugcaauaguggu

SEQ ID NO: 830251 - RNA, 19 nt, Artificial Sequence
  Description of Artificial Sequence: Synthetic oligonucleotide
  Antisense strand to SEQ ID NO: 830250
accacuauugcaauaaucu

SEQ ID NO: 830252 - RNA, 19 nt, Artificial Sequence
  Description of Artificial Sequence: Synthetic oligonucleotide
  Sense strand starting at position 3354 of SEQ ID NO: 587944
uugcaauaguggucuaacu

SEQ ID NO: 830253 - RNA, 19 nt, Artificial Sequence
  Description of Artificial Sequence: Synthetic oligonucleotide
  Antisense strand to SEQ ID NO: 830252
aguuagaccacuauugcaa

SEQ ID NO: 830254 - RNA, 19 nt, Artificial Sequence
  Description of Artificial Sequence: Synthetic oligonucleotide
  Sense strand starting at position 3356 of SEQ ID NO: 587944
gcaauaguggucuaacuca

SEQ ID NO: 830255 - RNA, 19 nt, Artificial Sequence
  Description of Artificial Sequence: Synthetic oligonucleotide
  Antisense strand to SEQ ID NO: 830254
ugaguuagaccacuauugc

SEQ ID NO: 830256 - RNA, 19 nt, Artificial Sequence
  Description of Artificial Sequence: Synthetic oligonucleotide
  Sense strand starting at position 3500 of SEQ ID NO: 587944
cugauuguccuccagguaa

SEQ ID NO: 830257 - RNA, 19 nt, Artificial Sequence
  Description of Artificial Sequence: Synthetic oligonucleotide
  Antisense strand to SEQ ID NO: 830256
uuaccuggaggacaaucag

SEQ ID NO: 830258 - RNA, 19 nt, Artificial Sequence
  Description of Artificial Sequence: Synthetic oligonucleotide
  Sense strand starting at position 3502 of SEQ ID NO: 587944
gauuguccuccagguaaua

SEQ ID NO: 830259 - RNA, 19 nt, Artificial Sequence
  Description of Artificial Sequence: Synthetic oligonucleotide
  Antisense strand to SEQ ID NO: 830258
uauuaccuggaggacaauc

SEQ ID NO: 830260 - RNA, 19 nt, Artificial Sequence
  Description of Artificial Sequence: Synthetic oligonucleotide
  Sense strand starting at position 3836 of SEQ ID NO: 587944
agcuucuuccaggaaaccu

SEQ ID NO: 830261 - RNA, 19 nt, Artificial Sequence
  Description of Artificial Sequence: Synthetic oligonucleotide
  Antisense strand to SEQ ID NO: 830260
agguuuccuggaagaagcu

SEQ ID NO: 830262 - RNA, 19 nt, Artificial Sequence
  Description of Artificial Sequence: Synthetic oligonucleotide
  Sense strand starting at position 3897 of SEQ ID NO: 587944
cuguuaugaucuccucaga

SEQ ID NO: 830263 - RNA, 19 nt, Artificial Sequence
  Description of Artificial Sequence: Synthetic oligonucleotide
  Antisense strand to SEQ ID NO: 830262
ucugaggagaucauaacag

SEQ ID NO: 830264 - RNA, 19 nt, Artificial Sequence
  Description of Artificial Sequence: Synthetic oligonucleotide
  Sense strand starting at position 3920 of SEQ ID NO: 587944
cccauuuacuuguuuguuu

SEQ ID NO: 830265 - RNA, 19 nt, Artificial Sequence
  Description of Artificial Sequence: Synthetic oligonucleotide
  Antisense strand to SEQ ID NO: 830264
aaacaaacaaguaaauggg

SEQ ID NO: 830266 - RNA, 19 nt, Artificial Sequence
  Description of Artificial Sequence: Synthetic oligonucleotide
  Sense strand starting at position 3962 of SEQ ID NO: 587944
cuaguacaauuccuguuau

SEQ ID NO: 830267 - RNA, 19 nt, Artificial Sequence
  Description of Artificial Sequence: Synthetic oligonucleotide
  Antisense strand to SEQ ID NO: 830266
auaacaggaauuguacuag

SEQ ID NO: 830268 - RNA, 19 nt, Artificial Sequence
  Description of Artificial Sequence: Synthetic oligonucleotide
  Sense strand starting at position 58 of SEQ ID NO: 587945
ggaauucggcuucgagaaa

SEQ ID NO: 830269 - RNA, 19 nt, Artificial Sequence
  Description of Artificial Sequence: Synthetic oligonucleotide
  Antisense strand to SEQ ID NO: 830268
uuucucgaagccgaauucc

SEQ ID NO: 830270 - RNA, 19 nt, Artificial Sequence
  Description of Artificial Sequence: Synthetic oligonucleotide
  Sense strand starting at position 70 of SEQ ID NO: 587945
cgagaaaucuccuugucau

SEQ ID NO: 830271 - RNA, 19 nt, Artificial Sequence
  Description of Artificial Sequence: Synthetic oligonucleotide
  Antisense strand to SEQ ID NO: 830270
augacaaggagauuucucg

SEQ ID NO: 830272 - RNA, 19 nt, Artificial Sequence
  Description of Artificial Sequence: Synthetic oligonucleotide
  Sense strand starting at position 71 of SEQ ID NO: 587945
gagaaaucuccuugucaug

SEQ ID NO: 830273 - RNA, 19 nt, Artificial Sequence
  Description of Artificial Sequence: Synthetic oligonucleotide
  Antisense strand to SEQ ID NO: 830272
caugacaaggagauuucuc

SEQ ID NO: 830274 - RNA, 19 nt, Artificial Sequence
  Description of Artificial Sequence: Synthetic oligonucleotide
  Sense strand starting at position 147 of SEQ ID NO: 587945
acgcguuucccucucuuaa

SEQ ID NO: 830275 - RNA, 19 nt, Artificial Sequence
  Description of Artificial Sequence: Synthetic oligonucleotide
  Antisense strand to SEQ ID NO: 830274
uuaagagagggaaacgcgu

SEQ ID NO: 830276 - RNA, 19 nt, Artificial Sequence
  Description of Artificial Sequence: Synthetic oligonucleotide
  Sense strand starting at position 148 of SEQ ID NO: 587945
cgcguuucccucucuuaac

SEQ ID NO: 830277 - RNA, 19 nt, Artificial Sequence
  Description of Artificial Sequence: Synthetic oligonucleotide
  Antisense strand to SEQ ID NO: 830276
guuaagagagggaaacgcg

SEQ ID NO: 830278 - RNA, 19 nt, Artificial Sequence
  Description of Artificial Sequence: Synthetic oligonucleotide
  Sense strand starting at position 245 of SEQ ID NO: 587945
aucucaguugcugaaauga

SEQ ID NO: 830279 - RNA, 19 nt, Artificial Sequence
  Description of Artificial Sequence: Synthetic oligonucleotide
  Antisense strand to SEQ ID NO: 830278
ucauuucagcaacugagau

SEQ ID NO: 830280 - RNA, 19 nt, Artificial Sequence
  Description of Artificial Sequence: Synthetic oligonucleotide
  Sense strand starting at position 523 of SEQ ID NO: 587945
cuaaauuagcugugacagu

SEQ ID NO: 830281 - RNA, 19 nt, Artificial Sequence
  Description of Artificial Sequence: Synthetic oligonucleotide
  Antisense strand to SEQ ID NO: 830280
acugucacagcuaauuuag

SEQ ID NO: 830282 - RNA, 19 nt, Artificial Sequence
  Description of Artificial Sequence: Synthetic oligonucleotide
  Sense strand starting at position 648 of SEQ ID NO: 587945
ggaucuuaauuauucguua

SEQ ID NO: 830283 - RNA, 19 nt, Artificial Sequence
  Description of Artificial Sequence: Synthetic oligonucleotide
  Antisense strand to SEQ ID NO: 830282
uaacgaauaauuaagaucc

SEQ ID NO: 830284 - RNA, 19 nt, Artificial Sequence
  Description of Artificial Sequence: Synthetic oligonucleotide
  Sense strand starting at position 659 of SEQ ID NO: 587945
auucguuaauauccuggua

SEQ ID NO: 830285 - RNA, 19 nt, Artificial Sequence
  Description of Artificial Sequence: Synthetic oligonucleotide
  Antisense strand to SEQ ID NO: 830284
uaccaggauauuaacgaau

SEQ ID NO: 830286 - RNA, 19 nt, Artificial Sequence
  Description of Artificial Sequence: Synthetic oligonucleotide
  Sense strand starting at position 725 of SEQ ID NO: 587945
ggaagauggcuccaccuuu

SEQ ID NO: 830287 - RNA, 19 nt, Artificial Sequence
  Description of Artificial Sequence: Synthetic oligonucleotide
  Antisense strand to SEQ ID NO: 830286
aaagguggagccaucuucc

SEQ ID NO: 830288 - RNA, 19 nt, Artificial Sequence
  Description of Artificial Sequence: Synthetic oligonucleotide
  Sense strand starting at position 775 of SEQ ID NO: 587945
ggacauccauaagaagaga

SEQ ID NO: 830289 - RNA, 19 nt, Artificial Sequence
  Description of Artificial Sequence: Synthetic oligonucleotide
  Antisense strand to SEQ ID NO: 830288
ucucuucuuauggaugucc

SEQ ID NO: 830290 - RNA, 19 nt, Artificial Sequence
  Description of Artificial Sequence: Synthetic oligonucleotide
  Sense strand starting at position 1000 of SEQ ID NO: 587945
gguagagaugcuuaggcaa

SEQ ID NO: 830291 - RNA, 19 nt, Artificial Sequence
  Description of Artificial Sequence: Synthetic oligonucleotide
  Antisense strand to SEQ ID NO: 830290
uugccuaagcaucucuacc

SEQ ID NO: 830292 - RNA, 19 nt, Artificial Sequence
  Description of Artificial Sequence: Synthetic oligonucleotide
  Sense strand starting at position 1033 of SEQ ID NO: 587945
ccagaaguagaacgaaauu

SEQ ID NO: 830293 - RNA, 19 nt, Artificial Sequence
  Description of Artificial Sequence: Synthetic oligonucleotide
  Antisense strand to SEQ ID NO: 830292
aauuucguucuacuucugg

SEQ ID NO: 830294 - RNA, 19 nt, Artificial Sequence
  Description of Artificial Sequence: Synthetic oligonucleotide
  Sense strand starting at position 1163 of SEQ ID NO: 587945
gacucuuuggcuuagguaa

SEQ ID NO: 830295 - RNA, 19 nt, Artificial Sequence
  Description of Artificial Sequence: Synthetic oligonucleotide
  Antisense strand to SEQ ID NO: 830294
uuaccuaagccaaagaguc

SEQ ID NO: 830296 - RNA, 19 nt, Artificial Sequence
  Description of Artificial Sequence: Synthetic oligonucleotide
  Sense strand starting at position 1277 of SEQ ID NO: 587945
gcauaaauugaaggguaaa

SEQ ID NO: 830297 - RNA, 19 nt, Artificial Sequence
  Description of Artificial Sequence: Synthetic oligonucleotide
  Antisense strand to SEQ ID NO: 830296
uuuacccuucaauuuaugc

SEQ ID NO: 830298 - RNA, 19 nt, Artificial Sequence
  Description of Artificial Sequence: Synthetic oligonucleotide
  Sense strand starting at position 1367 of SEQ ID NO: 587945
cucggauucgcccugcaca

SEQ ID NO: 830299 - RNA, 19 nt, Artificial Sequence
  Description of Artificial Sequence: Synthetic oligonucleotide
  Antisense strand to SEQ ID NO: 830298
ugugcagggcgaauccgag

SEQ ID NO: 830300 - RNA, 19 nt, Artificial Sequence
  Description of Artificial Sequence: Synthetic oligonucleotide
  Sense strand starting at position 2400 of SEQ ID NO: 587945
ggucuuaagucagccuaca

SEQ ID NO: 830301 - RNA, 19 nt, Artificial Sequence
  Description of Artificial Sequence: Synthetic oligonucleotide
  Antisense strand to SEQ ID NO: 830300
uguaggcugacuuaagacc

SEQ ID NO: 830302 - RNA, 19 nt, Artificial Sequence
  Description of Artificial Sequence: Synthetic oligonucleotide
  Sense strand starting at position 2437 of SEQ ID NO: 587945
gcccgagagcugcagagau

SEQ ID NO: 830303 - RNA, 19 nt, Artificial Sequence
  Description of Artificial Sequence: Synthetic oligonucleotide
  Antisense strand to SEQ ID NO: 830302
aucucugcagcucucgggc

SEQ ID NO: 830304 - RNA, 19 nt, Artificial Sequence
  Description of Artificial Sequence: Synthetic oligonucleotide
  Sense strand starting at position 2614 of SEQ ID NO: 587945
cugcuauguagccagagaa

SEQ ID NO: 830305 - RNA, 19 nt, Artificial Sequence
  Description of Artificial Sequence: Synthetic oligonucleotide
  Antisense strand to SEQ ID NO: 830304
uucucuggcuacauagcag

SEQ ID NO: 830306 - RNA, 19 nt, Artificial Sequence
  Description of Artificial Sequence: Synthetic oligonucleotide
  Sense strand starting at position 2771 of SEQ ID NO: 587945
ugccuuuaugccuaaaguu

SEQ ID NO: 830307 - RNA, 19 nt, Artificial Sequence
  Description of Artificial Sequence: Synthetic oligonucleotide
  Antisense strand to SEQ ID NO: 830306
aacuuuaggcauaaaggca

SEQ ID NO: 830308 - RNA, 19 nt, Artificial Sequence
  Description of Artificial Sequence: Synthetic oligonucleotide
  Sense strand starting at position 3037 of SEQ ID NO: 587945
gagggauaauaauagugau

SEQ ID NO: 830309 - RNA, 19 nt, Artificial Sequence
  Description of Artificial Sequence: Synthetic oligonucleotide
  Antisense strand to SEQ ID NO: 830308
aucacuauuauuaucccuc

SEQ ID NO: 830310 - RNA, 19 nt, Artificial Sequence
  Description of Artificial Sequence: Synthetic oligonucleotide
  Sense strand starting at position 3064 of SEQ ID NO: 587945
cuaggauagcugugagggu

SEQ ID NO: 830311 - RNA, 19 nt, Artificial Sequence
  Description of Artificial Sequence: Synthetic oligonucleotide
  Antisense strand to SEQ ID NO: 830310
acccucacagcuauccuag

SEQ ID NO: 830312 - RNA, 19 nt, Artificial Sequence
  Description of Artificial Sequence: Synthetic oligonucleotide
  Sense strand starting at position 3103 of SEQ ID NO: 587945
cucuauccagcugauugaa

SEQ ID NO: 830313 - RNA, 19 nt, Artificial Sequence
  Description of Artificial Sequence: Synthetic oligonucleotide
  Antisense strand to SEQ ID NO: 830312
uucaaucagcuggauagag

SEQ ID NO: 830314 - RNA, 19 nt, Artificial Sequence
  Description of Artificial Sequence: Synthetic oligonucleotide
  Sense strand starting at position 3325 of SEQ ID NO: 587945
aucuuaucuggugguggaa

SEQ ID NO: 830315 - RNA, 19 nt, Artificial Sequence
  Description of Artificial Sequence: Synthetic oligonucleotide
  Antisense strand to SEQ ID NO: 830314
uuccaccaccagauaagau

SEQ ID NO: 830316 - RNA, 19 nt, Artificial Sequence
  Description of Artificial Sequence: Synthetic oligonucleotide
  Sense strand starting at position 3404 of SEQ ID NO: 587945
gcgacacucugauccuuau

SEQ ID NO: 830317 - RNA, 19 nt, Artificial Sequence
  Description of Artificial Sequence: Synthetic oligonucleotide
  Antisense strand to SEQ ID NO: 830316
auaaggaucagagugucgc

SEQ ID NO: 830318 - RNA, 19 nt, Artificial Sequence
  Description of Artificial Sequence: Synthetic oligonucleotide
  Sense strand starting at position 3425 of SEQ ID NO: 587945
accaguguccuacauagga

SEQ ID NO: 830319 - RNA, 19 nt, Artificial Sequence
  Description of Artificial Sequence: Synthetic oligonucleotide
  Antisense strand to SEQ ID NO: 830318
uccuauguaggacacuggu

SEQ ID NO: 830320 - RNA, 19 nt, Artificial Sequence
  Description of Artificial Sequence: Synthetic oligonucleotide
  Sense strand starting at position 3528 of SEQ ID NO: 587945
cuaagaauauauguuguga

SEQ ID NO: 830321 - RNA, 19 nt, Artificial Sequence
  Description of Artificial Sequence: Synthetic oligonucleotide
  Antisense strand to SEQ ID NO: 830320
ucacaacauauauucuuag

SEQ ID NO: 830322 - RNA, 19 nt, Artificial Sequence
  Description of Artificial Sequence: Synthetic oligonucleotide
  Sense strand starting at position 3565 of SEQ ID NO: 587945
gccagaggauuaguggaau

SEQ ID NO: 830323 - RNA, 19 nt, Artificial Sequence
  Description of Artificial Sequence: Synthetic oligonucleotide
  Antisense strand to SEQ ID NO: 830322
auuccacuaauccucuggc

SEQ ID NO: 830324 - RNA, 19 nt, Artificial Sequence
  Description of Artificial Sequence: Synthetic oligonucleotide
  Sense strand starting at position 3665 of SEQ ID NO: 587945
agcagugagguugguaauu

SEQ ID NO: 830325 - RNA, 19 nt, Artificial Sequence
  Description of Artificial Sequence: Synthetic oligonucleotide
  Antisense strand to SEQ ID NO: 830324
aauuaccaaccucacugcu

SEQ ID NO: 830326 - RNA, 19 nt, Artificial Sequence
  Description of Artificial Sequence: Synthetic oligonucleotide
  Sense strand starting at position 3688 of SEQ ID NO: 587945
gauucuuuauuugggaaga

SEQ ID NO: 830327 - RNA, 19 nt, Artificial Sequence
  Description of Artificial Sequence: Synthetic oligonucleotide
  Antisense strand to SEQ ID NO: 830326
ucuucccaaauaaagaauc

SEQ ID NO: 830328 - RNA, 19 nt, Artificial Sequence
  Description of Artificial Sequence: Synthetic oligonucleotide
  Sense strand starting at position 3689 of SEQ ID NO: 587945
auucuuuauuugggaagaa

SEQ ID NO: 830329 - RNA, 19 nt, Artificial Sequence
  Description of Artificial Sequence: Synthetic oligonucleotide
  Antisense strand to SEQ ID NO: 830328
uucuucccaaauaaagaau

SEQ ID NO: 830330 - RNA, 19 nt, Artificial Sequence
  Description of Artificial Sequence: Synthetic oligonucleotide
  Sense strand starting at position 3690 of SEQ ID NO: 587945
uucuuuauuugggaagaag

SEQ ID NO: 830331 - RNA, 19 nt, Artificial Sequence
  Description of Artificial Sequence: Synthetic oligonucleotide
  Antisense strand to SEQ ID NO: 830330
cuucuucccaaauaaagaa

SEQ ID NO: 830332 - RNA, 19 nt, Artificial Sequence
  Description of Artificial Sequence: Synthetic oligonucleotide
  Sense strand starting at position 3766 of SEQ ID NO: 587945
agugaugguccaggaugau

SEQ ID NO: 830333 - RNA, 19 nt, Artificial Sequence
  Description of Artificial Sequence: Synthetic oligonucleotide
  Antisense strand to SEQ ID NO: 830332
aucauccuggaccaucacu

SEQ ID NO: 830334 - RNA, 19 nt, Artificial Sequence
  Description of Artificial Sequence: Synthetic oligonucleotide
  Sense strand starting at position 3806 of SEQ ID NO: 587945
aaauuaugagccugggauc

SEQ ID NO: 830335 - RNA, 19 nt, Artificial Sequence
  Description of Artificial Sequence: Synthetic oligonucleotide
  Antisense strand to SEQ ID NO: 830334
gaucccaggcucauaauuu

SEQ ID NO: 830336 - RNA, 19 nt, Artificial Sequence
  Description of Artificial Sequence: Synthetic oligonucleotide
  Sense strand starting at position 3807 of SEQ ID NO: 587945
aauuaugagccugggauca

SEQ ID NO: 830337 - RNA, 19 nt, Artificial Sequence
  Description of Artificial Sequence: Synthetic oligonucleotide
  Antisense strand to SEQ ID NO: 830336
ugaucccaggcucauaauu

SEQ ID NO: 830338 - RNA, 19 nt, Artificial Sequence
  Description of Artificial Sequence: Synthetic oligonucleotide
  Sense strand starting at position 3821 of SEQ ID NO: 587945
gaucauauacugugagaua

SEQ ID NO: 830339 - RNA, 19 nt, Artificial Sequence
  Description of Artificial Sequence: Synthetic oligonucleotide
  Antisense strand to SEQ ID NO: 830338
uaucucacaguauaugauc

SEQ ID NO: 830340 - RNA, 19 nt, Artificial Sequence
  Description of Artificial Sequence: Synthetic oligonucleotide
  Sense strand starting at position 3868 of SEQ ID NO: 587945
uucugaguucccuacuuag

SEQ ID NO: 830341 - RNA, 19 nt, Artificial Sequence
  Description of Artificial Sequence: Synthetic oligonucleotide
  Antisense strand to SEQ ID NO: 830340
cuaaguagggaacucagaa

SEQ ID NO: 830342 - RNA, 19 nt, Artificial Sequence
  Description of Artificial Sequence: Synthetic oligonucleotide
  Sense strand starting at position 3871 of SEQ ID NO: 587945
ugaguucccuacuuagaau

SEQ ID NO: 830343 - RNA, 19 nt, Artificial Sequence
  Description of Artificial Sequence: Synthetic oligonucleotide
  Antisense strand to SEQ ID NO: 830342
auucuaaguagggaacuca

SEQ ID NO: 830344 - RNA, 19 nt, Artificial Sequence
  Description of Artificial Sequence: Synthetic oligonucleotide
  Sense strand starting at position 3945 of SEQ ID NO: 587945
gucagaaccucagugucau

SEQ ID NO: 830345 - RNA, 19 nt, Artificial Sequence
  Description of Artificial Sequence: Synthetic oligonucleotide
  Antisense strand to SEQ ID NO: 830344
augacacugagguucugac

SEQ ID NO: 830346 - RNA, 19 nt, Artificial Sequence
  Description of Artificial Sequence: Synthetic oligonucleotide
  Sense strand starting at position 3946 of SEQ ID NO: 587945
ucagaaccucagugucauc

SEQ ID NO: 830347 - RNA, 19 nt, Artificial Sequence
  Description of Artificial Sequence: Synthetic oligonucleotide
  Antisense strand to SEQ ID NO: 830346
gaugacacugagguucuga

SEQ ID NO: 830348 - RNA, 19 nt, Artificial Sequence
  Description of Artificial Sequence: Synthetic oligonucleotide
  Sense strand starting at position 51 of SEQ ID NO: 587946
ucaagagauuugugcccuu

SEQ ID NO: 830349 - RNA, 19 nt, Artificial Sequence
  Description of Artificial Sequence: Synthetic oligonucleotide
  Antisense strand to SEQ ID NO: 830348
aagggcacaaaucucuuga

SEQ ID NO: 830350 - RNA, 19 nt, Artificial Sequence
  Description of Artificial Sequence: Synthetic oligonucleotide
  Sense strand starting at position 125 of SEQ ID NO: 587946
auccauaguuccuuguauu

SEQ ID NO: 830351 - RNA, 19 nt, Artificial Sequence
  Description of Artificial Sequence: Synthetic oligonucleotide
  Antisense strand to SEQ ID NO: 830350
aauacaaggaacuauggau

SEQ ID NO: 830352 - RNA, 19 nt, Artificial Sequence
  Description of Artificial Sequence: Synthetic oligonucleotide
  Sense strand starting at position 126 of SEQ ID NO: 587946
uccauaguuccuuguauua

SEQ ID NO: 830353 - RNA, 19 nt, Artificial Sequence
  Description of Artificial Sequence: Synthetic oligonucleotide
  Antisense strand to SEQ ID NO: 830352
uaauacaaggaacuaugga

SEQ ID NO: 830354 - RNA, 19 nt, Artificial Sequence
  Description of Artificial Sequence: Synthetic oligonucleotide
  Sense strand starting at position 181 of SEQ ID NO: 587946
uaccguguaaggugaacau

SEQ ID NO: 830355 - RNA, 19 nt, Artificial Sequence
  Description of Artificial Sequence: Synthetic oligonucleotide
  Antisense strand to SEQ ID NO: 830354
auguucaccuuacacggua

SEQ ID NO: 830356 - RNA, 19 nt, Artificial Sequence
  Description of Artificial Sequence: Synthetic oligonucleotide
  Sense strand starting at position 316 of SEQ ID NO: 587946
caguauguaaguggugaaa

SEQ ID NO: 830357 - RNA, 19 nt, Artificial Sequence
  Description of Artificial Sequence: Synthetic oligonucleotide
  Antisense strand to SEQ ID NO: 830356
uuucaccacuuacauacug

SEQ ID NO: 830358 - RNA, 19 nt, Artificial Sequence
  Description of Artificial Sequence: Synthetic oligonucleotide
  Sense strand starting at position 378 of SEQ ID NO: 587946
cugggcucuucccuacuaa

SEQ ID NO: 830359 - RNA, 19 nt, Artificial Sequence
  Description of Artificial Sequence: Synthetic oligonucleotide
  Antisense strand to SEQ ID NO: 830358
uuaguagggaagagcccag

SEQ ID NO: 830360 - RNA, 19 nt, Artificial Sequence
  Description of Artificial Sequence: Synthetic oligonucleotide
  Sense strand starting at position 379 of SEQ ID NO: 587946
ugggcucuucccuacuaaa

SEQ ID NO: 830361 - RNA, 19 nt, Artificial Sequence
  Description of Artificial Sequence: Synthetic oligonucleotide
  Antisense strand to SEQ ID NO: 830360
uuuaguagggaagagccca

SEQ ID NO: 830362 - RNA, 19 nt, Artificial Sequence
  Description of Artificial Sequence: Synthetic oligonucleotide
  Sense strand starting at position 420 of SEQ ID NO: 587946
ggcuauaacucuccuugau

SEQ ID NO: 830363 - RNA, 19 nt, Artificial Sequence
  Description of Artificial Sequence: Synthetic oligonucleotide
  Antisense strand to SEQ ID NO: 830362
aucaaggagaguuauagcc

SEQ ID NO: 830364 - RNA, 19 nt, Artificial Sequence
  Description of Artificial Sequence: Synthetic oligonucleotide
  Sense strand starting at position 494 of SEQ ID NO: 587946
uacacaggcuucuagaagu

SEQ ID NO: 830365 - RNA, 19 nt, Artificial Sequence
  Description of Artificial Sequence: Synthetic oligonucleotide
  Antisense strand to SEQ ID NO: 830364
acuucuagaagccugugua

SEQ ID NO: 830366 - RNA, 19 nt, Artificial Sequence
  Description of Artificial Sequence: Synthetic oligonucleotide
  Sense strand starting at position 578 of SEQ ID NO: 587946
gucauagaauggcaguaau

SEQ ID NO: 830367 - RNA, 19 nt, Artificial Sequence
  Description of Artificial Sequence: Synthetic oligonucleotide
  Antisense strand to SEQ ID NO: 830366
auuacugccauucuaugac

SEQ ID NO: 830368 - RNA, 19 nt, Artificial Sequence
  Description of Artificial Sequence: Synthetic oligonucleotide
  Sense strand starting at position 1301 of SEQ ID NO: 587946
ucgaaauuauaagcuagaa

SEQ ID NO: 830369 - RNA, 19 nt, Artificial Sequence
  Description of Artificial Sequence: Synthetic oligonucleotide
  Antisense strand to SEQ ID NO: 830368
uucuagcuuauaauuucga

SEQ ID NO: 830370 - RNA, 19 nt, Artificial Sequence
  Description of Artificial Sequence: Synthetic oligonucleotide
  Sense strand starting at position 1374 of SEQ ID NO: 587946
cuguguuuguaggucacaa

SEQ ID NO: 830371 - RNA, 19 nt, Artificial Sequence
  Description of Artificial Sequence: Synthetic oligonucleotide
  Antisense strand to SEQ ID NO: 830370
uugugaccuacaaacacag

SEQ ID NO: 830372 - RNA, 19 nt, Artificial Sequence
  Description of Artificial Sequence: Synthetic oligonucleotide
  Sense strand starting at position 1376 of SEQ ID NO: 587946
guguuuguaggucacaaca

SEQ ID NO: 830373 - RNA, 19 nt, Artificial Sequence
  Description of Artificial Sequence: Synthetic oligonucleotide
  Antisense strand to SEQ ID NO: 830372
uguugugaccuacaaacac

SEQ ID NO: 830374 - RNA, 19 nt, Artificial Sequence
  Description of Artificial Sequence: Synthetic oligonucleotide
  Sense strand starting at position 1437 of SEQ ID NO: 587946
aguguaguucuaggcuaua

SEQ ID NO: 830375 - RNA, 19 nt, Artificial Sequence
  Description of Artificial Sequence: Synthetic oligonucleotide
  Antisense strand to SEQ ID NO: 830374
uauagccuagaacuacacu

SEQ ID NO: 830376 - RNA, 19 nt, Artificial Sequence
  Description of Artificial Sequence: Synthetic oligonucleotide
  Sense strand starting at position 1528 of SEQ ID NO: 587946
gguacuguaccugagcaga

SEQ ID NO: 830377 - RNA, 19 nt, Artificial Sequence
  Description of Artificial Sequence: Synthetic oligonucleotide
  Antisense strand to SEQ ID NO: 830376
ucugcucagguacaguacc

SEQ ID NO: 830378 - RNA, 19 nt, Artificial Sequence
  Description of Artificial Sequence: Synthetic oligonucleotide
  Sense strand starting at position 1603 of SEQ ID NO: 587946
cugcucucuuccucagaga

SEQ ID NO: 830379 - RNA, 19 nt, Artificial Sequence
  Description of Artificial Sequence: Synthetic oligonucleotide
  Antisense strand to SEQ ID NO: 830378
ucucugaggaagagagcag

SEQ ID NO: 830380 - RNA, 19 nt, Artificial Sequence
  Description of Artificial Sequence: Synthetic oligonucleotide
  Sense strand starting at position 1690 of SEQ ID NO: 587946
ggaauucggcuucgagaaa

SEQ ID NO: 830381 - RNA, 19 nt, Artificial Sequence
  Description of Artificial Sequence: Synthetic oligonucleotide
  Antisense strand to SEQ ID NO: 830380
uuucucgaagccgaauucc

SEQ ID NO: 830382 - RNA, 19 nt, Artificial Sequence
  Description of Artificial Sequence: Synthetic oligonucleotide
  Sense strand starting at position 1702 of SEQ ID NO: 587946
cgagaaaucuccuugucau

SEQ ID NO: 830383 - RNA, 19 nt, Artificial Sequence
  Description of Artificial Sequence: Synthetic oligonucleotide
  Antisense strand to SEQ ID NO: 830382
augacaaggagauuucucg

SEQ ID NO: 830384 - RNA, 19 nt, Artificial Sequence
  Description of Artificial Sequence: Synthetic oligonucleotide
  Sense strand starting at position 1703 of SEQ ID NO: 587946
gagaaaucuccuugucaug

SEQ ID NO: 830385 - RNA, 19 nt, Artificial Sequence
  Description of Artificial Sequence: Synthetic oligonucleotide
  Antisense strand to SEQ ID NO: 830384
caugacaaggagauuucuc

SEQ ID NO: 830386 - RNA, 19 nt, Artificial Sequence
  Description of Artificial Sequence: Synthetic oligonucleotide
  Sense strand starting at position 1779 of SEQ ID NO: 587946
acgcguuucccucucuuaa

SEQ ID NO: 830387 - RNA, 19 nt, Artificial Sequence
  Description of Artificial Sequence: Synthetic oligonucleotide
  Antisense strand to SEQ ID NO: 830386
uuaagagagggaaacgcgu

SEQ ID NO: 830388 - RNA, 19 nt, Artificial Sequence
  Description of Artificial Sequence: Synthetic oligonucleotide
  Sense strand starting at position 1780 of SEQ ID NO: 587946
cgcguuucccucucuuaac

SEQ ID NO: 830389 - RNA, 19 nt, Artificial Sequence
  Description of Artificial Sequence: Synthetic oligonucleotide
  Antisense strand to SEQ ID NO: 830388
guuaagagagggaaacgcg

SEQ ID NO: 830390 - RNA, 19 nt, Artificial Sequence
  Description of Artificial Sequence: Synthetic oligonucleotide
  Sense strand starting at position 1781 of SEQ ID NO: 587946
gcguuucccucucuuaacu

SEQ ID NO: 830391 - RNA, 19 nt, Artificial Sequence
  Description of Artificial Sequence: Synthetic oligonucleotide
  Antisense strand to SEQ ID NO: 830390
aguuaagagagggaaacgc

SEQ ID NO: 830392 - RNA, 19 nt, Artificial Sequence
  Description of Artificial Sequence: Synthetic oligonucleotide
  Sense strand starting at position 1839 of SEQ ID NO: 587946
auuucugaguauugagucu

SEQ ID NO: 830393 - RNA, 19 nt, Artificial Sequence
  Description of Artificial Sequence: Synthetic oligonucleotide
  Antisense strand to SEQ ID NO: 830392
agacucaauacucagaaau

SEQ ID NO: 830394 - RNA, 19 nt, Artificial Sequence
  Description of Artificial Sequence: Synthetic oligonucleotide
  Sense strand starting at position 1877 of SEQ ID NO: 587946
aucucaguugcugaaauga

SEQ ID NO: 830395 - RNA, 19 nt, Artificial Sequence
  Description of Artificial Sequence: Synthetic oligonucleotide
  Antisense strand to SEQ ID NO: 830394
ucauuucagcaacugagau

SEQ ID NO: 830396 - RNA, 19 nt, Artificial Sequence
  Description of Artificial Sequence: Synthetic oligonucleotide
  Sense strand starting at position 2155 of SEQ ID NO: 587946
cuaaauuagcugugacagu

SEQ ID NO: 830397 - RNA, 19 nt, Artificial Sequence
  Description of Artificial Sequence: Synthetic oligonucleotide
  Antisense strand to SEQ ID NO: 830396
acugucacagcuaauuuag

SEQ ID NO: 830398 - RNA, 19 nt, Artificial Sequence
  Description of Artificial Sequence: Synthetic oligonucleotide
  Sense strand starting at position 2166 of SEQ ID NO: 587946
gugacagucugacuuguuu

SEQ ID NO: 830399 - RNA, 19 nt, Artificial Sequence
  Description of Artificial Sequence: Synthetic oligonucleotide
  Antisense strand to SEQ ID NO: 830398
aaacaagucagacugucac

SEQ ID NO: 830400 - RNA, 19 nt, Artificial Sequence
  Description of Artificial Sequence: Synthetic oligonucleotide
  Sense strand starting at position 2221 of SEQ ID NO: 587946
acaguuauuuccugauagc

SEQ ID NO: 830401 - RNA, 19 nt, Artificial Sequence
  Description of Artificial Sequence: Synthetic oligonucleotide
  Antisense strand to SEQ ID NO: 830400
gcuaucaggaaauaacugu

SEQ ID NO: 830402 - RNA, 19 nt, Artificial Sequence
  Description of Artificial Sequence: Synthetic oligonucleotide
  Sense strand starting at position 2224 of SEQ ID NO: 587946
guuauuuccugauagcuca

SEQ ID NO: 830403 - RNA, 19 nt, Artificial Sequence
  Description of Artificial Sequence: Synthetic oligonucleotide
  Antisense strand to SEQ ID NO: 830402
ugagcuaucaggaaauaac

SEQ ID NO: 830404 - RNA, 19 nt, Artificial Sequence
  Description of Artificial Sequence: Synthetic oligonucleotide
  Sense strand starting at position 2274 of SEQ ID NO: 587946
uggacaggaucuuaauuau

SEQ ID NO: 830405 - RNA, 19 nt, Artificial Sequence
  Description of Artificial Sequence: Synthetic oligonucleotide
  Antisense strand to SEQ ID NO: 830404
auaauuaagauccugucca

SEQ ID NO: 830406 - RNA, 19 nt, Artificial Sequence
  Description of Artificial Sequence: Synthetic oligonucleotide
  Sense strand starting at position 2280 of SEQ ID NO: 587946
ggaucuuaauuauucguua

SEQ ID NO: 830407 - RNA, 19 nt, Artificial Sequence
  Description of Artificial Sequence: Synthetic oligonucleotide
  Antisense strand to SEQ ID NO: 830406
uaacgaauaauuaagaucc

SEQ ID NO: 830408 - RNA, 19 nt, Artificial Sequence
  Description of Artificial Sequence: Synthetic oligonucleotide
  Sense strand starting at position 2291 of SEQ ID NO: 587946
auucguuaauauccuggua

SEQ ID NO: 830409 - RNA, 19 nt, Artificial Sequence
  Description of Artificial Sequence: Synthetic oligonucleotide
  Antisense strand to SEQ ID NO: 830408
uaccaggauauuaacgaau

SEQ ID NO: 830410 - RNA, 19 nt, Artificial Sequence
  Description of Artificial Sequence: Synthetic oligonucleotide
  Sense strand starting at position 2294 of SEQ ID NO: 587946
cguuaauauccugguacac

SEQ ID NO: 830411 - RNA, 19 nt, Artificial Sequence
  Description of Artificial Sequence: Synthetic oligonucleotide
  Antisense strand to SEQ ID NO: 830410
guguaccaggauauuaacg

SEQ ID NO: 830412 - RNA, 19 nt, Artificial Sequence
  Description of Artificial Sequence: Synthetic oligonucleotide
  Sense strand starting at position 2357 of SEQ ID NO: 587946
ggaagauggcuccaccuuu

SEQ ID NO: 830413 - RNA, 19 nt, Artificial Sequence
  Description of Artificial Sequence: Synthetic oligonucleotide
  Antisense strand to SEQ ID NO: 830412
aaagguggagccaucuucc

SEQ ID NO: 830414 - RNA, 19 nt, Artificial Sequence
  Description of Artificial Sequence: Synthetic oligonucleotide
  Sense strand starting at position 2407 of SEQ ID NO: 587946
ggacauccauaagaagaga

SEQ ID NO: 830415 - RNA, 19 nt, Artificial Sequence
  Description of Artificial Sequence: Synthetic oligonucleotide
  Antisense strand to SEQ ID NO: 830414
ucucuucuuauggaugucc

SEQ ID NO: 830416 - RNA, 19 nt, Artificial Sequence
  Description of Artificial Sequence: Synthetic oligonucleotide
  Sense strand starting at position 2632 of SEQ ID NO: 587946
gguagagaugcuuaggcaa

SEQ ID NO: 830417 - RNA, 19 nt, Artificial Sequence
  Description of Artificial Sequence: Synthetic oligonucleotide
  Antisense strand to SEQ ID NO: 830416
uugccuaagcaucucuacc

SEQ ID NO: 830418 - RNA, 19 nt, Artificial Sequence
  Description of Artificial Sequence: Synthetic oligonucleotide
  Sense strand starting at position 2665 of SEQ ID NO: 587946
ccagaaguagaacgaaauu

SEQ ID NO: 830419 - RNA, 19 nt, Artificial Sequence
  Description of Artificial Sequence: Synthetic oligonucleotide
  Antisense strand to SEQ ID NO: 830418
aauuucguucuacuucugg

SEQ ID NO: 830420 - RNA, 19 nt, Artificial Sequence
  Description of Artificial Sequence: Synthetic oligonucleotide
  Sense strand starting at position 2795 of SEQ ID NO: 587946
gacucuuuggcuuagguaa

SEQ ID NO: 830421 - RNA, 19 nt, Artificial Sequence
  Description of Artificial Sequence: Synthetic oligonucleotide
  Antisense strand to SEQ ID NO: 830420
uuaccuaagccaaagaguc

SEQ ID NO: 830422 - RNA, 19 nt, Artificial Sequence
  Description of Artificial Sequence: Synthetic oligonucleotide
  Sense strand starting at position 2909 of SEQ ID NO: 587946
gcauaaauugaaggguaaa

SEQ ID NO: 830423 - RNA, 19 nt, Artificial Sequence
  Description of Artificial Sequence: Synthetic oligonucleotide
  Antisense strand to SEQ ID NO: 830422
uuuacccuucaauuuaugc

SEQ ID NO: 830424 - RNA, 19 nt, Artificial Sequence
  Description of Artificial Sequence: Synthetic oligonucleotide
  Sense strand starting at position 2999 of SEQ ID NO: 587946
cucggauucgcccugcaca

SEQ ID NO: 830425 - RNA, 19 nt, Artificial Sequence
  Description of Artificial Sequence: Synthetic oligonucleotide
  Antisense strand to SEQ ID NO: 830424
ugugcagggcgaauccgag

SEQ ID NO: 830426 - RNA, 19 nt, Artificial Sequence
  Description of Artificial Sequence: Synthetic oligonucleotide
  Sense strand starting at position 3000 of SEQ ID NO: 587946
ucggauucgcccugcacau

SEQ ID NO: 830427 - RNA, 19 nt, Artificial Sequence
  Description of Artificial Sequence: Synthetic oligonucleotide
  Antisense strand to SEQ ID NO: 830426
augugcagggcgaauccga

SEQ ID NO: 830428 - RNA, 19 nt, Artificial Sequence
  Description of Artificial Sequence: Synthetic oligonucleotide
  Sense strand starting at position 7 of SEQ ID NO: 587947
agucaagucuuaccuguaa

SEQ ID NO: 830429 - RNA, 19 nt, Artificial Sequence
  Description of Artificial Sequence: Synthetic oligonucleotide
  Antisense strand to SEQ ID NO: 830428
uuacagguaagacuugacu

SEQ ID NO: 830430 - RNA, 19 nt, Artificial Sequence
  Description of Artificial Sequence: Synthetic oligonucleotide
  Sense strand starting at position 55 of SEQ ID NO: 587947
agcaacuuagccugaggaa

SEQ ID NO: 830431 - RNA, 19 nt, Artificial Sequence
  Description of Artificial Sequence: Synthetic oligonucleotide
  Antisense strand to SEQ ID NO: 830430
uuccucaggcuaaguugcu

SEQ ID NO: 830432 - RNA, 19 nt, Artificial Sequence
  Description of Artificial Sequence: Synthetic oligonucleotide
  Sense strand starting at position 67 of SEQ ID NO: 587947
ugaggaauuugugaaguca

SEQ ID NO: 830433 - RNA, 19 nt, Artificial Sequence
  Description of Artificial Sequence: Synthetic oligonucleotide
  Antisense strand to SEQ ID NO: 830432
ugacuucacaaauuccuca

SEQ ID NO: 830434 - RNA, 19 nt, Artificial Sequence
  Description of Artificial Sequence: Synthetic oligonucleotide
  Sense strand starting at position 759 of SEQ ID NO: 587947
aggucauccuucccucaga

SEQ ID NO: 830435 - RNA, 19 nt, Artificial Sequence
  Description of Artificial Sequence: Synthetic oligonucleotide
  Antisense strand to SEQ ID NO: 830434
ucugagggaaggaugaccu

SEQ ID NO: 830436 - RNA, 19 nt, Artificial Sequence
  Description of Artificial Sequence: Synthetic oligonucleotide
  Sense strand starting at position 1130 of SEQ ID NO: 587947
uggguuagaucagugacgu

SEQ ID NO: 830437 - RNA, 19 nt, Artificial Sequence
  Description of Artificial Sequence: Synthetic oligonucleotide
  Antisense strand to SEQ ID NO: 830436
acgucacugaucuaaccca

SEQ ID NO: 830438 - RNA, 19 nt, Artificial Sequence
  Description of Artificial Sequence: Synthetic oligonucleotide
  Sense strand starting at position 1398 of SEQ ID NO: 587947
gagggagucgcagauggau

SEQ ID NO: 830439 - RNA, 19 nt, Artificial Sequence
  Description of Artificial Sequence: Synthetic oligonucleotide
  Antisense strand to SEQ ID NO: 830438
auccaucugcgacucccuc

SEQ ID NO: 830440 - RNA, 19 nt, Artificial Sequence
  Description of Artificial Sequence: Synthetic oligonucleotide
  Sense strand starting at position 1452 of SEQ ID NO: 587947
guguacuugccugaaacuc

SEQ ID NO: 830441 - RNA, 19 nt, Artificial Sequence
  Description of Artificial Sequence: Synthetic oligonucleotide
  Antisense strand to SEQ ID NO: 830440
gaguuucaggcaaguacac

SEQ ID NO: 830442 - RNA, 19 nt, Artificial Sequence
  Description of Artificial Sequence: Synthetic oligonucleotide
  Sense strand starting at position 2330 of SEQ ID NO: 587947
gugauauuggacugcacac

SEQ ID NO: 830443 - RNA, 19 nt, Artificial Sequence
  Description of Artificial Sequence: Synthetic oligonucleotide
  Antisense strand to SEQ ID NO: 830442
gugugcaguccaauaucac

SEQ ID NO: 830444 - RNA, 19 nt, Artificial Sequence
  Description of Artificial Sequence: Synthetic oligonucleotide
  Sense strand starting at position 2600 of SEQ ID NO: 587947
gguacuaaauucccuguga

SEQ ID NO: 830445 - RNA, 19 nt, Artificial Sequence
  Description of Artificial Sequence: Synthetic oligonucleotide
  Antisense strand to SEQ ID NO: 830444
ucacagggaauuuaguacc

SEQ ID NO: 830446 - RNA, 19 nt, Artificial Sequence
  Description of Artificial Sequence: Synthetic oligonucleotide
  Sense strand starting at position 2601 of SEQ ID NO: 587947
guacuaaauucccugugag

SEQ ID NO: 830447 - RNA, 19 nt, Artificial Sequence
  Description of Artificial Sequence: Synthetic oligonucleotide
  Antisense strand to SEQ ID NO: 830446
cucacagggaauuuaguac

SEQ ID NO: 830448 - RNA, 19 nt, Artificial Sequence
  Description of Artificial Sequence: Synthetic oligonucleotide
  Sense strand starting at position 2604 of SEQ ID NO: 587947
cuaaauucccugugagauu

SEQ ID NO: 830449 - RNA, 19 nt, Artificial Sequence
  Description of Artificial Sequence: Synthetic oligonucleotide
  Antisense strand to SEQ ID NO: 830448
aaucucacagggaauuuag

SEQ ID NO: 830450 - RNA, 19 nt, Artificial Sequence
  Description of Artificial Sequence: Synthetic oligonucleotide
  Sense strand starting at position 2873 of SEQ ID NO: 587947
uggcgacaucuuuagguuu

SEQ ID NO: 830451 - RNA, 19 nt, Artificial Sequence
  Description of Artificial Sequence: Synthetic oligonucleotide
  Antisense strand to SEQ ID NO: 830450
aaaccuaaagaugucgcca

SEQ ID NO: 830452 - RNA, 19 nt, Artificial Sequence
  Description of Artificial Sequence: Synthetic oligonucleotide
  Sense strand starting at position 2876 of SEQ ID NO: 587947
cgacaucuuuagguuugaa

SEQ ID NO: 830453 - RNA, 19 nt, Artificial Sequence
  Description of Artificial Sequence: Synthetic oligonucleotide
  Antisense strand to SEQ ID NO: 830452
uucaaaccuaaagaugucg

SEQ ID NO: 830454 - RNA, 19 nt, Artificial Sequence
  Description of Artificial Sequence: Synthetic oligonucleotide
  Sense strand starting at position 2888 of SEQ ID NO: 587947
guuugaaggcaaugggaaa

SEQ ID NO: 830455 - RNA, 19 nt, Artificial Sequence
  Description of Artificial Sequence: Synthetic oligonucleotide
  Antisense strand to SEQ ID NO: 830454
uuucccauugccuucaaac

SEQ ID NO: 830456 - RNA, 19 nt, Artificial Sequence
  Description of Artificial Sequence: Synthetic oligonucleotide
  Sense strand starting at position 2899 of SEQ ID NO: 587947
augggaaauagcugauguu

SEQ ID NO: 830457 - RNA, 19 nt, Artificial Sequence
  Description of Artificial Sequence: Synthetic oligonucleotide
  Antisense strand to SEQ ID NO: 830456
aacaucagcuauuucccau

SEQ ID NO: 830458 - RNA, 19 nt, Artificial Sequence
  Description of Artificial Sequence: Synthetic oligonucleotide
  Sense strand starting at position 2945 of SEQ ID NO: 587947
uagggauuguuccucucaa

SEQ ID NO: 830459 - RNA, 19 nt, Artificial Sequence
  Description of Artificial Sequence: Synthetic oligonucleotide
  Antisense strand to SEQ ID NO: 830458
uugagaggaacaaucccua

SEQ ID NO: 830460 - RNA, 19 nt, Artificial Sequence
  Description of Artificial Sequence: Synthetic oligonucleotide
  Sense strand starting at position 2946 of SEQ ID NO: 587947
agggauuguuccucucaaa

SEQ ID NO: 830461 - RNA, 19 nt, Artificial Sequence
  Description of Artificial Sequence: Synthetic oligonucleotide
  Antisense strand to SEQ ID NO: 830460
uuugagaggaacaaucccu

SEQ ID NO: 830462 - RNA, 19 nt, Artificial Sequence
  Description of Artificial Sequence: Synthetic oligonucleotide
  Sense strand starting at position 2986 of SEQ ID NO: 587947
aagugaaucgauugccuca

SEQ ID NO: 830463 - RNA, 19 nt, Artificial Sequence
  Description of Artificial Sequence: Synthetic oligonucleotide
  Antisense strand to SEQ ID NO: 830462
ugaggcaaucgauucacuu

SEQ ID NO: 830464 - RNA, 19 nt, Artificial Sequence
  Description of Artificial Sequence: Synthetic oligonucleotide
  Sense strand starting at position 2988 of SEQ ID NO: 587947
gugaaucgauugccucaaa

SEQ ID NO: 830465 - RNA, 19 nt, Artificial Sequence
  Description of Artificial Sequence: Synthetic oligonucleotide
  Antisense strand to SEQ ID NO: 830464
uuugaggcaaucgauucac

SEQ ID NO: 830466 - RNA, 19 nt, Artificial Sequence
  Description of Artificial Sequence: Synthetic oligonucleotide
  Sense strand starting at position 3019 of SEQ ID NO: 587947
ugaucuccuugccuggaua

SEQ ID NO: 830467 - RNA, 19 nt, Artificial Sequence
  Description of Artificial Sequence: Synthetic oligonucleotide
  Antisense strand to SEQ ID NO: 830466
uauccaggcaaggagauca

SEQ ID NO: 830468 - RNA, 19 nt, Artificial Sequence
  Description of Artificial Sequence: Synthetic oligonucleotide
  Sense strand starting at position 3032 of SEQ ID NO: 587947
uggauaagguguuccaggu

SEQ ID NO: 830469 - RNA, 19 nt, Artificial Sequence
  Description of Artificial Sequence: Synthetic oligonucleotide
  Antisense strand to SEQ ID NO: 830468
accuggaacaccuuaucca

SEQ ID NO: 830470 - RNA, 19 nt, Artificial Sequence
  Description of Artificial Sequence: Synthetic oligonucleotide
  Sense strand starting at position 3121 of SEQ ID NO: 587947
aaaugugcacguugaaacu

SEQ ID NO: 830471 - RNA, 19 nt, Artificial Sequence
  Description of Artificial Sequence: Synthetic oligonucleotide
  Antisense strand to SEQ ID NO: 830470
aguuucaacgugcacauuu

SEQ ID NO: 830472 - RNA, 19 nt, Artificial Sequence
  Description of Artificial Sequence: Synthetic oligonucleotide
  Sense strand starting at position 3339 of SEQ ID NO: 587947
ccuggcuucuucccagaaa

SEQ ID NO: 830473 - RNA, 19 nt, Artificial Sequence
  Description of Artificial Sequence: Synthetic oligonucleotide
  Antisense strand to SEQ ID NO: 830472
uuucugggaagaagccagg

SEQ ID NO: 830474 - RNA, 19 nt, Artificial Sequence
  Description of Artificial Sequence: Synthetic oligonucleotide
  Sense strand starting at position 3342 of SEQ ID NO: 587947
ggcuucuucccagaaauaa

SEQ ID NO: 830475 - RNA, 19 nt, Artificial Sequence
  Description of Artificial Sequence: Synthetic oligonucleotide
  Antisense strand to SEQ ID NO: 830474
uuauuucugggaagaagcc

SEQ ID NO: 830476 - RNA, 19 nt, Artificial Sequence
  Description of Artificial Sequence: Synthetic oligonucleotide
  Sense strand starting at position 3357 of SEQ ID NO: 587947
auaaauugucaugaguguu

SEQ ID NO: 830477 - RNA, 19 nt, Artificial Sequence
  Description of Artificial Sequence: Synthetic oligonucleotide
  Antisense strand to SEQ ID NO: 830476
aacacucaugacaauuuau

SEQ ID NO: 830478 - RNA, 19 nt, Artificial Sequence
  Description of Artificial Sequence: Synthetic oligonucleotide
  Sense strand starting at position 3360 of SEQ ID NO: 587947
aauugucaugaguguucua

SEQ ID NO: 830479 - RNA, 19 nt, Artificial Sequence
  Description of Artificial Sequence: Synthetic oligonucleotide
  Antisense strand to SEQ ID NO: 830478
uagaacacucaugacaauu

SEQ ID NO: 830480 - RNA, 19 nt, Artificial Sequence
  Description of Artificial Sequence: Synthetic oligonucleotide
  Sense strand starting at position 3369 of SEQ ID NO: 587947
gaguguucuagcgacuaua

SEQ ID NO: 830481 - RNA, 19 nt, Artificial Sequence
  Description of Artificial Sequence: Synthetic oligonucleotide
  Antisense strand to SEQ ID NO: 830480
uauagucgcuagaacacuc

SEQ ID NO: 830482 - RNA, 19 nt, Artificial Sequence
  Description of Artificial Sequence: Synthetic oligonucleotide
  Sense strand starting at position 3372 of SEQ ID NO: 587947
uguucuagcgacuauaaag

SEQ ID NO: 830483 - RNA, 19 nt, Artificial Sequence
  Description of Artificial Sequence: Synthetic oligonucleotide
  Antisense strand to SEQ ID NO: 830482
cuuuauagucgcuagaaca

SEQ ID NO: 830484 - RNA, 19 nt, Artificial Sequence
  Description of Artificial Sequence: Synthetic oligonucleotide
  Sense strand starting at position 3402 of SEQ ID NO: 587947
gcaggagguccaugugaaa

SEQ ID NO: 830485 - RNA, 19 nt, Artificial Sequence
  Description of Artificial Sequence: Synthetic oligonucleotide
  Antisense strand to SEQ ID NO: 830484
uuucacauggaccuccugc

SEQ ID NO: 830486 - RNA, 19 nt, Artificial Sequence
  Description of Artificial Sequence: Synthetic oligonucleotide
  Sense strand starting at position 3453 of SEQ ID NO: 587947
uuagguuuaugcuuaccca

SEQ ID NO: 830487 - RNA, 19 nt, Artificial Sequence
  Description of Artificial Sequence: Synthetic oligonucleotide
  Antisense strand to SEQ ID NO: 830486
uggguaagcauaaaccuaa

SEQ ID NO: 830488 - RNA, 19 nt, Artificial Sequence
  Description of Artificial Sequence: Synthetic oligonucleotide
  Sense strand starting at position 3518 of SEQ ID NO: 587947
aggguucuguuucugggaa

SEQ ID NO: 830489 - RNA, 19 nt, Artificial Sequence
  Description of Artificial Sequence: Synthetic oligonucleotide
  Antisense strand to SEQ ID NO: 830488
uucccagaaacagaacccu

SEQ ID NO: 830490 - RNA, 19 nt, Artificial Sequence
  Description of Artificial Sequence: Synthetic oligonucleotide
  Sense strand starting at position 3582 of SEQ ID NO: 587947
guucuuccuccugaauagu

SEQ ID NO: 830491 - RNA, 19 nt, Artificial Sequence
  Description of Artificial Sequence: Synthetic oligonucleotide
  Antisense strand to SEQ ID NO: 830490
acuauucaggaggaagaac

SEQ ID NO: 830492 - RNA, 19 nt, Artificial Sequence
  Description of Artificial Sequence: Synthetic oligonucleotide
  Sense strand starting at position 3627 of SEQ ID NO: 587947
cccuguggugacugacaua

SEQ ID NO: 830493 - RNA, 19 nt, Artificial Sequence
  Description of Artificial Sequence: Synthetic oligonucleotide
  Antisense strand to SEQ ID NO: 830492
uaugucagucaccacaggg

SEQ ID NO: 830494 - RNA, 19 nt, Artificial Sequence
  Description of Artificial Sequence: Synthetic oligonucleotide
  Sense strand starting at position 3821 of SEQ ID NO: 587947
uagagaacucguugucaau

SEQ ID NO: 830495 - RNA, 19 nt, Artificial Sequence
  Description of Artificial Sequence: Synthetic oligonucleotide
  Antisense strand to SEQ ID NO: 830494
auugacaacgaguucucua

SEQ ID NO: 830496 - RNA, 19 nt, Artificial Sequence
  Description of Artificial Sequence: Synthetic oligonucleotide
  Sense strand starting at position 3823 of SEQ ID NO: 587947
gagaacucguugucaaucu

SEQ ID NO: 830497 - RNA, 19 nt, Artificial Sequence
  Description of Artificial Sequence: Synthetic oligonucleotide
  Antisense strand to SEQ ID NO: 830496
agauugacaacgaguucuc

SEQ ID NO: 830498 - RNA, 19 nt, Artificial Sequence
  Description of Artificial Sequence: Synthetic oligonucleotide
  Sense strand starting at position 3831 of SEQ ID NO: 587947
guugucaaucuuuaauaug

SEQ ID NO: 830499 - RNA, 19 nt, Artificial Sequence
  Description of Artificial Sequence: Synthetic oligonucleotide
  Antisense strand to SEQ ID NO: 830498
cauauuaaagauugacaac

SEQ ID NO: 830500 - RNA, 19 nt, Artificial Sequence
  Description of Artificial Sequence: Synthetic oligonucleotide
  Sense strand starting at position 3891 of SEQ ID NO: 587947
gccagcagagucuggaaau

SEQ ID NO: 830501 - RNA, 19 nt, Artificial Sequence
  Description of Artificial Sequence: Synthetic oligonucleotide
  Antisense strand to SEQ ID NO: 830500
auuuccagacucugcuggc

SEQ ID NO: 830502 - RNA, 19 nt, Artificial Sequence
  Description of Artificial Sequence: Synthetic oligonucleotide
  Sense strand starting at position 3938 of SEQ ID NO: 587947
cuguuaucacaggguaaau

SEQ ID NO: 830503 - RNA, 19 nt, Artificial Sequence
  Description of Artificial Sequence: Synthetic oligonucleotide
  Antisense strand to SEQ ID NO: 830502
auuuacccugugauaacag

SEQ ID NO: 830504 - RNA, 19 nt, Artificial Sequence
  Description of Artificial Sequence: Synthetic oligonucleotide
  Sense strand starting at position 3948 of SEQ ID NO: 587947
aggguaaauuugggaaaca

SEQ ID NO: 830505 - RNA, 19 nt, Artificial Sequence
  Description of Artificial Sequence: Synthetic oligonucleotide
  Antisense strand to SEQ ID NO: 830504
uguuucccaaauuuacccu

SEQ ID NO: 830506 - RNA, 19 nt, Artificial Sequence
  Description of Artificial Sequence: Synthetic oligonucleotide
  Sense strand starting at position 3949 of SEQ ID NO: 587947
ggguaaauuugggaaacag

SEQ ID NO: 830507 - RNA, 19 nt, Artificial Sequence
  Description of Artificial Sequence: Synthetic oligonucleotide
  Antisense strand to SEQ ID NO: 830506
cuguuucccaaauuuaccc

SEQ ID NO: 830508 - RNA, 19 nt, Artificial Sequence
  Description of Artificial Sequence: Synthetic oligonucleotide
  Sense strand starting at position 26 of SEQ ID NO: 587948
agaaaucccuccgucaauc

SEQ ID NO: 830509 - RNA, 19 nt, Artificial Sequence
  Description of Artificial Sequence: Synthetic oligonucleotide
  Antisense strand to SEQ ID NO: 830508
gauugacggagggauuucu

SEQ ID NO: 830510 - RNA, 19 nt, Artificial Sequence
  Description of Artificial Sequence: Synthetic oligonucleotide
  Sense strand starting at position 172 of SEQ ID NO: 587948
uggagcuacuuuguuggaa

SEQ ID NO: 830511 - RNA, 19 nt, Artificial Sequence
  Description of Artificial Sequence: Synthetic oligonucleotide
  Antisense strand to SEQ ID NO: 830510
uuccaacaaaguagcucca

SEQ ID NO: 830512 - RNA, 19 nt, Artificial Sequence
  Description of Artificial Sequence: Synthetic oligonucleotide
  Sense strand starting at position 265 of SEQ ID NO: 587948
gagcaaggauguccuuaga

SEQ ID NO: 830513 - RNA, 19 nt, Artificial Sequence
  Description of Artificial Sequence: Synthetic oligonucleotide
  Antisense strand to SEQ ID NO: 830512
ucuaaggacauccuugcuc

SEQ ID NO: 830514 - RNA, 19 nt, Artificial Sequence
  Description of Artificial Sequence: Synthetic oligonucleotide
  Sense strand starting at position 333 of SEQ ID NO: 587948
cucgguugcccagacuaaa

SEQ ID NO: 830515 - RNA, 19 nt, Artificial Sequence
  Description of Artificial Sequence: Synthetic oligonucleotide
  Antisense strand to SEQ ID NO: 830514
uuuagucugggcaaccgag

SEQ ID NO: 830516 - RNA, 19 nt, Artificial Sequence
  Description of Artificial Sequence: Synthetic oligonucleotide
  Sense strand starting at position 669 of SEQ ID NO: 587948
ccagcugaguacuccuuau

SEQ ID NO: 830517 - RNA, 19 nt, Artificial Sequence
  Description of Artificial Sequence: Synthetic oligonucleotide
  Antisense strand to SEQ ID NO: 830516
auaaggaguacucagcugg

SEQ ID NO: 830518 - RNA, 19 nt, Artificial Sequence
  Description of Artificial Sequence: Synthetic oligonucleotide
  Sense strand starting at position 673 of SEQ ID NO: 587948
cugaguacuccuuaugcag

SEQ ID NO: 830519 - RNA, 19 nt, Artificial Sequence
  Description of Artificial Sequence: Synthetic oligonucleotide
  Antisense strand to SEQ ID NO: 830518
cugcauaaggaguacucag

SEQ ID NO: 830520 - RNA, 19 nt, Artificial Sequence
  Description of Artificial Sequence: Synthetic oligonucleotide
  Sense strand starting at position 698 of SEQ ID NO: 587948
ugcugaguucucugagcag

SEQ ID NO: 830521 - RNA, 19 nt, Artificial Sequence
  Description of Artificial Sequence: Synthetic oligonucleotide
  Antisense strand to SEQ ID NO: 830520
cugcucagagaacucagca

SEQ ID NO: 830522 - RNA, 19 nt, Artificial Sequence
  Description of Artificial Sequence: Synthetic oligonucleotide
  Sense strand starting at position 858 of SEQ ID NO: 587948
cugaguucuguccauaaac

SEQ ID NO: 830523 - RNA, 19 nt, Artificial Sequence
  Description of Artificial Sequence: Synthetic oligonucleotide
  Antisense strand to SEQ ID NO: 830522
guuuauggacagaacucag

SEQ ID NO: 830524 - RNA, 19 nt, Artificial Sequence
  Description of Artificial Sequence: Synthetic oligonucleotide
  Sense strand starting at position 936 of SEQ ID NO: 587948
gaaacaacucaagguaguu

SEQ ID NO: 830525 - RNA, 19 nt, Artificial Sequence
  Description of Artificial Sequence: Synthetic oligonucleotide
  Antisense strand to SEQ ID NO: 830524
aacuaccuugaguuguuuc

SEQ ID NO: 830526 - RNA, 19 nt, Artificial Sequence
  Description of Artificial Sequence: Synthetic oligonucleotide
  Sense strand starting at position 948 of SEQ ID NO: 587948
gguaguugucccuauggca

SEQ ID NO: 830527 - RNA, 19 nt, Artificial Sequence
  Description of Artificial Sequence: Synthetic oligonucleotide
  Antisense strand to SEQ ID NO: 830526
ugccauagggacaacuacc

SEQ ID NO: 830528 - RNA, 19 nt, Artificial Sequence
  Description of Artificial Sequence: Synthetic oligonucleotide
  Sense strand starting at position 993 of SEQ ID NO: 587948
gcaucugggccagaagaau

SEQ ID NO: 830529 - RNA, 19 nt, Artificial Sequence
  Description of Artificial Sequence: Synthetic oligonucleotide
  Antisense strand to SEQ ID NO: 830528
auucuucuggcccagaugc

SEQ ID NO: 830530 - RNA, 19 nt, Artificial Sequence
  Description of Artificial Sequence: Synthetic oligonucleotide
  Sense strand starting at position 1126 of SEQ ID NO: 587948
augacugcuccugggcauu

SEQ ID NO: 830531 - RNA, 19 nt, Artificial Sequence
  Description of Artificial Sequence: Synthetic oligonucleotide
  Antisense strand to SEQ ID NO: 830530
aaugcccaggagcagucau

SEQ ID NO: 830532 - RNA, 19 nt, Artificial Sequence
  Description of Artificial Sequence: Synthetic oligonucleotide
  Sense strand starting at position 1361 of SEQ ID NO: 587948
gccugaacuuauuccagau

SEQ ID NO: 830533 - RNA, 19 nt, Artificial Sequence
  Description of Artificial Sequence: Synthetic oligonucleotide
  Antisense strand to SEQ ID NO: 830532
aucuggaauaaguucaggc

SEQ ID NO: 830534 - RNA, 19 nt, Artificial Sequence
  Description of Artificial Sequence: Synthetic oligonucleotide
  Sense strand starting at position 1465 of SEQ ID NO: 587948
gcucaauaagugugaagug

SEQ ID NO: 830535 - RNA, 19 nt, Artificial Sequence
  Description of Artificial Sequence: Synthetic oligonucleotide
  Antisense strand to SEQ ID NO: 830534
cacuucacacuuauugagc

SEQ ID NO: 830536 - RNA, 19 nt, Artificial Sequence
  Description of Artificial Sequence: Synthetic oligonucleotide
  Sense strand starting at position 1989 of SEQ ID NO: 587948
acauccuguccuugugaga

SEQ ID NO: 830537 - RNA, 19 nt, Artificial Sequence
  Description of Artificial Sequence: Synthetic oligonucleotide
  Antisense strand to SEQ ID NO: 830536
ucucacaaggacaggaugu

SEQ ID NO: 830538 - RNA, 19 nt, Artificial Sequence
  Description of Artificial Sequence: Synthetic oligonucleotide
  Sense strand starting at position 2180 of SEQ ID NO: 587948
guaauaauagcugguugga

SEQ ID NO: 830539 - RNA, 19 nt, Artificial Sequence
  Description of Artificial Sequence: Synthetic oligonucleotide
  Antisense strand to SEQ ID NO: 830538
uccaaccagcuauuauuac

SEQ ID NO: 830540 - RNA, 19 nt, Artificial Sequence
  Description of Artificial Sequence: Synthetic oligonucleotide
  Sense strand starting at position 2207 of SEQ ID NO: 587948
agugguuugugcccauaau

SEQ ID NO: 830541 - RNA, 19 nt, Artificial Sequence
  Description of Artificial Sequence: Synthetic oligonucleotide
  Antisense strand to SEQ ID NO: 830540
auuaugggcacaaaccacu

SEQ ID NO: 830542 - RNA, 19 nt, Artificial Sequence
  Description of Artificial Sequence: Synthetic oligonucleotide
  Sense strand starting at position 2208 of SEQ ID NO: 587948
gugguuugugcccauaauc

SEQ ID NO: 830543 - RNA, 19 nt, Artificial Sequence
  Description of Artificial Sequence: Synthetic oligonucleotide
  Antisense strand to SEQ ID NO: 830542
gauuaugggcacaaaccac

SEQ ID NO: 830544 - RNA, 19 nt, Artificial Sequence
  Description of Artificial Sequence: Synthetic oligonucleotide
  Sense strand starting at position 2348 of SEQ ID NO: 587948
uugugucuguagucccaaa

SEQ ID NO: 830545 - RNA, 19 nt, Artificial Sequence
  Description of Artificial Sequence: Synthetic oligonucleotide
  Antisense strand to SEQ ID NO: 830544
uuugggacuacagacacaa

SEQ ID NO: 830546 - RNA, 19 nt, Artificial Sequence
  Description of Artificial Sequence: Synthetic oligonucleotide
  Sense strand starting at position 2402 of SEQ ID NO: 587948
augauugagccacggcaau

SEQ ID NO: 830547 - RNA, 19 nt, Artificial Sequence
  Description of Artificial Sequence: Synthetic oligonucleotide
  Antisense strand to SEQ ID NO: 830546
auugccguggcucaaucau

SEQ ID NO: 830548 - RNA, 19 nt, Artificial Sequence
  Description of Artificial Sequence: Synthetic oligonucleotide
  Sense strand starting at position 2441 of SEQ ID NO: 587948
agauccugucucuaaugau

SEQ ID NO: 830549 - RNA, 19 nt, Artificial Sequence
  Description of Artificial Sequence: Synthetic oligonucleotide
  Antisense strand to SEQ ID NO: 830548
aucauuagagacaggaucu

SEQ ID NO: 830550 - RNA, 19 nt, Artificial Sequence
  Description of Artificial Sequence: Synthetic oligonucleotide
  Sense strand starting at position 2473 of SEQ ID NO: 587948
auaacaauagcuggugaaa

SEQ ID NO: 830551 - RNA, 19 nt, Artificial Sequence
  Description of Artificial Sequence: Synthetic oligonucleotide
  Antisense strand to SEQ ID NO: 830550
uuucaccagcuauuguuau

SEQ ID NO: 830552 - RNA, 19 nt, Artificial Sequence
  Description of Artificial Sequence: Synthetic oligonucleotide
  Sense strand starting at position 2816 of SEQ ID NO: 587948
agguguucuuguucuuaaa

SEQ ID NO: 830553 - RNA, 19 nt, Artificial Sequence
  Description of Artificial Sequence: Synthetic oligonucleotide
  Antisense strand to SEQ ID NO: 830552
uuuaagaacaagaacaccu

SEQ ID NO: 830554 - RNA, 19 nt, Artificial Sequence
  Description of Artificial Sequence: Synthetic oligonucleotide
  Sense strand starting at position 2818 of SEQ ID NO: 587948
guguucuuguucuuaaacu

SEQ ID NO: 830555 - RNA, 19 nt, Artificial Sequence
  Description of Artificial Sequence: Synthetic oligonucleotide
  Antisense strand to SEQ ID NO: 830554
aguuuaagaacaagaacac

SEQ ID NO: 830556 - RNA, 19 nt, Artificial Sequence
  Description of Artificial Sequence: Synthetic oligonucleotide
  Sense strand starting at position 2957 of SEQ ID NO: 587948
cucuuaguucuaggucuuu

SEQ ID NO: 830557 - RNA, 19 nt, Artificial Sequence
  Description of Artificial Sequence: Synthetic oligonucleotide
  Antisense strand to SEQ ID NO: 830556
aaagaccuagaacuaagag

SEQ ID NO: 830558 - RNA, 19 nt, Artificial Sequence
  Description of Artificial Sequence: Synthetic oligonucleotide
  Sense strand starting at position 2962 of SEQ ID NO: 587948
aguucuaggucuuucuaua

SEQ ID NO: 830559 - RNA, 19 nt, Artificial Sequence
  Description of Artificial Sequence: Synthetic oligonucleotide
  Antisense strand to SEQ ID NO: 830558
uauagaaagaccuagaacu

SEQ ID NO: 830560 - RNA, 19 nt, Artificial Sequence
  Description of Artificial Sequence: Synthetic oligonucleotide
  Sense strand starting at position 2967 of SEQ ID NO: 587948
uaggucuuucuauaauggu

SEQ ID NO: 830561 - RNA, 19 nt, Artificial Sequence
  Description of Artificial Sequence: Synthetic oligonucleotide
  Antisense strand to SEQ ID NO: 830560
accauuauagaaagaccua

SEQ ID NO: 830562 - RNA, 19 nt, Artificial Sequence
  Description of Artificial Sequence: Synthetic oligonucleotide
  Sense strand starting at position 2976 of SEQ ID NO: 587948
cuauaauggucacacaaga

SEQ ID NO: 830563 - RNA, 19 nt, Artificial Sequence
  Description of Artificial Sequence: Synthetic oligonucleotide
  Antisense strand to SEQ ID NO: 830562
ucuugugugaccauuauag

SEQ ID NO: 830564 - RNA, 19 nt, Artificial Sequence
  Description of Artificial Sequence: Synthetic oligonucleotide
  Sense strand starting at position 3114 of SEQ ID NO: 587948
aggugauuggguggaagua

SEQ ID NO: 830565 - RNA, 19 nt, Artificial Sequence
  Description of Artificial Sequence: Synthetic oligonucleotide
  Antisense strand to SEQ ID NO: 830564
uacuuccacccaaucaccu

SEQ ID NO: 830566 - RNA, 19 nt, Artificial Sequence
  Description of Artificial Sequence: Synthetic oligonucleotide
  Sense strand starting at position 3138 of SEQ ID NO: 587948
ggcugagaggcugaucaua

SEQ ID NO: 830567 - RNA, 19 nt, Artificial Sequence
  Description of Artificial Sequence: Synthetic oligonucleotide
  Antisense strand to SEQ ID NO: 830566
uaugaucagccucucagcc

SEQ ID NO: 830568 - RNA, 19 nt, Artificial Sequence
  Description of Artificial Sequence: Synthetic oligonucleotide
  Sense strand starting at position 3140 of SEQ ID NO: 587948
cugagaggcugaucauaag

SEQ ID NO: 830569 - RNA, 19 nt, Artificial Sequence
  Description of Artificial Sequence: Synthetic oligonucleotide
  Antisense strand to SEQ ID NO: 830568
cuuaugaucagccucucag

SEQ ID NO: 830570 - RNA, 19 nt, Artificial Sequence
  Description of Artificial Sequence: Synthetic oligonucleotide
  Sense strand starting at position 3183 of SEQ ID NO: 587948
ggaguagcaugucugugaa

SEQ ID NO: 830571 - RNA, 19 nt, Artificial Sequence
  Description of Artificial Sequence: Synthetic oligonucleotide
  Antisense strand to SEQ ID NO: 830570
uucacagacaugcuacucc

SEQ ID NO: 830572 - RNA, 19 nt, Artificial Sequence
  Description of Artificial Sequence: Synthetic oligonucleotide
  Sense strand starting at position 3185 of SEQ ID NO: 587948
aguagcaugucugugaauu

SEQ ID NO: 830573 - RNA, 19 nt, Artificial Sequence
  Description of Artificial Sequence: Synthetic oligonucleotide
  Antisense strand to SEQ ID NO: 830572
aauucacagacaugcuacu

SEQ ID NO: 830574 - RNA, 19 nt, Artificial Sequence
  Description of Artificial Sequence: Synthetic oligonucleotide
  Sense strand starting at position 3186 of SEQ ID NO: 587948
guagcaugucugugaauug

SEQ ID NO: 830575 - RNA, 19 nt, Artificial Sequence
  Description of Artificial Sequence: Synthetic oligonucleotide
  Antisense strand to SEQ ID NO: 830574
caauucacagacaugcuac

SEQ ID NO: 830576 - RNA, 19 nt, Artificial Sequence
  Description of Artificial Sequence: Synthetic oligonucleotide
  Sense strand starting at position 3193 of SEQ ID NO: 587948
gucugugaauugucaaaug

SEQ ID NO: 830577 - RNA, 19 nt, Artificial Sequence
  Description of Artificial Sequence: Synthetic oligonucleotide
  Antisense strand to SEQ ID NO: 830576
cauuugacaauucacagac

SEQ ID NO: 830578 - RNA, 19 nt, Artificial Sequence
  Description of Artificial Sequence: Synthetic oligonucleotide
  Sense strand starting at position 3276 of SEQ ID NO: 587948
uaguguuaauugggaauuu

SEQ ID NO: 830579 - RNA, 19 nt, Artificial Sequence
  Description of Artificial Sequence: Synthetic oligonucleotide
  Antisense strand to SEQ ID NO: 830578
aaauucccaauuaacacua

SEQ ID NO: 830580 - RNA, 19 nt, Artificial Sequence
  Description of Artificial Sequence: Synthetic oligonucleotide
  Sense strand starting at position 3310 of SEQ ID NO: 587948
augagaacaucuccucugu

SEQ ID NO: 830581 - RNA, 19 nt, Artificial Sequence
  Description of Artificial Sequence: Synthetic oligonucleotide
  Antisense strand to SEQ ID NO: 830580
acagaggagauguucucau

SEQ ID NO: 830582 - RNA, 19 nt, Artificial Sequence
  Description of Artificial Sequence: Synthetic oligonucleotide
  Sense strand starting at position 3321 of SEQ ID NO: 587948
uccucuguucuaugcauua

SEQ ID NO: 830583 - RNA, 19 nt, Artificial Sequence
  Description of Artificial Sequence: Synthetic oligonucleotide
  Antisense strand to SEQ ID NO: 830582
uaaugcauagaacagagga

SEQ ID NO: 830584 - RNA, 19 nt, Artificial Sequence
  Description of Artificial Sequence: Synthetic oligonucleotide
  Sense strand starting at position 3958 of SEQ ID NO: 587948
gcuagcaauuucuagauug

SEQ ID NO: 830585 - RNA, 19 nt, Artificial Sequence
  Description of Artificial Sequence: Synthetic oligonucleotide
  Antisense strand to SEQ ID NO: 830584
caaucuagaaauugcuagc

SEQ ID NO: 830586 - RNA, 19 nt, Artificial Sequence
  Description of Artificial Sequence: Synthetic oligonucleotide
  Sense strand starting at position 3969 of SEQ ID NO: 587948
cuagauuguugaguugaug

SEQ ID NO: 830587 - RNA, 19 nt, Artificial Sequence
  Description of Artificial Sequence: Synthetic oligonucleotide
  Antisense strand to SEQ ID NO: 830586
caucaacucaacaaucuag

SEQ ID NO: 830588 - RNA, 19 nt, Artificial Sequence
  Description of Artificial Sequence: Synthetic oligonucleotide
  Sense strand starting at position 347 of SEQ ID NO: 587949
caucuaaauugugucggga

SEQ ID NO: 830589 - RNA, 19 nt, Artificial Sequence
  Description of Artificial Sequence: Synthetic oligonucleotide
  Antisense strand to SEQ ID NO: 830588
ucccgacacaauuuagaug

SEQ ID NO: 830590 - RNA, 19 nt, Artificial Sequence
  Description of Artificial Sequence: Synthetic oligonucleotide
  Sense strand starting at position 376 of SEQ ID NO: 587949
gguagaggguuucuagauc

SEQ ID NO: 830591 - RNA, 19 nt, Artificial Sequence
  Description of Artificial Sequence: Synthetic oligonucleotide
  Antisense strand to SEQ ID NO: 830590
gaucuagaaacccucuacc

SEQ ID NO: 830592 - RNA, 19 nt, Artificial Sequence
  Description of Artificial Sequence: Synthetic oligonucleotide
  Sense strand starting at position 476 of SEQ ID NO: 587949
agccaagucagugagugua

SEQ ID NO: 830593 - RNA, 19 nt, Artificial Sequence
  Description of Artificial Sequence: Synthetic oligonucleotide
  Antisense strand to SEQ ID NO: 830592
uacacucacugacuuggcu

SEQ ID NO: 830594 - RNA, 19 nt, Artificial Sequence
  Description of Artificial Sequence: Synthetic oligonucleotide
  Sense strand starting at position 479 of SEQ ID NO: 587949
caagucagugaguguauua

SEQ ID NO: 830595 - RNA, 19 nt, Artificial Sequence
  Description of Artificial Sequence: Synthetic oligonucleotide
  Antisense strand to SEQ ID NO: 830594
uaauacacucacugacuug

SEQ ID NO: 830596 - RNA, 19 nt, Artificial Sequence
  Description of Artificial Sequence: Synthetic oligonucleotide
  Sense strand starting at position 525 of SEQ ID NO: 587949
ucgcuaugggcuuauacuu

SEQ ID NO: 830597 - RNA, 19 nt, Artificial Sequence
  Description of Artificial Sequence: Synthetic oligonucleotide
  Antisense strand to SEQ ID NO: 830596
aaguauaagcccauagcga

SEQ ID NO: 830598 - RNA, 19 nt, Artificial Sequence
  Description of Artificial Sequence: Synthetic oligonucleotide
  Sense strand starting at position 646 of SEQ ID NO: 587949
gggagaauuugggaggcaa

SEQ ID NO: 830599 - RNA, 19 nt, Artificial Sequence
  Description of Artificial Sequence: Synthetic oligonucleotide
  Antisense strand to SEQ ID NO: 830598
uugccucccaaauucuccc

SEQ ID NO: 830600 - RNA, 19 nt, Artificial Sequence
  Description of Artificial Sequence: Synthetic oligonucleotide
  Sense strand starting at position 686 of SEQ ID NO: 587949
uggaacuuguaaucauaca

SEQ ID NO: 830601 - RNA, 19 nt, Artificial Sequence
  Description of Artificial Sequence: Synthetic oligonucleotide
  Antisense strand to SEQ ID NO: 830600
uguaugauuacaaguucca

SEQ ID NO: 830602 - RNA, 19 nt, Artificial Sequence
  Description of Artificial Sequence: Synthetic oligonucleotide
  Sense strand starting at position 781 of SEQ ID NO: 587949
gguggauuguuacucuuua

SEQ ID NO: 830603 - RNA, 19 nt, Artificial Sequence
  Description of Artificial Sequence: Synthetic oligonucleotide
  Antisense strand to SEQ ID NO: 830602
uaaagaguaacaauccacc

SEQ ID NO: 830604 - RNA, 19 nt, Artificial Sequence
  Description of Artificial Sequence: Synthetic oligonucleotide
  Sense strand starting at position 782 of SEQ ID NO: 587949
guggauuguuacucuuuau

SEQ ID NO: 830605 - RNA, 19 nt, Artificial Sequence
  Description of Artificial Sequence: Synthetic oligonucleotide
  Antisense strand to SEQ ID NO: 830604
auaaagaguaacaauccac

SEQ ID NO: 830606 - RNA, 19 nt, Artificial Sequence
  Description of Artificial Sequence: Synthetic oligonucleotide
  Sense strand starting at position 803 of SEQ ID NO: 587949
uggacuuguuacuauuuau

SEQ ID NO: 830607 - RNA, 19 nt, Artificial Sequence
  Description of Artificial Sequence: Synthetic oligonucleotide
  Antisense strand to SEQ ID NO: 830606
auaaauaguaacaagucca

SEQ ID NO: 830608 - RNA, 19 nt, Artificial Sequence
  Description of Artificial Sequence: Synthetic oligonucleotide
  Sense strand starting at position 957 of SEQ ID NO: 587949
guauaauucuauccaagua

SEQ ID NO: 830609 - RNA, 19 nt, Artificial Sequence
  Description of Artificial Sequence: Synthetic oligonucleotide
  Antisense strand to SEQ ID NO: 830608
uacuuggauagaauuauac

SEQ ID NO: 830610 - RNA, 19 nt, Artificial Sequence
  Description of Artificial Sequence: Synthetic oligonucleotide
  Sense strand starting at position 980 of SEQ ID NO: 587949
uuaggacuauguucuaagu

SEQ ID NO: 830611 - RNA, 19 nt, Artificial Sequence
  Description of Artificial Sequence: Synthetic oligonucleotide
  Antisense strand to SEQ ID NO: 830610
acuuagaacauaguccuaa

SEQ ID NO: 830612 - RNA, 19 nt, Artificial Sequence
  Description of Artificial Sequence: Synthetic oligonucleotide
  Sense strand starting at position 1306 of SEQ ID NO: 587949
cugagagacuccgucuuaa

SEQ ID NO: 830613 - RNA, 19 nt, Artificial Sequence
  Description of Artificial Sequence: Synthetic oligonucleotide
  Antisense strand to SEQ ID NO: 830612
uuaagacggagucucucag

SEQ ID NO: 830614 - RNA, 19 nt, Artificial Sequence
  Description of Artificial Sequence: Synthetic oligonucleotide
  Sense strand starting at position 1444 of SEQ ID NO: 587949
aguaacuugcaacgggaau

SEQ ID NO: 830615 - RNA, 19 nt, Artificial Sequence
  Description of Artificial Sequence: Synthetic oligonucleotide
  Antisense strand to SEQ ID NO: 830614
auucccguugcaaguuacu

SEQ ID NO: 830616 - RNA, 19 nt, Artificial Sequence
  Description of Artificial Sequence: Synthetic oligonucleotide
  Sense strand starting at position 1445 of SEQ ID NO: 587949
guaacuugcaacgggaauu

SEQ ID NO: 830617 - RNA, 19 nt, Artificial Sequence
  Description of Artificial Sequence: Synthetic oligonucleotide
  Antisense strand to SEQ ID NO: 830616
aauucccguugcaaguuac

SEQ ID NO: 830618 - RNA, 19 nt, Artificial Sequence
  Description of Artificial Sequence: Synthetic oligonucleotide
  Sense strand starting at position 1515 of SEQ ID NO: 587949
uuuccaucacagugaguaa

SEQ ID NO: 830619 - RNA, 19 nt, Artificial Sequence
  Description of Artificial Sequence: Synthetic oligonucleotide
  Antisense strand to SEQ ID NO: 830618
uuacucacugugauggaaa

SEQ ID NO: 830620 - RNA, 19 nt, Artificial Sequence
  Description of Artificial Sequence: Synthetic oligonucleotide
  Sense strand starting at position 1518 of SEQ ID NO: 587949
ccaucacagugaguaaauu

SEQ ID NO: 830621 - RNA, 19 nt, Artificial Sequence
  Description of Artificial Sequence: Synthetic oligonucleotide
  Antisense strand to SEQ ID NO: 830620
aauuuacucacugugaugg

SEQ ID NO: 830622 - RNA, 19 nt, Artificial Sequence
  Description of Artificial Sequence: Synthetic oligonucleotide
  Sense strand starting at position 1529 of SEQ ID NO: 587949
aguaaauucuaguuuccca

SEQ ID NO: 830623 - RNA, 19 nt, Artificial Sequence
  Description of Artificial Sequence: Synthetic oligonucleotide
  Antisense strand to SEQ ID NO: 830622
ugggaaacuagaauuuacu

SEQ ID NO: 830624 - RNA, 19 nt, Artificial Sequence
  Description of Artificial Sequence: Synthetic oligonucleotide
  Sense strand starting at position 1537 of SEQ ID NO: 587949
cuaguuucccacuagguuu

SEQ ID NO: 830625 - RNA, 19 nt, Artificial Sequence
  Description of Artificial Sequence: Synthetic oligonucleotide
  Antisense strand to SEQ ID NO: 830624
aaaccuagugggaaacuag

SEQ ID NO: 830626 - RNA, 19 nt, Artificial Sequence
  Description of Artificial Sequence: Synthetic oligonucleotide
  Sense strand starting at position 1983 of SEQ ID NO: 587949
cgccgacaucuugucugua

SEQ ID NO: 830627 - RNA, 19 nt, Artificial Sequence
  Description of Artificial Sequence: Synthetic oligonucleotide
  Antisense strand to SEQ ID NO: 830626
uacagacaagaugucggcg

SEQ ID NO: 830628 - RNA, 19 nt, Artificial Sequence
  Description of Artificial Sequence: Synthetic oligonucleotide
  Sense strand starting at position 2074 of SEQ ID NO: 587949
gggcuugcgaucuucgcau

SEQ ID NO: 830629 - RNA, 19 nt, Artificial Sequence
  Description of Artificial Sequence: Synthetic oligonucleotide
  Antisense strand to SEQ ID NO: 830628
augcgaagaucgcaagccc

SEQ ID NO: 830630 - RNA, 19 nt, Artificial Sequence
  Description of Artificial Sequence: Synthetic oligonucleotide
  Sense strand starting at position 2230 of SEQ ID NO: 587949
ugcgaagagccagguauaa

SEQ ID NO: 830631 - RNA, 19 nt, Artificial Sequence
  Description of Artificial Sequence: Synthetic oligonucleotide
  Antisense strand to SEQ ID NO: 830630
uuauaccuggcucuucgca

SEQ ID NO: 830632 - RNA, 19 nt, Artificial Sequence
  Description of Artificial Sequence: Synthetic oligonucleotide
  Sense strand starting at position 2232 of SEQ ID NO: 587949
cgaagagccagguauaaau

SEQ ID NO: 830633 - RNA, 19 nt, Artificial Sequence
  Description of Artificial Sequence: Synthetic oligonucleotide
  Antisense strand to SEQ ID NO: 830632
auuuauaccuggcucuucg

SEQ ID NO: 830634 - RNA, 19 nt, Artificial Sequence
  Description of Artificial Sequence: Synthetic oligonucleotide
  Sense strand starting at position 2388 of SEQ ID NO: 587949
gacugcagguagucuaaau

SEQ ID NO: 830635 - RNA, 19 nt, Artificial Sequence
  Description of Artificial Sequence: Synthetic oligonucleotide
  Antisense strand to SEQ ID NO: 830634
auuuagacuaccugcaguc

SEQ ID NO: 830636 - RNA, 19 nt, Artificial Sequence
  Description of Artificial Sequence: Synthetic oligonucleotide
  Sense strand starting at position 2439 of SEQ ID NO: 587949
ggcacugcugccuuaguau

SEQ ID NO: 830637 - RNA, 19 nt, Artificial Sequence
  Description of Artificial Sequence: Synthetic oligonucleotide
  Antisense strand to SEQ ID NO: 830636
auacuaaggcagcagugcc

SEQ ID NO: 830638 - RNA, 19 nt, Artificial Sequence
  Description of Artificial Sequence: Synthetic oligonucleotide
  Sense strand starting at position 2442 of SEQ ID NO: 587949
acugcugccuuaguauuua

SEQ ID NO: 830639 - RNA, 19 nt, Artificial Sequence
  Description of Artificial Sequence: Synthetic oligonucleotide
  Antisense strand to SEQ ID NO: 830638
uaaauacuaaggcagcagu

SEQ ID NO: 830640 - RNA, 19 nt, Artificial Sequence
  Description of Artificial Sequence: Synthetic oligonucleotide
  Sense strand starting at position 3104 of SEQ ID NO: 587949
agauauauagacuguguau

SEQ ID NO: 830641 - RNA, 19 nt, Artificial Sequence
  Description of Artificial Sequence: Synthetic oligonucleotide
  Antisense strand to SEQ ID NO: 830640
auacacagucuauauaucu

SEQ ID NO: 830642 - RNA, 19 nt, Artificial Sequence
  Description of Artificial Sequence: Synthetic oligonucleotide
  Sense strand starting at position 3162 of SEQ ID NO: 587949
gaaagacauuucgaagcca

SEQ ID NO: 830643 - RNA, 19 nt, Artificial Sequence
  Description of Artificial Sequence: Synthetic oligonucleotide
  Antisense strand to SEQ ID NO: 830642
uggcuucgaaaugucuuuc

SEQ ID NO: 830644 - RNA, 19 nt, Artificial Sequence
  Description of Artificial Sequence: Synthetic oligonucleotide
  Sense strand starting at position 3173 of SEQ ID NO: 587949
cgaagccaucguguuugua

SEQ ID NO: 830645 - RNA, 19 nt, Artificial Sequence
  Description of Artificial Sequence: Synthetic oligonucleotide
  Antisense strand to SEQ ID NO: 830644
uacaaacacgauggcuucg

SEQ ID NO: 830646 - RNA, 19 nt, Artificial Sequence
  Description of Artificial Sequence: Synthetic oligonucleotide
  Sense strand starting at position 3176 of SEQ ID NO: 587949
agccaucguguuuguauuu

SEQ ID NO: 830647 - RNA, 19 nt, Artificial Sequence
  Description of Artificial Sequence: Synthetic oligonucleotide
  Antisense strand to SEQ ID NO: 830646
aaauacaaacacgauggcu

SEQ ID NO: 830648 - RNA, 19 nt, Artificial Sequence
  Description of Artificial Sequence: Synthetic oligonucleotide
  Sense strand starting at position 3181 of SEQ ID NO: 587949
ucguguuuguauuucaugu

SEQ ID NO: 830649 - RNA, 19 nt, Artificial Sequence
  Description of Artificial Sequence: Synthetic oligonucleotide
  Antisense strand to SEQ ID NO: 830648
acaugaaauacaaacacga

SEQ ID NO: 830650 - RNA, 19 nt, Artificial Sequence
  Description of Artificial Sequence: Synthetic oligonucleotide
  Sense strand starting at position 3245 of SEQ ID NO: 587949
uuaauuauggauuagccau

SEQ ID NO: 830651 - RNA, 19 nt, Artificial Sequence
  Description of Artificial Sequence: Synthetic oligonucleotide
  Antisense strand to SEQ ID NO: 830650
auggcuaauccauaauuaa

SEQ ID NO: 830652 - RNA, 19 nt, Artificial Sequence
  Description of Artificial Sequence: Synthetic oligonucleotide
  Sense strand starting at position 3252 of SEQ ID NO: 587949
uggauuagccauuaacauu

SEQ ID NO: 830653 - RNA, 19 nt, Artificial Sequence
  Description of Artificial Sequence: Synthetic oligonucleotide
  Antisense strand to SEQ ID NO: 830652
aauguuaauggcuaaucca

SEQ ID NO: 830654 - RNA, 19 nt, Artificial Sequence
  Description of Artificial Sequence: Synthetic oligonucleotide
  Sense strand starting at position 3560 of SEQ ID NO: 587949
ggauguaaacgauggauau

SEQ ID NO: 830655 - RNA, 19 nt, Artificial Sequence
  Description of Artificial Sequence: Synthetic oligonucleotide
  Antisense strand to SEQ ID NO: 830654
auauccaucguuuacaucc

SEQ ID NO: 830656 - RNA, 19 nt, Artificial Sequence
  Description of Artificial Sequence: Synthetic oligonucleotide
  Sense strand starting at position 3561 of SEQ ID NO: 587949
gauguaaacgauggauaua

SEQ ID NO: 830657 - RNA, 19 nt, Artificial Sequence
  Description of Artificial Sequence: Synthetic oligonucleotide
  Antisense strand to SEQ ID NO: 830656
uauauccaucguuuacauc

SEQ ID NO: 830658 - RNA, 19 nt, Artificial Sequence
  Description of Artificial Sequence: Synthetic oligonucleotide
  Sense strand starting at position 3666 of SEQ ID NO: 587949
gugaauaaauaguucucuu

SEQ ID NO: 830659 - RNA, 19 nt, Artificial Sequence
  Description of Artificial Sequence: Synthetic oligonucleotide
  Antisense strand to SEQ ID NO: 830658
aagagaacuauuuauucac

SEQ ID NO: 830660 - RNA, 19 nt, Artificial Sequence
  Description of Artificial Sequence: Synthetic oligonucleotide
  Sense strand starting at position 3724 of SEQ ID NO: 587949
guguauuaaugauuagaac

SEQ ID NO: 830661 - RNA, 19 nt, Artificial Sequence
  Description of Artificial Sequence: Synthetic oligonucleotide
  Antisense strand to SEQ ID NO: 830660
guucuaaucauuaauacac

SEQ ID NO: 830662 - RNA, 19 nt, Artificial Sequence
  Description of Artificial Sequence: Synthetic oligonucleotide
  Sense strand starting at position 3856 of SEQ ID NO: 587949
guguacauaguacaaauau

SEQ ID NO: 830663 - RNA, 19 nt, Artificial Sequence
  Description of Artificial Sequence: Synthetic oligonucleotide
  Antisense strand to SEQ ID NO: 830662
auauuuguacuauguacac

SEQ ID NO: 830664 - RNA, 19 nt, Artificial Sequence
  Description of Artificial Sequence: Synthetic oligonucleotide
  Sense strand starting at position 3948 of SEQ ID NO: 587949
gccuuagaagacuagguuu

SEQ ID NO: 830665 - RNA, 19 nt, Artificial Sequence
  Description of Artificial Sequence: Synthetic oligonucleotide
  Antisense strand to SEQ ID NO: 830664
aaaccuagucuucuaaggc

SEQ ID NO: 830666 - RNA, 19 nt, Artificial Sequence
  Description of Artificial Sequence: Synthetic oligonucleotide
  Sense strand starting at position 3951 of SEQ ID NO: 587949
uuagaagacuagguuucua

SEQ ID NO: 830667 - RNA, 19 nt, Artificial Sequence
  Description of Artificial Sequence: Synthetic oligonucleotide
  Antisense strand to SEQ ID NO: 830666
uagaaaccuagucuucuaa

SEQ ID NO: 830668 - RNA, 19 nt, Artificial Sequence
  Description of Artificial Sequence: Synthetic oligonucleotide
  Sense strand starting at position 85 of SEQ ID NO: 587950
cccaaacagucauuguacu

SEQ ID NO: 830669 - RNA, 19 nt, Artificial Sequence
  Description of Artificial Sequence: Synthetic oligonucleotide
  Antisense strand to SEQ ID NO: 830668
aguacaaugacuguuuggg

SEQ ID NO: 830670 - RNA, 19 nt, Artificial Sequence
  Description of Artificial Sequence: Synthetic oligonucleotide
  Sense strand starting at position 86 of SEQ ID NO: 587950
ccaaacagucauuguacua

SEQ ID NO: 830671 - RNA, 19 nt, Artificial Sequence
  Description of Artificial Sequence: Synthetic oligonucleotide
  Antisense strand to SEQ ID NO: 830670
uaguacaaugacuguuugg

SEQ ID NO: 830672 - RNA, 19 nt, Artificial Sequence
  Description of Artificial Sequence: Synthetic oligonucleotide
  Sense strand starting at position 134 of SEQ ID NO: 587950
accaguaucugccuuaaga

SEQ ID NO: 830673 - RNA, 19 nt, Artificial Sequence
  Description of Artificial Sequence: Synthetic oligonucleotide
  Antisense strand to SEQ ID NO: 830672
ucuuaaggcagauacuggu

SEQ ID NO: 830674 - RNA, 19 nt, Artificial Sequence
  Description of Artificial Sequence: Synthetic oligonucleotide
  Sense strand starting at position 136 of SEQ ID NO: 587950
caguaucugccuuaagagu

SEQ ID NO: 830675 - RNA, 19 nt, Artificial Sequence
  Description of Artificial Sequence: Synthetic oligonucleotide
  Antisense strand to SEQ ID NO: 830674
acucuuaaggcagauacug

SEQ ID NO: 830676 - RNA, 19 nt, Artificial Sequence
  Description of Artificial Sequence: Synthetic oligonucleotide
  Sense strand starting at position 144 of SEQ ID NO: 587950
gccuuaagaguuugaucua

SEQ ID NO: 830677 - RNA, 19 nt, Artificial Sequence
  Description of Artificial Sequence: Synthetic oligonucleotide
  Antisense strand to SEQ ID NO: 830676
uagaucaaacucuuaaggc

SEQ ID NO: 830678 - RNA, 19 nt, Artificial Sequence
  Description of Artificial Sequence: Synthetic oligonucleotide
  Sense strand starting at position 147 of SEQ ID NO: 587950
uuaagaguuugaucuagug

SEQ ID NO: 830679 - RNA, 19 nt, Artificial Sequence
  Description of Artificial Sequence: Synthetic oligonucleotide
  Antisense strand to SEQ ID NO: 830678
cacuagaucaaacucuuaa

SEQ ID NO: 830680 - RNA, 19 nt, Artificial Sequence
  Description of Artificial Sequence: Synthetic oligonucleotide
  Sense strand starting at position 153 of SEQ ID NO: 587950
guuugaucuagugggaaag

SEQ ID NO: 830681 - RNA, 19 nt, Artificial Sequence
  Description of Artificial Sequence: Synthetic oligonucleotide
  Antisense strand to SEQ ID NO: 830680
cuuucccacuagaucaaac

SEQ ID NO: 830682 - RNA, 19 nt, Artificial Sequence
  Description of Artificial Sequence: Synthetic oligonucleotide
  Sense strand starting at position 246 of SEQ ID NO: 587950
uugguaggcagaggaauau

SEQ ID NO: 830683 - RNA, 19 nt, Artificial Sequence
  Description of Artificial Sequence: Synthetic oligonucleotide
  Antisense strand to SEQ ID NO: 830682
auauuccucugccuaccaa

SEQ ID NO: 830684 - RNA, 19 nt, Artificial Sequence
  Description of Artificial Sequence: Synthetic oligonucleotide
  Sense strand starting at position 314 of SEQ ID NO: 587950
augcacaaguguuuauaga

SEQ ID NO: 830685 - RNA, 19 nt, Artificial Sequence
  Description of Artificial Sequence: Synthetic oligonucleotide
  Antisense strand to SEQ ID NO: 830684
ucuauaaacacuugugcau

SEQ ID NO: 830686 - RNA, 19 nt, Artificial Sequence
  Description of Artificial Sequence: Synthetic oligonucleotide
  Sense strand starting at position 388 of SEQ ID NO: 587950
uaugguguguaagcauuua

SEQ ID NO: 830687 - RNA, 19 nt, Artificial Sequence
  Description of Artificial Sequence: Synthetic oligonucleotide
  Antisense strand to SEQ ID NO: 830686
uaaaugcuuacacaccaua

SEQ ID NO: 830688 - RNA, 19 nt, Artificial Sequence
  Description of Artificial Sequence: Synthetic oligonucleotide
  Sense strand starting at position 412 of SEQ ID NO: 587950
uccugaggagcguaaauga

SEQ ID NO: 830689 - RNA, 19 nt, Artificial Sequence
  Description of Artificial Sequence: Synthetic oligonucleotide
  Antisense strand to SEQ ID NO: 830688
ucauuuacgcuccucagga

SEQ ID NO: 830690 - RNA, 19 nt, Artificial Sequence
  Description of Artificial Sequence: Synthetic oligonucleotide
  Sense strand starting at position 529 of SEQ ID NO: 587950
ggaauuugguuguauaaca

SEQ ID NO: 830691 - RNA, 19 nt, Artificial Sequence
  Description of Artificial Sequence: Synthetic oligonucleotide
  Antisense strand to SEQ ID NO: 830690
uguuauacaaccaaauucc

SEQ ID NO: 830692 - RNA, 19 nt, Artificial Sequence
  Description of Artificial Sequence: Synthetic oligonucleotide
  Sense strand starting at position 914 of SEQ ID NO: 587950
ucuugauugccagaccaca

SEQ ID NO: 830693 - RNA, 19 nt, Artificial Sequence
  Description of Artificial Sequence: Synthetic oligonucleotide
  Antisense strand to SEQ ID NO: 830692
uguggucuggcaaucaaga

SEQ ID NO: 830694 - RNA, 19 nt, Artificial Sequence
  Description of Artificial Sequence: Synthetic oligonucleotide
  Sense strand starting at position 946 of SEQ ID NO: 587950
agauaucucuaccuggaug

SEQ ID NO: 830695 - RNA, 19 nt, Artificial Sequence
  Description of Artificial Sequence: Synthetic oligonucleotide
  Antisense strand to SEQ ID NO: 830694
cauccagguagagauaucu

SEQ ID NO: 830696 - RNA, 19 nt, Artificial Sequence
  Description of Artificial Sequence: Synthetic oligonucleotide
  Sense strand starting at position 954 of SEQ ID NO: 587950
cuaccuggauguccuauaa

SEQ ID NO: 830697 - RNA, 19 nt, Artificial Sequence
  Description of Artificial Sequence: Synthetic oligonucleotide
  Antisense strand to SEQ ID NO: 830696
uuauaggacauccagguag

SEQ ID NO: 830698 - RNA, 19 nt, Artificial Sequence
  Description of Artificial Sequence: Synthetic oligonucleotide
  Sense strand starting at position 958 of SEQ ID NO: 587950
cuggauguccuauaauuau

SEQ ID NO: 830699 - RNA, 19 nt, Artificial Sequence
  Description of Artificial Sequence: Synthetic oligonucleotide
  Antisense strand to SEQ ID NO: 830698
auaauuauaggacauccag

SEQ ID NO: 830700 - RNA, 19 nt, Artificial Sequence
  Description of Artificial Sequence: Synthetic oligonucleotide
  Sense strand starting at position 1233 of SEQ ID NO: 587950
ucaggauuaccuugcuaaa

SEQ ID NO: 830701 - RNA, 19 nt, Artificial Sequence
  Description of Artificial Sequence: Synthetic oligonucleotide
  Antisense strand to SEQ ID NO: 830700
uuuagcaagguaauccuga

SEQ ID NO: 830702 - RNA, 19 nt, Artificial Sequence
  Description of Artificial Sequence: Synthetic oligonucleotide
  Sense strand starting at position 1360 of SEQ ID NO: 587950
ugccgacuggaucauugua

SEQ ID NO: 830703 - RNA, 19 nt, Artificial Sequence
  Description of Artificial Sequence: Synthetic oligonucleotide
  Antisense strand to SEQ ID NO: 830702
uacaaugauccagucggca

SEQ ID NO: 830704 - RNA, 19 nt, Artificial Sequence
  Description of Artificial Sequence: Synthetic oligonucleotide
  Sense strand starting at position 1368 of SEQ ID NO: 587950
ggaucauuguacuugccaa

SEQ ID NO: 830705 - RNA, 19 nt, Artificial Sequence
  Description of Artificial Sequence: Synthetic oligonucleotide
  Antisense strand to SEQ ID NO: 830704
uuggcaaguacaaugaucc

SEQ ID NO: 830706 - RNA, 19 nt, Artificial Sequence
  Description of Artificial Sequence: Synthetic oligonucleotide
  Sense strand starting at position 1460 of SEQ ID NO: 587950
gagcuuugugcccuguguu

SEQ ID NO: 830707 - RNA, 19 nt, Artificial Sequence
  Description of Artificial Sequence: Synthetic oligonucleotide
  Antisense strand to SEQ ID NO: 830706
aacacagggcacaaagcuc

SEQ ID NO: 830708 - RNA, 19 nt, Artificial Sequence
  Description of Artificial Sequence: Synthetic oligonucleotide
  Sense strand starting at position 1508 of SEQ ID NO: 587950
gcucacuaacuaugauaug

SEQ ID NO: 830709 - RNA, 19 nt, Artificial Sequence
  Description of Artificial Sequence: Synthetic oligonucleotide
  Antisense strand to SEQ ID NO: 830708
cauaucauaguuagugagc

SEQ ID NO: 830710 - RNA, 19 nt, Artificial Sequence
  Description of Artificial Sequence: Synthetic oligonucleotide
  Sense strand starting at position 1532 of SEQ ID NO: 587950
augaaugcuugagugaauu

SEQ ID NO: 830711 - RNA, 19 nt, Artificial Sequence
  Description of Artificial Sequence: Synthetic oligonucleotide
  Antisense strand to SEQ ID NO: 830710
aauucacucaagcauucau

SEQ ID NO: 830712 - RNA, 19 nt, Artificial Sequence
  Description of Artificial Sequence: Synthetic oligonucleotide
  Sense strand starting at position 1707 of SEQ ID NO: 587950
cuguacggcuuguuaauuu

SEQ ID NO: 830713 - RNA, 19 nt, Artificial Sequence
  Description of Artificial Sequence: Synthetic oligonucleotide
  Antisense strand to SEQ ID NO: 830712
aaauuaacaagccguacag

SEQ ID NO: 830714 - RNA, 19 nt, Artificial Sequence
  Description of Artificial Sequence: Synthetic oligonucleotide
  Sense strand starting at position 2323 of SEQ ID NO: 587950
cacagaauccuaugguaga

SEQ ID NO: 830715 - RNA, 19 nt, Artificial Sequence
  Description of Artificial Sequence: Synthetic oligonucleotide
  Antisense strand to SEQ ID NO: 830714
ucuaccauaggauucugug

SEQ ID NO: 830716 - RNA, 19 nt, Artificial Sequence
  Description of Artificial Sequence: Synthetic oligonucleotide
  Sense strand starting at position 2334 of SEQ ID NO: 587950
augguagacccggguucaa

SEQ ID NO: 830717 - RNA, 19 nt, Artificial Sequence
  Description of Artificial Sequence: Synthetic oligonucleotide
  Antisense strand to SEQ ID NO: 830716
uugaacccgggucuaccau

SEQ ID NO: 830718 - RNA, 19 nt, Artificial Sequence
  Description of Artificial Sequence: Synthetic oligonucleotide
  Sense strand starting at position 2671 of SEQ ID NO: 587950
gcgcaaggugauagaguuu

SEQ ID NO: 830719 - RNA, 19 nt, Artificial Sequence
  Description of Artificial Sequence: Synthetic oligonucleotide
  Antisense strand to SEQ ID NO: 830718
aaacucuaucaccuugcgc

SEQ ID NO: 830720 - RNA, 19 nt, Artificial Sequence
  Description of Artificial Sequence: Synthetic oligonucleotide
  Sense strand starting at position 2678 of SEQ ID NO: 587950
gugauagaguuucuaagug

SEQ ID NO: 830721 - RNA, 19 nt, Artificial Sequence
  Description of Artificial Sequence: Synthetic oligonucleotide
  Antisense strand to SEQ ID NO: 830720
cacuuagaaacucuaucac

SEQ ID NO: 830722 - RNA, 19 nt, Artificial Sequence
  Description of Artificial Sequence: Synthetic oligonucleotide
  Sense strand starting at position 2849 of SEQ ID NO: 587950
gucugagacuagucugaga

SEQ ID NO: 830723 - RNA, 19 nt, Artificial Sequence
  Description of Artificial Sequence: Synthetic oligonucleotide
  Antisense strand to SEQ ID NO: 830722
ucucagacuagucucagac

SEQ ID NO: 830724 - RNA, 19 nt, Artificial Sequence
  Description of Artificial Sequence: Synthetic oligonucleotide
  Sense strand starting at position 2851 of SEQ ID NO: 587950
cugagacuagucugagaac

SEQ ID NO: 830725 - RNA, 19 nt, Artificial Sequence
  Description of Artificial Sequence: Synthetic oligonucleotide
  Antisense strand to SEQ ID NO: 830724
guucucagacuagucucag

SEQ ID NO: 830726 - RNA, 19 nt, Artificial Sequence
  Description of Artificial Sequence: Synthetic oligonucleotide
  Sense strand starting at position 3025 of SEQ ID NO: 587950
uggaguaggccuggaagaa

SEQ ID NO: 830727 - RNA, 19 nt, Artificial Sequence
  Description of Artificial Sequence: Synthetic oligonucleotide
  Antisense strand to SEQ ID NO: 830726
uucuuccaggccuacucca

SEQ ID NO: 830728 - RNA, 19 nt, Artificial Sequence
  Description of Artificial Sequence: Synthetic oligonucleotide
  Sense strand starting at position 3069 of SEQ ID NO: 587950
gauugcauauaugugacua

SEQ ID NO: 830729 - RNA, 19 nt, Artificial Sequence
  Description of Artificial Sequence: Synthetic oligonucleotide
  Antisense strand to SEQ ID NO: 830728
uagucacauauaugcaauc

SEQ ID NO: 830730 - RNA, 19 nt, Artificial Sequence
  Description of Artificial Sequence: Synthetic oligonucleotide
  Sense strand starting at position 3073 of SEQ ID NO: 587950
gcauauaugugacuauuag

SEQ ID NO: 830731 - RNA, 19 nt, Artificial Sequence
  Description of Artificial Sequence: Synthetic oligonucleotide
  Antisense strand to SEQ ID NO: 830730
cuaauagucacauauaugc

SEQ ID NO: 830732 - RNA, 19 nt, Artificial Sequence
  Description of Artificial Sequence: Synthetic oligonucleotide
  Sense strand starting at position 3131 of SEQ ID NO: 587950
ggccaaguacaaugugaug

SEQ ID NO: 830733 - RNA, 19 nt, Artificial Sequence
  Description of Artificial Sequence: Synthetic oligonucleotide
  Antisense strand to SEQ ID NO: 830732
caucacauuguacuuggcc

SEQ ID NO: 830734 - RNA, 19 nt, Artificial Sequence
  Description of Artificial Sequence: Synthetic oligonucleotide
  Sense strand starting at position 3142 of SEQ ID NO: 587950
augugaugggauuguuagu

SEQ ID NO: 830735 - RNA, 19 nt, Artificial Sequence
  Description of Artificial Sequence: Synthetic oligonucleotide
  Antisense strand to SEQ ID NO: 830734
acuaacaaucccaucacau

SEQ ID NO: 830736 - RNA, 19 nt, Artificial Sequence
  Description of Artificial Sequence: Synthetic oligonucleotide
  Sense strand starting at position 3517 of SEQ ID NO: 587950
ugaacuauagcugggaaua

SEQ ID NO: 830737 - RNA, 19 nt, Artificial Sequence
  Description of Artificial Sequence: Synthetic oligonucleotide
  Antisense strand to SEQ ID NO: 830736
uauucccagcuauaguuca

SEQ ID NO: 830738 - RNA, 19 nt, Artificial Sequence
  Description of Artificial Sequence: Synthetic oligonucleotide
  Sense strand starting at position 3518 of SEQ ID NO: 587950
gaacuauagcugggaauac

SEQ ID NO: 830739 - RNA, 19 nt, Artificial Sequence
  Description of Artificial Sequence: Synthetic oligonucleotide
  Antisense strand to SEQ ID NO: 830738
guauucccagcuauaguuc

SEQ ID NO: 830740 - RNA, 19 nt, Artificial Sequence
  Description of Artificial Sequence: Synthetic oligonucleotide
  Sense strand starting at position 3583 of SEQ ID NO: 587950
acaguuauggcucagcauu

SEQ ID NO: 830741 - RNA, 19 nt, Artificial Sequence
  Description of Artificial Sequence: Synthetic oligonucleotide
  Antisense strand to SEQ ID NO: 830740
aaugcugagccauaacugu

SEQ ID NO: 830742 - RNA, 19 nt, Artificial Sequence
  Description of Artificial Sequence: Synthetic oligonucleotide
  Sense strand starting at position 3690 of SEQ ID NO: 587950
gcauacuguguuguuguau

SEQ ID NO: 830743 - RNA, 19 nt, Artificial Sequence
  Description of Artificial Sequence: Synthetic oligonucleotide
  Antisense strand to SEQ ID NO: 830742
auacaacaacacaguaugc

SEQ ID NO: 830744 - RNA, 19 nt, Artificial Sequence
  Description of Artificial Sequence: Synthetic oligonucleotide
  Sense strand starting at position 3745 of SEQ ID NO: 587950
gcgcucauuugucucuaga

SEQ ID NO: 830745 - RNA, 19 nt, Artificial Sequence
  Description of Artificial Sequence: Synthetic oligonucleotide
  Antisense strand to SEQ ID NO: 830744
ucuagagacaaaugagcgc

SEQ ID NO: 830746 - RNA, 19 nt, Artificial Sequence
  Description of Artificial Sequence: Synthetic oligonucleotide
  Sense strand starting at position 3781 of SEQ ID NO: 587950
uuguuagaucacgacuguu

SEQ ID NO: 830747 - RNA, 19 nt, Artificial Sequence
  Description of Artificial Sequence: Synthetic oligonucleotide
  Antisense strand to SEQ ID NO: 830746
aacagucgugaucuaacaa

SEQ ID NO: 830748 - RNA, 19 nt, Artificial Sequence
  Description of Artificial Sequence: Synthetic oligonucleotide
  Sense strand starting at position 2 of SEQ ID NO: 587951
cuaugcuuuaguggaagaa

SEQ ID NO: 830749 - RNA, 19 nt, Artificial Sequence
  Description of Artificial Sequence: Synthetic oligonucleotide
  Antisense strand to SEQ ID NO: 830748
uucuuccacuaaagcauag

SEQ ID NO: 830750 - RNA, 19 nt, Artificial Sequence
  Description of Artificial Sequence: Synthetic oligonucleotide
  Sense strand starting at position 6 of SEQ ID NO: 587951
gcuuuaguggaagaagcaa

SEQ ID NO: 830751 - RNA, 19 nt, Artificial Sequence
  Description of Artificial Sequence: Synthetic oligonucleotide
  Antisense strand to SEQ ID NO: 830750
uugcuucuuccacuaaagc

SEQ ID NO: 830752 - RNA, 19 nt, Artificial Sequence
  Description of Artificial Sequence: Synthetic oligonucleotide
  Sense strand starting at position 25 of SEQ ID NO: 587951
acaagacauuuggauaauc

SEQ ID NO: 830753 - RNA, 19 nt, Artificial Sequence
  Description of Artificial Sequence: Synthetic oligonucleotide
  Antisense strand to SEQ ID NO: 830752
gauuauccaaaugucuugu

SEQ ID NO: 830754 - RNA, 19 nt, Artificial Sequence
  Description of Artificial Sequence: Synthetic oligonucleotide
  Sense strand starting at position 111 of SEQ ID NO: 587951
aggcgagugggcuauaacu

SEQ ID NO: 830755 - RNA, 19 nt, Artificial Sequence
  Description of Artificial Sequence: Synthetic oligonucleotide
  Antisense strand to SEQ ID NO: 830754
aguuauagcccacucgccu

SEQ ID NO: 830756 - RNA, 19 nt, Artificial Sequence
  Description of Artificial Sequence: Synthetic oligonucleotide
  Sense strand starting at position 260 of SEQ ID NO: 587951
gauaaagaggccugacagu

SEQ ID NO: 830757 - RNA, 19 nt, Artificial Sequence
  Description of Artificial Sequence: Synthetic oligonucleotide
  Antisense strand to SEQ ID NO: 830756
acugucaggccucuuuauc

SEQ ID NO: 830758 - RNA, 19 nt, Artificial Sequence
  Description of Artificial Sequence: Synthetic oligonucleotide
  Sense strand starting at position 494 of SEQ ID NO: 587951
gggaguggugcgccuguaa

SEQ ID NO: 830759 - RNA, 19 nt, Artificial Sequence
  Description of Artificial Sequence: Synthetic oligonucleotide
  Antisense strand to SEQ ID NO: 830758
uuacaggcgcaccacuccc

SEQ ID NO: 830760 - RNA, 19 nt, Artificial Sequence
  Description of Artificial Sequence: Synthetic oligonucleotide
  Sense strand starting at position 495 of SEQ ID NO: 587951
ggaguggugcgccuguaau

SEQ ID NO: 830761 - RNA, 19 nt, Artificial Sequence
  Description of Artificial Sequence: Synthetic oligonucleotide
  Antisense strand to SEQ ID NO: 830760
auuacaggcgcaccacucc

SEQ ID NO: 830762 - RNA, 19 nt, Artificial Sequence
  Description of Artificial Sequence: Synthetic oligonucleotide
  Sense strand starting at position 1040 of SEQ ID NO: 587951
cgugaaauccuagggaauu

SEQ ID NO: 830763 - RNA, 19 nt, Artificial Sequence
  Description of Artificial Sequence: Synthetic oligonucleotide
  Antisense strand to SEQ ID NO: 830762
aauucccuaggauuucacg

SEQ ID NO: 830764 - RNA, 19 nt, Artificial Sequence
  Description of Artificial Sequence: Synthetic oligonucleotide
  Sense strand starting at position 1212 of SEQ ID NO: 587951
cccagcaaugcauaaugaa

SEQ ID NO: 830765 - RNA, 19 nt, Artificial Sequence
  Description of Artificial Sequence: Synthetic oligonucleotide
  Antisense strand to SEQ ID NO: 830764
uucauuaugcauugcuggg

SEQ ID NO: 830766 - RNA, 19 nt, Artificial Sequence
  Description of Artificial Sequence: Synthetic oligonucleotide
  Sense strand starting at position 1245 of SEQ ID NO: 587951
cauacacgccgauauguaa

SEQ ID NO: 830767 - RNA, 19 nt, Artificial Sequence
  Description of Artificial Sequence: Synthetic oligonucleotide
  Antisense strand to SEQ ID NO: 830766
uuacauaucggcguguaug

SEQ ID NO: 830768 - RNA, 19 nt, Artificial Sequence
  Description of Artificial Sequence: Synthetic oligonucleotide
  Sense strand starting at position 1359 of SEQ ID NO: 587951
aaugcuugugcgucuaaac

SEQ ID NO: 830769 - RNA, 19 nt, Artificial Sequence
  Description of Artificial Sequence: Synthetic oligonucleotide
  Antisense strand to SEQ ID NO: 830768
guuuagacgcacaagcauu

SEQ ID NO: 830770 - RNA, 19 nt, Artificial Sequence
  Description of Artificial Sequence: Synthetic oligonucleotide
  Sense strand starting at position 1360 of SEQ ID NO: 587951
augcuugugcgucuaaaca

SEQ ID NO: 830771 - RNA, 19 nt, Artificial Sequence
  Description of Artificial Sequence: Synthetic oligonucleotide
  Antisense strand to SEQ ID NO: 830770
uguuuagacgcacaagcau

SEQ ID NO: 830772 - RNA, 19 nt, Artificial Sequence
  Description of Artificial Sequence: Synthetic oligonucleotide
  Sense strand starting at position 1484 of SEQ ID NO: 587951
guuaaauacucacugagca

SEQ ID NO: 830773 - RNA, 19 nt, Artificial Sequence
  Description of Artificial Sequence: Synthetic oligonucleotide
  Antisense strand to SEQ ID NO: 830772
ugcucagugaguauuuaac

SEQ ID NO: 830774 - RNA, 19 nt, Artificial Sequence
  Description of Artificial Sequence: Synthetic oligonucleotide
  Sense strand starting at position 1528 of SEQ ID NO: 587951
gggauaccgugaucauaaa

SEQ ID NO: 830775 - RNA, 19 nt, Artificial Sequence
  Description of Artificial Sequence: Synthetic oligonucleotide
  Antisense strand to SEQ ID NO: 830774
uuuaugaucacgguauccc

SEQ ID NO: 830776 - RNA, 19 nt, Artificial Sequence
  Description of Artificial Sequence: Synthetic oligonucleotide
  Sense strand starting at position 2122 of SEQ ID NO: 587951
ggacaauguaaucgaccaa

SEQ ID NO: 830777 - RNA, 19 nt, Artificial Sequence
  Description of Artificial Sequence: Synthetic oligonucleotide
  Antisense strand to SEQ ID NO: 830776
uuggucgauuacauugucc

SEQ ID NO: 830778 - RNA, 19 nt, Artificial Sequence
  Description of Artificial Sequence: Synthetic oligonucleotide
  Sense strand starting at position 2230 of SEQ ID NO: 587951
ggaucauagacgcgaggaa

SEQ ID NO: 830779 - RNA, 19 nt, Artificial Sequence
  Description of Artificial Sequence: Synthetic oligonucleotide
  Antisense strand to SEQ ID NO: 830778
uuccucgcgucuaugaucc

SEQ ID NO: 830780 - RNA, 19 nt, Artificial Sequence
  Description of Artificial Sequence: Synthetic oligonucleotide
  Sense strand starting at position 2231 of SEQ ID NO: 587951
gaucauagacgcgaggaau

SEQ ID NO: 830781 - RNA, 19 nt, Artificial Sequence
  Description of Artificial Sequence: Synthetic oligonucleotide
  Antisense strand to SEQ ID NO: 830780
auuccucgcgucuaugauc

SEQ ID NO: 830782 - RNA, 19 nt, Artificial Sequence
  Description of Artificial Sequence: Synthetic oligonucleotide
  Sense strand starting at position 2243 of SEQ ID NO: 587951
gaggaauuggcuugggaau

SEQ ID NO: 830783 - RNA, 19 nt, Artificial Sequence
  Description of Artificial Sequence: Synthetic oligonucleotide
  Antisense strand to SEQ ID NO: 830782
auucccaagccaauuccuc

SEQ ID NO: 830784 - RNA, 19 nt, Artificial Sequence
  Description of Artificial Sequence: Synthetic oligonucleotide
  Sense strand starting at position 2244 of SEQ ID NO: 587951
aggaauuggcuugggaauu

SEQ ID NO: 830785 - RNA, 19 nt, Artificial Sequence
  Description of Artificial Sequence: Synthetic oligonucleotide
  Antisense strand to SEQ ID NO: 830784
aauucccaagccaauuccu

SEQ ID NO: 830786 - RNA, 19 nt, Artificial Sequence
  Description of Artificial Sequence: Synthetic oligonucleotide
  Sense strand starting at position 2462 of SEQ ID NO: 587951
aacguucgggcucaaauga

SEQ ID NO: 830787 - RNA, 19 nt, Artificial Sequence
  Description of Artificial Sequence: Synthetic oligonucleotide
  Antisense strand to SEQ ID NO: 830786
ucauuugagcccgaacguu

SEQ ID NO: 830788 - RNA, 19 nt, Artificial Sequence
  Description of Artificial Sequence: Synthetic oligonucleotide
  Sense strand starting at position 2540 of SEQ ID NO: 587951
ucguuucuucaguuucgua

SEQ ID NO: 830789 - RNA, 19 nt, Artificial Sequence
  Description of Artificial Sequence: Synthetic oligonucleotide
  Antisense strand to SEQ ID NO: 830788
uacgaaacugaagaaacga

SEQ ID NO: 830790 - RNA, 19 nt, Artificial Sequence
  Description of Artificial Sequence: Synthetic oligonucleotide
  Sense strand starting at position 2821 of SEQ ID NO: 587951
ugaggcugcccucacaaau

SEQ ID NO: 830791 - RNA, 19 nt, Artificial Sequence
  Description of Artificial Sequence: Synthetic oligonucleotide
  Antisense strand to SEQ ID NO: 830790
auuugugagggcagccuca

SEQ ID NO: 830792 - RNA, 19 nt, Artificial Sequence
  Description of Artificial Sequence: Synthetic oligonucleotide
  Sense strand starting at position 2841 of SEQ ID NO: 587951
accacaaacuuggugacau

SEQ ID NO: 830793 - RNA, 19 nt, Artificial Sequence
  Description of Artificial Sequence: Synthetic oligonucleotide
  Antisense strand to SEQ ID NO: 830792
augucaccaaguuuguggu

SEQ ID NO: 830794 - RNA, 19 nt, Artificial Sequence
  Description of Artificial Sequence: Synthetic oligonucleotide
  Sense strand starting at position 2870 of SEQ ID NO: 587951
aaauguauucuugggaagu

SEQ ID NO: 830795 - RNA, 19 nt, Artificial Sequence
  Description of Artificial Sequence: Synthetic oligonucleotide
  Antisense strand to SEQ ID NO: 830794
acuucccaagaauacauuu

SEQ ID NO: 830796 - RNA, 19 nt, Artificial Sequence
  Description of Artificial Sequence: Synthetic oligonucleotide
  Sense strand starting at position 2886 of SEQ ID NO: 587951
aguucuugaggccauacau

SEQ ID NO: 830797 - RNA, 19 nt, Artificial Sequence
  Description of Artificial Sequence: Synthetic oligonucleotide
  Antisense strand to SEQ ID NO: 830796
auguauggccucaagaacu

SEQ ID NO: 830798 - RNA, 19 nt, Artificial Sequence
  Description of Artificial Sequence: Synthetic oligonucleotide
  Sense strand starting at position 2893 of SEQ ID NO: 587951
gaggccauacaucggaaau

SEQ ID NO: 830799 - RNA, 19 nt, Artificial Sequence
  Description of Artificial Sequence: Synthetic oligonucleotide
  Antisense strand to SEQ ID NO: 830798
auuuccgauguauggccuc

SEQ ID NO: 830800 - RNA, 19 nt, Artificial Sequence
  Description of Artificial Sequence: Synthetic oligonucleotide
  Sense strand starting at position 2894 of SEQ ID NO: 587951
aggccauacaucggaaauc

SEQ ID NO: 830801 - RNA, 19 nt, Artificial Sequence
  Description of Artificial Sequence: Synthetic oligonucleotide
  Antisense strand to SEQ ID NO: 830800
gauuuccgauguauggccu

SEQ ID NO: 830802 - RNA, 19 nt, Artificial Sequence
  Description of Artificial Sequence: Synthetic oligonucleotide
  Sense strand starting at position 2944 of SEQ ID NO: 587951
gcaagauucccuuacuugu

SEQ ID NO: 830803 - RNA, 19 nt, Artificial Sequence
  Description of Artificial Sequence: Synthetic oligonucleotide
  Antisense strand to SEQ ID NO: 830802
acaaguaagggaaucuugc

SEQ ID NO: 830804 - RNA, 19 nt, Artificial Sequence
  Description of Artificial Sequence: Synthetic oligonucleotide
  Sense strand starting at position 2986 of SEQ ID NO: 587951
uggcguucucugcuuguga

SEQ ID NO: 830805 - RNA, 19 nt, Artificial Sequence
  Description of Artificial Sequence: Synthetic oligonucleotide
  Antisense strand to SEQ ID NO: 830804
ucacaagcagagaacgcca

SEQ ID NO: 830806 - RNA, 19 nt, Artificial Sequence
  Description of Artificial Sequence: Synthetic oligonucleotide
  Sense strand starting at position 3111 of SEQ ID NO: 587951
ggaaacuugucauuggguc

SEQ ID NO: 830807 - RNA, 19 nt, Artificial Sequence
  Description of Artificial Sequence: Synthetic oligonucleotide
  Antisense strand to SEQ ID NO: 830806
gacccaaugacaaguuucc

SEQ ID NO: 830808 - RNA, 19 nt, Artificial Sequence
  Description of Artificial Sequence: Synthetic oligonucleotide
  Sense strand starting at position 3118 of SEQ ID NO: 587951
ugucauuggguccauauga

SEQ ID NO: 830809 - RNA, 19 nt, Artificial Sequence
  Description of Artificial Sequence: Synthetic oligonucleotide
  Antisense strand to SEQ ID NO: 830808
ucauauggacccaaugaca

SEQ ID NO: 830810 - RNA, 19 nt, Artificial Sequence
  Description of Artificial Sequence: Synthetic oligonucleotide
  Sense strand starting at position 3235 of SEQ ID NO: 587951
uugggauuaguauguugac

SEQ ID NO: 830811 - RNA, 19 nt, Artificial Sequence
  Description of Artificial Sequence: Synthetic oligonucleotide
  Antisense strand to SEQ ID NO: 830810
gucaacauacuaaucccaa

SEQ ID NO: 830812 - RNA, 19 nt, Artificial Sequence
  Description of Artificial Sequence: Synthetic oligonucleotide
  Sense strand starting at position 3236 of SEQ ID NO: 587951
ugggauuaguauguugaca

SEQ ID NO: 830813 - RNA, 19 nt, Artificial Sequence
  Description of Artificial Sequence: Synthetic oligonucleotide
  Antisense strand to SEQ ID NO: 830812
ugucaacauacuaauccca

SEQ ID NO: 830814 - RNA, 19 nt, Artificial Sequence
  Description of Artificial Sequence: Synthetic oligonucleotide
  Sense strand starting at position 3391 of SEQ ID NO: 587951
uuauauggucgugguauuu

SEQ ID NO: 830815 - RNA, 19 nt, Artificial Sequence
  Description of Artificial Sequence: Synthetic oligonucleotide
  Antisense strand to SEQ ID NO: 830814
aaauaccacgaccauauaa

SEQ ID NO: 830816 - RNA, 19 nt, Artificial Sequence
  Description of Artificial Sequence: Synthetic oligonucleotide
  Sense strand starting at position 3495 of SEQ ID NO: 587951
guggcucugagagaucaga

SEQ ID NO: 830817 - RNA, 19 nt, Artificial Sequence
  Description of Artificial Sequence: Synthetic oligonucleotide
  Antisense strand to SEQ ID NO: 830816
ucugaucucucagagccac

SEQ ID NO: 830818 - RNA, 19 nt, Artificial Sequence
  Description of Artificial Sequence: Synthetic oligonucleotide
  Sense strand starting at position 3838 of SEQ ID NO: 587951
augugauaaagagguuuau

SEQ ID NO: 830819 - RNA, 19 nt, Artificial Sequence
  Description of Artificial Sequence: Synthetic oligonucleotide
  Antisense strand to SEQ ID NO: 830818
auaaaccucuuuaucacau

SEQ ID NO: 830820 - RNA, 19 nt, Artificial Sequence
  Description of Artificial Sequence: Synthetic oligonucleotide
  Sense strand starting at position 3847 of SEQ ID NO: 587951
agagguuuauauguuagau

SEQ ID NO: 830821 - RNA, 19 nt, Artificial Sequence
  Description of Artificial Sequence: Synthetic oligonucleotide
  Antisense strand to SEQ ID NO: 830820
aucuaacauauaaaccucu

SEQ ID NO: 830822 - RNA, 19 nt, Artificial Sequence
  Description of Artificial Sequence: Synthetic oligonucleotide
  Sense strand starting at position 3856 of SEQ ID NO: 587951
uauguuagaucuucuggac

SEQ ID NO: 830823 - RNA, 19 nt, Artificial Sequence
  Description of Artificial Sequence: Synthetic oligonucleotide
  Antisense strand to SEQ ID NO: 830822
guccagaagaucuaacaua

SEQ ID NO: 830824 - RNA, 19 nt, Artificial Sequence
  Description of Artificial Sequence: Synthetic oligonucleotide
  Sense strand starting at position 3955 of SEQ ID NO: 587951
aguucuacucauuagaucu

SEQ ID NO: 830825 - RNA, 19 nt, Artificial Sequence
  Description of Artificial Sequence: Synthetic oligonucleotide
  Antisense strand to SEQ ID NO: 830824
agaucuaaugaguagaacu

SEQ ID NO: 830826 - RNA, 19 nt, Artificial Sequence
  Description of Artificial Sequence: Synthetic oligonucleotide
  Sense strand starting at position 3962 of SEQ ID NO: 587951
cucauuagaucucccaguu

SEQ ID NO: 830827 - RNA, 19 nt, Artificial Sequence
  Description of Artificial Sequence: Synthetic oligonucleotide
  Antisense strand to SEQ ID NO: 830826
aacugggagaucuaaugag

SEQ ID NO: 830828 - RNA, 19 nt, Artificial Sequence
  Description of Artificial Sequence: Synthetic oligonucleotide
  Sense strand starting at position 56 of SEQ ID NO: 587952
gucuuacguauuuaguguu

SEQ ID NO: 830829 - RNA, 19 nt, Artificial Sequence
  Description of Artificial Sequence: Synthetic oligonucleotide
  Antisense strand to SEQ ID NO: 830828
aacacuaaauacguaagac

SEQ ID NO: 830830 - RNA, 19 nt, Artificial Sequence
  Description of Artificial Sequence: Synthetic oligonucleotide
  Sense strand starting at position 91 of SEQ ID NO: 587952
cuagcugucauguggaaag

SEQ ID NO: 830831 - RNA, 19 nt, Artificial Sequence
  Description of Artificial Sequence: Synthetic oligonucleotide
  Antisense strand to SEQ ID NO: 830830
cuuuccacaugacagcuag

SEQ ID NO: 830832 - RNA, 19 nt, Artificial Sequence
  Description of Artificial Sequence: Synthetic oligonucleotide
  Sense strand starting at position 93 of SEQ ID NO: 587952
agcugucauguggaaagca

SEQ ID NO: 830833 - RNA, 19 nt, Artificial Sequence
  Description of Artificial Sequence: Synthetic oligonucleotide
  Antisense strand to SEQ ID NO: 830832
ugcuuuccacaugacagcu

SEQ ID NO: 830834 - RNA, 19 nt, Artificial Sequence
  Description of Artificial Sequence: Synthetic oligonucleotide
  Sense strand starting at position 107 of SEQ ID NO: 587952
aagcaugcuguccagaaga

SEQ ID NO: 830835 - RNA, 19 nt, Artificial Sequence
  Description of Artificial Sequence: Synthetic oligonucleotide
  Antisense strand to SEQ ID NO: 830834
ucuucuggacagcaugcuu

SEQ ID NO: 830836 - RNA, 19 nt, Artificial Sequence
  Description of Artificial Sequence: Synthetic oligonucleotide
  Sense strand starting at position 109 of SEQ ID NO: 587952
gcaugcuguccagaagaaa

SEQ ID NO: 830837 - RNA, 19 nt, Artificial Sequence
  Description of Artificial Sequence: Synthetic oligonucleotide
  Antisense strand to SEQ ID NO: 830836
uuucuucuggacagcaugc

SEQ ID NO: 830838 - RNA, 19 nt, Artificial Sequence
  Description of Artificial Sequence: Synthetic oligonucleotide
  Sense strand starting at position 133 of SEQ ID NO: 587952
gguccuggcuuauuccaaa

SEQ ID NO: 830839 - RNA, 19 nt, Artificial Sequence
  Description of Artificial Sequence: Synthetic oligonucleotide
  Antisense strand to SEQ ID NO: 830838
uuuggaauaagccaggacc

SEQ ID NO: 830840 - RNA, 19 nt, Artificial Sequence
  Description of Artificial Sequence: Synthetic oligonucleotide
  Sense strand starting at position 235 of SEQ ID NO: 587952
agcucugugugagucacaa

SEQ ID NO: 830841 - RNA, 19 nt, Artificial Sequence
  Description of Artificial Sequence: Synthetic oligonucleotide
  Antisense strand to SEQ ID NO: 830840
uugugacucacacagagcu

SEQ ID NO: 830842 - RNA, 19 nt, Artificial Sequence
  Description of Artificial Sequence: Synthetic oligonucleotide
  Sense strand starting at position 394 of SEQ ID NO: 587952
gccgaacgugguuaaacaa

SEQ ID NO: 830843 - RNA, 19 nt, Artificial Sequence
  Description of Artificial Sequence: Synthetic oligonucleotide
  Antisense strand to SEQ ID NO: 830842
uuguuuaaccacguucggc

SEQ ID NO: 830844 - RNA, 19 nt, Artificial Sequence
  Description of Artificial Sequence: Synthetic oligonucleotide
  Sense strand starting at position 411 of SEQ ID NO: 587952
aaauuuaggugaggacaau

SEQ ID NO: 830845 - RNA, 19 nt, Artificial Sequence
  Description of Artificial Sequence: Synthetic oligonucleotide
  Antisense strand to SEQ ID NO: 830844
auuguccucaccuaaauuu

SEQ ID NO: 830846 - RNA, 19 nt, Artificial Sequence
  Description of Artificial Sequence: Synthetic oligonucleotide
  Sense strand starting at position 420 of SEQ ID NO: 587952
ugaggacaauuauauaagu

SEQ ID NO: 830847 - RNA, 19 nt, Artificial Sequence
  Description of Artificial Sequence: Synthetic oligonucleotide
  Antisense strand to SEQ ID NO: 830846
acuuauauaauuguccuca

SEQ ID NO: 830848 - RNA, 19 nt, Artificial Sequence
  Description of Artificial Sequence: Synthetic oligonucleotide
  Sense strand starting at position 717 of SEQ ID NO: 587952
gaguuaaacuccgucucga

SEQ ID NO: 830849 - RNA, 19 nt, Artificial Sequence
  Description of Artificial Sequence: Synthetic oligonucleotide
  Antisense strand to SEQ ID NO: 830848
ucgagacggaguuuaacuc

SEQ ID NO: 830850 - RNA, 19 nt, Artificial Sequence
  Description of Artificial Sequence: Synthetic oligonucleotide
  Sense strand starting at position 755 of SEQ ID NO: 587952
aacagaugagucugaagca

SEQ ID NO: 830851 - RNA, 19 nt, Artificial Sequence
  Description of Artificial Sequence: Synthetic oligonucleotide
  Antisense strand to SEQ ID NO: 830850
ugcuucagacucaucuguu

SEQ ID NO: 830852 - RNA, 19 nt, Artificial Sequence
  Description of Artificial Sequence: Synthetic oligonucleotide
  Sense strand starting at position 779 of SEQ ID NO: 587952
cugaaagugccacacaaau

SEQ ID NO: 830853 - RNA, 19 nt, Artificial Sequence
  Description of Artificial Sequence: Synthetic oligonucleotide
  Antisense strand to SEQ ID NO: 830852
auuuguguggcacuuucag

SEQ ID NO: 830854 - RNA, 19 nt, Artificial Sequence
  Description of Artificial Sequence: Synthetic oligonucleotide
  Sense strand starting at position 806 of SEQ ID NO: 587952
uguagaaacuggucguaug

SEQ ID NO: 830855 - RNA, 19 nt, Artificial Sequence
  Description of Artificial Sequence: Synthetic oligonucleotide
  Antisense strand to SEQ ID NO: 830854
cauacgaccaguuucuaca

SEQ ID NO: 830856 - RNA, 19 nt, Artificial Sequence
  Description of Artificial Sequence: Synthetic oligonucleotide
  Sense strand starting at position 807 of SEQ ID NO: 587952
guagaaacuggucguauga

SEQ ID NO: 830857 - RNA, 19 nt, Artificial Sequence
  Description of Artificial Sequence: Synthetic oligonucleotide
  Antisense strand to SEQ ID NO: 830856
ucauacgaccaguuucuac

SEQ ID NO: 830858 - RNA, 19 nt, Artificial Sequence
  Description of Artificial Sequence: Synthetic oligonucleotide
  Sense strand starting at position 971 of SEQ ID NO: 587952
gugcgugcuguaguccuaa

SEQ ID NO: 830859 - RNA, 19 nt, Artificial Sequence
  Description of Artificial Sequence: Synthetic oligonucleotide
  Antisense strand to SEQ ID NO: 830858
uuaggacuacagcacgcac

SEQ ID NO: 830860 - RNA, 19 nt, Artificial Sequence
  Description of Artificial Sequence: Synthetic oligonucleotide
  Sense strand starting at position 973 of SEQ ID NO: 587952
gcgugcuguaguccuaacu

SEQ ID NO: 830861 - RNA, 19 nt, Artificial Sequence
  Description of Artificial Sequence: Synthetic oligonucleotide
  Antisense strand to SEQ ID NO: 830860
aguuaggacuacagcacgc

SEQ ID NO: 830862 - RNA, 19 nt, Artificial Sequence
  Description of Artificial Sequence: Synthetic oligonucleotide
  Sense strand starting at position 1037 of SEQ ID NO: 587952
uuagcaacucgccaagaaa

SEQ ID NO: 830863 - RNA, 19 nt, Artificial Sequence
  Description of Artificial Sequence: Synthetic oligonucleotide
  Antisense strand to SEQ ID NO: 830862
uuucuuggcgaguugcuaa

SEQ ID NO: 830864 - RNA, 19 nt, Artificial Sequence
  Description of Artificial Sequence: Synthetic oligonucleotide
  Sense strand starting at position 1162 of SEQ ID NO: 587952
uuaccagcccgaugucuaa

SEQ ID NO: 830865 - RNA, 19 nt, Artificial Sequence
  Description of Artificial Sequence: Synthetic oligonucleotide
  Antisense strand to SEQ ID NO: 830864
uuagacaucgggcugguaa

SEQ ID NO: 830866 - RNA, 19 nt, Artificial Sequence
  Description of Artificial Sequence: Synthetic oligonucleotide
  Sense strand starting at position 1213 of SEQ ID NO: 587952
cuagauguuggccacggau

SEQ ID NO: 830867 - RNA, 19 nt, Artificial Sequence
  Description of Artificial Sequence: Synthetic oligonucleotide
  Antisense strand to SEQ ID NO: 830866
auccguggccaacaucuag

SEQ ID NO: 830868 - RNA, 19 nt, Artificial Sequence
  Description of Artificial Sequence: Synthetic oligonucleotide
  Sense strand starting at position 1215 of SEQ ID NO: 587952
agauguuggccacggauca

SEQ ID NO: 830869 - RNA, 19 nt, Artificial Sequence
  Description of Artificial Sequence: Synthetic oligonucleotide
  Antisense strand to SEQ ID NO: 830868
ugauccguggccaacaucu

SEQ ID NO: 830870 - RNA, 19 nt, Artificial Sequence
  Description of Artificial Sequence: Synthetic oligonucleotide
  Sense strand starting at position 1348 of SEQ ID NO: 587952
cccuaaaucgauuagguuu

SEQ ID NO: 830871 - RNA, 19 nt, Artificial Sequence
  Description of Artificial Sequence: Synthetic oligonucleotide
  Antisense strand to SEQ ID NO: 830870
aaaccuaaucgauuuaggg

SEQ ID NO: 830872 - RNA, 19 nt, Artificial Sequence
  Description of Artificial Sequence: Synthetic oligonucleotide
  Sense strand starting at position 1354 of SEQ ID NO: 587952
aucgauuagguuuauuaca

SEQ ID NO: 830873 - RNA, 19 nt, Artificial Sequence
  Description of Artificial Sequence: Synthetic oligonucleotide
  Antisense strand to SEQ ID NO: 830872
uguaauaaaccuaaucgau

SEQ ID NO: 830874 - RNA, 19 nt, Artificial Sequence
  Description of Artificial Sequence: Synthetic oligonucleotide
  Sense strand starting at position 2070 of SEQ ID NO: 587952
cccuauugcaucgggacau

SEQ ID NO: 830875 - RNA, 19 nt, Artificial Sequence
  Description of Artificial Sequence: Synthetic oligonucleotide
  Antisense strand to SEQ ID NO: 830874
augucccgaugcaauaggg

SEQ ID NO: 830876 - RNA, 19 nt, Artificial Sequence
  Description of Artificial Sequence: Synthetic oligonucleotide
  Sense strand starting at position 2080 of SEQ ID NO: 587952
ucgggacaucccggaguuu

SEQ ID NO: 830877 - RNA, 19 nt, Artificial Sequence
  Description of Artificial Sequence: Synthetic oligonucleotide
  Antisense strand to SEQ ID NO: 830876
aaacuccgggaugucccga

SEQ ID NO: 830878 - RNA, 19 nt, Artificial Sequence
  Description of Artificial Sequence: Synthetic oligonucleotide
  Sense strand starting at position 2135 of SEQ ID NO: 587952
gcagauuccgagcauggaa

SEQ ID NO: 830879 - RNA, 19 nt, Artificial Sequence
  Description of Artificial Sequence: Synthetic oligonucleotide
  Antisense strand to SEQ ID NO: 830878
uuccaugcucggaaucugc

SEQ ID NO: 830880 - RNA, 19 nt, Artificial Sequence
  Description of Artificial Sequence: Synthetic oligonucleotide
  Sense strand starting at position 2187 of SEQ ID NO: 587952
gcacuuucuccauaggaga

SEQ ID NO: 830881 - RNA, 19 nt, Artificial Sequence
  Description of Artificial Sequence: Synthetic oligonucleotide
  Antisense strand to SEQ ID NO: 830880
ucuccuauggagaaagugc

SEQ ID NO: 830882 - RNA, 19 nt, Artificial Sequence
  Description of Artificial Sequence: Synthetic oligonucleotide
  Sense strand starting at position 2226 of SEQ ID NO: 587952
acccguguccucuaaguua

SEQ ID NO: 830883 - RNA, 19 nt, Artificial Sequence
  Description of Artificial Sequence: Synthetic oligonucleotide
  Antisense strand to SEQ ID NO: 830882
uaacuuagaggacacgggu

SEQ ID NO: 830884 - RNA, 19 nt, Artificial Sequence
  Description of Artificial Sequence: Synthetic oligonucleotide
  Sense strand starting at position 2231 of SEQ ID NO: 587952
uguccucuaaguuagguua

SEQ ID NO: 830885 - RNA, 19 nt, Artificial Sequence
  Description of Artificial Sequence: Synthetic oligonucleotide
  Antisense strand to SEQ ID NO: 830884
uaaccuaacuuagaggaca

SEQ ID NO: 830886 - RNA, 19 nt, Artificial Sequence
  Description of Artificial Sequence: Synthetic oligonucleotide
  Sense strand starting at position 2690 of SEQ ID NO: 587952
ggagaaacaucgucacuac

SEQ ID NO: 830887 - RNA, 19 nt, Artificial Sequence
  Description of Artificial Sequence: Synthetic oligonucleotide
  Antisense strand to SEQ ID NO: 830886
guagugacgauguuucucc

SEQ ID NO: 830888 - RNA, 19 nt, Artificial Sequence
  Description of Artificial Sequence: Synthetic oligonucleotide
  Sense strand starting at position 2691 of SEQ ID NO: 587952
gagaaacaucgucacuacu

SEQ ID NO: 830889 - RNA, 19 nt, Artificial Sequence
  Description of Artificial Sequence: Synthetic oligonucleotide
  Antisense strand to SEQ ID NO: 830888
aguagugacgauguuucuc

SEQ ID NO: 830890 - RNA, 19 nt, Artificial Sequence
  Description of Artificial Sequence: Synthetic oligonucleotide
  Sense strand starting at position 2968 of SEQ ID NO: 587952
gaaaccuucuggucagaaa

SEQ ID NO: 830891 - RNA, 19 nt, Artificial Sequence
  Description of Artificial Sequence: Synthetic oligonucleotide
  Antisense strand to SEQ ID NO: 830890
uuucugaccagaagguuuc

SEQ ID NO: 830892 - RNA, 19 nt, Artificial Sequence
  Description of Artificial Sequence: Synthetic oligonucleotide
  Sense strand starting at position 3029 of SEQ ID NO: 587952
ggugacuuaaguugugaca

SEQ ID NO: 830893 - RNA, 19 nt, Artificial Sequence
  Description of Artificial Sequence: Synthetic oligonucleotide
  Antisense strand to SEQ ID NO: 830892
ugucacaacuuaagucacc

SEQ ID NO: 830894 - RNA, 19 nt, Artificial Sequence
  Description of Artificial Sequence: Synthetic oligonucleotide
  Sense strand starting at position 3117 of SEQ ID NO: 587952
augcuauuugcagguauaa

SEQ ID NO: 830895 - RNA, 19 nt, Artificial Sequence
  Description of Artificial Sequence: Synthetic oligonucleotide
  Antisense strand to SEQ ID NO: 830894
uuauaccugcaaauagcau

SEQ ID NO: 830896 - RNA, 19 nt, Artificial Sequence
  Description of Artificial Sequence: Synthetic oligonucleotide
  Sense strand starting at position 3248 of SEQ ID NO: 587952
uugggaucguuucccuauu

SEQ ID NO: 830897 - RNA, 19 nt, Artificial Sequence
  Description of Artificial Sequence: Synthetic oligonucleotide
  Antisense strand to SEQ ID NO: 830896
aauagggaaacgaucccaa

SEQ ID NO: 830898 - RNA, 19 nt, Artificial Sequence
  Description of Artificial Sequence: Synthetic oligonucleotide
  Sense strand starting at position 3249 of SEQ ID NO: 587952
ugggaucguuucccuauuu

SEQ ID NO: 830899 - RNA, 19 nt, Artificial Sequence
  Description of Artificial Sequence: Synthetic oligonucleotide
  Antisense strand to SEQ ID NO: 830898
aaauagggaaacgauccca

SEQ ID NO: 830900 - RNA, 19 nt, Artificial Sequence
  Description of Artificial Sequence: Synthetic oligonucleotide
  Sense strand starting at position 3643 of SEQ ID NO: 587952
cggccuaucucgucaauuu

SEQ ID NO: 830901 - RNA, 19 nt, Artificial Sequence
  Description of Artificial Sequence: Synthetic oligonucleotide
  Antisense strand to SEQ ID NO: 830900
aaauugacgagauaggccg

SEQ ID NO: 830902 - RNA, 19 nt, Artificial Sequence
  Description of Artificial Sequence: Synthetic oligonucleotide
  Sense strand starting at position 3666 of SEQ ID NO: 587952
gcauaucuauguguucuaa

SEQ ID NO: 830903 - RNA, 19 nt, Artificial Sequence
  Description of Artificial Sequence: Synthetic oligonucleotide
  Antisense strand to SEQ ID NO: 830902
uuagaacacauagauaugc

SEQ ID NO: 830904 - RNA, 19 nt, Artificial Sequence
  Description of Artificial Sequence: Synthetic oligonucleotide
  Sense strand starting at position 3764 of SEQ ID NO: 587952
cucaauuaaugaguaugua

SEQ ID NO: 830905 - RNA, 19 nt, Artificial Sequence
  Description of Artificial Sequence: Synthetic oligonucleotide
  Antisense strand to SEQ ID NO: 830904
uacauacucauuaauugag

SEQ ID NO: 830906 - RNA, 19 nt, Artificial Sequence
  Description of Artificial Sequence: Synthetic oligonucleotide
  Sense strand starting at position 3847 of SEQ ID NO: 587952
cccaaagaaucaguugaug

SEQ ID NO: 830907 - RNA, 19 nt, Artificial Sequence
  Description of Artificial Sequence: Synthetic oligonucleotide
  Antisense strand to SEQ ID NO: 830906
caucaacugauucuuuggg

SEQ ID NO: 830908 - RNA, 19 nt, Artificial Sequence
  Description of Artificial Sequence: Synthetic oligonucleotide
  Sense strand starting at position 85 of SEQ ID NO: 587953
gauguauaggacugacuau

SEQ ID NO: 830909 - RNA, 19 nt, Artificial Sequence
  Description of Artificial Sequence: Synthetic oligonucleotide
  Antisense strand to SEQ ID NO: 830908
auagucaguccuauacauc

SEQ ID NO: 830910 - RNA, 19 nt, Artificial Sequence
  Description of Artificial Sequence: Synthetic oligonucleotide
  Sense strand starting at position 102 of SEQ ID NO: 587953
auaacuucuggcuguaaac

SEQ ID NO: 830911 - RNA, 19 nt, Artificial Sequence
  Description of Artificial Sequence: Synthetic oligonucleotide
  Antisense strand to SEQ ID NO: 830910
guuuacagccagaaguuau

SEQ ID NO: 830912 - RNA, 19 nt, Artificial Sequence
  Description of Artificial Sequence: Synthetic oligonucleotide
  Sense strand starting at position 174 of SEQ ID NO: 587953
uuugaaugguaguuaucaa

SEQ ID NO: 830913 - RNA, 19 nt, Artificial Sequence
  Description of Artificial Sequence: Synthetic oligonucleotide
  Antisense strand to SEQ ID NO: 830912
uugauaacuaccauucaaa

SEQ ID NO: 830914 - RNA, 19 nt, Artificial Sequence
  Description of Artificial Sequence: Synthetic oligonucleotide
  Sense strand starting at position 212 of SEQ ID NO: 587953
gaggaacggucacuuaaua

SEQ ID NO: 830915 - RNA, 19 nt, Artificial Sequence
  Description of Artificial Sequence: Synthetic oligonucleotide
  Antisense strand to SEQ ID NO: 830914
uauuaagugaccguuccuc

SEQ ID NO: 830916 - RNA, 19 nt, Artificial Sequence
  Description of Artificial Sequence: Synthetic oligonucleotide
  Sense strand starting at position 307 of SEQ ID NO: 587953
gccauuguaucuccagaau

SEQ ID NO: 830917 - RNA, 19 nt, Artificial Sequence
  Description of Artificial Sequence: Synthetic oligonucleotide
  Antisense strand to SEQ ID NO: 830916
auucuggagauacaauggc

SEQ ID NO: 830918 - RNA, 19 nt, Artificial Sequence
  Description of Artificial Sequence: Synthetic oligonucleotide
  Sense strand starting at position 1164 of SEQ ID NO: 587953
aguagaaaugcucacgcua

SEQ ID NO: 830919 - RNA, 19 nt, Artificial Sequence
  Description of Artificial Sequence: Synthetic oligonucleotide
  Antisense strand to SEQ ID NO: 830918
uagcgugagcauuucuacu

SEQ ID NO: 830920 - RNA, 19 nt, Artificial Sequence
  Description of Artificial Sequence: Synthetic oligonucleotide
  Sense strand starting at position 1201 of SEQ ID NO: 587953
guuauauguuacuuaacag

SEQ ID NO: 830921 - RNA, 19 nt, Artificial Sequence
  Description of Artificial Sequence: Synthetic oligonucleotide
  Antisense strand to SEQ ID NO: 830920
cuguuaaguaacauauaac

SEQ ID NO: 830922 - RNA, 19 nt, Artificial Sequence
  Description of Artificial Sequence: Synthetic oligonucleotide
  Sense strand starting at position 1218 of SEQ ID NO: 587953
agaucucaguuccuuaaga

SEQ ID NO: 830923 - RNA, 19 nt, Artificial Sequence
  Description of Artificial Sequence: Synthetic oligonucleotide
  Antisense strand to SEQ ID NO: 830922
ucuuaaggaacugagaucu

SEQ ID NO: 830924 - RNA, 19 nt, Artificial Sequence
  Description of Artificial Sequence: Synthetic oligonucleotide
  Sense strand starting at position 1219 of SEQ ID NO: 587953
gaucucaguuccuuaagag

SEQ ID NO: 830925 - RNA, 19 nt, Artificial Sequence
  Description of Artificial Sequence: Synthetic oligonucleotide
  Antisense strand to SEQ ID NO: 830924
cucuuaaggaacugagauc

SEQ ID NO: 830926 - RNA, 19 nt, Artificial Sequence
  Description of Artificial Sequence: Synthetic oligonucleotide
  Sense strand starting at position 1240 of SEQ ID NO: 587953
acucaaugggcacaguauu

SEQ ID NO: 830927 - RNA, 19 nt, Artificial Sequence
  Description of Artificial Sequence: Synthetic oligonucleotide
  Antisense strand to SEQ ID NO: 830926
aauacugugcccauugagu

SEQ ID NO: 830928 - RNA, 19 nt, Artificial Sequence
  Description of Artificial Sequence: Synthetic oligonucleotide
  Sense strand starting at position 1319 of SEQ ID NO: 587953
acucaugaagucgagcaua

SEQ ID NO: 830929 - RNA, 19 nt, Artificial Sequence
  Description of Artificial Sequence: Synthetic oligonucleotide
  Antisense strand to SEQ ID NO: 830928
uaugcucgacuucaugagu

SEQ ID NO: 830930 - RNA, 19 nt, Artificial Sequence
  Description of Artificial Sequence: Synthetic oligonucleotide
  Sense strand starting at position 1322 of SEQ ID NO: 587953
caugaagucgagcauagaa

SEQ ID NO: 830931 - RNA, 19 nt, Artificial Sequence
  Description of Artificial Sequence: Synthetic oligonucleotide
  Antisense strand to SEQ ID NO: 830930
uucuaugcucgacuucaug

SEQ ID NO: 830932 - RNA, 19 nt, Artificial Sequence
  Description of Artificial Sequence: Synthetic oligonucleotide
  Sense strand starting at position 1361 of SEQ ID NO: 587953
aagguaaacuucucgggua

SEQ ID NO: 830933 - RNA, 19 nt, Artificial Sequence
  Description of Artificial Sequence: Synthetic oligonucleotide
  Antisense strand to SEQ ID NO: 830932
uacccgagaaguuuaccuu

SEQ ID NO: 830934 - RNA, 19 nt, Artificial Sequence
  Description of Artificial Sequence: Synthetic oligonucleotide
  Sense strand starting at position 1375 of SEQ ID NO: 587953
ggguacugcagcuagaaga

SEQ ID NO: 830935 - RNA, 19 nt, Artificial Sequence
  Description of Artificial Sequence: Synthetic oligonucleotide
  Antisense strand to SEQ ID NO: 830934
ucuucuagcugcaguaccc

SEQ ID NO: 830936 - RNA, 19 nt, Artificial Sequence
  Description of Artificial Sequence: Synthetic oligonucleotide
  Sense strand starting at position 1399 of SEQ ID NO: 587953
gagaccucucccugggcua

SEQ ID NO: 830937 - RNA, 19 nt, Artificial Sequence
  Description of Artificial Sequence: Synthetic oligonucleotide
  Antisense strand to SEQ ID NO: 830936
uagcccagggagaggucuc

SEQ ID NO: 830938 - RNA, 19 nt, Artificial Sequence
  Description of Artificial Sequence: Synthetic oligonucleotide
  Sense strand starting at position 1437 of SEQ ID NO: 587953
gaacuaaucugagcggaca

SEQ ID NO: 830939 - RNA, 19 nt, Artificial Sequence
  Description of Artificial Sequence: Synthetic oligonucleotide
  Antisense strand to SEQ ID NO: 830938
uguccgcucagauuaguuc

SEQ ID NO: 830940 - RNA, 19 nt, Artificial Sequence
  Description of Artificial Sequence: Synthetic oligonucleotide
  Sense strand starting at position 2112 of SEQ ID NO: 587953
cgcagacccugauccaauu

SEQ ID NO: 830941 - RNA, 19 nt, Artificial Sequence
  Description of Artificial Sequence: Synthetic oligonucleotide
  Antisense strand to SEQ ID NO: 830940
aauuggaucagggucugcg

SEQ ID NO: 830942 - RNA, 19 nt, Artificial Sequence
  Description of Artificial Sequence: Synthetic oligonucleotide
  Sense strand starting at position 2123 of SEQ ID NO: 587953
auccaauugcuguaaagac

SEQ ID NO: 830943 - RNA, 19 nt, Artificial Sequence
  Description of Artificial Sequence: Synthetic oligonucleotide
  Antisense strand to SEQ ID NO: 830942
gucuuuacagcaauuggau

SEQ ID NO: 830944 - RNA, 19 nt, Artificial Sequence
  Description of Artificial Sequence: Synthetic oligonucleotide
  Sense strand starting at position 2136 of SEQ ID NO: 587953
aaagacgcauccuuagaga

SEQ ID NO: 830945 - RNA, 19 nt, Artificial Sequence
  Description of Artificial Sequence: Synthetic oligonucleotide
  Antisense strand to SEQ ID NO: 830944
ucucuaaggaugcgucuuu

SEQ ID NO: 830946 - RNA, 19 nt, Artificial Sequence
  Description of Artificial Sequence: Synthetic oligonucleotide
  Sense strand starting at position 2263 of SEQ ID NO: 587953
cucgcacugcguguuaaga

SEQ ID NO: 830947 - RNA, 19 nt, Artificial Sequence
  Description of Artificial Sequence: Synthetic oligonucleotide
  Antisense strand to SEQ ID NO: 830946
ucuuaacacgcagugcgag

SEQ ID NO: 830948 - RNA, 19 nt, Artificial Sequence
  Description of Artificial Sequence: Synthetic oligonucleotide
  Sense strand starting at position 2264 of SEQ ID NO: 587953
ucgcacugcguguuaagau

SEQ ID NO: 830949 - RNA, 19 nt, Artificial Sequence
  Description of Artificial Sequence: Synthetic oligonucleotide
  Antisense strand to SEQ ID NO: 830948
aucuuaacacgcagugcga

SEQ ID NO: 830950 - RNA, 19 nt, Artificial Sequence
  Description of Artificial Sequence: Synthetic oligonucleotide
  Sense strand starting at position 2391 of SEQ ID NO: 587953
gaucguacucuuuaugaag

SEQ ID NO: 830951 - RNA, 19 nt, Artificial Sequence
  Description of Artificial Sequence: Synthetic oligonucleotide
  Antisense strand to SEQ ID NO: 830950
cuucauaaagaguacgauc

SEQ ID NO: 830952 - RNA, 19 nt, Artificial Sequence
  Description of Artificial Sequence: Synthetic oligonucleotide
  Sense strand starting at position 2494 of SEQ ID NO: 587953
cucucuucccgguagaauu

SEQ ID NO: 830953 - RNA, 19 nt, Artificial Sequence
  Description of Artificial Sequence: Synthetic oligonucleotide
  Antisense strand to SEQ ID NO: 830952
aauucuaccgggaagagag

SEQ ID NO: 830954 - RNA, 19 nt, Artificial Sequence
  Description of Artificial Sequence: Synthetic oligonucleotide
  Sense strand starting at position 2651 of SEQ ID NO: 587953
uugggaacuucuuucucau

SEQ ID NO: 830955 - RNA, 19 nt, Artificial Sequence
  Description of Artificial Sequence: Synthetic oligonucleotide
  Antisense strand to SEQ ID NO: 830954
augagaaagaaguucccaa

SEQ ID NO: 830956 - RNA, 19 nt, Artificial Sequence
  Description of Artificial Sequence: Synthetic oligonucleotide
  Sense strand starting at position 2782 of SEQ ID NO: 587953
guggcaugaagagaaugua

SEQ ID NO: 830957 - RNA, 19 nt, Artificial Sequence
  Description of Artificial Sequence: Synthetic oligonucleotide
  Antisense strand to SEQ ID NO: 830956
uacauucucuucaugccac

SEQ ID NO: 830958 - RNA, 19 nt, Artificial Sequence
  Description of Artificial Sequence: Synthetic oligonucleotide
  Sense strand starting at position 2785 of SEQ ID NO: 587953
gcaugaagagaauguaugu

SEQ ID NO: 830959 - RNA, 19 nt, Artificial Sequence
  Description of Artificial Sequence: Synthetic oligonucleotide
  Antisense strand to SEQ ID NO: 830958
acauacauucucuucaugc

SEQ ID NO: 830960 - RNA, 19 nt, Artificial Sequence
  Description of Artificial Sequence: Synthetic oligonucleotide
  Sense strand starting at position 2870 of SEQ ID NO: 587953
cuaucuagaguuuguugaa

SEQ ID NO: 830961 - RNA, 19 nt, Artificial Sequence
  Description of Artificial Sequence: Synthetic oligonucleotide
  Antisense strand to SEQ ID NO: 830960
uucaacaaacucuagauag

SEQ ID NO: 830962 - RNA, 19 nt, Artificial Sequence
  Description of Artificial Sequence: Synthetic oligonucleotide
  Sense strand starting at position 2871 of SEQ ID NO: 587953
uaucuagaguuuguugaac

SEQ ID NO: 830963 - RNA, 19 nt, Artificial Sequence
  Description of Artificial Sequence: Synthetic oligonucleotide
  Antisense strand to SEQ ID NO: 830962
guucaacaaacucuagaua

SEQ ID NO: 830964 - RNA, 19 nt, Artificial Sequence
  Description of Artificial Sequence: Synthetic oligonucleotide
  Sense strand starting at position 2879 of SEQ ID NO: 587953
guuuguugaacugaggacu

SEQ ID NO: 830965 - RNA, 19 nt, Artificial Sequence
  Description of Artificial Sequence: Synthetic oligonucleotide
  Antisense strand to SEQ ID NO: 830964
aguccucaguucaacaaac

SEQ ID NO: 830966 - RNA, 19 nt, Artificial Sequence
  Description of Artificial Sequence: Synthetic oligonucleotide
  Sense strand starting at position 2971 of SEQ ID NO: 587953
ugcaauaaucaaggagauu

SEQ ID NO: 830967 - RNA, 19 nt, Artificial Sequence
  Description of Artificial Sequence: Synthetic oligonucleotide
  Antisense strand to SEQ ID NO: 830966
aaucuccuugauuauugca

SEQ ID NO: 830968 - RNA, 19 nt, Artificial Sequence
  Description of Artificial Sequence: Synthetic oligonucleotide
  Sense strand starting at position 2980 of SEQ ID NO: 587953
caaggagauugucuuggau

SEQ ID NO: 830969 - RNA, 19 nt, Artificial Sequence
  Description of Artificial Sequence: Synthetic oligonucleotide
  Antisense strand to SEQ ID NO: 830968
auccaagacaaucuccuug

SEQ ID NO: 830970 - RNA, 19 nt, Artificial Sequence
  Description of Artificial Sequence: Synthetic oligonucleotide
  Sense strand starting at position 3042 of SEQ ID NO: 587953
ggcuguaaugguagcucga

SEQ ID NO: 830971 - RNA, 19 nt, Artificial Sequence
  Description of Artificial Sequence: Synthetic oligonucleotide
  Antisense strand to SEQ ID NO: 830970
ucgagcuaccauuacagcc

SEQ ID NO: 830972 - RNA, 19 nt, Artificial Sequence
  Description of Artificial Sequence: Synthetic oligonucleotide
  Sense strand starting at position 3051 of SEQ ID NO: 587953
gguagcucgaaguagaguu

SEQ ID NO: 830973 - RNA, 19 nt, Artificial Sequence
  Description of Artificial Sequence: Synthetic oligonucleotide
  Antisense strand to SEQ ID NO: 830972
aacucuacuucgagcuacc

SEQ ID NO: 830974 - RNA, 19 nt, Artificial Sequence
  Description of Artificial Sequence: Synthetic oligonucleotide
  Sense strand starting at position 3761 of SEQ ID NO: 587953
agugaauauugauugugag

SEQ ID NO: 830975 - RNA, 19 nt, Artificial Sequence
  Description of Artificial Sequence: Synthetic oligonucleotide
  Antisense strand to SEQ ID NO: 830974
cucacaaucaauauucacu

SEQ ID NO: 830976 - RNA, 19 nt, Artificial Sequence
  Description of Artificial Sequence: Synthetic oligonucleotide
  Sense strand starting at position 3762 of SEQ ID NO: 587953
gugaauauugauugugagu

SEQ ID NO: 830977 - RNA, 19 nt, Artificial Sequence
  Description of Artificial Sequence: Synthetic oligonucleotide
  Antisense strand to SEQ ID NO: 830976
acucacaaucaauauucac

SEQ ID NO: 830978 - RNA, 19 nt, Artificial Sequence
  Description of Artificial Sequence: Synthetic oligonucleotide
  Sense strand starting at position 3767 of SEQ ID NO: 587953
uauugauugugagugaauu

SEQ ID NO: 830979 - RNA, 19 nt, Artificial Sequence
  Description of Artificial Sequence: Synthetic oligonucleotide
  Antisense strand to SEQ ID NO: 830978
aauucacucacaaucaaua

SEQ ID NO: 830980 - RNA, 19 nt, Artificial Sequence
  Description of Artificial Sequence: Synthetic oligonucleotide
  Sense strand starting at position 3768 of SEQ ID NO: 587953
auugauugugagugaauua

SEQ ID NO: 830981 - RNA, 19 nt, Artificial Sequence
  Description of Artificial Sequence: Synthetic oligonucleotide
  Antisense strand to SEQ ID NO: 830980
uaauucacucacaaucaau

SEQ ID NO: 830982 - RNA, 19 nt, Artificial Sequence
  Description of Artificial Sequence: Synthetic oligonucleotide
  Sense strand starting at position 3769 of SEQ ID NO: 587953
uugauugugagugaauuac

SEQ ID NO: 830983 - RNA, 19 nt, Artificial Sequence
  Description of Artificial Sequence: Synthetic oligonucleotide
  Antisense strand to SEQ ID NO: 830982
guaauucacucacaaucaa

SEQ ID NO: 830984 - RNA, 19 nt, Artificial Sequence
  Description of Artificial Sequence: Synthetic oligonucleotide
  Sense strand starting at position 3775 of SEQ ID NO: 587953
gugagugaauuacccuaaa

SEQ ID NO: 830985 - RNA, 19 nt, Artificial Sequence
  Description of Artificial Sequence: Synthetic oligonucleotide
  Antisense strand to SEQ ID NO: 830984
uuuaggguaauucacucac

SEQ ID NO: 830986 - RNA, 19 nt, Artificial Sequence
  Description of Artificial Sequence: Synthetic oligonucleotide
  Sense strand starting at position 3876 of SEQ ID NO: 587953
ccuugauuccaggagcuca

SEQ ID NO: 830987 - RNA, 19 nt, Artificial Sequence
  Description of Artificial Sequence: Synthetic oligonucleotide
  Antisense strand to SEQ ID NO: 830986
ugagcuccuggaaucaagg

SEQ ID NO: 830988 - RNA, 19 nt, Artificial Sequence
  Description of Artificial Sequence: Synthetic oligonucleotide
  Sense strand starting at position 52 of SEQ ID NO: 587954
gacagcaguuuagcugaaa

SEQ ID NO: 830989 - RNA, 19 nt, Artificial Sequence
  Description of Artificial Sequence: Synthetic oligonucleotide
  Antisense strand to SEQ ID NO: 830988
uuucagcuaaacugcuguc

SEQ ID NO: 830990 - RNA, 19 nt, Artificial Sequence
  Description of Artificial Sequence: Synthetic oligonucleotide
  Sense strand starting at position 53 of SEQ ID NO: 587954
acagcaguuuagcugaaau

SEQ ID NO: 830991 - RNA, 19 nt, Artificial Sequence
  Description of Artificial Sequence: Synthetic oligonucleotide
  Antisense strand to SEQ ID NO: 830990
auuucagcuaaacugcugu

SEQ ID NO: 830992 - RNA, 19 nt, Artificial Sequence
  Description of Artificial Sequence: Synthetic oligonucleotide
  Sense strand starting at position 64 of SEQ ID NO: 587954
gcugaaaugcauuaacaca

SEQ ID NO: 830993 - RNA, 19 nt, Artificial Sequence
  Description of Artificial Sequence: Synthetic oligonucleotide
  Antisense strand to SEQ ID NO: 830992
uguguuaaugcauuucagc

SEQ ID NO: 830994 - RNA, 19 nt, Artificial Sequence
  Description of Artificial Sequence: Synthetic oligonucleotide
  Sense strand starting at position 90 of SEQ ID NO: 587954
gaccauagcuggccagauu

SEQ ID NO: 830995 - RNA, 19 nt, Artificial Sequence
  Description of Artificial Sequence: Synthetic oligonucleotide
  Antisense strand to SEQ ID NO: 830994
aaucuggccagcuaugguc

SEQ ID NO: 830996 - RNA, 19 nt, Artificial Sequence
  Description of Artificial Sequence: Synthetic oligonucleotide
  Sense strand starting at position 101 of SEQ ID NO: 587954
gccagauuuggugguucau

SEQ ID NO: 830997 - RNA, 19 nt, Artificial Sequence
  Description of Artificial Sequence: Synthetic oligonucleotide
  Antisense strand to SEQ ID NO: 830996
augaaccaccaaaucuggc

SEQ ID NO: 830998 - RNA, 19 nt, Artificial Sequence
  Description of Artificial Sequence: Synthetic oligonucleotide
  Sense strand starting at position 464 of SEQ ID NO: 587954
gauguauaggacugacuau

SEQ ID NO: 830999 - RNA, 19 nt, Artificial Sequence
  Description of Artificial Sequence: Synthetic oligonucleotide
  Antisense strand to SEQ ID NO: 830998
auagucaguccuauacauc

SEQ ID NO: 831000 - RNA, 19 nt, Artificial Sequence
  Description of Artificial Sequence: Synthetic oligonucleotide
  Sense strand starting at position 481 of SEQ ID NO: 587954
auaacuucuggcuguaaac

SEQ ID NO: 831001 - RNA, 19 nt, Artificial Sequence
  Description of Artificial Sequence: Synthetic oligonucleotide
  Antisense strand to SEQ ID NO: 831000
guuuacagccagaaguuau

SEQ ID NO: 831002 - RNA, 19 nt, Artificial Sequence
  Description of Artificial Sequence: Synthetic oligonucleotide
  Sense strand starting at position 553 of SEQ ID NO: 587954
uuugaaugguaguuaucaa

SEQ ID NO: 831003 - RNA, 19 nt, Artificial Sequence
  Description of Artificial Sequence: Synthetic oligonucleotide
  Antisense strand to SEQ ID NO: 831002
uugauaacuaccauucaaa

SEQ ID NO: 831004 - RNA, 19 nt, Artificial Sequence
  Description of Artificial Sequence: Synthetic oligonucleotide
  Sense strand starting at position 591 of SEQ ID NO: 587954
gaggaacggucacuuaaua

SEQ ID NO: 831005 - RNA, 19 nt, Artificial Sequence
  Description of Artificial Sequence: Synthetic oligonucleotide
  Antisense strand to SEQ ID NO: 831004
uauuaagugaccguuccuc

SEQ ID NO: 831006 - RNA, 19 nt, Artificial Sequence
  Description of Artificial Sequence: Synthetic oligonucleotide
  Sense strand starting at position 686 of SEQ ID NO: 587954
gccauuguaucuccagaau

SEQ ID NO: 831007 - RNA, 19 nt, Artificial Sequence
  Description of Artificial Sequence: Synthetic oligonucleotide
  Antisense strand to SEQ ID NO: 831006
auucuggagauacaauggc

SEQ ID NO: 831008 - RNA, 19 nt, Artificial Sequence
  Description of Artificial Sequence: Synthetic oligonucleotide
  Sense strand starting at position 1543 of SEQ ID NO: 587954
aguagaaaugcucacgcua

SEQ ID NO: 831009 - RNA, 19 nt, Artificial Sequence
  Description of Artificial Sequence: Synthetic oligonucleotide
  Antisense strand to SEQ ID NO: 831008
uagcgugagcauuucuacu

SEQ ID NO: 831010 - RNA, 19 nt, Artificial Sequence
  Description of Artificial Sequence: Synthetic oligonucleotide
  Sense strand starting at position 1580 of SEQ ID NO: 587954
guuauauguuacuuaacag

SEQ ID NO: 831011 - RNA, 19 nt, Artificial Sequence
  Description of Artificial Sequence: Synthetic oligonucleotide
  Antisense strand to SEQ ID NO: 831010
cuguuaaguaacauauaac

SEQ ID NO: 831012 - RNA, 19 nt, Artificial Sequence
  Description of Artificial Sequence: Synthetic oligonucleotide
  Sense strand starting at position 1597 of SEQ ID NO: 587954
agaucucaguuccuuaaga

SEQ ID NO: 831013 - RNA, 19 nt, Artificial Sequence
  Description of Artificial Sequence: Synthetic oligonucleotide
  Antisense strand to SEQ ID NO: 831012
ucuuaaggaacugagaucu

SEQ ID NO: 831014 - RNA, 19 nt, Artificial Sequence
  Description of Artificial Sequence: Synthetic oligonucleotide
  Sense strand starting at position 1598 of SEQ ID NO: 587954
gaucucaguuccuuaagag

SEQ ID NO: 831015 - RNA, 19 nt, Artificial Sequence
  Description of Artificial Sequence: Synthetic oligonucleotide
  Antisense strand to SEQ ID NO: 831014
cucuuaaggaacugagauc

SEQ ID NO: 831016 - RNA, 19 nt, Artificial Sequence
  Description of Artificial Sequence: Synthetic oligonucleotide
  Sense strand starting at position 1619 of SEQ ID NO: 587954
acucaaugggcacaguauu

SEQ ID NO: 831017 - RNA, 19 nt, Artificial Sequence
  Description of Artificial Sequence: Synthetic oligonucleotide
  Antisense strand to SEQ ID NO: 831016
aauacugugcccauugagu

SEQ ID NO: 831018 - RNA, 19 nt, Artificial Sequence
  Description of Artificial Sequence: Synthetic oligonucleotide
  Sense strand starting at position 1698 of SEQ ID NO: 587954
acucaugaagucgagcaua

SEQ ID NO: 831019 - RNA, 19 nt, Artificial Sequence
  Description of Artificial Sequence: Synthetic oligonucleotide
  Antisense strand to SEQ ID NO: 831018
uaugcucgacuucaugagu

SEQ ID NO: 831020 - RNA, 19 nt, Artificial Sequence
  Description of Artificial Sequence: Synthetic oligonucleotide
  Sense strand starting at position 1701 of SEQ ID NO: 587954
caugaagucgagcauagaa

SEQ ID NO: 831021 - RNA, 19 nt, Artificial Sequence
  Description of Artificial Sequence: Synthetic oligonucleotide
  Antisense strand to SEQ ID NO: 831020
uucuaugcucgacuucaug

SEQ ID NO: 831022 - RNA, 19 nt, Artificial Sequence
  Description of Artificial Sequence: Synthetic oligonucleotide
  Sense strand starting at position 1740 of SEQ ID NO: 587954
aagguaaacuucucgggua

SEQ ID NO: 831023 - RNA, 19 nt, Artificial Sequence
  Description of Artificial Sequence: Synthetic oligonucleotide
  Antisense strand to SEQ ID NO: 831022
uacccgagaaguuuaccuu

SEQ ID NO: 831024 - RNA, 19 nt, Artificial Sequence
  Description of Artificial Sequence: Synthetic oligonucleotide
  Sense strand starting at position 1754 of SEQ ID NO: 587954
ggguacugcagcuagaaga

SEQ ID NO: 831025 - RNA, 19 nt, Artificial Sequence
  Description of Artificial Sequence: Synthetic oligonucleotide
  Antisense strand to SEQ ID NO: 831024
ucuucuagcugcaguaccc

SEQ ID NO: 831026 - RNA, 19 nt, Artificial Sequence
  Description of Artificial Sequence: Synthetic oligonucleotide
  Sense strand starting at position 1778 of SEQ ID NO: 587954
gagaccucucccugggcua

SEQ ID NO: 831027 - RNA, 19 nt, Artificial Sequence
  Description of Artificial Sequence: Synthetic oligonucleotide
  Antisense strand to SEQ ID NO: 831026
uagcccagggagaggucuc

SEQ ID NO: 831028 - RNA, 19 nt, Artificial Sequence
  Description of Artificial Sequence: Synthetic oligonucleotide
  Sense strand starting at position 1816 of SEQ ID NO: 587954
gaacuaaucugagcggaca

SEQ ID NO: 831029 - RNA, 19 nt, Artificial Sequence
  Description of Artificial Sequence: Synthetic oligonucleotide
  Antisense strand to SEQ ID NO: 831028
uguccgcucagauuaguuc

SEQ ID NO: 831030 - RNA, 19 nt, Artificial Sequence
  Description of Artificial Sequence: Synthetic oligonucleotide
  Sense strand starting at position 2459 of SEQ ID NO: 587954
gagucuagcucuucuggau

SEQ ID NO: 831031 - RNA, 19 nt, Artificial Sequence
  Description of Artificial Sequence: Synthetic oligonucleotide
  Antisense strand to SEQ ID NO: 831030
auccagaagagcuagacuc

SEQ ID NO: 831032 - RNA, 19 nt, Artificial Sequence
  Description of Artificial Sequence: Synthetic oligonucleotide
  Sense strand starting at position 2491 of SEQ ID NO: 587954
cgcagacccugauccaauu

SEQ ID NO: 831033 - RNA, 19 nt, Artificial Sequence
  Description of Artificial Sequence: Synthetic oligonucleotide
  Antisense strand to SEQ ID NO: 831032
aauuggaucagggucugcg

SEQ ID NO: 831034 - RNA, 19 nt, Artificial Sequence
  Description of Artificial Sequence: Synthetic oligonucleotide
  Sense strand starting at position 2502 of SEQ ID NO: 587954
auccaauugcuguaaagac

SEQ ID NO: 831035 - RNA, 19 nt, Artificial Sequence
  Description of Artificial Sequence: Synthetic oligonucleotide
  Antisense strand to SEQ ID NO: 831034
gucuuuacagcaauuggau

SEQ ID NO: 831036 - RNA, 19 nt, Artificial Sequence
  Description of Artificial Sequence: Synthetic oligonucleotide
  Sense strand starting at position 2515 of SEQ ID NO: 587954
aaagacgcauccuuagaga

SEQ ID NO: 831037 - RNA, 19 nt, Artificial Sequence
  Description of Artificial Sequence: Synthetic oligonucleotide
  Antisense strand to SEQ ID NO: 831036
ucucuaaggaugcgucuuu

SEQ ID NO: 831038 - RNA, 19 nt, Artificial Sequence
  Description of Artificial Sequence: Synthetic oligonucleotide
  Sense strand starting at position 2642 of SEQ ID NO: 587954
cucgcacugcguguuaaga

SEQ ID NO: 831039 - RNA, 19 nt, Artificial Sequence
  Description of Artificial Sequence: Synthetic oligonucleotide
  Antisense strand to SEQ ID NO: 831038
ucuuaacacgcagugcgag

SEQ ID NO: 831040 - RNA, 19 nt, Artificial Sequence
  Description of Artificial Sequence: Synthetic oligonucleotide
  Sense strand starting at position 2643 of SEQ ID NO: 587954
ucgcacugcguguuaagau

SEQ ID NO: 831041 - RNA, 19 nt, Artificial Sequence
  Description of Artificial Sequence: Synthetic oligonucleotide
  Antisense strand to SEQ ID NO: 831040
aucuuaacacgcagugcga

SEQ ID NO: 831042 - RNA, 19 nt, Artificial Sequence
  Description of Artificial Sequence: Synthetic oligonucleotide
  Sense strand starting at position 2758 of SEQ ID NO: 587954
cuuugcuaacgagaucgua

SEQ ID NO: 831043 - RNA, 19 nt, Artificial Sequence
  Description of Artificial Sequence: Synthetic oligonucleotide
  Antisense strand to SEQ ID NO: 831042
uacgaucucguuagcaaag

SEQ ID NO: 831044 - RNA, 19 nt, Artificial Sequence
  Description of Artificial Sequence: Synthetic oligonucleotide
  Sense strand starting at position 2770 of SEQ ID NO: 587954
gaucguacucuuuaugaag

SEQ ID NO: 831045 - RNA, 19 nt, Artificial Sequence
  Description of Artificial Sequence: Synthetic oligonucleotide
  Antisense strand to SEQ ID NO: 831044
cuucauaaagaguacgauc

SEQ ID NO: 831046 - RNA, 19 nt, Artificial Sequence
  Description of Artificial Sequence: Synthetic oligonucleotide
  Sense strand starting at position 2873 of SEQ ID NO: 587954
cucucuucccgguagaauu

SEQ ID NO: 831047 - RNA, 19 nt, Artificial Sequence
  Description of Artificial Sequence: Synthetic oligonucleotide
  Antisense strand to SEQ ID NO: 831046
aauucuaccgggaagagag

SEQ ID NO: 831048 - RNA, 19 nt, Artificial Sequence
  Description of Artificial Sequence: Synthetic oligonucleotide
  Sense strand starting at position 3030 of SEQ ID NO: 587954
uugggaacuucuuucucau

SEQ ID NO: 831049 - RNA, 19 nt, Artificial Sequence
  Description of Artificial Sequence: Synthetic oligonucleotide
  Antisense strand to SEQ ID NO: 831048
augagaaagaaguucccaa

SEQ ID NO: 831050 - RNA, 19 nt, Artificial Sequence
  Description of Artificial Sequence: Synthetic oligonucleotide
  Sense strand starting at position 3161 of SEQ ID NO: 587954
guggcaugaagagaaugua

SEQ ID NO: 831051 - RNA, 19 nt, Artificial Sequence
  Description of Artificial Sequence: Synthetic oligonucleotide
  Antisense strand to SEQ ID NO: 831050
uacauucucuucaugccac

SEQ ID NO: 831052 - RNA, 19 nt, Artificial Sequence
  Description of Artificial Sequence: Synthetic oligonucleotide
  Sense strand starting at position 3164 of SEQ ID NO: 587954
gcaugaagagaauguaugu

SEQ ID NO: 831053 - RNA, 19 nt, Artificial Sequence
  Description of Artificial Sequence: Synthetic oligonucleotide
  Antisense strand to SEQ ID NO: 831052
acauacauucucuucaugc

SEQ ID NO: 831054 - RNA, 19 nt, Artificial Sequence
  Description of Artificial Sequence: Synthetic oligonucleotide
  Sense strand starting at position 3249 of SEQ ID NO: 587954
cuaucuagaguuuguugaa

SEQ ID NO: 831055 - RNA, 19 nt, Artificial Sequence
  Description of Artificial Sequence: Synthetic oligonucleotide
  Antisense strand to SEQ ID NO: 831054
uucaacaaacucuagauag

SEQ ID NO: 831056 - RNA, 19 nt, Artificial Sequence
  Description of Artificial Sequence: Synthetic oligonucleotide
  Sense strand starting at position 3250 of SEQ ID NO: 587954
uaucuagaguuuguugaac

SEQ ID NO: 831057 - RNA, 19 nt, Artificial Sequence
  Description of Artificial Sequence: Synthetic oligonucleotide
  Antisense strand to SEQ ID NO: 831056
guucaacaaacucuagaua

SEQ ID NO: 831058 - RNA, 19 nt, Artificial Sequence
  Description of Artificial Sequence: Synthetic oligonucleotide
  Sense strand starting at position 3258 of SEQ ID NO: 587954
guuuguugaacugaggacu

SEQ ID NO: 831059 - RNA, 19 nt, Artificial Sequence
  Description of Artificial Sequence: Synthetic oligonucleotide
  Antisense strand to SEQ ID NO: 831058
aguccucaguucaacaaac

SEQ ID NO: 831060 - RNA, 19 nt, Artificial Sequence
  Description of Artificial Sequence: Synthetic oligonucleotide
  Sense strand starting at position 3350 of SEQ ID NO: 587954
ugcaauaaucaaggagauu

SEQ ID NO: 831061 - RNA, 19 nt, Artificial Sequence
  Description of Artificial Sequence: Synthetic oligonucleotide
  Antisense strand to SEQ ID NO: 831060
aaucuccuugauuauugca

SEQ ID NO: 831062 - RNA, 19 nt, Artificial Sequence
  Description of Artificial Sequence: Synthetic oligonucleotide
  Sense strand starting at position 3359 of SEQ ID NO: 587954
caaggagauugucuuggau

SEQ ID NO: 831063 - RNA, 19 nt, Artificial Sequence
  Description of Artificial Sequence: Synthetic oligonucleotide
  Antisense strand to SEQ ID NO: 831062
auccaagacaaucuccuug

SEQ ID NO: 831064 - RNA, 19 nt, Artificial Sequence
  Description of Artificial Sequence: Synthetic oligonucleotide
  Sense strand starting at position 3421 of SEQ ID NO: 587954
ggcuguaaugguagcucga

SEQ ID NO: 831065 - RNA, 19 nt, Artificial Sequence
  Description of Artificial Sequence: Synthetic oligonucleotide
  Antisense strand to SEQ ID NO: 831064
ucgagcuaccauuacagcc

SEQ ID NO: 831066 - RNA, 19 nt, Artificial Sequence
  Description of Artificial Sequence: Synthetic oligonucleotide
  Sense strand starting at position 3430 of SEQ ID NO: 587954
gguagcucgaaguagaguu

SEQ ID NO: 831067 - RNA, 19 nt, Artificial Sequence
  Description of Artificial Sequence: Synthetic oligonucleotide
  Antisense strand to SEQ ID NO: 831066
aacucuacuucgagcuacc

SEQ ID NO: 831068 - RNA, 19 nt, Artificial Sequence
  Description of Artificial Sequence: Synthetic oligonucleotide
  Sense strand starting at position 9 of SEQ ID NO: 587955
gguaacgaagcauaaucau

SEQ ID NO: 831069 - RNA, 19 nt, Artificial Sequence
  Description of Artificial Sequence: Synthetic oligonucleotide
  Antisense strand to SEQ ID NO: 831068
augauuaugcuucguuacc

SEQ ID NO: 831070 - RNA, 19 nt, Artificial Sequence
  Description of Artificial Sequence: Synthetic oligonucleotide
  Sense strand starting at position 112 of SEQ ID NO: 587955
acaugagacuuugaauuua

SEQ ID NO: 831071 - RNA, 19 nt, Artificial Sequence
  Description of Artificial Sequence: Synthetic oligonucleotide
  Antisense strand to SEQ ID NO: 831070
uaaauucaaagucucaugu

SEQ ID NO: 831072 - RNA, 19 nt, Artificial Sequence
  Description of Artificial Sequence: Synthetic oligonucleotide
  Sense strand starting at position 159 of SEQ ID NO: 587955
aucuauuacgaacguauuu

SEQ ID NO: 831073 - RNA, 19 nt, Artificial Sequence
  Description of Artificial Sequence: Synthetic oligonucleotide
  Antisense strand to SEQ ID NO: 831072
aaauacguucguaauagau

SEQ ID NO: 831074 - RNA, 19 nt, Artificial Sequence
  Description of Artificial Sequence: Synthetic oligonucleotide
  Sense strand starting at position 209 of SEQ ID NO: 587955
agcugucaagucuaugaua

SEQ ID NO: 831075 - RNA, 19 nt, Artificial Sequence
  Description of Artificial Sequence: Synthetic oligonucleotide
  Antisense strand to SEQ ID NO: 831074
uaucauagacuugacagcu

SEQ ID NO: 831076 - RNA, 19 nt, Artificial Sequence
  Description of Artificial Sequence: Synthetic oligonucleotide
  Sense strand starting at position 267 of SEQ ID NO: 587955
gaugcagaauggucucauu

SEQ ID NO: 831077 - RNA, 19 nt, Artificial Sequence
  Description of Artificial Sequence: Synthetic oligonucleotide
  Antisense strand to SEQ ID NO: 831076
aaugagaccauucugcauc

SEQ ID NO: 831078 - RNA, 19 nt, Artificial Sequence
  Description of Artificial Sequence: Synthetic oligonucleotide
  Sense strand starting at position 276 of SEQ ID NO: 587955
uggucucauuuguucuuau

SEQ ID NO: 831079 - RNA, 19 nt, Artificial Sequence
  Description of Artificial Sequence: Synthetic oligonucleotide
  Antisense strand to SEQ ID NO: 831078
auaagaacaaaugagacca

SEQ ID NO: 831080 - RNA, 19 nt, Artificial Sequence
  Description of Artificial Sequence: Synthetic oligonucleotide
  Sense strand starting at position 277 of SEQ ID NO: 587955
ggucucauuuguucuuauu

SEQ ID NO: 831081 - RNA, 19 nt, Artificial Sequence
  Description of Artificial Sequence: Synthetic oligonucleotide
  Antisense strand to SEQ ID NO: 831080
aauaagaacaaaugagacc

SEQ ID NO: 831082 - RNA, 19 nt, Artificial Sequence
  Description of Artificial Sequence: Synthetic oligonucleotide
  Sense strand starting at position 340 of SEQ ID NO: 587955
gggccauuacuccagugaa

SEQ ID NO: 831083 - RNA, 19 nt, Artificial Sequence
  Description of Artificial Sequence: Synthetic oligonucleotide
  Antisense strand to SEQ ID NO: 831082
uucacuggaguaauggccc

SEQ ID NO: 831084 - RNA, 19 nt, Artificial Sequence
  Description of Artificial Sequence: Synthetic oligonucleotide
  Sense strand starting at position 420 of SEQ ID NO: 587955
aaacucucagagggucaua

SEQ ID NO: 831085 - RNA, 19 nt, Artificial Sequence
  Description of Artificial Sequence: Synthetic oligonucleotide
  Antisense strand to SEQ ID NO: 831084
uaugacccucugagaguuu

SEQ ID NO: 831086 - RNA, 19 nt, Artificial Sequence
  Description of Artificial Sequence: Synthetic oligonucleotide
  Sense strand starting at position 458 of SEQ ID NO: 587955
acauuaucaggaugugcaa

SEQ ID NO: 831087 - RNA, 19 nt, Artificial Sequence
  Description of Artificial Sequence: Synthetic oligonucleotide
  Antisense strand to SEQ ID NO: 831086
uugcacauccugauaaugu

SEQ ID NO: 831088 - RNA, 19 nt, Artificial Sequence
  Description of Artificial Sequence: Synthetic oligonucleotide
  Sense strand starting at position 1372 of SEQ ID NO: 587955
gcggaacuccggaguucuu

SEQ ID NO: 831089 - RNA, 19 nt, Artificial Sequence
  Description of Artificial Sequence: Synthetic oligonucleotide
  Antisense strand to SEQ ID NO: 831088
aagaacuccggaguuccgc

SEQ ID NO: 831090 - RNA, 19 nt, Artificial Sequence
  Description of Artificial Sequence: Synthetic oligonucleotide
  Sense strand starting at position 1389 of SEQ ID NO: 587955
uugggcuuccuagaaggau

SEQ ID NO: 831091 - RNA, 19 nt, Artificial Sequence
  Description of Artificial Sequence: Synthetic oligonucleotide
  Antisense strand to SEQ ID NO: 831090
auccuucuaggaagcccaa

SEQ ID NO: 831092 - RNA, 19 nt, Artificial Sequence
  Description of Artificial Sequence: Synthetic oligonucleotide
  Sense strand starting at position 1458 of SEQ ID NO: 587955
ggucuacucuacccgggaa

SEQ ID NO: 831093 - RNA, 19 nt, Artificial Sequence
  Description of Artificial Sequence: Synthetic oligonucleotide
  Antisense strand to SEQ ID NO: 831092
uucccggguagaguagacc

SEQ ID NO: 831094 - RNA, 19 nt, Artificial Sequence
  Description of Artificial Sequence: Synthetic oligonucleotide
  Sense strand starting at position 1460 of SEQ ID NO: 587955
ucuacucuacccgggaaga

SEQ ID NO: 831095 - RNA, 19 nt, Artificial Sequence
  Description of Artificial Sequence: Synthetic oligonucleotide
  Antisense strand to SEQ ID NO: 831094
ucuucccggguagaguaga

SEQ ID NO: 831096 - RNA, 19 nt, Artificial Sequence
  Description of Artificial Sequence: Synthetic oligonucleotide
  Sense strand starting at position 1461 of SEQ ID NO: 587955
cuacucuacccgggaagaa

SEQ ID NO: 831097 - RNA, 19 nt, Artificial Sequence
  Description of Artificial Sequence: Synthetic oligonucleotide
  Antisense strand to SEQ ID NO: 831096
uucuucccggguagaguag

SEQ ID NO: 831098 - RNA, 19 nt, Artificial Sequence
  Description of Artificial Sequence: Synthetic oligonucleotide
  Sense strand starting at position 1475 of SEQ ID NO: 587955
aagaaagaucucggaagca

SEQ ID NO: 831099 - RNA, 19 nt, Artificial Sequence
  Description of Artificial Sequence: Synthetic oligonucleotide
  Antisense strand to SEQ ID NO: 831098
ugcuuccgagaucuuucuu

SEQ ID NO: 831100 - RNA, 19 nt, Artificial Sequence
  Description of Artificial Sequence: Synthetic oligonucleotide
  Sense strand starting at position 1997 of SEQ ID NO: 587955
ggcuuagagggucauuaau

SEQ ID NO: 831101 - RNA, 19 nt, Artificial Sequence
  Description of Artificial Sequence: Synthetic oligonucleotide
  Antisense strand to SEQ ID NO: 831100
auuaaugacccucuaagcc

SEQ ID NO: 831102 - RNA, 19 nt, Artificial Sequence
  Description of Artificial Sequence: Synthetic oligonucleotide
  Sense strand starting at position 1999 of SEQ ID NO: 587955
cuuagagggucauuaauca

SEQ ID NO: 831103 - RNA, 19 nt, Artificial Sequence
  Description of Artificial Sequence: Synthetic oligonucleotide
  Antisense strand to SEQ ID NO: 831102
ugauuaaugacccucuaag

SEQ ID NO: 831104 - RNA, 19 nt, Artificial Sequence
  Description of Artificial Sequence: Synthetic oligonucleotide
  Sense strand starting at position 2395 of SEQ ID NO: 587955
acccuaaagcugggagaua

SEQ ID NO: 831105 - RNA, 19 nt, Artificial Sequence
  Description of Artificial Sequence: Synthetic oligonucleotide
  Antisense strand to SEQ ID NO: 831104
uaucucccagcuuuagggu

SEQ ID NO: 831106 - RNA, 19 nt, Artificial Sequence
  Description of Artificial Sequence: Synthetic oligonucleotide
  Sense strand starting at position 2450 of SEQ ID NO: 587955
gucuguaauucuuuaagaa

SEQ ID NO: 831107 - RNA, 19 nt, Artificial Sequence
  Description of Artificial Sequence: Synthetic oligonucleotide
  Antisense strand to SEQ ID NO: 831106
uucuuaaagaauuacagac

SEQ ID NO: 831108 - RNA, 19 nt, Artificial Sequence
  Description of Artificial Sequence: Synthetic oligonucleotide
  Sense strand starting at position 2649 of SEQ ID NO: 587955
aucccaggcuucuuuagaa

SEQ ID NO: 831109 - RNA, 19 nt, Artificial Sequence
  Description of Artificial Sequence: Synthetic oligonucleotide
  Antisense strand to SEQ ID NO: 831108
uucuaaagaagccugggau

SEQ ID NO: 831110 - RNA, 19 nt, Artificial Sequence
  Description of Artificial Sequence: Synthetic oligonucleotide
  Sense strand starting at position 2775 of SEQ ID NO: 587955
guaggugaaaucuaaguac

SEQ ID NO: 831111 - RNA, 19 nt, Artificial Sequence
  Description of Artificial Sequence: Synthetic oligonucleotide
  Antisense strand to SEQ ID NO: 831110
guacuuagauuucaccuac

SEQ ID NO: 831112 - RNA, 19 nt, Artificial Sequence
  Description of Artificial Sequence: Synthetic oligonucleotide
  Sense strand starting at position 2778 of SEQ ID NO: 587955
ggugaaaucuaaguacuuu

SEQ ID NO: 831113 - RNA, 19 nt, Artificial Sequence
  Description of Artificial Sequence: Synthetic oligonucleotide
  Antisense strand to SEQ ID NO: 831112
aaaguacuuagauuucacc

SEQ ID NO: 831114 - RNA, 19 nt, Artificial Sequence
  Description of Artificial Sequence: Synthetic oligonucleotide
  Sense strand starting at position 2835 of SEQ ID NO: 587955
caguucuccgaguaggaca

SEQ ID NO: 831115 - RNA, 19 nt, Artificial Sequence
  Description of Artificial Sequence: Synthetic oligonucleotide
  Antisense strand to SEQ ID NO: 831114
uguccuacucggagaacug

SEQ ID NO: 831116 - RNA, 19 nt, Artificial Sequence
  Description of Artificial Sequence: Synthetic oligonucleotide
  Sense strand starting at position 3124 of SEQ ID NO: 587955
gauguacuggcccacaaau

SEQ ID NO: 831117 - RNA, 19 nt, Artificial Sequence
  Description of Artificial Sequence: Synthetic oligonucleotide
  Antisense strand to SEQ ID NO: 831116
auuugugggccaguacauc

SEQ ID NO: 831118 - RNA, 19 nt, Artificial Sequence
  Description of Artificial Sequence: Synthetic oligonucleotide
  Sense strand starting at position 3126 of SEQ ID NO: 587955
uguacuggcccacaaauua

SEQ ID NO: 831119 - RNA, 19 nt, Artificial Sequence
  Description of Artificial Sequence: Synthetic oligonucleotide
  Antisense strand to SEQ ID NO: 831118
uaauuugugggccaguaca

SEQ ID NO: 831120 - RNA, 19 nt, Artificial Sequence
  Description of Artificial Sequence: Synthetic oligonucleotide
  Sense strand starting at position 3146 of SEQ ID NO: 587955
guacauuagugagucagaa

SEQ ID NO: 831121 - RNA, 19 nt, Artificial Sequence
  Description of Artificial Sequence: Synthetic oligonucleotide
  Antisense strand to SEQ ID NO: 831120
uucugacucacuaauguac

SEQ ID NO: 831122 - RNA, 19 nt, Artificial Sequence
  Description of Artificial Sequence: Synthetic oligonucleotide
  Sense strand starting at position 3159 of SEQ ID NO: 587955
ucagaaugguacuuagacu

SEQ ID NO: 831123 - RNA, 19 nt, Artificial Sequence
  Description of Artificial Sequence: Synthetic oligonucleotide
  Antisense strand to SEQ ID NO: 831122
agucuaaguaccauucuga

SEQ ID NO: 831124 - RNA, 19 nt, Artificial Sequence
  Description of Artificial Sequence: Synthetic oligonucleotide
  Sense strand starting at position 3225 of SEQ ID NO: 587955
aaagaaguacaccgauauu

SEQ ID NO: 831125 - RNA, 19 nt, Artificial Sequence
  Description of Artificial Sequence: Synthetic oligonucleotide
  Antisense strand to SEQ ID NO: 831124
aauaucgguguacuucuuu

SEQ ID NO: 831126 - RNA, 19 nt, Artificial Sequence
  Description of Artificial Sequence: Synthetic oligonucleotide
  Sense strand starting at position 3228 of SEQ ID NO: 587955
gaaguacaccgauauucua

SEQ ID NO: 831127 - RNA, 19 nt, Artificial Sequence
  Description of Artificial Sequence: Synthetic oligonucleotide
  Antisense strand to SEQ ID NO: 831126
uagaauaucgguguacuuc

SEQ ID NO: 831128 - RNA, 19 nt, Artificial Sequence
  Description of Artificial Sequence: Synthetic oligonucleotide
  Sense strand starting at position 3375 of SEQ ID NO: 587955
ggacuucuauugcugaaug

SEQ ID NO: 831129 - RNA, 19 nt, Artificial Sequence
  Description of Artificial Sequence: Synthetic oligonucleotide
  Antisense strand to SEQ ID NO: 831128
cauucagcaauagaagucc

SEQ ID NO: 831130 - RNA, 19 nt, Artificial Sequence
  Description of Artificial Sequence: Synthetic oligonucleotide
  Sense strand starting at position 3377 of SEQ ID NO: 587955
acuucuauugcugaaugaa

SEQ ID NO: 831131 - RNA, 19 nt, Artificial Sequence
  Description of Artificial Sequence: Synthetic oligonucleotide
  Antisense strand to SEQ ID NO: 831130
uucauucagcaauagaagu

SEQ ID NO: 831132 - RNA, 19 nt, Artificial Sequence
  Description of Artificial Sequence: Synthetic oligonucleotide
  Sense strand starting at position 3414 of SEQ ID NO: 587955
guaaauuguauguaaugag

SEQ ID NO: 831133 - RNA, 19 nt, Artificial Sequence
  Description of Artificial Sequence: Synthetic oligonucleotide
  Antisense strand to SEQ ID NO: 831132
cucauuacauacaauuuac

SEQ ID NO: 831134 - RNA, 19 nt, Artificial Sequence
  Description of Artificial Sequence: Synthetic oligonucleotide
  Sense strand starting at position 3440 of SEQ ID NO: 587955
gcaacuagaucccugaauu

SEQ ID NO: 831135 - RNA, 19 nt, Artificial Sequence
  Description of Artificial Sequence: Synthetic oligonucleotide
  Antisense strand to SEQ ID NO: 831134
aauucagggaucuaguugc

SEQ ID NO: 831136 - RNA, 19 nt, Artificial Sequence
  Description of Artificial Sequence: Synthetic oligonucleotide
  Sense strand starting at position 3463 of SEQ ID NO: 587955
gguggaaagcaauguuuca

SEQ ID NO: 831137 - RNA, 19 nt, Artificial Sequence
  Description of Artificial Sequence: Synthetic oligonucleotide
  Antisense strand to SEQ ID NO: 831136
ugaaacauugcuuuccacc

SEQ ID NO: 831138 - RNA, 19 nt, Artificial Sequence
  Description of Artificial Sequence: Synthetic oligonucleotide
  Sense strand starting at position 3662 of SEQ ID NO: 587955
uuucuucuggguuauggaa

SEQ ID NO: 831139 - RNA, 19 nt, Artificial Sequence
  Description of Artificial Sequence: Synthetic oligonucleotide
  Antisense strand to SEQ ID NO: 831138
uuccauaacccagaagaaa

SEQ ID NO: 831140 - RNA, 19 nt, Artificial Sequence
  Description of Artificial Sequence: Synthetic oligonucleotide
  Sense strand starting at position 3860 of SEQ ID NO: 587955
aucaccaaacagugugaau

SEQ ID NO: 831141 - RNA, 19 nt, Artificial Sequence
  Description of Artificial Sequence: Synthetic oligonucleotide
  Antisense strand to SEQ ID NO: 831140
auucacacuguuuggugau

SEQ ID NO: 831142 - RNA, 19 nt, Artificial Sequence
  Description of Artificial Sequence: Synthetic oligonucleotide
  Sense strand starting at position 3926 of SEQ ID NO: 587955
uguagcgaagaaugugaaa

SEQ ID NO: 831143 - RNA, 19 nt, Artificial Sequence
  Description of Artificial Sequence: Synthetic oligonucleotide
  Antisense strand to SEQ ID NO: 831142
uuucacauucuucgcuaca

SEQ ID NO: 831144 - RNA, 19 nt, Artificial Sequence
  Description of Artificial Sequence: Synthetic oligonucleotide
  Sense strand starting at position 3955 of SEQ ID NO: 587955
uugugagagguauggaaau

SEQ ID NO: 831145 - RNA, 19 nt, Artificial Sequence
  Description of Artificial Sequence: Synthetic oligonucleotide
  Antisense strand to SEQ ID NO: 831144
auuuccauaccucucacaa

SEQ ID NO: 831146 - RNA, 19 nt, Artificial Sequence
  Description of Artificial Sequence: Synthetic oligonucleotide
  Sense strand starting at position 3969 of SEQ ID NO: 587955
gaaauaauauuagagggaa

SEQ ID NO: 831147 - RNA, 19 nt, Artificial Sequence
  Description of Artificial Sequence: Synthetic oligonucleotide
  Antisense strand to SEQ ID NO: 831146
uucccucuaauauuauuuc

SEQ ID NO: 831148 - RNA, 19 nt, Artificial Sequence
  Description of Artificial Sequence: Synthetic oligonucleotide
  Sense strand starting at position 35 of SEQ ID NO: 587956
agaugacaauuguguaaag

SEQ ID NO: 831149 - RNA, 19 nt, Artificial Sequence
  Description of Artificial Sequence: Synthetic oligonucleotide
  Antisense strand to SEQ ID NO: 831148
cuuuacacaauugucaucu

SEQ ID NO: 831150 - RNA, 19 nt, Artificial Sequence
  Description of Artificial Sequence: Synthetic oligonucleotide
  Sense strand starting at position 95 of SEQ ID NO: 587956
auugaaucuagcuggagga

SEQ ID NO: 831151 - RNA, 19 nt, Artificial Sequence
  Description of Artificial Sequence: Synthetic oligonucleotide
  Antisense strand to SEQ ID NO: 831150
uccuccagcuagauucaau

SEQ ID NO: 831152 - RNA, 19 nt, Artificial Sequence
  Description of Artificial Sequence: Synthetic oligonucleotide
  Sense strand starting at position 96 of SEQ ID NO: 587956
uugaaucuagcuggaggau

SEQ ID NO: 831153 - RNA, 19 nt, Artificial Sequence
  Description of Artificial Sequence: Synthetic oligonucleotide
  Antisense strand to SEQ ID NO: 831152
auccuccagcuagauucaa

SEQ ID NO: 831154 - RNA, 19 nt, Artificial Sequence
  Description of Artificial Sequence: Synthetic oligonucleotide
  Sense strand starting at position 119 of SEQ ID NO: 587956
ggaagaaucuccuauucuu

SEQ ID NO: 831155 - RNA, 19 nt, Artificial Sequence
  Description of Artificial Sequence: Synthetic oligonucleotide
  Antisense strand to SEQ ID NO: 831154
aagaauaggagauucuucc

SEQ ID NO: 831156 - RNA, 19 nt, Artificial Sequence
  Description of Artificial Sequence: Synthetic oligonucleotide
  Sense strand starting at position 144 of SEQ ID NO: 587956
uuccgcauguuagaaauuu

SEQ ID NO: 831157 - RNA, 19 nt, Artificial Sequence
  Description of Artificial Sequence: Synthetic oligonucleotide
  Antisense strand to SEQ ID NO: 831156
aaauuucuaacaugcggaa

SEQ ID NO: 831158 - RNA, 19 nt, Artificial Sequence
  Description of Artificial Sequence: Synthetic oligonucleotide
  Sense strand starting at position 404 of SEQ ID NO: 587956
gccguagugagccgagauu

SEQ ID NO: 831159 - RNA, 19 nt, Artificial Sequence
  Description of Artificial Sequence: Synthetic oligonucleotide
  Antisense strand to SEQ ID NO: 831158
aaucucggcucacuacggc

SEQ ID NO: 831160 - RNA, 19 nt, Artificial Sequence
  Description of Artificial Sequence: Synthetic oligonucleotide
  Sense strand starting at position 625 of SEQ ID NO: 587956
gcaguuaacucuguagcca

SEQ ID NO: 831161 - RNA, 19 nt, Artificial Sequence
  Description of Artificial Sequence: Synthetic oligonucleotide
  Antisense strand to SEQ ID NO: 831160
uggcuacagaguuaacugc

SEQ ID NO: 831162 - RNA, 19 nt, Artificial Sequence
  Description of Artificial Sequence: Synthetic oligonucleotide
  Sense strand starting at position 672 of SEQ ID NO: 587956
aagagagcuguuuagagua

SEQ ID NO: 831163 - RNA, 19 nt, Artificial Sequence
  Description of Artificial Sequence: Synthetic oligonucleotide
  Antisense strand to SEQ ID NO: 831162
uacucuaaacagcucucuu

SEQ ID NO: 831164 - RNA, 19 nt, Artificial Sequence
  Description of Artificial Sequence: Synthetic oligonucleotide
  Sense strand starting at position 674 of SEQ ID NO: 587956
gagagcuguuuagaguaac

SEQ ID NO: 831165 - RNA, 19 nt, Artificial Sequence
  Description of Artificial Sequence: Synthetic oligonucleotide
  Antisense strand to SEQ ID NO: 831164
guuacucuaaacagcucuc

SEQ ID NO: 831166 - RNA, 19 nt, Artificial Sequence
  Description of Artificial Sequence: Synthetic oligonucleotide
  Sense strand starting at position 677 of SEQ ID NO: 587956
agcuguuuagaguaacuau

SEQ ID NO: 831167 - RNA, 19 nt, Artificial Sequence
  Description of Artificial Sequence: Synthetic oligonucleotide
  Antisense strand to SEQ ID NO: 831166
auaguuacucuaaacagcu

SEQ ID NO: 831168 - RNA, 19 nt, Artificial Sequence
  Description of Artificial Sequence: Synthetic oligonucleotide
  Sense strand starting at position 680 of SEQ ID NO: 587956
uguuuagaguaacuauaac

SEQ ID NO: 831169 - RNA, 19 nt, Artificial Sequence
  Description of Artificial Sequence: Synthetic oligonucleotide
  Antisense strand to SEQ ID NO: 831168
guuauaguuacucuaaaca

SEQ ID NO: 831170 - RNA, 19 nt, Artificial Sequence
  Description of Artificial Sequence: Synthetic oligonucleotide
  Sense strand starting at position 749 of SEQ ID NO: 587956
agaaauuucucagacaagu

SEQ ID NO: 831171 - RNA, 19 nt, Artificial Sequence
  Description of Artificial Sequence: Synthetic oligonucleotide
  Antisense strand to SEQ ID NO: 831170
acuugucugagaaauuucu

SEQ ID NO: 831172 - RNA, 19 nt, Artificial Sequence
  Description of Artificial Sequence: Synthetic oligonucleotide
  Sense strand starting at position 886 of SEQ ID NO: 587956
agaaacucuucugcucaga

SEQ ID NO: 831173 - RNA, 19 nt, Artificial Sequence
  Description of Artificial Sequence: Synthetic oligonucleotide
  Antisense strand to SEQ ID NO: 831172
ucugagcagaagaguuucu

SEQ ID NO: 831174 - RNA, 19 nt, Artificial Sequence
  Description of Artificial Sequence: Synthetic oligonucleotide
  Sense strand starting at position 910 of SEQ ID NO: 587956
uuuccaaguccucggaaga

SEQ ID NO: 831175 - RNA, 19 nt, Artificial Sequence
  Description of Artificial Sequence: Synthetic oligonucleotide
  Antisense strand to SEQ ID NO: 831174
ucuuccgaggacuuggaaa

SEQ ID NO: 831176 - RNA, 19 nt, Artificial Sequence
  Description of Artificial Sequence: Synthetic oligonucleotide
  Sense strand starting at position 1012 of SEQ ID NO: 587956
gauccagaaugcuggauuu

SEQ ID NO: 831177 - RNA, 19 nt, Artificial Sequence
  Description of Artificial Sequence: Synthetic oligonucleotide
  Antisense strand to SEQ ID NO: 831176
aaauccagcauucuggauc

SEQ ID NO: 831178 - RNA, 19 nt, Artificial Sequence
  Description of Artificial Sequence: Synthetic oligonucleotide
  Sense strand starting at position 1177 of SEQ ID NO: 587956
ucucuacacucgucaggua

SEQ ID NO: 831179 - RNA, 19 nt, Artificial Sequence
  Description of Artificial Sequence: Synthetic oligonucleotide
  Antisense strand to SEQ ID NO: 831178
uaccugacgaguguagaga

SEQ ID NO: 831180 - RNA, 19 nt, Artificial Sequence
  Description of Artificial Sequence: Synthetic oligonucleotide
  Sense strand starting at position 1316 of SEQ ID NO: 587956
guccaaagcugcuuagugu

SEQ ID NO: 831181 - RNA, 19 nt, Artificial Sequence
  Description of Artificial Sequence: Synthetic oligonucleotide
  Antisense strand to SEQ ID NO: 831180
acacuaagcagcuuuggac

SEQ ID NO: 831182 - RNA, 19 nt, Artificial Sequence
  Description of Artificial Sequence: Synthetic oligonucleotide
  Sense strand starting at position 1325 of SEQ ID NO: 587956
ugcuuaguguccgcgagga

SEQ ID NO: 831183 - RNA, 19 nt, Artificial Sequence
  Description of Artificial Sequence: Synthetic oligonucleotide
  Antisense strand to SEQ ID NO: 831182
uccucgcggacacuaagca

SEQ ID NO: 831184 - RNA, 19 nt, Artificial Sequence
  Description of Artificial Sequence: Synthetic oligonucleotide
  Sense strand starting at position 1348 of SEQ ID NO: 587956
guccggaugcgcgaugauu

SEQ ID NO: 831185 - RNA, 19 nt, Artificial Sequence
  Description of Artificial Sequence: Synthetic oligonucleotide
  Antisense strand to SEQ ID NO: 831184
aaucaucgcgcauccggac

SEQ ID NO: 831186 - RNA, 19 nt, Artificial Sequence
  Description of Artificial Sequence: Synthetic oligonucleotide
  Sense strand starting at position 1350 of SEQ ID NO: 587956
ccggaugcgcgaugauuca

SEQ ID NO: 831187 - RNA, 19 nt, Artificial Sequence
  Description of Artificial Sequence: Synthetic oligonucleotide
  Antisense strand to SEQ ID NO: 831186
ugaaucaucgcgcauccgg

SEQ ID NO: 831188 - RNA, 19 nt, Artificial Sequence
  Description of Artificial Sequence: Synthetic oligonucleotide
  Sense strand starting at position 3047 of SEQ ID NO: 587956
ggcuauggcuuugucagaa

SEQ ID NO: 831189 - RNA, 19 nt, Artificial Sequence
  Description of Artificial Sequence: Synthetic oligonucleotide
  Antisense strand to SEQ ID NO: 831188
uucugacaaagccauagcc

SEQ ID NO: 831190 - RNA, 19 nt, Artificial Sequence
  Description of Artificial Sequence: Synthetic oligonucleotide
  Sense strand starting at position 3051 of SEQ ID NO: 587956
auggcuuugucagaaucag

SEQ ID NO: 831191 - RNA, 19 nt, Artificial Sequence
  Description of Artificial Sequence: Synthetic oligonucleotide
  Antisense strand to SEQ ID NO: 831190
cugauucugacaaagccau

SEQ ID NO: 831192 - RNA, 19 nt, Artificial Sequence
  Description of Artificial Sequence: Synthetic oligonucleotide
  Sense strand starting at position 3087 of SEQ ID NO: 587956
acagauuccugagggcaga

SEQ ID NO: 831193 - RNA, 19 nt, Artificial Sequence
  Description of Artificial Sequence: Synthetic oligonucleotide
  Antisense strand to SEQ ID NO: 831192
ucugcccucaggaaucugu

SEQ ID NO: 831194 - RNA, 19 nt, Artificial Sequence
  Description of Artificial Sequence: Synthetic oligonucleotide
  Sense strand starting at position 3088 of SEQ ID NO: 587956
cagauuccugagggcagaa

SEQ ID NO: 831195 - RNA, 19 nt, Artificial Sequence
  Description of Artificial Sequence: Synthetic oligonucleotide
  Antisense strand to SEQ ID NO: 831194
uucugcccucaggaaucug

SEQ ID NO: 831196 - RNA, 19 nt, Artificial Sequence
  Description of Artificial Sequence: Synthetic oligonucleotide
  Sense strand starting at position 3227 of SEQ ID NO: 587956
cgcuucguaucgcuucuua

SEQ ID NO: 831197 - RNA, 19 nt, Artificial Sequence
  Description of Artificial Sequence: Synthetic oligonucleotide
  Antisense strand to SEQ ID NO: 831196
uaagaagcgauacgaagcg

SEQ ID NO: 831198 - RNA, 19 nt, Artificial Sequence
  Description of Artificial Sequence: Synthetic oligonucleotide
  Sense strand starting at position 3229 of SEQ ID NO: 587956
cuucguaucgcuucuuaca

SEQ ID NO: 831199 - RNA, 19 nt, Artificial Sequence
  Description of Artificial Sequence: Synthetic oligonucleotide
  Antisense strand to SEQ ID NO: 831198
uguaagaagcgauacgaag

SEQ ID NO: 831200 - RNA, 19 nt, Artificial Sequence
  Description of Artificial Sequence: Synthetic oligonucleotide
  Sense strand starting at position 3325 of SEQ ID NO: 587956
acugcaagcuucguaacuu

SEQ ID NO: 831201 - RNA, 19 nt, Artificial Sequence
  Description of Artificial Sequence: Synthetic oligonucleotide
  Antisense strand to SEQ ID NO: 831200
aaguuacgaagcuugcagu

SEQ ID NO: 831202 - RNA, 19 nt, Artificial Sequence
  Description of Artificial Sequence: Synthetic oligonucleotide
  Sense strand starting at position 3326 of SEQ ID NO: 587956
cugcaagcuucguaacuuu

SEQ ID NO: 831203 - RNA, 19 nt, Artificial Sequence
  Description of Artificial Sequence: Synthetic oligonucleotide
  Antisense strand to SEQ ID NO: 831202
aaaguuacgaagcuugcag

SEQ ID NO: 831204 - RNA, 19 nt, Artificial Sequence
  Description of Artificial Sequence: Synthetic oligonucleotide
  Sense strand starting at position 3374 of SEQ ID NO: 587956
uugaguuucccagaaguga

SEQ ID NO: 831205 - RNA, 19 nt, Artificial Sequence
  Description of Artificial Sequence: Synthetic oligonucleotide
  Antisense strand to SEQ ID NO: 831204
ucacuucugggaaacucaa

SEQ ID NO: 831206 - RNA, 19 nt, Artificial Sequence
  Description of Artificial Sequence: Synthetic oligonucleotide
  Sense strand starting at position 3425 of SEQ ID NO: 587956
cugaacugccuuugggaga

SEQ ID NO: 831207 - RNA, 19 nt, Artificial Sequence
  Description of Artificial Sequence: Synthetic oligonucleotide
  Antisense strand to SEQ ID NO: 831206
ucucccaaaggcaguucag

SEQ ID NO: 831208 - RNA, 19 nt, Artificial Sequence
  Description of Artificial Sequence: Synthetic oligonucleotide
  Sense strand starting at position 3426 of SEQ ID NO: 587956
ugaacugccuuugggagau

SEQ ID NO: 831209 - RNA, 19 nt, Artificial Sequence
  Description of Artificial Sequence: Synthetic oligonucleotide
  Antisense strand to SEQ ID NO: 831208
aucucccaaaggcaguuca

SEQ ID NO: 831210 - RNA, 19 nt, Artificial Sequence
  Description of Artificial Sequence: Synthetic oligonucleotide
  Sense strand starting at position 3685 of SEQ ID NO: 587956
ccgcaaacaucacgaaaua

SEQ ID NO: 831211 - RNA, 19 nt, Artificial Sequence
  Description of Artificial Sequence: Synthetic oligonucleotide
  Antisense strand to SEQ ID NO: 831210
uauuucgugauguuugcgg

SEQ ID NO: 831212 - RNA, 19 nt, Artificial Sequence
  Description of Artificial Sequence: Synthetic oligonucleotide
  Sense strand starting at position 3770 of SEQ ID NO: 587956
ucacgcaaauaauaagaau

SEQ ID NO: 831213 - RNA, 19 nt, Artificial Sequence
  Description of Artificial Sequence: Synthetic oligonucleotide
  Antisense strand to SEQ ID NO: 831212
auucuuauuauuugcguga

SEQ ID NO: 831214 - RNA, 19 nt, Artificial Sequence
  Description of Artificial Sequence: Synthetic oligonucleotide
  Sense strand starting at position 3773 of SEQ ID NO: 587956
cgcaaauaauaagaauguu

SEQ ID NO: 831215 - RNA, 19 nt, Artificial Sequence
  Description of Artificial Sequence: Synthetic oligonucleotide
  Antisense strand to SEQ ID NO: 831214
aacauucuuauuauuugcg

SEQ ID NO: 831216 - RNA, 19 nt, Artificial Sequence
  Description of Artificial Sequence: Synthetic oligonucleotide
  Sense strand starting at position 3923 of SEQ ID NO: 587956
agcacaaacugaugaaagu

SEQ ID NO: 831217 - RNA, 19 nt, Artificial Sequence
  Description of Artificial Sequence: Synthetic oligonucleotide
  Antisense strand to SEQ ID NO: 831216
acuuucaucaguuugugcu

SEQ ID NO: 831218 - RNA, 19 nt, Artificial Sequence
  Description of Artificial Sequence: Synthetic oligonucleotide
  Sense strand starting at position 76 of SEQ ID NO: 587957
gauccagaaugcuggauuu

SEQ ID NO: 831219 - RNA, 19 nt, Artificial Sequence
  Description of Artificial Sequence: Synthetic oligonucleotide
  Antisense strand to SEQ ID NO: 831218
aaauccagcauucuggauc

SEQ ID NO: 831220 - RNA, 19 nt, Artificial Sequence
  Description of Artificial Sequence: Synthetic oligonucleotide
  Sense strand starting at position 241 of SEQ ID NO: 587957
ucucuacacucgucaggua

SEQ ID NO: 831221 - RNA, 19 nt, Artificial Sequence
  Description of Artificial Sequence: Synthetic oligonucleotide
  Antisense strand to SEQ ID NO: 831220
uaccugacgaguguagaga

SEQ ID NO: 831222 - RNA, 19 nt, Artificial Sequence
  Description of Artificial Sequence: Synthetic oligonucleotide
  Sense strand starting at position 380 of SEQ ID NO: 587957
guccaaagcugcuuagugu

SEQ ID NO: 831223 - RNA, 19 nt, Artificial Sequence
  Description of Artificial Sequence: Synthetic oligonucleotide
  Antisense strand to SEQ ID NO: 831222
acacuaagcagcuuuggac

SEQ ID NO: 831224 - RNA, 19 nt, Artificial Sequence
  Description of Artificial Sequence: Synthetic oligonucleotide
  Sense strand starting at position 389 of SEQ ID NO: 587957
ugcuuaguguccgcgagga

SEQ ID NO: 831225 - RNA, 19 nt, Artificial Sequence
  Description of Artificial Sequence: Synthetic oligonucleotide
  Antisense strand to SEQ ID NO: 831224
uccucgcggacacuaagca

SEQ ID NO: 831226 - RNA, 19 nt, Artificial Sequence
  Description of Artificial Sequence: Synthetic oligonucleotide
  Sense strand starting at position 412 of SEQ ID NO: 587957
guccggaugcgcgaugauu

SEQ ID NO: 831227 - RNA, 19 nt, Artificial Sequence
  Description of Artificial Sequence: Synthetic oligonucleotide
  Antisense strand to SEQ ID NO: 831226
aaucaucgcgcauccggac

SEQ ID NO: 831228 - RNA, 19 nt, Artificial Sequence
  Description of Artificial Sequence: Synthetic oligonucleotide
  Sense strand starting at position 414 of SEQ ID NO: 587957
ccggaugcgcgaugauuca

SEQ ID NO: 831229 - RNA, 19 nt, Artificial Sequence
  Description of Artificial Sequence: Synthetic oligonucleotide
  Antisense strand to SEQ ID NO: 831228
ugaaucaucgcgcauccgg

SEQ ID NO: 831230 - RNA, 19 nt, Artificial Sequence
  Description of Artificial Sequence: Synthetic oligonucleotide
  Sense strand starting at position 2111 of SEQ ID NO: 587957
ggcuauggcuuugucagaa

SEQ ID NO: 831231 - RNA, 19 nt, Artificial Sequence
  Description of Artificial Sequence: Synthetic oligonucleotide
  Antisense strand to SEQ ID NO: 831230
uucugacaaagccauagcc

SEQ ID NO: 831232 - RNA, 19 nt, Artificial Sequence
  Description of Artificial Sequence: Synthetic oligonucleotide
  Sense strand starting at position 2115 of SEQ ID NO: 587957
auggcuuugucagaaucag

SEQ ID NO: 831233 - RNA, 19 nt, Artificial Sequence
  Description of Artificial Sequence: Synthetic oligonucleotide
  Antisense strand to SEQ ID NO: 831232
cugauucugacaaagccau

SEQ ID NO: 831234 - RNA, 19 nt, Artificial Sequence
  Description of Artificial Sequence: Synthetic oligonucleotide
  Sense strand starting at position 2151 of SEQ ID NO: 587957
acagauuccugagggcaga

SEQ ID NO: 831235 - RNA, 19 nt, Artificial Sequence
  Description of Artificial Sequence: Synthetic oligonucleotide
  Antisense strand to SEQ ID NO: 831234
ucugcccucaggaaucugu

SEQ ID NO: 831236 - RNA, 19 nt, Artificial Sequence
  Description of Artificial Sequence: Synthetic oligonucleotide
  Sense strand starting at position 2152 of SEQ ID NO: 587957
cagauuccugagggcagaa

SEQ ID NO: 831237 - RNA, 19 nt, Artificial Sequence
  Description of Artificial Sequence: Synthetic oligonucleotide
  Antisense strand to SEQ ID NO: 831236
uucugcccucaggaaucug

SEQ ID NO: 831238 - RNA, 19 nt, Artificial Sequence
  Description of Artificial Sequence: Synthetic oligonucleotide
  Sense strand starting at position 2293 of SEQ ID NO: 587957
cuucguaucgcuucuuaca

SEQ ID NO: 831239 - RNA, 19 nt, Artificial Sequence
  Description of Artificial Sequence: Synthetic oligonucleotide
  Antisense strand to SEQ ID NO: 831238
uguaagaagcgauacgaag

SEQ ID NO: 831240 - RNA, 19 nt, Artificial Sequence
  Description of Artificial Sequence: Synthetic oligonucleotide
  Sense strand starting at position 2389 of SEQ ID NO: 587957
acugcaagcuucguaacuu

SEQ ID NO: 831241 - RNA, 19 nt, Artificial Sequence
  Description of Artificial Sequence: Synthetic oligonucleotide
  Antisense strand to SEQ ID NO: 831240
aaguuacgaagcuugcagu

SEQ ID NO: 831242 - RNA, 19 nt, Artificial Sequence
  Description of Artificial Sequence: Synthetic oligonucleotide
  Sense strand starting at position 2438 of SEQ ID NO: 587957
uugaguuucccagaaguga

SEQ ID NO: 831243 - RNA, 19 nt, Artificial Sequence
  Description of Artificial Sequence: Synthetic oligonucleotide
  Antisense strand to SEQ ID NO: 831242
ucacuucugggaaacucaa

SEQ ID NO: 831244 - RNA, 19 nt, Artificial Sequence
  Description of Artificial Sequence: Synthetic oligonucleotide
  Sense strand starting at position 2489 of SEQ ID NO: 587957
cugaacugccuuugggaga

SEQ ID NO: 831245 - RNA, 19 nt, Artificial Sequence
  Description of Artificial Sequence: Synthetic oligonucleotide
  Antisense strand to SEQ ID NO: 831244
ucucccaaaggcaguucag

SEQ ID NO: 831246 - RNA, 19 nt, Artificial Sequence
  Description of Artificial Sequence: Synthetic oligonucleotide
  Sense strand starting at position 2834 of SEQ ID NO: 587957
ucacgcaaauaauaagaau

SEQ ID NO: 831247 - RNA, 19 nt, Artificial Sequence
  Description of Artificial Sequence: Synthetic oligonucleotide
  Antisense strand to SEQ ID NO: 831246
auucuuauuauuugcguga

SEQ ID NO: 831248 - RNA, 19 nt, Artificial Sequence
  Description of Artificial Sequence: Synthetic oligonucleotide
  Sense strand starting at position 2837 of SEQ ID NO: 587957
cgcaaauaauaagaauguu

SEQ ID NO: 831249 - RNA, 19 nt, Artificial Sequence
  Description of Artificial Sequence: Synthetic oligonucleotide
  Antisense strand to SEQ ID NO: 831248
aacauucuuauuauuugcg

SEQ ID NO: 831250 - RNA, 19 nt, Artificial Sequence
  Description of Artificial Sequence: Synthetic oligonucleotide
  Sense strand starting at position 2987 of SEQ ID NO: 587957
agcacaaacugaugaaagu

SEQ ID NO: 831251 - RNA, 19 nt, Artificial Sequence
  Description of Artificial Sequence: Synthetic oligonucleotide
  Antisense strand to SEQ ID NO: 831250
acuuucaucaguuugugcu

SEQ ID NO: 831252 - RNA, 19 nt, Artificial Sequence
  Description of Artificial Sequence: Synthetic oligonucleotide
  Sense strand starting at position 3096 of SEQ ID NO: 587957
ucagaacacuuggacaaau

SEQ ID NO: 831253 - RNA, 19 nt, Artificial Sequence
  Description of Artificial Sequence: Synthetic oligonucleotide
  Antisense strand to SEQ ID NO: 831252
auuuguccaaguguucuga

SEQ ID NO: 831254 - RNA, 19 nt, Artificial Sequence
  Description of Artificial Sequence: Synthetic oligonucleotide
  Sense strand starting at position 3151 of SEQ ID NO: 587957
ggcuuaugcccagacagcu

SEQ ID NO: 831255 - RNA, 19 nt, Artificial Sequence
  Description of Artificial Sequence: Synthetic oligonucleotide
  Antisense strand to SEQ ID NO: 831254
agcugucugggcauaagcc

SEQ ID NO: 831256 - RNA, 19 nt, Artificial Sequence
  Description of Artificial Sequence: Synthetic oligonucleotide
  Sense strand starting at position 3235 of SEQ ID NO: 587957
cuaugacaaucuggaagaa

SEQ ID NO: 831257 - RNA, 19 nt, Artificial Sequence
  Description of Artificial Sequence: Synthetic oligonucleotide
  Antisense strand to SEQ ID NO: 831256
uucuuccagauugucauag

SEQ ID NO: 831258 - RNA, 19 nt, Artificial Sequence
  Description of Artificial Sequence: Synthetic oligonucleotide
  Sense strand starting at position 3251 of SEQ ID NO: 587957
gaaggugagccuugcuaaa

SEQ ID NO: 831259 - RNA, 19 nt, Artificial Sequence
  Description of Artificial Sequence: Synthetic oligonucleotide
  Antisense strand to SEQ ID NO: 831258
uuuagcaaggcucaccuuc

SEQ ID NO: 831260 - RNA, 19 nt, Artificial Sequence
  Description of Artificial Sequence: Synthetic oligonucleotide
  Sense strand starting at position 3253 of SEQ ID NO: 587957
aggugagccuugcuaaaua

SEQ ID NO: 831261 - RNA, 19 nt, Artificial Sequence
  Description of Artificial Sequence: Synthetic oligonucleotide
  Antisense strand to SEQ ID NO: 831260
uauuuagcaaggcucaccu

SEQ ID NO: 831262 - RNA, 19 nt, Artificial Sequence
  Description of Artificial Sequence: Synthetic oligonucleotide
  Sense strand starting at position 3326 of SEQ ID NO: 587957
acagcuagucaggauaucu

SEQ ID NO: 831263 - RNA, 19 nt, Artificial Sequence
  Description of Artificial Sequence: Synthetic oligonucleotide
  Antisense strand to SEQ ID NO: 831262
agauauccugacuagcugu

SEQ ID NO: 831264 - RNA, 19 nt, Artificial Sequence
  Description of Artificial Sequence: Synthetic oligonucleotide
  Sense strand starting at position 3422 of SEQ ID NO: 587957
gcaggcauuucuggaauuu

SEQ ID NO: 831265 - RNA, 19 nt, Artificial Sequence
  Description of Artificial Sequence: Synthetic oligonucleotide
  Antisense strand to SEQ ID NO: 831264
aaauuccagaaaugccugc

SEQ ID NO: 831266 - RNA, 19 nt, Artificial Sequence
  Description of Artificial Sequence: Synthetic oligonucleotide
  Sense strand starting at position 3443 of SEQ ID NO: 587957
agaagaacuuucccgagua

SEQ ID NO: 831267 - RNA, 19 nt, Artificial Sequence
  Description of Artificial Sequence: Synthetic oligonucleotide
  Antisense strand to SEQ ID NO: 831266
uacucgggaaaguucuucu

SEQ ID NO: 831268 - RNA, 19 nt, Artificial Sequence
  Description of Artificial Sequence: Synthetic oligonucleotide
  Sense strand starting at position 3445 of SEQ ID NO: 587957
aagaacuuucccgaguacu

SEQ ID NO: 831269 - RNA, 19 nt, Artificial Sequence
  Description of Artificial Sequence: Synthetic oligonucleotide
  Antisense strand to SEQ ID NO: 831268
aguacucgggaaaguucuu

SEQ ID NO: 831270 - RNA, 19 nt, Artificial Sequence
  Description of Artificial Sequence: Synthetic oligonucleotide
  Sense strand starting at position 3448 of SEQ ID NO: 587957
aacuuucccgaguacuaug

SEQ ID NO: 831271 - RNA, 19 nt, Artificial Sequence
  Description of Artificial Sequence: Synthetic oligonucleotide
  Antisense strand to SEQ ID NO: 831270
cauaguacucgggaaaguu

SEQ ID NO: 831272 - RNA, 19 nt, Artificial Sequence
  Description of Artificial Sequence: Synthetic oligonucleotide
  Sense strand starting at position 3451 of SEQ ID NO: 587957
uuucccgaguacuaugaau

SEQ ID NO: 831273 - RNA, 19 nt, Artificial Sequence
  Description of Artificial Sequence: Synthetic oligonucleotide
  Antisense strand to SEQ ID NO: 831272
auucauaguacucgggaaa

SEQ ID NO: 831274 - RNA, 19 nt, Artificial Sequence
  Description of Artificial Sequence: Synthetic oligonucleotide
  Sense strand starting at position 3487 of SEQ ID NO: 587957
uuagcuccucuaugaguuu

SEQ ID NO: 831275 - RNA, 19 nt, Artificial Sequence
  Description of Artificial Sequence: Synthetic oligonucleotide
  Antisense strand to SEQ ID NO: 831274
aaacucauagaggagcuaa

SEQ ID NO: 831276 - RNA, 19 nt, Artificial Sequence
  Description of Artificial Sequence: Synthetic oligonucleotide
  Sense strand starting at position 3607 of SEQ ID NO: 587957
gaucgagaaagucaugguu

SEQ ID NO: 831277 - RNA, 19 nt, Artificial Sequence
  Description of Artificial Sequence: Synthetic oligonucleotide
  Antisense strand to SEQ ID NO: 831276
aaccaugacuuucucgauc

SEQ ID NO: 831278 - RNA, 19 nt, Artificial Sequence
  Description of Artificial Sequence: Synthetic oligonucleotide
  Sense strand starting at position 3610 of SEQ ID NO: 587957
cgagaaagucaugguuaaa

SEQ ID NO: 831279 - RNA, 19 nt, Artificial Sequence
  Description of Artificial Sequence: Synthetic oligonucleotide
  Antisense strand to SEQ ID NO: 831278
uuuaaccaugacuuucucg

SEQ ID NO: 831280 - RNA, 19 nt, Artificial Sequence
  Description of Artificial Sequence: Synthetic oligonucleotide
  Sense strand starting at position 3686 of SEQ ID NO: 587957
ugcccuuauuggcuaauuu

SEQ ID NO: 831281 - RNA, 19 nt, Artificial Sequence
  Description of Artificial Sequence: Synthetic oligonucleotide
  Antisense strand to SEQ ID NO: 831280
aaauuagccaauaagggca

SEQ ID NO: 831282 - RNA, 19 nt, Artificial Sequence
  Description of Artificial Sequence: Synthetic oligonucleotide
  Sense strand starting at position 3751 of SEQ ID NO: 587957
aaagaucaagcgugucauc

SEQ ID NO: 831283 - RNA, 19 nt, Artificial Sequence
  Description of Artificial Sequence: Synthetic oligonucleotide
  Antisense strand to SEQ ID NO: 831282
gaugacacgcuugaucuuu

SEQ ID NO: 831284 - RNA, 19 nt, Artificial Sequence
  Description of Artificial Sequence: Synthetic oligonucleotide
  Sense strand starting at position 3794 of SEQ ID NO: 587957
ggcucaauuuagugagauu

SEQ ID NO: 831285 - RNA, 19 nt, Artificial Sequence
  Description of Artificial Sequence: Synthetic oligonucleotide
  Antisense strand to SEQ ID NO: 831284
aaucucacuaaauugagcc

SEQ ID NO: 831286 - RNA, 19 nt, Artificial Sequence
  Description of Artificial Sequence: Synthetic oligonucleotide
  Sense strand starting at position 3812 of SEQ ID NO: 587957
uuugcucuggcagacuuaa

SEQ ID NO: 831287 - RNA, 19 nt, Artificial Sequence
  Description of Artificial Sequence: Synthetic oligonucleotide
  Antisense strand to SEQ ID NO: 831286
uuaagucugccagagcaaa

SEQ ID NO: 831288 - RNA, 19 nt, Artificial Sequence
  Description of Artificial Sequence: Synthetic oligonucleotide
  Sense strand starting at position 3902 of SEQ ID NO: 587957
guuucuuauccauggaggu

SEQ ID NO: 831289 - RNA, 19 nt, Artificial Sequence
  Description of Artificial Sequence: Synthetic oligonucleotide
  Antisense strand to SEQ ID NO: 831288
accuccauggauaagaaac

SEQ ID NO: 831290 - RNA, 19 nt, Artificial Sequence
  Description of Artificial Sequence: Synthetic oligonucleotide
  Sense strand starting at position 3917 of SEQ ID NO: 587957
aggugauucggcagaggcu

SEQ ID NO: 831291 - RNA, 19 nt, Artificial Sequence
  Description of Artificial Sequence: Synthetic oligonucleotide
  Antisense strand to SEQ ID NO: 831290
agccucugccgaaucaccu

SEQ ID NO: 831292 - RNA, 19 nt, Artificial Sequence
  Description of Artificial Sequence: Synthetic oligonucleotide
  Sense strand starting at position 3930 of SEQ ID NO: 587957
gaggcuggaucuuaagaca

SEQ ID NO: 831293 - RNA, 19 nt, Artificial Sequence
  Description of Artificial Sequence: Synthetic oligonucleotide
  Antisense strand to SEQ ID NO: 831292
ugucuuaagauccagccuc

SEQ ID NO: 831294 - RNA, 19 nt, Artificial Sequence
  Description of Artificial Sequence: Synthetic oligonucleotide
  Sense strand starting at position 3933 of SEQ ID NO: 587957
gcuggaucuuaagacaguu

SEQ ID NO: 831295 - RNA, 19 nt, Artificial Sequence
  Description of Artificial Sequence: Synthetic oligonucleotide
  Antisense strand to SEQ ID NO: 831294
aacugucuuaagauccagc

SEQ ID NO: 831296 - RNA, 19 nt, Artificial Sequence
  Description of Artificial Sequence: Synthetic oligonucleotide
  Sense strand starting at position 3955 of SEQ ID NO: 587957
cccucaguccucugacuuu

SEQ ID NO: 831297 - RNA, 19 nt, Artificial Sequence
  Description of Artificial Sequence: Synthetic oligonucleotide
  Antisense strand to SEQ ID NO: 831296
aaagucagaggacugaggg

SEQ ID NO: 831298 - RNA, 19 nt, Artificial Sequence
  Description of Artificial Sequence: Synthetic oligonucleotide
  Sense strand starting at position 132 of SEQ ID NO: 587958
aguccuuacugucuauaaa

SEQ ID NO: 831299 - RNA, 19 nt, Artificial Sequence
  Description of Artificial Sequence: Synthetic oligonucleotide
  Antisense strand to SEQ ID NO: 831298
uuuauagacaguaaggacu

SEQ ID NO: 831300 - RNA, 19 nt, Artificial Sequence
  Description of Artificial Sequence: Synthetic oligonucleotide
  Sense strand starting at position 133 of SEQ ID NO: 587958
guccuuacugucuauaaag

SEQ ID NO: 831301 - RNA, 19 nt, Artificial Sequence
  Description of Artificial Sequence: Synthetic oligonucleotide
  Antisense strand to SEQ ID NO: 831300
cuuuauagacaguaaggac

SEQ ID NO: 831302 - RNA, 19 nt, Artificial Sequence
  Description of Artificial Sequence: Synthetic oligonucleotide
  Sense strand starting at position 359 of SEQ ID NO: 587958
guaaccuaugucuacacau

SEQ ID NO: 831303 - RNA, 19 nt, Artificial Sequence
  Description of Artificial Sequence: Synthetic oligonucleotide
  Antisense strand to SEQ ID NO: 831302
auguguagacauagguuac

SEQ ID NO: 831304 - RNA, 19 nt, Artificial Sequence
  Description of Artificial Sequence: Synthetic oligonucleotide
  Sense strand starting at position 450 of SEQ ID NO: 587958
agagaacucuaagagaauu

SEQ ID NO: 831305 - RNA, 19 nt, Artificial Sequence
  Description of Artificial Sequence: Synthetic oligonucleotide
  Antisense strand to SEQ ID NO: 831304
aauucucuuagaguucucu

SEQ ID NO: 831306 - RNA, 19 nt, Artificial Sequence
  Description of Artificial Sequence: Synthetic oligonucleotide
  Sense strand starting at position 530 of SEQ ID NO: 587958
caguguuaaccgcaauaca

SEQ ID NO: 831307 - RNA, 19 nt, Artificial Sequence
  Description of Artificial Sequence: Synthetic oligonucleotide
  Antisense strand to SEQ ID NO: 831306
uguauugcgguuaacacug

SEQ ID NO: 831308 - RNA, 19 nt, Artificial Sequence
  Description of Artificial Sequence: Synthetic oligonucleotide
  Sense strand starting at position 745 of SEQ ID NO: 587958
gccaacuaugaaugaagua

SEQ ID NO: 831309 - RNA, 19 nt, Artificial Sequence
  Description of Artificial Sequence: Synthetic oligonucleotide
  Antisense strand to SEQ ID NO: 831308
uacuucauucauaguuggc

SEQ ID NO: 831310 - RNA, 19 nt, Artificial Sequence
  Description of Artificial Sequence: Synthetic oligonucleotide
  Sense strand starting at position 1166 of SEQ ID NO: 587958
caggcauguggccaacauu

SEQ ID NO: 831311 - RNA, 19 nt, Artificial Sequence
  Description of Artificial Sequence: Synthetic oligonucleotide
  Antisense strand to SEQ ID NO: 831310
aauguuggccacaugccug

SEQ ID NO: 831312 - RNA, 19 nt, Artificial Sequence
  Description of Artificial Sequence: Synthetic oligonucleotide
  Sense strand starting at position 1498 of SEQ ID NO: 587958
ccgggauucgaacaaaguu

SEQ ID NO: 831313 - RNA, 19 nt, Artificial Sequence
  Description of Artificial Sequence: Synthetic oligonucleotide
  Antisense strand to SEQ ID NO: 831312
aacuuuguucgaaucccgg

SEQ ID NO: 831314 - RNA, 19 nt, Artificial Sequence
  Description of Artificial Sequence: Synthetic oligonucleotide
  Sense strand starting at position 2159 of SEQ ID NO: 587958
gccucugggcguugaauuu

SEQ ID NO: 831315 - RNA, 19 nt, Artificial Sequence
  Description of Artificial Sequence: Synthetic oligonucleotide
  Antisense strand to SEQ ID NO: 831314
aaauucaacgcccagaggc

SEQ ID NO: 831316 - RNA, 19 nt, Artificial Sequence
  Description of Artificial Sequence: Synthetic oligonucleotide
  Sense strand starting at position 2171 of SEQ ID NO: 587958
ugaauuugccgccagucua

SEQ ID NO: 831317 - RNA, 19 nt, Artificial Sequence
  Description of Artificial Sequence: Synthetic oligonucleotide
  Antisense strand to SEQ ID NO: 831316
uagacuggcggcaaauuca

SEQ ID NO: 831318 - RNA, 19 nt, Artificial Sequence
  Description of Artificial Sequence: Synthetic oligonucleotide
  Sense strand starting at position 2372 of SEQ ID NO: 587958
gagaacuugucacuauuag

SEQ ID NO: 831319 - RNA, 19 nt, Artificial Sequence
  Description of Artificial Sequence: Synthetic oligonucleotide
  Antisense strand to SEQ ID NO: 831318
cuaauagugacaaguucuc

SEQ ID NO: 831320 - RNA, 19 nt, Artificial Sequence
  Description of Artificial Sequence: Synthetic oligonucleotide
  Sense strand starting at position 2426 of SEQ ID NO: 587958
aacaguuacuacgugauca

SEQ ID NO: 831321 - RNA, 19 nt, Artificial Sequence
  Description of Artificial Sequence: Synthetic oligonucleotide
  Antisense strand to SEQ ID NO: 831320
ugaucacguaguaacuguu

SEQ ID NO: 831322 - RNA, 19 nt, Artificial Sequence
  Description of Artificial Sequence: Synthetic oligonucleotide
  Sense strand starting at position 2434 of SEQ ID NO: 587958
cuacgugaucacgaacaac

SEQ ID NO: 831323 - RNA, 19 nt, Artificial Sequence
  Description of Artificial Sequence: Synthetic oligonucleotide
  Antisense strand to SEQ ID NO: 831322
guuguucgugaucacguag

SEQ ID NO: 831324 - RNA, 19 nt, Artificial Sequence
  Description of Artificial Sequence: Synthetic oligonucleotide
  Sense strand starting at position 2629 of SEQ ID NO: 587958
ugagaucagugcucuagaa

SEQ ID NO: 831325 - RNA, 19 nt, Artificial Sequence
  Description of Artificial Sequence: Synthetic oligonucleotide
  Antisense strand to SEQ ID NO: 831324
uucuagagcacugaucuca

SEQ ID NO: 831326 - RNA, 19 nt, Artificial Sequence
  Description of Artificial Sequence: Synthetic oligonucleotide
  Sense strand starting at position 2637 of SEQ ID NO: 587958
gugcucuagaaagaguaua

SEQ ID NO: 831327 - RNA, 19 nt, Artificial Sequence
  Description of Artificial Sequence: Synthetic oligonucleotide
  Antisense strand to SEQ ID NO: 831326
uauacucuuucuagagcac

SEQ ID NO: 831328 - RNA, 19 nt, Artificial Sequence
  Description of Artificial Sequence: Synthetic oligonucleotide
  Sense strand starting at position 2661 of SEQ ID NO: 587958
auggaaauguaucucaauc

SEQ ID NO: 831329 - RNA, 19 nt, Artificial Sequence
  Description of Artificial Sequence: Synthetic oligonucleotide
  Antisense strand to SEQ ID NO: 831328
gauugagauacauuuccau

SEQ ID NO: 831330 - RNA, 19 nt, Artificial Sequence
  Description of Artificial Sequence: Synthetic oligonucleotide
  Sense strand starting at position 2674 of SEQ ID NO: 587958
ucaaucaagguuugagauc

SEQ ID NO: 831331 - RNA, 19 nt, Artificial Sequence
  Description of Artificial Sequence: Synthetic oligonucleotide
  Antisense strand to SEQ ID NO: 831330
gaucucaaaccuugauuga

SEQ ID NO: 831332 - RNA, 19 nt, Artificial Sequence
  Description of Artificial Sequence: Synthetic oligonucleotide
  Sense strand starting at position 2680 of SEQ ID NO: 587958
aagguuugagaucgacuau

SEQ ID NO: 831333 - RNA, 19 nt, Artificial Sequence
  Description of Artificial Sequence: Synthetic oligonucleotide
  Antisense strand to SEQ ID NO: 831332
auagucgaucucaaaccuu

SEQ ID NO: 831334 - RNA, 19 nt, Artificial Sequence
  Description of Artificial Sequence: Synthetic oligonucleotide
  Sense strand starting at position 2698 of SEQ ID NO: 587958
uagaaugcaguuuguagaa

SEQ ID NO: 831335 - RNA, 19 nt, Artificial Sequence
  Description of Artificial Sequence: Synthetic oligonucleotide
  Antisense strand to SEQ ID NO: 831334
uucuacaaacugcauucua

SEQ ID NO: 831336 - RNA, 19 nt, Artificial Sequence
  Description of Artificial Sequence: Synthetic oligonucleotide
  Sense strand starting at position 2775 of SEQ ID NO: 587958
ggauggguggucugguuau

SEQ ID NO: 831337 - RNA, 19 nt, Artificial Sequence
  Description of Artificial Sequence: Synthetic oligonucleotide
  Antisense strand to SEQ ID NO: 831336
auaaccagaccacccaucc

SEQ ID NO: 831338 - RNA, 19 nt, Artificial Sequence
  Description of Artificial Sequence: Synthetic oligonucleotide
  Sense strand starting at position 3104 of SEQ ID NO: 587958
uguuauugucuuuaaggug

SEQ ID NO: 831339 - RNA, 19 nt, Artificial Sequence
  Description of Artificial Sequence: Synthetic oligonucleotide
  Antisense strand to SEQ ID NO: 831338
caccuuaaagacaauaaca

SEQ ID NO: 831340 - RNA, 19 nt, Artificial Sequence
  Description of Artificial Sequence: Synthetic oligonucleotide
  Sense strand starting at position 3127 of SEQ ID NO: 587958
aguuuaaguguugaguaac

SEQ ID NO: 831341 - RNA, 19 nt, Artificial Sequence
  Description of Artificial Sequence: Synthetic oligonucleotide
  Antisense strand to SEQ ID NO: 831340
guuacucaacacuuaaacu

SEQ ID NO: 831342 - RNA, 19 nt, Artificial Sequence
  Description of Artificial Sequence: Synthetic oligonucleotide
  Sense strand starting at position 3130 of SEQ ID NO: 587958
uuaaguguugaguaacuaa

SEQ ID NO: 831343 - RNA, 19 nt, Artificial Sequence
  Description of Artificial Sequence: Synthetic oligonucleotide
  Antisense strand to SEQ ID NO: 831342
uuaguuacucaacacuuaa

SEQ ID NO: 831344 - RNA, 19 nt, Artificial Sequence
  Description of Artificial Sequence: Synthetic oligonucleotide
  Sense strand starting at position 3147 of SEQ ID NO: 587958
aaggcacuguauucuagua

SEQ ID NO: 831345 - RNA, 19 nt, Artificial Sequence
  Description of Artificial Sequence: Synthetic oligonucleotide
  Antisense strand to SEQ ID NO: 831344
uacuagaauacagugccuu

SEQ ID NO: 831346 - RNA, 19 nt, Artificial Sequence
  Description of Artificial Sequence: Synthetic oligonucleotide
  Sense strand starting at position 3164 of SEQ ID NO: 587958
uauuaagaaugcuuagguu

SEQ ID NO: 831347 - RNA, 19 nt, Artificial Sequence
  Description of Artificial Sequence: Synthetic oligonucleotide
  Antisense strand to SEQ ID NO: 831346
aaccuaagcauucuuaaua

SEQ ID NO: 831348 - RNA, 19 nt, Artificial Sequence
  Description of Artificial Sequence: Synthetic oligonucleotide
  Sense strand starting at position 3168 of SEQ ID NO: 587958
aagaaugcuuagguuggaa

SEQ ID NO: 831349 - RNA, 19 nt, Artificial Sequence
  Description of Artificial Sequence: Synthetic oligonucleotide
  Antisense strand to SEQ ID NO: 831348
uuccaaccuaagcauucuu

SEQ ID NO: 831350 - RNA, 19 nt, Artificial Sequence
  Description of Artificial Sequence: Synthetic oligonucleotide
  Sense strand starting at position 3170 of SEQ ID NO: 587958
gaaugcuuagguuggaaua

SEQ ID NO: 831351 - RNA, 19 nt, Artificial Sequence
  Description of Artificial Sequence: Synthetic oligonucleotide
  Antisense strand to SEQ ID NO: 831350
uauuccaaccuaagcauuc

SEQ ID NO: 831352 - RNA, 19 nt, Artificial Sequence
  Description of Artificial Sequence: Synthetic oligonucleotide
  Sense strand starting at position 3171 of SEQ ID NO: 587958
aaugcuuagguuggaauau

SEQ ID NO: 831353 - RNA, 19 nt, Artificial Sequence
  Description of Artificial Sequence: Synthetic oligonucleotide
  Antisense strand to SEQ ID NO: 831352
auauuccaaccuaagcauu

SEQ ID NO: 831354 - RNA, 19 nt, Artificial Sequence
  Description of Artificial Sequence: Synthetic oligonucleotide
  Sense strand starting at position 3180 of SEQ ID NO: 587958
guuggaauauucccuacca

SEQ ID NO: 831355 - RNA, 19 nt, Artificial Sequence
  Description of Artificial Sequence: Synthetic oligonucleotide
  Antisense strand to SEQ ID NO: 831354
ugguagggaauauuccaac

SEQ ID NO: 831356 - RNA, 19 nt, Artificial Sequence
  Description of Artificial Sequence: Synthetic oligonucleotide
  Sense strand starting at position 3181 of SEQ ID NO: 587958
uuggaauauucccuaccag

SEQ ID NO: 831357 - RNA, 19 nt, Artificial Sequence
  Description of Artificial Sequence: Synthetic oligonucleotide
  Antisense strand to SEQ ID NO: 831356
cugguagggaauauuccaa

SEQ ID NO: 831358 - RNA, 19 nt, Artificial Sequence
  Description of Artificial Sequence: Synthetic oligonucleotide
  Sense strand starting at position 3269 of SEQ ID NO: 587958
auaauaccugcacgauuaa

SEQ ID NO: 831359 - RNA, 19 nt, Artificial Sequence
  Description of Artificial Sequence: Synthetic oligonucleotide
  Antisense strand to SEQ ID NO: 831358
uuaaucgugcagguauuau

SEQ ID NO: 831360 - RNA, 19 nt, Artificial Sequence
  Description of Artificial Sequence: Synthetic oligonucleotide
  Sense strand starting at position 3283 of SEQ ID NO: 587958
auuaaagggcuugguaaau

SEQ ID NO: 831361 - RNA, 19 nt, Artificial Sequence
  Description of Artificial Sequence: Synthetic oligonucleotide
  Antisense strand to SEQ ID NO: 831360
auuuaccaagcccuuuaau

SEQ ID NO: 831362 - RNA, 19 nt, Artificial Sequence
  Description of Artificial Sequence: Synthetic oligonucleotide
  Sense strand starting at position 3734 of SEQ ID NO: 587958
gagaucucaucucuaccga

SEQ ID NO: 831363 - RNA, 19 nt, Artificial Sequence
  Description of Artificial Sequence: Synthetic oligonucleotide
  Antisense strand to SEQ ID NO: 831362
ucgguagagaugagaucuc

SEQ ID NO: 831364 - RNA, 19 nt, Artificial Sequence
  Description of Artificial Sequence: Synthetic oligonucleotide
  Sense strand starting at position 3775 of SEQ ID NO: 587958
ggaaauaguaagugcucaa

SEQ ID NO: 831365 - RNA, 19 nt, Artificial Sequence
  Description of Artificial Sequence: Synthetic oligonucleotide
  Antisense strand to SEQ ID NO: 831364
uugagcacuuacuauuucc

SEQ ID NO: 831366 - RNA, 19 nt, Artificial Sequence
  Description of Artificial Sequence: Synthetic oligonucleotide
  Sense strand starting at position 3779 of SEQ ID NO: 587958
auaguaagugcucaauuag

SEQ ID NO: 831367 - RNA, 19 nt, Artificial Sequence
  Description of Artificial Sequence: Synthetic oligonucleotide
  Antisense strand to SEQ ID NO: 831366
cuaauugagcacuuacuau

SEQ ID NO: 831368 - RNA, 19 nt, Artificial Sequence
  Description of Artificial Sequence: Synthetic oligonucleotide
  Sense strand starting at position 3791 of SEQ ID NO: 587958
caauuaguauuagcaggaa

SEQ ID NO: 831369 - RNA, 19 nt, Artificial Sequence
  Description of Artificial Sequence: Synthetic oligonucleotide
  Antisense strand to SEQ ID NO: 831368
uuccugcuaauacuaauug

SEQ ID NO: 831370 - RNA, 19 nt, Artificial Sequence
  Description of Artificial Sequence: Synthetic oligonucleotide
  Sense strand starting at position 3794 of SEQ ID NO: 587958
uuaguauuagcaggaagag

SEQ ID NO: 831371 - RNA, 19 nt, Artificial Sequence
  Description of Artificial Sequence: Synthetic oligonucleotide
  Antisense strand to SEQ ID NO: 831370
cucuuccugcuaauacuaa

SEQ ID NO: 831372 - RNA, 19 nt, Artificial Sequence
  Description of Artificial Sequence: Synthetic oligonucleotide
  Sense strand starting at position 3813 of SEQ ID NO: 587958
cagaauauuugugcugcca

SEQ ID NO: 831373 - RNA, 19 nt, Artificial Sequence
  Description of Artificial Sequence: Synthetic oligonucleotide
  Antisense strand to SEQ ID NO: 831372
uggcagcacaaauauucug

SEQ ID NO: 831374 - RNA, 19 nt, Artificial Sequence
  Description of Artificial Sequence: Synthetic oligonucleotide
  Sense strand starting at position 3874 of SEQ ID NO: 587958
cuaauugucccaugggaag

SEQ ID NO: 831375 - RNA, 19 nt, Artificial Sequence
  Description of Artificial Sequence: Synthetic oligonucleotide
  Antisense strand to SEQ ID NO: 831374
cuucccaugggacaauuag

SEQ ID NO: 831376 - RNA, 19 nt, Artificial Sequence
  Description of Artificial Sequence: Synthetic oligonucleotide
  Sense strand starting at position 3970 of SEQ ID NO: 587958
aguauuauggacugcauau

SEQ ID NO: 831377 - RNA, 19 nt, Artificial Sequence
  Description of Artificial Sequence: Synthetic oligonucleotide
  Antisense strand to SEQ ID NO: 831376
auaugcaguccauaauacu

SEQ ID NO: 831378 - RNA, 19 nt, Artificial Sequence
  Description of Artificial Sequence: Synthetic oligonucleotide
  Sense strand starting at position 21 of SEQ ID NO: 587959
augaaaugauucuugugau

SEQ ID NO: 831379 - RNA, 19 nt, Artificial Sequence
  Description of Artificial Sequence: Synthetic oligonucleotide
  Antisense strand to SEQ ID NO: 831378
aucacaagaaucauuucau

SEQ ID NO: 831380 - RNA, 19 nt, Artificial Sequence
  Description of Artificial Sequence: Synthetic oligonucleotide
  Sense strand starting at position 142 of SEQ ID NO: 587959
uggugaucgucauuauuua

SEQ ID NO: 831381 - RNA, 19 nt, Artificial Sequence
  Description of Artificial Sequence: Synthetic oligonucleotide
  Antisense strand to SEQ ID NO: 831380
uaaauaaugacgaucacca

SEQ ID NO: 831382 - RNA, 19 nt, Artificial Sequence
  Description of Artificial Sequence: Synthetic oligonucleotide
  Sense strand starting at position 241 of SEQ ID NO: 587959
ggaaaugucguggaagcca

SEQ ID NO: 831383 - RNA, 19 nt, Artificial Sequence
  Description of Artificial Sequence: Synthetic oligonucleotide
  Antisense strand to SEQ ID NO: 831382
uggcuuccacgacauuucc

SEQ ID NO: 831384 - RNA, 19 nt, Artificial Sequence
  Description of Artificial Sequence: Synthetic oligonucleotide
  Sense strand starting at position 501 of SEQ ID NO: 587959
auauauguucucuauguug

SEQ ID NO: 831385 - RNA, 19 nt, Artificial Sequence
  Description of Artificial Sequence: Synthetic oligonucleotide
  Antisense strand to SEQ ID NO: 831384
caacauagagaacauauau

SEQ ID NO: 831386 - RNA, 19 nt, Artificial Sequence
  Description of Artificial Sequence: Synthetic oligonucleotide
  Sense strand starting at position 631 of SEQ ID NO: 587959
aacagauugugauccugac

SEQ ID NO: 831387 - RNA, 19 nt, Artificial Sequence
  Description of Artificial Sequence: Synthetic oligonucleotide
  Antisense strand to SEQ ID NO: 831386
gucaggaucacaaucuguu

SEQ ID NO: 831388 - RNA, 19 nt, Artificial Sequence
  Description of Artificial Sequence: Synthetic oligonucleotide
  Sense strand starting at position 675 of SEQ ID NO: 587959
uuuauagucucucugaaug

SEQ ID NO: 831389 - RNA, 19 nt, Artificial Sequence
  Description of Artificial Sequence: Synthetic oligonucleotide
  Antisense strand to SEQ ID NO: 831388
cauucagagagacuauaaa

SEQ ID NO: 831390 - RNA, 19 nt, Artificial Sequence
  Description of Artificial Sequence: Synthetic oligonucleotide
  Sense strand starting at position 685 of SEQ ID NO: 587959
cucugaauguucucuaaug

SEQ ID NO: 831391 - RNA, 19 nt, Artificial Sequence
  Description of Artificial Sequence: Synthetic oligonucleotide
  Antisense strand to SEQ ID NO: 831390
cauuagagaacauucagag

SEQ ID NO: 831392 - RNA, 19 nt, Artificial Sequence
  Description of Artificial Sequence: Synthetic oligonucleotide
  Sense strand starting at position 686 of SEQ ID NO: 587959
ucugaauguucucuaauga

SEQ ID NO: 831393 - RNA, 19 nt, Artificial Sequence
  Description of Artificial Sequence: Synthetic oligonucleotide
  Antisense strand to SEQ ID NO: 831392
ucauuagagaacauucaga

SEQ ID NO: 831394 - RNA, 19 nt, Artificial Sequence
  Description of Artificial Sequence: Synthetic oligonucleotide
  Sense strand starting at position 687 of SEQ ID NO: 587959
cugaauguucucuaaugac

SEQ ID NO: 831395 - RNA, 19 nt, Artificial Sequence
  Description of Artificial Sequence: Synthetic oligonucleotide
  Antisense strand to SEQ ID NO: 831394
gucauuagagaacauucag

SEQ ID NO: 831396 - RNA, 19 nt, Artificial Sequence
  Description of Artificial Sequence: Synthetic oligonucleotide
  Sense strand starting at position 851 of SEQ ID NO: 587959
ucgggaaagcuucaguuau

SEQ ID NO: 831397 - RNA, 19 nt, Artificial Sequence
  Description of Artificial Sequence: Synthetic oligonucleotide
  Antisense strand to SEQ ID NO: 831396
auaacugaagcuuucccga

SEQ ID NO: 831398 - RNA, 19 nt, Artificial Sequence
  Description of Artificial Sequence: Synthetic oligonucleotide
  Sense strand starting at position 1019 of SEQ ID NO: 587959
auuccaaugcuagaugauc

SEQ ID NO: 831399 - RNA, 19 nt, Artificial Sequence
  Description of Artificial Sequence: Synthetic oligonucleotide
  Antisense strand to SEQ ID NO: 831398
gaucaucuagcauuggaau

SEQ ID NO: 831400 - RNA, 19 nt, Artificial Sequence
  Description of Artificial Sequence: Synthetic oligonucleotide
  Sense strand starting at position 1024 of SEQ ID NO: 587959
aaugcuagaugaucuaguu

SEQ ID NO: 831401 - RNA, 19 nt, Artificial Sequence
  Description of Artificial Sequence: Synthetic oligonucleotide
  Antisense strand to SEQ ID NO: 831400
aacuagaucaucuagcauu

SEQ ID NO: 831402 - RNA, 19 nt, Artificial Sequence
  Description of Artificial Sequence: Synthetic oligonucleotide
  Sense strand starting at position 1044 of SEQ ID NO: 587959
auccuuauccuuuauggua

SEQ ID NO: 831403 - RNA, 19 nt, Artificial Sequence
  Description of Artificial Sequence: Synthetic oligonucleotide
  Antisense strand to SEQ ID NO: 831402
uaccauaaaggauaaggau

SEQ ID NO: 831404 - RNA, 19 nt, Artificial Sequence
  Description of Artificial Sequence: Synthetic oligonucleotide
  Sense strand starting at position 1053 of SEQ ID NO: 587959
cuuuaugguagauguagaa

SEQ ID NO: 831405 - RNA, 19 nt, Artificial Sequence
  Description of Artificial Sequence: Synthetic oligonucleotide
  Antisense strand to SEQ ID NO: 831404
uucuacaucuaccauaaag

SEQ ID NO: 831406 - RNA, 19 nt, Artificial Sequence
  Description of Artificial Sequence: Synthetic oligonucleotide
  Sense strand starting at position 1357 of SEQ ID NO: 587959
uggcaaccagucugauaaa

SEQ ID NO: 831407 - RNA, 19 nt, Artificial Sequence
  Description of Artificial Sequence: Synthetic oligonucleotide
  Antisense strand to SEQ ID NO: 831406
uuuaucagacugguugcca

SEQ ID NO: 831408 - RNA, 19 nt, Artificial Sequence
  Description of Artificial Sequence: Synthetic oligonucleotide
  Sense strand starting at position 1518 of SEQ ID NO: 587959
cacagaaauugggaaggaa

SEQ ID NO: 831409 - RNA, 19 nt, Artificial Sequence
  Description of Artificial Sequence: Synthetic oligonucleotide
  Antisense strand to SEQ ID NO: 831408
uuccuucccaauuucugug

SEQ ID NO: 831410 - RNA, 19 nt, Artificial Sequence
  Description of Artificial Sequence: Synthetic oligonucleotide
  Sense strand starting at position 1573 of SEQ ID NO: 587959
acuuuauugggagguauac

SEQ ID NO: 831411 - RNA, 19 nt, Artificial Sequence
  Description of Artificial Sequence: Synthetic oligonucleotide
  Antisense strand to SEQ ID NO: 831410
guauaccucccaauaaagu

SEQ ID NO: 831412 - RNA, 19 nt, Artificial Sequence
  Description of Artificial Sequence: Synthetic oligonucleotide
  Sense strand starting at position 1627 of SEQ ID NO: 587959
gauugugaaucauuaacag

SEQ ID NO: 831413 - RNA, 19 nt, Artificial Sequence
  Description of Artificial Sequence: Synthetic oligonucleotide
  Antisense strand to SEQ ID NO: 831412
cuguuaaugauucacaauc

SEQ ID NO: 831414 - RNA, 19 nt, Artificial Sequence
  Description of Artificial Sequence: Synthetic oligonucleotide
  Sense strand starting at position 1687 of SEQ ID NO: 587959
gcacaaucaccagggacaa

SEQ ID NO: 831415 - RNA, 19 nt, Artificial Sequence
  Description of Artificial Sequence: Synthetic oligonucleotide
  Antisense strand to SEQ ID NO: 831414
uugucccuggugauugugc

SEQ ID NO: 831416 - RNA, 19 nt, Artificial Sequence
  Description of Artificial Sequence: Synthetic oligonucleotide
  Sense strand starting at position 1788 of SEQ ID NO: 587959
cucauuuaagccugcagua

SEQ ID NO: 831417 - RNA, 19 nt, Artificial Sequence
  Description of Artificial Sequence: Synthetic oligonucleotide
  Antisense strand to SEQ ID NO: 831416
uacugcaggcuuaaaugag

SEQ ID NO: 831418 - RNA, 19 nt, Artificial Sequence
  Description of Artificial Sequence: Synthetic oligonucleotide
  Sense strand starting at position 1879 of SEQ ID NO: 587959
gugcuugagccaguauugu

SEQ ID NO: 831419 - RNA, 19 nt, Artificial Sequence
  Description of Artificial Sequence: Synthetic oligonucleotide
  Antisense strand to SEQ ID NO: 831418
acaauacuggcucaagcac

SEQ ID NO: 831420 - RNA, 19 nt, Artificial Sequence
  Description of Artificial Sequence: Synthetic oligonucleotide
  Sense strand starting at position 2001 of SEQ ID NO: 587959
aagugaaaugucugaauca

SEQ ID NO: 831421 - RNA, 19 nt, Artificial Sequence
  Description of Artificial Sequence: Synthetic oligonucleotide
  Antisense strand to SEQ ID NO: 831420
ugauucagacauuucacuu

SEQ ID NO: 831422 - RNA, 19 nt, Artificial Sequence
  Description of Artificial Sequence: Synthetic oligonucleotide
  Sense strand starting at position 2021 of SEQ ID NO: 587959
gugcaaguacuugagaagu

SEQ ID NO: 831423 - RNA, 19 nt, Artificial Sequence
  Description of Artificial Sequence: Synthetic oligonucleotide
  Antisense strand to SEQ ID NO: 831422
acuucucaaguacuugcac

SEQ ID NO: 831424 - RNA, 19 nt, Artificial Sequence
  Description of Artificial Sequence: Synthetic oligonucleotide
  Sense strand starting at position 2202 of SEQ ID NO: 587959
aucuacagguuucuugaaa

SEQ ID NO: 831425 - RNA, 19 nt, Artificial Sequence
  Description of Artificial Sequence: Synthetic oligonucleotide
  Antisense strand to SEQ ID NO: 831424
uuucaagaaaccuguagau

SEQ ID NO: 831426 - RNA, 19 nt, Artificial Sequence
  Description of Artificial Sequence: Synthetic oligonucleotide
  Sense strand starting at position 2203 of SEQ ID NO: 587959
ucuacagguuucuugaaau

SEQ ID NO: 831427 - RNA, 19 nt, Artificial Sequence
  Description of Artificial Sequence: Synthetic oligonucleotide
  Antisense strand to SEQ ID NO: 831426
auuucaagaaaccuguaga

SEQ ID NO: 831428 - RNA, 19 nt, Artificial Sequence
  Description of Artificial Sequence: Synthetic oligonucleotide
  Sense strand starting at position 2213 of SEQ ID NO: 587959
ucuugaaaugcacaaaggu

SEQ ID NO: 831429 - RNA, 19 nt, Artificial Sequence
  Description of Artificial Sequence: Synthetic oligonucleotide
  Antisense strand to SEQ ID NO: 831428
accuuugugcauuucaaga

SEQ ID NO: 831430 - RNA, 19 nt, Artificial Sequence
  Description of Artificial Sequence: Synthetic oligonucleotide
  Sense strand starting at position 2293 of SEQ ID NO: 587959
guccuuucuguggaaauaa

SEQ ID NO: 831431 - RNA, 19 nt, Artificial Sequence
  Description of Artificial Sequence: Synthetic oligonucleotide
  Antisense strand to SEQ ID NO: 831430
uuauuuccacagaaaggac

SEQ ID NO: 831432 - RNA, 19 nt, Artificial Sequence
  Description of Artificial Sequence: Synthetic oligonucleotide
  Sense strand starting at position 2479 of SEQ ID NO: 587959
auauaaaugacguagcaug

SEQ ID NO: 831433 - RNA, 19 nt, Artificial Sequence
  Description of Artificial Sequence: Synthetic oligonucleotide
  Antisense strand to SEQ ID NO: 831432
caugcuacgucauuuauau

SEQ ID NO: 831434 - RNA, 19 nt, Artificial Sequence
  Description of Artificial Sequence: Synthetic oligonucleotide
  Sense strand starting at position 2631 of SEQ ID NO: 587959
auuccauuacuuugagaag

SEQ ID NO: 831435 - RNA, 19 nt, Artificial Sequence
  Description of Artificial Sequence: Synthetic oligonucleotide
  Antisense strand to SEQ ID NO: 831434
cuucucaaaguaauggaau

SEQ ID NO: 831436 - RNA, 19 nt, Artificial Sequence
  Description of Artificial Sequence: Synthetic oligonucleotide
  Sense strand starting at position 3177 of SEQ ID NO: 587959
cagugaaaugaauguuccu

SEQ ID NO: 831437 - RNA, 19 nt, Artificial Sequence
  Description of Artificial Sequence: Synthetic oligonucleotide
  Antisense strand to SEQ ID NO: 831436
aggaacauucauuucacug

SEQ ID NO: 831438 - RNA, 19 nt, Artificial Sequence
  Description of Artificial Sequence: Synthetic oligonucleotide
  Sense strand starting at position 3180 of SEQ ID NO: 587959
ugaaaugaauguuccugca

SEQ ID NO: 831439 - RNA, 19 nt, Artificial Sequence
  Description of Artificial Sequence: Synthetic oligonucleotide
  Antisense strand to SEQ ID NO: 831438
ugcaggaacauucauuuca

SEQ ID NO: 831440 - RNA, 19 nt, Artificial Sequence
  Description of Artificial Sequence: Synthetic oligonucleotide
  Sense strand starting at position 3412 of SEQ ID NO: 587959
augagaaauugcuugugac

SEQ ID NO: 831441 - RNA, 19 nt, Artificial Sequence
  Description of Artificial Sequence: Synthetic oligonucleotide
  Antisense strand to SEQ ID NO: 831440
gucacaagcaauuucucau

SEQ ID NO: 831442 - RNA, 19 nt, Artificial Sequence
  Description of Artificial Sequence: Synthetic oligonucleotide
  Sense strand starting at position 3413 of SEQ ID NO: 587959
ugagaaauugcuugugaca

SEQ ID NO: 831443 - RNA, 19 nt, Artificial Sequence
  Description of Artificial Sequence: Synthetic oligonucleotide
  Antisense strand to SEQ ID NO: 831442
ugucacaagcaauuucuca

SEQ ID NO: 831444 - RNA, 19 nt, Artificial Sequence
  Description of Artificial Sequence: Synthetic oligonucleotide
  Sense strand starting at position 3449 of SEQ ID NO: 587959
guuaucaugucacugacaa

SEQ ID NO: 831445 - RNA, 19 nt, Artificial Sequence
  Description of Artificial Sequence: Synthetic oligonucleotide
  Antisense strand to SEQ ID NO: 831444
uugucagugacaugauaac

SEQ ID NO: 831446 - RNA, 19 nt, Artificial Sequence
  Description of Artificial Sequence: Synthetic oligonucleotide
  Sense strand starting at position 3450 of SEQ ID NO: 587959
uuaucaugucacugacaag

SEQ ID NO: 831447 - RNA, 19 nt, Artificial Sequence
  Description of Artificial Sequence: Synthetic oligonucleotide
  Antisense strand to SEQ ID NO: 831446
cuugucagugacaugauaa

SEQ ID NO: 831448 - RNA, 19 nt, Artificial Sequence
  Description of Artificial Sequence: Synthetic oligonucleotide
  Sense strand starting at position 3489 of SEQ ID NO: 587959
caguaagagagcuauguug

SEQ ID NO: 831449 - RNA, 19 nt, Artificial Sequence
  Description of Artificial Sequence: Synthetic oligonucleotide
  Antisense strand to SEQ ID NO: 831448
caacauagcucucuuacug

SEQ ID NO: 831450 - RNA, 19 nt, Artificial Sequence
  Description of Artificial Sequence: Synthetic oligonucleotide
  Sense strand starting at position 3491 of SEQ ID NO: 587959
guaagagagcuauguugaa

SEQ ID NO: 831451 - RNA, 19 nt, Artificial Sequence
  Description of Artificial Sequence: Synthetic oligonucleotide
  Antisense strand to SEQ ID NO: 831450
uucaacauagcucucuuac

SEQ ID NO: 831452 - RNA, 19 nt, Artificial Sequence
  Description of Artificial Sequence: Synthetic oligonucleotide
  Sense strand starting at position 3552 of SEQ ID NO: 587959
guaagcuaucauggaaaua

SEQ ID NO: 831453 - RNA, 19 nt, Artificial Sequence
  Description of Artificial Sequence: Synthetic oligonucleotide
  Antisense strand to SEQ ID NO: 831452
uauuuccaugauagcuuac

SEQ ID NO: 831454 - RNA, 19 nt, Artificial Sequence
  Description of Artificial Sequence: Synthetic oligonucleotide
  Sense strand starting at position 3587 of SEQ ID NO: 587959
gauguaguucuuuagagug

SEQ ID NO: 831455 - RNA, 19 nt, Artificial Sequence
  Description of Artificial Sequence: Synthetic oligonucleotide
  Antisense strand to SEQ ID NO: 831454
cacucuaaagaacuacauc

SEQ ID NO: 831456 - RNA, 19 nt, Artificial Sequence
  Description of Artificial Sequence: Synthetic oligonucleotide
  Sense strand starting at position 3634 of SEQ ID NO: 587959
uguagauuccuacaccuac

SEQ ID NO: 831457 - RNA, 19 nt, Artificial Sequence
  Description of Artificial Sequence: Synthetic oligonucleotide
  Antisense strand to SEQ ID NO: 831456
guagguguaggaaucuaca

SEQ ID NO: 831458 - RNA, 19 nt, Artificial Sequence
  Description of Artificial Sequence: Synthetic oligonucleotide
  Sense strand starting at position 106 of SEQ ID NO: 587960
ugcaaaggauuccugucua

SEQ ID NO: 831459 - RNA, 19 nt, Artificial Sequence
  Description of Artificial Sequence: Synthetic oligonucleotide
  Antisense strand to SEQ ID NO: 831458
uagacaggaauccuuugca

SEQ ID NO: 831460 - RNA, 19 nt, Artificial Sequence
  Description of Artificial Sequence: Synthetic oligonucleotide
  Sense strand starting at position 118 of SEQ ID NO: 587960
cugucuauucugcagggaa

SEQ ID NO: 831461 - RNA, 19 nt, Artificial Sequence
  Description of Artificial Sequence: Synthetic oligonucleotide
  Antisense strand to SEQ ID NO: 831460
uucccugcagaauagacag

SEQ ID NO: 831462 - RNA, 19 nt, Artificial Sequence
  Description of Artificial Sequence: Synthetic oligonucleotide
  Sense strand starting at position 120 of SEQ ID NO: 587960
gucuauucugcagggaaga

SEQ ID NO: 831463 - RNA, 19 nt, Artificial Sequence
  Description of Artificial Sequence: Synthetic oligonucleotide
  Antisense strand to SEQ ID NO: 831462
ucuucccugcagaauagac

SEQ ID NO: 831464 - RNA, 19 nt, Artificial Sequence
  Description of Artificial Sequence: Synthetic oligonucleotide
  Sense strand starting at position 121 of SEQ ID NO: 587960
ucuauucugcagggaagaa

SEQ ID NO: 831465 - RNA, 19 nt, Artificial Sequence
  Description of Artificial Sequence: Synthetic oligonucleotide
  Antisense strand to SEQ ID NO: 831464
uucuucccugcagaauaga

SEQ ID NO: 831466 - RNA, 19 nt, Artificial Sequence
  Description of Artificial Sequence: Synthetic oligonucleotide
  Sense strand starting at position 513 of SEQ ID NO: 587960
ggguucacuuggucagauu

SEQ ID NO: 831467 - RNA, 19 nt, Artificial Sequence
  Description of Artificial Sequence: Synthetic oligonucleotide
  Antisense strand to SEQ ID NO: 831466
aaucugaccaagugaaccc

SEQ ID NO: 831468 - RNA, 19 nt, Artificial Sequence
  Description of Artificial Sequence: Synthetic oligonucleotide
  Sense strand starting at position 526 of SEQ ID NO: 587960
cagauuguccaguguugaa

SEQ ID NO: 831469 - RNA, 19 nt, Artificial Sequence
  Description of Artificial Sequence: Synthetic oligonucleotide
  Antisense strand to SEQ ID NO: 831468
uucaacacuggacaaucug

SEQ ID NO: 831470 - RNA, 19 nt, Artificial Sequence
  Description of Artificial Sequence: Synthetic oligonucleotide
  Sense strand starting at position 697 of SEQ ID NO: 587960
caucuuggaccuugagagu

SEQ ID NO: 831471 - RNA, 19 nt, Artificial Sequence
  Description of Artificial Sequence: Synthetic oligonucleotide
  Antisense strand to SEQ ID NO: 831470
acucucaagguccaagaug

SEQ ID NO: 831472 - RNA, 19 nt, Artificial Sequence
  Description of Artificial Sequence: Synthetic oligonucleotide
  Sense strand starting at position 712 of SEQ ID NO: 587960
gaguucgcugcugacauaa

SEQ ID NO: 831473 - RNA, 19 nt, Artificial Sequence
  Description of Artificial Sequence: Synthetic oligonucleotide
  Antisense strand to SEQ ID NO: 831472
uuaugucagcagcgaacuc

SEQ ID NO: 831474 - RNA, 19 nt, Artificial Sequence
  Description of Artificial Sequence: Synthetic oligonucleotide
  Sense strand starting at position 936 of SEQ ID NO: 587960
gggucaucaucauuaccua

SEQ ID NO: 831475 - RNA, 19 nt, Artificial Sequence
  Description of Artificial Sequence: Synthetic oligonucleotide
  Antisense strand to SEQ ID NO: 831474
uagguaaugaugaugaccc

SEQ ID NO: 831476 - RNA, 19 nt, Artificial Sequence
  Description of Artificial Sequence: Synthetic oligonucleotide
  Sense strand starting at position 937 of SEQ ID NO: 587960
ggucaucaucauuaccuau

SEQ ID NO: 831477 - RNA, 19 nt, Artificial Sequence
  Description of Artificial Sequence: Synthetic oligonucleotide
  Antisense strand to SEQ ID NO: 831476
auagguaaugaugaugacc

SEQ ID NO: 831478 - RNA, 19 nt, Artificial Sequence
  Description of Artificial Sequence: Synthetic oligonucleotide
  Sense strand starting at position 1023 of SEQ ID NO: 587960
gugcaacauucuccuaaga

SEQ ID NO: 831479 - RNA, 19 nt, Artificial Sequence
  Description of Artificial Sequence: Synthetic oligonucleotide
  Antisense strand to SEQ ID NO: 831478
ucuuaggagaauguugcac

SEQ ID NO: 831480 - RNA, 19 nt, Artificial Sequence
  Description of Artificial Sequence: Synthetic oligonucleotide
  Sense strand starting at position 1049 of SEQ ID NO: 587960
ggcaauauauccuugucac

SEQ ID NO: 831481 - RNA, 19 nt, Artificial Sequence
  Description of Artificial Sequence: Synthetic oligonucleotide
  Antisense strand to SEQ ID NO: 831480
gugacaaggauauauugcc

SEQ ID NO: 831482 - RNA, 19 nt, Artificial Sequence
  Description of Artificial Sequence: Synthetic oligonucleotide
  Sense strand starting at position 1055 of SEQ ID NO: 587960
auauccuugucacucauga

SEQ ID NO: 831483 - RNA, 19 nt, Artificial Sequence
  Description of Artificial Sequence: Synthetic oligonucleotide
  Antisense strand to SEQ ID NO: 831482
ucaugagugacaaggauau

SEQ ID NO: 831484 - RNA, 19 nt, Artificial Sequence
  Description of Artificial Sequence: Synthetic oligonucleotide
  Sense strand starting at position 1186 of SEQ ID NO: 587960
cgcaauucccaugaggcua

SEQ ID NO: 831485 - RNA, 19 nt, Artificial Sequence
  Description of Artificial Sequence: Synthetic oligonucleotide
  Antisense strand to SEQ ID NO: 831484
uagccucaugggaauugcg

SEQ ID NO: 831486 - RNA, 19 nt, Artificial Sequence
  Description of Artificial Sequence: Synthetic oligonucleotide
  Sense strand starting at position 1267 of SEQ ID NO: 587960
gauguaacauguuccagau

SEQ ID NO: 831487 - RNA, 19 nt, Artificial Sequence
  Description of Artificial Sequence: Synthetic oligonucleotide
  Antisense strand to SEQ ID NO: 831486
aucuggaacauguuacauc

SEQ ID NO: 831488 - RNA, 19 nt, Artificial Sequence
  Description of Artificial Sequence: Synthetic oligonucleotide
  Sense strand starting at position 1393 of SEQ ID NO: 587960
guguguuauuuguuuacuu

SEQ ID NO: 831489 - RNA, 19 nt, Artificial Sequence
  Description of Artificial Sequence: Synthetic oligonucleotide
  Antisense strand to SEQ ID NO: 831488
aaguaaacaaauaacacac

SEQ ID NO: 831490 - RNA, 19 nt, Artificial Sequence
  Description of Artificial Sequence: Synthetic oligonucleotide
  Sense strand starting at position 1447 of SEQ ID NO: 587960
ggcacuuugcccgaaguca

SEQ ID NO: 831491 - RNA, 19 nt, Artificial Sequence
  Description of Artificial Sequence: Synthetic oligonucleotide
  Antisense strand to SEQ ID NO: 831490
ugacuucgggcaaagugcc

SEQ ID NO: 831492 - RNA, 19 nt, Artificial Sequence
  Description of Artificial Sequence: Synthetic oligonucleotide
  Sense strand starting at position 1456 of SEQ ID NO: 587960
cccgaagucauauggguaa

SEQ ID NO: 831493 - RNA, 19 nt, Artificial Sequence
  Description of Artificial Sequence: Synthetic oligonucleotide
  Antisense strand to SEQ ID NO: 831492
uuacccauaugacuucggg

SEQ ID NO: 831494 - RNA, 19 nt, Artificial Sequence
  Description of Artificial Sequence: Synthetic oligonucleotide
  Sense strand starting at position 1458 of SEQ ID NO: 587960
cgaagucauauggguaagu

SEQ ID NO: 831495 - RNA, 19 nt, Artificial Sequence
  Description of Artificial Sequence: Synthetic oligonucleotide
  Antisense strand to SEQ ID NO: 831494
acuuacccauaugacuucg

SEQ ID NO: 831496 - RNA, 19 nt, Artificial Sequence
  Description of Artificial Sequence: Synthetic oligonucleotide
  Sense strand starting at position 1549 of SEQ ID NO: 587960
accuguuauggaugacaca

SEQ ID NO: 831497 - RNA, 19 nt, Artificial Sequence
  Description of Artificial Sequence: Synthetic oligonucleotide
  Antisense strand to SEQ ID NO: 831496
ugugucauccauaacaggu

SEQ ID NO: 831498 - RNA, 19 nt, Artificial Sequence
  Description of Artificial Sequence: Synthetic oligonucleotide
  Sense strand starting at position 1646 of SEQ ID NO: 587960
agaauugaauuaggaagau

SEQ ID NO: 831499 - RNA, 19 nt, Artificial Sequence
  Description of Artificial Sequence: Synthetic oligonucleotide
  Antisense strand to SEQ ID NO: 831498
aucuuccuaauucaauucu

SEQ ID NO: 831500 - RNA, 19 nt, Artificial Sequence
  Description of Artificial Sequence: Synthetic oligonucleotide
  Sense strand starting at position 1781 of SEQ ID NO: 587960
gugggaauuugugaagauu

SEQ ID NO: 831501 - RNA, 19 nt, Artificial Sequence
  Description of Artificial Sequence: Synthetic oligonucleotide
  Antisense strand to SEQ ID NO: 831500
aaucuucacaaauucccac

SEQ ID NO: 831502 - RNA, 19 nt, Artificial Sequence
  Description of Artificial Sequence: Synthetic oligonucleotide
  Sense strand starting at position 1872 of SEQ ID NO: 587960
gcuccauggccucagaacu

SEQ ID NO: 831503 - RNA, 19 nt, Artificial Sequence
  Description of Artificial Sequence: Synthetic oligonucleotide
  Antisense strand to SEQ ID NO: 831502
aguucugaggccauggagc

SEQ ID NO: 831504 - RNA, 19 nt, Artificial Sequence
  Description of Artificial Sequence: Synthetic oligonucleotide
  Sense strand starting at position 2175 of SEQ ID NO: 587960
ugaggaucuugucuaaacu

SEQ ID NO: 831505 - RNA, 19 nt, Artificial Sequence
  Description of Artificial Sequence: Synthetic oligonucleotide
  Antisense strand to SEQ ID NO: 831504
aguuuagacaagauccuca

SEQ ID NO: 831506 - RNA, 19 nt, Artificial Sequence
  Description of Artificial Sequence: Synthetic oligonucleotide
  Sense strand starting at position 2246 of SEQ ID NO: 587960
agaccaaagcucuguaucu

SEQ ID NO: 831507 - RNA, 19 nt, Artificial Sequence
  Description of Artificial Sequence: Synthetic oligonucleotide
  Antisense strand to SEQ ID NO: 831506
agauacagagcuuuggucu

SEQ ID NO: 831508 - RNA, 19 nt, Artificial Sequence
  Description of Artificial Sequence: Synthetic oligonucleotide
  Sense strand starting at position 2258 of SEQ ID NO: 587960
uguaucuuuggagggaaca

SEQ ID NO: 831509 - RNA, 19 nt, Artificial Sequence
  Description of Artificial Sequence: Synthetic oligonucleotide
  Antisense strand to SEQ ID NO: 831508
uguucccuccaaagauaca

SEQ ID NO: 831510 - RNA, 19 nt, Artificial Sequence
  Description of Artificial Sequence: Synthetic oligonucleotide
  Sense strand starting at position 2593 of SEQ ID NO: 587960
ucgugcccucauuaauaua

SEQ ID NO: 831511 - RNA, 19 nt, Artificial Sequence
  Description of Artificial Sequence: Synthetic oligonucleotide
  Antisense strand to SEQ ID NO: 831510
uauauuaaugagggcacga

SEQ ID NO: 831512 - RNA, 19 nt, Artificial Sequence
  Description of Artificial Sequence: Synthetic oligonucleotide
  Sense strand starting at position 2720 of SEQ ID NO: 587960
gcaggaacuguguauucca

SEQ ID NO: 831513 - RNA, 19 nt, Artificial Sequence
  Description of Artificial Sequence: Synthetic oligonucleotide
  Antisense strand to SEQ ID NO: 831512
uggaauacacaguuccugc

SEQ ID NO: 831514 - RNA, 19 nt, Artificial Sequence
  Description of Artificial Sequence: Synthetic oligonucleotide
  Sense strand starting at position 2727 of SEQ ID NO: 587960
cuguguauuccacagaaag

SEQ ID NO: 831515 - RNA, 19 nt, Artificial Sequence
  Description of Artificial Sequence: Synthetic oligonucleotide
  Antisense strand to SEQ ID NO: 831514
cuuucuguggaauacacag

SEQ ID NO: 831516 - RNA, 19 nt, Artificial Sequence
  Description of Artificial Sequence: Synthetic oligonucleotide
  Sense strand starting at position 2759 of SEQ ID NO: 587960
uugguuucuccuggcaaac

SEQ ID NO: 831517 - RNA, 19 nt, Artificial Sequence
  Description of Artificial Sequence: Synthetic oligonucleotide
  Antisense strand to SEQ ID NO: 831516
guuugccaggagaaaccaa

SEQ ID NO: 831518 - RNA, 19 nt, Artificial Sequence
  Description of Artificial Sequence: Synthetic oligonucleotide
  Sense strand starting at position 2847 of SEQ ID NO: 587960
ccuccuucucuggaaagca

SEQ ID NO: 831519 - RNA, 19 nt, Artificial Sequence
  Description of Artificial Sequence: Synthetic oligonucleotide
  Antisense strand to SEQ ID NO: 831518
ugcuuuccagagaaggagg

SEQ ID NO: 831520 - RNA, 19 nt, Artificial Sequence
  Description of Artificial Sequence: Synthetic oligonucleotide
  Sense strand starting at position 2898 of SEQ ID NO: 587960
uuguuaagguaguuguaag

SEQ ID NO: 831521 - RNA, 19 nt, Artificial Sequence
  Description of Artificial Sequence: Synthetic oligonucleotide
  Antisense strand to SEQ ID NO: 831520
cuuacaacuaccuuaacaa

SEQ ID NO: 831522 - RNA, 19 nt, Artificial Sequence
  Description of Artificial Sequence: Synthetic oligonucleotide
  Sense strand starting at position 2899 of SEQ ID NO: 587960
uguuaagguaguuguaaga

SEQ ID NO: 831523 - RNA, 19 nt, Artificial Sequence
  Description of Artificial Sequence: Synthetic oligonucleotide
  Antisense strand to SEQ ID NO: 831522
ucuuacaacuaccuuaaca

SEQ ID NO: 831524 - RNA, 19 nt, Artificial Sequence
  Description of Artificial Sequence: Synthetic oligonucleotide
  Sense strand starting at position 2931 of SEQ ID NO: 587960
agagcacaugcuuauuaga

SEQ ID NO: 831525 - RNA, 19 nt, Artificial Sequence
  Description of Artificial Sequence: Synthetic oligonucleotide
  Antisense strand to SEQ ID NO: 831524
ucuaauaagcaugugcucu

SEQ ID NO: 831526 - RNA, 19 nt, Artificial Sequence
  Description of Artificial Sequence: Synthetic oligonucleotide
  Sense strand starting at position 2933 of SEQ ID NO: 587960
agcacaugcuuauuagaca

SEQ ID NO: 831527 - RNA, 19 nt, Artificial Sequence
  Description of Artificial Sequence: Synthetic oligonucleotide
  Antisense strand to SEQ ID NO: 831526
ugucuaauaagcaugugcu

SEQ ID NO: 831528 - RNA, 19 nt, Artificial Sequence
  Description of Artificial Sequence: Synthetic oligonucleotide
  Sense strand starting at position 3146 of SEQ ID NO: 587960
ggauauggucccggguaga

SEQ ID NO: 831529 - RNA, 19 nt, Artificial Sequence
  Description of Artificial Sequence: Synthetic oligonucleotide
  Antisense strand to SEQ ID NO: 831528
ucuacccgggaccauaucc

SEQ ID NO: 831530 - RNA, 19 nt, Artificial Sequence
  Description of Artificial Sequence: Synthetic oligonucleotide
  Sense strand starting at position 3268 of SEQ ID NO: 587960
caaauaggguugcuaugaa

SEQ ID NO: 831531 - RNA, 19 nt, Artificial Sequence
  Description of Artificial Sequence: Synthetic oligonucleotide
  Antisense strand to SEQ ID NO: 831530
uucauagcaacccuauuug

SEQ ID NO: 831532 - RNA, 19 nt, Artificial Sequence
  Description of Artificial Sequence: Synthetic oligonucleotide
  Sense strand starting at position 3338 of SEQ ID NO: 587960
auaaguauccaguguuagc

SEQ ID NO: 831533 - RNA, 19 nt, Artificial Sequence
  Description of Artificial Sequence: Synthetic oligonucleotide
  Antisense strand to SEQ ID NO: 831532
gcuaacacuggauacuuau

SEQ ID NO: 831534 - RNA, 19 nt, Artificial Sequence
  Description of Artificial Sequence: Synthetic oligonucleotide
  Sense strand starting at position 3345 of SEQ ID NO: 587960
uccaguguuagcuacugua

SEQ ID NO: 831535 - RNA, 19 nt, Artificial Sequence
  Description of Artificial Sequence: Synthetic oligonucleotide
  Antisense strand to SEQ ID NO: 831534
uacaguagcuaacacugga

SEQ ID NO: 831536 - RNA, 19 nt, Artificial Sequence
  Description of Artificial Sequence: Synthetic oligonucleotide
  Sense strand starting at position 3762 of SEQ ID NO: 587960
auuguuggguuccugauau

SEQ ID NO: 831537 - RNA, 19 nt, Artificial Sequence
  Description of Artificial Sequence: Synthetic oligonucleotide
  Antisense strand to SEQ ID NO: 831536
auaucaggaacccaacaau

SEQ ID NO: 831538 - RNA, 19 nt, Artificial Sequence
  Description of Artificial Sequence: Synthetic oligonucleotide
  Sense strand starting at position 417 of SEQ ID NO: 587961
cucugugacccuuggaaag

SEQ ID NO: 831539 - RNA, 19 nt, Artificial Sequence
  Description of Artificial Sequence: Synthetic oligonucleotide
  Antisense strand to SEQ ID NO: 831538
cuuuccaagggucacagag

SEQ ID NO: 831540 - RNA, 19 nt, Artificial Sequence
  Description of Artificial Sequence: Synthetic oligonucleotide
  Sense strand starting at position 498 of SEQ ID NO: 587961
guaauaauguaaccaguua

SEQ ID NO: 831541 - RNA, 19 nt, Artificial Sequence
  Description of Artificial Sequence: Synthetic oligonucleotide
  Antisense strand to SEQ ID NO: 831540
uaacugguuacauuauuac

SEQ ID NO: 831542 - RNA, 19 nt, Artificial Sequence
  Description of Artificial Sequence: Synthetic oligonucleotide
  Sense strand starting at position 505 of SEQ ID NO: 587961
uguaaccaguuaucuuaau

SEQ ID NO: 831543 - RNA, 19 nt, Artificial Sequence
  Description of Artificial Sequence: Synthetic oligonucleotide
  Antisense strand to SEQ ID NO: 831542
auuaagauaacugguuaca

SEQ ID NO: 831544 - RNA, 19 nt, Artificial Sequence
  Description of Artificial Sequence: Synthetic oligonucleotide
  Sense strand starting at position 506 of SEQ ID NO: 587961
guaaccaguuaucuuaaua

SEQ ID NO: 831545 - RNA, 19 nt, Artificial Sequence
  Description of Artificial Sequence: Synthetic oligonucleotide
  Antisense strand to SEQ ID NO: 831544
uauuaagauaacugguuac

SEQ ID NO: 831546 - RNA, 19 nt, Artificial Sequence
  Description of Artificial Sequence: Synthetic oligonucleotide
  Sense strand starting at position 529 of SEQ ID NO: 587961
ucuucucugcuaggaagua

SEQ ID NO: 831547 - RNA, 19 nt, Artificial Sequence
  Description of Artificial Sequence: Synthetic oligonucleotide
  Antisense strand to SEQ ID NO: 831546
uacuuccuagcagagaaga

SEQ ID NO: 831548 - RNA, 19 nt, Artificial Sequence
  Description of Artificial Sequence: Synthetic oligonucleotide
  Sense strand starting at position 638 of SEQ ID NO: 587961
auuguaugacuacaugcau

SEQ ID NO: 831549 - RNA, 19 nt, Artificial Sequence
  Description of Artificial Sequence: Synthetic oligonucleotide
  Antisense strand to SEQ ID NO: 831548
augcauguagucauacaau

SEQ ID NO: 831550 - RNA, 19 nt, Artificial Sequence
  Description of Artificial Sequence: Synthetic oligonucleotide
  Sense strand starting at position 649 of SEQ ID NO: 587961
acaugcaugccugacuaaa

SEQ ID NO: 831551 - RNA, 19 nt, Artificial Sequence
  Description of Artificial Sequence: Synthetic oligonucleotide
  Antisense strand to SEQ ID NO: 831550
uuuagucaggcaugcaugu

SEQ ID NO: 831552 - RNA, 19 nt, Artificial Sequence
  Description of Artificial Sequence: Synthetic oligonucleotide
  Sense strand starting at position 960 of SEQ ID NO: 587961
guauuauuccugcauacua

SEQ ID NO: 831553 - RNA, 19 nt, Artificial Sequence
  Description of Artificial Sequence: Synthetic oligonucleotide
  Antisense strand to SEQ ID NO: 831552
uaguaugcaggaauaauac

SEQ ID NO: 831554 - RNA, 19 nt, Artificial Sequence
  Description of Artificial Sequence: Synthetic oligonucleotide
  Sense strand starting at position 1050 of SEQ ID NO: 587961
auguaaauaugguuaaguc

SEQ ID NO: 831555 - RNA, 19 nt, Artificial Sequence
  Description of Artificial Sequence: Synthetic oligonucleotide
  Antisense strand to SEQ ID NO: 831554
gacuuaaccauauuuacau

SEQ ID NO: 831556 - RNA, 19 nt, Artificial Sequence
  Description of Artificial Sequence: Synthetic oligonucleotide
  Sense strand starting at position 1051 of SEQ ID NO: 587961
uguaaauaugguuaagucu

SEQ ID NO: 831557 - RNA, 19 nt, Artificial Sequence
  Description of Artificial Sequence: Synthetic oligonucleotide
  Antisense strand to SEQ ID NO: 831556
agacuuaaccauauuuaca

SEQ ID NO: 831558 - RNA, 19 nt, Artificial Sequence
  Description of Artificial Sequence: Synthetic oligonucleotide
  Sense strand starting at position 1074 of SEQ ID NO: 587961
ucucaacuaguuugaaguu

SEQ ID NO: 831559 - RNA, 19 nt, Artificial Sequence
  Description of Artificial Sequence: Synthetic oligonucleotide
  Antisense strand to SEQ ID NO: 831558
aacuucaaacuaguugaga

SEQ ID NO: 831560 - RNA, 19 nt, Artificial Sequence
  Description of Artificial Sequence: Synthetic oligonucleotide
  Sense strand starting at position 1253 of SEQ ID NO: 587961
uuacaaauaugagaugaca

SEQ ID NO: 831561 - RNA, 19 nt, Artificial Sequence
  Description of Artificial Sequence: Synthetic oligonucleotide
  Antisense strand to SEQ ID NO: 831560
ugucaucucauauuuguaa

SEQ ID NO: 831562 - RNA, 19 nt, Artificial Sequence
  Description of Artificial Sequence: Synthetic oligonucleotide
  Sense strand starting at position 1467 of SEQ ID NO: 587961
ggguaaugacugugcuaga

SEQ ID NO: 831563 - RNA, 19 nt, Artificial Sequence
  Description of Artificial Sequence: Synthetic oligonucleotide
  Antisense strand to SEQ ID NO: 831562
ucuagcacagucauuaccc

SEQ ID NO: 831564 - RNA, 19 nt, Artificial Sequence
  Description of Artificial Sequence: Synthetic oligonucleotide
  Sense strand starting at position 1468 of SEQ ID NO: 587961
gguaaugacugugcuagaa

SEQ ID NO: 831565 - RNA, 19 nt, Artificial Sequence
  Description of Artificial Sequence: Synthetic oligonucleotide
  Antisense strand to SEQ ID NO: 831564
uucuagcacagucauuacc

SEQ ID NO: 831566 - RNA, 19 nt, Artificial Sequence
  Description of Artificial Sequence: Synthetic oligonucleotide
  Sense strand starting at position 1472 of SEQ ID NO: 587961
augacugugcuagaacaug

SEQ ID NO: 831567 - RNA, 19 nt, Artificial Sequence
  Description of Artificial Sequence: Synthetic oligonucleotide
  Antisense strand to SEQ ID NO: 831566
cauguucuagcacagucau

SEQ ID NO: 831568 - RNA, 19 nt, Artificial Sequence
  Description of Artificial Sequence: Synthetic oligonucleotide
  Sense strand starting at position 2397 of SEQ ID NO: 587961
uggugaucccgagagugua

SEQ ID NO: 831569 - RNA, 19 nt, Artificial Sequence
  Description of Artificial Sequence: Synthetic oligonucleotide
  Antisense strand to SEQ ID NO: 831568
uacacucucgggaucacca

SEQ ID NO: 831570 - RNA, 19 nt, Artificial Sequence
  Description of Artificial Sequence: Synthetic oligonucleotide
  Sense strand starting at position 2429 of SEQ ID NO: 587961
guggguagagcguucguau

SEQ ID NO: 831571 - RNA, 19 nt, Artificial Sequence
  Description of Artificial Sequence: Synthetic oligonucleotide
  Antisense strand to SEQ ID NO: 831570
auacgaacgcucuacccac

SEQ ID NO: 831572 - RNA, 19 nt, Artificial Sequence
  Description of Artificial Sequence: Synthetic oligonucleotide
  Sense strand starting at position 2430 of SEQ ID NO: 587961
uggguagagcguucguauc

SEQ ID NO: 831573 - RNA, 19 nt, Artificial Sequence
  Description of Artificial Sequence: Synthetic oligonucleotide
  Antisense strand to SEQ ID NO: 831572
gauacgaacgcucuaccca

SEQ ID NO: 831574 - RNA, 19 nt, Artificial Sequence
  Description of Artificial Sequence: Synthetic oligonucleotide
  Sense strand starting at position 2509 of SEQ ID NO: 587961
uucugagcuuaccuuugau

SEQ ID NO: 831575 - RNA, 19 nt, Artificial Sequence
  Description of Artificial Sequence: Synthetic oligonucleotide
  Antisense strand to SEQ ID NO: 831574
aucaaagguaagcucagaa

SEQ ID NO: 831576 - RNA, 19 nt, Artificial Sequence
  Description of Artificial Sequence: Synthetic oligonucleotide
  Sense strand starting at position 2512 of SEQ ID NO: 587961
ugagcuuaccuuugaucac

SEQ ID NO: 831577 - RNA, 19 nt, Artificial Sequence
  Description of Artificial Sequence: Synthetic oligonucleotide
  Antisense strand to SEQ ID NO: 831576
gugaucaaagguaagcuca

SEQ ID NO: 831578 - RNA, 19 nt, Artificial Sequence
  Description of Artificial Sequence: Synthetic oligonucleotide
  Sense strand starting at position 2522 of SEQ ID NO: 587961
uuugaucaccugugaaaug

SEQ ID NO: 831579 - RNA, 19 nt, Artificial Sequence
  Description of Artificial Sequence: Synthetic oligonucleotide
  Antisense strand to SEQ ID NO: 831578
cauuucacaggugaucaaa

SEQ ID NO: 831580 - RNA, 19 nt, Artificial Sequence
  Description of Artificial Sequence: Synthetic oligonucleotide
  Sense strand starting at position 2610 of SEQ ID NO: 587961
uuccuuugugcgcuuaauc

SEQ ID NO: 831581 - RNA, 19 nt, Artificial Sequence
  Description of Artificial Sequence: Synthetic oligonucleotide
  Antisense strand to SEQ ID NO: 831580
gauuaagcgcacaaaggaa

SEQ ID NO: 831582 - RNA, 19 nt, Artificial Sequence
  Description of Artificial Sequence: Synthetic oligonucleotide
  Sense strand starting at position 2782 of SEQ ID NO: 587961
agcguugcuggaucuguua

SEQ ID NO: 831583 - RNA, 19 nt, Artificial Sequence
  Description of Artificial Sequence: Synthetic oligonucleotide
  Antisense strand to SEQ ID NO: 831582
uaacagauccagcaacgcu

SEQ ID NO: 831584 - RNA, 19 nt, Artificial Sequence
  Description of Artificial Sequence: Synthetic oligonucleotide
  Sense strand starting at position 2810 of SEQ ID NO: 587961
uaguauuugguguguggua

SEQ ID NO: 831585 - RNA, 19 nt, Artificial Sequence
  Description of Artificial Sequence: Synthetic oligonucleotide
  Antisense strand to SEQ ID NO: 831584
uaccacacaccaaauacua

SEQ ID NO: 831586 - RNA, 19 nt, Artificial Sequence
  Description of Artificial Sequence: Synthetic oligonucleotide
  Sense strand starting at position 2811 of SEQ ID NO: 587961
aguauuuggugugugguau

SEQ ID NO: 831587 - RNA, 19 nt, Artificial Sequence
  Description of Artificial Sequence: Synthetic oligonucleotide
  Antisense strand to SEQ ID NO: 831586
auaccacacaccaaauacu

SEQ ID NO: 831588 - RNA, 19 nt, Artificial Sequence
  Description of Artificial Sequence: Synthetic oligonucleotide
  Sense strand starting at position 2812 of SEQ ID NO: 587961
guauuuggugugugguauu

SEQ ID NO: 831589 - RNA, 19 nt, Artificial Sequence
  Description of Artificial Sequence: Synthetic oligonucleotide
  Antisense strand to SEQ ID NO: 831588
aauaccacacaccaaauac

SEQ ID NO: 831590 - RNA, 19 nt, Artificial Sequence
  Description of Artificial Sequence: Synthetic oligonucleotide
  Sense strand starting at position 2864 of SEQ ID NO: 587961
aagcucagacuugaaaguu

SEQ ID NO: 831591 - RNA, 19 nt, Artificial Sequence
  Description of Artificial Sequence: Synthetic oligonucleotide
  Antisense strand to SEQ ID NO: 831590
aacuuucaagucugagcuu

SEQ ID NO: 831592 - RNA, 19 nt, Artificial Sequence
  Description of Artificial Sequence: Synthetic oligonucleotide
  Sense strand starting at position 3070 of SEQ ID NO: 587961
cuacuuugaggucggagau

SEQ ID NO: 831593 - RNA, 19 nt, Artificial Sequence
  Description of Artificial Sequence: Synthetic oligonucleotide
  Antisense strand to SEQ ID NO: 831592
aucuccgaccucaaaguag

SEQ ID NO: 831594 - RNA, 19 nt, Artificial Sequence
  Description of Artificial Sequence: Synthetic oligonucleotide
  Sense strand starting at position 3071 of SEQ ID NO: 587961
uacuuugaggucggagaua

SEQ ID NO: 831595 - RNA, 19 nt, Artificial Sequence
  Description of Artificial Sequence: Synthetic oligonucleotide
  Antisense strand to SEQ ID NO: 831594
uaucuccgaccucaaagua

SEQ ID NO: 831596 - RNA, 19 nt, Artificial Sequence
  Description of Artificial Sequence: Synthetic oligonucleotide
  Sense strand starting at position 3128 of SEQ ID NO: 587961
cgguuacagauauaccagu

SEQ ID NO: 831597 - RNA, 19 nt, Artificial Sequence
  Description of Artificial Sequence: Synthetic oligonucleotide
  Antisense strand to SEQ ID NO: 831596
acugguauaucuguaaccg

SEQ ID NO: 831598 - RNA, 19 nt, Artificial Sequence
  Description of Artificial Sequence: Synthetic oligonucleotide
  Sense strand starting at position 3144 of SEQ ID NO: 587961
aguauagaugugcagcauu

SEQ ID NO: 831599 - RNA, 19 nt, Artificial Sequence
  Description of Artificial Sequence: Synthetic oligonucleotide
  Antisense strand to SEQ ID NO: 831598
aaugcugcacaucuauacu

SEQ ID NO: 831600 - RNA, 19 nt, Artificial Sequence
  Description of Artificial Sequence: Synthetic oligonucleotide
  Sense strand starting at position 3154 of SEQ ID NO: 587961
ugcagcauuauugggauga

SEQ ID NO: 831601 - RNA, 19 nt, Artificial Sequence
  Description of Artificial Sequence: Synthetic oligonucleotide
  Antisense strand to SEQ ID NO: 831600
ucaucccaauaaugcugca

SEQ ID NO: 831602 - RNA, 19 nt, Artificial Sequence
  Description of Artificial Sequence: Synthetic oligonucleotide
  Sense strand starting at position 3158 of SEQ ID NO: 587961
gcauuauugggaugaguag

SEQ ID NO: 831603 - RNA, 19 nt, Artificial Sequence
  Description of Artificial Sequence: Synthetic oligonucleotide
  Antisense strand to SEQ ID NO: 831602
cuacucaucccaauaaugc

SEQ ID NO: 831604 - RNA, 19 nt, Artificial Sequence
  Description of Artificial Sequence: Synthetic oligonucleotide
  Sense strand starting at position 3234 of SEQ ID NO: 587961
cuagaaguugggcauucua

SEQ ID NO: 831605 - RNA, 19 nt, Artificial Sequence
  Description of Artificial Sequence: Synthetic oligonucleotide
  Antisense strand to SEQ ID NO: 831604
uagaaugcccaacuucuag

SEQ ID NO: 831606 - RNA, 19 nt, Artificial Sequence
  Description of Artificial Sequence: Synthetic oligonucleotide
  Sense strand starting at position 3241 of SEQ ID NO: 587961
uugggcauucuaggauuaa

SEQ ID NO: 831607 - RNA, 19 nt, Artificial Sequence
  Description of Artificial Sequence: Synthetic oligonucleotide
  Antisense strand to SEQ ID NO: 831606
uuaauccuagaaugcccaa

SEQ ID NO: 831608 - RNA, 19 nt, Artificial Sequence
  Description of Artificial Sequence: Synthetic oligonucleotide
  Sense strand starting at position 3275 of SEQ ID NO: 587961
gguaauuuguaucagaacc

SEQ ID NO: 831609 - RNA, 19 nt, Artificial Sequence
  Description of Artificial Sequence: Synthetic oligonucleotide
  Antisense strand to SEQ ID NO: 831608
gguucugauacaaauuacc

SEQ ID NO: 831610 - RNA, 19 nt, Artificial Sequence
  Description of Artificial Sequence: Synthetic oligonucleotide
  Sense strand starting at position 3296 of SEQ ID NO: 587961
gaguuuaaagcuugaaaua

SEQ ID NO: 831611 - RNA, 19 nt, Artificial Sequence
  Description of Artificial Sequence: Synthetic oligonucleotide
  Antisense strand to SEQ ID NO: 831610
uauuucaagcuuuaaacuc

SEQ ID NO: 831612 - RNA, 19 nt, Artificial Sequence
  Description of Artificial Sequence: Synthetic oligonucleotide
  Sense strand starting at position 3385 of SEQ ID NO: 587961
caugguuugaaguagaagu

SEQ ID NO: 831613 - RNA, 19 nt, Artificial Sequence
  Description of Artificial Sequence: Synthetic oligonucleotide
  Antisense strand to SEQ ID NO: 831612
acuucuacuucaaaccaug

SEQ ID NO: 831614 - RNA, 19 nt, Artificial Sequence
  Description of Artificial Sequence: Synthetic oligonucleotide
  Sense strand starting at position 3513 of SEQ ID NO: 587961
gaauguucucaaugugacu

SEQ ID NO: 831615 - RNA, 19 nt, Artificial Sequence
  Description of Artificial Sequence: Synthetic oligonucleotide
  Antisense strand to SEQ ID NO: 831614
agucacauugagaacauuc

SEQ ID NO: 831616 - RNA, 19 nt, Artificial Sequence
  Description of Artificial Sequence: Synthetic oligonucleotide
  Sense strand starting at position 3559 of SEQ ID NO: 587961
acugguaauggguguucaa

SEQ ID NO: 831617 - RNA, 19 nt, Artificial Sequence
  Description of Artificial Sequence: Synthetic oligonucleotide
  Antisense strand to SEQ ID NO: 831616
uugaacacccauuaccagu

SEQ ID NO: 831618 - RNA, 19 nt, Artificial Sequence
  Description of Artificial Sequence: Synthetic oligonucleotide
  Sense strand starting at position 242 of SEQ ID NO: 587962
agccaucgugccucgacaa

SEQ ID NO: 831619 - RNA, 19 nt, Artificial Sequence
  Description of Artificial Sequence: Synthetic oligonucleotide
  Antisense strand to SEQ ID NO: 831618
uugucgaggcacgauggcu

SEQ ID NO: 831620 - RNA, 19 nt, Artificial Sequence
  Description of Artificial Sequence: Synthetic oligonucleotide
  Sense strand starting at position 267 of SEQ ID NO: 587962
uuauuuccgacgugugaau

SEQ ID NO: 831621 - RNA, 19 nt, Artificial Sequence
  Description of Artificial Sequence: Synthetic oligonucleotide
  Antisense strand to SEQ ID NO: 831620
auucacacgucggaaauaa

SEQ ID NO: 831622 - RNA, 19 nt, Artificial Sequence
  Description of Artificial Sequence: Synthetic oligonucleotide
  Sense strand starting at position 345 of SEQ ID NO: 587962
cugccaagccaucagaaau

SEQ ID NO: 831623 - RNA, 19 nt, Artificial Sequence
  Description of Artificial Sequence: Synthetic oligonucleotide
  Antisense strand to SEQ ID NO: 831622
auuucugauggcuuggcag

SEQ ID NO: 831624 - RNA, 19 nt, Artificial Sequence
  Description of Artificial Sequence: Synthetic oligonucleotide
  Sense strand starting at position 479 of SEQ ID NO: 587962
ugaacugaauccucuaagu

SEQ ID NO: 831625 - RNA, 19 nt, Artificial Sequence
  Description of Artificial Sequence: Synthetic oligonucleotide
  Antisense strand to SEQ ID NO: 831624
acuuagaggauucaguuca

SEQ ID NO: 831626 - RNA, 19 nt, Artificial Sequence
  Description of Artificial Sequence: Synthetic oligonucleotide
  Sense strand starting at position 520 of SEQ ID NO: 587962
guaacauuauuacucugga

SEQ ID NO: 831627 - RNA, 19 nt, Artificial Sequence
  Description of Artificial Sequence: Synthetic oligonucleotide
  Antisense strand to SEQ ID NO: 831626
uccagaguaauaauguuac

SEQ ID NO: 831628 - RNA, 19 nt, Artificial Sequence
  Description of Artificial Sequence: Synthetic oligonucleotide
  Sense strand starting at position 523 of SEQ ID NO: 587962
acauuauuacucuggagac

SEQ ID NO: 831629 - RNA, 19 nt, Artificial Sequence
  Description of Artificial Sequence: Synthetic oligonucleotide
  Antisense strand to SEQ ID NO: 831628
gucuccagaguaauaaugu

SEQ ID NO: 831630 - RNA, 19 nt, Artificial Sequence
  Description of Artificial Sequence: Synthetic oligonucleotide
  Sense strand starting at position 535 of SEQ ID NO: 587962
uggagaccucucuauguuc

SEQ ID NO: 831631 - RNA, 19 nt, Artificial Sequence
  Description of Artificial Sequence: Synthetic oligonucleotide
  Antisense strand to SEQ ID NO: 831630
gaacauagagaggucucca

SEQ ID NO: 831632 - RNA, 19 nt, Artificial Sequence
  Description of Artificial Sequence: Synthetic oligonucleotide
  Sense strand starting at position 738 of SEQ ID NO: 587962
auggcuaaucuguauaguu

SEQ ID NO: 831633 - RNA, 19 nt, Artificial Sequence
  Description of Artificial Sequence: Synthetic oligonucleotide
  Antisense strand to SEQ ID NO: 831632
aacuauacagauuagccau

SEQ ID NO: 831634 - RNA, 19 nt, Artificial Sequence
  Description of Artificial Sequence: Synthetic oligonucleotide
  Sense strand starting at position 740 of SEQ ID NO: 587962
ggcuaaucuguauaguuua

SEQ ID NO: 831635 - RNA, 19 nt, Artificial Sequence
  Description of Artificial Sequence: Synthetic oligonucleotide
  Antisense strand to SEQ ID NO: 831634
uaaacuauacagauuagcc

SEQ ID NO: 831636 - RNA, 19 nt, Artificial Sequence
  Description of Artificial Sequence: Synthetic oligonucleotide
  Sense strand starting at position 1062 of SEQ ID NO: 587962
agauccgugugagucauuu

SEQ ID NO: 831637 - RNA, 19 nt, Artificial Sequence
  Description of Artificial Sequence: Synthetic oligonucleotide
  Antisense strand to SEQ ID NO: 831636
aaaugacucacacggaucu

SEQ ID NO: 831638 - RNA, 19 nt, Artificial Sequence
  Description of Artificial Sequence: Synthetic oligonucleotide
  Sense strand starting at position 1094 of SEQ ID NO: 587962
guuguaacuguccauauua

SEQ ID NO: 831639 - RNA, 19 nt, Artificial Sequence
  Description of Artificial Sequence: Synthetic oligonucleotide
  Antisense strand to SEQ ID NO: 831638
uaauauggacaguuacaac

SEQ ID NO: 831640 - RNA, 19 nt, Artificial Sequence
  Description of Artificial Sequence: Synthetic oligonucleotide
  Sense strand starting at position 1096 of SEQ ID NO: 587962
uguaacuguccauauuauc

SEQ ID NO: 831641 - RNA, 19 nt, Artificial Sequence
  Description of Artificial Sequence: Synthetic oligonucleotide
  Antisense strand to SEQ ID NO: 831640
gauaauauggacaguuaca

SEQ ID NO: 831642 - RNA, 19 nt, Artificial Sequence
  Description of Artificial Sequence: Synthetic oligonucleotide
  Sense strand starting at position 1137 of SEQ ID NO: 587962
acgauuuaucucggcagua

SEQ ID NO: 831643 - RNA, 19 nt, Artificial Sequence
  Description of Artificial Sequence: Synthetic oligonucleotide
  Antisense strand to SEQ ID NO: 831642
uacugccgagauaaaucgu

SEQ ID NO: 831644 - RNA, 19 nt, Artificial Sequence
  Description of Artificial Sequence: Synthetic oligonucleotide
  Sense strand starting at position 1138 of SEQ ID NO: 587962
cgauuuaucucggcaguac

SEQ ID NO: 831645 - RNA, 19 nt, Artificial Sequence
  Description of Artificial Sequence: Synthetic oligonucleotide
  Antisense strand to SEQ ID NO: 831644
guacugccgagauaaaucg

SEQ ID NO: 831646 - RNA, 19 nt, Artificial Sequence
  Description of Artificial Sequence: Synthetic oligonucleotide
  Sense strand starting at position 1187 of SEQ ID NO: 587962
aaagcuuaguuccuagaga

SEQ ID NO: 831647 - RNA, 19 nt, Artificial Sequence
  Description of Artificial Sequence: Synthetic oligonucleotide
  Antisense strand to SEQ ID NO: 831646
ucucuaggaacuaagcuuu

SEQ ID NO: 831648 - RNA, 19 nt, Artificial Sequence
  Description of Artificial Sequence: Synthetic oligonucleotide
  Sense strand starting at position 1292 of SEQ ID NO: 587962
aguagugauuucuucguuu

SEQ ID NO: 831649 - RNA, 19 nt, Artificial Sequence
  Description of Artificial Sequence: Synthetic oligonucleotide
  Antisense strand to SEQ ID NO: 831648
aaacgaagaaaucacuacu

SEQ ID NO: 831650 - RNA, 19 nt, Artificial Sequence
  Description of Artificial Sequence: Synthetic oligonucleotide
  Sense strand starting at position 1294 of SEQ ID NO: 587962
uagugauuucuucguuuaa

SEQ ID NO: 831651 - RNA, 19 nt, Artificial Sequence
  Description of Artificial Sequence: Synthetic oligonucleotide
  Antisense strand to SEQ ID NO: 831650
uuaaacgaagaaaucacua

SEQ ID NO: 831652 - RNA, 19 nt, Artificial Sequence
  Description of Artificial Sequence: Synthetic oligonucleotide
  Sense strand starting at position 1295 of SEQ ID NO: 587962
agugauuucuucguuuaaa

SEQ ID NO: 831653 - RNA, 19 nt, Artificial Sequence
  Description of Artificial Sequence: Synthetic oligonucleotide
  Antisense strand to SEQ ID NO: 831652
uuuaaacgaagaaaucacu

SEQ ID NO: 831654 - RNA, 19 nt, Artificial Sequence
  Description of Artificial Sequence: Synthetic oligonucleotide
  Sense strand starting at position 1296 of SEQ ID NO: 587962
gugauuucuucguuuaaag

SEQ ID NO: 831655 - RNA, 19 nt, Artificial Sequence
  Description of Artificial Sequence: Synthetic oligonucleotide
  Antisense strand to SEQ ID NO: 831654
cuuuaaacgaagaaaucac

SEQ ID NO: 831656 - RNA, 19 nt, Artificial Sequence
  Description of Artificial Sequence: Synthetic oligonucleotide
  Sense strand starting at position 1682 of SEQ ID NO: 587962
aggguccucacuuguggaa

SEQ ID NO: 831657 - RNA, 19 nt, Artificial Sequence
  Description of Artificial Sequence: Synthetic oligonucleotide
  Antisense strand to SEQ ID NO: 831656
uuccacaagugaggacccu

SEQ ID NO: 831658 - RNA, 19 nt, Artificial Sequence
  Description of Artificial Sequence: Synthetic oligonucleotide
  Sense strand starting at position 2051 of SEQ ID NO: 587962
agguaacguuuccugggaa

SEQ ID NO: 831659 - RNA, 19 nt, Artificial Sequence
  Description of Artificial Sequence: Synthetic oligonucleotide
  Antisense strand to SEQ ID NO: 831658
uucccaggaaacguuaccu

SEQ ID NO: 831660 - RNA, 19 nt, Artificial Sequence
  Description of Artificial Sequence: Synthetic oligonucleotide
  Sense strand starting at position 2358 of SEQ ID NO: 587962
acagaugguguaugauuaa

SEQ ID NO: 831661 - RNA, 19 nt, Artificial Sequence
  Description of Artificial Sequence: Synthetic oligonucleotide
  Antisense strand to SEQ ID NO: 831660
uuaaucauacaccaucugu

SEQ ID NO: 831662 - RNA, 19 nt, Artificial Sequence
  Description of Artificial Sequence: Synthetic oligonucleotide
  Sense strand starting at position 2361 of SEQ ID NO: 587962
gaugguguaugauuaauaa

SEQ ID NO: 831663 - RNA, 19 nt, Artificial Sequence
  Description of Artificial Sequence: Synthetic oligonucleotide
  Antisense strand to SEQ ID NO: 831662
uuauuaaucauacaccauc

SEQ ID NO: 831664 - RNA, 19 nt, Artificial Sequence
  Description of Artificial Sequence: Synthetic oligonucleotide
  Sense strand starting at position 2439 of SEQ ID NO: 587962
ucacaaguuucugugagag

SEQ ID NO: 831665 - RNA, 19 nt, Artificial Sequence
  Description of Artificial Sequence: Synthetic oligonucleotide
  Antisense strand to SEQ ID NO: 831664
cucucacagaaacuuguga

SEQ ID NO: 831666 - RNA, 19 nt, Artificial Sequence
  Description of Artificial Sequence: Synthetic oligonucleotide
  Sense strand starting at position 2769 of SEQ ID NO: 587962
ucuccauugcugugauuuc

SEQ ID NO: 831667 - RNA, 19 nt, Artificial Sequence
  Description of Artificial Sequence: Synthetic oligonucleotide
  Antisense strand to SEQ ID NO: 831666
gaaaucacagcaauggaga

SEQ ID NO: 831668 - RNA, 19 nt, Artificial Sequence
  Description of Artificial Sequence: Synthetic oligonucleotide
  Sense strand starting at position 2778 of SEQ ID NO: 587962
cugugauuuccaugugcug

SEQ ID NO: 831669 - RNA, 19 nt, Artificial Sequence
  Description of Artificial Sequence: Synthetic oligonucleotide
  Antisense strand to SEQ ID NO: 831668
cagcacauggaaaucacag

SEQ ID NO: 831670 - RNA, 19 nt, Artificial Sequence
  Description of Artificial Sequence: Synthetic oligonucleotide
  Sense strand starting at position 2787 of SEQ ID NO: 587962
ccaugugcuguguugcaaa

SEQ ID NO: 831671 - RNA, 19 nt, Artificial Sequence
  Description of Artificial Sequence: Synthetic oligonucleotide
  Antisense strand to SEQ ID NO: 831670
uuugcaacacagcacaugg

SEQ ID NO: 831672 - RNA, 19 nt, Artificial Sequence
  Description of Artificial Sequence: Synthetic oligonucleotide
  Sense strand starting at position 2875 of SEQ ID NO: 587962
cuguguugagugagggcua

SEQ ID NO: 831673 - RNA, 19 nt, Artificial Sequence
  Description of Artificial Sequence: Synthetic oligonucleotide
  Antisense strand to SEQ ID NO: 831672
uagcccucacucaacacag

SEQ ID NO: 831674 - RNA, 19 nt, Artificial Sequence
  Description of Artificial Sequence: Synthetic oligonucleotide
  Sense strand starting at position 2929 of SEQ ID NO: 587962
cgggaaguuagguauuccu

SEQ ID NO: 831675 - RNA, 19 nt, Artificial Sequence
  Description of Artificial Sequence: Synthetic oligonucleotide
  Antisense strand to SEQ ID NO: 831674
aggaauaccuaacuucccg

SEQ ID NO: 831676 - RNA, 19 nt, Artificial Sequence
  Description of Artificial Sequence: Synthetic oligonucleotide
  Sense strand starting at position 2950 of SEQ ID NO: 587962
ccucuagauguguauacca

SEQ ID NO: 831677 - RNA, 19 nt, Artificial Sequence
  Description of Artificial Sequence: Synthetic oligonucleotide
  Antisense strand to SEQ ID NO: 831676
ugguauacacaucuagagg

SEQ ID NO: 831678 - RNA, 19 nt, Artificial Sequence
  Description of Artificial Sequence: Synthetic oligonucleotide
  Sense strand starting at position 2952 of SEQ ID NO: 587962
ucuagauguguauaccauu

SEQ ID NO: 831679 - RNA, 19 nt, Artificial Sequence
  Description of Artificial Sequence: Synthetic oligonucleotide
  Antisense strand to SEQ ID NO: 831678
aaugguauacacaucuaga

SEQ ID NO: 831680 - RNA, 19 nt, Artificial Sequence
  Description of Artificial Sequence: Synthetic oligonucleotide
  Sense strand starting at position 2958 of SEQ ID NO: 587962
uguguauaccauuaaggca

SEQ ID NO: 831681 - RNA, 19 nt, Artificial Sequence
  Description of Artificial Sequence: Synthetic oligonucleotide
  Antisense strand to SEQ ID NO: 831680
ugccuuaaugguauacaca

SEQ ID NO: 831682 - RNA, 19 nt, Artificial Sequence
  Description of Artificial Sequence: Synthetic oligonucleotide
  Sense strand starting at position 3009 of SEQ ID NO: 587962
acuaccaaguguccagaua

SEQ ID NO: 831683 - RNA, 19 nt, Artificial Sequence
  Description of Artificial Sequence: Synthetic oligonucleotide
  Antisense strand to SEQ ID NO: 831682
uaucuggacacuugguagu

SEQ ID NO: 831684 - RNA, 19 nt, Artificial Sequence
  Description of Artificial Sequence: Synthetic oligonucleotide
  Sense strand starting at position 3010 of SEQ ID NO: 587962
cuaccaaguguccagauau

SEQ ID NO: 831685 - RNA, 19 nt, Artificial Sequence
  Description of Artificial Sequence: Synthetic oligonucleotide
  Antisense strand to SEQ ID NO: 831684
auaucuggacacuugguag

SEQ ID NO: 831686 - RNA, 19 nt, Artificial Sequence
  Description of Artificial Sequence: Synthetic oligonucleotide
  Sense strand starting at position 3231 of SEQ ID NO: 587962
ggcacaugcccucgaauuu

SEQ ID NO: 831687 - RNA, 19 nt, Artificial Sequence
  Description of Artificial Sequence: Synthetic oligonucleotide
  Antisense strand to SEQ ID NO: 831686
aaauucgagggcaugugcc

SEQ ID NO: 831688 - RNA, 19 nt, Artificial Sequence
  Description of Artificial Sequence: Synthetic oligonucleotide
  Sense strand starting at position 3921 of SEQ ID NO: 587962
uugggauuaucaucuguga

SEQ ID NO: 831689 - RNA, 19 nt, Artificial Sequence
  Description of Artificial Sequence: Synthetic oligonucleotide
  Antisense strand to SEQ ID NO: 831688
ucacagaugauaaucccaa

SEQ ID NO: 831690 - RNA, 19 nt, Artificial Sequence
  Description of Artificial Sequence: Synthetic oligonucleotide
  Sense strand starting at position 3923 of SEQ ID NO: 587962
gggauuaucaucugugaau

SEQ ID NO: 831691 - RNA, 19 nt, Artificial Sequence
  Description of Artificial Sequence: Synthetic oligonucleotide
  Antisense strand to SEQ ID NO: 831690
auucacagaugauaauccc

SEQ ID NO: 831692 - RNA, 19 nt, Artificial Sequence
  Description of Artificial Sequence: Synthetic oligonucleotide
  Sense strand starting at position 3924 of SEQ ID NO: 587962
ggauuaucaucugugaauu

SEQ ID NO: 831693 - RNA, 19 nt, Artificial Sequence
  Description of Artificial Sequence: Synthetic oligonucleotide
  Antisense strand to SEQ ID NO: 831692
aauucacagaugauaaucc

SEQ ID NO: 831694 - RNA, 19 nt, Artificial Sequence
  Description of Artificial Sequence: Synthetic oligonucleotide
  Sense strand starting at position 3935 of SEQ ID NO: 587962
ugugaauuaucaucuguga

SEQ ID NO: 831695 - RNA, 19 nt, Artificial Sequence
  Description of Artificial Sequence: Synthetic oligonucleotide
  Antisense strand to SEQ ID NO: 831694
ucacagaugauaauucaca

SEQ ID NO: 831696 - RNA, 19 nt, Artificial Sequence
  Description of Artificial Sequence: Synthetic oligonucleotide
  Sense strand starting at position 3963 of SEQ ID NO: 587962
ucaacaguugucuaaacca

SEQ ID NO: 831697 - RNA, 19 nt, Artificial Sequence
  Description of Artificial Sequence: Synthetic oligonucleotide
  Antisense strand to SEQ ID NO: 831696
ugguuuagacaacuguuga

SEQ ID NO: 831698 - RNA, 19 nt, Artificial Sequence
  Description of Artificial Sequence: Synthetic oligonucleotide
  Sense strand starting at position 24 of SEQ ID NO: 587963
uccagauaucccgaugucu

SEQ ID NO: 831699 - RNA, 19 nt, Artificial Sequence
  Description of Artificial Sequence: Synthetic oligonucleotide
  Antisense strand to SEQ ID NO: 831698
agacaucgggauaucugga

SEQ ID NO: 831700 - RNA, 19 nt, Artificial Sequence
  Description of Artificial Sequence: Synthetic oligonucleotide
  Sense strand starting at position 30 of SEQ ID NO: 587963
uaucccgaugucuggagaa

SEQ ID NO: 831701 - RNA, 19 nt, Artificial Sequence
  Description of Artificial Sequence: Synthetic oligonucleotide
  Antisense strand to SEQ ID NO: 831700
uucuccagacaucgggaua

SEQ ID NO: 831702 - RNA, 19 nt, Artificial Sequence
  Description of Artificial Sequence: Synthetic oligonucleotide
  Sense strand starting at position 32 of SEQ ID NO: 587963
ucccgaugucuggagaaca

SEQ ID NO: 831703 - RNA, 19 nt, Artificial Sequence
  Description of Artificial Sequence: Synthetic oligonucleotide
  Antisense strand to SEQ ID NO: 831702
uguucuccagacaucggga

SEQ ID NO: 831704 - RNA, 19 nt, Artificial Sequence
  Description of Artificial Sequence: Synthetic oligonucleotide
  Sense strand starting at position 383 of SEQ ID NO: 587963
acgcguuccuccucuuaca

SEQ ID NO: 831705 - RNA, 19 nt, Artificial Sequence
  Description of Artificial Sequence: Synthetic oligonucleotide
  Antisense strand to SEQ ID NO: 831704
uguaagaggaggaacgcgu

SEQ ID NO: 831706 - RNA, 19 nt, Artificial Sequence
  Description of Artificial Sequence: Synthetic oligonucleotide
  Sense strand starting at position 524 of SEQ ID NO: 587963
ccuugaggucuggaucuga

SEQ ID NO: 831707 - RNA, 19 nt, Artificial Sequence
  Description of Artificial Sequence: Synthetic oligonucleotide
  Antisense strand to SEQ ID NO: 831706
ucagauccagaccucaagg

SEQ ID NO: 831708 - RNA, 19 nt, Artificial Sequence
  Description of Artificial Sequence: Synthetic oligonucleotide
  Sense strand starting at position 901 of SEQ ID NO: 587963
agcucuaagcugugugaaa

SEQ ID NO: 831709 - RNA, 19 nt, Artificial Sequence
  Description of Artificial Sequence: Synthetic oligonucleotide
  Antisense strand to SEQ ID NO: 831708
uuucacacagcuuagagcu

SEQ ID NO: 831710 - RNA, 19 nt, Artificial Sequence
  Description of Artificial Sequence: Synthetic oligonucleotide
  Sense strand starting at position 902 of SEQ ID NO: 587963
gcucuaagcugugugaaag

SEQ ID NO: 831711 - RNA, 19 nt, Artificial Sequence
  Description of Artificial Sequence: Synthetic oligonucleotide
  Antisense strand to SEQ ID NO: 831710
cuuucacacagcuuagagc

SEQ ID NO: 831712 - RNA, 19 nt, Artificial Sequence
  Description of Artificial Sequence: Synthetic oligonucleotide
  Sense strand starting at position 1220 of SEQ ID NO: 587963
uccagcaguauccgaaaga

SEQ ID NO: 831713 - RNA, 19 nt, Artificial Sequence
  Description of Artificial Sequence: Synthetic oligonucleotide
  Antisense strand to SEQ ID NO: 831712
ucuuucggauacugcugga

SEQ ID NO: 831714 - RNA, 19 nt, Artificial Sequence
  Description of Artificial Sequence: Synthetic oligonucleotide
  Sense strand starting at position 1221 of SEQ ID NO: 587963
ccagcaguauccgaaagag

SEQ ID NO: 831715 - RNA, 19 nt, Artificial Sequence
  Description of Artificial Sequence: Synthetic oligonucleotide
  Antisense strand to SEQ ID NO: 831714
cucuuucggauacugcugg

SEQ ID NO: 831716 - RNA, 19 nt, Artificial Sequence
  Description of Artificial Sequence: Synthetic oligonucleotide
  Sense strand starting at position 2541 of SEQ ID NO: 587963
caggcucuucccgagcauu

SEQ ID NO: 831717 - RNA, 19 nt, Artificial Sequence
  Description of Artificial Sequence: Synthetic oligonucleotide
  Antisense strand to SEQ ID NO: 831716
aaugcucgggaagagccug

SEQ ID NO: 831718 - RNA, 19 nt, Artificial Sequence
  Description of Artificial Sequence: Synthetic oligonucleotide
  Sense strand starting at position 2830 of SEQ ID NO: 587963
cccggaauugcuggguuaa

SEQ ID NO: 831719 - RNA, 19 nt, Artificial Sequence
  Description of Artificial Sequence: Synthetic oligonucleotide
  Antisense strand to SEQ ID NO: 831718
uuaacccagcaauuccggg

SEQ ID NO: 831720 - RNA, 19 nt, Artificial Sequence
  Description of Artificial Sequence: Synthetic oligonucleotide
  Sense strand starting at position 2831 of SEQ ID NO: 587963
ccggaauugcuggguuaaa

SEQ ID NO: 831721 - RNA, 19 nt, Artificial Sequence
  Description of Artificial Sequence: Synthetic oligonucleotide
  Antisense strand to SEQ ID NO: 831720
uuuaacccagcaauuccgg

SEQ ID NO: 831722 - RNA, 19 nt, Artificial Sequence
  Description of Artificial Sequence: Synthetic oligonucleotide
  Sense strand starting at position 2832 of SEQ ID NO: 587963
cggaauugcuggguuaaac

SEQ ID NO: 831723 - RNA, 19 nt, Artificial Sequence
  Description of Artificial Sequence: Synthetic oligonucleotide
  Antisense strand to SEQ ID NO: 831722
guuuaacccagcaauuccg

SEQ ID NO: 831724 - RNA, 19 nt, Artificial Sequence
  Description of Artificial Sequence: Synthetic oligonucleotide
  Sense strand starting at position 2960 of SEQ ID NO: 587963
cagggagcucacuaccuau

SEQ ID NO: 831725 - RNA, 19 nt, Artificial Sequence
  Description of Artificial Sequence: Synthetic oligonucleotide
  Antisense strand to SEQ ID NO: 831724
auagguagugagcucccug

SEQ ID NO: 831726 - RNA, 19 nt, Artificial Sequence
  Description of Artificial Sequence: Synthetic oligonucleotide
  Sense strand starting at position 3158 of SEQ ID NO: 587963
gccagugauaagcacaguu

SEQ ID NO: 831727 - RNA, 19 nt, Artificial Sequence
  Description of Artificial Sequence: Synthetic oligonucleotide
  Antisense strand to SEQ ID NO: 831726
aacugugcuuaucacuggc

SEQ ID NO: 831728 - RNA, 19 nt, Artificial Sequence
  Description of Artificial Sequence: Synthetic oligonucleotide
  Sense strand starting at position 3237 of SEQ ID NO: 587963
ggguggguuuggcuaguua

SEQ ID NO: 831729 - RNA, 19 nt, Artificial Sequence
  Description of Artificial Sequence: Synthetic oligonucleotide
  Antisense strand to SEQ ID NO: 831728
uaacuagccaaacccaccc

SEQ ID NO: 831730 - RNA, 19 nt, Artificial Sequence
  Description of Artificial Sequence: Synthetic oligonucleotide
  Sense strand starting at position 3490 of SEQ ID NO: 587963
ucacacuugucccugaagu

SEQ ID NO: 831731 - RNA, 19 nt, Artificial Sequence
  Description of Artificial Sequence: Synthetic oligonucleotide
  Antisense strand to SEQ ID NO: 831730
acuucagggacaaguguga

SEQ ID NO: 831732 - RNA, 19 nt, Artificial Sequence
  Description of Artificial Sequence: Synthetic oligonucleotide
  Sense strand starting at position 3491 of SEQ ID NO: 587963
cacacuugucccugaagug

SEQ ID NO: 831733 - RNA, 19 nt, Artificial Sequence
  Description of Artificial Sequence: Synthetic oligonucleotide
  Antisense strand to SEQ ID NO: 831732
cacuucagggacaagugug

SEQ ID NO: 831734 - RNA, 19 nt, Artificial Sequence
  Description of Artificial Sequence: Synthetic oligonucleotide
  Sense strand starting at position 3492 of SEQ ID NO: 587963
acacuugucccugaagugu

SEQ ID NO: 831735 - RNA, 19 nt, Artificial Sequence
  Description of Artificial Sequence: Synthetic oligonucleotide
  Antisense strand to SEQ ID NO: 831734
acacuucagggacaagugu

SEQ ID NO: 831736 - RNA, 19 nt, Artificial Sequence
  Description of Artificial Sequence: Synthetic oligonucleotide
  Sense strand starting at position 3600 of SEQ ID NO: 587963
guuggccauugcucaaaga

SEQ ID NO: 831737 - RNA, 19 nt, Artificial Sequence
  Description of Artificial Sequence: Synthetic oligonucleotide
  Antisense strand to SEQ ID NO: 831736
ucuuugagcaauggccaac

SEQ ID NO: 831738 - RNA, 19 nt, Artificial Sequence
  Description of Artificial Sequence: Synthetic oligonucleotide
  Sense strand starting at position 3601 of SEQ ID NO: 587963
uuggccauugcucaaagaa

SEQ ID NO: 831739 - RNA, 19 nt, Artificial Sequence
  Description of Artificial Sequence: Synthetic oligonucleotide
  Antisense strand to SEQ ID NO: 831738
uucuuugagcaauggccaa

SEQ ID NO: 831740 - RNA, 19 nt, Artificial Sequence
  Description of Artificial Sequence: Synthetic oligonucleotide
  Sense strand starting at position 3674 of SEQ ID NO: 587963
ugugcaauguuugaagaga

SEQ ID NO: 831741 - RNA, 19 nt, Artificial Sequence
  Description of Artificial Sequence: Synthetic oligonucleotide
  Antisense strand to SEQ ID NO: 831740
ucucuucaaacauugcaca

SEQ ID NO: 831742 - RNA, 19 nt, Artificial Sequence
  Description of Artificial Sequence: Synthetic oligonucleotide
  Sense strand starting at position 3714 of SEQ ID NO: 587963
gugacuguggccugucaca

SEQ ID NO: 831743 - RNA, 19 nt, Artificial Sequence
  Description of Artificial Sequence: Synthetic oligonucleotide
  Antisense strand to SEQ ID NO: 831742
ugugacaggccacagucac

SEQ ID NO: 831744 - RNA, 19 nt, Artificial Sequence
  Description of Artificial Sequence: Synthetic oligonucleotide
  Sense strand starting at position 3740 of SEQ ID NO: 587963
agaagauccugagaacuug

SEQ ID NO: 831745 - RNA, 19 nt, Artificial Sequence
  Description of Artificial Sequence: Synthetic oligonucleotide
  Antisense strand to SEQ ID NO: 831744
caaguucucaggaucuucu

SEQ ID NO: 831746 - RNA, 19 nt, Artificial Sequence
  Description of Artificial Sequence: Synthetic oligonucleotide
  Sense strand starting at position 3750 of SEQ ID NO: 587963
gagaacuuguacccagagu

SEQ ID NO: 831747 - RNA, 19 nt, Artificial Sequence
  Description of Artificial Sequence: Synthetic oligonucleotide
  Antisense strand to SEQ ID NO: 831746
acucuggguacaaguucuc

SEQ ID NO: 831748 - RNA, 19 nt, Artificial Sequence
  Description of Artificial Sequence: Synthetic oligonucleotide
  Sense strand starting at position 3818 of SEQ ID NO: 587963
aaugaauacuugcaggaug

SEQ ID NO: 831749 - RNA, 19 nt, Artificial Sequence
  Description of Artificial Sequence: Synthetic oligonucleotide
  Antisense strand to SEQ ID NO: 831748
cauccugcaaguauucauu

SEQ ID NO: 831750 - RNA, 19 nt, Artificial Sequence
  Description of Artificial Sequence: Synthetic oligonucleotide
  Sense strand starting at position 3820 of SEQ ID NO: 587963
ugaauacuugcaggaugga

SEQ ID NO: 831751 - RNA, 19 nt, Artificial Sequence
  Description of Artificial Sequence: Synthetic oligonucleotide
  Antisense strand to SEQ ID NO: 831750
uccauccugcaaguauuca

SEQ ID NO: 831752 - RNA, 19 nt, Artificial Sequence
  Description of Artificial Sequence: Synthetic oligonucleotide
  Sense strand starting at position 3881 of SEQ ID NO: 587963
gagggacuucuaggucaua

SEQ ID NO: 831753 - RNA, 19 nt, Artificial Sequence
  Description of Artificial Sequence: Synthetic oligonucleotide
  Antisense strand to SEQ ID NO: 831752
uaugaccuagaagucccuc

SEQ ID NO: 831754 - RNA, 19 nt, Artificial Sequence
  Description of Artificial Sequence: Synthetic oligonucleotide
  Sense strand starting at position 2323 of SEQ ID NO: 587964
ggucaucuccaacggaauu

SEQ ID NO: 831755 - RNA, 19 nt, Artificial Sequence
  Description of Artificial Sequence: Synthetic oligonucleotide
  Antisense strand to SEQ ID NO: 831754
aauuccguuggagaugacc

SEQ ID NO: 831756 - RNA, 19 nt, Artificial Sequence
  Description of Artificial Sequence: Synthetic oligonucleotide
  Sense strand starting at position 2334 of SEQ ID NO: 587964
acggaauucugccuuugaa

SEQ ID NO: 831757 - RNA, 19 nt, Artificial Sequence
  Description of Artificial Sequence: Synthetic oligonucleotide
  Antisense strand to SEQ ID NO: 831756
uucaaaggcagaauuccgu

SEQ ID NO: 831758 - RNA, 19 nt, Artificial Sequence
  Description of Artificial Sequence: Synthetic oligonucleotide
  Sense strand starting at position 2337 of SEQ ID NO: 587964
gaauucugccuuugaagug

SEQ ID NO: 831759 - RNA, 19 nt, Artificial Sequence
  Description of Artificial Sequence: Synthetic oligonucleotide
  Antisense strand to SEQ ID NO: 831758
cacuucaaaggcagaauuc

SEQ ID NO: 831760 - RNA, 19 nt, Artificial Sequence
  Description of Artificial Sequence: Synthetic oligonucleotide
  Sense strand starting at position 2433 of SEQ ID NO: 587964
gcccguggcucuugguaga

SEQ ID NO: 831761 - RNA, 19 nt, Artificial Sequence
  Description of Artificial Sequence: Synthetic oligonucleotide
  Antisense strand to SEQ ID NO: 831760
ucuaccaagagccacgggc

SEQ ID NO: 831762 - RNA, 19 nt, Artificial Sequence
  Description of Artificial Sequence: Synthetic oligonucleotide
  Sense strand starting at position 2850 of SEQ ID NO: 587964
gggccuaaggccuguguuu

SEQ ID NO: 831763 - RNA, 19 nt, Artificial Sequence
  Description of Artificial Sequence: Synthetic oligonucleotide
  Antisense strand to SEQ ID NO: 831762
aaacacaggccuuaggccc

SEQ ID NO: 831764 - RNA, 19 nt, Artificial Sequence
  Description of Artificial Sequence: Synthetic oligonucleotide
  Sense strand starting at position 2870 of SEQ ID NO: 587964
cugccgucuccgugggaga

SEQ ID NO: 831765 - RNA, 19 nt, Artificial Sequence
  Description of Artificial Sequence: Synthetic oligonucleotide
  Antisense strand to SEQ ID NO: 831764
ucucccacggagacggcag

SEQ ID NO: 831766 - RNA, 19 nt, Artificial Sequence
  Description of Artificial Sequence: Synthetic oligonucleotide
  Sense strand starting at position 3038 of SEQ ID NO: 587964
aaggaauaagccuguacug

SEQ ID NO: 831767 - RNA, 19 nt, Artificial Sequence
  Description of Artificial Sequence: Synthetic oligonucleotide
  Antisense strand to SEQ ID NO: 831766
caguacaggcuuauuccuu

SEQ ID NO: 831768 - RNA, 19 nt, Artificial Sequence
  Description of Artificial Sequence: Synthetic oligonucleotide
  Sense strand starting at position 3040 of SEQ ID NO: 587964
ggaauaagccuguacugug

SEQ ID NO: 831769 - RNA, 19 nt, Artificial Sequence
  Description of Artificial Sequence: Synthetic oligonucleotide
  Antisense strand to SEQ ID NO: 831768
cacaguacaggcuuauucc

SEQ ID NO: 831770 - RNA, 19 nt, Artificial Sequence
  Description of Artificial Sequence: Synthetic oligonucleotide
  Sense strand starting at position 3050 of SEQ ID NO: 587964
uguacugugacugggucaa

SEQ ID NO: 831771 - RNA, 19 nt, Artificial Sequence
  Description of Artificial Sequence: Synthetic oligonucleotide
  Antisense strand to SEQ ID NO: 831770
uugacccagucacaguaca

SEQ ID NO: 831772 - RNA, 19 nt, Artificial Sequence
  Description of Artificial Sequence: Synthetic oligonucleotide
  Sense strand starting at position 3123 of SEQ ID NO: 587964
ggaugcuguugcuaagaag

SEQ ID NO: 831773 - RNA, 19 nt, Artificial Sequence
  Description of Artificial Sequence: Synthetic oligonucleotide
  Antisense strand to SEQ ID NO: 831772
cuucuuagcaacagcaucc

SEQ ID NO: 831774 - RNA, 19 nt, Artificial Sequence
  Description of Artificial Sequence: Synthetic oligonucleotide
  Sense strand starting at position 3153 of SEQ ID NO: 587964
gaggcuuuaaguggaagga

SEQ ID NO: 831775 - RNA, 19 nt, Artificial Sequence
  Description of Artificial Sequence: Synthetic oligonucleotide
  Antisense strand to SEQ ID NO: 831774
uccuuccacuuaaagccuc

SEQ ID NO: 831776 - RNA, 19 nt, Artificial Sequence
  Description of Artificial Sequence: Synthetic oligonucleotide
  Sense strand starting at position 3216 of SEQ ID NO: 587964
caggauugguuuccagaau

SEQ ID NO: 831777 - RNA, 19 nt, Artificial Sequence
  Description of Artificial Sequence: Synthetic oligonucleotide
  Antisense strand to SEQ ID NO: 831776
auucuggaaaccaauccug

SEQ ID NO: 831778 - RNA, 19 nt, Artificial Sequence
  Description of Artificial Sequence: Synthetic oligonucleotide
  Sense strand starting at position 3217 of SEQ ID NO: 587964
aggauugguuuccagaaug

SEQ ID NO: 831779 - RNA, 19 nt, Artificial Sequence
  Description of Artificial Sequence: Synthetic oligonucleotide
  Antisense strand to SEQ ID NO: 831778
cauucuggaaaccaauccu

SEQ ID NO: 831780 - RNA, 19 nt, Artificial Sequence
  Description of Artificial Sequence: Synthetic oligonucleotide
  Sense strand starting at position 3251 of SEQ ID NO: 587964
gcagaagaacuguguagcu

SEQ ID NO: 831781 - RNA, 19 nt, Artificial Sequence
  Description of Artificial Sequence: Synthetic oligonucleotide
  Antisense strand to SEQ ID NO: 831780
agcuacacaguucuucugc

SEQ ID NO: 831782 - RNA, 19 nt, Artificial Sequence
  Description of Artificial Sequence: Synthetic oligonucleotide
  Sense strand starting at position 3253 of SEQ ID NO: 587964
agaagaacuguguagcuaa

SEQ ID NO: 831783 - RNA, 19 nt, Artificial Sequence
  Description of Artificial Sequence: Synthetic oligonucleotide
  Antisense strand to SEQ ID NO: 831782
uuagcuacacaguucuucu

SEQ ID NO: 831784 - RNA, 19 nt, Artificial Sequence
  Description of Artificial Sequence: Synthetic oligonucleotide
  Sense strand starting at position 3256 of SEQ ID NO: 587964
agaacuguguagcuaaacu

SEQ ID NO: 831785 - RNA, 19 nt, Artificial Sequence
  Description of Artificial Sequence: Synthetic oligonucleotide
  Antisense strand to SEQ ID NO: 831784
aguuuagcuacacaguucu

SEQ ID NO: 831786 - RNA, 19 nt, Artificial Sequence
  Description of Artificial Sequence: Synthetic oligonucleotide
  Sense strand starting at position 3302 of SEQ ID NO: 587964
ggugcuucuuaaguugaca

SEQ ID NO: 831787 - RNA, 19 nt, Artificial Sequence
  Description of Artificial Sequence: Synthetic oligonucleotide
  Antisense strand to SEQ ID NO: 831786
ugucaacuuaagaagcacc

SEQ ID NO: 831788 - RNA, 19 nt, Artificial Sequence
  Description of Artificial Sequence: Synthetic oligonucleotide
  Sense strand starting at position 3532 of SEQ ID NO: 587964
ccgagcguccucugaggaa

SEQ ID NO: 831789 - RNA, 19 nt, Artificial Sequence
  Description of Artificial Sequence: Synthetic oligonucleotide
  Antisense strand to SEQ ID NO: 831788
uuccucagaggacgcucgg

SEQ ID NO: 831790 - RNA, 19 nt, Artificial Sequence
  Description of Artificial Sequence: Synthetic oligonucleotide
  Sense strand starting at position 3535 of SEQ ID NO: 587964
agcguccucugaggaagua

SEQ ID NO: 831791 - RNA, 19 nt, Artificial Sequence
  Description of Artificial Sequence: Synthetic oligonucleotide
  Antisense strand to SEQ ID NO: 831790
uacuuccucagaggacgcu

SEQ ID NO: 831792 - RNA, 19 nt, Artificial Sequence
  Description of Artificial Sequence: Synthetic oligonucleotide
  Sense strand starting at position 3635 of SEQ ID NO: 587964
cagugccaauccugugaga

SEQ ID NO: 831793 - RNA, 19 nt, Artificial Sequence
  Description of Artificial Sequence: Synthetic oligonucleotide
  Antisense strand to SEQ ID NO: 831792
ucucacaggauuggcacug

SEQ ID NO: 831794 - RNA, 19 nt, Artificial Sequence
  Description of Artificial Sequence: Synthetic oligonucleotide
  Sense strand starting at position 3637 of SEQ ID NO: 587964
gugccaauccugugagaca

SEQ ID NO: 831795 - RNA, 19 nt, Artificial Sequence
  Description of Artificial Sequence: Synthetic oligonucleotide
  Antisense strand to SEQ ID NO: 831794
ugucucacaggauuggcac

SEQ ID NO: 831796 - RNA, 19 nt, Artificial Sequence
  Description of Artificial Sequence: Synthetic oligonucleotide
  Sense strand starting at position 3821 of SEQ ID NO: 587964
ggcacacgugcuugaugau

SEQ ID NO: 831797 - RNA, 19 nt, Artificial Sequence
  Description of Artificial Sequence: Synthetic oligonucleotide
  Antisense strand to SEQ ID NO: 831796
aucaucaagcacgugugcc

SEQ ID NO: 831798 - RNA, 19 nt, Artificial Sequence
  Description of Artificial Sequence: Synthetic oligonucleotide
  Sense strand starting at position 3827 of SEQ ID NO: 587964
cgugcuugaugauggacaa

SEQ ID NO: 831799 - RNA, 19 nt, Artificial Sequence
  Description of Artificial Sequence: Synthetic oligonucleotide
  Antisense strand to SEQ ID NO: 831798
uuguccaucaucaagcacg

SEQ ID NO: 831800 - RNA, 19 nt, Artificial Sequence
  Description of Artificial Sequence: Synthetic oligonucleotide
  Sense strand starting at position 3828 of SEQ ID NO: 587964
gugcuugaugauggacaaa

SEQ ID NO: 831801 - RNA, 19 nt, Artificial Sequence
  Description of Artificial Sequence: Synthetic oligonucleotide
  Antisense strand to SEQ ID NO: 831800
uuuguccaucaucaagcac

SEQ ID NO: 831802 - RNA, 19 nt, Artificial Sequence
  Description of Artificial Sequence: Synthetic oligonucleotide
  Sense strand starting at position 3924 of SEQ ID NO: 587964
gggucaucauccugugcca

SEQ ID NO: 831803 - RNA, 19 nt, Artificial Sequence
  Description of Artificial Sequence: Synthetic oligonucleotide
  Antisense strand to SEQ ID NO: 831802
uggcacaggaugaugaccc

SEQ ID NO: 831804 - RNA, 19 nt, Artificial Sequence
  Description of Artificial Sequence: Synthetic oligonucleotide
  Sense strand starting at position 3926 of SEQ ID NO: 587964
gucaucauccugugccagu

SEQ ID NO: 831805 - RNA, 19 nt, Artificial Sequence
  Description of Artificial Sequence: Synthetic oligonucleotide
  Antisense strand to SEQ ID NO: 831804
acuggcacaggaugaugac

SEQ ID NO: 831806 - RNA, 19 nt, Artificial Sequence
  Description of Artificial Sequence: Synthetic oligonucleotide
  Sense strand starting at position 3933 of SEQ ID NO: 587964
uccugugccaguguguuaa

SEQ ID NO: 831807 - RNA, 19 nt, Artificial Sequence
  Description of Artificial Sequence: Synthetic oligonucleotide
  Antisense strand to SEQ ID NO: 831806
uuaacacacuggcacagga

SEQ ID NO: 831808 - RNA, 19 nt, Artificial Sequence
  Description of Artificial Sequence: Synthetic oligonucleotide
  Sense strand starting at position 3943 of SEQ ID NO: 587964
guguguuaaggugacauca

SEQ ID NO: 831809 - RNA, 19 nt, Artificial Sequence
  Description of Artificial Sequence: Synthetic oligonucleotide
  Antisense strand to SEQ ID NO: 831808
ugaugucaccuuaacacac

SEQ ID NO: 831810 - RNA, 19 nt, Artificial Sequence
  Description of Artificial Sequence: Synthetic oligonucleotide
  Sense strand starting at position 3953 of SEQ ID NO: 587964
gugacaucagcguguugga

SEQ ID NO: 831811 - RNA, 19 nt, Artificial Sequence
  Description of Artificial Sequence: Synthetic oligonucleotide
  Antisense strand to SEQ ID NO: 831810
uccaacacgcugaugucac

SEQ ID NO: 831812 - RNA, 19 nt, Artificial Sequence
  Description of Artificial Sequence: Synthetic oligonucleotide
  Sense strand starting at position 3973 of SEQ ID NO: 587964
gcugguggcagugaguuau

SEQ ID NO: 831813 - RNA, 19 nt, Artificial Sequence
  Description of Artificial Sequence: Synthetic oligonucleotide
  Antisense strand to SEQ ID NO: 831812
auaacucacugccaccagc

SEQ ID NO: 831814 - RNA, 19 nt, Artificial Sequence
  Description of Artificial Sequence: Synthetic oligonucleotide
  Sense strand starting at position 3977 of SEQ ID NO: 587964
guggcagugaguuaugcua

SEQ ID NO: 831815 - RNA, 19 nt, Artificial Sequence
  Description of Artificial Sequence: Synthetic oligonucleotide
  Antisense strand to SEQ ID NO: 831814
uagcauaacucacugccac

SEQ ID NO: 831816 - RNA, 19 nt, Artificial Sequence
  Description of Artificial Sequence: Synthetic oligonucleotide
  Sense strand starting at position 3979 of SEQ ID NO: 587964
ggcagugaguuaugcuaag

SEQ ID NO: 831817 - RNA, 19 nt, Artificial Sequence
  Description of Artificial Sequence: Synthetic oligonucleotide
  Antisense strand to SEQ ID NO: 831816
cuuagcauaacucacugcc

SEQ ID NO: 831818 - RNA, 19 nt, Artificial Sequence
  Description of Artificial Sequence: Synthetic oligonucleotide
  Sense strand starting at position 43 of SEQ ID NO: 587965
auuccucugugucugauuu

SEQ ID NO: 831819 - RNA, 19 nt, Artificial Sequence
  Description of Artificial Sequence: Synthetic oligonucleotide
  Antisense strand to SEQ ID NO: 831818
aaaucagacacagaggaau

SEQ ID NO: 831820 - RNA, 19 nt, Artificial Sequence
  Description of Artificial Sequence: Synthetic oligonucleotide
  Sense strand starting at position 44 of SEQ ID NO: 587965
uuccucugugucugauuua

SEQ ID NO: 831821 - RNA, 19 nt, Artificial Sequence
  Description of Artificial Sequence: Synthetic oligonucleotide
  Antisense strand to SEQ ID NO: 831820
uaaaucagacacagaggaa

SEQ ID NO: 831822 - RNA, 19 nt, Artificial Sequence
  Description of Artificial Sequence: Synthetic oligonucleotide
  Sense strand starting at position 47 of SEQ ID NO: 587965
cucugugucugauuuagua

SEQ ID NO: 831823 - RNA, 19 nt, Artificial Sequence
  Description of Artificial Sequence: Synthetic oligonucleotide
  Antisense strand to SEQ ID NO: 831822
uacuaaaucagacacagag

SEQ ID NO: 831824 - RNA, 19 nt, Artificial Sequence
  Description of Artificial Sequence: Synthetic oligonucleotide
  Sense strand starting at position 212 of SEQ ID NO: 587965
cagcuuuagggauauuacu

SEQ ID NO: 831825 - RNA, 19 nt, Artificial Sequence
  Description of Artificial Sequence: Synthetic oligonucleotide
  Antisense strand to SEQ ID NO: 831824
aguaauaucccuaaagcug

SEQ ID NO: 831826 - RNA, 19 nt, Artificial Sequence
  Description of Artificial Sequence: Synthetic oligonucleotide
  Sense strand starting at position 258 of SEQ ID NO: 587965
ccaagaagccacuguuaac

SEQ ID NO: 831827 - RNA, 19 nt, Artificial Sequence
  Description of Artificial Sequence: Synthetic oligonucleotide
  Antisense strand to SEQ ID NO: 831826
guuaacaguggcuucuugg

SEQ ID NO: 831828 - RNA, 19 nt, Artificial Sequence
  Description of Artificial Sequence: Synthetic oligonucleotide
  Sense strand starting at position 314 of SEQ ID NO: 587965
gacauauaccgguagacuc

SEQ ID NO: 831829 - RNA, 19 nt, Artificial Sequence
  Description of Artificial Sequence: Synthetic oligonucleotide
  Antisense strand to SEQ ID NO: 831828
gagucuaccgguauauguc

SEQ ID NO: 831830 - RNA, 19 nt, Artificial Sequence
  Description of Artificial Sequence: Synthetic oligonucleotide
  Sense strand starting at position 378 of SEQ ID NO: 587965
agaaaugucauuggcaaga

SEQ ID NO: 831831 - RNA, 19 nt, Artificial Sequence
  Description of Artificial Sequence: Synthetic oligonucleotide
  Antisense strand to SEQ ID NO: 831830
ucuugccaaugacauuucu

SEQ ID NO: 831832 - RNA, 19 nt, Artificial Sequence
  Description of Artificial Sequence: Synthetic oligonucleotide
  Sense strand starting at position 491 of SEQ ID NO: 587965
agguucaugccuugaagga

SEQ ID NO: 831833 - RNA, 19 nt, Artificial Sequence
  Description of Artificial Sequence: Synthetic oligonucleotide
  Antisense strand to SEQ ID NO: 831832
uccuucaaggcaugaaccu

SEQ ID NO: 831834 - RNA, 19 nt, Artificial Sequence
  Description of Artificial Sequence: Synthetic oligonucleotide
  Sense strand starting at position 492 of SEQ ID NO: 587965
gguucaugccuugaaggag

SEQ ID NO: 831835 - RNA, 19 nt, Artificial Sequence
  Description of Artificial Sequence: Synthetic oligonucleotide
  Antisense strand to SEQ ID NO: 831834
cuccuucaaggcaugaacc

SEQ ID NO: 831836 - RNA, 19 nt, Artificial Sequence
  Description of Artificial Sequence: Synthetic oligonucleotide
  Sense strand starting at position 658 of SEQ ID NO: 587965
acuggaaauuuccaguaac

SEQ ID NO: 831837 - RNA, 19 nt, Artificial Sequence
  Description of Artificial Sequence: Synthetic oligonucleotide
  Antisense strand to SEQ ID NO: 831836
guuacuggaaauuuccagu

SEQ ID NO: 831838 - RNA, 19 nt, Artificial Sequence
  Description of Artificial Sequence: Synthetic oligonucleotide
  Sense strand starting at position 744 of SEQ ID NO: 587965
auuccuauuucguuaucga

SEQ ID NO: 831839 - RNA, 19 nt, Artificial Sequence
  Description of Artificial Sequence: Synthetic oligonucleotide
  Antisense strand to SEQ ID NO: 831838
ucgauaacgaaauaggaau

SEQ ID NO: 831840 - RNA, 19 nt, Artificial Sequence
  Description of Artificial Sequence: Synthetic oligonucleotide
  Sense strand starting at position 820 of SEQ ID NO: 587965
cugggaugcaguugcauuu

SEQ ID NO: 831841 - RNA, 19 nt, Artificial Sequence
  Description of Artificial Sequence: Synthetic oligonucleotide
  Antisense strand to SEQ ID NO: 831840
aaaugcaacugcaucccag

SEQ ID NO: 831842 - RNA, 19 nt, Artificial Sequence
  Description of Artificial Sequence: Synthetic oligonucleotide
  Sense strand starting at position 827 of SEQ ID NO: 587965
gcaguugcauuuccaacau

SEQ ID NO: 831843 - RNA, 19 nt, Artificial Sequence
  Description of Artificial Sequence: Synthetic oligonucleotide
  Antisense strand to SEQ ID NO: 831842
auguuggaaaugcaacugc

SEQ ID NO: 831844 - RNA, 19 nt, Artificial Sequence
  Description of Artificial Sequence: Synthetic oligonucleotide
  Sense strand starting at position 897 of SEQ ID NO: 587965
guaagaucaugaucaucau

SEQ ID NO: 831845 - RNA, 19 nt, Artificial Sequence
  Description of Artificial Sequence: Synthetic oligonucleotide
  Antisense strand to SEQ ID NO: 831844
augaugaucaugaucuuac

SEQ ID NO: 831846 - RNA, 19 nt, Artificial Sequence
  Description of Artificial Sequence: Synthetic oligonucleotide
  Sense strand starting at position 926 of SEQ ID NO: 587965
uugcaaaucgcuguuugca

SEQ ID NO: 831847 - RNA, 19 nt, Artificial Sequence
  Description of Artificial Sequence: Synthetic oligonucleotide
  Antisense strand to SEQ ID NO: 831846
ugcaaacagcgauuugcaa

SEQ ID NO: 831848 - RNA, 19 nt, Artificial Sequence
  Description of Artificial Sequence: Synthetic oligonucleotide
  Sense strand starting at position 927 of SEQ ID NO: 587965
ugcaaaucgcuguuugcau

SEQ ID NO: 831849 - RNA, 19 nt, Artificial Sequence
  Description of Artificial Sequence: Synthetic oligonucleotide
  Antisense strand to SEQ ID NO: 831848
augcaaacagcgauuugca

SEQ ID NO: 831850 - RNA, 19 nt, Artificial Sequence
  Description of Artificial Sequence: Synthetic oligonucleotide
  Sense strand starting at position 938 of SEQ ID NO: 587965
guuugcaugcacguaauca

SEQ ID NO: 831851 - RNA, 19 nt, Artificial Sequence
  Description of Artificial Sequence: Synthetic oligonucleotide
  Antisense strand to SEQ ID NO: 831850
ugauuacgugcaugcaaac

SEQ ID NO: 831852 - RNA, 19 nt, Artificial Sequence
  Description of Artificial Sequence: Synthetic oligonucleotide
  Sense strand starting at position 1366 of SEQ ID NO: 587965
accgaaucgaccgacuaau

SEQ ID NO: 831853 - RNA, 19 nt, Artificial Sequence
  Description of Artificial Sequence: Synthetic oligonucleotide
  Antisense strand to SEQ ID NO: 831852
auuagucggucgauucggu

SEQ ID NO: 831854 - RNA, 19 nt, Artificial Sequence
  Description of Artificial Sequence: Synthetic oligonucleotide
  Sense strand starting at position 1726 of SEQ ID NO: 587965
gccauauucccagcucgca

SEQ ID NO: 831855 - RNA, 19 nt, Artificial Sequence
  Description of Artificial Sequence: Synthetic oligonucleotide
  Antisense strand to SEQ ID NO: 831854
ugcgagcugggaauauggc

SEQ ID NO: 831856 - RNA, 19 nt, Artificial Sequence
  Description of Artificial Sequence: Synthetic oligonucleotide
  Sense strand starting at position 2176 of SEQ ID NO: 587965
cgccgaaugcguucuccaa

SEQ ID NO: 831857 - RNA, 19 nt, Artificial Sequence
  Description of Artificial Sequence: Synthetic oligonucleotide
  Antisense strand to SEQ ID NO: 831856
uuggagaacgcauucggcg

SEQ ID NO: 831858 - RNA, 19 nt, Artificial Sequence
  Description of Artificial Sequence: Synthetic oligonucleotide
  Sense strand starting at position 2177 of SEQ ID NO: 587965
gccgaaugcguucuccaau

SEQ ID NO: 831859 - RNA, 19 nt, Artificial Sequence
  Description of Artificial Sequence: Synthetic oligonucleotide
  Antisense strand to SEQ ID NO: 831858
auuggagaacgcauucggc

SEQ ID NO: 831860 - RNA, 19 nt, Artificial Sequence
  Description of Artificial Sequence: Synthetic oligonucleotide
  Sense strand starting at position 3080 of SEQ ID NO: 587965
gaaagagacugagagauga

SEQ ID NO: 831861 - RNA, 19 nt, Artificial Sequence
  Description of Artificial Sequence: Synthetic oligonucleotide
  Antisense strand to SEQ ID NO: 831860
ucaucucucagucucuuuc

SEQ ID NO: 831862 - RNA, 19 nt, Artificial Sequence
  Description of Artificial Sequence: Synthetic oligonucleotide
  Sense strand starting at position 3139 of SEQ ID NO: 587965
ugguauccuugggucaaca

SEQ ID NO: 831863 - RNA, 19 nt, Artificial Sequence
  Description of Artificial Sequence: Synthetic oligonucleotide
  Antisense strand to SEQ ID NO: 831862
uguugacccaaggauacca

SEQ ID NO: 831864 - RNA, 19 nt, Artificial Sequence
  Description of Artificial Sequence: Synthetic oligonucleotide
  Sense strand starting at position 3141 of SEQ ID NO: 587965
guauccuugggucaacaca

SEQ ID NO: 831865 - RNA, 19 nt, Artificial Sequence
  Description of Artificial Sequence: Synthetic oligonucleotide
  Antisense strand to SEQ ID NO: 831864
uguguugacccaaggauac

SEQ ID NO: 831866 - RNA, 19 nt, Artificial Sequence
  Description of Artificial Sequence: Synthetic oligonucleotide
  Sense strand starting at position 3308 of SEQ ID NO: 587965
guguuaaauccggacagau

SEQ ID NO: 831867 - RNA, 19 nt, Artificial Sequence
  Description of Artificial Sequence: Synthetic oligonucleotide
  Antisense strand to SEQ ID NO: 831866
aucuguccggauuuaacac

SEQ ID NO: 831868 - RNA, 19 nt, Artificial Sequence
  Description of Artificial Sequence: Synthetic oligonucleotide
  Sense strand starting at position 3399 of SEQ ID NO: 587965
ugaaacugcccuugacuau

SEQ ID NO: 831869 - RNA, 19 nt, Artificial Sequence
  Description of Artificial Sequence: Synthetic oligonucleotide
  Antisense strand to SEQ ID NO: 831868
auagucaagggcaguuuca

SEQ ID NO: 831870 - RNA, 19 nt, Artificial Sequence
  Description of Artificial Sequence: Synthetic oligonucleotide
  Sense strand starting at position 3427 of SEQ ID NO: 587965
uuguauuggagaugcccaa

SEQ ID NO: 831871 - RNA, 19 nt, Artificial Sequence
  Description of Artificial Sequence: Synthetic oligonucleotide
  Antisense strand to SEQ ID NO: 831870
uugggcaucuccaauacaa

SEQ ID NO: 831872 - RNA, 19 nt, Artificial Sequence
  Description of Artificial Sequence: Synthetic oligonucleotide
  Sense strand starting at position 3475 of SEQ ID NO: 587965
ggcgucuuucuggaaacaa

SEQ ID NO: 831873 - RNA, 19 nt, Artificial Sequence
  Description of Artificial Sequence: Synthetic oligonucleotide
  Antisense strand to SEQ ID NO: 831872
uuguuuccagaaagacgcc

SEQ ID NO: 831874 - RNA, 19 nt, Artificial Sequence
  Description of Artificial Sequence: Synthetic oligonucleotide
  Sense strand starting at position 3683 of SEQ ID NO: 587965
uuggcugcuuuauuugaaa

SEQ ID NO: 831875 - RNA, 19 nt, Artificial Sequence
  Description of Artificial Sequence: Synthetic oligonucleotide
  Antisense strand to SEQ ID NO: 831874
uuucaaauaaagcagccaa

SEQ ID NO: 831876 - RNA, 19 nt, Artificial Sequence
  Description of Artificial Sequence: Synthetic oligonucleotide
  Sense strand starting at position 3796 of SEQ ID NO: 587965
ggugguauucuagaugguu

SEQ ID NO: 831877 - RNA, 19 nt, Artificial Sequence
  Description of Artificial Sequence: Synthetic oligonucleotide
  Antisense strand to SEQ ID NO: 831876
aaccaucuagaauaccacc

SEQ ID NO: 831878 - RNA, 19 nt, Artificial Sequence
  Description of Artificial Sequence: Synthetic oligonucleotide
  Sense strand starting at position 3798 of SEQ ID NO: 587965
ugguauucuagaugguuaa

SEQ ID NO: 831879 - RNA, 19 nt, Artificial Sequence
  Description of Artificial Sequence: Synthetic oligonucleotide
  Antisense strand to SEQ ID NO: 831878
uuaaccaucuagaauacca

SEQ ID NO: 831880 - RNA, 19 nt, Artificial Sequence
  Description of Artificial Sequence: Synthetic oligonucleotide
  Sense strand starting at position 3799 of SEQ ID NO: 587965
gguauucuagaugguuaac

SEQ ID NO: 831881 - RNA, 19 nt, Artificial Sequence
  Description of Artificial Sequence: Synthetic oligonucleotide
  Antisense strand to SEQ ID NO: 831880
guuaaccaucuagaauacc

SEQ ID NO: 831882 - RNA, 19 nt, Artificial Sequence
  Description of Artificial Sequence: Synthetic oligonucleotide
  Sense strand starting at position 3824 of SEQ ID NO: 587965
cgauguuuaaggugaagac

SEQ ID NO: 831883 - RNA, 19 nt, Artificial Sequence
  Description of Artificial Sequence: Synthetic oligonucleotide
  Antisense strand to SEQ ID NO: 831882
gucuucaccuuaaacaucg

SEQ ID NO: 831884 - RNA, 19 nt, Artificial Sequence
  Description of Artificial Sequence: Synthetic oligonucleotide
  Sense strand starting at position 3828 of SEQ ID NO: 587965
guuuaaggugaagacgauu

SEQ ID NO: 831885 - RNA, 19 nt, Artificial Sequence
  Description of Artificial Sequence: Synthetic oligonucleotide
  Antisense strand to SEQ ID NO: 831884
aaucgucuucaccuuaaac

SEQ ID NO: 831886 - RNA, 19 nt, Artificial Sequence
  Description of Artificial Sequence: Synthetic oligonucleotide
  Sense strand starting at position 3951 of SEQ ID NO: 587965
gcauuaggugaguggaaua

SEQ ID NO: 831887 - RNA, 19 nt, Artificial Sequence
  Description of Artificial Sequence: Synthetic oligonucleotide
  Antisense strand to SEQ ID NO: 831886
uauuccacucaccuaaugc

SEQ ID NO: 831888 - RNA, 19 nt, Artificial Sequence
  Description of Artificial Sequence: Synthetic oligonucleotide
  Sense strand starting at position 3962 of SEQ ID NO: 587965
guggaauauccugaugguc

SEQ ID NO: 831889 - RNA, 19 nt, Artificial Sequence
  Description of Artificial Sequence: Synthetic oligonucleotide
  Antisense strand to SEQ ID NO: 831888
gaccaucaggauauuccac

SEQ ID NO: 831890 - RNA, 19 nt, Artificial Sequence
  Description of Artificial Sequence: Synthetic oligonucleotide
  Sense strand starting at position 3965 of SEQ ID NO: 587965
gaauauccugauggucuuu

SEQ ID NO: 831891 - RNA, 19 nt, Artificial Sequence
  Description of Artificial Sequence: Synthetic oligonucleotide
  Antisense strand to SEQ ID NO: 831890
aaagaccaucaggauauuc

SEQ ID NO: 831892 - RNA, 19 nt, Artificial Sequence
  Description of Artificial Sequence: Synthetic oligonucleotide
  Sense strand starting at position 3967 of SEQ ID NO: 587965
auauccugauggucuuuaa

SEQ ID NO: 831893 - RNA, 19 nt, Artificial Sequence
  Description of Artificial Sequence: Synthetic oligonucleotide
  Antisense strand to SEQ ID NO: 831892
uuaaagaccaucaggauau

SEQ ID NO: 831894 - RNA, 19 nt, Artificial Sequence
  Description of Artificial Sequence: Synthetic oligonucleotide
  Sense strand starting at position 3970 of SEQ ID NO: 587965
uccugauggucuuuaacug

SEQ ID NO: 831895 - RNA, 19 nt, Artificial Sequence
  Description of Artificial Sequence: Synthetic oligonucleotide
  Antisense strand to SEQ ID NO: 831894
caguuaaagaccaucagga

SEQ ID NO: 831896 - RNA, 19 nt, Artificial Sequence
  Description of Artificial Sequence: Synthetic oligonucleotide
  Sense strand starting at position 3971 of SEQ ID NO: 587965
ccugauggucuuuaacugu

SEQ ID NO: 831897 - RNA, 19 nt, Artificial Sequence
  Description of Artificial Sequence: Synthetic oligonucleotide
  Antisense strand to SEQ ID NO: 831896
acaguuaaagaccaucagg

SEQ ID NO: 831898 - RNA, 19 nt, Artificial Sequence
  Description of Artificial Sequence: Synthetic oligonucleotide
  Sense strand starting at position 2 of SEQ ID NO: 587966
gauucugacuccuggauuc

SEQ ID NO: 831899 - RNA, 19 nt, Artificial Sequence
  Description of Artificial Sequence: Synthetic oligonucleotide
  Antisense strand to SEQ ID NO: 831898
gaauccaggagucagaauc

SEQ ID NO: 831900 - RNA, 19 nt, Artificial Sequence
  Description of Artificial Sequence: Synthetic oligonucleotide
  Sense strand starting at position 154 of SEQ ID NO: 587966
agcuguuccugucuucgaa

SEQ ID NO: 831901 - RNA, 19 nt, Artificial Sequence
  Description of Artificial Sequence: Synthetic oligonucleotide
  Antisense strand to SEQ ID NO: 831900
uucgaagacaggaacagcu

SEQ ID NO: 831902 - RNA, 19 nt, Artificial Sequence
  Description of Artificial Sequence: Synthetic oligonucleotide
  Sense strand starting at position 156 of SEQ ID NO: 587966
cuguuccugucuucgaaca

SEQ ID NO: 831903 - RNA, 19 nt, Artificial Sequence
  Description of Artificial Sequence: Synthetic oligonucleotide
  Antisense strand to SEQ ID NO: 831902
uguucgaagacaggaacag

SEQ ID NO: 831904 - RNA, 19 nt, Artificial Sequence
  Description of Artificial Sequence: Synthetic oligonucleotide
  Sense strand starting at position 158 of SEQ ID NO: 587966
guuccugucuucgaacaca

SEQ ID NO: 831905 - RNA, 19 nt, Artificial Sequence
  Description of Artificial Sequence: Synthetic oligonucleotide
  Antisense strand to SEQ ID NO: 831904
uguguucgaagacaggaac

SEQ ID NO: 831906 - RNA, 19 nt, Artificial Sequence
  Description of Artificial Sequence: Synthetic oligonucleotide
  Sense strand starting at position 283 of SEQ ID NO: 587966
aaaugauccguguggaagc

SEQ ID NO: 831907 - RNA, 19 nt, Artificial Sequence
  Description of Artificial Sequence: Synthetic oligonucleotide
  Antisense strand to SEQ ID NO: 831906
gcuuccacacggaucauuu

SEQ ID NO: 831908 - RNA, 19 nt, Artificial Sequence
  Description of Artificial Sequence: Synthetic oligonucleotide
  Sense strand starting at position 303 of SEQ ID NO: 587966
gaggcagcuuuauugaaag

SEQ ID NO: 831909 - RNA, 19 nt, Artificial Sequence
  Description of Artificial Sequence: Synthetic oligonucleotide
  Antisense strand to SEQ ID NO: 831908
cuuucaauaaagcugccuc

SEQ ID NO: 831910 - RNA, 19 nt, Artificial Sequence
  Description of Artificial Sequence: Synthetic oligonucleotide
  Sense strand starting at position 305 of SEQ ID NO: 587966
ggcagcuuuauugaaagga

SEQ ID NO: 831911 - RNA, 19 nt, Artificial Sequence
  Description of Artificial Sequence: Synthetic oligonucleotide
  Antisense strand to SEQ ID NO: 831910
uccuuucaauaaagcugcc

SEQ ID NO: 831912 - RNA, 19 nt, Artificial Sequence
  Description of Artificial Sequence: Synthetic oligonucleotide
  Sense strand starting at position 533 of SEQ ID NO: 587966
ccagguagucgaaguaguu

SEQ ID NO: 831913 - RNA, 19 nt, Artificial Sequence
  Description of Artificial Sequence: Synthetic oligonucleotide
  Antisense strand to SEQ ID NO: 831912
aacuacuucgacuaccugg

SEQ ID NO: 831914 - RNA, 19 nt, Artificial Sequence
  Description of Artificial Sequence: Synthetic oligonucleotide
  Sense strand starting at position 539 of SEQ ID NO: 587966
agucgaaguaguugauguu

SEQ ID NO: 831915 - RNA, 19 nt, Artificial Sequence
  Description of Artificial Sequence: Synthetic oligonucleotide
  Antisense strand to SEQ ID NO: 831914
aacaucaacuacuucgacu

SEQ ID NO: 831916 - RNA, 19 nt, Artificial Sequence
  Description of Artificial Sequence: Synthetic oligonucleotide
  Sense strand starting at position 545 of SEQ ID NO: 587966
aguaguugauguugaguuu

SEQ ID NO: 831917 - RNA, 19 nt, Artificial Sequence
  Description of Artificial Sequence: Synthetic oligonucleotide
  Antisense strand to SEQ ID NO: 831916
aaacucaacaucaacuacu

SEQ ID NO: 831918 - RNA, 19 nt, Artificial Sequence
  Description of Artificial Sequence: Synthetic oligonucleotide
  Sense strand starting at position 555 of SEQ ID NO: 587966
guugaguuuccgggcgaug

SEQ ID NO: 831919 - RNA, 19 nt, Artificial Sequence
  Description of Artificial Sequence: Synthetic oligonucleotide
  Antisense strand to SEQ ID NO: 831918
caucgcccggaaacucaac

SEQ ID NO: 831920 - RNA, 19 nt, Artificial Sequence
  Description of Artificial Sequence: Synthetic oligonucleotide
  Sense strand starting at position 556 of SEQ ID NO: 587966
uugaguuuccgggcgaugu

SEQ ID NO: 831921 - RNA, 19 nt, Artificial Sequence
  Description of Artificial Sequence: Synthetic oligonucleotide
  Antisense strand to SEQ ID NO: 831920
acaucgcccggaaacucaa

SEQ ID NO: 831922 - RNA, 19 nt, Artificial Sequence
  Description of Artificial Sequence: Synthetic oligonucleotide
  Sense strand starting at position 557 of SEQ ID NO: 587966
ugaguuuccgggcgaugua

SEQ ID NO: 831923 - RNA, 19 nt, Artificial Sequence
  Description of Artificial Sequence: Synthetic oligonucleotide
  Antisense strand to SEQ ID NO: 831922
uacaucgcccggaaacuca

SEQ ID NO: 831924 - RNA, 19 nt, Artificial Sequence
  Description of Artificial Sequence: Synthetic oligonucleotide
  Sense strand starting at position 558 of SEQ ID NO: 587966
gaguuuccgggcgauguaa

SEQ ID NO: 831925 - RNA, 19 nt, Artificial Sequence
  Description of Artificial Sequence: Synthetic oligonucleotide
  Antisense strand to SEQ ID NO: 831924
uuacaucgcccggaaacuc

SEQ ID NO: 831926 - RNA, 19 nt, Artificial Sequence
  Description of Artificial Sequence: Synthetic oligonucleotide
  Sense strand starting at position 570 of SEQ ID NO: 587966
gauguaacggcccaaguau

SEQ ID NO: 831927 - RNA, 19 nt, Artificial Sequence
  Description of Artificial Sequence: Synthetic oligonucleotide
  Antisense strand to SEQ ID NO: 831926
auacuugggccguuacauc

SEQ ID NO: 831928 - RNA, 19 nt, Artificial Sequence
  Description of Artificial Sequence: Synthetic oligonucleotide
  Sense strand starting at position 730 of SEQ ID NO: 587966
caccgaagaccguguugua

SEQ ID NO: 831929 - RNA, 19 nt, Artificial Sequence
  Description of Artificial Sequence: Synthetic oligonucleotide
  Antisense strand to SEQ ID NO: 831928
uacaacacggucuucggug

SEQ ID NO: 831930 - RNA, 19 nt, Artificial Sequence
  Description of Artificial Sequence: Synthetic oligonucleotide
  Sense strand starting at position 733 of SEQ ID NO: 587966
cgaagaccguguuguauuu

SEQ ID NO: 831931 - RNA, 19 nt, Artificial Sequence
  Description of Artificial Sequence: Synthetic oligonucleotide
  Antisense strand to SEQ ID NO: 831930
aaauacaacacggucuucg

SEQ ID NO: 831932 - RNA, 19 nt, Artificial Sequence
  Description of Artificial Sequence: Synthetic oligonucleotide
  Sense strand starting at position 791 of SEQ ID NO: 587966
aacagugaucggugucauc

SEQ ID NO: 831933 - RNA, 19 nt, Artificial Sequence
  Description of Artificial Sequence: Synthetic oligonucleotide
  Antisense strand to SEQ ID NO: 831932
gaugacaccgaucacuguu

SEQ ID NO: 831934 - RNA, 19 nt, Artificial Sequence
  Description of Artificial Sequence: Synthetic oligonucleotide
  Sense strand starting at position 793 of SEQ ID NO: 587966
cagugaucggugucaucgu

SEQ ID NO: 831935 - RNA, 19 nt, Artificial Sequence
  Description of Artificial Sequence: Synthetic oligonucleotide
  Antisense strand to SEQ ID NO: 831934
acgaugacaccgaucacug

SEQ ID NO: 831936 - RNA, 19 nt, Artificial Sequence
  Description of Artificial Sequence: Synthetic oligonucleotide
  Sense strand starting at position 800 of SEQ ID NO: 587966
cggugucaucguguccuga

SEQ ID NO: 831937 - RNA, 19 nt, Artificial Sequence
  Description of Artificial Sequence: Synthetic oligonucleotide
  Antisense strand to SEQ ID NO: 831936
ucaggacacgaugacaccg

SEQ ID NO: 831938 - RNA, 19 nt, Artificial Sequence
  Description of Artificial Sequence: Synthetic oligonucleotide
  Sense strand starting at position 1381 of SEQ ID NO: 587966
guaguauucgagcacgaag

SEQ ID NO: 831939 - RNA, 19 nt, Artificial Sequence
  Description of Artificial Sequence: Synthetic oligonucleotide
  Antisense strand to SEQ ID NO: 831938
cuucgugcucgaauacuac

SEQ ID NO: 831940 - RNA, 19 nt, Artificial Sequence
  Description of Artificial Sequence: Synthetic oligonucleotide
  Sense strand starting at position 1710 of SEQ ID NO: 587966
gguagaagcuauuguucuu

SEQ ID NO: 831941 - RNA, 19 nt, Artificial Sequence
  Description of Artificial Sequence: Synthetic oligonucleotide
  Antisense strand to SEQ ID NO: 831940
aagaacaauagcuucuacc

SEQ ID NO: 831942 - RNA, 19 nt, Artificial Sequence
  Description of Artificial Sequence: Synthetic oligonucleotide
  Sense strand starting at position 1758 of SEQ ID NO: 587966
aggugaguccuaggaacca

SEQ ID NO: 831943 - RNA, 19 nt, Artificial Sequence
  Description of Artificial Sequence: Synthetic oligonucleotide
  Antisense strand to SEQ ID NO: 831942
ugguuccuaggacucaccu

SEQ ID NO: 831944 - RNA, 19 nt, Artificial Sequence
  Description of Artificial Sequence: Synthetic oligonucleotide
  Sense strand starting at position 1904 of SEQ ID NO: 587966
cuccuaccucggugagcaa

SEQ ID NO: 831945 - RNA, 19 nt, Artificial Sequence
  Description of Artificial Sequence: Synthetic oligonucleotide
  Antisense strand to SEQ ID NO: 831944
uugcucaccgagguaggag

SEQ ID NO: 831946 - RNA, 19 nt, Artificial Sequence
  Description of Artificial Sequence: Synthetic oligonucleotide
  Sense strand starting at position 1917 of SEQ ID NO: 587966
gagcaaauucuccagggcu

SEQ ID NO: 831947 - RNA, 19 nt, Artificial Sequence
  Description of Artificial Sequence: Synthetic oligonucleotide
  Antisense strand to SEQ ID NO: 831946
agcccuggagaauuugcuc

SEQ ID NO: 831948 - RNA, 19 nt, Artificial Sequence
  Description of Artificial Sequence: Synthetic oligonucleotide
  Sense strand starting at position 2011 of SEQ ID NO: 587966
gcggauggguucuagaagu

SEQ ID NO: 831949 - RNA, 19 nt, Artificial Sequence
  Description of Artificial Sequence: Synthetic oligonucleotide
  Antisense strand to SEQ ID NO: 831948
acuucuagaacccauccgc

SEQ ID NO: 831950 - RNA, 19 nt, Artificial Sequence
  Description of Artificial Sequence: Synthetic oligonucleotide
  Sense strand starting at position 2101 of SEQ ID NO: 587966
ggcauuaacuucuuggcca

SEQ ID NO: 831951 - RNA, 19 nt, Artificial Sequence
  Description of Artificial Sequence: Synthetic oligonucleotide
  Antisense strand to SEQ ID NO: 831950
uggccaagaaguuaaugcc

SEQ ID NO: 831952 - RNA, 19 nt, Artificial Sequence
  Description of Artificial Sequence: Synthetic oligonucleotide
  Sense strand starting at position 2194 of SEQ ID NO: 587966
gccugagcuggagagaaau

SEQ ID NO: 831953 - RNA, 19 nt, Artificial Sequence
  Description of Artificial Sequence: Synthetic oligonucleotide
  Antisense strand to SEQ ID NO: 831952
auuucucuccagcucaggc

SEQ ID NO: 831954 - RNA, 19 nt, Artificial Sequence
  Description of Artificial Sequence: Synthetic oligonucleotide
  Sense strand starting at position 2440 of SEQ ID NO: 587966
guggcuccaucagguauaa

SEQ ID NO: 831955 - RNA, 19 nt, Artificial Sequence
  Description of Artificial Sequence: Synthetic oligonucleotide
  Antisense strand to SEQ ID NO: 831954
uuauaccugauggagccac

SEQ ID NO: 831956 - RNA, 19 nt, Artificial Sequence
  Description of Artificial Sequence: Synthetic oligonucleotide
  Sense strand starting at position 2452 of SEQ ID NO: 587966
gguauaaccuguugcccaa

SEQ ID NO: 831957 - RNA, 19 nt, Artificial Sequence
  Description of Artificial Sequence: Synthetic oligonucleotide
  Antisense strand to SEQ ID NO: 831956
uugggcaacagguuauacc

SEQ ID NO: 831958 - RNA, 19 nt, Artificial Sequence
  Description of Artificial Sequence: Synthetic oligonucleotide
  Sense strand starting at position 2528 of SEQ ID NO: 587966
gcucaaauaucugaaauug

SEQ ID NO: 831959 - RNA, 19 nt, Artificial Sequence
  Description of Artificial Sequence: Synthetic oligonucleotide
  Antisense strand to SEQ ID NO: 831958
caauuucagauauuugagc

SEQ ID NO: 831960 - RNA, 19 nt, Artificial Sequence
  Description of Artificial Sequence: Synthetic oligonucleotide
  Sense strand starting at position 2774 of SEQ ID NO: 587966
uugagcuguugccucagaa

SEQ ID NO: 831961 - RNA, 19 nt, Artificial Sequence
  Description of Artificial Sequence: Synthetic oligonucleotide
  Antisense strand to SEQ ID NO: 831960
uucugaggcaacagcucaa

SEQ ID NO: 831962 - RNA, 19 nt, Artificial Sequence
  Description of Artificial Sequence: Synthetic oligonucleotide
  Sense strand starting at position 2908 of SEQ ID NO: 587966
gggcuuggacaguaugcau

SEQ ID NO: 831963 - RNA, 19 nt, Artificial Sequence
  Description of Artificial Sequence: Synthetic oligonucleotide
  Antisense strand to SEQ ID NO: 831962
augcauacuguccaagccc

SEQ ID NO: 831964 - RNA, 19 nt, Artificial Sequence
  Description of Artificial Sequence: Synthetic oligonucleotide
  Sense strand starting at position 3173 of SEQ ID NO: 587966
ccaguucucgcaguguaug

SEQ ID NO: 831965 - RNA, 19 nt, Artificial Sequence
  Description of Artificial Sequence: Synthetic oligonucleotide
  Antisense strand to SEQ ID NO: 831964
cauacacugcgagaacugg

SEQ ID NO: 831966 - RNA, 19 nt, Artificial Sequence
  Description of Artificial Sequence: Synthetic oligonucleotide
  Sense strand starting at position 3192 of SEQ ID NO: 587966
gcaccacuucugggucaaa

SEQ ID NO: 831967 - RNA, 19 nt, Artificial Sequence
  Description of Artificial Sequence: Synthetic oligonucleotide
  Antisense strand to SEQ ID NO: 831966
uuugacccagaaguggugc

SEQ ID NO: 831968 - RNA, 19 nt, Artificial Sequence
  Description of Artificial Sequence: Synthetic oligonucleotide
  Sense strand starting at position 3239 of SEQ ID NO: 587966
gccggucugacgugccaua

SEQ ID NO: 831969 - RNA, 19 nt, Artificial Sequence
  Description of Artificial Sequence: Synthetic oligonucleotide
  Antisense strand to SEQ ID NO: 831968
uauggcacgucagaccggc

SEQ ID NO: 831970 - RNA, 19 nt, Artificial Sequence
  Description of Artificial Sequence: Synthetic oligonucleotide
  Sense strand starting at position 3440 of SEQ ID NO: 587966
uugggagagccguggagua

SEQ ID NO: 831971 - RNA, 19 nt, Artificial Sequence
  Description of Artificial Sequence: Synthetic oligonucleotide
  Antisense strand to SEQ ID NO: 831970
uacuccacggcucucccaa

SEQ ID NO: 831972 - RNA, 19 nt, Artificial Sequence
  Description of Artificial Sequence: Synthetic oligonucleotide
  Sense strand starting at position 3468 of SEQ ID NO: 587966
ggaccucguugcucacaaa

SEQ ID NO: 831973 - RNA, 19 nt, Artificial Sequence
  Description of Artificial Sequence: Synthetic oligonucleotide
  Antisense strand to SEQ ID NO: 831972
uuugugagcaacgaggucc

SEQ ID NO: 831974 - RNA, 19 nt, Artificial Sequence
  Description of Artificial Sequence: Synthetic oligonucleotide
  Sense strand starting at position 3719 of SEQ ID NO: 587966
gaaugcuauuacgguugau

SEQ ID NO: 831975 - RNA, 19 nt, Artificial Sequence
  Description of Artificial Sequence: Synthetic oligonucleotide
  Antisense strand to SEQ ID NO: 831974
aucaaccguaauagcauuc

SEQ ID NO: 831976 - RNA, 19 nt, Artificial Sequence
  Description of Artificial Sequence: Synthetic oligonucleotide
  Sense strand starting at position 3774 of SEQ ID NO: 587966
gcagcugcccugcagagau

SEQ ID NO: 831977 - RNA, 19 nt, Artificial Sequence
  Description of Artificial Sequence: Synthetic oligonucleotide
  Antisense strand to SEQ ID NO: 831976
aucucugcagggcagcugc

SEQ ID NO: 831978 - RNA, 19 nt, Artificial Sequence
  Description of Artificial Sequence: Synthetic oligonucleotide
  Sense strand starting at position 52 of SEQ ID NO: 587967
caccgaagaccguguugua

SEQ ID NO: 831979 - RNA, 19 nt, Artificial Sequence
  Description of Artificial Sequence: Synthetic oligonucleotide
  Antisense strand to SEQ ID NO: 831978
uacaacacggucuucggug

SEQ ID NO: 831980 - RNA, 19 nt, Artificial Sequence
  Description of Artificial Sequence: Synthetic oligonucleotide
  Sense strand starting at position 55 of SEQ ID NO: 587967
cgaagaccguguuguauuu

SEQ ID NO: 831981 - RNA, 19 nt, Artificial Sequence
  Description of Artificial Sequence: Synthetic oligonucleotide
  Antisense strand to SEQ ID NO: 831980
aaauacaacacggucuucg

SEQ ID NO: 831982 - RNA, 19 nt, Artificial Sequence
  Description of Artificial Sequence: Synthetic oligonucleotide
  Sense strand starting at position 113 of SEQ ID NO: 587967
aacagugaucggugucauc

SEQ ID NO: 831983 - RNA, 19 nt, Artificial Sequence
  Description of Artificial Sequence: Synthetic oligonucleotide
  Antisense strand to SEQ ID NO: 831982
gaugacaccgaucacuguu

SEQ ID NO: 831984 - RNA, 19 nt, Artificial Sequence
  Description of Artificial Sequence: Synthetic oligonucleotide
  Sense strand starting at position 115 of SEQ ID NO: 587967
cagugaucggugucaucgu

SEQ ID NO: 831985 - RNA, 19 nt, Artificial Sequence
  Description of Artificial Sequence: Synthetic oligonucleotide
  Antisense strand to SEQ ID NO: 831984
acgaugacaccgaucacug

SEQ ID NO: 831986 - RNA, 19 nt, Artificial Sequence
  Description of Artificial Sequence: Synthetic oligonucleotide
  Sense strand starting at position 122 of SEQ ID NO: 587967
cggugucaucguguccuga

SEQ ID NO: 831987 - RNA, 19 nt, Artificial Sequence
  Description of Artificial Sequence: Synthetic oligonucleotide
  Antisense strand to SEQ ID NO: 831986
ucaggacacgaugacaccg

SEQ ID NO: 831988 - RNA, 19 nt, Artificial Sequence
  Description of Artificial Sequence: Synthetic oligonucleotide
  Sense strand starting at position 703 of SEQ ID NO: 587967
guaguauucgagcacgaag

SEQ ID NO: 831989 - RNA, 19 nt, Artificial Sequence
  Description of Artificial Sequence: Synthetic oligonucleotide
  Antisense strand to SEQ ID NO: 831988
cuucgugcucgaauacuac

SEQ ID NO: 831990 - RNA, 19 nt, Artificial Sequence
  Description of Artificial Sequence: Synthetic oligonucleotide
  Sense strand starting at position 1032 of SEQ ID NO: 587967
gguagaagcuauuguucuu

SEQ ID NO: 831991 - RNA, 19 nt, Artificial Sequence
  Description of Artificial Sequence: Synthetic oligonucleotide
  Antisense strand to SEQ ID NO: 831990
aagaacaauagcuucuacc

SEQ ID NO: 831992 - RNA, 19 nt, Artificial Sequence
  Description of Artificial Sequence: Synthetic oligonucleotide
  Sense strand starting at position 1080 of SEQ ID NO: 587967
aggugaguccuaggaacca

SEQ ID NO: 831993 - RNA, 19 nt, Artificial Sequence
  Description of Artificial Sequence: Synthetic oligonucleotide
  Antisense strand to SEQ ID NO: 831992
ugguuccuaggacucaccu

SEQ ID NO: 831994 - RNA, 19 nt, Artificial Sequence
  Description of Artificial Sequence: Synthetic oligonucleotide
  Sense strand starting at position 1226 of SEQ ID NO: 587967
cuccuaccucggugagcaa

SEQ ID NO: 831995 - RNA, 19 nt, Artificial Sequence
  Description of Artificial Sequence: Synthetic oligonucleotide
  Antisense strand to SEQ ID NO: 831994
uugcucaccgagguaggag

SEQ ID NO: 831996 - RNA, 19 nt, Artificial Sequence
  Description of Artificial Sequence: Synthetic oligonucleotide
  Sense strand starting at position 1239 of SEQ ID NO: 587967
gagcaaauucuccagggcu

SEQ ID NO: 831997 - RNA, 19 nt, Artificial Sequence
  Description of Artificial Sequence: Synthetic oligonucleotide
  Antisense strand to SEQ ID NO: 831996
agcccuggagaauuugcuc

SEQ ID NO: 831998 - RNA, 19 nt, Artificial Sequence
  Description of Artificial Sequence: Synthetic oligonucleotide
  Sense strand starting at position 1333 of SEQ ID NO: 587967
gcggauggguucuagaagu

SEQ ID NO: 831999 - RNA, 19 nt, Artificial Sequence
  Description of Artificial Sequence: Synthetic oligonucleotide
  Antisense strand to SEQ ID NO: 831998
acuucuagaacccauccgc

SEQ ID NO: 832000 - RNA, 19 nt, Artificial Sequence
  Description of Artificial Sequence: Synthetic oligonucleotide
  Sense strand starting at position 1423 of SEQ ID NO: 587967
ggcauuaacuucuuggcca

SEQ ID NO: 832001 - RNA, 19 nt, Artificial Sequence
  Description of Artificial Sequence: Synthetic oligonucleotide
  Antisense strand to SEQ ID NO: 832000
uggccaagaaguuaaugcc

SEQ ID NO: 832002 - RNA, 19 nt, Artificial Sequence
  Description of Artificial Sequence: Synthetic oligonucleotide
  Sense strand starting at position 1516 of SEQ ID NO: 587967
gccugagcuggagagaaau

SEQ ID NO: 832003 - RNA, 19 nt, Artificial Sequence
  Description of Artificial Sequence: Synthetic oligonucleotide
  Antisense strand to SEQ ID NO: 832002
auuucucuccagcucaggc

SEQ ID NO: 832004 - RNA, 19 nt, Artificial Sequence
  Description of Artificial Sequence: Synthetic oligonucleotide
  Sense strand starting at position 1762 of SEQ ID NO: 587967
guggcuccaucagguauaa

SEQ ID NO: 832005 - RNA, 19 nt, Artificial Sequence
  Description of Artificial Sequence: Synthetic oligonucleotide
  Antisense strand to SEQ ID NO: 832004
uuauaccugauggagccac

SEQ ID NO: 832006 - RNA, 19 nt, Artificial Sequence
  Description of Artificial Sequence: Synthetic oligonucleotide
  Sense strand starting at position 1774 of SEQ ID NO: 587967
gguauaaccuguugcccaa

SEQ ID NO: 832007 - RNA, 19 nt, Artificial Sequence
  Description of Artificial Sequence: Synthetic oligonucleotide
  Antisense strand to SEQ ID NO: 832006
uugggcaacagguuauacc

SEQ ID NO: 832008 - RNA, 19 nt, Artificial Sequence
  Description of Artificial Sequence: Synthetic oligonucleotide
  Sense strand starting at position 1850 of SEQ ID NO: 587967
gcucaaauaucugaaauug

SEQ ID NO: 832009 - RNA, 19 nt, Artificial Sequence
  Description of Artificial Sequence: Synthetic oligonucleotide
  Antisense strand to SEQ ID NO: 832008
caauuucagauauuugagc

SEQ ID NO: 832010 - RNA, 19 nt, Artificial Sequence
  Description of Artificial Sequence: Synthetic oligonucleotide
  Sense strand starting at position 2096 of SEQ ID NO: 587967
uugagcuguugccucagaa

SEQ ID NO: 832011 - RNA, 19 nt, Artificial Sequence
  Description of Artificial Sequence: Synthetic oligonucleotide
  Antisense strand to SEQ ID NO: 832010
uucugaggcaacagcucaa

SEQ ID NO: 832012 - RNA, 19 nt, Artificial Sequence
  Description of Artificial Sequence: Synthetic oligonucleotide
  Sense strand starting at position 2230 of SEQ ID NO: 587967
gggcuuggacaguaugcau

SEQ ID NO: 832013 - RNA, 19 nt, Artificial Sequence
  Description of Artificial Sequence: Synthetic oligonucleotide
  Antisense strand to SEQ ID NO: 832012
augcauacuguccaagccc

SEQ ID NO: 832014 - RNA, 19 nt, Artificial Sequence
  Description of Artificial Sequence: Synthetic oligonucleotide
  Sense strand starting at position 2495 of SEQ ID NO: 587967
ccaguucucgcaguguaug

SEQ ID NO: 832015 - RNA, 19 nt, Artificial Sequence
  Description of Artificial Sequence: Synthetic oligonucleotide
  Antisense strand to SEQ ID NO: 832014
cauacacugcgagaacugg

SEQ ID NO: 832016 - RNA, 19 nt, Artificial Sequence
  Description of Artificial Sequence: Synthetic oligonucleotide
  Sense strand starting at position 2514 of SEQ ID NO: 587967
gcaccacuucugggucaaa

SEQ ID NO: 832017 - RNA, 19 nt, Artificial Sequence
  Description of Artificial Sequence: Synthetic oligonucleotide
  Antisense strand to SEQ ID NO: 832016
uuugacccagaaguggugc

SEQ ID NO: 832018 - RNA, 19 nt, Artificial Sequence
  Description of Artificial Sequence: Synthetic oligonucleotide
  Sense strand starting at position 2561 of SEQ ID NO: 587967
gccggucugacgugccaua

SEQ ID NO: 832019 - RNA, 19 nt, Artificial Sequence
  Description of Artificial Sequence: Synthetic oligonucleotide
  Antisense strand to SEQ ID NO: 832018
uauggcacgucagaccggc

SEQ ID NO: 832020 - RNA, 19 nt, Artificial Sequence
  Description of Artificial Sequence: Synthetic oligonucleotide
  Sense strand starting at position 2762 of SEQ ID NO: 587967
uugggagagccguggagua

SEQ ID NO: 832021 - RNA, 19 nt, Artificial Sequence
  Description of Artificial Sequence: Synthetic oligonucleotide
  Antisense strand to SEQ ID NO: 832020
uacuccacggcucucccaa

SEQ ID NO: 832022 - RNA, 19 nt, Artificial Sequence
  Description of Artificial Sequence: Synthetic oligonucleotide
  Sense strand starting at position 2790 of SEQ ID NO: 587967
ggaccucguugcucacaaa

SEQ ID NO: 832023 - RNA, 19 nt, Artificial Sequence
  Description of Artificial Sequence: Synthetic oligonucleotide
  Antisense strand to SEQ ID NO: 832022
uuugugagcaacgaggucc

SEQ ID NO: 832024 - RNA, 19 nt, Artificial Sequence
  Description of Artificial Sequence: Synthetic oligonucleotide
  Sense strand starting at position 2793 of SEQ ID NO: 587967
ccucguugcucacaaaguu

SEQ ID NO: 832025 - RNA, 19 nt, Artificial Sequence
  Description of Artificial Sequence: Synthetic oligonucleotide
  Antisense strand to SEQ ID NO: 832024
aacuuugugagcaacgagg

SEQ ID NO: 832026 - RNA, 19 nt, Artificial Sequence
  Description of Artificial Sequence: Synthetic oligonucleotide
  Sense strand starting at position 3041 of SEQ ID NO: 587967
gaaugcuauuacgguugau

SEQ ID NO: 832027 - RNA, 19 nt, Artificial Sequence
  Description of Artificial Sequence: Synthetic oligonucleotide
  Antisense strand to SEQ ID NO: 832026
aucaaccguaauagcauuc

SEQ ID NO: 832028 - RNA, 19 nt, Artificial Sequence
  Description of Artificial Sequence: Synthetic oligonucleotide
  Sense strand starting at position 3096 of SEQ ID NO: 587967
gcagcugcccugcagagau

SEQ ID NO: 832029 - RNA, 19 nt, Artificial Sequence
  Description of Artificial Sequence: Synthetic oligonucleotide
  Antisense strand to SEQ ID NO: 832028
aucucugcagggcagcugc

SEQ ID NO: 832030 - RNA, 19 nt, Artificial Sequence
  Description of Artificial Sequence: Synthetic oligonucleotide
  Sense strand starting at position 3465 of SEQ ID NO: 587967
gccggagagcuugaggaaa

SEQ ID NO: 832031 - RNA, 19 nt, Artificial Sequence
  Description of Artificial Sequence: Synthetic oligonucleotide
  Antisense strand to SEQ ID NO: 832030
uuuccucaagcucuccggc

SEQ ID NO: 832032 - RNA, 19 nt, Artificial Sequence
  Description of Artificial Sequence: Synthetic oligonucleotide
  Sense strand starting at position 3467 of SEQ ID NO: 587967
cggagagcuugaggaaagu

SEQ ID NO: 832033 - RNA, 19 nt, Artificial Sequence
  Description of Artificial Sequence: Synthetic oligonucleotide
  Antisense strand to SEQ ID NO: 832032
acuuuccucaagcucuccg

SEQ ID NO: 832034 - RNA, 19 nt, Artificial Sequence
  Description of Artificial Sequence: Synthetic oligonucleotide
  Sense strand starting at position 3757 of SEQ ID NO: 587967
ugacccacuuccuagagua

SEQ ID NO: 832035 - RNA, 19 nt, Artificial Sequence
  Description of Artificial Sequence: Synthetic oligonucleotide
  Antisense strand to SEQ ID NO: 832034
uacucuaggaaguggguca

SEQ ID NO: 832036 - RNA, 19 nt, Artificial Sequence
  Description of Artificial Sequence: Synthetic oligonucleotide
  Sense strand starting at position 3759 of SEQ ID NO: 587967
acccacuuccuagaguacu

SEQ ID NO: 832037 - RNA, 19 nt, Artificial Sequence
  Description of Artificial Sequence: Synthetic oligonucleotide
  Antisense strand to SEQ ID NO: 832036
aguacucuaggaagugggu

SEQ ID NO: 832038 - RNA, 19 nt, Artificial Sequence
  Description of Artificial Sequence: Synthetic oligonucleotide
  Sense strand starting at position 3846 of SEQ ID NO: 587967
accugagacuuccagugga

SEQ ID NO: 832039 - RNA, 19 nt, Artificial Sequence
  Description of Artificial Sequence: Synthetic oligonucleotide
  Antisense strand to SEQ ID NO: 832038
uccacuggaagucucaggu

SEQ ID NO: 832040 - RNA, 19 nt, Artificial Sequence
  Description of Artificial Sequence: Synthetic oligonucleotide
  Sense strand starting at position 3849 of SEQ ID NO: 587967
ugagacuuccaguggauga

SEQ ID NO: 832041 - RNA, 19 nt, Artificial Sequence
  Description of Artificial Sequence: Synthetic oligonucleotide
  Antisense strand to SEQ ID NO: 832040
ucauccacuggaagucuca

SEQ ID NO: 832042 - RNA, 19 nt, Artificial Sequence
  Description of Artificial Sequence: Synthetic oligonucleotide
  Sense strand starting at position 3850 of SEQ ID NO: 587967
gagacuuccaguggaugag

SEQ ID NO: 832043 - RNA, 19 nt, Artificial Sequence
  Description of Artificial Sequence: Synthetic oligonucleotide
  Antisense strand to SEQ ID NO: 832042
cucauccacuggaagucuc

SEQ ID NO: 832044 - RNA, 19 nt, Artificial Sequence
  Description of Artificial Sequence: Synthetic oligonucleotide
  Sense strand starting at position 3873 of SEQ ID NO: 587967
agccucuggagcugugaaa

SEQ ID NO: 832045 - RNA, 19 nt, Artificial Sequence
  Description of Artificial Sequence: Synthetic oligonucleotide
  Antisense strand to SEQ ID NO: 832044
uuucacagcuccagaggcu

SEQ ID NO: 832046 - RNA, 19 nt, Artificial Sequence
  Description of Artificial Sequence: Synthetic oligonucleotide
  Sense strand starting at position 3908 of SEQ ID NO: 587967
gaggcagagcugcacuaau

SEQ ID NO: 832047 - RNA, 19 nt, Artificial Sequence
  Description of Artificial Sequence: Synthetic oligonucleotide
  Antisense strand to SEQ ID NO: 832046
auuagugcagcucugccuc

SEQ ID NO: 832048 - RNA, 19 nt, Artificial Sequence
  Description of Artificial Sequence: Synthetic oligonucleotide
  Sense strand starting at position 28 of SEQ ID NO: 587968
uaaagaugucuauaagcug

SEQ ID NO: 832049 - RNA, 19 nt, Artificial Sequence
  Description of Artificial Sequence: Synthetic oligonucleotide
  Antisense strand to SEQ ID NO: 832048
cagcuuauagacaucuuua

SEQ ID NO: 832050 - RNA, 19 nt, Artificial Sequence
  Description of Artificial Sequence: Synthetic oligonucleotide
  Sense strand starting at position 209 of SEQ ID NO: 587968
aguguuuaagucuauucua

SEQ ID NO: 832051 - RNA, 19 nt, Artificial Sequence
  Description of Artificial Sequence: Synthetic oligonucleotide
  Antisense strand to SEQ ID NO: 832050
uagaauagacuuaaacacu

SEQ ID NO: 832052 - RNA, 19 nt, Artificial Sequence
  Description of Artificial Sequence: Synthetic oligonucleotide
  Sense strand starting at position 212 of SEQ ID NO: 587968
guuuaagucuauucuacau

SEQ ID NO: 832053 - RNA, 19 nt, Artificial Sequence
  Description of Artificial Sequence: Synthetic oligonucleotide
  Antisense strand to SEQ ID NO: 832052
auguagaauagacuuaaac

SEQ ID NO: 832054 - RNA, 19 nt, Artificial Sequence
  Description of Artificial Sequence: Synthetic oligonucleotide
  Sense strand starting at position 235 of SEQ ID NO: 587968
cgauuuagauaacaguaaa

SEQ ID NO: 832055 - RNA, 19 nt, Artificial Sequence
  Description of Artificial Sequence: Synthetic oligonucleotide
  Antisense strand to SEQ ID NO: 832054
uuuacuguuaucuaaaucg

SEQ ID NO: 832056 - RNA, 19 nt, Artificial Sequence
  Description of Artificial Sequence: Synthetic oligonucleotide
  Sense strand starting at position 269 of SEQ ID NO: 587968
uggcccauuagaggaaauu

SEQ ID NO: 832057 - RNA, 19 nt, Artificial Sequence
  Description of Artificial Sequence: Synthetic oligonucleotide
  Antisense strand to SEQ ID NO: 832056
aauuuccucuaaugggcca

SEQ ID NO: 832058 - RNA, 19 nt, Artificial Sequence
  Description of Artificial Sequence: Synthetic oligonucleotide
  Sense strand starting at position 278 of SEQ ID NO: 587968
agaggaaauucucuugccu

SEQ ID NO: 832059 - RNA, 19 nt, Artificial Sequence
  Description of Artificial Sequence: Synthetic oligonucleotide
  Antisense strand to SEQ ID NO: 832058
aggcaagagaauuuccucu

SEQ ID NO: 832060 - RNA, 19 nt, Artificial Sequence
  Description of Artificial Sequence: Synthetic oligonucleotide
  Sense strand starting at position 294 of SEQ ID NO: 587968
ccugguguccucugauaca

SEQ ID NO: 832061 - RNA, 19 nt, Artificial Sequence
  Description of Artificial Sequence: Synthetic oligonucleotide
  Antisense strand to SEQ ID NO: 832060
uguaucagaggacaccagg

SEQ ID NO: 832062 - RNA, 19 nt, Artificial Sequence
  Description of Artificial Sequence: Synthetic oligonucleotide
  Sense strand starting at position 314 of SEQ ID NO: 587968
guuuaaugcugaccaacaa

SEQ ID NO: 832063 - RNA, 19 nt, Artificial Sequence
  Description of Artificial Sequence: Synthetic oligonucleotide
  Antisense strand to SEQ ID NO: 832062
uuguuggucagcauuaaac

SEQ ID NO: 832064 - RNA, 19 nt, Artificial Sequence
  Description of Artificial Sequence: Synthetic oligonucleotide
  Sense strand starting at position 439 of SEQ ID NO: 587968
ucuucuuguuaaguaugga

SEQ ID NO: 832065 - RNA, 19 nt, Artificial Sequence
  Description of Artificial Sequence: Synthetic oligonucleotide
  Antisense strand to SEQ ID NO: 832064
uccauacuuaacaagaaga

SEQ ID NO: 832066 - RNA, 19 nt, Artificial Sequence
  Description of Artificial Sequence: Synthetic oligonucleotide
  Sense strand starting at position 442 of SEQ ID NO: 587968
ucuuguuaaguauggauua

SEQ ID NO: 832067 - RNA, 19 nt, Artificial Sequence
  Description of Artificial Sequence: Synthetic oligonucleotide
  Antisense strand to SEQ ID NO: 832066
uaauccauacuuaacaaga

SEQ ID NO: 832068 - RNA, 19 nt, Artificial Sequence
  Description of Artificial Sequence: Synthetic oligonucleotide
  Sense strand starting at position 543 of SEQ ID NO: 587968
gcucuaauuccagacuuga

SEQ ID NO: 832069 - RNA, 19 nt, Artificial Sequence
  Description of Artificial Sequence: Synthetic oligonucleotide
  Antisense strand to SEQ ID NO: 832068
ucaagucuggaauuagagc

SEQ ID NO: 832070 - RNA, 19 nt, Artificial Sequence
  Description of Artificial Sequence: Synthetic oligonucleotide
  Sense strand starting at position 841 of SEQ ID NO: 587968
aaucgaauaguaugguaaa

SEQ ID NO: 832071 - RNA, 19 nt, Artificial Sequence
  Description of Artificial Sequence: Synthetic oligonucleotide
  Antisense strand to SEQ ID NO: 832070
uuuaccauacuauucgauu

SEQ ID NO: 832072 - RNA, 19 nt, Artificial Sequence
  Description of Artificial Sequence: Synthetic oligonucleotide
  Sense strand starting at position 977 of SEQ ID NO: 587968
ucacccagauauguguuaa

SEQ ID NO: 832073 - RNA, 19 nt, Artificial Sequence
  Description of Artificial Sequence: Synthetic oligonucleotide
  Antisense strand to SEQ ID NO: 832072
uuaacacauaucuggguga

SEQ ID NO: 832074 - RNA, 19 nt, Artificial Sequence
  Description of Artificial Sequence: Synthetic oligonucleotide
  Sense strand starting at position 1188 of SEQ ID NO: 587968
guagcagaagcauauuguu

SEQ ID NO: 832075 - RNA, 19 nt, Artificial Sequence
  Description of Artificial Sequence: Synthetic oligonucleotide
  Antisense strand to SEQ ID NO: 832074
aacaauaugcuucugcuac

SEQ ID NO: 832076 - RNA, 19 nt, Artificial Sequence
  Description of Artificial Sequence: Synthetic oligonucleotide
  Sense strand starting at position 1249 of SEQ ID NO: 587968
acuccugguuucucagcaa

SEQ ID NO: 832077 - RNA, 19 nt, Artificial Sequence
  Description of Artificial Sequence: Synthetic oligonucleotide
  Antisense strand to SEQ ID NO: 832076
uugcugagaaaccaggagu

SEQ ID NO: 832078 - RNA, 19 nt, Artificial Sequence
  Description of Artificial Sequence: Synthetic oligonucleotide
  Sense strand starting at position 1253 of SEQ ID NO: 587968
cugguuucucagcaacgga

SEQ ID NO: 832079 - RNA, 19 nt, Artificial Sequence
  Description of Artificial Sequence: Synthetic oligonucleotide
  Antisense strand to SEQ ID NO: 832078
uccguugcugagaaaccag

SEQ ID NO: 832080 - RNA, 19 nt, Artificial Sequence
  Description of Artificial Sequence: Synthetic oligonucleotide
  Sense strand starting at position 1344 of SEQ ID NO: 587968
cuaagcagagcuugggaaa

SEQ ID NO: 832081 - RNA, 19 nt, Artificial Sequence
  Description of Artificial Sequence: Synthetic oligonucleotide
  Antisense strand to SEQ ID NO: 832080
uuucccaagcucugcuuag

SEQ ID NO: 832082 - RNA, 19 nt, Artificial Sequence
  Description of Artificial Sequence: Synthetic oligonucleotide
  Sense strand starting at position 1375 of SEQ ID NO: 587968
acuguagcccuggguaaga

SEQ ID NO: 832083 - RNA, 19 nt, Artificial Sequence
  Description of Artificial Sequence: Synthetic oligonucleotide
  Antisense strand to SEQ ID NO: 832082
ucuuacccagggcuacagu

SEQ ID NO: 832084 - RNA, 19 nt, Artificial Sequence
  Description of Artificial Sequence: Synthetic oligonucleotide
  Sense strand starting at position 1384 of SEQ ID NO: 587968
cuggguaagaaguggugaa

SEQ ID NO: 832085 - RNA, 19 nt, Artificial Sequence
  Description of Artificial Sequence: Synthetic oligonucleotide
  Antisense strand to SEQ ID NO: 832084
uucaccacuucuuacccag

SEQ ID NO: 832086 - RNA, 19 nt, Artificial Sequence
  Description of Artificial Sequence: Synthetic oligonucleotide
  Sense strand starting at position 1385 of SEQ ID NO: 587968
uggguaagaaguggugaaa

SEQ ID NO: 832087 - RNA, 19 nt, Artificial Sequence
  Description of Artificial Sequence: Synthetic oligonucleotide
  Antisense strand to SEQ ID NO: 832086
uuucaccacuucuuaccca

SEQ ID NO: 832088 - RNA, 19 nt, Artificial Sequence
  Description of Artificial Sequence: Synthetic oligonucleotide
  Sense strand starting at position 1675 of SEQ ID NO: 587968
ggcugcuuucuugcaagua

SEQ ID NO: 832089 - RNA, 19 nt, Artificial Sequence
  Description of Artificial Sequence: Synthetic oligonucleotide
  Antisense strand to SEQ ID NO: 832088
uacuugcaagaaagcagcc

SEQ ID NO: 832090 - RNA, 19 nt, Artificial Sequence
  Description of Artificial Sequence: Synthetic oligonucleotide
  Sense strand starting at position 2175 of SEQ ID NO: 587968
ggacaaguccuuugcucua

SEQ ID NO: 832091 - RNA, 19 nt, Artificial Sequence
  Description of Artificial Sequence: Synthetic oligonucleotide
  Antisense strand to SEQ ID NO: 832090
uagagcaaaggacuugucc

SEQ ID NO: 832092 - RNA, 19 nt, Artificial Sequence
  Description of Artificial Sequence: Synthetic oligonucleotide
  Sense strand starting at position 2180 of SEQ ID NO: 587968
aguccuuugcucuaggaaa

SEQ ID NO: 832093 - RNA, 19 nt, Artificial Sequence
  Description of Artificial Sequence: Synthetic oligonucleotide
  Antisense strand to SEQ ID NO: 832092
uuuccuagagcaaaggacu

SEQ ID NO: 832094 - RNA, 19 nt, Artificial Sequence
  Description of Artificial Sequence: Synthetic oligonucleotide
  Sense strand starting at position 2182 of SEQ ID NO: 587968
uccuuugcucuaggaaaga

SEQ ID NO: 832095 - RNA, 19 nt, Artificial Sequence
  Description of Artificial Sequence: Synthetic oligonucleotide
  Antisense strand to SEQ ID NO: 832094
ucuuuccuagagcaaagga

SEQ ID NO: 832096 - RNA, 19 nt, Artificial Sequence
  Description of Artificial Sequence: Synthetic oligonucleotide
  Sense strand starting at position 2233 of SEQ ID NO: 587968
agaggaaaggccugugacu

SEQ ID NO: 832097 - RNA, 19 nt, Artificial Sequence
  Description of Artificial Sequence: Synthetic oligonucleotide
  Antisense strand to SEQ ID NO: 832096
agucacaggccuuuccucu

SEQ ID NO: 832098 - RNA, 19 nt, Artificial Sequence
  Description of Artificial Sequence: Synthetic oligonucleotide
  Sense strand starting at position 2240 of SEQ ID NO: 587968
aggccugugacuugauuac

SEQ ID NO: 832099 - RNA, 19 nt, Artificial Sequence
  Description of Artificial Sequence: Synthetic oligonucleotide
  Antisense strand to SEQ ID NO: 832098
guaaucaagucacaggccu

SEQ ID NO: 832100 - RNA, 19 nt, Artificial Sequence
  Description of Artificial Sequence: Synthetic oligonucleotide
  Sense strand starting at position 2315 of SEQ ID NO: 587968
gacugacucuuugcuguca

SEQ ID NO: 832101 - RNA, 19 nt, Artificial Sequence
  Description of Artificial Sequence: Synthetic oligonucleotide
  Antisense strand to SEQ ID NO: 832100
ugacagcaaagagucaguc

SEQ ID NO: 832102 - RNA, 19 nt, Artificial Sequence
  Description of Artificial Sequence: Synthetic oligonucleotide
  Sense strand starting at position 2434 of SEQ ID NO: 587968
gaaaguagaucuuugcgga

SEQ ID NO: 832103 - RNA, 19 nt, Artificial Sequence
  Description of Artificial Sequence: Synthetic oligonucleotide
  Antisense strand to SEQ ID NO: 832102
uccgcaaagaucuacuuuc

SEQ ID NO: 832104 - RNA, 19 nt, Artificial Sequence
  Description of Artificial Sequence: Synthetic oligonucleotide
  Sense strand starting at position 2435 of SEQ ID NO: 587968
aaaguagaucuuugcggaa

SEQ ID NO: 832105 - RNA, 19 nt, Artificial Sequence
  Description of Artificial Sequence: Synthetic oligonucleotide
  Antisense strand to SEQ ID NO: 832104
uuccgcaaagaucuacuuu

SEQ ID NO: 832106 - RNA, 19 nt, Artificial Sequence
  Description of Artificial Sequence: Synthetic oligonucleotide
  Sense strand starting at position 2439 of SEQ ID NO: 587968
uagaucuuugcggaagugu

SEQ ID NO: 832107 - RNA, 19 nt, Artificial Sequence
  Description of Artificial Sequence: Synthetic oligonucleotide
  Antisense strand to SEQ ID NO: 832106
acacuuccgcaaagaucua

SEQ ID NO: 832108 - RNA, 19 nt, Artificial Sequence
  Description of Artificial Sequence: Synthetic oligonucleotide
  Sense strand starting at position 2620 of SEQ ID NO: 587968
gccuauugucccugacaca

SEQ ID NO: 832109 - RNA, 19 nt, Artificial Sequence
  Description of Artificial Sequence: Synthetic oligonucleotide
  Antisense strand to SEQ ID NO: 832108
ugugucagggacaauaggc

SEQ ID NO: 832110 - RNA, 19 nt, Artificial Sequence
  Description of Artificial Sequence: Synthetic oligonucleotide
  Sense strand starting at position 2621 of SEQ ID NO: 587968
ccuauugucccugacacau

SEQ ID NO: 832111 - RNA, 19 nt, Artificial Sequence
  Description of Artificial Sequence: Synthetic oligonucleotide
  Antisense strand to SEQ ID NO: 832110
augugucagggacaauagg

SEQ ID NO: 832112 - RNA, 19 nt, Artificial Sequence
  Description of Artificial Sequence: Synthetic oligonucleotide
  Sense strand starting at position 2768 of SEQ ID NO: 587968
uucuuugcuuggucaaaca

SEQ ID NO: 832113 - RNA, 19 nt, Artificial Sequence
  Description of Artificial Sequence: Synthetic oligonucleotide
  Antisense strand to SEQ ID NO: 832112
uguuugaccaagcaaagaa

SEQ ID NO: 832114 - RNA, 19 nt, Artificial Sequence
  Description of Artificial Sequence: Synthetic oligonucleotide
  Sense strand starting at position 2777 of SEQ ID NO: 587968
uggucaaacaaguaagguu

SEQ ID NO: 832115 - RNA, 19 nt, Artificial Sequence
  Description of Artificial Sequence: Synthetic oligonucleotide
  Antisense strand to SEQ ID NO: 832114
aaccuuacuuguuugacca

SEQ ID NO: 832116 - RNA, 19 nt, Artificial Sequence
  Description of Artificial Sequence: Synthetic oligonucleotide
  Sense strand starting at position 2785 of SEQ ID NO: 587968
caaguaagguuucugaauc

SEQ ID NO: 832117 - RNA, 19 nt, Artificial Sequence
  Description of Artificial Sequence: Synthetic oligonucleotide
  Antisense strand to SEQ ID NO: 832116
gauucagaaaccuuacuug

SEQ ID NO: 832118 - RNA, 19 nt, Artificial Sequence
  Description of Artificial Sequence: Synthetic oligonucleotide
  Sense strand starting at position 3053 of SEQ ID NO: 587968
augcuccuaggcuauaaau

SEQ ID NO: 832119 - RNA, 19 nt, Artificial Sequence
  Description of Artificial Sequence: Synthetic oligonucleotide
  Antisense strand to SEQ ID NO: 832118
auuuauagccuaggagcau

SEQ ID NO: 832120 - RNA, 19 nt, Artificial Sequence
  Description of Artificial Sequence: Synthetic oligonucleotide
  Sense strand starting at position 3270 of SEQ ID NO: 587968
uuuauuuggugguuuguca

SEQ ID NO: 832121 - RNA, 19 nt, Artificial Sequence
  Description of Artificial Sequence: Synthetic oligonucleotide
  Antisense strand to SEQ ID NO: 832120
ugacaaaccaccaaauaaa

SEQ ID NO: 832122 - RNA, 19 nt, Artificial Sequence
  Description of Artificial Sequence: Synthetic oligonucleotide
  Sense strand starting at position 3789 of SEQ ID NO: 587968
ccucaagaugccugagaga

SEQ ID NO: 832123 - RNA, 19 nt, Artificial Sequence
  Description of Artificial Sequence: Synthetic oligonucleotide
  Antisense strand to SEQ ID NO: 832122
ucucucaggcaucuugagg

SEQ ID NO: 832124 - RNA, 19 nt, Artificial Sequence
  Description of Artificial Sequence: Synthetic oligonucleotide
  Sense strand starting at position 3864 of SEQ ID NO: 587968
gcagaaguuagacauacga

SEQ ID NO: 832125 - RNA, 19 nt, Artificial Sequence
  Description of Artificial Sequence: Synthetic oligonucleotide
  Antisense strand to SEQ ID NO: 832124
ucguaugucuaacuucugc

SEQ ID NO: 832126 - RNA, 19 nt, Artificial Sequence
  Description of Artificial Sequence: Synthetic oligonucleotide
  Sense strand starting at position 3961 of SEQ ID NO: 587968
uuaggcaucagcuggaaau

SEQ ID NO: 832127 - RNA, 19 nt, Artificial Sequence
  Description of Artificial Sequence: Synthetic oligonucleotide
  Antisense strand to SEQ ID NO: 832126
auuuccagcugaugccuaa

SEQ ID NO: 832128 - RNA, 19 nt, Artificial Sequence
  Description of Artificial Sequence: Synthetic oligonucleotide
  Sense strand starting at position 58 of SEQ ID NO: 587969
agaggcagauugguuagua

SEQ ID NO: 832129 - RNA, 19 nt, Artificial Sequence
  Description of Artificial Sequence: Synthetic oligonucleotide
  Antisense strand to SEQ ID NO: 832128
uacuaaccaaucugccucu

SEQ ID NO: 832130 - RNA, 19 nt, Artificial Sequence
  Description of Artificial Sequence: Synthetic oligonucleotide
  Sense strand starting at position 59 of SEQ ID NO: 587969
gaggcagauugguuaguau

SEQ ID NO: 832131 - RNA, 19 nt, Artificial Sequence
  Description of Artificial Sequence: Synthetic oligonucleotide
  Antisense strand to SEQ ID NO: 832130
auacuaaccaaucugccuc

SEQ ID NO: 832132 - RNA, 19 nt, Artificial Sequence
  Description of Artificial Sequence: Synthetic oligonucleotide
  Sense strand starting at position 68 of SEQ ID NO: 587969
ugguuaguauuauuccuaa

SEQ ID NO: 832133 - RNA, 19 nt, Artificial Sequence
  Description of Artificial Sequence: Synthetic oligonucleotide
  Antisense strand to SEQ ID NO: 832132
uuaggaauaauacuaacca

SEQ ID NO: 832134 - RNA, 19 nt, Artificial Sequence
  Description of Artificial Sequence: Synthetic oligonucleotide
  Sense strand starting at position 220 of SEQ ID NO: 587969
uuucuuuaagucuagcuga

SEQ ID NO: 832135 - RNA, 19 nt, Artificial Sequence
  Description of Artificial Sequence: Synthetic oligonucleotide
  Antisense strand to SEQ ID NO: 832134
ucagcuagacuuaaagaaa

SEQ ID NO: 832136 - RNA, 19 nt, Artificial Sequence
  Description of Artificial Sequence: Synthetic oligonucleotide
  Sense strand starting at position 239 of SEQ ID NO: 587969
aggguuaaguuccugggaa

SEQ ID NO: 832137 - RNA, 19 nt, Artificial Sequence
  Description of Artificial Sequence: Synthetic oligonucleotide
  Antisense strand to SEQ ID NO: 832136
uucccaggaacuuaacccu

SEQ ID NO: 832138 - RNA, 19 nt, Artificial Sequence
  Description of Artificial Sequence: Synthetic oligonucleotide
  Sense strand starting at position 241 of SEQ ID NO: 587969
gguuaaguuccugggaauc

SEQ ID NO: 832139 - RNA, 19 nt, Artificial Sequence
  Description of Artificial Sequence: Synthetic oligonucleotide
  Antisense strand to SEQ ID NO: 832138
gauucccaggaacuuaacc

SEQ ID NO: 832140 - RNA, 19 nt, Artificial Sequence
  Description of Artificial Sequence: Synthetic oligonucleotide
  Sense strand starting at position 261 of SEQ ID NO: 587969
acauaaacucuugguaguu

SEQ ID NO: 832141 - RNA, 19 nt, Artificial Sequence
  Description of Artificial Sequence: Synthetic oligonucleotide
  Antisense strand to SEQ ID NO: 832140
aacuaccaagaguuuaugu

SEQ ID NO: 832142 - RNA, 19 nt, Artificial Sequence
  Description of Artificial Sequence: Synthetic oligonucleotide
  Sense strand starting at position 266 of SEQ ID NO: 587969
aacucuugguaguuuagaa

SEQ ID NO: 832143 - RNA, 19 nt, Artificial Sequence
  Description of Artificial Sequence: Synthetic oligonucleotide
  Antisense strand to SEQ ID NO: 832142
uucuaaacuaccaagaguu

SEQ ID NO: 832144 - RNA, 19 nt, Artificial Sequence
  Description of Artificial Sequence: Synthetic oligonucleotide
  Sense strand starting at position 276 of SEQ ID NO: 587969
aguuuagaaucacugaauu

SEQ ID NO: 832145 - RNA, 19 nt, Artificial Sequence
  Description of Artificial Sequence: Synthetic oligonucleotide
  Antisense strand to SEQ ID NO: 832144
aauucagugauucuaaacu

SEQ ID NO: 832146 - RNA, 19 nt, Artificial Sequence
  Description of Artificial Sequence: Synthetic oligonucleotide
  Sense strand starting at position 298 of SEQ ID NO: 587969
ggaacaugguaaucuacuu

SEQ ID NO: 832147 - RNA, 19 nt, Artificial Sequence
  Description of Artificial Sequence: Synthetic oligonucleotide
  Antisense strand to SEQ ID NO: 832146
aaguagauuaccauguucc

SEQ ID NO: 832148 - RNA, 19 nt, Artificial Sequence
  Description of Artificial Sequence: Synthetic oligonucleotide
  Sense strand starting at position 361 of SEQ ID NO: 587969
gggucaguaacuugaucca

SEQ ID NO: 832149 - RNA, 19 nt, Artificial Sequence
  Description of Artificial Sequence: Synthetic oligonucleotide
  Antisense strand to SEQ ID NO: 832148
uggaucaaguuacugaccc

SEQ ID NO: 832150 - RNA, 19 nt, Artificial Sequence
  Description of Artificial Sequence: Synthetic oligonucleotide
  Sense strand starting at position 364 of SEQ ID NO: 587969
ucaguaacuugauccaaag

SEQ ID NO: 832151 - RNA, 19 nt, Artificial Sequence
  Description of Artificial Sequence: Synthetic oligonucleotide
  Antisense strand to SEQ ID NO: 832150
cuuuggaucaaguuacuga

SEQ ID NO: 832152 - RNA, 19 nt, Artificial Sequence
  Description of Artificial Sequence: Synthetic oligonucleotide
  Sense strand starting at position 382 of SEQ ID NO: 587969
gucacaaaguuuguaaaga

SEQ ID NO: 832153 - RNA, 19 nt, Artificial Sequence
  Description of Artificial Sequence: Synthetic oligonucleotide
  Antisense strand to SEQ ID NO: 832152
ucuuuacaaacuuugugac

SEQ ID NO: 832154 - RNA, 19 nt, Artificial Sequence
  Description of Artificial Sequence: Synthetic oligonucleotide
  Sense strand starting at position 455 of SEQ ID NO: 587969
aaaucaguugcauggagau

SEQ ID NO: 832155 - RNA, 19 nt, Artificial Sequence
  Description of Artificial Sequence: Synthetic oligonucleotide
  Antisense strand to SEQ ID NO: 832154
aucuccaugcaacugauuu

SEQ ID NO: 832156 - RNA, 19 nt, Artificial Sequence
  Description of Artificial Sequence: Synthetic oligonucleotide
  Sense strand starting at position 485 of SEQ ID NO: 587969
auagaaaccugaguaagca

SEQ ID NO: 832157 - RNA, 19 nt, Artificial Sequence
  Description of Artificial Sequence: Synthetic oligonucleotide
  Antisense strand to SEQ ID NO: 832156
ugcuuacucagguuucuau

SEQ ID NO: 832158 - RNA, 19 nt, Artificial Sequence
  Description of Artificial Sequence: Synthetic oligonucleotide
  Sense strand starting at position 893 of SEQ ID NO: 587969
aguauuaaagaugggcauu

SEQ ID NO: 832159 - RNA, 19 nt, Artificial Sequence
  Description of Artificial Sequence: Synthetic oligonucleotide
  Antisense strand to SEQ ID NO: 832158
aaugcccaucuuuaauacu

SEQ ID NO: 832160 - RNA, 19 nt, Artificial Sequence
  Description of Artificial Sequence: Synthetic oligonucleotide
  Sense strand starting at position 1016 of SEQ ID NO: 587969
cgaggcuccgcguuaggua

SEQ ID NO: 832161 - RNA, 19 nt, Artificial Sequence
  Description of Artificial Sequence: Synthetic oligonucleotide
  Antisense strand to SEQ ID NO: 832160
uaccuaacgcggagccucg

SEQ ID NO: 832162 - RNA, 19 nt, Artificial Sequence
  Description of Artificial Sequence: Synthetic oligonucleotide
  Sense strand starting at position 1039 of SEQ ID NO: 587969
uuauguguaggacagacuu

SEQ ID NO: 832163 - RNA, 19 nt, Artificial Sequence
  Description of Artificial Sequence: Synthetic oligonucleotide
  Antisense strand to SEQ ID NO: 832162
aagucuguccuacacauaa

SEQ ID NO: 832164 - RNA, 19 nt, Artificial Sequence
  Description of Artificial Sequence: Synthetic oligonucleotide
  Sense strand starting at position 1068 of SEQ ID NO: 587969
gauggaaaguaaucguaac

SEQ ID NO: 832165 - RNA, 19 nt, Artificial Sequence
  Description of Artificial Sequence: Synthetic oligonucleotide
  Antisense strand to SEQ ID NO: 832164
guuacgauuacuuuccauc

SEQ ID NO: 832166 - RNA, 19 nt, Artificial Sequence
  Description of Artificial Sequence: Synthetic oligonucleotide
  Sense strand starting at position 1069 of SEQ ID NO: 587969
auggaaaguaaucguaacu

SEQ ID NO: 832167 - RNA, 19 nt, Artificial Sequence
  Description of Artificial Sequence: Synthetic oligonucleotide
  Antisense strand to SEQ ID NO: 832166
aguuacgauuacuuuccau

SEQ ID NO: 832168 - RNA, 19 nt, Artificial Sequence
  Description of Artificial Sequence: Synthetic oligonucleotide
  Sense strand starting at position 1113 of SEQ ID NO: 587969
ugguauuuaucugauagag

SEQ ID NO: 832169 - RNA, 19 nt, Artificial Sequence
  Description of Artificial Sequence: Synthetic oligonucleotide
  Antisense strand to SEQ ID NO: 832168
cucuaucagauaaauacca

SEQ ID NO: 832170 - RNA, 19 nt, Artificial Sequence
  Description of Artificial Sequence: Synthetic oligonucleotide
  Sense strand starting at position 1295 of SEQ ID NO: 587969
gaauaaccgcgcucagcuu

SEQ ID NO: 832171 - RNA, 19 nt, Artificial Sequence
  Description of Artificial Sequence: Synthetic oligonucleotide
  Antisense strand to SEQ ID NO: 832170
aagcugagcgcgguuauuc

SEQ ID NO: 832172 - RNA, 19 nt, Artificial Sequence
  Description of Artificial Sequence: Synthetic oligonucleotide
  Sense strand starting at position 2611 of SEQ ID NO: 587969
cugugaguggcgcucacau

SEQ ID NO: 832173 - RNA, 19 nt, Artificial Sequence
  Description of Artificial Sequence: Synthetic oligonucleotide
  Antisense strand to SEQ ID NO: 832172
augugagcgccacucacag

SEQ ID NO: 832174 - RNA, 19 nt, Artificial Sequence
  Description of Artificial Sequence: Synthetic oligonucleotide
  Sense strand starting at position 2652 of SEQ ID NO: 587969
gggaaagaguucuuguguu

SEQ ID NO: 832175 - RNA, 19 nt, Artificial Sequence
  Description of Artificial Sequence: Synthetic oligonucleotide
  Antisense strand to SEQ ID NO: 832174
aacacaagaacucuuuccc

SEQ ID NO: 832176 - RNA, 19 nt, Artificial Sequence
  Description of Artificial Sequence: Synthetic oligonucleotide
  Sense strand starting at position 2664 of SEQ ID NO: 587969
uuguguucugaggaggguu

SEQ ID NO: 832177 - RNA, 19 nt, Artificial Sequence
  Description of Artificial Sequence: Synthetic oligonucleotide
  Antisense strand to SEQ ID NO: 832176
aacccuccucagaacacaa

SEQ ID NO: 832178 - RNA, 19 nt, Artificial Sequence
  Description of Artificial Sequence: Synthetic oligonucleotide
  Sense strand starting at position 2698 of SEQ ID NO: 587969
acccuauucuugucucaga

SEQ ID NO: 832179 - RNA, 19 nt, Artificial Sequence
  Description of Artificial Sequence: Synthetic oligonucleotide
  Antisense strand to SEQ ID NO: 832178
ucugagacaagaauagggu

SEQ ID NO: 832180 - RNA, 19 nt, Artificial Sequence
  Description of Artificial Sequence: Synthetic oligonucleotide
  Sense strand starting at position 2756 of SEQ ID NO: 587969
auggcuugguccuuuagga

SEQ ID NO: 832181 - RNA, 19 nt, Artificial Sequence
  Description of Artificial Sequence: Synthetic oligonucleotide
  Antisense strand to SEQ ID NO: 832180
uccuaaaggaccaagccau

SEQ ID NO: 832182 - RNA, 19 nt, Artificial Sequence
  Description of Artificial Sequence: Synthetic oligonucleotide
  Sense strand starting at position 2922 of SEQ ID NO: 587969
gagggcagcuucucaaacu

SEQ ID NO: 832183 - RNA, 19 nt, Artificial Sequence
  Description of Artificial Sequence: Synthetic oligonucleotide
  Antisense strand to SEQ ID NO: 832182
aguuugagaagcugcccuc

SEQ ID NO: 832184 - RNA, 19 nt, Artificial Sequence
  Description of Artificial Sequence: Synthetic oligonucleotide
  Sense strand starting at position 3186 of SEQ ID NO: 587969
guagauagaugaucaacuu

SEQ ID NO: 832185 - RNA, 19 nt, Artificial Sequence
  Description of Artificial Sequence: Synthetic oligonucleotide
  Antisense strand to SEQ ID NO: 832184
aaguugaucaucuaucuac

SEQ ID NO: 832186 - RNA, 19 nt, Artificial Sequence
  Description of Artificial Sequence: Synthetic oligonucleotide
  Sense strand starting at position 3215 of SEQ ID NO: 587969
gcaaaucacguuuaguaac

SEQ ID NO: 832187 - RNA, 19 nt, Artificial Sequence
  Description of Artificial Sequence: Synthetic oligonucleotide
  Antisense strand to SEQ ID NO: 832186
guuacuaaacgugauuugc

SEQ ID NO: 832188 - RNA, 19 nt, Artificial Sequence
  Description of Artificial Sequence: Synthetic oligonucleotide
  Sense strand starting at position 3225 of SEQ ID NO: 587969
uuuaguaacuggucaaaca

SEQ ID NO: 832189 - RNA, 19 nt, Artificial Sequence
  Description of Artificial Sequence: Synthetic oligonucleotide
  Antisense strand to SEQ ID NO: 832188
uguuugaccaguuacuaaa

SEQ ID NO: 832190 - RNA, 19 nt, Artificial Sequence
  Description of Artificial Sequence: Synthetic oligonucleotide
  Sense strand starting at position 3350 of SEQ ID NO: 587969
ggugauuagcacuaugccu

SEQ ID NO: 832191 - RNA, 19 nt, Artificial Sequence
  Description of Artificial Sequence: Synthetic oligonucleotide
  Antisense strand to SEQ ID NO: 832190
aggcauagugcuaaucacc

SEQ ID NO: 832192 - RNA, 19 nt, Artificial Sequence
  Description of Artificial Sequence: Synthetic oligonucleotide
  Sense strand starting at position 3355 of SEQ ID NO: 587969
uuagcacuaugccugaaau

SEQ ID NO: 832193 - RNA, 19 nt, Artificial Sequence
  Description of Artificial Sequence: Synthetic oligonucleotide
  Antisense strand to SEQ ID NO: 832192
auuucaggcauagugcuaa

SEQ ID NO: 832194 - RNA, 19 nt, Artificial Sequence
  Description of Artificial Sequence: Synthetic oligonucleotide
  Sense strand starting at position 3357 of SEQ ID NO: 587969
agcacuaugccugaaauca

SEQ ID NO: 832195 - RNA, 19 nt, Artificial Sequence
  Description of Artificial Sequence: Synthetic oligonucleotide
  Antisense strand to SEQ ID NO: 832194
ugauuucaggcauagugcu

SEQ ID NO: 832196 - RNA, 19 nt, Artificial Sequence
  Description of Artificial Sequence: Synthetic oligonucleotide
  Sense strand starting at position 3369 of SEQ ID NO: 587969
gaaaucagucgucaguaaa

SEQ ID NO: 832197 - RNA, 19 nt, Artificial Sequence
  Description of Artificial Sequence: Synthetic oligonucleotide
  Antisense strand to SEQ ID NO: 832196
uuuacugacgacugauuuc

SEQ ID NO: 832198 - RNA, 19 nt, Artificial Sequence
  Description of Artificial Sequence: Synthetic oligonucleotide
  Sense strand starting at position 3385 of SEQ ID NO: 587969
aaauguuaacuaugugaug

SEQ ID NO: 832199 - RNA, 19 nt, Artificial Sequence
  Description of Artificial Sequence: Synthetic oligonucleotide
  Antisense strand to SEQ ID NO: 832198
caucacauaguuaacauuu

SEQ ID NO: 832200 - RNA, 19 nt, Artificial Sequence
  Description of Artificial Sequence: Synthetic oligonucleotide
  Sense strand starting at position 3387 of SEQ ID NO: 587969
auguuaacuaugugauggu

SEQ ID NO: 832201 - RNA, 19 nt, Artificial Sequence
  Description of Artificial Sequence: Synthetic oligonucleotide
  Antisense strand to SEQ ID NO: 832200
accaucacauaguuaacau

SEQ ID NO: 832202 - RNA, 19 nt, Artificial Sequence
  Description of Artificial Sequence: Synthetic oligonucleotide
  Sense strand starting at position 3396 of SEQ ID NO: 587969
augugaugguaucccucau

SEQ ID NO: 832203 - RNA, 19 nt, Artificial Sequence
  Description of Artificial Sequence: Synthetic oligonucleotide
  Antisense strand to SEQ ID NO: 832202
augagggauaccaucacau

SEQ ID NO: 832204 - RNA, 19 nt, Artificial Sequence
  Description of Artificial Sequence: Synthetic oligonucleotide
  Sense strand starting at position 3951 of SEQ ID NO: 587969
cuguauggccauuaucaca

SEQ ID NO: 832205 - RNA, 19 nt, Artificial Sequence
  Description of Artificial Sequence: Synthetic oligonucleotide
  Antisense strand to SEQ ID NO: 832204
ugugauaauggccauacag

SEQ ID NO: 832206 - RNA, 19 nt, Artificial Sequence
  Description of Artificial Sequence: Synthetic oligonucleotide
  Sense strand starting at position 3972 of SEQ ID NO: 587969
ugucccguuguauuguaau

SEQ ID NO: 832207 - RNA, 19 nt, Artificial Sequence
  Description of Artificial Sequence: Synthetic oligonucleotide
  Antisense strand to SEQ ID NO: 832206
auuacaauacaacgggaca

SEQ ID NO: 832208 - RNA, 19 nt, Artificial Sequence
  Description of Artificial Sequence: Synthetic oligonucleotide
  Sense strand starting at position 119 of SEQ ID NO: 587970
cuaugagauguuuauguac

SEQ ID NO: 832209 - RNA, 19 nt, Artificial Sequence
  Description of Artificial Sequence: Synthetic oligonucleotide
  Antisense strand to SEQ ID NO: 832208
guacauaaacaucucauag

SEQ ID NO: 832210 - RNA, 19 nt, Artificial Sequence
  Description of Artificial Sequence: Synthetic oligonucleotide
  Sense strand starting at position 122 of SEQ ID NO: 587970
ugagauguuuauguaccua

SEQ ID NO: 832211 - RNA, 19 nt, Artificial Sequence
  Description of Artificial Sequence: Synthetic oligonucleotide
  Antisense strand to SEQ ID NO: 832210
uagguacauaaacaucuca

SEQ ID NO: 832212 - RNA, 19 nt, Artificial Sequence
  Description of Artificial Sequence: Synthetic oligonucleotide
  Sense strand starting at position 126 of SEQ ID NO: 587970
auguuuauguaccuaccaa

SEQ ID NO: 832213 - RNA, 19 nt, Artificial Sequence
  Description of Artificial Sequence: Synthetic oligonucleotide
  Antisense strand to SEQ ID NO: 832212
uugguagguacauaaacau

SEQ ID NO: 832214 - RNA, 19 nt, Artificial Sequence
  Description of Artificial Sequence: Synthetic oligonucleotide
  Sense strand starting at position 429 of SEQ ID NO: 587970
ugagcaucagucugacuuu

SEQ ID NO: 832215 - RNA, 19 nt, Artificial Sequence
  Description of Artificial Sequence: Synthetic oligonucleotide
  Antisense strand to SEQ ID NO: 832214
aaagucagacugaugcuca

SEQ ID NO: 832216 - RNA, 19 nt, Artificial Sequence
  Description of Artificial Sequence: Synthetic oligonucleotide
  Sense strand starting at position 524 of SEQ ID NO: 587970
acuggaguuuaacuugaau

SEQ ID NO: 832217 - RNA, 19 nt, Artificial Sequence
  Description of Artificial Sequence: Synthetic oligonucleotide
  Antisense strand to SEQ ID NO: 832216
auucaaguuaaacuccagu

SEQ ID NO: 832218 - RNA, 19 nt, Artificial Sequence
  Description of Artificial Sequence: Synthetic oligonucleotide
  Sense strand starting at position 547 of SEQ ID NO: 587970
cuuuccauuucuggagaaa

SEQ ID NO: 832219 - RNA, 19 nt, Artificial Sequence
  Description of Artificial Sequence: Synthetic oligonucleotide
  Antisense strand to SEQ ID NO: 832218
uuucuccagaaauggaaag

SEQ ID NO: 832220 - RNA, 19 nt, Artificial Sequence
  Description of Artificial Sequence: Synthetic oligonucleotide
  Sense strand starting at position 621 of SEQ ID NO: 587970
cuaugagcaucccugacuu

SEQ ID NO: 832221 - RNA, 19 nt, Artificial Sequence
  Description of Artificial Sequence: Synthetic oligonucleotide
  Antisense strand to SEQ ID NO: 832220
aagucagggaugcucauag

SEQ ID NO: 832222 - RNA, 19 nt, Artificial Sequence
  Description of Artificial Sequence: Synthetic oligonucleotide
  Sense strand starting at position 2187 of SEQ ID NO: 587970
uggcguuaaaccuacagau

SEQ ID NO: 832223 - RNA, 19 nt, Artificial Sequence
  Description of Artificial Sequence: Synthetic oligonucleotide
  Antisense strand to SEQ ID NO: 832222
aucuguagguuuaacgcca

SEQ ID NO: 832224 - RNA, 19 nt, Artificial Sequence
  Description of Artificial Sequence: Synthetic oligonucleotide
  Sense strand starting at position 2286 of SEQ ID NO: 587970
ucuggagcuuguucugaaa

SEQ ID NO: 832225 - RNA, 19 nt, Artificial Sequence
  Description of Artificial Sequence: Synthetic oligonucleotide
  Antisense strand to SEQ ID NO: 832224
uuucagaacaagcuccaga

SEQ ID NO: 832226 - RNA, 19 nt, Artificial Sequence
  Description of Artificial Sequence: Synthetic oligonucleotide
  Sense strand starting at position 2666 of SEQ ID NO: 587970
gugcuaaagcgggaagaau

SEQ ID NO: 832227 - RNA, 19 nt, Artificial Sequence
  Description of Artificial Sequence: Synthetic oligonucleotide
  Antisense strand to SEQ ID NO: 832226
auucuucccgcuuuagcac

SEQ ID NO: 832228 - RNA, 19 nt, Artificial Sequence
  Description of Artificial Sequence: Synthetic oligonucleotide
  Sense strand starting at position 2687 of SEQ ID NO: 587970
uuugauuguccacgauuuc

SEQ ID NO: 832229 - RNA, 19 nt, Artificial Sequence
  Description of Artificial Sequence: Synthetic oligonucleotide
  Antisense strand to SEQ ID NO: 832228
gaaaucguggacaaucaaa

SEQ ID NO: 832230 - RNA, 19 nt, Artificial Sequence
  Description of Artificial Sequence: Synthetic oligonucleotide
  Sense strand starting at position 2741 of SEQ ID NO: 587970
ggugaaaggucuccuacuu

SEQ ID NO: 832231 - RNA, 19 nt, Artificial Sequence
  Description of Artificial Sequence: Synthetic oligonucleotide
  Antisense strand to SEQ ID NO: 832230
aaguaggagaccuuucacc

SEQ ID NO: 832232 - RNA, 19 nt, Artificial Sequence
  Description of Artificial Sequence: Synthetic oligonucleotide
  Sense strand starting at position 2788 of SEQ ID NO: 587970
ggaggagaucucugcuuua

SEQ ID NO: 832233 - RNA, 19 nt, Artificial Sequence
  Description of Artificial Sequence: Synthetic oligonucleotide
  Antisense strand to SEQ ID NO: 832232
uaaagcagagaucuccucc

SEQ ID NO: 832234 - RNA, 19 nt, Artificial Sequence
  Description of Artificial Sequence: Synthetic oligonucleotide
  Sense strand starting at position 2791 of SEQ ID NO: 587970
ggagaucucugcuuuaucu

SEQ ID NO: 832235 - RNA, 19 nt, Artificial Sequence
  Description of Artificial Sequence: Synthetic oligonucleotide
  Antisense strand to SEQ ID NO: 832234
agauaaagcagagaucucc

SEQ ID NO: 832236 - RNA, 19 nt, Artificial Sequence
  Description of Artificial Sequence: Synthetic oligonucleotide
  Sense strand starting at position 2793 of SEQ ID NO: 587970
agaucucugcuuuaucuga

SEQ ID NO: 832237 - RNA, 19 nt, Artificial Sequence
  Description of Artificial Sequence: Synthetic oligonucleotide
  Antisense strand to SEQ ID NO: 832236
ucagauaaagcagagaucu

SEQ ID NO: 832238 - RNA, 19 nt, Artificial Sequence
  Description of Artificial Sequence: Synthetic oligonucleotide
  Sense strand starting at position 2806 of SEQ ID NO: 587970
aucugaaccugucuaauga

SEQ ID NO: 832239 - RNA, 19 nt, Artificial Sequence
  Description of Artificial Sequence: Synthetic oligonucleotide
  Antisense strand to SEQ ID NO: 832238
ucauuagacagguucagau

SEQ ID NO: 832240 - RNA, 19 nt, Artificial Sequence
  Description of Artificial Sequence: Synthetic oligonucleotide
  Sense strand starting at position 2858 of SEQ ID NO: 587970
auaaaucugcuggagcgua

SEQ ID NO: 832241 - RNA, 19 nt, Artificial Sequence
  Description of Artificial Sequence: Synthetic oligonucleotide
  Antisense strand to SEQ ID NO: 832240
uacgcuccagcagauuuau

SEQ ID NO: 832242 - RNA, 19 nt, Artificial Sequence
  Description of Artificial Sequence: Synthetic oligonucleotide
  Sense strand starting at position 2863 of SEQ ID NO: 587970
ucugcuggagcguaaucaa

SEQ ID NO: 832243 - RNA, 19 nt, Artificial Sequence
  Description of Artificial Sequence: Synthetic oligonucleotide
  Antisense strand to SEQ ID NO: 832242
uugauuacgcuccagcaga

SEQ ID NO: 832244 - RNA, 19 nt, Artificial Sequence
  Description of Artificial Sequence: Synthetic oligonucleotide
  Sense strand starting at position 2870 of SEQ ID NO: 587970
gagcguaaucaagaucuaa

SEQ ID NO: 832245 - RNA, 19 nt, Artificial Sequence
  Description of Artificial Sequence: Synthetic oligonucleotide
  Antisense strand to SEQ ID NO: 832244
uuagaucuugauuacgcuc

SEQ ID NO: 832246 - RNA, 19 nt, Artificial Sequence
  Description of Artificial Sequence: Synthetic oligonucleotide
  Sense strand starting at position 2915 of SEQ ID NO: 587970
gcacucagcccggaaacuu

SEQ ID NO: 832247 - RNA, 19 nt, Artificial Sequence
  Description of Artificial Sequence: Synthetic oligonucleotide
  Antisense strand to SEQ ID NO: 832246
aaguuuccgggcugagugc

SEQ ID NO: 832248 - RNA, 19 nt, Artificial Sequence
  Description of Artificial Sequence: Synthetic oligonucleotide
  Sense strand starting at position 2925 of SEQ ID NO: 587970
cggaaacuuguagguagua

SEQ ID NO: 832249 - RNA, 19 nt, Artificial Sequence
  Description of Artificial Sequence: Synthetic oligonucleotide
  Antisense strand to SEQ ID NO: 832248
uacuaccuacaaguuuccg

SEQ ID NO: 832250 - RNA, 19 nt, Artificial Sequence
  Description of Artificial Sequence: Synthetic oligonucleotide
  Sense strand starting at position 2926 of SEQ ID NO: 587970
ggaaacuuguagguaguaa

SEQ ID NO: 832251 - RNA, 19 nt, Artificial Sequence
  Description of Artificial Sequence: Synthetic oligonucleotide
  Antisense strand to SEQ ID NO: 832250
uuacuaccuacaaguuucc

SEQ ID NO: 832252 - RNA, 19 nt, Artificial Sequence
  Description of Artificial Sequence: Synthetic oligonucleotide
  Sense strand starting at position 2948 of SEQ ID NO: 587970
ugcuacauguaaguagaau

SEQ ID NO: 832253 - RNA, 19 nt, Artificial Sequence
  Description of Artificial Sequence: Synthetic oligonucleotide
  Antisense strand to SEQ ID NO: 832252
auucuacuuacauguagca

SEQ ID NO: 832254 - RNA, 19 nt, Artificial Sequence
  Description of Artificial Sequence: Synthetic oligonucleotide
  Sense strand starting at position 2982 of SEQ ID NO: 587970
ggaggauuguuaccacuaa

SEQ ID NO: 832255 - RNA, 19 nt, Artificial Sequence
  Description of Artificial Sequence: Synthetic oligonucleotide
  Antisense strand to SEQ ID NO: 832254
uuagugguaacaauccucc

SEQ ID NO: 832256 - RNA, 19 nt, Artificial Sequence
  Description of Artificial Sequence: Synthetic oligonucleotide
  Sense strand starting at position 3209 of SEQ ID NO: 587970
uuuaaauuccaaggugaug

SEQ ID NO: 832257 - RNA, 19 nt, Artificial Sequence
  Description of Artificial Sequence: Synthetic oligonucleotide
  Antisense strand to SEQ ID NO: 832256
caucaccuuggaauuuaaa

SEQ ID NO: 832258 - RNA, 19 nt, Artificial Sequence
  Description of Artificial Sequence: Synthetic oligonucleotide
  Sense strand starting at position 3252 of SEQ ID NO: 587970
uaagaaugcucucugugga

SEQ ID NO: 832259 - RNA, 19 nt, Artificial Sequence
  Description of Artificial Sequence: Synthetic oligonucleotide
  Antisense strand to SEQ ID NO: 832258
uccacagagagcauucuua

SEQ ID NO: 832260 - RNA, 19 nt, Artificial Sequence
  Description of Artificial Sequence: Synthetic oligonucleotide
  Sense strand starting at position 3253 of SEQ ID NO: 587970
aagaaugcucucuguggaa

SEQ ID NO: 832261 - RNA, 19 nt, Artificial Sequence
  Description of Artificial Sequence: Synthetic oligonucleotide
  Antisense strand to SEQ ID NO: 832260
uuccacagagagcauucuu

SEQ ID NO: 832262 - RNA, 19 nt, Artificial Sequence
  Description of Artificial Sequence: Synthetic oligonucleotide
  Sense strand starting at position 3255 of SEQ ID NO: 587970
gaaugcucucuguggaaau

SEQ ID NO: 832263 - RNA, 19 nt, Artificial Sequence
  Description of Artificial Sequence: Synthetic oligonucleotide
  Antisense strand to SEQ ID NO: 832262
auuuccacagagagcauuc

SEQ ID NO: 832264 - RNA, 19 nt, Artificial Sequence
  Description of Artificial Sequence: Synthetic oligonucleotide
  Sense strand starting at position 3257 of SEQ ID NO: 587970
augcucucuguggaaauga

SEQ ID NO: 832265 - RNA, 19 nt, Artificial Sequence
  Description of Artificial Sequence: Synthetic oligonucleotide
  Antisense strand to SEQ ID NO: 832264
ucauuuccacagagagcau

SEQ ID NO: 832266 - RNA, 19 nt, Artificial Sequence
  Description of Artificial Sequence: Synthetic oligonucleotide
  Sense strand starting at position 3341 of SEQ ID NO: 587970
acuggaauccucugcagag

SEQ ID NO: 832267 - RNA, 19 nt, Artificial Sequence
  Description of Artificial Sequence: Synthetic oligonucleotide
  Antisense strand to SEQ ID NO: 832266
cucugcagaggauuccagu

SEQ ID NO: 832268 - RNA, 19 nt, Artificial Sequence
  Description of Artificial Sequence: Synthetic oligonucleotide
  Sense strand starting at position 3516 of SEQ ID NO: 587970
ccagaauaguaguuuagug

SEQ ID NO: 832269 - RNA, 19 nt, Artificial Sequence
  Description of Artificial Sequence: Synthetic oligonucleotide
  Antisense strand to SEQ ID NO: 832268
cacuaaacuacuauucugg

SEQ ID NO: 832270 - RNA, 19 nt, Artificial Sequence
  Description of Artificial Sequence: Synthetic oligonucleotide
  Sense strand starting at position 3561 of SEQ ID NO: 587970
aaguucgaucccuggauca

SEQ ID NO: 832271 - RNA, 19 nt, Artificial Sequence
  Description of Artificial Sequence: Synthetic oligonucleotide
  Antisense strand to SEQ ID NO: 832270
ugauccagggaucgaacuu

SEQ ID NO: 832272 - RNA, 19 nt, Artificial Sequence
  Description of Artificial Sequence: Synthetic oligonucleotide
  Sense strand starting at position 3563 of SEQ ID NO: 587970
guucgaucccuggaucaac

SEQ ID NO: 832273 - RNA, 19 nt, Artificial Sequence
  Description of Artificial Sequence: Synthetic oligonucleotide
  Antisense strand to SEQ ID NO: 832272
guugauccagggaucgaac

SEQ ID NO: 832274 - RNA, 19 nt, Artificial Sequence
  Description of Artificial Sequence: Synthetic oligonucleotide
  Sense strand starting at position 3688 of SEQ ID NO: 587970
gggcuuggcuauuugacuu

SEQ ID NO: 832275 - RNA, 19 nt, Artificial Sequence
  Description of Artificial Sequence: Synthetic oligonucleotide
  Antisense strand to SEQ ID NO: 832274
aagucaaauagccaagccc

SEQ ID NO: 832276 - RNA, 19 nt, Artificial Sequence
  Description of Artificial Sequence: Synthetic oligonucleotide
  Sense strand starting at position 3727 of SEQ ID NO: 587970
ggacaucauaaacgugaua

SEQ ID NO: 832277 - RNA, 19 nt, Artificial Sequence
  Description of Artificial Sequence: Synthetic oligonucleotide
  Antisense strand to SEQ ID NO: 832276
uaucacguuuaugaugucc

SEQ ID NO: 832278 - RNA, 19 nt, Artificial Sequence
  Description of Artificial Sequence: Synthetic oligonucleotide
  Sense strand starting at position 3739 of SEQ ID NO: 587970
cgugauaugauacauguuu

SEQ ID NO: 832279 - RNA, 19 nt, Artificial Sequence
  Description of Artificial Sequence: Synthetic oligonucleotide
  Antisense strand to SEQ ID NO: 832278
aaacauguaucauaucacg

SEQ ID NO: 832280 - RNA, 19 nt, Artificial Sequence
  Description of Artificial Sequence: Synthetic oligonucleotide
  Sense strand starting at position 3745 of SEQ ID NO: 587970
augauacauguuugcucau

SEQ ID NO: 832281 - RNA, 19 nt, Artificial Sequence
  Description of Artificial Sequence: Synthetic oligonucleotide
  Antisense strand to SEQ ID NO: 832280
augagcaaacauguaucau

SEQ ID NO: 832282 - RNA, 19 nt, Artificial Sequence
  Description of Artificial Sequence: Synthetic oligonucleotide
  Sense strand starting at position 3746 of SEQ ID NO: 587970
ugauacauguuugcucauu

SEQ ID NO: 832283 - RNA, 19 nt, Artificial Sequence
  Description of Artificial Sequence: Synthetic oligonucleotide
  Antisense strand to SEQ ID NO: 832282
aaugagcaaacauguauca

SEQ ID NO: 832284 - RNA, 19 nt, Artificial Sequence
  Description of Artificial Sequence: Synthetic oligonucleotide
  Sense strand starting at position 3841 of SEQ ID NO: 587970
agaagcaagucacuuauga

SEQ ID NO: 832285 - RNA, 19 nt, Artificial Sequence
  Description of Artificial Sequence: Synthetic oligonucleotide
  Antisense strand to SEQ ID NO: 832284
ucauaagugacuugcuucu

SEQ ID NO: 832286 - RNA, 19 nt, Artificial Sequence
  Description of Artificial Sequence: Synthetic oligonucleotide
  Sense strand starting at position 3931 of SEQ ID NO: 587970
gcuuuagauagaggcagaa

SEQ ID NO: 832287 - RNA, 19 nt, Artificial Sequence
  Description of Artificial Sequence: Synthetic oligonucleotide
  Antisense strand to SEQ ID NO: 832286
uucugccucuaucuaaagc

SEQ ID NO: 832288 - RNA, 19 nt, Artificial Sequence
  Description of Artificial Sequence: Synthetic oligonucleotide
  Sense strand starting at position 145 of SEQ ID NO: 587971
auggguaauucagcuagga

SEQ ID NO: 832289 - RNA, 19 nt, Artificial Sequence
  Description of Artificial Sequence: Synthetic oligonucleotide
  Antisense strand to SEQ ID NO: 832288
uccuagcugaauuacccau

SEQ ID NO: 832290 - RNA, 19 nt, Artificial Sequence
  Description of Artificial Sequence: Synthetic oligonucleotide
  Sense strand starting at position 333 of SEQ ID NO: 587971
auaugacaaugagaagaaa

SEQ ID NO: 832291 - RNA, 19 nt, Artificial Sequence
  Description of Artificial Sequence: Synthetic oligonucleotide
  Antisense strand to SEQ ID NO: 832290
uuucuucucauugucauau

SEQ ID NO: 832292 - RNA, 19 nt, Artificial Sequence
  Description of Artificial Sequence: Synthetic oligonucleotide
  Sense strand starting at position 588 of SEQ ID NO: 587971
guugacaugguaggucuaa

SEQ ID NO: 832293 - RNA, 19 nt, Artificial Sequence
  Description of Artificial Sequence: Synthetic oligonucleotide
  Antisense strand to SEQ ID NO: 832292
uuagaccuaccaugucaac

SEQ ID NO: 832294 - RNA, 19 nt, Artificial Sequence
  Description of Artificial Sequence: Synthetic oligonucleotide
  Sense strand starting at position 810 of SEQ ID NO: 587971
gcaugaaauuucgcugauc

SEQ ID NO: 832295 - RNA, 19 nt, Artificial Sequence
  Description of Artificial Sequence: Synthetic oligonucleotide
  Antisense strand to SEQ ID NO: 832294
gaucagcgaaauuucaugc

SEQ ID NO: 832296 - RNA, 19 nt, Artificial Sequence
  Description of Artificial Sequence: Synthetic oligonucleotide
  Sense strand starting at position 1170 of SEQ ID NO: 587971
gcaguauagugauuaacag

SEQ ID NO: 832297 - RNA, 19 nt, Artificial Sequence
  Description of Artificial Sequence: Synthetic oligonucleotide
  Antisense strand to SEQ ID NO: 832296
cuguuaaucacuauacugc

SEQ ID NO: 832298 - RNA, 19 nt, Artificial Sequence
  Description of Artificial Sequence: Synthetic oligonucleotide
  Sense strand starting at position 1179 of SEQ ID NO: 587971
ugauuaacagcaggauucu

SEQ ID NO: 832299 - RNA, 19 nt, Artificial Sequence
  Description of Artificial Sequence: Synthetic oligonucleotide
  Antisense strand to SEQ ID NO: 832298
agaauccugcuguuaauca

SEQ ID NO: 832300 - RNA, 19 nt, Artificial Sequence
  Description of Artificial Sequence: Synthetic oligonucleotide
  Sense strand starting at position 1189 of SEQ ID NO: 587971
caggauucuggaggcagua

SEQ ID NO: 832301 - RNA, 19 nt, Artificial Sequence
  Description of Artificial Sequence: Synthetic oligonucleotide
  Antisense strand to SEQ ID NO: 832300
uacugccuccagaauccug

SEQ ID NO: 832302 - RNA, 19 nt, Artificial Sequence
  Description of Artificial Sequence: Synthetic oligonucleotide
  Sense strand starting at position 1268 of SEQ ID NO: 587971
guugcaugaccuugaacaa

SEQ ID NO: 832303 - RNA, 19 nt, Artificial Sequence
  Description of Artificial Sequence: Synthetic oligonucleotide
  Antisense strand to SEQ ID NO: 832302
uuguucaaggucaugcaac

SEQ ID NO: 832304 - RNA, 19 nt, Artificial Sequence
  Description of Artificial Sequence: Synthetic oligonucleotide
  Sense strand starting at position 1356 of SEQ ID NO: 587971
ggguuaguaugaguacaaa

SEQ ID NO: 832305 - RNA, 19 nt, Artificial Sequence
  Description of Artificial Sequence: Synthetic oligonucleotide
  Antisense strand to SEQ ID NO: 832304
uuuguacucauacuaaccc

SEQ ID NO: 832306 - RNA, 19 nt, Artificial Sequence
  Description of Artificial Sequence: Synthetic oligonucleotide
  Sense strand starting at position 1376 of SEQ ID NO: 587971
uuaguuauuauacguagag

SEQ ID NO: 832307 - RNA, 19 nt, Artificial Sequence
  Description of Artificial Sequence: Synthetic oligonucleotide
  Antisense strand to SEQ ID NO: 832306
cucuacguauaauaacuaa

SEQ ID NO: 832308 - RNA, 19 nt, Artificial Sequence
  Description of Artificial Sequence: Synthetic oligonucleotide
  Sense strand starting at position 1378 of SEQ ID NO: 587971
aguuauuauacguagaggu

SEQ ID NO: 832309 - RNA, 19 nt, Artificial Sequence
  Description of Artificial Sequence: Synthetic oligonucleotide
  Antisense strand to SEQ ID NO: 832308
accucuacguauaauaacu

SEQ ID NO: 832310 - RNA, 19 nt, Artificial Sequence
  Description of Artificial Sequence: Synthetic oligonucleotide
  Sense strand starting at position 1382 of SEQ ID NO: 587971
auuauacguagaggucuua

SEQ ID NO: 832311 - RNA, 19 nt, Artificial Sequence
  Description of Artificial Sequence: Synthetic oligonucleotide
  Antisense strand to SEQ ID NO: 832310
uaagaccucuacguauaau

SEQ ID NO: 832312 - RNA, 19 nt, Artificial Sequence
  Description of Artificial Sequence: Synthetic oligonucleotide
  Sense strand starting at position 1392 of SEQ ID NO: 587971
gaggucuuacacuggcaca

SEQ ID NO: 832313 - RNA, 19 nt, Artificial Sequence
  Description of Artificial Sequence: Synthetic oligonucleotide
  Antisense strand to SEQ ID NO: 832312
ugugccaguguaagaccuc

SEQ ID NO: 832314 - RNA, 19 nt, Artificial Sequence
  Description of Artificial Sequence: Synthetic oligonucleotide
  Sense strand starting at position 1440 of SEQ ID NO: 587971
gugcaaguauaacuaaacu

SEQ ID NO: 832315 - RNA, 19 nt, Artificial Sequence
  Description of Artificial Sequence: Synthetic oligonucleotide
  Antisense strand to SEQ ID NO: 832314
aguuuaguuauacuugcac

SEQ ID NO: 832316 - RNA, 19 nt, Artificial Sequence
  Description of Artificial Sequence: Synthetic oligonucleotide
  Sense strand starting at position 1487 of SEQ ID NO: 587971
uuuacauuucuacgucacu

SEQ ID NO: 832317 - RNA, 19 nt, Artificial Sequence
  Description of Artificial Sequence: Synthetic oligonucleotide
  Antisense strand to SEQ ID NO: 832316
agugacguagaaauguaaa

SEQ ID NO: 832318 - RNA, 19 nt, Artificial Sequence
  Description of Artificial Sequence: Synthetic oligonucleotide
  Sense strand starting at position 2084 of SEQ ID NO: 587971
uccaguaaagaauggguua

SEQ ID NO: 832319 - RNA, 19 nt, Artificial Sequence
  Description of Artificial Sequence: Synthetic oligonucleotide
  Antisense strand to SEQ ID NO: 832318
uaacccauucuuuacugga

SEQ ID NO: 832320 - RNA, 19 nt, Artificial Sequence
  Description of Artificial Sequence: Synthetic oligonucleotide
  Sense strand starting at position 2096 of SEQ ID NO: 587971
uggguuagagaccgguuaa

SEQ ID NO: 832321 - RNA, 19 nt, Artificial Sequence
  Description of Artificial Sequence: Synthetic oligonucleotide
  Antisense strand to SEQ ID NO: 832320
uuaaccggucucuaaccca

SEQ ID NO: 832322 - RNA, 19 nt, Artificial Sequence
  Description of Artificial Sequence: Synthetic oligonucleotide
  Sense strand starting at position 2097 of SEQ ID NO: 587971
ggguuagagaccgguuaac

SEQ ID NO: 832323 - RNA, 19 nt, Artificial Sequence
  Description of Artificial Sequence: Synthetic oligonucleotide
  Antisense strand to SEQ ID NO: 832322
guuaaccggucucuaaccc

SEQ ID NO: 832324 - RNA, 19 nt, Artificial Sequence
  Description of Artificial Sequence: Synthetic oligonucleotide
  Sense strand starting at position 2143 of SEQ ID NO: 587971
uguauagaguuccucuacu

SEQ ID NO: 832325 - RNA, 19 nt, Artificial Sequence
  Description of Artificial Sequence: Synthetic oligonucleotide
  Antisense strand to SEQ ID NO: 832324
aguagaggaacucuauaca

SEQ ID NO: 832326 - RNA, 19 nt, Artificial Sequence
  Description of Artificial Sequence: Synthetic oligonucleotide
  Sense strand starting at position 2211 of SEQ ID NO: 587971
uaucauaauuugucgaguu

SEQ ID NO: 832327 - RNA, 19 nt, Artificial Sequence
  Description of Artificial Sequence: Synthetic oligonucleotide
  Antisense strand to SEQ ID NO: 832326
aacucgacaaauuaugaua

SEQ ID NO: 832328 - RNA, 19 nt, Artificial Sequence
  Description of Artificial Sequence: Synthetic oligonucleotide
  Sense strand starting at position 2276 of SEQ ID NO: 587971
ggaaacaugacuuguaguu

SEQ ID NO: 832329 - RNA, 19 nt, Artificial Sequence
  Description of Artificial Sequence: Synthetic oligonucleotide
  Antisense strand to SEQ ID NO: 832328
aacuacaagucauguuucc

SEQ ID NO: 832330 - RNA, 19 nt, Artificial Sequence
  Description of Artificial Sequence: Synthetic oligonucleotide
  Sense strand starting at position 2283 of SEQ ID NO: 587971
ugacuuguaguuuaacaau

SEQ ID NO: 832331 - RNA, 19 nt, Artificial Sequence
  Description of Artificial Sequence: Synthetic oligonucleotide
  Antisense strand to SEQ ID NO: 832330
auuguuaaacuacaaguca

SEQ ID NO: 832332 - RNA, 19 nt, Artificial Sequence
  Description of Artificial Sequence: Synthetic oligonucleotide
  Sense strand starting at position 2341 of SEQ ID NO: 587971
ggauuacuauagcucaaag

SEQ ID NO: 832333 - RNA, 19 nt, Artificial Sequence
  Description of Artificial Sequence: Synthetic oligonucleotide
  Antisense strand to SEQ ID NO: 832332
cuuugagcuauaguaaucc

SEQ ID NO: 832334 - RNA, 19 nt, Artificial Sequence
  Description of Artificial Sequence: Synthetic oligonucleotide
  Sense strand starting at position 2401 of SEQ ID NO: 587971
ggaaaucauguaugcgaga

SEQ ID NO: 832335 - RNA, 19 nt, Artificial Sequence
  Description of Artificial Sequence: Synthetic oligonucleotide
  Antisense strand to SEQ ID NO: 832334
ucucgcauacaugauuucc

SEQ ID NO: 832336 - RNA, 19 nt, Artificial Sequence
  Description of Artificial Sequence: Synthetic oligonucleotide
  Sense strand starting at position 2406 of SEQ ID NO: 587971
ucauguaugcgagacaaag

SEQ ID NO: 832337 - RNA, 19 nt, Artificial Sequence
  Description of Artificial Sequence: Synthetic oligonucleotide
  Antisense strand to SEQ ID NO: 832336
cuuugucucgcauacauga

SEQ ID NO: 832338 - RNA, 19 nt, Artificial Sequence
  Description of Artificial Sequence: Synthetic oligonucleotide
  Sense strand starting at position 2408 of SEQ ID NO: 587971
auguaugcgagacaaagua

SEQ ID NO: 832339 - RNA, 19 nt, Artificial Sequence
  Description of Artificial Sequence: Synthetic oligonucleotide
  Antisense strand to SEQ ID NO: 832338
uacuuugucucgcauacau

SEQ ID NO: 832340 - RNA, 19 nt, Artificial Sequence
  Description of Artificial Sequence: Synthetic oligonucleotide
  Sense strand starting at position 2455 of SEQ ID NO: 587971
ucuguugccagcgaaauuu

SEQ ID NO: 832341 - RNA, 19 nt, Artificial Sequence
  Description of Artificial Sequence: Synthetic oligonucleotide
  Antisense strand to SEQ ID NO: 832340
aaauuucgcuggcaacaga

SEQ ID NO: 832342 - RNA, 19 nt, Artificial Sequence
  Description of Artificial Sequence: Synthetic oligonucleotide
  Sense strand starting at position 2499 of SEQ ID NO: 587971
aacgcaguccuccagaaga

SEQ ID NO: 832343 - RNA, 19 nt, Artificial Sequence
  Description of Artificial Sequence: Synthetic oligonucleotide
  Antisense strand to SEQ ID NO: 832342
ucuucuggaggacugcguu

SEQ ID NO: 832344 - RNA, 19 nt, Artificial Sequence
  Description of Artificial Sequence: Synthetic oligonucleotide
  Sense strand starting at position 2501 of SEQ ID NO: 587971
cgcaguccuccagaagaau

SEQ ID NO: 832345 - RNA, 19 nt, Artificial Sequence
  Description of Artificial Sequence: Synthetic oligonucleotide
  Antisense strand to SEQ ID NO: 832344
auucuucuggaggacugcg

SEQ ID NO: 832346 - RNA, 19 nt, Artificial Sequence
  Description of Artificial Sequence: Synthetic oligonucleotide
  Sense strand starting at position 2807 of SEQ ID NO: 587971
gcugcuuuggaccaguaua

SEQ ID NO: 832347 - RNA, 19 nt, Artificial Sequence
  Description of Artificial Sequence: Synthetic oligonucleotide
  Antisense strand to SEQ ID NO: 832346
uauacugguccaaagcagc

SEQ ID NO: 832348 - RNA, 19 nt, Artificial Sequence
  Description of Artificial Sequence: Synthetic oligonucleotide
  Sense strand starting at position 2853 of SEQ ID NO: 587971
gguugcauuccucaguaag

SEQ ID NO: 832349 - RNA, 19 nt, Artificial Sequence
  Description of Artificial Sequence: Synthetic oligonucleotide
  Antisense strand to SEQ ID NO: 832348
cuuacugaggaaugcaacc

SEQ ID NO: 832350 - RNA, 19 nt, Artificial Sequence
  Description of Artificial Sequence: Synthetic oligonucleotide
  Sense strand starting at position 2855 of SEQ ID NO: 587971
uugcauuccucaguaagac

SEQ ID NO: 832351 - RNA, 19 nt, Artificial Sequence
  Description of Artificial Sequence: Synthetic oligonucleotide
  Antisense strand to SEQ ID NO: 832350
gucuuacugaggaaugcaa

SEQ ID NO: 832352 - RNA, 19 nt, Artificial Sequence
  Description of Artificial Sequence: Synthetic oligonucleotide
  Sense strand starting at position 2856 of SEQ ID NO: 587971
ugcauuccucaguaagacu

SEQ ID NO: 832353 - RNA, 19 nt, Artificial Sequence
  Description of Artificial Sequence: Synthetic oligonucleotide
  Antisense strand to SEQ ID NO: 832352
agucuuacugaggaaugca

SEQ ID NO: 832354 - RNA, 19 nt, Artificial Sequence
  Description of Artificial Sequence: Synthetic oligonucleotide
  Sense strand starting at position 2864 of SEQ ID NO: 587971
ucaguaagacuccgaauaa

SEQ ID NO: 832355 - RNA, 19 nt, Artificial Sequence
  Description of Artificial Sequence: Synthetic oligonucleotide
  Antisense strand to SEQ ID NO: 832354
uuauucggagucuuacuga

SEQ ID NO: 832356 - RNA, 19 nt, Artificial Sequence
  Description of Artificial Sequence: Synthetic oligonucleotide
  Sense strand starting at position 3298 of SEQ ID NO: 587971
uauggaaacguuuagaguu

SEQ ID NO: 832357 - RNA, 19 nt, Artificial Sequence
  Description of Artificial Sequence: Synthetic oligonucleotide
  Antisense strand to SEQ ID NO: 832356
aacucuaaacguuuccaua

SEQ ID NO: 832358 - RNA, 19 nt, Artificial Sequence
  Description of Artificial Sequence: Synthetic oligonucleotide
  Sense strand starting at position 3304 of SEQ ID NO: 587971
aacguuuagaguuagagac

SEQ ID NO: 832359 - RNA, 19 nt, Artificial Sequence
  Description of Artificial Sequence: Synthetic oligonucleotide
  Antisense strand to SEQ ID NO: 832358
gucucuaacucuaaacguu

SEQ ID NO: 832360 - RNA, 19 nt, Artificial Sequence
  Description of Artificial Sequence: Synthetic oligonucleotide
  Sense strand starting at position 3527 of SEQ ID NO: 587971
ggaagauaccugugguaga

SEQ ID NO: 832361 - RNA, 19 nt, Artificial Sequence
  Description of Artificial Sequence: Synthetic oligonucleotide
  Antisense strand to SEQ ID NO: 832360
ucuaccacagguaucuucc

SEQ ID NO: 832362 - RNA, 19 nt, Artificial Sequence
  Description of Artificial Sequence: Synthetic oligonucleotide
  Sense strand starting at position 3625 of SEQ ID NO: 587971
gagcuagagguauggauaa

SEQ ID NO: 832363 - RNA, 19 nt, Artificial Sequence
  Description of Artificial Sequence: Synthetic oligonucleotide
  Antisense strand to SEQ ID NO: 832362
uuauccauaccucuagcuc

SEQ ID NO: 832364 - RNA, 19 nt, Artificial Sequence
  Description of Artificial Sequence: Synthetic oligonucleotide
  Sense strand starting at position 3834 of SEQ ID NO: 587971
aacuuaugggcuuggaaag

SEQ ID NO: 832365 - RNA, 19 nt, Artificial Sequence
  Description of Artificial Sequence: Synthetic oligonucleotide
  Antisense strand to SEQ ID NO: 832364
cuuuccaagcccauaaguu

SEQ ID NO: 832366 - RNA, 19 nt, Artificial Sequence
  Description of Artificial Sequence: Synthetic oligonucleotide
  Sense strand starting at position 3858 of SEQ ID NO: 587971
ggaagaauuuaggaaugug

SEQ ID NO: 832367 - RNA, 19 nt, Artificial Sequence
  Description of Artificial Sequence: Synthetic oligonucleotide
  Antisense strand to SEQ ID NO: 832366
cacauuccuaaauucuucc

SEQ ID NO: 832368 - RNA, 19 nt, Artificial Sequence
  Description of Artificial Sequence: Synthetic oligonucleotide
  Sense strand starting at position 275 of SEQ ID NO: 587972
uuaaauccacacugguaga

SEQ ID NO: 832369 - RNA, 19 nt, Artificial Sequence
  Description of Artificial Sequence: Synthetic oligonucleotide
  Antisense strand to SEQ ID NO: 832368
ucuaccaguguggauuuaa

SEQ ID NO: 832370 - RNA, 19 nt, Artificial Sequence
  Description of Artificial Sequence: Synthetic oligonucleotide
  Sense strand starting at position 359 of SEQ ID NO: 587972
agcuuuauuuagucucuua

SEQ ID NO: 832371 - RNA, 19 nt, Artificial Sequence
  Description of Artificial Sequence: Synthetic oligonucleotide
  Antisense strand to SEQ ID NO: 832370
uaagagacuaaauaaagcu

SEQ ID NO: 832372 - RNA, 19 nt, Artificial Sequence
  Description of Artificial Sequence: Synthetic oligonucleotide
  Sense strand starting at position 438 of SEQ ID NO: 587972
ugguucuuuguuuaaugga

SEQ ID NO: 832373 - RNA, 19 nt, Artificial Sequence
  Description of Artificial Sequence: Synthetic oligonucleotide
  Antisense strand to SEQ ID NO: 832372
uccauuaaacaaagaacca

SEQ ID NO: 832374 - RNA, 19 nt, Artificial Sequence
  Description of Artificial Sequence: Synthetic oligonucleotide
  Sense strand starting at position 457 of SEQ ID NO: 587972
aaccaacgucuaugggaaa

SEQ ID NO: 832375 - RNA, 19 nt, Artificial Sequence
  Description of Artificial Sequence: Synthetic oligonucleotide
  Antisense strand to SEQ ID NO: 832374
uuucccauagacguugguu

SEQ ID NO: 832376 - RNA, 19 nt, Artificial Sequence
  Description of Artificial Sequence: Synthetic oligonucleotide
  Sense strand starting at position 896 of SEQ ID NO: 587972
ccauucuucgaguauguga

SEQ ID NO: 832377 - RNA, 19 nt, Artificial Sequence
  Description of Artificial Sequence: Synthetic oligonucleotide
  Antisense strand to SEQ ID NO: 832376
ucacauacucgaagaaugg

SEQ ID NO: 832378 - RNA, 19 nt, Artificial Sequence
  Description of Artificial Sequence: Synthetic oligonucleotide
  Sense strand starting at position 1025 of SEQ ID NO: 587972
cauagcaggucgcuaauuu

SEQ ID NO: 832379 - RNA, 19 nt, Artificial Sequence
  Description of Artificial Sequence: Synthetic oligonucleotide
  Antisense strand to SEQ ID NO: 832378
aaauuagcgaccugcuaug

SEQ ID NO: 832380 - RNA, 19 nt, Artificial Sequence
  Description of Artificial Sequence: Synthetic oligonucleotide
  Sense strand starting at position 1148 of SEQ ID NO: 587972
aaaugaguagaugguuaau

SEQ ID NO: 832381 - RNA, 19 nt, Artificial Sequence
  Description of Artificial Sequence: Synthetic oligonucleotide
  Antisense strand to SEQ ID NO: 832380
auuaaccaucuacucauuu

SEQ ID NO: 832382 - RNA, 19 nt, Artificial Sequence
  Description of Artificial Sequence: Synthetic oligonucleotide
  Sense strand starting at position 1151 of SEQ ID NO: 587972
ugaguagaugguuaauggu

SEQ ID NO: 832383 - RNA, 19 nt, Artificial Sequence
  Description of Artificial Sequence: Synthetic oligonucleotide
  Antisense strand to SEQ ID NO: 832382
accauuaaccaucuacuca

SEQ ID NO: 832384 - RNA, 19 nt, Artificial Sequence
  Description of Artificial Sequence: Synthetic oligonucleotide
  Sense strand starting at position 1157 of SEQ ID NO: 587972
gaugguuaaugguuaacuu

SEQ ID NO: 832385 - RNA, 19 nt, Artificial Sequence
  Description of Artificial Sequence: Synthetic oligonucleotide
  Antisense strand to SEQ ID NO: 832384
aaguuaaccauuaaccauc

SEQ ID NO: 832386 - RNA, 19 nt, Artificial Sequence
  Description of Artificial Sequence: Synthetic oligonucleotide
  Sense strand starting at position 1225 of SEQ ID NO: 587972
gaaguaugucguguuuagc

SEQ ID NO: 832387 - RNA, 19 nt, Artificial Sequence
  Description of Artificial Sequence: Synthetic oligonucleotide
  Antisense strand to SEQ ID NO: 832386
gcuaaacacgacauacuuc

SEQ ID NO: 832388 - RNA, 19 nt, Artificial Sequence
  Description of Artificial Sequence: Synthetic oligonucleotide
  Sense strand starting at position 1226 of SEQ ID NO: 587972
aaguaugucguguuuagcu

SEQ ID NO: 832389 - RNA, 19 nt, Artificial Sequence
  Description of Artificial Sequence: Synthetic oligonucleotide
  Antisense strand to SEQ ID NO: 832388
agcuaaacacgacauacuu

SEQ ID NO: 832390 - RNA, 19 nt, Artificial Sequence
  Description of Artificial Sequence: Synthetic oligonucleotide
  Sense strand starting at position 1711 of SEQ ID NO: 587972
uugagauaacucugcacaa

SEQ ID NO: 832391 - RNA, 19 nt, Artificial Sequence
  Description of Artificial Sequence: Synthetic oligonucleotide
  Antisense strand to SEQ ID NO: 832390
uugugcagaguuaucucaa

SEQ ID NO: 832392 - RNA, 19 nt, Artificial Sequence
  Description of Artificial Sequence: Synthetic oligonucleotide
  Sense strand starting at position 1712 of SEQ ID NO: 587972
ugagauaacucugcacaaa

SEQ ID NO: 832393 - RNA, 19 nt, Artificial Sequence
  Description of Artificial Sequence: Synthetic oligonucleotide
  Antisense strand to SEQ ID NO: 832392
uuugugcagaguuaucuca

SEQ ID NO: 832394 - RNA, 19 nt, Artificial Sequence
  Description of Artificial Sequence: Synthetic oligonucleotide
  Sense strand starting at position 1992 of SEQ ID NO: 587972
gucucuauucuggaaagca

SEQ ID NO: 832395 - RNA, 19 nt, Artificial Sequence
  Description of Artificial Sequence: Synthetic oligonucleotide
  Antisense strand to SEQ ID NO: 832394
ugcuuuccagaauagagac

SEQ ID NO: 832396 - RNA, 19 nt, Artificial Sequence
  Description of Artificial Sequence: Synthetic oligonucleotide
  Sense strand starting at position 2177 of SEQ ID NO: 587972
accauugcuuuggugaaga

SEQ ID NO: 832397 - RNA, 19 nt, Artificial Sequence
  Description of Artificial Sequence: Synthetic oligonucleotide
  Antisense strand to SEQ ID NO: 832396
ucuucaccaaagcaauggu

SEQ ID NO: 832398 - RNA, 19 nt, Artificial Sequence
  Description of Artificial Sequence: Synthetic oligonucleotide
  Sense strand starting at position 2179 of SEQ ID NO: 587972
cauugcuuuggugaagaca

SEQ ID NO: 832399 - RNA, 19 nt, Artificial Sequence
  Description of Artificial Sequence: Synthetic oligonucleotide
  Antisense strand to SEQ ID NO: 832398
ugucuucaccaaagcaaug

SEQ ID NO: 832400 - RNA, 19 nt, Artificial Sequence
  Description of Artificial Sequence: Synthetic oligonucleotide
  Sense strand starting at position 2321 of SEQ ID NO: 587972
uuaguaacuuugccagaua

SEQ ID NO: 832401 - RNA, 19 nt, Artificial Sequence
  Description of Artificial Sequence: Synthetic oligonucleotide
  Antisense strand to SEQ ID NO: 832400
uaucuggcaaaguuacuaa

SEQ ID NO: 832402 - RNA, 19 nt, Artificial Sequence
  Description of Artificial Sequence: Synthetic oligonucleotide
  Sense strand starting at position 2324 of SEQ ID NO: 587972
guaacuuugccagauaacc

SEQ ID NO: 832403 - RNA, 19 nt, Artificial Sequence
  Description of Artificial Sequence: Synthetic oligonucleotide
  Antisense strand to SEQ ID NO: 832402
gguuaucuggcaaaguuac

SEQ ID NO: 832404 - RNA, 19 nt, Artificial Sequence
  Description of Artificial Sequence: Synthetic oligonucleotide
  Sense strand starting at position 2420 of SEQ ID NO: 587972
uccauacuuugauuguauu

SEQ ID NO: 832405 - RNA, 19 nt, Artificial Sequence
  Description of Artificial Sequence: Synthetic oligonucleotide
  Antisense strand to SEQ ID NO: 832404
aauacaaucaaaguaugga

SEQ ID NO: 832406 - RNA, 19 nt, Artificial Sequence
  Description of Artificial Sequence: Synthetic oligonucleotide
  Sense strand starting at position 2426 of SEQ ID NO: 587972
cuuugauuguauucuuaga

SEQ ID NO: 832407 - RNA, 19 nt, Artificial Sequence
  Description of Artificial Sequence: Synthetic oligonucleotide
  Antisense strand to SEQ ID NO: 832406
ucuaagaauacaaucaaag

SEQ ID NO: 832408 - RNA, 19 nt, Artificial Sequence
  Description of Artificial Sequence: Synthetic oligonucleotide
  Sense strand starting at position 2428 of SEQ ID NO: 587972
uugauuguauucuuagaac

SEQ ID NO: 832409 - RNA, 19 nt, Artificial Sequence
  Description of Artificial Sequence: Synthetic oligonucleotide
  Antisense strand to SEQ ID NO: 832408
guucuaagaauacaaucaa

SEQ ID NO: 832410 - RNA, 19 nt, Artificial Sequence
  Description of Artificial Sequence: Synthetic oligonucleotide
  Sense strand starting at position 2632 of SEQ ID NO: 587972
cugacuuguucucccagga

SEQ ID NO: 832411 - RNA, 19 nt, Artificial Sequence
  Description of Artificial Sequence: Synthetic oligonucleotide
  Antisense strand to SEQ ID NO: 832410
uccugggagaacaagucag

SEQ ID NO: 832412 - RNA, 19 nt, Artificial Sequence
  Description of Artificial Sequence: Synthetic oligonucleotide
  Sense strand starting at position 2636 of SEQ ID NO: 587972
cuuguucucccaggaauga

SEQ ID NO: 832413 - RNA, 19 nt, Artificial Sequence
  Description of Artificial Sequence: Synthetic oligonucleotide
  Antisense strand to SEQ ID NO: 832412
ucauuccugggagaacaag

SEQ ID NO: 832414 - RNA, 19 nt, Artificial Sequence
  Description of Artificial Sequence: Synthetic oligonucleotide
  Sense strand starting at position 2688 of SEQ ID NO: 587972
auuuacuugugagaaaucu

SEQ ID NO: 832415 - RNA, 19 nt, Artificial Sequence
  Description of Artificial Sequence: Synthetic oligonucleotide
  Antisense strand to SEQ ID NO: 832414
agauuucucacaaguaaau

SEQ ID NO: 832416 - RNA, 19 nt, Artificial Sequence
  Description of Artificial Sequence: Synthetic oligonucleotide
  Sense strand starting at position 2697 of SEQ ID NO: 587972
ugagaaaucuggucuguua

SEQ ID NO: 832417 - RNA, 19 nt, Artificial Sequence
  Description of Artificial Sequence: Synthetic oligonucleotide
  Antisense strand to SEQ ID NO: 832416
uaacagaccagauuucuca

SEQ ID NO: 832418 - RNA, 19 nt, Artificial Sequence
  Description of Artificial Sequence: Synthetic oligonucleotide
  Sense strand starting at position 2699 of SEQ ID NO: 587972
agaaaucuggucuguuaug

SEQ ID NO: 832419 - RNA, 19 nt, Artificial Sequence
  Description of Artificial Sequence: Synthetic oligonucleotide
  Antisense strand to SEQ ID NO: 832418
cauaacagaccagauuucu

SEQ ID NO: 832420 - RNA, 19 nt, Artificial Sequence
  Description of Artificial Sequence: Synthetic oligonucleotide
  Sense strand starting at position 2708 of SEQ ID NO: 587972
gucuguuaugguuacagga

SEQ ID NO: 832421 - RNA, 19 nt, Artificial Sequence
  Description of Artificial Sequence: Synthetic oligonucleotide
  Antisense strand to SEQ ID NO: 832420
uccuguaaccauaacagac

SEQ ID NO: 832422 - RNA, 19 nt, Artificial Sequence
  Description of Artificial Sequence: Synthetic oligonucleotide
  Sense strand starting at position 3138 of SEQ ID NO: 587972
uuugaucauuuagaaugca

SEQ ID NO: 832423 - RNA, 19 nt, Artificial Sequence
  Description of Artificial Sequence: Synthetic oligonucleotide
  Antisense strand to SEQ ID NO: 832422
ugcauucuaaaugaucaaa

SEQ ID NO: 832424 - RNA, 19 nt, Artificial Sequence
  Description of Artificial Sequence: Synthetic oligonucleotide
  Sense strand starting at position 3399 of SEQ ID NO: 587972
ugacuccaguuaucugaua

SEQ ID NO: 832425 - RNA, 19 nt, Artificial Sequence
  Description of Artificial Sequence: Synthetic oligonucleotide
  Antisense strand to SEQ ID NO: 832424
uaucagauaacuggaguca

SEQ ID NO: 832426 - RNA, 19 nt, Artificial Sequence
  Description of Artificial Sequence: Synthetic oligonucleotide
  Sense strand starting at position 3498 of SEQ ID NO: 587972
augagauuacugugauuac

SEQ ID NO: 832427 - RNA, 19 nt, Artificial Sequence
  Description of Artificial Sequence: Synthetic oligonucleotide
  Antisense strand to SEQ ID NO: 832426
guaaucacaguaaucucau

SEQ ID NO: 832428 - RNA, 19 nt, Artificial Sequence
  Description of Artificial Sequence: Synthetic oligonucleotide
  Sense strand starting at position 3501 of SEQ ID NO: 587972
agauuacugugauuacaug

SEQ ID NO: 832429 - RNA, 19 nt, Artificial Sequence
  Description of Artificial Sequence: Synthetic oligonucleotide
  Antisense strand to SEQ ID NO: 832428
cauguaaucacaguaaucu

SEQ ID NO: 832430 - RNA, 19 nt, Artificial Sequence
  Description of Artificial Sequence: Synthetic oligonucleotide
  Sense strand starting at position 3507 of SEQ ID NO: 587972
cugugauuacaugggcuaa

SEQ ID NO: 832431 - RNA, 19 nt, Artificial Sequence
  Description of Artificial Sequence: Synthetic oligonucleotide
  Antisense strand to SEQ ID NO: 832430
uuagcccauguaaucacag

SEQ ID NO: 832432 - RNA, 19 nt, Artificial Sequence
  Description of Artificial Sequence: Synthetic oligonucleotide
  Sense strand starting at position 3508 of SEQ ID NO: 587972
ugugauuacaugggcuaau

SEQ ID NO: 832433 - RNA, 19 nt, Artificial Sequence
  Description of Artificial Sequence: Synthetic oligonucleotide
  Antisense strand to SEQ ID NO: 832432
auuagcccauguaaucaca

SEQ ID NO: 832434 - RNA, 19 nt, Artificial Sequence
  Description of Artificial Sequence: Synthetic oligonucleotide
  Sense strand starting at position 3509 of SEQ ID NO: 587972
gugauuacaugggcuaauc

SEQ ID NO: 832435 - RNA, 19 nt, Artificial Sequence
  Description of Artificial Sequence: Synthetic oligonucleotide
  Antisense strand to SEQ ID NO: 832434
gauuagcccauguaaucac

SEQ ID NO: 832436 - RNA, 19 nt, Artificial Sequence
  Description of Artificial Sequence: Synthetic oligonucleotide
  Sense strand starting at position 3519 of SEQ ID NO: 587972
gggcuaaucuguguaaaga

SEQ ID NO: 832437 - RNA, 19 nt, Artificial Sequence
  Description of Artificial Sequence: Synthetic oligonucleotide
  Antisense strand to SEQ ID NO: 832436
ucuuuacacagauuagccc

SEQ ID NO: 832438 - RNA, 19 nt, Artificial Sequence
  Description of Artificial Sequence: Synthetic oligonucleotide
  Sense strand starting at position 3520 of SEQ ID NO: 587972
ggcuaaucuguguaaagag

SEQ ID NO: 832439 - RNA, 19 nt, Artificial Sequence
  Description of Artificial Sequence: Synthetic oligonucleotide
  Antisense strand to SEQ ID NO: 832438
cucuuuacacagauuagcc

SEQ ID NO: 832440 - RNA, 19 nt, Artificial Sequence
  Description of Artificial Sequence: Synthetic oligonucleotide
  Sense strand starting at position 3529 of SEQ ID NO: 587972
guguaaagagccuagaaua

SEQ ID NO: 832441 - RNA, 19 nt, Artificial Sequence
  Description of Artificial Sequence: Synthetic oligonucleotide
  Antisense strand to SEQ ID NO: 832440
uauucuaggcucuuuacac

SEQ ID NO: 832442 - RNA, 19 nt, Artificial Sequence
  Description of Artificial Sequence: Synthetic oligonucleotide
  Sense strand starting at position 3552 of SEQ ID NO: 587972
acauguaaucaguguuaca

SEQ ID NO: 832443 - RNA, 19 nt, Artificial Sequence
  Description of Artificial Sequence: Synthetic oligonucleotide
  Antisense strand to SEQ ID NO: 832442
uguaacacugauuacaugu

SEQ ID NO: 832444 - RNA, 19 nt, Artificial Sequence
  Description of Artificial Sequence: Synthetic oligonucleotide
  Sense strand starting at position 3797 of SEQ ID NO: 587972
ggaugacaugaaugggcuu

SEQ ID NO: 832445 - RNA, 19 nt, Artificial Sequence
  Description of Artificial Sequence: Synthetic oligonucleotide
  Antisense strand to SEQ ID NO: 832444
aagcccauucaugucaucc

SEQ ID NO: 832446 - RNA, 19 nt, Artificial Sequence
  Description of Artificial Sequence: Synthetic oligonucleotide
  Sense strand starting at position 3835 of SEQ ID NO: 587972
cuggaauacuggcuuuaca

SEQ ID NO: 832447 - RNA, 19 nt, Artificial Sequence
  Description of Artificial Sequence: Synthetic oligonucleotide
  Antisense strand to SEQ ID NO: 832446
uguaaagccaguauuccag

SEQ ID NO: 832448 - RNA, 19 nt, Artificial Sequence
  Description of Artificial Sequence: Synthetic oligonucleotide
  Sense strand starting at position 361 of SEQ ID NO: 587973
guuuccuuucugcauauuu

SEQ ID NO: 832449 - RNA, 19 nt, Artificial Sequence
  Description of Artificial Sequence: Synthetic oligonucleotide
  Antisense strand to SEQ ID NO: 832448
aaauaugcagaaaggaaac

SEQ ID NO: 832450 - RNA, 19 nt, Artificial Sequence
  Description of Artificial Sequence: Synthetic oligonucleotide
  Sense strand starting at position 448 of SEQ ID NO: 587973
gcugcaauuuaguauuugu

SEQ ID NO: 832451 - RNA, 19 nt, Artificial Sequence
  Description of Artificial Sequence: Synthetic oligonucleotide
  Antisense strand to SEQ ID NO: 832450
acaaauacuaaauugcagc

SEQ ID NO: 832452 - RNA, 19 nt, Artificial Sequence
  Description of Artificial Sequence: Synthetic oligonucleotide
  Sense strand starting at position 463 of SEQ ID NO: 587973
uugucaagauagcugguaa

SEQ ID NO: 832453 - RNA, 19 nt, Artificial Sequence
  Description of Artificial Sequence: Synthetic oligonucleotide
  Antisense strand to SEQ ID NO: 832452
uuaccagcuaucuugacaa

SEQ ID NO: 832454 - RNA, 19 nt, Artificial Sequence
  Description of Artificial Sequence: Synthetic oligonucleotide
  Sense strand starting at position 464 of SEQ ID NO: 587973
ugucaagauagcugguaaa

SEQ ID NO: 832455 - RNA, 19 nt, Artificial Sequence
  Description of Artificial Sequence: Synthetic oligonucleotide
  Antisense strand to SEQ ID NO: 832454
uuuaccagcuaucuugaca

SEQ ID NO: 832456 - RNA, 19 nt, Artificial Sequence
  Description of Artificial Sequence: Synthetic oligonucleotide
  Sense strand starting at position 681 of SEQ ID NO: 587973
cugguauaucuguaaccgu

SEQ ID NO: 832457 - RNA, 19 nt, Artificial Sequence
  Description of Artificial Sequence: Synthetic oligonucleotide
  Antisense strand to SEQ ID NO: 832456
acgguuacagauauaccag

SEQ ID NO: 832458 - RNA, 19 nt, Artificial Sequence
  Description of Artificial Sequence: Synthetic oligonucleotide
  Sense strand starting at position 955 of SEQ ID NO: 587973
cugagcuugucucugaaga

SEQ ID NO: 832459 - RNA, 19 nt, Artificial Sequence
  Description of Artificial Sequence: Synthetic oligonucleotide
  Antisense strand to SEQ ID NO: 832458
ucuucagagacaagcucag

SEQ ID NO: 832460 - RNA, 19 nt, Artificial Sequence
  Description of Artificial Sequence: Synthetic oligonucleotide
  Sense strand starting at position 956 of SEQ ID NO: 587973
ugagcuugucucugaagaa

SEQ ID NO: 832461 - RNA, 19 nt, Artificial Sequence
  Description of Artificial Sequence: Synthetic oligonucleotide
  Antisense strand to SEQ ID NO: 832460
uucuucagagacaagcuca

SEQ ID NO: 832462 - RNA, 19 nt, Artificial Sequence
  Description of Artificial Sequence: Synthetic oligonucleotide
  Sense strand starting at position 1226 of SEQ ID NO: 587973
auacaucauuucguuuagu

SEQ ID NO: 832463 - RNA, 19 nt, Artificial Sequence
  Description of Artificial Sequence: Synthetic oligonucleotide
  Antisense strand to SEQ ID NO: 832462
acuaaacgaaaugauguau

SEQ ID NO: 832464 - RNA, 19 nt, Artificial Sequence
  Description of Artificial Sequence: Synthetic oligonucleotide
  Sense strand starting at position 1236 of SEQ ID NO: 587973
ucguuuaguccucccugca

SEQ ID NO: 832465 - RNA, 19 nt, Artificial Sequence
  Description of Artificial Sequence: Synthetic oligonucleotide
  Antisense strand to SEQ ID NO: 832464
ugcagggaggacuaaacga

SEQ ID NO: 832466 - RNA, 19 nt, Artificial Sequence
  Description of Artificial Sequence: Synthetic oligonucleotide
  Sense strand starting at position 1612 of SEQ ID NO: 587973
ggcucuuugacccagagga

SEQ ID NO: 832467 - RNA, 19 nt, Artificial Sequence
  Description of Artificial Sequence: Synthetic oligonucleotide
  Antisense strand to SEQ ID NO: 832466
uccucugggucaaagagcc

SEQ ID NO: 832468 - RNA, 19 nt, Artificial Sequence
  Description of Artificial Sequence: Synthetic oligonucleotide
  Sense strand starting at position 2349 of SEQ ID NO: 587973
agucauuacccagaaaugu

SEQ ID NO: 832469 - RNA, 19 nt, Artificial Sequence
  Description of Artificial Sequence: Synthetic oligonucleotide
  Antisense strand to SEQ ID NO: 832468
acauuucuggguaaugacu

SEQ ID NO: 832470 - RNA, 19 nt, Artificial Sequence
  Description of Artificial Sequence: Synthetic oligonucleotide
  Sense strand starting at position 2383 of SEQ ID NO: 587973
gguuguaauugaucccuga

SEQ ID NO: 832471 - RNA, 19 nt, Artificial Sequence
  Description of Artificial Sequence: Synthetic oligonucleotide
  Antisense strand to SEQ ID NO: 832470
ucagggaucaauuacaacc

SEQ ID NO: 832472 - RNA, 19 nt, Artificial Sequence
  Description of Artificial Sequence: Synthetic oligonucleotide
  Sense strand starting at position 2386 of SEQ ID NO: 587973
uguaauugaucccugaaag

SEQ ID NO: 832473 - RNA, 19 nt, Artificial Sequence
  Description of Artificial Sequence: Synthetic oligonucleotide
  Antisense strand to SEQ ID NO: 832472
cuuucagggaucaauuaca

SEQ ID NO: 832474 - RNA, 19 nt, Artificial Sequence
  Description of Artificial Sequence: Synthetic oligonucleotide
  Sense strand starting at position 2387 of SEQ ID NO: 587973
guaauugaucccugaaagc

SEQ ID NO: 832475 - RNA, 19 nt, Artificial Sequence
  Description of Artificial Sequence: Synthetic oligonucleotide
  Antisense strand to SEQ ID NO: 832474
gcuuucagggaucaauuac

SEQ ID NO: 832476 - RNA, 19 nt, Artificial Sequence
  Description of Artificial Sequence: Synthetic oligonucleotide
  Sense strand starting at position 2429 of SEQ ID NO: 587973
cacggugauguuuaagaaa

SEQ ID NO: 832477 - RNA, 19 nt, Artificial Sequence
  Description of Artificial Sequence: Synthetic oligonucleotide
  Antisense strand to SEQ ID NO: 832476
uuucuuaaacaucaccgug

SEQ ID NO: 832478 - RNA, 19 nt, Artificial Sequence
  Description of Artificial Sequence: Synthetic oligonucleotide
  Sense strand starting at position 2548 of SEQ ID NO: 587973
ugcuauaugucaucucaua

SEQ ID NO: 832479 - RNA, 19 nt, Artificial Sequence
  Description of Artificial Sequence: Synthetic oligonucleotide
  Antisense strand to SEQ ID NO: 832478
uaugagaugacauauagca

SEQ ID NO: 832480 - RNA, 19 nt, Artificial Sequence
  Description of Artificial Sequence: Synthetic oligonucleotide
  Sense strand starting at position 2653 of SEQ ID NO: 587973
guuuaaaguugagugacuu

SEQ ID NO: 832481 - RNA, 19 nt, Artificial Sequence
  Description of Artificial Sequence: Synthetic oligonucleotide
  Antisense strand to SEQ ID NO: 832480
aagucacucaacuuuaaac

SEQ ID NO: 832482 - RNA, 19 nt, Artificial Sequence
  Description of Artificial Sequence: Synthetic oligonucleotide
  Sense strand starting at position 2846 of SEQ ID NO: 587973
gcuaguaugcaggaauaau

SEQ ID NO: 832483 - RNA, 19 nt, Artificial Sequence
  Description of Artificial Sequence: Synthetic oligonucleotide
  Antisense strand to SEQ ID NO: 832482
auuauuccugcauacuagc

SEQ ID NO: 832484 - RNA, 19 nt, Artificial Sequence
  Description of Artificial Sequence: Synthetic oligonucleotide
  Sense strand starting at position 2874 of SEQ ID NO: 587973
agacuugaauucuaggaau

SEQ ID NO: 832485 - RNA, 19 nt, Artificial Sequence
  Description of Artificial Sequence: Synthetic oligonucleotide
  Antisense strand to SEQ ID NO: 832484
auuccuagaauucaagucu

SEQ ID NO: 832486 - RNA, 19 nt, Artificial Sequence
  Description of Artificial Sequence: Synthetic oligonucleotide
  Sense strand starting at position 2887 of SEQ ID NO: 587973
aggaauuguuuccuuuaua

SEQ ID NO: 832487 - RNA, 19 nt, Artificial Sequence
  Description of Artificial Sequence: Synthetic oligonucleotide
  Antisense strand to SEQ ID NO: 832486
uauaaaggaaacaauuccu

SEQ ID NO: 832488 - RNA, 19 nt, Artificial Sequence
  Description of Artificial Sequence: Synthetic oligonucleotide
  Sense strand starting at position 2888 of SEQ ID NO: 587973
ggaauuguuuccuuuauau

SEQ ID NO: 832489 - RNA, 19 nt, Artificial Sequence
  Description of Artificial Sequence: Synthetic oligonucleotide
  Antisense strand to SEQ ID NO: 832488
auauaaaggaaacaauucc

SEQ ID NO: 832490 - RNA, 19 nt, Artificial Sequence
  Description of Artificial Sequence: Synthetic oligonucleotide
  Sense strand starting at position 2903 of SEQ ID NO: 587973
auauuaaaugcgugaguua

SEQ ID NO: 832491 - RNA, 19 nt, Artificial Sequence
  Description of Artificial Sequence: Synthetic oligonucleotide
  Antisense strand to SEQ ID NO: 832490
uaacucacgcauuuaauau

SEQ ID NO: 832492 - RNA, 19 nt, Artificial Sequence
  Description of Artificial Sequence: Synthetic oligonucleotide
  Sense strand starting at position 2904 of SEQ ID NO: 587973
uauuaaaugcgugaguuaa

SEQ ID NO: 832493 - RNA, 19 nt, Artificial Sequence
  Description of Artificial Sequence: Synthetic oligonucleotide
  Antisense strand to SEQ ID NO: 832492
uuaacucacgcauuuaaua

SEQ ID NO: 832494 - RNA, 19 nt, Artificial Sequence
  Description of Artificial Sequence: Synthetic oligonucleotide
  Sense strand starting at position 2906 of SEQ ID NO: 587973
uuaaaugcgugaguuaaac

SEQ ID NO: 832495 - RNA, 19 nt, Artificial Sequence
  Description of Artificial Sequence: Synthetic oligonucleotide
  Antisense strand to SEQ ID NO: 832494
guuuaacucacgcauuuaa

SEQ ID NO: 832496 - RNA, 19 nt, Artificial Sequence
  Description of Artificial Sequence: Synthetic oligonucleotide
  Sense strand starting at position 2986 of SEQ ID NO: 587973
agaguuaaauccuugugga

SEQ ID NO: 832497 - RNA, 19 nt, Artificial Sequence
  Description of Artificial Sequence: Synthetic oligonucleotide
  Antisense strand to SEQ ID NO: 832496
uccacaaggauuuaacucu

SEQ ID NO: 832498 - RNA, 19 nt, Artificial Sequence
  Description of Artificial Sequence: Synthetic oligonucleotide
  Sense strand starting at position 2987 of SEQ ID NO: 587973
gaguuaaauccuuguggaa

SEQ ID NO: 832499 - RNA, 19 nt, Artificial Sequence
  Description of Artificial Sequence: Synthetic oligonucleotide
  Antisense strand to SEQ ID NO: 832498
uuccacaaggauuuaacuc

SEQ ID NO: 832500 - RNA, 19 nt, Artificial Sequence
  Description of Artificial Sequence: Synthetic oligonucleotide
  Sense strand starting at position 3049 of SEQ ID NO: 587973
ggauuuaaguuugaaggaa

SEQ ID NO: 832501 - RNA, 19 nt, Artificial Sequence
  Description of Artificial Sequence: Synthetic oligonucleotide
  Antisense strand to SEQ ID NO: 832500
uuccuucaaacuuaaaucc

SEQ ID NO: 832502 - RNA, 19 nt, Artificial Sequence
  Description of Artificial Sequence: Synthetic oligonucleotide
  Sense strand starting at position 3252 of SEQ ID NO: 587973
acauucuguccuuacaugu

SEQ ID NO: 832503 - RNA, 19 nt, Artificial Sequence
  Description of Artificial Sequence: Synthetic oligonucleotide
  Antisense strand to SEQ ID NO: 832502
acauguaaggacagaaugu

SEQ ID NO: 832504 - RNA, 19 nt, Artificial Sequence
  Description of Artificial Sequence: Synthetic oligonucleotide
  Sense strand starting at position 3273 of SEQ ID NO: 587973
ugaguuuacuuccuagcag

SEQ ID NO: 832505 - RNA, 19 nt, Artificial Sequence
  Description of Artificial Sequence: Synthetic oligonucleotide
  Antisense strand to SEQ ID NO: 832504
cugcuaggaaguaaacuca

SEQ ID NO: 832506 - RNA, 19 nt, Artificial Sequence
  Description of Artificial Sequence: Synthetic oligonucleotide
  Sense strand starting at position 3319 of SEQ ID NO: 587973
acauuauuacuugguugau

SEQ ID NO: 832507 - RNA, 19 nt, Artificial Sequence
  Description of Artificial Sequence: Synthetic oligonucleotide
  Antisense strand to SEQ ID NO: 832506
aucaaccaaguaauaaugu

SEQ ID NO: 832508 - RNA, 19 nt, Artificial Sequence
  Description of Artificial Sequence: Synthetic oligonucleotide
  Sense strand starting at position 3325 of SEQ ID NO: 587973
uuacuugguugauuauagu

SEQ ID NO: 832509 - RNA, 19 nt, Artificial Sequence
  Description of Artificial Sequence: Synthetic oligonucleotide
  Antisense strand to SEQ ID NO: 832508
acuauaaucaaccaaguaa

SEQ ID NO: 832510 - RNA, 19 nt, Artificial Sequence
  Description of Artificial Sequence: Synthetic oligonucleotide
  Sense strand starting at position 3331 of SEQ ID NO: 587973
gguugauuauaguuauaag

SEQ ID NO: 832511 - RNA, 19 nt, Artificial Sequence
  Description of Artificial Sequence: Synthetic oligonucleotide
  Antisense strand to SEQ ID NO: 832510
cuuauaacuauaaucaacc

SEQ ID NO: 832512 - RNA, 19 nt, Artificial Sequence
  Description of Artificial Sequence: Synthetic oligonucleotide
  Sense strand starting at position 3343 of SEQ ID NO: 587973
uuauaagugcuaugagaga

SEQ ID NO: 832513 - RNA, 19 nt, Artificial Sequence
  Description of Artificial Sequence: Synthetic oligonucleotide
  Antisense strand to SEQ ID NO: 832512
ucucucauagcacuuauaa

SEQ ID NO: 832514 - RNA, 19 nt, Artificial Sequence
  Description of Artificial Sequence: Synthetic oligonucleotide
  Sense strand starting at position 3409 of SEQ ID NO: 587973
gguuucuuugaggaaguag

SEQ ID NO: 832515 - RNA, 19 nt, Artificial Sequence
  Description of Artificial Sequence: Synthetic oligonucleotide
  Antisense strand to SEQ ID NO: 832514
cuacuuccucaaagaaacc

SEQ ID NO: 832516 - RNA, 19 nt, Artificial Sequence
  Description of Artificial Sequence: Synthetic oligonucleotide
  Sense strand starting at position 3460 of SEQ ID NO: 587973
gggugaguuucagugggag

SEQ ID NO: 832517 - RNA, 19 nt, Artificial Sequence
  Description of Artificial Sequence: Synthetic oligonucleotide
  Antisense strand to SEQ ID NO: 832516
cucccacugaaacucaccc

SEQ ID NO: 832518 - RNA, 19 nt, Artificial Sequence
  Description of Artificial Sequence: Synthetic oligonucleotide
  Sense strand starting at position 3462 of SEQ ID NO: 587973
gugaguuucagugggagaa

SEQ ID NO: 832519 - RNA, 19 nt, Artificial Sequence
  Description of Artificial Sequence: Synthetic oligonucleotide
  Antisense strand to SEQ ID NO: 832518
uucucccacugaaacucac

SEQ ID NO: 832520 - RNA, 19 nt, Artificial Sequence
  Description of Artificial Sequence: Synthetic oligonucleotide
  Sense strand starting at position 3463 of SEQ ID NO: 587973
ugaguuucagugggagaaa

SEQ ID NO: 832521 - RNA, 19 nt, Artificial Sequence
  Description of Artificial Sequence: Synthetic oligonucleotide
  Antisense strand to SEQ ID NO: 832520
uuucucccacugaaacuca

SEQ ID NO: 832522 - RNA, 19 nt, Artificial Sequence
  Description of Artificial Sequence: Synthetic oligonucleotide
  Sense strand starting at position 3491 of SEQ ID NO: 587973
gcaggcugaacucaguaaa

SEQ ID NO: 832523 - RNA, 19 nt, Artificial Sequence
  Description of Artificial Sequence: Synthetic oligonucleotide
  Antisense strand to SEQ ID NO: 832522
uuuacugaguucagccugc

SEQ ID NO: 832524 - RNA, 19 nt, Artificial Sequence
  Description of Artificial Sequence: Synthetic oligonucleotide
  Sense strand starting at position 3503 of SEQ ID NO: 587973
caguaaaggccuugaggga

SEQ ID NO: 832525 - RNA, 19 nt, Artificial Sequence
  Description of Artificial Sequence: Synthetic oligonucleotide
  Antisense strand to SEQ ID NO: 832524
ucccucaaggccuuuacug

SEQ ID NO: 832526 - RNA, 19 nt, Artificial Sequence
  Description of Artificial Sequence: Synthetic oligonucleotide
  Sense strand starting at position 3793 of SEQ ID NO: 587973
gccauugucgugccuggau

SEQ ID NO: 832527 - RNA, 19 nt, Artificial Sequence
  Description of Artificial Sequence: Synthetic oligonucleotide
  Antisense strand to SEQ ID NO: 832526
auccaggcacgacaauggc

SEQ ID NO: 832528 - RNA, 19 nt, Artificial Sequence
  Description of Artificial Sequence: Synthetic oligonucleotide
  Sense strand starting at position 73 of SEQ ID NO: 587974
ugucacaugaggugacaua

SEQ ID NO: 832529 - RNA, 19 nt, Artificial Sequence
  Description of Artificial Sequence: Synthetic oligonucleotide
  Antisense strand to SEQ ID NO: 832528
uaugucaccucaugugaca

SEQ ID NO: 832530 - RNA, 19 nt, Artificial Sequence
  Description of Artificial Sequence: Synthetic oligonucleotide
  Sense strand starting at position 138 of SEQ ID NO: 587974
gacagaauggcuugccuua

SEQ ID NO: 832531 - RNA, 19 nt, Artificial Sequence
  Description of Artificial Sequence: Synthetic oligonucleotide
  Antisense strand to SEQ ID NO: 832530
uaaggcaagccauucuguc

SEQ ID NO: 832532 - RNA, 19 nt, Artificial Sequence
  Description of Artificial Sequence: Synthetic oligonucleotide
  Sense strand starting at position 188 of SEQ ID NO: 587974
ggaguuuguuagcuuagca

SEQ ID NO: 832533 - RNA, 19 nt, Artificial Sequence
  Description of Artificial Sequence: Synthetic oligonucleotide
  Antisense strand to SEQ ID NO: 832532
ugcuaagcuaacaaacucc

SEQ ID NO: 832534 - RNA, 19 nt, Artificial Sequence
  Description of Artificial Sequence: Synthetic oligonucleotide
  Sense strand starting at position 216 of SEQ ID NO: 587974
ucagguuucuaggucuagu

SEQ ID NO: 832535 - RNA, 19 nt, Artificial Sequence
  Description of Artificial Sequence: Synthetic oligonucleotide
  Antisense strand to SEQ ID NO: 832534
acuagaccuagaaaccuga

SEQ ID NO: 832536 - RNA, 19 nt, Artificial Sequence
  Description of Artificial Sequence: Synthetic oligonucleotide
  Sense strand starting at position 227 of SEQ ID NO: 587974
ggucuagugugaccuugaa

SEQ ID NO: 832537 - RNA, 19 nt, Artificial Sequence
  Description of Artificial Sequence: Synthetic oligonucleotide
  Antisense strand to SEQ ID NO: 832536
uucaaggucacacuagacc

SEQ ID NO: 832538 - RNA, 19 nt, Artificial Sequence
  Description of Artificial Sequence: Synthetic oligonucleotide
  Sense strand starting at position 258 of SEQ ID NO: 587974
guaacaguuucuucuacuc

SEQ ID NO: 832539 - RNA, 19 nt, Artificial Sequence
  Description of Artificial Sequence: Synthetic oligonucleotide
  Antisense strand to SEQ ID NO: 832538
gaguagaagaaacuguuac

SEQ ID NO: 832540 - RNA, 19 nt, Artificial Sequence
  Description of Artificial Sequence: Synthetic oligonucleotide
  Sense strand starting at position 278 of SEQ ID NO: 587974
acuguuaaugacgacauca

SEQ ID NO: 832541 - RNA, 19 nt, Artificial Sequence
  Description of Artificial Sequence: Synthetic oligonucleotide
  Antisense strand to SEQ ID NO: 832540
ugaugucgucauuaacagu

SEQ ID NO: 832542 - RNA, 19 nt, Artificial Sequence
  Description of Artificial Sequence: Synthetic oligonucleotide
  Sense strand starting at position 280 of SEQ ID NO: 587974
uguuaaugacgacaucauu

SEQ ID NO: 832543 - RNA, 19 nt, Artificial Sequence
  Description of Artificial Sequence: Synthetic oligonucleotide
  Antisense strand to SEQ ID NO: 832542
aaugaugucgucauuaaca

SEQ ID NO: 832544 - RNA, 19 nt, Artificial Sequence
  Description of Artificial Sequence: Synthetic oligonucleotide
  Sense strand starting at position 339 of SEQ ID NO: 587974
acauuuagcugguguaaug

SEQ ID NO: 832545 - RNA, 19 nt, Artificial Sequence
  Description of Artificial Sequence: Synthetic oligonucleotide
  Antisense strand to SEQ ID NO: 832544
cauuacaccagcuaaaugu

SEQ ID NO: 832546 - RNA, 19 nt, Artificial Sequence
  Description of Artificial Sequence: Synthetic oligonucleotide
  Sense strand starting at position 710 of SEQ ID NO: 587974
ggaggaugauuugagguca

SEQ ID NO: 832547 - RNA, 19 nt, Artificial Sequence
  Description of Artificial Sequence: Synthetic oligonucleotide
  Antisense strand to SEQ ID NO: 832546
ugaccucaaaucauccucc

SEQ ID NO: 832548 - RNA, 19 nt, Artificial Sequence
  Description of Artificial Sequence: Synthetic oligonucleotide
  Sense strand starting at position 1070 of SEQ ID NO: 587974
uuccucaaugcugaaaugu

SEQ ID NO: 832549 - RNA, 19 nt, Artificial Sequence
  Description of Artificial Sequence: Synthetic oligonucleotide
  Antisense strand to SEQ ID NO: 832548
acauuucagcauugaggaa

SEQ ID NO: 832550 - RNA, 19 nt, Artificial Sequence
  Description of Artificial Sequence: Synthetic oligonucleotide
  Sense strand starting at position 1079 of SEQ ID NO: 587974
gcugaaauguaauuagauu

SEQ ID NO: 832551 - RNA, 19 nt, Artificial Sequence
  Description of Artificial Sequence: Synthetic oligonucleotide
  Antisense strand to SEQ ID NO: 832550
aaucuaauuacauuucagc

SEQ ID NO: 832552 - RNA, 19 nt, Artificial Sequence
  Description of Artificial Sequence: Synthetic oligonucleotide
  Sense strand starting at position 1161 of SEQ ID NO: 587974
agaguagaauuagaagaca

SEQ ID NO: 832553 - RNA, 19 nt, Artificial Sequence
  Description of Artificial Sequence: Synthetic oligonucleotide
  Antisense strand to SEQ ID NO: 832552
ugucuucuaauucuacucu

SEQ ID NO: 832554 - RNA, 19 nt, Artificial Sequence
  Description of Artificial Sequence: Synthetic oligonucleotide
  Sense strand starting at position 2107 of SEQ ID NO: 587974
gcguuauccgccagcugag

SEQ ID NO: 832555 - RNA, 19 nt, Artificial Sequence
  Description of Artificial Sequence: Synthetic oligonucleotide
  Antisense strand to SEQ ID NO: 832554
cucagcuggcggauaacgc

SEQ ID NO: 832556 - RNA, 19 nt, Artificial Sequence
  Description of Artificial Sequence: Synthetic oligonucleotide
  Sense strand starting at position 2158 of SEQ ID NO: 587974
ggcuccuccuuccuagaau

SEQ ID NO: 832557 - RNA, 19 nt, Artificial Sequence
  Description of Artificial Sequence: Synthetic oligonucleotide
  Antisense strand to SEQ ID NO: 832556
auucuaggaaggaggagcc

SEQ ID NO: 832558 - RNA, 19 nt, Artificial Sequence
  Description of Artificial Sequence: Synthetic oligonucleotide
  Sense strand starting at position 2212 of SEQ ID NO: 587974
gcuguacgagaaugacaau

SEQ ID NO: 832559 - RNA, 19 nt, Artificial Sequence
  Description of Artificial Sequence: Synthetic oligonucleotide
  Antisense strand to SEQ ID NO: 832558
auugucauucucguacagc

SEQ ID NO: 832560 - RNA, 19 nt, Artificial Sequence
  Description of Artificial Sequence: Synthetic oligonucleotide
  Sense strand starting at position 2232 of SEQ ID NO: 587974
cccagaagccaggguuaaa

SEQ ID NO: 832561 - RNA, 19 nt, Artificial Sequence
  Description of Artificial Sequence: Synthetic oligonucleotide
  Antisense strand to SEQ ID NO: 832560
uuuaacccuggcuucuggg

SEQ ID NO: 832562 - RNA, 19 nt, Artificial Sequence
  Description of Artificial Sequence: Synthetic oligonucleotide
  Sense strand starting at position 2264 of SEQ ID NO: 587974
cguggacgacaucacuaaa

SEQ ID NO: 832563 - RNA, 19 nt, Artificial Sequence
  Description of Artificial Sequence: Synthetic oligonucleotide
  Antisense strand to SEQ ID NO: 832562
uuuagugaugucguccacg

SEQ ID NO: 832564 - RNA, 19 nt, Artificial Sequence
  Description of Artificial Sequence: Synthetic oligonucleotide
  Sense strand starting at position 2283 of SEQ ID NO: 587974
aacuguuuccuuugcggaa

SEQ ID NO: 832565 - RNA, 19 nt, Artificial Sequence
  Description of Artificial Sequence: Synthetic oligonucleotide
  Antisense strand to SEQ ID NO: 832564
uuccgcaaaggaaacaguu

SEQ ID NO: 832566 - RNA, 19 nt, Artificial Sequence
  Description of Artificial Sequence: Synthetic oligonucleotide
  Sense strand starting at position 2284 of SEQ ID NO: 587974
acuguuuccuuugcggaaa

SEQ ID NO: 832567 - RNA, 19 nt, Artificial Sequence
  Description of Artificial Sequence: Synthetic oligonucleotide
  Antisense strand to SEQ ID NO: 832566
uuuccgcaaaggaaacagu

SEQ ID NO: 832568 - RNA, 19 nt, Artificial Sequence
  Description of Artificial Sequence: Synthetic oligonucleotide
  Sense strand starting at position 2301 of SEQ ID NO: 587974
aaaugauucuagccuguug

SEQ ID NO: 832569 - RNA, 19 nt, Artificial Sequence
  Description of Artificial Sequence: Synthetic oligonucleotide
  Antisense strand to SEQ ID NO: 832568
caacaggcuagaaucauuu

SEQ ID NO: 832570 - RNA, 19 nt, Artificial Sequence
  Description of Artificial Sequence: Synthetic oligonucleotide
  Sense strand starting at position 2328 of SEQ ID NO: 587974
gaaagaauauacgauuuga

SEQ ID NO: 832571 - RNA, 19 nt, Artificial Sequence
  Description of Artificial Sequence: Synthetic oligonucleotide
  Antisense strand to SEQ ID NO: 832570
ucaaaucguauauucuuuc

SEQ ID NO: 832572 - RNA, 19 nt, Artificial Sequence
  Description of Artificial Sequence: Synthetic oligonucleotide
  Sense strand starting at position 2357 of SEQ ID NO: 587974
gugauaacuuaauugaauc

SEQ ID NO: 832573 - RNA, 19 nt, Artificial Sequence
  Description of Artificial Sequence: Synthetic oligonucleotide
  Antisense strand to SEQ ID NO: 832572
gauucaauuaaguuaucac

SEQ ID NO: 832574 - RNA, 19 nt, Artificial Sequence
  Description of Artificial Sequence: Synthetic oligonucleotide
  Sense strand starting at position 2365 of SEQ ID NO: 587974
uuaauugaaucaucggguu

SEQ ID NO: 832575 - RNA, 19 nt, Artificial Sequence
  Description of Artificial Sequence: Synthetic oligonucleotide
  Antisense strand to SEQ ID NO: 832574
aacccgaugauucaauuaa

SEQ ID NO: 832576 - RNA, 19 nt, Artificial Sequence
  Description of Artificial Sequence: Synthetic oligonucleotide
  Sense strand starting at position 2371 of SEQ ID NO: 587974
gaaucaucggguuggagga

SEQ ID NO: 832577 - RNA, 19 nt, Artificial Sequence
  Description of Artificial Sequence: Synthetic oligonucleotide
  Antisense strand to SEQ ID NO: 832576
uccuccaacccgaugauuc

SEQ ID NO: 832578 - RNA, 19 nt, Artificial Sequence
  Description of Artificial Sequence: Synthetic oligonucleotide
  Sense strand starting at position 2410 of SEQ ID NO: 587974
guaauauugauagguguua

SEQ ID NO: 832579 - RNA, 19 nt, Artificial Sequence
  Description of Artificial Sequence: Synthetic oligonucleotide
  Antisense strand to SEQ ID NO: 832578
uaacaccuaucaauauuac

SEQ ID NO: 832580 - RNA, 19 nt, Artificial Sequence
  Description of Artificial Sequence: Synthetic oligonucleotide
  Sense strand starting at position 2415 of SEQ ID NO: 587974
auugauagguguuaccaga

SEQ ID NO: 832581 - RNA, 19 nt, Artificial Sequence
  Description of Artificial Sequence: Synthetic oligonucleotide
  Antisense strand to SEQ ID NO: 832580
ucugguaacaccuaucaau

SEQ ID NO: 832582 - RNA, 19 nt, Artificial Sequence
  Description of Artificial Sequence: Synthetic oligonucleotide
  Sense strand starting at position 2431 of SEQ ID NO: 587974
agauuugucuucggaaauc

SEQ ID NO: 832583 - RNA, 19 nt, Artificial Sequence
  Description of Artificial Sequence: Synthetic oligonucleotide
  Antisense strand to SEQ ID NO: 832582
gauuuccgaagacaaaucu

SEQ ID NO: 832584 - RNA, 19 nt, Artificial Sequence
  Description of Artificial Sequence: Synthetic oligonucleotide
  Sense strand starting at position 2543 of SEQ ID NO: 587974
agauuaaacugggaaucca

SEQ ID NO: 832585 - RNA, 19 nt, Artificial Sequence
  Description of Artificial Sequence: Synthetic oligonucleotide
  Antisense strand to SEQ ID NO: 832584
uggauucccaguuuaaucu

SEQ ID NO: 832586 - RNA, 19 nt, Artificial Sequence
  Description of Artificial Sequence: Synthetic oligonucleotide
  Sense strand starting at position 2553 of SEQ ID NO: 587974
gggaauccacagugcuuaa

SEQ ID NO: 832587 - RNA, 19 nt, Artificial Sequence
  Description of Artificial Sequence: Synthetic oligonucleotide
  Antisense strand to SEQ ID NO: 832586
uuaagcacuguggauuccc

SEQ ID NO: 832588 - RNA, 19 nt, Artificial Sequence
  Description of Artificial Sequence: Synthetic oligonucleotide
  Sense strand starting at position 2564 of SEQ ID NO: 587974
gugcuuaaacaguggagga

SEQ ID NO: 832589 - RNA, 19 nt, Artificial Sequence
  Description of Artificial Sequence: Synthetic oligonucleotide
  Antisense strand to SEQ ID NO: 832588
uccuccacuguuuaagcac

SEQ ID NO: 832590 - RNA, 19 nt, Artificial Sequence
  Description of Artificial Sequence: Synthetic oligonucleotide
  Sense strand starting at position 2565 of SEQ ID NO: 587974
ugcuuaaacaguggaggaa

SEQ ID NO: 832591 - RNA, 19 nt, Artificial Sequence
  Description of Artificial Sequence: Synthetic oligonucleotide
  Antisense strand to SEQ ID NO: 832590
uuccuccacuguuuaagca

SEQ ID NO: 832592 - RNA, 19 nt, Artificial Sequence
  Description of Artificial Sequence: Synthetic oligonucleotide
  Sense strand starting at position 3036 of SEQ ID NO: 587974
uagcucagucuugaaggau

SEQ ID NO: 832593 - RNA, 19 nt, Artificial Sequence
  Description of Artificial Sequence: Synthetic oligonucleotide
  Antisense strand to SEQ ID NO: 832592
auccuucaagacugagcua

SEQ ID NO: 832594 - RNA, 19 nt, Artificial Sequence
  Description of Artificial Sequence: Synthetic oligonucleotide
  Sense strand starting at position 3042 of SEQ ID NO: 587974
agucuugaaggaugagcau

SEQ ID NO: 832595 - RNA, 19 nt, Artificial Sequence
  Description of Artificial Sequence: Synthetic oligonucleotide
  Antisense strand to SEQ ID NO: 832594
augcucauccuucaagacu

SEQ ID NO: 832596 - RNA, 19 nt, Artificial Sequence
  Description of Artificial Sequence: Synthetic oligonucleotide
  Sense strand starting at position 3053 of SEQ ID NO: 587974
augagcaucuuaguaauag

SEQ ID NO: 832597 - RNA, 19 nt, Artificial Sequence
  Description of Artificial Sequence: Synthetic oligonucleotide
  Antisense strand to SEQ ID NO: 832596
cuauuacuaagaugcucau

SEQ ID NO: 832598 - RNA, 19 nt, Artificial Sequence
  Description of Artificial Sequence: Synthetic oligonucleotide
  Sense strand starting at position 3081 of SEQ ID NO: 587974
uuuguuuaccacugcagaa

SEQ ID NO: 832599 - RNA, 19 nt, Artificial Sequence
  Description of Artificial Sequence: Synthetic oligonucleotide
  Antisense strand to SEQ ID NO: 832598
uucugcagugguaaacaaa

SEQ ID NO: 832600 - RNA, 19 nt, Artificial Sequence
  Description of Artificial Sequence: Synthetic oligonucleotide
  Sense strand starting at position 3120 of SEQ ID NO: 587974
acauguuauuugcaccgga

SEQ ID NO: 832601 - RNA, 19 nt, Artificial Sequence
  Description of Artificial Sequence: Synthetic oligonucleotide
  Antisense strand to SEQ ID NO: 832600
uccggugcaaauaacaugu

SEQ ID NO: 832602 - RNA, 19 nt, Artificial Sequence
  Description of Artificial Sequence: Synthetic oligonucleotide
  Sense strand starting at position 3182 of SEQ ID NO: 587974
ggagcucacgccugcaauu

SEQ ID NO: 832603 - RNA, 19 nt, Artificial Sequence
  Description of Artificial Sequence: Synthetic oligonucleotide
  Antisense strand to SEQ ID NO: 832602
aauugcaggcgugagcucc

SEQ ID NO: 832604 - RNA, 19 nt, Artificial Sequence
  Description of Artificial Sequence: Synthetic oligonucleotide
  Sense strand starting at position 3576 of SEQ ID NO: 587974
guuagcuucuacuuacauu

SEQ ID NO: 832605 - RNA, 19 nt, Artificial Sequence
  Description of Artificial Sequence: Synthetic oligonucleotide
  Antisense strand to SEQ ID NO: 832604
aauguaaguagaagcuaac

SEQ ID NO: 832606 - RNA, 19 nt, Artificial Sequence
  Description of Artificial Sequence: Synthetic oligonucleotide
  Sense strand starting at position 3959 of SEQ ID NO: 587974
ucuugagcuccuggaauca

SEQ ID NO: 832607 - RNA, 19 nt, Artificial Sequence
  Description of Artificial Sequence: Synthetic oligonucleotide
  Antisense strand to SEQ ID NO: 832606
ugauuccaggagcucaaga

SEQ ID NO: 832608 - RNA, 19 nt, Artificial Sequence
  Description of Artificial Sequence: Synthetic oligonucleotide
  Sense strand starting at position 27 of SEQ ID NO: 587975
caaagugaacacuggcauu

SEQ ID NO: 832609 - RNA, 19 nt, Artificial Sequence
  Description of Artificial Sequence: Synthetic oligonucleotide
  Antisense strand to SEQ ID NO: 832608
aaugccaguguucacuuug

SEQ ID NO: 832610 - RNA, 19 nt, Artificial Sequence
  Description of Artificial Sequence: Synthetic oligonucleotide
  Sense strand starting at position 58 of SEQ ID NO: 587975
gcuacugacagaugguuaa

SEQ ID NO: 832611 - RNA, 19 nt, Artificial Sequence
  Description of Artificial Sequence: Synthetic oligonucleotide
  Antisense strand to SEQ ID NO: 832610
uuaaccaucugucaguagc

SEQ ID NO: 832612 - RNA, 19 nt, Artificial Sequence
  Description of Artificial Sequence: Synthetic oligonucleotide
  Sense strand starting at position 137 of SEQ ID NO: 587975
aagauaauugcguaucaca

SEQ ID NO: 832613 - RNA, 19 nt, Artificial Sequence
  Description of Artificial Sequence: Synthetic oligonucleotide
  Antisense strand to SEQ ID NO: 832612
ugugauacgcaauuaucuu

SEQ ID NO: 832614 - RNA, 19 nt, Artificial Sequence
  Description of Artificial Sequence: Synthetic oligonucleotide
  Sense strand starting at position 183 of SEQ ID NO: 587975
guugacaucaguugagaua

SEQ ID NO: 832615 - RNA, 19 nt, Artificial Sequence
  Description of Artificial Sequence: Synthetic oligonucleotide
  Antisense strand to SEQ ID NO: 832614
uaucucaacugaugucaac

SEQ ID NO: 832616 - RNA, 19 nt, Artificial Sequence
  Description of Artificial Sequence: Synthetic oligonucleotide
  Sense strand starting at position 195 of SEQ ID NO: 587975
ugagauauucgguacaucu

SEQ ID NO: 832617 - RNA, 19 nt, Artificial Sequence
  Description of Artificial Sequence: Synthetic oligonucleotide
  Antisense strand to SEQ ID NO: 832616
agauguaccgaauaucuca

SEQ ID NO: 832618 - RNA, 19 nt, Artificial Sequence
  Description of Artificial Sequence: Synthetic oligonucleotide
  Sense strand starting at position 674 of SEQ ID NO: 587975
ucaaacagugcuuggagau

SEQ ID NO: 832619 - RNA, 19 nt, Artificial Sequence
  Description of Artificial Sequence: Synthetic oligonucleotide
  Antisense strand to SEQ ID NO: 832618
aucuccaagcacuguuuga

SEQ ID NO: 832620 - RNA, 19 nt, Artificial Sequence
  Description of Artificial Sequence: Synthetic oligonucleotide
  Sense strand starting at position 732 of SEQ ID NO: 587975
gguagucacagagagugau

SEQ ID NO: 832621 - RNA, 19 nt, Artificial Sequence
  Description of Artificial Sequence: Synthetic oligonucleotide
  Antisense strand to SEQ ID NO: 832620
aucacucucugugacuacc

SEQ ID NO: 832622 - RNA, 19 nt, Artificial Sequence
  Description of Artificial Sequence: Synthetic oligonucleotide
  Sense strand starting at position 834 of SEQ ID NO: 587975
agaacuuaguucccaugaa

SEQ ID NO: 832623 - RNA, 19 nt, Artificial Sequence
  Description of Artificial Sequence: Synthetic oligonucleotide
  Antisense strand to SEQ ID NO: 832622
uucaugggaacuaaguucu

SEQ ID NO: 832624 - RNA, 19 nt, Artificial Sequence
  Description of Artificial Sequence: Synthetic oligonucleotide
  Sense strand starting at position 949 of SEQ ID NO: 587975
uucuguugacuaugaaacu

SEQ ID NO: 832625 - RNA, 19 nt, Artificial Sequence
  Description of Artificial Sequence: Synthetic oligonucleotide
  Antisense strand to SEQ ID NO: 832624
aguuucauagucaacagaa

SEQ ID NO: 832626 - RNA, 19 nt, Artificial Sequence
  Description of Artificial Sequence: Synthetic oligonucleotide
  Sense strand starting at position 986 of SEQ ID NO: 587975
uccuaaucgcuuuauaagg

SEQ ID NO: 832627 - RNA, 19 nt, Artificial Sequence
  Description of Artificial Sequence: Synthetic oligonucleotide
  Antisense strand to SEQ ID NO: 832626
ccuuauaaagcgauuagga

SEQ ID NO: 832628 - RNA, 19 nt, Artificial Sequence
  Description of Artificial Sequence: Synthetic oligonucleotide
  Sense strand starting at position 995 of SEQ ID NO: 587975
cuuuauaagguaggaguaa

SEQ ID NO: 832629 - RNA, 19 nt, Artificial Sequence
  Description of Artificial Sequence: Synthetic oligonucleotide
  Antisense strand to SEQ ID NO: 832628
uuacuccuaccuuauaaag

SEQ ID NO: 832630 - RNA, 19 nt, Artificial Sequence
  Description of Artificial Sequence: Synthetic oligonucleotide
  Sense strand starting at position 1169 of SEQ ID NO: 587975
auauaaaccugguuuauag

SEQ ID NO: 832631 - RNA, 19 nt, Artificial Sequence
  Description of Artificial Sequence: Synthetic oligonucleotide
  Antisense strand to SEQ ID NO: 832630
cuauaaaccagguuuauau

SEQ ID NO: 832632 - RNA, 19 nt, Artificial Sequence
  Description of Artificial Sequence: Synthetic oligonucleotide
  Sense strand starting at position 1226 of SEQ ID NO: 587975
uuggaagauuucuaaauca

SEQ ID NO: 832633 - RNA, 19 nt, Artificial Sequence
  Description of Artificial Sequence: Synthetic oligonucleotide
  Antisense strand to SEQ ID NO: 832632
ugauuuagaaaucuuccaa

SEQ ID NO: 832634 - RNA, 19 nt, Artificial Sequence
  Description of Artificial Sequence: Synthetic oligonucleotide
  Sense strand starting at position 1284 of SEQ ID NO: 587975
auaaucccaguguaaugua

SEQ ID NO: 832635 - RNA, 19 nt, Artificial Sequence
  Description of Artificial Sequence: Synthetic oligonucleotide
  Antisense strand to SEQ ID NO: 832634
uacauuacacugggauuau

SEQ ID NO: 832636 - RNA, 19 nt, Artificial Sequence
  Description of Artificial Sequence: Synthetic oligonucleotide
  Sense strand starting at position 1453 of SEQ ID NO: 587975
cucacaagugcuuagaaga

SEQ ID NO: 832637 - RNA, 19 nt, Artificial Sequence
  Description of Artificial Sequence: Synthetic oligonucleotide
  Antisense strand to SEQ ID NO: 832636
ucuucuaagcacuugugag

SEQ ID NO: 832638 - RNA, 19 nt, Artificial Sequence
  Description of Artificial Sequence: Synthetic oligonucleotide
  Sense strand starting at position 1589 of SEQ ID NO: 587975
cgacacaucuauucugaaa

SEQ ID NO: 832639 - RNA, 19 nt, Artificial Sequence
  Description of Artificial Sequence: Synthetic oligonucleotide
  Antisense strand to SEQ ID NO: 832638
uuucagaauagaugugucg

SEQ ID NO: 832640 - RNA, 19 nt, Artificial Sequence
  Description of Artificial Sequence: Synthetic oligonucleotide
  Sense strand starting at position 1894 of SEQ ID NO: 587975
uguuuccugguauaaauga

SEQ ID NO: 832641 - RNA, 19 nt, Artificial Sequence
  Description of Artificial Sequence: Synthetic oligonucleotide
  Antisense strand to SEQ ID NO: 832640
ucauuuauaccaggaaaca

SEQ ID NO: 832642 - RNA, 19 nt, Artificial Sequence
  Description of Artificial Sequence: Synthetic oligonucleotide
  Sense strand starting at position 1899 of SEQ ID NO: 587975
ccugguauaaaugagugua

SEQ ID NO: 832643 - RNA, 19 nt, Artificial Sequence
  Description of Artificial Sequence: Synthetic oligonucleotide
  Antisense strand to SEQ ID NO: 832642
uacacucauuuauaccagg

SEQ ID NO: 832644 - RNA, 19 nt, Artificial Sequence
  Description of Artificial Sequence: Synthetic oligonucleotide
  Sense strand starting at position 1901 of SEQ ID NO: 587975
ugguauaaaugaguguaua

SEQ ID NO: 832645 - RNA, 19 nt, Artificial Sequence
  Description of Artificial Sequence: Synthetic oligonucleotide
  Antisense strand to SEQ ID NO: 832644
uauacacucauuuauacca

SEQ ID NO: 832646 - RNA, 19 nt, Artificial Sequence
  Description of Artificial Sequence: Synthetic oligonucleotide
  Sense strand starting at position 1902 of SEQ ID NO: 587975
gguauaaaugaguguauag

SEQ ID NO: 832647 - RNA, 19 nt, Artificial Sequence
  Description of Artificial Sequence: Synthetic oligonucleotide
  Antisense strand to SEQ ID NO: 832646
cuauacacucauuuauacc

SEQ ID NO: 832648 - RNA, 19 nt, Artificial Sequence
  Description of Artificial Sequence: Synthetic oligonucleotide
  Sense strand starting at position 1914 of SEQ ID NO: 587975
uguauaguucuugggaaag

SEQ ID NO: 832649 - RNA, 19 nt, Artificial Sequence
  Description of Artificial Sequence: Synthetic oligonucleotide
  Antisense strand to SEQ ID NO: 832648
cuuucccaagaacuauaca

SEQ ID NO: 832650 - RNA, 19 nt, Artificial Sequence
  Description of Artificial Sequence: Synthetic oligonucleotide
  Sense strand starting at position 1994 of SEQ ID NO: 587975
gcagaaugaggucacacuu

SEQ ID NO: 832651 - RNA, 19 nt, Artificial Sequence
  Description of Artificial Sequence: Synthetic oligonucleotide
  Antisense strand to SEQ ID NO: 832650
aagugugaccucauucugc

SEQ ID NO: 832652 - RNA, 19 nt, Artificial Sequence
  Description of Artificial Sequence: Synthetic oligonucleotide
  Sense strand starting at position 2188 of SEQ ID NO: 587975
gagaaagacucagcgaacu

SEQ ID NO: 832653 - RNA, 19 nt, Artificial Sequence
  Description of Artificial Sequence: Synthetic oligonucleotide
  Antisense strand to SEQ ID NO: 832652
aguucgcugagucuuucuc

SEQ ID NO: 832654 - RNA, 19 nt, Artificial Sequence
  Description of Artificial Sequence: Synthetic oligonucleotide
  Sense strand starting at position 2259 of SEQ ID NO: 587975
gugaucuuuguccaaauca

SEQ ID NO: 832655 - RNA, 19 nt, Artificial Sequence
  Description of Artificial Sequence: Synthetic oligonucleotide
  Antisense strand to SEQ ID NO: 832654
ugauuuggacaaagaucac

SEQ ID NO: 832656 - RNA, 19 nt, Artificial Sequence
  Description of Artificial Sequence: Synthetic oligonucleotide
  Sense strand starting at position 2292 of SEQ ID NO: 587975
ggauaaugcacugaugcua

SEQ ID NO: 832657 - RNA, 19 nt, Artificial Sequence
  Description of Artificial Sequence: Synthetic oligonucleotide
  Antisense strand to SEQ ID NO: 832656
uagcaucagugcauuaucc

SEQ ID NO: 832658 - RNA, 19 nt, Artificial Sequence
  Description of Artificial Sequence: Synthetic oligonucleotide
  Sense strand starting at position 2367 of SEQ ID NO: 587975
aggcaauagguuuaucuaa

SEQ ID NO: 832659 - RNA, 19 nt, Artificial Sequence
  Description of Artificial Sequence: Synthetic oligonucleotide
  Antisense strand to SEQ ID NO: 832658
uuagauaaaccuauugccu

SEQ ID NO: 832660 - RNA, 19 nt, Artificial Sequence
  Description of Artificial Sequence: Synthetic oligonucleotide
  Sense strand starting at position 2375 of SEQ ID NO: 587975
gguuuaucuaaugaagguu

SEQ ID NO: 832661 - RNA, 19 nt, Artificial Sequence
  Description of Artificial Sequence: Synthetic oligonucleotide
  Antisense strand to SEQ ID NO: 832660
aaccuucauuagauaaacc

SEQ ID NO: 832662 - RNA, 19 nt, Artificial Sequence
  Description of Artificial Sequence: Synthetic oligonucleotide
  Sense strand starting at position 3055 of SEQ ID NO: 587975
cugaguuuccacuaccaug

SEQ ID NO: 832663 - RNA, 19 nt, Artificial Sequence
  Description of Artificial Sequence: Synthetic oligonucleotide
  Antisense strand to SEQ ID NO: 832662
caugguaguggaaacucag

SEQ ID NO: 832664 - RNA, 19 nt, Artificial Sequence
  Description of Artificial Sequence: Synthetic oligonucleotide
  Sense strand starting at position 3087 of SEQ ID NO: 587975
cuuguuggacucuauuacu

SEQ ID NO: 832665 - RNA, 19 nt, Artificial Sequence
  Description of Artificial Sequence: Synthetic oligonucleotide
  Antisense strand to SEQ ID NO: 832664
aguaauagaguccaacaag

SEQ ID NO: 832666 - RNA, 19 nt, Artificial Sequence
  Description of Artificial Sequence: Synthetic oligonucleotide
  Sense strand starting at position 3157 of SEQ ID NO: 587975
gugucaaggaaucaagagu

SEQ ID NO: 832667 - RNA, 19 nt, Artificial Sequence
  Description of Artificial Sequence: Synthetic oligonucleotide
  Antisense strand to SEQ ID NO: 832666
acucuugauuccuugacac

SEQ ID NO: 832668 - RNA, 19 nt, Artificial Sequence
  Description of Artificial Sequence: Synthetic oligonucleotide
  Sense strand starting at position 3164 of SEQ ID NO: 587975
ggaaucaagaguggucuca

SEQ ID NO: 832669 - RNA, 19 nt, Artificial Sequence
  Description of Artificial Sequence: Synthetic oligonucleotide
  Antisense strand to SEQ ID NO: 832668
ugagaccacucuugauucc

SEQ ID NO: 832670 - RNA, 19 nt, Artificial Sequence
  Description of Artificial Sequence: Synthetic oligonucleotide
  Sense strand starting at position 3166 of SEQ ID NO: 587975
aaucaagaguggucucaaa

SEQ ID NO: 832671 - RNA, 19 nt, Artificial Sequence
  Description of Artificial Sequence: Synthetic oligonucleotide
  Antisense strand to SEQ ID NO: 832670
uuugagaccacucuugauu

SEQ ID NO: 832672 - RNA, 19 nt, Artificial Sequence
  Description of Artificial Sequence: Synthetic oligonucleotide
  Sense strand starting at position 3297 of SEQ ID NO: 587975
caucuaaugcucgauugga

SEQ ID NO: 832673 - RNA, 19 nt, Artificial Sequence
  Description of Artificial Sequence: Synthetic oligonucleotide
  Antisense strand to SEQ ID NO: 832672
uccaaucgagcauuagaug

SEQ ID NO: 832674 - RNA, 19 nt, Artificial Sequence
  Description of Artificial Sequence: Synthetic oligonucleotide
  Sense strand starting at position 3383 of SEQ ID NO: 587975
ggaagugacaaaugguauu

SEQ ID NO: 832675 - RNA, 19 nt, Artificial Sequence
  Description of Artificial Sequence: Synthetic oligonucleotide
  Antisense strand to SEQ ID NO: 832674
aauaccauuugucacuucc

SEQ ID NO: 832676 - RNA, 19 nt, Artificial Sequence
  Description of Artificial Sequence: Synthetic oligonucleotide
  Sense strand starting at position 3513 of SEQ ID NO: 587975
uagugacuccuguagaaua

SEQ ID NO: 832677 - RNA, 19 nt, Artificial Sequence
  Description of Artificial Sequence: Synthetic oligonucleotide
  Antisense strand to SEQ ID NO: 832676
uauucuacaggagucacua

SEQ ID NO: 832678 - RNA, 19 nt, Artificial Sequence
  Description of Artificial Sequence: Synthetic oligonucleotide
  Sense strand starting at position 3515 of SEQ ID NO: 587975
gugacuccuguagaauaua

SEQ ID NO: 832679 - RNA, 19 nt, Artificial Sequence
  Description of Artificial Sequence: Synthetic oligonucleotide
  Antisense strand to SEQ ID NO: 832678
uauauucuacaggagucac

SEQ ID NO: 832680 - RNA, 19 nt, Artificial Sequence
  Description of Artificial Sequence: Synthetic oligonucleotide
  Sense strand starting at position 3523 of SEQ ID NO: 587975
uguagaauauagucacauu

SEQ ID NO: 832681 - RNA, 19 nt, Artificial Sequence
  Description of Artificial Sequence: Synthetic oligonucleotide
  Antisense strand to SEQ ID NO: 832680
aaugugacuauauucuaca

SEQ ID NO: 832682 - RNA, 19 nt, Artificial Sequence
  Description of Artificial Sequence: Synthetic oligonucleotide
  Sense strand starting at position 3609 of SEQ ID NO: 587975
ugguauucucuuuacugga

SEQ ID NO: 832683 - RNA, 19 nt, Artificial Sequence
  Description of Artificial Sequence: Synthetic oligonucleotide
  Antisense strand to SEQ ID NO: 832682
uccaguaaagagaauacca

SEQ ID NO: 832684 - RNA, 19 nt, Artificial Sequence
  Description of Artificial Sequence: Synthetic oligonucleotide
  Sense strand starting at position 3729 of SEQ ID NO: 587975
ugacuuauucgagacccuc

SEQ ID NO: 832685 - RNA, 19 nt, Artificial Sequence
  Description of Artificial Sequence: Synthetic oligonucleotide
  Antisense strand to SEQ ID NO: 832684
gagggucucgaauaaguca

SEQ ID NO: 832686 - RNA, 19 nt, Artificial Sequence
  Description of Artificial Sequence: Synthetic oligonucleotide
  Sense strand starting at position 3795 of SEQ ID NO: 587975
gaaagacuuuggucuacuu

SEQ ID NO: 832687 - RNA, 19 nt, Artificial Sequence
  Description of Artificial Sequence: Synthetic oligonucleotide
  Antisense strand to SEQ ID NO: 832686
aaguagaccaaagucuuuc

SEQ ID NO: 832688 - RNA, 19 nt, Artificial Sequence
  Description of Artificial Sequence: Synthetic oligonucleotide
  Sense strand starting at position 19 of SEQ ID NO: 587976
agcauagacuuguuaauuc

SEQ ID NO: 832689 - RNA, 19 nt, Artificial Sequence
  Description of Artificial Sequence: Synthetic oligonucleotide
  Antisense strand to SEQ ID NO: 832688
gaauuaacaagucuaugcu

SEQ ID NO: 832690 - RNA, 19 nt, Artificial Sequence
  Description of Artificial Sequence: Synthetic oligonucleotide
  Sense strand starting at position 88 of SEQ ID NO: 587976
acagauuagcuuuggagca

SEQ ID NO: 832691 - RNA, 19 nt, Artificial Sequence
  Description of Artificial Sequence: Synthetic oligonucleotide
  Antisense strand to SEQ ID NO: 832690
ugcuccaaagcuaaucugu

SEQ ID NO: 832692 - RNA, 19 nt, Artificial Sequence
  Description of Artificial Sequence: Synthetic oligonucleotide
  Sense strand starting at position 102 of SEQ ID NO: 587976
gagcaucaccaucagugaa

SEQ ID NO: 832693 - RNA, 19 nt, Artificial Sequence
  Description of Artificial Sequence: Synthetic oligonucleotide
  Antisense strand to SEQ ID NO: 832692
uucacugauggugaugcuc

SEQ ID NO: 832694 - RNA, 19 nt, Artificial Sequence
  Description of Artificial Sequence: Synthetic oligonucleotide
  Sense strand starting at position 109 of SEQ ID NO: 587976
accaucagugaaugacuau

SEQ ID NO: 832695 - RNA, 19 nt, Artificial Sequence
  Description of Artificial Sequence: Synthetic oligonucleotide
  Antisense strand to SEQ ID NO: 832694
auagucauucacugauggu

SEQ ID NO: 832696 - RNA, 19 nt, Artificial Sequence
  Description of Artificial Sequence: Synthetic oligonucleotide
  Sense strand starting at position 161 of SEQ ID NO: 587976
uugauuccauagcucugaa

SEQ ID NO: 832697 - RNA, 19 nt, Artificial Sequence
  Description of Artificial Sequence: Synthetic oligonucleotide
  Antisense strand to SEQ ID NO: 832696
uucagagcuauggaaucaa

SEQ ID NO: 832698 - RNA, 19 nt, Artificial Sequence
  Description of Artificial Sequence: Synthetic oligonucleotide
  Sense strand starting at position 164 of SEQ ID NO: 587976
auuccauagcucugaagua

SEQ ID NO: 832699 - RNA, 19 nt, Artificial Sequence
  Description of Artificial Sequence: Synthetic oligonucleotide
  Antisense strand to SEQ ID NO: 832698
uacuucagagcuauggaau

SEQ ID NO: 832700 - RNA, 19 nt, Artificial Sequence
  Description of Artificial Sequence: Synthetic oligonucleotide
  Sense strand starting at position 249 of SEQ ID NO: 587976
gugacacagcccuguauuu

SEQ ID NO: 832701 - RNA, 19 nt, Artificial Sequence
  Description of Artificial Sequence: Synthetic oligonucleotide
  Antisense strand to SEQ ID NO: 832700
aaauacagggcugugucac

SEQ ID NO: 832702 - RNA, 19 nt, Artificial Sequence
  Description of Artificial Sequence: Synthetic oligonucleotide
  Sense strand starting at position 597 of SEQ ID NO: 587976
guaagaguucuguggagac

SEQ ID NO: 832703 - RNA, 19 nt, Artificial Sequence
  Description of Artificial Sequence: Synthetic oligonucleotide
  Antisense strand to SEQ ID NO: 832702
gucuccacagaacucuuac

SEQ ID NO: 832704 - RNA, 19 nt, Artificial Sequence
  Description of Artificial Sequence: Synthetic oligonucleotide
  Sense strand starting at position 704 of SEQ ID NO: 587976
gggagagaacuuugguuug

SEQ ID NO: 832705 - RNA, 19 nt, Artificial Sequence
  Description of Artificial Sequence: Synthetic oligonucleotide
  Antisense strand to SEQ ID NO: 832704
caaaccaaaguucucuccc

SEQ ID NO: 832706 - RNA, 19 nt, Artificial Sequence
  Description of Artificial Sequence: Synthetic oligonucleotide
  Sense strand starting at position 828 of SEQ ID NO: 587976
cuuccaaauccagggugau

SEQ ID NO: 832707 - RNA, 19 nt, Artificial Sequence
  Description of Artificial Sequence: Synthetic oligonucleotide
  Antisense strand to SEQ ID NO: 832706
aucacccuggauuuggaag

SEQ ID NO: 832708 - RNA, 19 nt, Artificial Sequence
  Description of Artificial Sequence: Synthetic oligonucleotide
  Sense strand starting at position 831 of SEQ ID NO: 587976
ccaaauccagggugauaau

SEQ ID NO: 832709 - RNA, 19 nt, Artificial Sequence
  Description of Artificial Sequence: Synthetic oligonucleotide
  Antisense strand to SEQ ID NO: 832708
auuaucacccuggauuugg

SEQ ID NO: 832710 - RNA, 19 nt, Artificial Sequence
  Description of Artificial Sequence: Synthetic oligonucleotide
  Sense strand starting at position 992 of SEQ ID NO: 587976
accuaagaguuuguuuaaa

SEQ ID NO: 832711 - RNA, 19 nt, Artificial Sequence
  Description of Artificial Sequence: Synthetic oligonucleotide
  Antisense strand to SEQ ID NO: 832710
uuuaaacaaacucuuaggu

SEQ ID NO: 832712 - RNA, 19 nt, Artificial Sequence
  Description of Artificial Sequence: Synthetic oligonucleotide
  Sense strand starting at position 1056 of SEQ ID NO: 587976
ggaguuucucuacagugaa

SEQ ID NO: 832713 - RNA, 19 nt, Artificial Sequence
  Description of Artificial Sequence: Synthetic oligonucleotide
  Antisense strand to SEQ ID NO: 832712
uucacuguagagaaacucc

SEQ ID NO: 832714 - RNA, 19 nt, Artificial Sequence
  Description of Artificial Sequence: Synthetic oligonucleotide
  Sense strand starting at position 1253 of SEQ ID NO: 587976
cuagccuaccuuggauaaa

SEQ ID NO: 832715 - RNA, 19 nt, Artificial Sequence
  Description of Artificial Sequence: Synthetic oligonucleotide
  Antisense strand to SEQ ID NO: 832714
uuuauccaagguaggcuag

SEQ ID NO: 832716 - RNA, 19 nt, Artificial Sequence
  Description of Artificial Sequence: Synthetic oligonucleotide
  Sense strand starting at position 1273 of SEQ ID NO: 587976
ucagcaggguucuuugaga

SEQ ID NO: 832717 - RNA, 19 nt, Artificial Sequence
  Description of Artificial Sequence: Synthetic oligonucleotide
  Antisense strand to SEQ ID NO: 832716
ucucaaagaacccugcuga

SEQ ID NO: 832718 - RNA, 19 nt, Artificial Sequence
  Description of Artificial Sequence: Synthetic oligonucleotide
  Sense strand starting at position 1387 of SEQ ID NO: 587976
cuuguucuaccggagguau

SEQ ID NO: 832719 - RNA, 19 nt, Artificial Sequence
  Description of Artificial Sequence: Synthetic oligonucleotide
  Antisense strand to SEQ ID NO: 832718
auaccuccgguagaacaag

SEQ ID NO: 832720 - RNA, 19 nt, Artificial Sequence
  Description of Artificial Sequence: Synthetic oligonucleotide
  Sense strand starting at position 1450 of SEQ ID NO: 587976
uuuccauucucaguggaga

SEQ ID NO: 832721 - RNA, 19 nt, Artificial Sequence
  Description of Artificial Sequence: Synthetic oligonucleotide
  Antisense strand to SEQ ID NO: 832720
ucuccacugagaauggaaa

SEQ ID NO: 832722 - RNA, 19 nt, Artificial Sequence
  Description of Artificial Sequence: Synthetic oligonucleotide
  Sense strand starting at position 1596 of SEQ ID NO: 587976
guccaucugucaucaauua

SEQ ID NO: 832723 - RNA, 19 nt, Artificial Sequence
  Description of Artificial Sequence: Synthetic oligonucleotide
  Antisense strand to SEQ ID NO: 832722
uaauugaugacagauggac

SEQ ID NO: 832724 - RNA, 19 nt, Artificial Sequence
  Description of Artificial Sequence: Synthetic oligonucleotide
  Sense strand starting at position 1749 of SEQ ID NO: 587976
gaggaauccggcuauccau

SEQ ID NO: 832725 - RNA, 19 nt, Artificial Sequence
  Description of Artificial Sequence: Synthetic oligonucleotide
  Antisense strand to SEQ ID NO: 832724
auggauagccggauuccuc

SEQ ID NO: 832726 - RNA, 19 nt, Artificial Sequence
  Description of Artificial Sequence: Synthetic oligonucleotide
  Sense strand starting at position 1792 of SEQ ID NO: 587976
aggcauucgagguacggau

SEQ ID NO: 832727 - RNA, 19 nt, Artificial Sequence
  Description of Artificial Sequence: Synthetic oligonucleotide
  Antisense strand to SEQ ID NO: 832726
auccguaccucgaaugccu

SEQ ID NO: 832728 - RNA, 19 nt, Artificial Sequence
  Description of Artificial Sequence: Synthetic oligonucleotide
  Sense strand starting at position 2110 of SEQ ID NO: 587976
ggagcaucccgggaguugu

SEQ ID NO: 832729 - RNA, 19 nt, Artificial Sequence
  Description of Artificial Sequence: Synthetic oligonucleotide
  Antisense strand to SEQ ID NO: 832728
acaacucccgggaugcucc

SEQ ID NO: 832730 - RNA, 19 nt, Artificial Sequence
  Description of Artificial Sequence: Synthetic oligonucleotide
  Sense strand starting at position 2296 of SEQ ID NO: 587976
uggccacaagacugugaaa

SEQ ID NO: 832731 - RNA, 19 nt, Artificial Sequence
  Description of Artificial Sequence: Synthetic oligonucleotide
  Antisense strand to SEQ ID NO: 832730
uuucacagucuuguggcca

SEQ ID NO: 832732 - RNA, 19 nt, Artificial Sequence
  Description of Artificial Sequence: Synthetic oligonucleotide
  Sense strand starting at position 2315 of SEQ ID NO: 587976
aggaaaguauauucgacuu

SEQ ID NO: 832733 - RNA, 19 nt, Artificial Sequence
  Description of Artificial Sequence: Synthetic oligonucleotide
  Antisense strand to SEQ ID NO: 832732
aagucgaauauacuuuccu

SEQ ID NO: 832734 - RNA, 19 nt, Artificial Sequence
  Description of Artificial Sequence: Synthetic oligonucleotide
  Sense strand starting at position 2333 of SEQ ID NO: 587976
ucaaaugugccagauaauu

SEQ ID NO: 832735 - RNA, 19 nt, Artificial Sequence
  Description of Artificial Sequence: Synthetic oligonucleotide
  Antisense strand to SEQ ID NO: 832734
aauuaucuggcacauuuga

SEQ ID NO: 832736 - RNA, 19 nt, Artificial Sequence
  Description of Artificial Sequence: Synthetic oligonucleotide
  Sense strand starting at position 2480 of SEQ ID NO: 587976
ugaaauugcauccaggagu

SEQ ID NO: 832737 - RNA, 19 nt, Artificial Sequence
  Description of Artificial Sequence: Synthetic oligonucleotide
  Antisense strand to SEQ ID NO: 832736
acuccuggaugcaauuuca

SEQ ID NO: 832738 - RNA, 19 nt, Artificial Sequence
  Description of Artificial Sequence: Synthetic oligonucleotide
  Sense strand starting at position 2493 of SEQ ID NO: 587976
aggagucagauucgaaagu

SEQ ID NO: 832739 - RNA, 19 nt, Artificial Sequence
  Description of Artificial Sequence: Synthetic oligonucleotide
  Antisense strand to SEQ ID NO: 832738
acuuucgaaucugacuccu

SEQ ID NO: 832740 - RNA, 19 nt, Artificial Sequence
  Description of Artificial Sequence: Synthetic oligonucleotide
  Sense strand starting at position 2509 of SEQ ID NO: 587976
agucauugcgugucucaca

SEQ ID NO: 832741 - RNA, 19 nt, Artificial Sequence
  Description of Artificial Sequence: Synthetic oligonucleotide
  Antisense strand to SEQ ID NO: 832740
ugugagacacgcaaugacu

SEQ ID NO: 832742 - RNA, 19 nt, Artificial Sequence
  Description of Artificial Sequence: Synthetic oligonucleotide
  Sense strand starting at position 2559 of SEQ ID NO: 587976
gagauuguccgauguacca

SEQ ID NO: 832743 - RNA, 19 nt, Artificial Sequence
  Description of Artificial Sequence: Synthetic oligonucleotide
  Antisense strand to SEQ ID NO: 832742
ugguacaucggacaaucuc

SEQ ID NO: 832744 - RNA, 19 nt, Artificial Sequence
  Description of Artificial Sequence: Synthetic oligonucleotide
  Sense strand starting at position 2606 of SEQ ID NO: 587976
auucguugaauguaugaau

SEQ ID NO: 832745 - RNA, 19 nt, Artificial Sequence
  Description of Artificial Sequence: Synthetic oligonucleotide
  Antisense strand to SEQ ID NO: 832744
auucauacauucaacgaau

SEQ ID NO: 832746 - RNA, 19 nt, Artificial Sequence
  Description of Artificial Sequence: Synthetic oligonucleotide
  Sense strand starting at position 2854 of SEQ ID NO: 587976
aacagauucuaagcguuau

SEQ ID NO: 832747 - RNA, 19 nt, Artificial Sequence
  Description of Artificial Sequence: Synthetic oligonucleotide
  Antisense strand to SEQ ID NO: 832746
auaacgcuuagaaucuguu

SEQ ID NO: 832748 - RNA, 19 nt, Artificial Sequence
  Description of Artificial Sequence: Synthetic oligonucleotide
  Sense strand starting at position 2865 of SEQ ID NO: 587976
agcguuaugcuauauggaa

SEQ ID NO: 832749 - RNA, 19 nt, Artificial Sequence
  Description of Artificial Sequence: Synthetic oligonucleotide
  Antisense strand to SEQ ID NO: 832748
uuccauauagcauaacgcu

SEQ ID NO: 832750 - RNA, 19 nt, Artificial Sequence
  Description of Artificial Sequence: Synthetic oligonucleotide
  Sense strand starting at position 2947 of SEQ ID NO: 587976
ugaaucuucugaguuguga

SEQ ID NO: 832751 - RNA, 19 nt, Artificial Sequence
  Description of Artificial Sequence: Synthetic oligonucleotide
  Antisense strand to SEQ ID NO: 832750
ucacaacucagaagauuca

SEQ ID NO: 832752 - RNA, 19 nt, Artificial Sequence
  Description of Artificial Sequence: Synthetic oligonucleotide
  Sense strand starting at position 3009 of SEQ ID NO: 587976
accagaguggacugcaaua

SEQ ID NO: 832753 - RNA, 19 nt, Artificial Sequence
  Description of Artificial Sequence: Synthetic oligonucleotide
  Antisense strand to SEQ ID NO: 832752
uauugcaguccacucuggu

SEQ ID NO: 832754 - RNA, 19 nt, Artificial Sequence
  Description of Artificial Sequence: Synthetic oligonucleotide
  Sense strand starting at position 3064 of SEQ ID NO: 587976
ugcagauaaucuccaguuu

SEQ ID NO: 832755 - RNA, 19 nt, Artificial Sequence
  Description of Artificial Sequence: Synthetic oligonucleotide
  Antisense strand to SEQ ID NO: 832754
aaacuggagauuaucugca

SEQ ID NO: 832756 - RNA, 19 nt, Artificial Sequence
  Description of Artificial Sequence: Synthetic oligonucleotide
  Sense strand starting at position 3456 of SEQ ID NO: 587976
gggauuauaguauguauua

SEQ ID NO: 832757 - RNA, 19 nt, Artificial Sequence
  Description of Artificial Sequence: Synthetic oligonucleotide
  Antisense strand to SEQ ID NO: 832756
uaauacauacuauaauccc

SEQ ID NO: 832758 - RNA, 19 nt, Artificial Sequence
  Description of Artificial Sequence: Synthetic oligonucleotide
  Sense strand starting at position 3649 of SEQ ID NO: 587976
uuauauuuguagccaguga

SEQ ID NO: 832759 - RNA, 19 nt, Artificial Sequence
  Description of Artificial Sequence: Synthetic oligonucleotide
  Antisense strand to SEQ ID NO: 832758
ucacuggcuacaaauauaa

SEQ ID NO: 832760 - RNA, 19 nt, Artificial Sequence
  Description of Artificial Sequence: Synthetic oligonucleotide
  Sense strand starting at position 3724 of SEQ ID NO: 587976
acgguucuccagcaugaau

SEQ ID NO: 832761 - RNA, 19 nt, Artificial Sequence
  Description of Artificial Sequence: Synthetic oligonucleotide
  Antisense strand to SEQ ID NO: 832760
auucaugcuggagaaccgu

SEQ ID NO: 832762 - RNA, 19 nt, Artificial Sequence
  Description of Artificial Sequence: Synthetic oligonucleotide
  Sense strand starting at position 3726 of SEQ ID NO: 587976
gguucuccagcaugaauau

SEQ ID NO: 832763 - RNA, 19 nt, Artificial Sequence
  Description of Artificial Sequence: Synthetic oligonucleotide
  Antisense strand to SEQ ID NO: 832762
auauucaugcuggagaacc

SEQ ID NO: 832764 - RNA, 19 nt, Artificial Sequence
  Description of Artificial Sequence: Synthetic oligonucleotide
  Sense strand starting at position 3777 of SEQ ID NO: 587976
caaggacuaguuugucaag

SEQ ID NO: 832765 - RNA, 19 nt, Artificial Sequence
  Description of Artificial Sequence: Synthetic oligonucleotide
  Antisense strand to SEQ ID NO: 832764
cuugacaaacuaguccuug

SEQ ID NO: 832766 - RNA, 19 nt, Artificial Sequence
  Description of Artificial Sequence: Synthetic oligonucleotide
  Sense strand starting at position 3930 of SEQ ID NO: 587976
ggagaauacugagaggaaa

SEQ ID NO: 832767 - RNA, 19 nt, Artificial Sequence
  Description of Artificial Sequence: Synthetic oligonucleotide
  Antisense strand to SEQ ID NO: 832766
uuuccucucaguauucucc

SEQ ID NO: 832768 - RNA, 19 nt, Artificial Sequence
  Description of Artificial Sequence: Synthetic oligonucleotide
  Sense strand starting at position 303 of SEQ ID NO: 587977
aucgcacuagccugucaaa

SEQ ID NO: 832769 - RNA, 19 nt, Artificial Sequence
  Description of Artificial Sequence: Synthetic oligonucleotide
  Antisense strand to SEQ ID NO: 832768
uuugacaggcuagugcgau

SEQ ID NO: 832770 - RNA, 19 nt, Artificial Sequence
  Description of Artificial Sequence: Synthetic oligonucleotide
  Sense strand starting at position 328 of SEQ ID NO: 587977
gccauuuaauaagcguauu

SEQ ID NO: 832771 - RNA, 19 nt, Artificial Sequence
  Description of Artificial Sequence: Synthetic oligonucleotide
  Antisense strand to SEQ ID NO: 832770
aauacgcuuauuaaauggc

SEQ ID NO: 832772 - RNA, 19 nt, Artificial Sequence
  Description of Artificial Sequence: Synthetic oligonucleotide
  Sense strand starting at position 355 of SEQ ID NO: 587977
gagucaaacguggguucca

SEQ ID NO: 832773 - RNA, 19 nt, Artificial Sequence
  Description of Artificial Sequence: Synthetic oligonucleotide
  Antisense strand to SEQ ID NO: 832772
uggaacccacguuugacuc

SEQ ID NO: 832774 - RNA, 19 nt, Artificial Sequence
  Description of Artificial Sequence: Synthetic oligonucleotide
  Sense strand starting at position 406 of SEQ ID NO: 587977
cuguaauuauuuggagauu

SEQ ID NO: 832775 - RNA, 19 nt, Artificial Sequence
  Description of Artificial Sequence: Synthetic oligonucleotide
  Antisense strand to SEQ ID NO: 832774
aaucuccaaauaauuacag

SEQ ID NO: 832776 - RNA, 19 nt, Artificial Sequence
  Description of Artificial Sequence: Synthetic oligonucleotide
  Sense strand starting at position 432 of SEQ ID NO: 587977
gcuauuggauuccuggauu

SEQ ID NO: 832777 - RNA, 19 nt, Artificial Sequence
  Description of Artificial Sequence: Synthetic oligonucleotide
  Antisense strand to SEQ ID NO: 832776
aauccaggaauccaauagc

SEQ ID NO: 832778 - RNA, 19 nt, Artificial Sequence
  Description of Artificial Sequence: Synthetic oligonucleotide
  Sense strand starting at position 485 of SEQ ID NO: 587977
uccugacacuuguaagacu

SEQ ID NO: 832779 - RNA, 19 nt, Artificial Sequence
  Description of Artificial Sequence: Synthetic oligonucleotide
  Antisense strand to SEQ ID NO: 832778
agucuuacaagugucagga

SEQ ID NO: 832780 - RNA, 19 nt, Artificial Sequence
  Description of Artificial Sequence: Synthetic oligonucleotide
  Sense strand starting at position 556 of SEQ ID NO: 587977
gaaucuggaugagaacaau

SEQ ID NO: 832781 - RNA, 19 nt, Artificial Sequence
  Description of Artificial Sequence: Synthetic oligonucleotide
  Antisense strand to SEQ ID NO: 832780
auuguucucauccagauuc

SEQ ID NO: 832782 - RNA, 19 nt, Artificial Sequence
  Description of Artificial Sequence: Synthetic oligonucleotide
  Sense strand starting at position 574 of SEQ ID NO: 587977
uugguagagccuuaaugaa

SEQ ID NO: 832783 - RNA, 19 nt, Artificial Sequence
  Description of Artificial Sequence: Synthetic oligonucleotide
  Antisense strand to SEQ ID NO: 832782
uucauuaaggcucuaccaa

SEQ ID NO: 832784 - RNA, 19 nt, Artificial Sequence
  Description of Artificial Sequence: Synthetic oligonucleotide
  Sense strand starting at position 626 of SEQ ID NO: 587977
cagacugagugauugcuuu

SEQ ID NO: 832785 - RNA, 19 nt, Artificial Sequence
  Description of Artificial Sequence: Synthetic oligonucleotide
  Antisense strand to SEQ ID NO: 832784
aaagcaaucacucagucug

SEQ ID NO: 832786 - RNA, 19 nt, Artificial Sequence
  Description of Artificial Sequence: Synthetic oligonucleotide
  Sense strand starting at position 726 of SEQ ID NO: 587977
accuguugaugcgcaagaa

SEQ ID NO: 832787 - RNA, 19 nt, Artificial Sequence
  Description of Artificial Sequence: Synthetic oligonucleotide
  Antisense strand to SEQ ID NO: 832786
uucuugcgcaucaacaggu

SEQ ID NO: 832788 - RNA, 19 nt, Artificial Sequence
  Description of Artificial Sequence: Synthetic oligonucleotide
  Sense strand starting at position 727 of SEQ ID NO: 587977
ccuguugaugcgcaagaaa

SEQ ID NO: 832789 - RNA, 19 nt, Artificial Sequence
  Description of Artificial Sequence: Synthetic oligonucleotide
  Antisense strand to SEQ ID NO: 832788
uuucuugcgcaucaacagg

SEQ ID NO: 832790 - RNA, 19 nt, Artificial Sequence
  Description of Artificial Sequence: Synthetic oligonucleotide
  Sense strand starting at position 837 of SEQ ID NO: 587977
cugcguguuuaaccaauuu

SEQ ID NO: 832791 - RNA, 19 nt, Artificial Sequence
  Description of Artificial Sequence: Synthetic oligonucleotide
  Antisense strand to SEQ ID NO: 832790
aaauugguuaaacacgcag

SEQ ID NO: 832792 - RNA, 19 nt, Artificial Sequence
  Description of Artificial Sequence: Synthetic oligonucleotide
  Sense strand starting at position 1239 of SEQ ID NO: 587977
ugggaguuggcuuggaagu

SEQ ID NO: 832793 - RNA, 19 nt, Artificial Sequence
  Description of Artificial Sequence: Synthetic oligonucleotide
  Antisense strand to SEQ ID NO: 832792
acuuccaagccaacuccca

SEQ ID NO: 832794 - RNA, 19 nt, Artificial Sequence
  Description of Artificial Sequence: Synthetic oligonucleotide
  Sense strand starting at position 1240 of SEQ ID NO: 587977
gggaguuggcuuggaaguu

SEQ ID NO: 832795 - RNA, 19 nt, Artificial Sequence
  Description of Artificial Sequence: Synthetic oligonucleotide
  Antisense strand to SEQ ID NO: 832794
aacuuccaagccaacuccc

SEQ ID NO: 832796 - RNA, 19 nt, Artificial Sequence
  Description of Artificial Sequence: Synthetic oligonucleotide
  Sense strand starting at position 1262 of SEQ ID NO: 587977
acacuugagcucuaucgau

SEQ ID NO: 832797 - RNA, 19 nt, Artificial Sequence
  Description of Artificial Sequence: Synthetic oligonucleotide
  Antisense strand to SEQ ID NO: 832796
aucgauagagcucaagugu

SEQ ID NO: 832798 - RNA, 19 nt, Artificial Sequence
  Description of Artificial Sequence: Synthetic oligonucleotide
  Sense strand starting at position 1272 of SEQ ID NO: 587977
ucuaucgauuccgaaacuu

SEQ ID NO: 832799 - RNA, 19 nt, Artificial Sequence
  Description of Artificial Sequence: Synthetic oligonucleotide
  Antisense strand to SEQ ID NO: 832798
aaguuucggaaucgauaga

SEQ ID NO: 832800 - RNA, 19 nt, Artificial Sequence
  Description of Artificial Sequence: Synthetic oligonucleotide
  Sense strand starting at position 1282 of SEQ ID NO: 587977
ccgaaacuucccgauacau

SEQ ID NO: 832801 - RNA, 19 nt, Artificial Sequence
  Description of Artificial Sequence: Synthetic oligonucleotide
  Antisense strand to SEQ ID NO: 832800
auguaucgggaaguuucgg

SEQ ID NO: 832802 - RNA, 19 nt, Artificial Sequence
  Description of Artificial Sequence: Synthetic oligonucleotide
  Sense strand starting at position 1292 of SEQ ID NO: 587977
ccgauacaucgugaggugu

SEQ ID NO: 832803 - RNA, 19 nt, Artificial Sequence
  Description of Artificial Sequence: Synthetic oligonucleotide
  Antisense strand to SEQ ID NO: 832802
acaccucacgauguaucgg

SEQ ID NO: 832804 - RNA, 19 nt, Artificial Sequence
  Description of Artificial Sequence: Synthetic oligonucleotide
  Sense strand starting at position 1890 of SEQ ID NO: 587977
gccauccugccaggucaau

SEQ ID NO: 832805 - RNA, 19 nt, Artificial Sequence
  Description of Artificial Sequence: Synthetic oligonucleotide
  Antisense strand to SEQ ID NO: 832804
auugaccuggcaggauggc

SEQ ID NO: 832806 - RNA, 19 nt, Artificial Sequence
  Description of Artificial Sequence: Synthetic oligonucleotide
  Sense strand starting at position 1920 of SEQ ID NO: 587977
cgugcuuggcuaugacaag

SEQ ID NO: 832807 - RNA, 19 nt, Artificial Sequence
  Description of Artificial Sequence: Synthetic oligonucleotide
  Antisense strand to SEQ ID NO: 832806
cuugucauagccaagcacg

SEQ ID NO: 832808 - RNA, 19 nt, Artificial Sequence
  Description of Artificial Sequence: Synthetic oligonucleotide
  Sense strand starting at position 1942 of SEQ ID NO: 587977
gaacuucgcauucggaguu

SEQ ID NO: 832809 - RNA, 19 nt, Artificial Sequence
  Description of Artificial Sequence: Synthetic oligonucleotide
  Antisense strand to SEQ ID NO: 832808
aacuccgaaugcgaaguuc

SEQ ID NO: 832810 - RNA, 19 nt, Artificial Sequence
  Description of Artificial Sequence: Synthetic oligonucleotide
  Sense strand starting at position 2008 of SEQ ID NO: 587977
guuggcuaacccugaacuu

SEQ ID NO: 832811 - RNA, 19 nt, Artificial Sequence
  Description of Artificial Sequence: Synthetic oligonucleotide
  Antisense strand to SEQ ID NO: 832810
aaguucaggguuagccaac

SEQ ID NO: 832812 - RNA, 19 nt, Artificial Sequence
  Description of Artificial Sequence: Synthetic oligonucleotide
  Sense strand starting at position 3399 of SEQ ID NO: 587977
auauauguauguguccauu

SEQ ID NO: 832813 - RNA, 19 nt, Artificial Sequence
  Description of Artificial Sequence: Synthetic oligonucleotide
  Antisense strand to SEQ ID NO: 832812
aauggacacauacauauau

SEQ ID NO: 832814 - RNA, 19 nt, Artificial Sequence
  Description of Artificial Sequence: Synthetic oligonucleotide
  Sense strand starting at position 3426 of SEQ ID NO: 587977
cuauucuguuccguuuauu

SEQ ID NO: 832815 - RNA, 19 nt, Artificial Sequence
  Description of Artificial Sequence: Synthetic oligonucleotide
  Antisense strand to SEQ ID NO: 832814
aauaaacggaacagaauag

SEQ ID NO: 832816 - RNA, 19 nt, Artificial Sequence
  Description of Artificial Sequence: Synthetic oligonucleotide
  Sense strand starting at position 3429 of SEQ ID NO: 587977
uucuguuccguuuauuuau

SEQ ID NO: 832817 - RNA, 19 nt, Artificial Sequence
  Description of Artificial Sequence: Synthetic oligonucleotide
  Antisense strand to SEQ ID NO: 832816
auaaauaaacggaacagaa

SEQ ID NO: 832818 - RNA, 19 nt, Artificial Sequence
  Description of Artificial Sequence: Synthetic oligonucleotide
  Sense strand starting at position 3478 of SEQ ID NO: 587977
uccuaauuaugagcuguau

SEQ ID NO: 832819 - RNA, 19 nt, Artificial Sequence
  Description of Artificial Sequence: Synthetic oligonucleotide
  Antisense strand to SEQ ID NO: 832818
auacagcucauaauuagga

SEQ ID NO: 832820 - RNA, 19 nt, Artificial Sequence
  Description of Artificial Sequence: Synthetic oligonucleotide
  Sense strand starting at position 3482 of SEQ ID NO: 587977
aauuaugagcuguauaguc

SEQ ID NO: 832821 - RNA, 19 nt, Artificial Sequence
  Description of Artificial Sequence: Synthetic oligonucleotide
  Antisense strand to SEQ ID NO: 832820
gacuauacagcucauaauu

SEQ ID NO: 832822 - RNA, 19 nt, Artificial Sequence
  Description of Artificial Sequence: Synthetic oligonucleotide
  Sense strand starting at position 3490 of SEQ ID NO: 587977
gcuguauagucagucuuga

SEQ ID NO: 832823 - RNA, 19 nt, Artificial Sequence
  Description of Artificial Sequence: Synthetic oligonucleotide
  Antisense strand to SEQ ID NO: 832822
ucaagacugacuauacagc

SEQ ID NO: 832824 - RNA, 19 nt, Artificial Sequence
  Description of Artificial Sequence: Synthetic oligonucleotide
  Sense strand starting at position 3495 of SEQ ID NO: 587977
auagucagucuugaaauca

SEQ ID NO: 832825 - RNA, 19 nt, Artificial Sequence
  Description of Artificial Sequence: Synthetic oligonucleotide
  Antisense strand to SEQ ID NO: 832824
ugauuucaagacugacuau

SEQ ID NO: 832826 - RNA, 19 nt, Artificial Sequence
  Description of Artificial Sequence: Synthetic oligonucleotide
  Sense strand starting at position 3545 of SEQ ID NO: 587977
ucccaaaugguuugcauuu

SEQ ID NO: 832827 - RNA, 19 nt, Artificial Sequence
  Description of Artificial Sequence: Synthetic oligonucleotide
  Antisense strand to SEQ ID NO: 832826
aaaugcaaaccauuuggga

SEQ ID NO: 832828 - RNA, 19 nt, Artificial Sequence
  Description of Artificial Sequence: Synthetic oligonucleotide
  Sense strand starting at position 3552 of SEQ ID NO: 587977
ugguuugcauuuccguaua

SEQ ID NO: 832829 - RNA, 19 nt, Artificial Sequence
  Description of Artificial Sequence: Synthetic oligonucleotide
  Antisense strand to SEQ ID NO: 832828
uauacggaaaugcaaacca

SEQ ID NO: 832830 - RNA, 19 nt, Artificial Sequence
  Description of Artificial Sequence: Synthetic oligonucleotide
  Sense strand starting at position 3554 of SEQ ID NO: 587977
guuugcauuuccguauaua

SEQ ID NO: 832831 - RNA, 19 nt, Artificial Sequence
  Description of Artificial Sequence: Synthetic oligonucleotide
  Antisense strand to SEQ ID NO: 832830
uauauacggaaaugcaaac

SEQ ID NO: 832832 - RNA, 19 nt, Artificial Sequence
  Description of Artificial Sequence: Synthetic oligonucleotide
  Sense strand starting at position 3555 of SEQ ID NO: 587977
uuugcauuuccguauauau

SEQ ID NO: 832833 - RNA, 19 nt, Artificial Sequence
  Description of Artificial Sequence: Synthetic oligonucleotide
  Antisense strand to SEQ ID NO: 832832
auauauacggaaaugcaaa

SEQ ID NO: 832834 - RNA, 19 nt, Artificial Sequence
  Description of Artificial Sequence: Synthetic oligonucleotide
  Sense strand starting at position 3642 of SEQ ID NO: 587977
agagaugaaugagaauaau

SEQ ID NO: 832835 - RNA, 19 nt, Artificial Sequence
  Description of Artificial Sequence: Synthetic oligonucleotide
  Antisense strand to SEQ ID NO: 832834
auuauucucauucaucucu

SEQ ID NO: 832836 - RNA, 19 nt, Artificial Sequence
  Description of Artificial Sequence: Synthetic oligonucleotide
  Sense strand starting at position 3718 of SEQ ID NO: 587977
guuacuuaagcuugacaau

SEQ ID NO: 832837 - RNA, 19 nt, Artificial Sequence
  Description of Artificial Sequence: Synthetic oligonucleotide
  Antisense strand to SEQ ID NO: 832836
auugucaagcuuaaguaac

SEQ ID NO: 832838 - RNA, 19 nt, Artificial Sequence
  Description of Artificial Sequence: Synthetic oligonucleotide
  Sense strand starting at position 3800 of SEQ ID NO: 587977
uguuacuauugcuaaugga

SEQ ID NO: 832839 - RNA, 19 nt, Artificial Sequence
  Description of Artificial Sequence: Synthetic oligonucleotide
  Antisense strand to SEQ ID NO: 832838
uccauuagcaauaguaaca

SEQ ID NO: 832840 - RNA, 19 nt, Artificial Sequence
  Description of Artificial Sequence: Synthetic oligonucleotide
  Sense strand starting at position 3893 of SEQ ID NO: 587977
ccuuguaugcuaugguacu

SEQ ID NO: 832841 - RNA, 19 nt, Artificial Sequence
  Description of Artificial Sequence: Synthetic oligonucleotide
  Antisense strand to SEQ ID NO: 832840
aguaccauagcauacaagg

SEQ ID NO: 832842 - RNA, 19 nt, Artificial Sequence
  Description of Artificial Sequence: Synthetic oligonucleotide
  Sense strand starting at position 3970 of SEQ ID NO: 587977
gcaauccuauugucaguaa

SEQ ID NO: 832843 - RNA, 19 nt, Artificial Sequence
  Description of Artificial Sequence: Synthetic oligonucleotide
  Antisense strand to SEQ ID NO: 832842
uuacugacaauaggauugc

SEQ ID NO: 832844 - RNA, 19 nt, Artificial Sequence
  Description of Artificial Sequence: Synthetic oligonucleotide
  Sense strand starting at position 3973 of SEQ ID NO: 587977
auccuauugucaguaacca

SEQ ID NO: 832845 - RNA, 19 nt, Artificial Sequence
  Description of Artificial Sequence: Synthetic oligonucleotide
  Antisense strand to SEQ ID NO: 832844
ugguuacugacaauaggau

SEQ ID NO: 832846 - RNA, 19 nt, Artificial Sequence
  Description of Artificial Sequence: Synthetic oligonucleotide
  Sense strand starting at position 3974 of SEQ ID NO: 587977
uccuauugucaguaaccaa

SEQ ID NO: 832847 - RNA, 19 nt, Artificial Sequence
  Description of Artificial Sequence: Synthetic oligonucleotide
  Antisense strand to SEQ ID NO: 832846
uugguuacugacaauagga

SEQ ID NO: 832848 - RNA, 19 nt, Artificial Sequence
  Description of Artificial Sequence: Synthetic oligonucleotide
  Sense strand starting at position 88 of SEQ ID NO: 587978
gcuguuguggcuuucuuua

SEQ ID NO: 832849 - RNA, 19 nt, Artificial Sequence
  Description of Artificial Sequence: Synthetic oligonucleotide
  Antisense strand to SEQ ID NO: 832848
uaaagaaagccacaacagc

SEQ ID NO: 832850 - RNA, 19 nt, Artificial Sequence
  Description of Artificial Sequence: Synthetic oligonucleotide
  Sense strand starting at position 90 of SEQ ID NO: 587978
uguuguggcuuucuuuaca

SEQ ID NO: 832851 - RNA, 19 nt, Artificial Sequence
  Description of Artificial Sequence: Synthetic oligonucleotide
  Antisense strand to SEQ ID NO: 832850
uguaaagaaagccacaaca

SEQ ID NO: 832852 - RNA, 19 nt, Artificial Sequence
  Description of Artificial Sequence: Synthetic oligonucleotide
  Sense strand starting at position 171 of SEQ ID NO: 587978
aguuguggcuuucuuuaca

SEQ ID NO: 832853 - RNA, 19 nt, Artificial Sequence
  Description of Artificial Sequence: Synthetic oligonucleotide
  Antisense strand to SEQ ID NO: 832852
uguaaagaaagccacaacu

SEQ ID NO: 832854 - RNA, 19 nt, Artificial Sequence
  Description of Artificial Sequence: Synthetic oligonucleotide
  Sense strand starting at position 174 of SEQ ID NO: 587978
uguggcuuucuuuacagaa

SEQ ID NO: 832855 - RNA, 19 nt, Artificial Sequence
  Description of Artificial Sequence: Synthetic oligonucleotide
  Antisense strand to SEQ ID NO: 832854
uucuguaaagaaagccaca

SEQ ID NO: 832856 - RNA, 19 nt, Artificial Sequence
  Description of Artificial Sequence: Synthetic oligonucleotide
  Sense strand starting at position 300 of SEQ ID NO: 587978
gcaaaccagugcuaagaaa

SEQ ID NO: 832857 - RNA, 19 nt, Artificial Sequence
  Description of Artificial Sequence: Synthetic oligonucleotide
  Antisense strand to SEQ ID NO: 832856
uuucuuagcacugguuugc

SEQ ID NO: 832858 - RNA, 19 nt, Artificial Sequence
  Description of Artificial Sequence: Synthetic oligonucleotide
  Sense strand starting at position 517 of SEQ ID NO: 587978
aaacaugagguguguaaca

SEQ ID NO: 832859 - RNA, 19 nt, Artificial Sequence
  Description of Artificial Sequence: Synthetic oligonucleotide
  Antisense strand to SEQ ID NO: 832858
uguuacacaccucauguuu

SEQ ID NO: 832860 - RNA, 19 nt, Artificial Sequence
  Description of Artificial Sequence: Synthetic oligonucleotide
  Sense strand starting at position 519 of SEQ ID NO: 587978
acaugagguguguaacaau

SEQ ID NO: 832861 - RNA, 19 nt, Artificial Sequence
  Description of Artificial Sequence: Synthetic oligonucleotide
  Antisense strand to SEQ ID NO: 832860
auuguuacacaccucaugu

SEQ ID NO: 832862 - RNA, 19 nt, Artificial Sequence
  Description of Artificial Sequence: Synthetic oligonucleotide
  Sense strand starting at position 522 of SEQ ID NO: 587978
ugagguguguaacaauauc

SEQ ID NO: 832863 - RNA, 19 nt, Artificial Sequence
  Description of Artificial Sequence: Synthetic oligonucleotide
  Antisense strand to SEQ ID NO: 832862
gauauuguuacacaccuca

SEQ ID NO: 832864 - RNA, 19 nt, Artificial Sequence
  Description of Artificial Sequence: Synthetic oligonucleotide
  Sense strand starting at position 564 of SEQ ID NO: 587978
cugacauucuucuagguca

SEQ ID NO: 832865 - RNA, 19 nt, Artificial Sequence
  Description of Artificial Sequence: Synthetic oligonucleotide
  Antisense strand to SEQ ID NO: 832864
ugaccuagaagaaugucag

SEQ ID NO: 832866 - RNA, 19 nt, Artificial Sequence
  Description of Artificial Sequence: Synthetic oligonucleotide
  Sense strand starting at position 638 of SEQ ID NO: 587978
ucuguacagucuugaguua

SEQ ID NO: 832867 - RNA, 19 nt, Artificial Sequence
  Description of Artificial Sequence: Synthetic oligonucleotide
  Antisense strand to SEQ ID NO: 832866
uaacucaagacuguacaga

SEQ ID NO: 832868 - RNA, 19 nt, Artificial Sequence
  Description of Artificial Sequence: Synthetic oligonucleotide
  Sense strand starting at position 690 of SEQ ID NO: 587978
gcggucucuuccucuguaa

SEQ ID NO: 832869 - RNA, 19 nt, Artificial Sequence
  Description of Artificial Sequence: Synthetic oligonucleotide
  Antisense strand to SEQ ID NO: 832868
uuacagaggaagagaccgc

SEQ ID NO: 832870 - RNA, 19 nt, Artificial Sequence
  Description of Artificial Sequence: Synthetic oligonucleotide
  Sense strand starting at position 1283 of SEQ ID NO: 587978
cgcagcuuacucgggaauu

SEQ ID NO: 832871 - RNA, 19 nt, Artificial Sequence
  Description of Artificial Sequence: Synthetic oligonucleotide
  Antisense strand to SEQ ID NO: 832870
aauucccgaguaagcugcg

SEQ ID NO: 832872 - RNA, 19 nt, Artificial Sequence
  Description of Artificial Sequence: Synthetic oligonucleotide
  Sense strand starting at position 1284 of SEQ ID NO: 587978
gcagcuuacucgggaauuc

SEQ ID NO: 832873 - RNA, 19 nt, Artificial Sequence
  Description of Artificial Sequence: Synthetic oligonucleotide
  Antisense strand to SEQ ID NO: 832872
gaauucccgaguaagcugc

SEQ ID NO: 832874 - RNA, 19 nt, Artificial Sequence
  Description of Artificial Sequence: Synthetic oligonucleotide
  Sense strand starting at position 1432 of SEQ ID NO: 587978
gugcgucuugcccggacau

SEQ ID NO: 832875 - RNA, 19 nt, Artificial Sequence
  Description of Artificial Sequence: Synthetic oligonucleotide
  Antisense strand to SEQ ID NO: 832874
auguccgggcaagacgcac

SEQ ID NO: 832876 - RNA, 19 nt, Artificial Sequence
  Description of Artificial Sequence: Synthetic oligonucleotide
  Sense strand starting at position 1714 of SEQ ID NO: 587978
agggaacgcucuuauaguc

SEQ ID NO: 832877 - RNA, 19 nt, Artificial Sequence
  Description of Artificial Sequence: Synthetic oligonucleotide
  Antisense strand to SEQ ID NO: 832876
gacuauaagagcguucccu

SEQ ID NO: 832878 - RNA, 19 nt, Artificial Sequence
  Description of Artificial Sequence: Synthetic oligonucleotide
  Sense strand starting at position 1768 of SEQ ID NO: 587978
cgggcaucgucgguguauu

SEQ ID NO: 832879 - RNA, 19 nt, Artificial Sequence
  Description of Artificial Sequence: Synthetic oligonucleotide
  Antisense strand to SEQ ID NO: 832878
aauacaccgacgaugcccg

SEQ ID NO: 832880 - RNA, 19 nt, Artificial Sequence
  Description of Artificial Sequence: Synthetic oligonucleotide
  Sense strand starting at position 1769 of SEQ ID NO: 587978
gggcaucgucgguguauuu

SEQ ID NO: 832881 - RNA, 19 nt, Artificial Sequence
  Description of Artificial Sequence: Synthetic oligonucleotide
  Antisense strand to SEQ ID NO: 832880
aaauacaccgacgaugccc

SEQ ID NO: 832882 - RNA, 19 nt, Artificial Sequence
  Description of Artificial Sequence: Synthetic oligonucleotide
  Sense strand starting at position 1823 of SEQ ID NO: 587978
ugcugauuuauguguccag

SEQ ID NO: 832883 - RNA, 19 nt, Artificial Sequence
  Description of Artificial Sequence: Synthetic oligonucleotide
  Antisense strand to SEQ ID NO: 832882
cuggacacauaaaucagca

SEQ ID NO: 832884 - RNA, 19 nt, Artificial Sequence
  Description of Artificial Sequence: Synthetic oligonucleotide
  Sense strand starting at position 1826 of SEQ ID NO: 587978
ugauuuauguguccaggcu

SEQ ID NO: 832885 - RNA, 19 nt, Artificial Sequence
  Description of Artificial Sequence: Synthetic oligonucleotide
  Antisense strand to SEQ ID NO: 832884
agccuggacacauaaauca

SEQ ID NO: 832886 - RNA, 19 nt, Artificial Sequence
  Description of Artificial Sequence: Synthetic oligonucleotide
  Sense strand starting at position 1937 of SEQ ID NO: 587978
accacagguuggugacaau

SEQ ID NO: 832887 - RNA, 19 nt, Artificial Sequence
  Description of Artificial Sequence: Synthetic oligonucleotide
  Antisense strand to SEQ ID NO: 832886
auugucaccaaccuguggu

SEQ ID NO: 832888 - RNA, 19 nt, Artificial Sequence
  Description of Artificial Sequence: Synthetic oligonucleotide
  Sense strand starting at position 1940 of SEQ ID NO: 587978
acagguuggugacaauaaa

SEQ ID NO: 832889 - RNA, 19 nt, Artificial Sequence
  Description of Artificial Sequence: Synthetic oligonucleotide
  Antisense strand to SEQ ID NO: 832888
uuuauugucaccaaccugu

SEQ ID NO: 832890 - RNA, 19 nt, Artificial Sequence
  Description of Artificial Sequence: Synthetic oligonucleotide
  Sense strand starting at position 1956 of SEQ ID NO: 587978
aaauaagagucucgucaac

SEQ ID NO: 832891 - RNA, 19 nt, Artificial Sequence
  Description of Artificial Sequence: Synthetic oligonucleotide
  Antisense strand to SEQ ID NO: 832890
guugacgagacucuuauuu

SEQ ID NO: 832892 - RNA, 19 nt, Artificial Sequence
  Description of Artificial Sequence: Synthetic oligonucleotide
  Sense strand starting at position 2159 of SEQ ID NO: 587978
gcgcgcuuggcugugaaca

SEQ ID NO: 832893 - RNA, 19 nt, Artificial Sequence
  Description of Artificial Sequence: Synthetic oligonucleotide
  Antisense strand to SEQ ID NO: 832892
uguucacagccaagcgcgc

SEQ ID NO: 832894 - RNA, 19 nt, Artificial Sequence
  Description of Artificial Sequence: Synthetic oligonucleotide
  Sense strand starting at position 2172 of SEQ ID NO: 587978
ugaacagggucuugagguu

SEQ ID NO: 832895 - RNA, 19 nt, Artificial Sequence
  Description of Artificial Sequence: Synthetic oligonucleotide
  Antisense strand to SEQ ID NO: 832894
aaccucaagacccuguuca

SEQ ID NO: 832896 - RNA, 19 nt, Artificial Sequence
  Description of Artificial Sequence: Synthetic oligonucleotide
  Sense strand starting at position 2682 of SEQ ID NO: 587978
uugucacuagucuaggaaa

SEQ ID NO: 832897 - RNA, 19 nt, Artificial Sequence
  Description of Artificial Sequence: Synthetic oligonucleotide
  Antisense strand to SEQ ID NO: 832896
uuuccuagacuagugacaa

SEQ ID NO: 832898 - RNA, 19 nt, Artificial Sequence
  Description of Artificial Sequence: Synthetic oligonucleotide
  Sense strand starting at position 2684 of SEQ ID NO: 587978
gucacuagucuaggaaaua

SEQ ID NO: 832899 - RNA, 19 nt, Artificial Sequence
  Description of Artificial Sequence: Synthetic oligonucleotide
  Antisense strand to SEQ ID NO: 832898
uauuuccuagacuagugac

SEQ ID NO: 832900 - RNA, 19 nt, Artificial Sequence
  Description of Artificial Sequence: Synthetic oligonucleotide
  Sense strand starting at position 2685 of SEQ ID NO: 587978
ucacuagucuaggaaauaa

SEQ ID NO: 832901 - RNA, 19 nt, Artificial Sequence
  Description of Artificial Sequence: Synthetic oligonucleotide
  Antisense strand to SEQ ID NO: 832900
uuauuuccuagacuaguga

SEQ ID NO: 832902 - RNA, 19 nt, Artificial Sequence
  Description of Artificial Sequence: Synthetic oligonucleotide
  Sense strand starting at position 2712 of SEQ ID NO: 587978
acaucacauuguuauguau

SEQ ID NO: 832903 - RNA, 19 nt, Artificial Sequence
  Description of Artificial Sequence: Synthetic oligonucleotide
  Antisense strand to SEQ ID NO: 832902
auacauaacaaugugaugu

SEQ ID NO: 832904 - RNA, 19 nt, Artificial Sequence
  Description of Artificial Sequence: Synthetic oligonucleotide
  Sense strand starting at position 2743 of SEQ ID NO: 587978
augguacuguguccggaau

SEQ ID NO: 832905 - RNA, 19 nt, Artificial Sequence
  Description of Artificial Sequence: Synthetic oligonucleotide
  Antisense strand to SEQ ID NO: 832904
auuccggacacaguaccau

SEQ ID NO: 832906 - RNA, 19 nt, Artificial Sequence
  Description of Artificial Sequence: Synthetic oligonucleotide
  Sense strand starting at position 50 of SEQ ID NO: 587979
aauacauagcaaugugaug

SEQ ID NO: 832907 - RNA, 19 nt, Artificial Sequence
  Description of Artificial Sequence: Synthetic oligonucleotide
  Antisense strand to SEQ ID NO: 832906
caucacauugcuauguauu

SEQ ID NO: 832908 - RNA, 19 nt, Artificial Sequence
  Description of Artificial Sequence: Synthetic oligonucleotide
  Sense strand starting at position 102 of SEQ ID NO: 587979
gaaagcuaaguguagcaaa

SEQ ID NO: 832909 - RNA, 19 nt, Artificial Sequence
  Description of Artificial Sequence: Synthetic oligonucleotide
  Antisense strand to SEQ ID NO: 832908
uuugcuacacuuagcuuuc

SEQ ID NO: 832910 - RNA, 19 nt, Artificial Sequence
  Description of Artificial Sequence: Synthetic oligonucleotide
  Sense strand starting at position 306 of SEQ ID NO: 587979
cgauacauacaaggguauu

SEQ ID NO: 832911 - RNA, 19 nt, Artificial Sequence
  Description of Artificial Sequence: Synthetic oligonucleotide
  Antisense strand to SEQ ID NO: 832910
aauacccuuguauguaucg

SEQ ID NO: 832912 - RNA, 19 nt, Artificial Sequence
  Description of Artificial Sequence: Synthetic oligonucleotide
  Sense strand starting at position 316 of SEQ ID NO: 587979
aaggguauuuaguacaaug

SEQ ID NO: 832913 - RNA, 19 nt, Artificial Sequence
  Description of Artificial Sequence: Synthetic oligonucleotide
  Antisense strand to SEQ ID NO: 832912
cauuguacuaaauacccuu

SEQ ID NO: 832914 - RNA, 19 nt, Artificial Sequence
  Description of Artificial Sequence: Synthetic oligonucleotide
  Sense strand starting at position 328 of SEQ ID NO: 587979
uacaaugcuguuggaauua

SEQ ID NO: 832915 - RNA, 19 nt, Artificial Sequence
  Description of Artificial Sequence: Synthetic oligonucleotide
  Antisense strand to SEQ ID NO: 832914
uaauuccaacagcauugua

SEQ ID NO: 832916 - RNA, 19 nt, Artificial Sequence
  Description of Artificial Sequence: Synthetic oligonucleotide
  Sense strand starting at position 333 of SEQ ID NO: 587979
ugcuguuggaauuagcaaa

SEQ ID NO: 832917 - RNA, 19 nt, Artificial Sequence
  Description of Artificial Sequence: Synthetic oligonucleotide
  Antisense strand to SEQ ID NO: 832916
uuugcuaauuccaacagca

SEQ ID NO: 832918 - RNA, 19 nt, Artificial Sequence
  Description of Artificial Sequence: Synthetic oligonucleotide
  Sense strand starting at position 386 of SEQ ID NO: 587979
ggcggcaacagugaauuaa

SEQ ID NO: 832919 - RNA, 19 nt, Artificial Sequence
  Description of Artificial Sequence: Synthetic oligonucleotide
  Antisense strand to SEQ ID NO: 832918
uuaauucacuguugccgcc

SEQ ID NO: 832920 - RNA, 19 nt, Artificial Sequence
  Description of Artificial Sequence: Synthetic oligonucleotide
  Sense strand starting at position 453 of SEQ ID NO: 587979
gaucaaucugaauguacug

SEQ ID NO: 832921 - RNA, 19 nt, Artificial Sequence
  Description of Artificial Sequence: Synthetic oligonucleotide
  Antisense strand to SEQ ID NO: 832920
caguacauucagauugauc

SEQ ID NO: 832922 - RNA, 19 nt, Artificial Sequence
  Description of Artificial Sequence: Synthetic oligonucleotide
  Sense strand starting at position 480 of SEQ ID NO: 587979
caucuaaugugauuugugu

SEQ ID NO: 832923 - RNA, 19 nt, Artificial Sequence
  Description of Artificial Sequence: Synthetic oligonucleotide
  Antisense strand to SEQ ID NO: 832922
acacaaaucacauuagaug

SEQ ID NO: 832924 - RNA, 19 nt, Artificial Sequence
  Description of Artificial Sequence: Synthetic oligonucleotide
  Sense strand starting at position 482 of SEQ ID NO: 587979
ucuaaugugauuuguguua

SEQ ID NO: 832925 - RNA, 19 nt, Artificial Sequence
  Description of Artificial Sequence: Synthetic oligonucleotide
  Antisense strand to SEQ ID NO: 832924
uaacacaaaucacauuaga

SEQ ID NO: 832926 - RNA, 19 nt, Artificial Sequence
  Description of Artificial Sequence: Synthetic oligonucleotide
  Sense strand starting at position 489 of SEQ ID NO: 587979
ugauuuguguuagcuccaa

SEQ ID NO: 832927 - RNA, 19 nt, Artificial Sequence
  Description of Artificial Sequence: Synthetic oligonucleotide
  Antisense strand to SEQ ID NO: 832926
uuggagcuaacacaaauca

SEQ ID NO: 832928 - RNA, 19 nt, Artificial Sequence
  Description of Artificial Sequence: Synthetic oligonucleotide
  Sense strand starting at position 736 of SEQ ID NO: 587979
aaagucaguuguguaauuu

SEQ ID NO: 832929 - RNA, 19 nt, Artificial Sequence
  Description of Artificial Sequence: Synthetic oligonucleotide
  Antisense strand to SEQ ID NO: 832928
aaauuacacaacugacuuu

SEQ ID NO: 832930 - RNA, 19 nt, Artificial Sequence
  Description of Artificial Sequence: Synthetic oligonucleotide
  Sense strand starting at position 790 of SEQ ID NO: 587979
agcauuaauuuguagaaag

SEQ ID NO: 832931 - RNA, 19 nt, Artificial Sequence
  Description of Artificial Sequence: Synthetic oligonucleotide
  Antisense strand to SEQ ID NO: 832930
cuuucuacaaauuaaugcu

SEQ ID NO: 832932 - RNA, 19 nt, Artificial Sequence
  Description of Artificial Sequence: Synthetic oligonucleotide
  Sense strand starting at position 937 of SEQ ID NO: 587979
gaccuagaagucugcauau

SEQ ID NO: 832933 - RNA, 19 nt, Artificial Sequence
  Description of Artificial Sequence: Synthetic oligonucleotide
  Antisense strand to SEQ ID NO: 832932
auaugcagacuucuagguc

SEQ ID NO: 832934 - RNA, 19 nt, Artificial Sequence
  Description of Artificial Sequence: Synthetic oligonucleotide
  Sense strand starting at position 1030 of SEQ ID NO: 587979
accguuuaugcugaaggaa

SEQ ID NO: 832935 - RNA, 19 nt, Artificial Sequence
  Description of Artificial Sequence: Synthetic oligonucleotide
  Antisense strand to SEQ ID NO: 832934
uuccuucagcauaaacggu

SEQ ID NO: 832936 - RNA, 19 nt, Artificial Sequence
  Description of Artificial Sequence: Synthetic oligonucleotide
  Sense strand starting at position 1095 of SEQ ID NO: 587979
gugguaguggaagacauua

SEQ ID NO: 832937 - RNA, 19 nt, Artificial Sequence
  Description of Artificial Sequence: Synthetic oligonucleotide
  Antisense strand to SEQ ID NO: 832936
uaaugucuuccacuaccac

SEQ ID NO: 832938 - RNA, 19 nt, Artificial Sequence
  Description of Artificial Sequence: Synthetic oligonucleotide
  Sense strand starting at position 1180 of SEQ ID NO: 587979
ggaggugaaaguugcuaaa

SEQ ID NO: 832939 - RNA, 19 nt, Artificial Sequence
  Description of Artificial Sequence: Synthetic oligonucleotide
  Antisense strand to SEQ ID NO: 832938
uuuagcaacuuucaccucc

SEQ ID NO: 832940 - RNA, 19 nt, Artificial Sequence
  Description of Artificial Sequence: Synthetic oligonucleotide
  Sense strand starting at position 1182 of SEQ ID NO: 587979
aggugaaaguugcuaaaga

SEQ ID NO: 832941 - RNA, 19 nt, Artificial Sequence
  Description of Artificial Sequence: Synthetic oligonucleotide
  Antisense strand to SEQ ID NO: 832940
ucuuuagcaacuuucaccu

SEQ ID NO: 832942 - RNA, 19 nt, Artificial Sequence
  Description of Artificial Sequence: Synthetic oligonucleotide
  Sense strand starting at position 1253 of SEQ ID NO: 587979
cacguuuaagaauguaaac

SEQ ID NO: 832943 - RNA, 19 nt, Artificial Sequence
  Description of Artificial Sequence: Synthetic oligonucleotide
  Antisense strand to SEQ ID NO: 832942
guuuacauucuuaaacgug

SEQ ID NO: 832944 - RNA, 19 nt, Artificial Sequence
  Description of Artificial Sequence: Synthetic oligonucleotide
  Sense strand starting at position 2177 of SEQ ID NO: 587979
gguagugagcuccagagga

SEQ ID NO: 832945 - RNA, 19 nt, Artificial Sequence
  Description of Artificial Sequence: Synthetic oligonucleotide
  Antisense strand to SEQ ID NO: 832944
uccucuggagcucacuacc

SEQ ID NO: 832946 - RNA, 19 nt, Artificial Sequence
  Description of Artificial Sequence: Synthetic oligonucleotide
  Sense strand starting at position 2695 of SEQ ID NO: 587979
agugucuauccagguccaa

SEQ ID NO: 832947 - RNA, 19 nt, Artificial Sequence
  Description of Artificial Sequence: Synthetic oligonucleotide
  Antisense strand to SEQ ID NO: 832946
uuggaccuggauagacacu

SEQ ID NO: 832948 - RNA, 19 nt, Artificial Sequence
  Description of Artificial Sequence: Synthetic oligonucleotide
  Sense strand starting at position 2772 of SEQ ID NO: 587979
agagauccaauguguggua

SEQ ID NO: 832949 - RNA, 19 nt, Artificial Sequence
  Description of Artificial Sequence: Synthetic oligonucleotide
  Antisense strand to SEQ ID NO: 832948
uaccacacauuggaucucu

SEQ ID NO: 832950 - RNA, 19 nt, Artificial Sequence
  Description of Artificial Sequence: Synthetic oligonucleotide
  Sense strand starting at position 2872 of SEQ ID NO: 587979
cucucacaugguggauaaa

SEQ ID NO: 832951 - RNA, 19 nt, Artificial Sequence
  Description of Artificial Sequence: Synthetic oligonucleotide
  Antisense strand to SEQ ID NO: 832950
uuuauccaccaugugagag

SEQ ID NO: 832952 - RNA, 19 nt, Artificial Sequence
  Description of Artificial Sequence: Synthetic oligonucleotide
  Sense strand starting at position 2941 of SEQ ID NO: 587979
cugggaaugauaugucauc

SEQ ID NO: 832953 - RNA, 19 nt, Artificial Sequence
  Description of Artificial Sequence: Synthetic oligonucleotide
  Antisense strand to SEQ ID NO: 832952
gaugacauaucauucccag

SEQ ID NO: 832954 - RNA, 19 nt, Artificial Sequence
  Description of Artificial Sequence: Synthetic oligonucleotide
  Sense strand starting at position 3028 of SEQ ID NO: 587979
ggaucagaaaugugugcca

SEQ ID NO: 832955 - RNA, 19 nt, Artificial Sequence
  Description of Artificial Sequence: Synthetic oligonucleotide
  Antisense strand to SEQ ID NO: 832954
uggcacacauuucugaucc

SEQ ID NO: 832956 - RNA, 19 nt, Artificial Sequence
  Description of Artificial Sequence: Synthetic oligonucleotide
  Sense strand starting at position 3048 of SEQ ID NO: 587979
gucgcaggcacugagaaau

SEQ ID NO: 832957 - RNA, 19 nt, Artificial Sequence
  Description of Artificial Sequence: Synthetic oligonucleotide
  Antisense strand to SEQ ID NO: 832956
auuucucagugccugcgac

SEQ ID NO: 832958 - RNA, 19 nt, Artificial Sequence
  Description of Artificial Sequence: Synthetic oligonucleotide
  Sense strand starting at position 3168 of SEQ ID NO: 587979
gcaggaaagucuuuagagc

SEQ ID NO: 832959 - RNA, 19 nt, Artificial Sequence
  Description of Artificial Sequence: Synthetic oligonucleotide
  Antisense strand to SEQ ID NO: 832958
gcucuaaagacuuuccugc

SEQ ID NO: 832960 - RNA, 19 nt, Artificial Sequence
  Description of Artificial Sequence: Synthetic oligonucleotide
  Sense strand starting at position 3330 of SEQ ID NO: 587979
gccuuuagacuauaaaguu

SEQ ID NO: 832961 - RNA, 19 nt, Artificial Sequence
  Description of Artificial Sequence: Synthetic oligonucleotide
  Antisense strand to SEQ ID NO: 832960
aacuuuauagucuaaaggc

SEQ ID NO: 832962 - RNA, 19 nt, Artificial Sequence
  Description of Artificial Sequence: Synthetic oligonucleotide
  Sense strand starting at position 3533 of SEQ ID NO: 587979
gauccuggugccugaggaa

SEQ ID NO: 832963 - RNA, 19 nt, Artificial Sequence
  Description of Artificial Sequence: Synthetic oligonucleotide
  Antisense strand to SEQ ID NO: 832962
uuccucaggcaccaggauc

SEQ ID NO: 832964 - RNA, 19 nt, Artificial Sequence
  Description of Artificial Sequence: Synthetic oligonucleotide
  Sense strand starting at position 3682 of SEQ ID NO: 587979
aagagcuacuuaguuugua

SEQ ID NO: 832965 - RNA, 19 nt, Artificial Sequence
  Description of Artificial Sequence: Synthetic oligonucleotide
  Antisense strand to SEQ ID NO: 832964
uacaaacuaaguagcucuu

SEQ ID NO: 832966 - RNA, 19 nt, Artificial Sequence
  Description of Artificial Sequence: Synthetic oligonucleotide
  Sense strand starting at position 3691 of SEQ ID NO: 587979
uuaguuuguagacagucau

SEQ ID NO: 832967 - RNA, 19 nt, Artificial Sequence
  Description of Artificial Sequence: Synthetic oligonucleotide
  Antisense strand to SEQ ID NO: 832966
augacugucuacaaacuaa

SEQ ID NO: 832968 - RNA, 19 nt, Artificial Sequence
  Description of Artificial Sequence: Synthetic oligonucleotide
  Sense strand starting at position 3703 of SEQ ID NO: 587979
cagucauuccuaggugaau

SEQ ID NO: 832969 - RNA, 19 nt, Artificial Sequence
  Description of Artificial Sequence: Synthetic oligonucleotide
  Antisense strand to SEQ ID NO: 832968
auucaccuaggaaugacug

SEQ ID NO: 832970 - RNA, 19 nt, Artificial Sequence
  Description of Artificial Sequence: Synthetic oligonucleotide
  Sense strand starting at position 3704 of SEQ ID NO: 587979
agucauuccuaggugaaug

SEQ ID NO: 832971 - RNA, 19 nt, Artificial Sequence
  Description of Artificial Sequence: Synthetic oligonucleotide
  Antisense strand to SEQ ID NO: 832970
cauucaccuaggaaugacu

SEQ ID NO: 832972 - RNA, 19 nt, Artificial Sequence
  Description of Artificial Sequence: Synthetic oligonucleotide
  Sense strand starting at position 3709 of SEQ ID NO: 587979
uuccuaggugaauggucaa

SEQ ID NO: 832973 - RNA, 19 nt, Artificial Sequence
  Description of Artificial Sequence: Synthetic oligonucleotide
  Antisense strand to SEQ ID NO: 832972
uugaccauucaccuaggaa

SEQ ID NO: 832974 - RNA, 19 nt, Artificial Sequence
  Description of Artificial Sequence: Synthetic oligonucleotide
  Sense strand starting at position 3712 of SEQ ID NO: 587979
cuaggugaauggucaacau

SEQ ID NO: 832975 - RNA, 19 nt, Artificial Sequence
  Description of Artificial Sequence: Synthetic oligonucleotide
  Antisense strand to SEQ ID NO: 832974
auguugaccauucaccuag

SEQ ID NO: 832976 - RNA, 19 nt, Artificial Sequence
  Description of Artificial Sequence: Synthetic oligonucleotide
  Sense strand starting at position 3716 of SEQ ID NO: 587979
gugaauggucaacauccua

SEQ ID NO: 832977 - RNA, 19 nt, Artificial Sequence
  Description of Artificial Sequence: Synthetic oligonucleotide
  Antisense strand to SEQ ID NO: 832976
uaggauguugaccauucac

SEQ ID NO: 832978 - RNA, 19 nt, Artificial Sequence
  Description of Artificial Sequence: Synthetic oligonucleotide
  Sense strand starting at position 3808 of SEQ ID NO: 587979
ccuagcgugauggaagauu

SEQ ID NO: 832979 - RNA, 19 nt, Artificial Sequence
  Description of Artificial Sequence: Synthetic oligonucleotide
  Antisense strand to SEQ ID NO: 832978
aaucuuccaucacgcuagg

SEQ ID NO: 832980 - RNA, 19 nt, Artificial Sequence
  Description of Artificial Sequence: Synthetic oligonucleotide
  Sense strand starting at position 3890 of SEQ ID NO: 587979
uggucauagaguugggaag

SEQ ID NO: 832981 - RNA, 19 nt, Artificial Sequence
  Description of Artificial Sequence: Synthetic oligonucleotide
  Antisense strand to SEQ ID NO: 832980
cuucccaacucuaugacca

SEQ ID NO: 832982 - RNA, 19 nt, Artificial Sequence
  Description of Artificial Sequence: Synthetic oligonucleotide
  Sense strand starting at position 3914 of SEQ ID NO: 587979
ugugaaaguugauugcaca

SEQ ID NO: 832983 - RNA, 19 nt, Artificial Sequence
  Description of Artificial Sequence: Synthetic oligonucleotide
  Antisense strand to SEQ ID NO: 832982
ugugcaaucaacuuucaca

SEQ ID NO: 832984 - RNA, 19 nt, Artificial Sequence
  Description of Artificial Sequence: Synthetic oligonucleotide
  Sense strand starting at position 3915 of SEQ ID NO: 587979
gugaaaguugauugcacaa

SEQ ID NO: 832985 - RNA, 19 nt, Artificial Sequence
  Description of Artificial Sequence: Synthetic oligonucleotide
  Antisense strand to SEQ ID NO: 832984
uugugcaaucaacuuucac

SEQ ID NO: 832986 - RNA, 19 nt, Artificial Sequence
  Description of Artificial Sequence: Synthetic oligonucleotide
  Sense strand starting at position 17 of SEQ ID NO: 587980
agugaauuaaccuguggcu

SEQ ID NO: 832987 - RNA, 19 nt, Artificial Sequence
  Description of Artificial Sequence: Synthetic oligonucleotide
  Antisense strand to SEQ ID NO: 832986
agccacagguuaauucacu

SEQ ID NO: 832988 - RNA, 19 nt, Artificial Sequence
  Description of Artificial Sequence: Synthetic oligonucleotide
  Sense strand starting at position 141 of SEQ ID NO: 587980
gcaacugugcauugaaaug

SEQ ID NO: 832989 - RNA, 19 nt, Artificial Sequence
  Description of Artificial Sequence: Synthetic oligonucleotide
  Antisense strand to SEQ ID NO: 832988
cauuucaaugcacaguugc

SEQ ID NO: 832990 - RNA, 19 nt, Artificial Sequence
  Description of Artificial Sequence: Synthetic oligonucleotide
  Sense strand starting at position 158 of SEQ ID NO: 587980
ugcauuuaauaaggcaaga

SEQ ID NO: 832991 - RNA, 19 nt, Artificial Sequence
  Description of Artificial Sequence: Synthetic oligonucleotide
  Antisense strand to SEQ ID NO: 832990
ucuugccuuauuaaaugca

SEQ ID NO: 832992 - RNA, 19 nt, Artificial Sequence
  Description of Artificial Sequence: Synthetic oligonucleotide
  Sense strand starting at position 355 of SEQ ID NO: 587980
guagaagucaguuguguaa

SEQ ID NO: 832993 - RNA, 19 nt, Artificial Sequence
  Description of Artificial Sequence: Synthetic oligonucleotide
  Antisense strand to SEQ ID NO: 832992
uuacacaacugacuucuac

SEQ ID NO: 832994 - RNA, 19 nt, Artificial Sequence
  Description of Artificial Sequence: Synthetic oligonucleotide
  Sense strand starting at position 391 of SEQ ID NO: 587980
ugucacugcuguucugaau

SEQ ID NO: 832995 - RNA, 19 nt, Artificial Sequence
  Description of Artificial Sequence: Synthetic oligonucleotide
  Antisense strand to SEQ ID NO: 832994
auucagaacagcagugaca

SEQ ID NO: 832996 - RNA, 19 nt, Artificial Sequence
  Description of Artificial Sequence: Synthetic oligonucleotide
  Sense strand starting at position 410 of SEQ ID NO: 587980
uuaguauuacuucguugaa

SEQ ID NO: 832997 - RNA, 19 nt, Artificial Sequence
  Description of Artificial Sequence: Synthetic oligonucleotide
  Antisense strand to SEQ ID NO: 832996
uucaacgaaguaauacuaa

SEQ ID NO: 832998 - RNA, 19 nt, Artificial Sequence
  Description of Artificial Sequence: Synthetic oligonucleotide
  Sense strand starting at position 411 of SEQ ID NO: 587980
uaguauuacuucguugaaa

SEQ ID NO: 832999 - RNA, 19 nt, Artificial Sequence
  Description of Artificial Sequence: Synthetic oligonucleotide
  Antisense strand to SEQ ID NO: 832998
uuucaacgaaguaauacua

SEQ ID NO: 833000 - RNA, 19 nt, Artificial Sequence
  Description of Artificial Sequence: Synthetic oligonucleotide
  Sense strand starting at position 412 of SEQ ID NO: 587980
aguauuacuucguugaaag

SEQ ID NO: 833001 - RNA, 19 nt, Artificial Sequence
  Description of Artificial Sequence: Synthetic oligonucleotide
  Antisense strand to SEQ ID NO: 833000
cuuucaacgaaguaauacu

SEQ ID NO: 833002 - RNA, 19 nt, Artificial Sequence
  Description of Artificial Sequence: Synthetic oligonucleotide
  Sense strand starting at position 413 of SEQ ID NO: 587980
guauuacuucguugaaaga

SEQ ID NO: 833003 - RNA, 19 nt, Artificial Sequence
  Description of Artificial Sequence: Synthetic oligonucleotide
  Antisense strand to SEQ ID NO: 833002
ucuuucaacgaaguaauac

SEQ ID NO: 833004 - RNA, 19 nt, Artificial Sequence
  Description of Artificial Sequence: Synthetic oligonucleotide
  Sense strand starting at position 414 of SEQ ID NO: 587980
uauuacuucguugaaagaa

SEQ ID NO: 833005 - RNA, 19 nt, Artificial Sequence
  Description of Artificial Sequence: Synthetic oligonucleotide
  Antisense strand to SEQ ID NO: 833004
uucuuucaacgaaguaaua

SEQ ID NO: 833006 - RNA, 19 nt, Artificial Sequence
  Description of Artificial Sequence: Synthetic oligonucleotide
  Sense strand starting at position 488 of SEQ ID NO: 587980
uuugguauuacguaagaaa

SEQ ID NO: 833007 - RNA, 19 nt, Artificial Sequence
  Description of Artificial Sequence: Synthetic oligonucleotide
  Antisense strand to SEQ ID NO: 833006
uuucuuacguaauaccaaa

SEQ ID NO: 833008 - RNA, 19 nt, Artificial Sequence
  Description of Artificial Sequence: Synthetic oligonucleotide
  Sense strand starting at position 513 of SEQ ID NO: 587980
aaagcacuguuggcagaaa

SEQ ID NO: 833009 - RNA, 19 nt, Artificial Sequence
  Description of Artificial Sequence: Synthetic oligonucleotide
  Antisense strand to SEQ ID NO: 833008
uuucugccaacagugcuuu

SEQ ID NO: 833010 - RNA, 19 nt, Artificial Sequence
  Description of Artificial Sequence: Synthetic oligonucleotide
  Sense strand starting at position 529 of SEQ ID NO: 587980
aaacgucagucacucagaa

SEQ ID NO: 833011 - RNA, 19 nt, Artificial Sequence
  Description of Artificial Sequence: Synthetic oligonucleotide
  Antisense strand to SEQ ID NO: 833010
uucugagugacugacguuu

SEQ ID NO: 833012 - RNA, 19 nt, Artificial Sequence
  Description of Artificial Sequence: Synthetic oligonucleotide
  Sense strand starting at position 676 of SEQ ID NO: 587980
cgguccugccuaugggaua

SEQ ID NO: 833013 - RNA, 19 nt, Artificial Sequence
  Description of Artificial Sequence: Synthetic oligonucleotide
  Antisense strand to SEQ ID NO: 833012
uaucccauaggcaggaccg

SEQ ID NO: 833014 - RNA, 19 nt, Artificial Sequence
  Description of Artificial Sequence: Synthetic oligonucleotide
  Sense strand starting at position 731 of SEQ ID NO: 587980
cugcaagcaccuugguuaa

SEQ ID NO: 833015 - RNA, 19 nt, Artificial Sequence
  Description of Artificial Sequence: Synthetic oligonucleotide
  Antisense strand to SEQ ID NO: 833014
uuaaccaaggugcuugcag

SEQ ID NO: 833016 - RNA, 19 nt, Artificial Sequence
  Description of Artificial Sequence: Synthetic oligonucleotide
  Sense strand starting at position 768 of SEQ ID NO: 587980
aggguucuauaggaaauga

SEQ ID NO: 833017 - RNA, 19 nt, Artificial Sequence
  Description of Artificial Sequence: Synthetic oligonucleotide
  Antisense strand to SEQ ID NO: 833016
ucauuuccuauagaacccu

SEQ ID NO: 833018 - RNA, 19 nt, Artificial Sequence
  Description of Artificial Sequence: Synthetic oligonucleotide
  Sense strand starting at position 820 of SEQ ID NO: 587980
acaggcuguuuguuaaacu

SEQ ID NO: 833019 - RNA, 19 nt, Artificial Sequence
  Description of Artificial Sequence: Synthetic oligonucleotide
  Antisense strand to SEQ ID NO: 833018
aguuuaacaaacagccugu

SEQ ID NO: 833020 - RNA, 19 nt, Artificial Sequence
  Description of Artificial Sequence: Synthetic oligonucleotide
  Sense strand starting at position 846 of SEQ ID NO: 587980
aagaaacacguguaacagu

SEQ ID NO: 833021 - RNA, 19 nt, Artificial Sequence
  Description of Artificial Sequence: Synthetic oligonucleotide
  Antisense strand to SEQ ID NO: 833020
acuguuacacguguuucuu

SEQ ID NO: 833022 - RNA, 19 nt, Artificial Sequence
  Description of Artificial Sequence: Synthetic oligonucleotide
  Sense strand starting at position 854 of SEQ ID NO: 587980
cguguaacaguguaaacau

SEQ ID NO: 833023 - RNA, 19 nt, Artificial Sequence
  Description of Artificial Sequence: Synthetic oligonucleotide
  Antisense strand to SEQ ID NO: 833022
auguuuacacuguuacacg

SEQ ID NO: 833024 - RNA, 19 nt, Artificial Sequence
  Description of Artificial Sequence: Synthetic oligonucleotide
  Sense strand starting at position 862 of SEQ ID NO: 587980
aguguaaacauaggguuaa

SEQ ID NO: 833025 - RNA, 19 nt, Artificial Sequence
  Description of Artificial Sequence: Synthetic oligonucleotide
  Antisense strand to SEQ ID NO: 833024
uuaacccuauguuuacacu

SEQ ID NO: 833026 - RNA, 19 nt, Artificial Sequence
  Description of Artificial Sequence: Synthetic oligonucleotide
  Sense strand starting at position 1372 of SEQ ID NO: 587980
cuggguuaacguuaugaac

SEQ ID NO: 833027 - RNA, 19 nt, Artificial Sequence
  Description of Artificial Sequence: Synthetic oligonucleotide
  Antisense strand to SEQ ID NO: 833026
guucauaacguuaacccag

SEQ ID NO: 833028 - RNA, 19 nt, Artificial Sequence
  Description of Artificial Sequence: Synthetic oligonucleotide
  Sense strand starting at position 1378 of SEQ ID NO: 587980
uaacguuaugaacgaacga

SEQ ID NO: 833029 - RNA, 19 nt, Artificial Sequence
  Description of Artificial Sequence: Synthetic oligonucleotide
  Antisense strand to SEQ ID NO: 833028
ucguucguucauaacguua

SEQ ID NO: 833030 - RNA, 19 nt, Artificial Sequence
  Description of Artificial Sequence: Synthetic oligonucleotide
  Sense strand starting at position 1379 of SEQ ID NO: 587980
aacguuaugaacgaacgaa

SEQ ID NO: 833031 - RNA, 19 nt, Artificial Sequence
  Description of Artificial Sequence: Synthetic oligonucleotide
  Antisense strand to SEQ ID NO: 833030
uucguucguucauaacguu

SEQ ID NO: 833032 - RNA, 19 nt, Artificial Sequence
  Description of Artificial Sequence: Synthetic oligonucleotide
  Sense strand starting at position 1624 of SEQ ID NO: 587980
guucguccugcccagacau

SEQ ID NO: 833033 - RNA, 19 nt, Artificial Sequence
  Description of Artificial Sequence: Synthetic oligonucleotide
  Antisense strand to SEQ ID NO: 833032
augucugggcaggacgaac

SEQ ID NO: 833034 - RNA, 19 nt, Artificial Sequence
  Description of Artificial Sequence: Synthetic oligonucleotide
  Sense strand starting at position 1893 of SEQ ID NO: 587980
cccaaagucccaugagaag

SEQ ID NO: 833035 - RNA, 19 nt, Artificial Sequence
  Description of Artificial Sequence: Synthetic oligonucleotide
  Antisense strand to SEQ ID NO: 833034
cuucucaugggacuuuggg

SEQ ID NO: 833036 - RNA, 19 nt, Artificial Sequence
  Description of Artificial Sequence: Synthetic oligonucleotide
  Sense strand starting at position 1961 of SEQ ID NO: 587980
uaguuugugcgcgugcaaa

SEQ ID NO: 833037 - RNA, 19 nt, Artificial Sequence
  Description of Artificial Sequence: Synthetic oligonucleotide
  Antisense strand to SEQ ID NO: 833036
uuugcacgcgcacaaacua

SEQ ID NO: 833038 - RNA, 19 nt, Artificial Sequence
  Description of Artificial Sequence: Synthetic oligonucleotide
  Sense strand starting at position 2041 of SEQ ID NO: 587980
aggcguggucaguuguacu

SEQ ID NO: 833039 - RNA, 19 nt, Artificial Sequence
  Description of Artificial Sequence: Synthetic oligonucleotide
  Antisense strand to SEQ ID NO: 833038
aguacaacugaccacgccu

SEQ ID NO: 833040 - RNA, 19 nt, Artificial Sequence
  Description of Artificial Sequence: Synthetic oligonucleotide
  Sense strand starting at position 2275 of SEQ ID NO: 587980
gguagugagcuccagagga

SEQ ID NO: 833041 - RNA, 19 nt, Artificial Sequence
  Description of Artificial Sequence: Synthetic oligonucleotide
  Antisense strand to SEQ ID NO: 833040
uccucuggagcucacuacc

SEQ ID NO: 833042 - RNA, 19 nt, Artificial Sequence
  Description of Artificial Sequence: Synthetic oligonucleotide
  Sense strand starting at position 2674 of SEQ ID NO: 587980
gcacccuuugcauggucaa

SEQ ID NO: 833043 - RNA, 19 nt, Artificial Sequence
  Description of Artificial Sequence: Synthetic oligonucleotide
  Antisense strand to SEQ ID NO: 833042
uugaccaugcaaagggugc

SEQ ID NO: 833044 - RNA, 19 nt, Artificial Sequence
  Description of Artificial Sequence: Synthetic oligonucleotide
  Sense strand starting at position 2715 of SEQ ID NO: 587980
ccuugagggcucuaguauu

SEQ ID NO: 833045 - RNA, 19 nt, Artificial Sequence
  Description of Artificial Sequence: Synthetic oligonucleotide
  Antisense strand to SEQ ID NO: 833044
aauacuagagcccucaagg

SEQ ID NO: 833046 - RNA, 19 nt, Artificial Sequence
  Description of Artificial Sequence: Synthetic oligonucleotide
  Sense strand starting at position 2805 of SEQ ID NO: 587980
gguccaacugucugaccuu

SEQ ID NO: 833047 - RNA, 19 nt, Artificial Sequence
  Description of Artificial Sequence: Synthetic oligonucleotide
  Antisense strand to SEQ ID NO: 833046
aaggucagacaguuggacc

SEQ ID NO: 833048 - RNA, 19 nt, Artificial Sequence
  Description of Artificial Sequence: Synthetic oligonucleotide
  Sense strand starting at position 2989 of SEQ ID NO: 587980
agaggauagcgcuauagaa

SEQ ID NO: 833049 - RNA, 19 nt, Artificial Sequence
  Description of Artificial Sequence: Synthetic oligonucleotide
  Antisense strand to SEQ ID NO: 833048
uucuauagcgcuauccucu

SEQ ID NO: 833050 - RNA, 19 nt, Artificial Sequence
  Description of Artificial Sequence: Synthetic oligonucleotide
  Sense strand starting at position 2991 of SEQ ID NO: 587980
aggauagcgcuauagaaau

SEQ ID NO: 833051 - RNA, 19 nt, Artificial Sequence
  Description of Artificial Sequence: Synthetic oligonucleotide
  Antisense strand to SEQ ID NO: 833050
auuucuauagcgcuauccu

SEQ ID NO: 833052 - RNA, 19 nt, Artificial Sequence
  Description of Artificial Sequence: Synthetic oligonucleotide
  Sense strand starting at position 3027 of SEQ ID NO: 587980
ugagaaaccugggaaugaa

SEQ ID NO: 833053 - RNA, 19 nt, Artificial Sequence
  Description of Artificial Sequence: Synthetic oligonucleotide
  Antisense strand to SEQ ID NO: 833052
uucauucccagguuucuca

SEQ ID NO: 833054 - RNA, 19 nt, Artificial Sequence
  Description of Artificial Sequence: Synthetic oligonucleotide
  Sense strand starting at position 3035 of SEQ ID NO: 587980
cugggaaugaaaugucauc

SEQ ID NO: 833055 - RNA, 19 nt, Artificial Sequence
  Description of Artificial Sequence: Synthetic oligonucleotide
  Antisense strand to SEQ ID NO: 833054
gaugacauuucauucccag

SEQ ID NO: 833056 - RNA, 19 nt, Artificial Sequence
  Description of Artificial Sequence: Synthetic oligonucleotide
  Sense strand starting at position 3078 of SEQ ID NO: 587980
gauggaucacccugagcac

SEQ ID NO: 833057 - RNA, 19 nt, Artificial Sequence
  Description of Artificial Sequence: Synthetic oligonucleotide
  Antisense strand to SEQ ID NO: 833056
gugcucagggugauccauc

SEQ ID NO: 833058 - RNA, 19 nt, Artificial Sequence
  Description of Artificial Sequence: Synthetic oligonucleotide
  Sense strand starting at position 3478 of SEQ ID NO: 587980
agaaaugugcgccagguuu

SEQ ID NO: 833059 - RNA, 19 nt, Artificial Sequence
  Description of Artificial Sequence: Synthetic oligonucleotide
  Antisense strand to SEQ ID NO: 833058
aaaccuggcgcacauuucu

SEQ ID NO: 833060 - RNA, 19 nt, Artificial Sequence
  Description of Artificial Sequence: Synthetic oligonucleotide
  Sense strand starting at position 3549 of SEQ ID NO: 587980
gggucagaaauguguguca

SEQ ID NO: 833061 - RNA, 19 nt, Artificial Sequence
  Description of Artificial Sequence: Synthetic oligonucleotide
  Antisense strand to SEQ ID NO: 833060
ugacacacauuucugaccc

SEQ ID NO: 833062 - RNA, 19 nt, Artificial Sequence
  Description of Artificial Sequence: Synthetic oligonucleotide
  Sense strand starting at position 3731 of SEQ ID NO: 587980
cugagcuagggucggaaau

SEQ ID NO: 833063 - RNA, 19 nt, Artificial Sequence
  Description of Artificial Sequence: Synthetic oligonucleotide
  Antisense strand to SEQ ID NO: 833062
auuuccgacccuagcucag

SEQ ID NO: 833064 - RNA, 19 nt, Artificial Sequence
  Description of Artificial Sequence: Synthetic oligonucleotide
  Sense strand starting at position 3878 of SEQ ID NO: 587980
caggaagacugacagcauu

SEQ ID NO: 833065 - RNA, 19 nt, Artificial Sequence
  Description of Artificial Sequence: Synthetic oligonucleotide
  Antisense strand to SEQ ID NO: 833064
aaugcugucagucuuccug

SEQ ID NO: 833066 - RNA, 19 nt, Artificial Sequence
  Description of Artificial Sequence: Synthetic oligonucleotide
  Sense strand starting at position 191 of SEQ ID NO: 587981
acggacaaauuauucuaua

SEQ ID NO: 833067 - RNA, 19 nt, Artificial Sequence
  Description of Artificial Sequence: Synthetic oligonucleotide
  Antisense strand to SEQ ID NO: 833066
uauagaauaauuuguccgu

SEQ ID NO: 833068 - RNA, 19 nt, Artificial Sequence
  Description of Artificial Sequence: Synthetic oligonucleotide
  Sense strand starting at position 192 of SEQ ID NO: 587981
cggacaaauuauucuauau

SEQ ID NO: 833069 - RNA, 19 nt, Artificial Sequence
  Description of Artificial Sequence: Synthetic oligonucleotide
  Antisense strand to SEQ ID NO: 833068
auauagaauaauuuguccg

SEQ ID NO: 833070 - RNA, 19 nt, Artificial Sequence
  Description of Artificial Sequence: Synthetic oligonucleotide
  Sense strand starting at position 332 of SEQ ID NO: 587981
ucagaauacugauuguucu

SEQ ID NO: 833071 - RNA, 19 nt, Artificial Sequence
  Description of Artificial Sequence: Synthetic oligonucleotide
  Antisense strand to SEQ ID NO: 833070
agaacaaucaguauucuga

SEQ ID NO: 833072 - RNA, 19 nt, Artificial Sequence
  Description of Artificial Sequence: Synthetic oligonucleotide
  Sense strand starting at position 342 of SEQ ID NO: 587981
gauuguucuggccauagac

SEQ ID NO: 833073 - RNA, 19 nt, Artificial Sequence
  Description of Artificial Sequence: Synthetic oligonucleotide
  Antisense strand to SEQ ID NO: 833072
gucuauggccagaacaauc

SEQ ID NO: 833074 - RNA, 19 nt, Artificial Sequence
  Description of Artificial Sequence: Synthetic oligonucleotide
  Sense strand starting at position 378 of SEQ ID NO: 587981
ucuugaggugccgauaaua

SEQ ID NO: 833075 - RNA, 19 nt, Artificial Sequence
  Description of Artificial Sequence: Synthetic oligonucleotide
  Antisense strand to SEQ ID NO: 833074
uauuaucggcaccucaaga

SEQ ID NO: 833076 - RNA, 19 nt, Artificial Sequence
  Description of Artificial Sequence: Synthetic oligonucleotide
  Sense strand starting at position 526 of SEQ ID NO: 587981
aucucuagcgaugaaguua

SEQ ID NO: 833077 - RNA, 19 nt, Artificial Sequence
  Description of Artificial Sequence: Synthetic oligonucleotide
  Antisense strand to SEQ ID NO: 833076
uaacuucaucgcuagagau

SEQ ID NO: 833078 - RNA, 19 nt, Artificial Sequence
  Description of Artificial Sequence: Synthetic oligonucleotide
  Sense strand starting at position 578 of SEQ ID NO: 587981
acauacuuauggguagauu

SEQ ID NO: 833079 - RNA, 19 nt, Artificial Sequence
  Description of Artificial Sequence: Synthetic oligonucleotide
  Antisense strand to SEQ ID NO: 833078
aaucuacccauaaguaugu

SEQ ID NO: 833080 - RNA, 19 nt, Artificial Sequence
  Description of Artificial Sequence: Synthetic oligonucleotide
  Sense strand starting at position 586 of SEQ ID NO: 587981
auggguagauuccuaucca

SEQ ID NO: 833081 - RNA, 19 nt, Artificial Sequence
  Description of Artificial Sequence: Synthetic oligonucleotide
  Antisense strand to SEQ ID NO: 833080
uggauaggaaucuacccau

SEQ ID NO: 833082 - RNA, 19 nt, Artificial Sequence
  Description of Artificial Sequence: Synthetic oligonucleotide
  Sense strand starting at position 652 of SEQ ID NO: 587981
uucuguauccuaggaacua

SEQ ID NO: 833083 - RNA, 19 nt, Artificial Sequence
  Description of Artificial Sequence: Synthetic oligonucleotide
  Antisense strand to SEQ ID NO: 833082
uaguuccuaggauacagaa

SEQ ID NO: 833084 - RNA, 19 nt, Artificial Sequence
  Description of Artificial Sequence: Synthetic oligonucleotide
  Sense strand starting at position 811 of SEQ ID NO: 587981
ugauguacucuacacucua

SEQ ID NO: 833085 - RNA, 19 nt, Artificial Sequence
  Description of Artificial Sequence: Synthetic oligonucleotide
  Antisense strand to SEQ ID NO: 833084
uagaguguagaguacauca

SEQ ID NO: 833086 - RNA, 19 nt, Artificial Sequence
  Description of Artificial Sequence: Synthetic oligonucleotide
  Sense strand starting at position 844 of SEQ ID NO: 587981
auaagucauuggucauaga

SEQ ID NO: 833087 - RNA, 19 nt, Artificial Sequence
  Description of Artificial Sequence: Synthetic oligonucleotide
  Antisense strand to SEQ ID NO: 833086
ucuaugaccaaugacuuau

SEQ ID NO: 833088 - RNA, 19 nt, Artificial Sequence
  Description of Artificial Sequence: Synthetic oligonucleotide
  Sense strand starting at position 1041 of SEQ ID NO: 587981
guauauugaaguugagaag

SEQ ID NO: 833089 - RNA, 19 nt, Artificial Sequence
  Description of Artificial Sequence: Synthetic oligonucleotide
  Antisense strand to SEQ ID NO: 833088
cuucucaacuucaauauac

SEQ ID NO: 833090 - RNA, 19 nt, Artificial Sequence
  Description of Artificial Sequence: Synthetic oligonucleotide
  Sense strand starting at position 1312 of SEQ ID NO: 587981
acaugagggcguuaauauu

SEQ ID NO: 833091 - RNA, 19 nt, Artificial Sequence
  Description of Artificial Sequence: Synthetic oligonucleotide
  Antisense strand to SEQ ID NO: 833090
aauauuaacgcccucaugu

SEQ ID NO: 833092 - RNA, 19 nt, Artificial Sequence
  Description of Artificial Sequence: Synthetic oligonucleotide
  Sense strand starting at position 1750 of SEQ ID NO: 587981
ugcgcucaucacguuauau

SEQ ID NO: 833093 - RNA, 19 nt, Artificial Sequence
  Description of Artificial Sequence: Synthetic oligonucleotide
  Antisense strand to SEQ ID NO: 833092
auauaacgugaugagcgca

SEQ ID NO: 833094 - RNA, 19 nt, Artificial Sequence
  Description of Artificial Sequence: Synthetic oligonucleotide
  Sense strand starting at position 1751 of SEQ ID NO: 587981
gcgcucaucacguuauaua

SEQ ID NO: 833095 - RNA, 19 nt, Artificial Sequence
  Description of Artificial Sequence: Synthetic oligonucleotide
  Antisense strand to SEQ ID NO: 833094
uauauaacgugaugagcgc

SEQ ID NO: 833096 - RNA, 19 nt, Artificial Sequence
  Description of Artificial Sequence: Synthetic oligonucleotide
  Sense strand starting at position 1798 of SEQ ID NO: 587981
ugccuuugaucagucauuu

SEQ ID NO: 833097 - RNA, 19 nt, Artificial Sequence
  Description of Artificial Sequence: Synthetic oligonucleotide
  Antisense strand to SEQ ID NO: 833096
aaaugacugaucaaaggca

SEQ ID NO: 833098 - RNA, 19 nt, Artificial Sequence
  Description of Artificial Sequence: Synthetic oligonucleotide
  Sense strand starting at position 1884 of SEQ ID NO: 587981
ugcagaaagcuccaggguu

SEQ ID NO: 833099 - RNA, 19 nt, Artificial Sequence
  Description of Artificial Sequence: Synthetic oligonucleotide
  Antisense strand to SEQ ID NO: 833098
aacccuggagcuuucugca

SEQ ID NO: 833100 - RNA, 19 nt, Artificial Sequence
  Description of Artificial Sequence: Synthetic oligonucleotide
  Sense strand starting at position 1886 of SEQ ID NO: 587981
cagaaagcuccaggguuaa

SEQ ID NO: 833101 - RNA, 19 nt, Artificial Sequence
  Description of Artificial Sequence: Synthetic oligonucleotide
  Antisense strand to SEQ ID NO: 833100
uuaacccuggagcuuucug

SEQ ID NO: 833102 - RNA, 19 nt, Artificial Sequence
  Description of Artificial Sequence: Synthetic oligonucleotide
  Sense strand starting at position 2367 of SEQ ID NO: 587981
uuacauaaaccauguagua

SEQ ID NO: 833103 - RNA, 19 nt, Artificial Sequence
  Description of Artificial Sequence: Synthetic oligonucleotide
  Antisense strand to SEQ ID NO: 833102
uacuacaugguuuauguaa

SEQ ID NO: 833104 - RNA, 19 nt, Artificial Sequence
  Description of Artificial Sequence: Synthetic oligonucleotide
  Sense strand starting at position 2469 of SEQ ID NO: 587981
cagagagaaucugcagagu

SEQ ID NO: 833105 - RNA, 19 nt, Artificial Sequence
  Description of Artificial Sequence: Synthetic oligonucleotide
  Antisense strand to SEQ ID NO: 833104
acucugcagauucucucug

SEQ ID NO: 833106 - RNA, 19 nt, Artificial Sequence
  Description of Artificial Sequence: Synthetic oligonucleotide
  Sense strand starting at position 2632 of SEQ ID NO: 587981
ucaagcuaucgacagaagu

SEQ ID NO: 833107 - RNA, 19 nt, Artificial Sequence
  Description of Artificial Sequence: Synthetic oligonucleotide
  Antisense strand to SEQ ID NO: 833106
acuucugucgauagcuuga

SEQ ID NO: 833108 - RNA, 19 nt, Artificial Sequence
  Description of Artificial Sequence: Synthetic oligonucleotide
  Sense strand starting at position 2686 of SEQ ID NO: 587981
uuaauucccuggucuagaa

SEQ ID NO: 833109 - RNA, 19 nt, Artificial Sequence
  Description of Artificial Sequence: Synthetic oligonucleotide
  Antisense strand to SEQ ID NO: 833108
uucuagaccagggaauuaa

SEQ ID NO: 833110 - RNA, 19 nt, Artificial Sequence
  Description of Artificial Sequence: Synthetic oligonucleotide
  Sense strand starting at position 2690 of SEQ ID NO: 587981
uucccuggucuagaaguua

SEQ ID NO: 833111 - RNA, 19 nt, Artificial Sequence
  Description of Artificial Sequence: Synthetic oligonucleotide
  Antisense strand to SEQ ID NO: 833110
uaacuucuagaccagggaa

SEQ ID NO: 833112 - RNA, 19 nt, Artificial Sequence
  Description of Artificial Sequence: Synthetic oligonucleotide
  Sense strand starting at position 2695 of SEQ ID NO: 587981
uggucuagaaguuagacuu

SEQ ID NO: 833113 - RNA, 19 nt, Artificial Sequence
  Description of Artificial Sequence: Synthetic oligonucleotide
  Antisense strand to SEQ ID NO: 833112
aagucuaacuucuagacca

SEQ ID NO: 833114 - RNA, 19 nt, Artificial Sequence
  Description of Artificial Sequence: Synthetic oligonucleotide
  Sense strand starting at position 2707 of SEQ ID NO: 587981
uagacuugaugacuuguaa

SEQ ID NO: 833115 - RNA, 19 nt, Artificial Sequence
  Description of Artificial Sequence: Synthetic oligonucleotide
  Antisense strand to SEQ ID NO: 833114
uuacaagucaucaagucua

SEQ ID NO: 833116 - RNA, 19 nt, Artificial Sequence
  Description of Artificial Sequence: Synthetic oligonucleotide
  Sense strand starting at position 2756 of SEQ ID NO: 587981
cggguugccacugaaauug

SEQ ID NO: 833117 - RNA, 19 nt, Artificial Sequence
  Description of Artificial Sequence: Synthetic oligonucleotide
  Antisense strand to SEQ ID NO: 833116
caauuucaguggcaacccg

SEQ ID NO: 833118 - RNA, 19 nt, Artificial Sequence
  Description of Artificial Sequence: Synthetic oligonucleotide
  Sense strand starting at position 2834 of SEQ ID NO: 587981
aguuauaugucuccagaga

SEQ ID NO: 833119 - RNA, 19 nt, Artificial Sequence
  Description of Artificial Sequence: Synthetic oligonucleotide
  Antisense strand to SEQ ID NO: 833118
ucucuggagacauauaacu

SEQ ID NO: 833120 - RNA, 19 nt, Artificial Sequence
  Description of Artificial Sequence: Synthetic oligonucleotide
  Sense strand starting at position 2835 of SEQ ID NO: 587981
guuauaugucuccagagaa

SEQ ID NO: 833121 - RNA, 19 nt, Artificial Sequence
  Description of Artificial Sequence: Synthetic oligonucleotide
  Antisense strand to SEQ ID NO: 833120
uucucuggagacauauaac

SEQ ID NO: 833122 - RNA, 19 nt, Artificial Sequence
  Description of Artificial Sequence: Synthetic oligonucleotide
  Sense strand starting at position 3207 of SEQ ID NO: 587981
uuagacuugccaugggacu

SEQ ID NO: 833123 - RNA, 19 nt, Artificial Sequence
  Description of Artificial Sequence: Synthetic oligonucleotide
  Antisense strand to SEQ ID NO: 833122
agucccauggcaagucuaa

SEQ ID NO: 833124 - RNA, 19 nt, Artificial Sequence
  Description of Artificial Sequence: Synthetic oligonucleotide
  Sense strand starting at position 3295 of SEQ ID NO: 587981
guuugucuaggauauuauu

SEQ ID NO: 833125 - RNA, 19 nt, Artificial Sequence
  Description of Artificial Sequence: Synthetic oligonucleotide
  Antisense strand to SEQ ID NO: 833124
aauaauauccuagacaaac

SEQ ID NO: 833126 - RNA, 19 nt, Artificial Sequence
  Description of Artificial Sequence: Synthetic oligonucleotide
  Sense strand starting at position 3356 of SEQ ID NO: 587981
ggugucagaccuuggagaa

SEQ ID NO: 833127 - RNA, 19 nt, Artificial Sequence
  Description of Artificial Sequence: Synthetic oligonucleotide
  Antisense strand to SEQ ID NO: 833126
uucuccaaggucugacacc

SEQ ID NO: 833128 - RNA, 19 nt, Artificial Sequence
  Description of Artificial Sequence: Synthetic oligonucleotide
  Sense strand starting at position 3357 of SEQ ID NO: 587981
gugucagaccuuggagaaa

SEQ ID NO: 833129 - RNA, 19 nt, Artificial Sequence
  Description of Artificial Sequence: Synthetic oligonucleotide
  Antisense strand to SEQ ID NO: 833128
uuucuccaaggucugacac

SEQ ID NO: 833130 - RNA, 19 nt, Artificial Sequence
  Description of Artificial Sequence: Synthetic oligonucleotide
  Sense strand starting at position 3398 of SEQ ID NO: 587981
caguguuaacccugggaaa

SEQ ID NO: 833131 - RNA, 19 nt, Artificial Sequence
  Description of Artificial Sequence: Synthetic oligonucleotide
  Antisense strand to SEQ ID NO: 833130
uuucccaggguuaacacug

SEQ ID NO: 833132 - RNA, 19 nt, Artificial Sequence
  Description of Artificial Sequence: Synthetic oligonucleotide
  Sense strand starting at position 3399 of SEQ ID NO: 587981
aguguuaacccugggaaag

SEQ ID NO: 833133 - RNA, 19 nt, Artificial Sequence
  Description of Artificial Sequence: Synthetic oligonucleotide
  Antisense strand to SEQ ID NO: 833132
cuuucccaggguuaacacu

SEQ ID NO: 833134 - RNA, 19 nt, Artificial Sequence
  Description of Artificial Sequence: Synthetic oligonucleotide
  Sense strand starting at position 3458 of SEQ ID NO: 587981
acugauauugcagaaacgu

SEQ ID NO: 833135 - RNA, 19 nt, Artificial Sequence
  Description of Artificial Sequence: Synthetic oligonucleotide
  Antisense strand to SEQ ID NO: 833134
acguuucugcaauaucagu

SEQ ID NO: 833136 - RNA, 19 nt, Artificial Sequence
  Description of Artificial Sequence: Synthetic oligonucleotide
  Sense strand starting at position 3523 of SEQ ID NO: 587981
gguaaucacuaauuaugag

SEQ ID NO: 833137 - RNA, 19 nt, Artificial Sequence
  Description of Artificial Sequence: Synthetic oligonucleotide
  Antisense strand to SEQ ID NO: 833136
cucauaauuagugauuacc

SEQ ID NO: 833138 - RNA, 19 nt, Artificial Sequence
  Description of Artificial Sequence: Synthetic oligonucleotide
  Sense strand starting at position 3594 of SEQ ID NO: 587981
ggaaauauuuccuauaguu

SEQ ID NO: 833139 - RNA, 19 nt, Artificial Sequence
  Description of Artificial Sequence: Synthetic oligonucleotide
  Antisense strand to SEQ ID NO: 833138
aacuauaggaaauauuucc

SEQ ID NO: 833140 - RNA, 19 nt, Artificial Sequence
  Description of Artificial Sequence: Synthetic oligonucleotide
  Sense strand starting at position 3701 of SEQ ID NO: 587981
agacuaguugccuaaccua

SEQ ID NO: 833141 - RNA, 19 nt, Artificial Sequence
  Description of Artificial Sequence: Synthetic oligonucleotide
  Antisense strand to SEQ ID NO: 833140
uagguuaggcaacuagucu

SEQ ID NO: 833142 - RNA, 19 nt, Artificial Sequence
  Description of Artificial Sequence: Synthetic oligonucleotide
  Sense strand starting at position 3736 of SEQ ID NO: 587981
uuguuauuccuauaaugag

SEQ ID NO: 833143 - RNA, 19 nt, Artificial Sequence
  Description of Artificial Sequence: Synthetic oligonucleotide
  Antisense strand to SEQ ID NO: 833142
cucauuauaggaauaacaa

SEQ ID NO: 833144 - RNA, 19 nt, Artificial Sequence
  Description of Artificial Sequence: Synthetic oligonucleotide
  Sense strand starting at position 3845 of SEQ ID NO: 587981
gcacauagugcucauuaag

SEQ ID NO: 833145 - RNA, 19 nt, Artificial Sequence
  Description of Artificial Sequence: Synthetic oligonucleotide
  Antisense strand to SEQ ID NO: 833144
cuuaaugagcacuaugugc

SEQ ID NO: 833146 - RNA, 19 nt, Artificial Sequence
  Description of Artificial Sequence: Synthetic oligonucleotide
  Sense strand starting at position 135 of SEQ ID NO: 587982
auaucucccaaguguggua

SEQ ID NO: 833147 - RNA, 19 nt, Artificial Sequence
  Description of Artificial Sequence: Synthetic oligonucleotide
  Antisense strand to SEQ ID NO: 833146
uaccacacuugggagauau

SEQ ID NO: 833148 - RNA, 19 nt, Artificial Sequence
  Description of Artificial Sequence: Synthetic oligonucleotide
  Sense strand starting at position 253 of SEQ ID NO: 587982
agaaguuaucucuggugug

SEQ ID NO: 833149 - RNA, 19 nt, Artificial Sequence
  Description of Artificial Sequence: Synthetic oligonucleotide
  Antisense strand to SEQ ID NO: 833148
cacaccagagauaacuucu

SEQ ID NO: 833150 - RNA, 19 nt, Artificial Sequence
  Description of Artificial Sequence: Synthetic oligonucleotide
  Sense strand starting at position 418 of SEQ ID NO: 587982
guauccaggcagugagauu

SEQ ID NO: 833151 - RNA, 19 nt, Artificial Sequence
  Description of Artificial Sequence: Synthetic oligonucleotide
  Antisense strand to SEQ ID NO: 833150
aaucucacugccuggauac

SEQ ID NO: 833152 - RNA, 19 nt, Artificial Sequence
  Description of Artificial Sequence: Synthetic oligonucleotide
  Sense strand starting at position 429 of SEQ ID NO: 587982
gugagauuaugguccuuug

SEQ ID NO: 833153 - RNA, 19 nt, Artificial Sequence
  Description of Artificial Sequence: Synthetic oligonucleotide
  Antisense strand to SEQ ID NO: 833152
caaaggaccauaaucucac

SEQ ID NO: 833154 - RNA, 19 nt, Artificial Sequence
  Description of Artificial Sequence: Synthetic oligonucleotide
  Sense strand starting at position 432 of SEQ ID NO: 587982
agauuaugguccuuuguuu

SEQ ID NO: 833155 - RNA, 19 nt, Artificial Sequence
  Description of Artificial Sequence: Synthetic oligonucleotide
  Antisense strand to SEQ ID NO: 833154
aaacaaaggaccauaaucu

SEQ ID NO: 833156 - RNA, 19 nt, Artificial Sequence
  Description of Artificial Sequence: Synthetic oligonucleotide
  Sense strand starting at position 582 of SEQ ID NO: 587982
ggagaacuuugugccagau

SEQ ID NO: 833157 - RNA, 19 nt, Artificial Sequence
  Description of Artificial Sequence: Synthetic oligonucleotide
  Antisense strand to SEQ ID NO: 833156
aucuggcacaaaguucucc

SEQ ID NO: 833158 - RNA, 19 nt, Artificial Sequence
  Description of Artificial Sequence: Synthetic oligonucleotide
  Sense strand starting at position 673 of SEQ ID NO: 587982
agguaaauggucugcuaga

SEQ ID NO: 833159 - RNA, 19 nt, Artificial Sequence
  Description of Artificial Sequence: Synthetic oligonucleotide
  Antisense strand to SEQ ID NO: 833158
ucuagcagaccauuuaccu

SEQ ID NO: 833160 - RNA, 19 nt, Artificial Sequence
  Description of Artificial Sequence: Synthetic oligonucleotide
  Sense strand starting at position 674 of SEQ ID NO: 587982
gguaaauggucugcuagac

SEQ ID NO: 833161 - RNA, 19 nt, Artificial Sequence
  Description of Artificial Sequence: Synthetic oligonucleotide
  Antisense strand to SEQ ID NO: 833160
gucuagcagaccauuuacc

SEQ ID NO: 833162 - RNA, 19 nt, Artificial Sequence
  Description of Artificial Sequence: Synthetic oligonucleotide
  Sense strand starting at position 678 of SEQ ID NO: 587982
aauggucugcuagacaaca

SEQ ID NO: 833163 - RNA, 19 nt, Artificial Sequence
  Description of Artificial Sequence: Synthetic oligonucleotide
  Antisense strand to SEQ ID NO: 833162
uguugucuagcagaccauu

SEQ ID NO: 833164 - RNA, 19 nt, Artificial Sequence
  Description of Artificial Sequence: Synthetic oligonucleotide
  Sense strand starting at position 809 of SEQ ID NO: 587982
cugcaaacuucuuuagaag

SEQ ID NO: 833165 - RNA, 19 nt, Artificial Sequence
  Description of Artificial Sequence: Synthetic oligonucleotide
  Antisense strand to SEQ ID NO: 833164
cuucuaaagaaguuugcag

SEQ ID NO: 833166 - RNA, 19 nt, Artificial Sequence
  Description of Artificial Sequence: Synthetic oligonucleotide
  Sense strand starting at position 867 of SEQ ID NO: 587982
gguuauuaaggcuacaaua

SEQ ID NO: 833167 - RNA, 19 nt, Artificial Sequence
  Description of Artificial Sequence: Synthetic oligonucleotide
  Antisense strand to SEQ ID NO: 833166
uauuguagccuuaauaacc

SEQ ID NO: 833168 - RNA, 19 nt, Artificial Sequence
  Description of Artificial Sequence: Synthetic oligonucleotide
  Sense strand starting at position 1005 of SEQ ID NO: 587982
guccaaaucuaacuguauu

SEQ ID NO: 833169 - RNA, 19 nt, Artificial Sequence
  Description of Artificial Sequence: Synthetic oligonucleotide
  Antisense strand to SEQ ID NO: 833168
aauacaguuagauuuggac

SEQ ID NO: 833170 - RNA, 19 nt, Artificial Sequence
  Description of Artificial Sequence: Synthetic oligonucleotide
  Sense strand starting at position 1016 of SEQ ID NO: 587982
acuguauuccugcacacca

SEQ ID NO: 833171 - RNA, 19 nt, Artificial Sequence
  Description of Artificial Sequence: Synthetic oligonucleotide
  Antisense strand to SEQ ID NO: 833170
uggugugcaggaauacagu

SEQ ID NO: 833172 - RNA, 19 nt, Artificial Sequence
  Description of Artificial Sequence: Synthetic oligonucleotide
  Sense strand starting at position 1112 of SEQ ID NO: 587982
ugaagaauuccuuggauuc

SEQ ID NO: 833173 - RNA, 19 nt, Artificial Sequence
  Description of Artificial Sequence: Synthetic oligonucleotide
  Antisense strand to SEQ ID NO: 833172
gaauccaaggaauucuuca

SEQ ID NO: 833174 - RNA, 19 nt, Artificial Sequence
  Description of Artificial Sequence: Synthetic oligonucleotide
  Sense strand starting at position 1189 of SEQ ID NO: 587982
cagucuucuggugagguga

SEQ ID NO: 833175 - RNA, 19 nt, Artificial Sequence
  Description of Artificial Sequence: Synthetic oligonucleotide
  Antisense strand to SEQ ID NO: 833174
ucaccucaccagaagacug

SEQ ID NO: 833176 - RNA, 19 nt, Artificial Sequence
  Description of Artificial Sequence: Synthetic oligonucleotide
  Sense strand starting at position 2173 of SEQ ID NO: 587982
gggcuuugucacugagagg

SEQ ID NO: 833177 - RNA, 19 nt, Artificial Sequence
  Description of Artificial Sequence: Synthetic oligonucleotide
  Antisense strand to SEQ ID NO: 833176
ccucucagugacaaagccc

SEQ ID NO: 833178 - RNA, 19 nt, Artificial Sequence
  Description of Artificial Sequence: Synthetic oligonucleotide
  Sense strand starting at position 2261 of SEQ ID NO: 587982
ggaaacauuuccugcauuu

SEQ ID NO: 833179 - RNA, 19 nt, Artificial Sequence
  Description of Artificial Sequence: Synthetic oligonucleotide
  Antisense strand to SEQ ID NO: 833178
aaaugcaggaaauguuucc

SEQ ID NO: 833180 - RNA, 19 nt, Artificial Sequence
  Description of Artificial Sequence: Synthetic oligonucleotide
  Sense strand starting at position 2354 of SEQ ID NO: 587982
gcuguugagaugcagauca

SEQ ID NO: 833181 - RNA, 19 nt, Artificial Sequence
  Description of Artificial Sequence: Synthetic oligonucleotide
  Antisense strand to SEQ ID NO: 833180
ugaucugcaucucaacagc

SEQ ID NO: 833182 - RNA, 19 nt, Artificial Sequence
  Description of Artificial Sequence: Synthetic oligonucleotide
  Sense strand starting at position 2449 of SEQ ID NO: 587982
acagaauuauuagcgggau

SEQ ID NO: 833183 - RNA, 19 nt, Artificial Sequence
  Description of Artificial Sequence: Synthetic oligonucleotide
  Antisense strand to SEQ ID NO: 833182
aucccgcuaauaauucugu

SEQ ID NO: 833184 - RNA, 19 nt, Artificial Sequence
  Description of Artificial Sequence: Synthetic oligonucleotide
  Sense strand starting at position 2451 of SEQ ID NO: 587982
agaauuauuagcgggauua

SEQ ID NO: 833185 - RNA, 19 nt, Artificial Sequence
  Description of Artificial Sequence: Synthetic oligonucleotide
  Antisense strand to SEQ ID NO: 833184
uaaucccgcuaauaauucu

SEQ ID NO: 833186 - RNA, 19 nt, Artificial Sequence
  Description of Artificial Sequence: Synthetic oligonucleotide
  Sense strand starting at position 2452 of SEQ ID NO: 587982
gaauuauuagcgggauuaa

SEQ ID NO: 833187 - RNA, 19 nt, Artificial Sequence
  Description of Artificial Sequence: Synthetic oligonucleotide
  Antisense strand to SEQ ID NO: 833186
uuaaucccgcuaauaauuc

SEQ ID NO: 833188 - RNA, 19 nt, Artificial Sequence
  Description of Artificial Sequence: Synthetic oligonucleotide
  Sense strand starting at position 2635 of SEQ ID NO: 587982
ugguucagauugcuaggau

SEQ ID NO: 833189 - RNA, 19 nt, Artificial Sequence
  Description of Artificial Sequence: Synthetic oligonucleotide
  Antisense strand to SEQ ID NO: 833188
auccuagcaaucugaacca

SEQ ID NO: 833190 - RNA, 19 nt, Artificial Sequence
  Description of Artificial Sequence: Synthetic oligonucleotide
  Sense strand starting at position 2668 of SEQ ID NO: 587982
ugccauuuguuguuuauau

SEQ ID NO: 833191 - RNA, 19 nt, Artificial Sequence
  Description of Artificial Sequence: Synthetic oligonucleotide
  Antisense strand to SEQ ID NO: 833190
auauaaacaacaaauggca

SEQ ID NO: 833192 - RNA, 19 nt, Artificial Sequence
  Description of Artificial Sequence: Synthetic oligonucleotide
  Sense strand starting at position 2669 of SEQ ID NO: 587982
gccauuuguuguuuauaua

SEQ ID NO: 833193 - RNA, 19 nt, Artificial Sequence
  Description of Artificial Sequence: Synthetic oligonucleotide
  Antisense strand to SEQ ID NO: 833192
uauauaaacaacaaauggc

SEQ ID NO: 833194 - RNA, 19 nt, Artificial Sequence
  Description of Artificial Sequence: Synthetic oligonucleotide
  Sense strand starting at position 2741 of SEQ ID NO: 587982
acaauagugcaauaagugu

SEQ ID NO: 833195 - RNA, 19 nt, Artificial Sequence
  Description of Artificial Sequence: Synthetic oligonucleotide
  Antisense strand to SEQ ID NO: 833194
acacuuauugcacuauugu

SEQ ID NO: 833196 - RNA, 19 nt, Artificial Sequence
  Description of Artificial Sequence: Synthetic oligonucleotide
  Sense strand starting at position 2747 of SEQ ID NO: 587982
gugcaauaagugugaauua

SEQ ID NO: 833197 - RNA, 19 nt, Artificial Sequence
  Description of Artificial Sequence: Synthetic oligonucleotide
  Antisense strand to SEQ ID NO: 833196
uaauucacacuuauugcac

SEQ ID NO: 833198 - RNA, 19 nt, Artificial Sequence
  Description of Artificial Sequence: Synthetic oligonucleotide
  Sense strand starting at position 2858 of SEQ ID NO: 587982
ugaauucuggcuuagcuua

SEQ ID NO: 833199 - RNA, 19 nt, Artificial Sequence
  Description of Artificial Sequence: Synthetic oligonucleotide
  Antisense strand to SEQ ID NO: 833198
uaagcuaagccagaauuca

SEQ ID NO: 833200 - RNA, 19 nt, Artificial Sequence
  Description of Artificial Sequence: Synthetic oligonucleotide
  Sense strand starting at position 3044 of SEQ ID NO: 587982
cacagauuagcugggcaaa

SEQ ID NO: 833201 - RNA, 19 nt, Artificial Sequence
  Description of Artificial Sequence: Synthetic oligonucleotide
  Antisense strand to SEQ ID NO: 833200
uuugcccagcuaaucugug

SEQ ID NO: 833202 - RNA, 19 nt, Artificial Sequence
  Description of Artificial Sequence: Synthetic oligonucleotide
  Sense strand starting at position 3046 of SEQ ID NO: 587982
cagauuagcugggcaaagu

SEQ ID NO: 833203 - RNA, 19 nt, Artificial Sequence
  Description of Artificial Sequence: Synthetic oligonucleotide
  Antisense strand to SEQ ID NO: 833202
acuuugcccagcuaaucug

SEQ ID NO: 833204 - RNA, 19 nt, Artificial Sequence
  Description of Artificial Sequence: Synthetic oligonucleotide
  Sense strand starting at position 3096 of SEQ ID NO: 587982
gucuguugggaggaucacu

SEQ ID NO: 833205 - RNA, 19 nt, Artificial Sequence
  Description of Artificial Sequence: Synthetic oligonucleotide
  Antisense strand to SEQ ID NO: 833204
agugauccucccaacagac

SEQ ID NO: 833206 - RNA, 19 nt, Artificial Sequence
  Description of Artificial Sequence: Synthetic oligonucleotide
  Sense strand starting at position 3228 of SEQ ID NO: 587982
cugauugcuguccauuacu

SEQ ID NO: 833207 - RNA, 19 nt, Artificial Sequence
  Description of Artificial Sequence: Synthetic oligonucleotide
  Antisense strand to SEQ ID NO: 833206
aguaauggacagcaaucag

SEQ ID NO: 833208 - RNA, 19 nt, Artificial Sequence
  Description of Artificial Sequence: Synthetic oligonucleotide
  Sense strand starting at position 3332 of SEQ ID NO: 587982
uguauccaugaaugagaua

SEQ ID NO: 833209 - RNA, 19 nt, Artificial Sequence
  Description of Artificial Sequence: Synthetic oligonucleotide
  Antisense strand to SEQ ID NO: 833208
uaucucauucauggauaca

SEQ ID NO: 833210 - RNA, 19 nt, Artificial Sequence
  Description of Artificial Sequence: Synthetic oligonucleotide
  Sense strand starting at position 3395 of SEQ ID NO: 587982
gcaggcauuguagaaguau

SEQ ID NO: 833211 - RNA, 19 nt, Artificial Sequence
  Description of Artificial Sequence: Synthetic oligonucleotide
  Antisense strand to SEQ ID NO: 833210
auacuucuacaaugccugc

SEQ ID NO: 833212 - RNA, 19 nt, Artificial Sequence
  Description of Artificial Sequence: Synthetic oligonucleotide
  Sense strand starting at position 3423 of SEQ ID NO: 587982
gcauuauuccaauagagug

SEQ ID NO: 833213 - RNA, 19 nt, Artificial Sequence
  Description of Artificial Sequence: Synthetic oligonucleotide
  Antisense strand to SEQ ID NO: 833212
cacucuauuggaauaaugc

SEQ ID NO: 833214 - RNA, 19 nt, Artificial Sequence
  Description of Artificial Sequence: Synthetic oligonucleotide
  Sense strand starting at position 3467 of SEQ ID NO: 587982
aaacaagauuuagaugagu

SEQ ID NO: 833215 - RNA, 19 nt, Artificial Sequence
  Description of Artificial Sequence: Synthetic oligonucleotide
  Antisense strand to SEQ ID NO: 833214
acucaucuaaaucuuguuu

SEQ ID NO: 833216 - RNA, 19 nt, Artificial Sequence
  Description of Artificial Sequence: Synthetic oligonucleotide
  Sense strand starting at position 3631 of SEQ ID NO: 587982
aguauuacgaguggcauuu

SEQ ID NO: 833217 - RNA, 19 nt, Artificial Sequence
  Description of Artificial Sequence: Synthetic oligonucleotide
  Antisense strand to SEQ ID NO: 833216
aaaugccacucguaauacu

SEQ ID NO: 833218 - RNA, 19 nt, Artificial Sequence
  Description of Artificial Sequence: Synthetic oligonucleotide
  Sense strand starting at position 3745 of SEQ ID NO: 587982
aguguagcuggauaggaaa

SEQ ID NO: 833219 - RNA, 19 nt, Artificial Sequence
  Description of Artificial Sequence: Synthetic oligonucleotide
  Antisense strand to SEQ ID NO: 833218
uuuccuauccagcuacacu

SEQ ID NO: 833220 - RNA, 19 nt, Artificial Sequence
  Description of Artificial Sequence: Synthetic oligonucleotide
  Sense strand starting at position 3874 of SEQ ID NO: 587982
ccaacaugauauguuagau

SEQ ID NO: 833221 - RNA, 19 nt, Artificial Sequence
  Description of Artificial Sequence: Synthetic oligonucleotide
  Antisense strand to SEQ ID NO: 833220
aucuaacauaucauguugg

SEQ ID NO: 833222 - RNA, 19 nt, Artificial Sequence
  Description of Artificial Sequence: Synthetic oligonucleotide
  Sense strand starting at position 3948 of SEQ ID NO: 587982
agaaauaucucaucugguc

SEQ ID NO: 833223 - RNA, 19 nt, Artificial Sequence
  Description of Artificial Sequence: Synthetic oligonucleotide
  Antisense strand to SEQ ID NO: 833222
gaccagaugagauauuucu

SEQ ID NO: 833224 - RNA, 19 nt, Artificial Sequence
  Description of Artificial Sequence: Synthetic oligonucleotide
  Sense strand starting at position 3972 of SEQ ID NO: 587982
guggucaguuacucauaga

SEQ ID NO: 833225 - RNA, 19 nt, Artificial Sequence
  Description of Artificial Sequence: Synthetic oligonucleotide
  Antisense strand to SEQ ID NO: 833224
ucuaugaguaacugaccac

SEQ ID NO: 833226 - RNA, 19 nt, Artificial Sequence
  Description of Artificial Sequence: Synthetic oligonucleotide
  Sense strand starting at position 239 of SEQ ID NO: 587983
gggccuuacuccgcaagga

SEQ ID NO: 833227 - RNA, 19 nt, Artificial Sequence
  Description of Artificial Sequence: Synthetic oligonucleotide
  Antisense strand to SEQ ID NO: 833226
uccuugcggaguaaggccc

SEQ ID NO: 833228 - RNA, 19 nt, Artificial Sequence
  Description of Artificial Sequence: Synthetic oligonucleotide
  Sense strand starting at position 240 of SEQ ID NO: 587983
ggccuuacuccgcaaggaa

SEQ ID NO: 833229 - RNA, 19 nt, Artificial Sequence
  Description of Artificial Sequence: Synthetic oligonucleotide
  Antisense strand to SEQ ID NO: 833228
uuccuugcggaguaaggcc

SEQ ID NO: 833230 - RNA, 19 nt, Artificial Sequence
  Description of Artificial Sequence: Synthetic oligonucleotide
  Sense strand starting at position 255 of SEQ ID NO: 587983
ggaagaugcucuuccugaa

SEQ ID NO: 833231 - RNA, 19 nt, Artificial Sequence
  Description of Artificial Sequence: Synthetic oligonucleotide
  Antisense strand to SEQ ID NO: 833230
uucaggaagagcaucuucc

SEQ ID NO: 833232 - RNA, 19 nt, Artificial Sequence
  Description of Artificial Sequence: Synthetic oligonucleotide
  Sense strand starting at position 258 of SEQ ID NO: 587983
agaugcucuuccugaagua

SEQ ID NO: 833233 - RNA, 19 nt, Artificial Sequence
  Description of Artificial Sequence: Synthetic oligonucleotide
  Antisense strand to SEQ ID NO: 833232
uacuucaggaagagcaucu

SEQ ID NO: 833234 - RNA, 19 nt, Artificial Sequence
  Description of Artificial Sequence: Synthetic oligonucleotide
  Sense strand starting at position 259 of SEQ ID NO: 587983
gaugcucuuccugaaguaa

SEQ ID NO: 833235 - RNA, 19 nt, Artificial Sequence
  Description of Artificial Sequence: Synthetic oligonucleotide
  Antisense strand to SEQ ID NO: 833234
uuacuucaggaagagcauc

SEQ ID NO: 833236 - RNA, 19 nt, Artificial Sequence
  Description of Artificial Sequence: Synthetic oligonucleotide
  Sense strand starting at position 267 of SEQ ID NO: 587983
uccugaaguaaucguugca

SEQ ID NO: 833237 - RNA, 19 nt, Artificial Sequence
  Description of Artificial Sequence: Synthetic oligonucleotide
  Antisense strand to SEQ ID NO: 833236
ugcaacgauuacuucagga

SEQ ID NO: 833238 - RNA, 19 nt, Artificial Sequence
  Description of Artificial Sequence: Synthetic oligonucleotide
  Sense strand starting at position 270 of SEQ ID NO: 587983
ugaaguaaucguugcacag

SEQ ID NO: 833239 - RNA, 19 nt, Artificial Sequence
  Description of Artificial Sequence: Synthetic oligonucleotide
  Antisense strand to SEQ ID NO: 833238
cugugcaacgauuacuuca

SEQ ID NO: 833240 - RNA, 19 nt, Artificial Sequence
  Description of Artificial Sequence: Synthetic oligonucleotide
  Sense strand starting at position 368 of SEQ ID NO: 587983
gccagugucccuggaagau

SEQ ID NO: 833241 - RNA, 19 nt, Artificial Sequence
  Description of Artificial Sequence: Synthetic oligonucleotide
  Antisense strand to SEQ ID NO: 833240
aucuuccagggacacuggc

SEQ ID NO: 833242 - RNA, 19 nt, Artificial Sequence
  Description of Artificial Sequence: Synthetic oligonucleotide
  Sense strand starting at position 497 of SEQ ID NO: 587983
gcaaguguccugcggcaga

SEQ ID NO: 833243 - RNA, 19 nt, Artificial Sequence
  Description of Artificial Sequence: Synthetic oligonucleotide
  Antisense strand to SEQ ID NO: 833242
ucugccgcaggacacuugc

SEQ ID NO: 833244 - RNA, 19 nt, Artificial Sequence
  Description of Artificial Sequence: Synthetic oligonucleotide
  Sense strand starting at position 528 of SEQ ID NO: 587983
uggauaaagagcugacgau

SEQ ID NO: 833245 - RNA, 19 nt, Artificial Sequence
  Description of Artificial Sequence: Synthetic oligonucleotide
  Antisense strand to SEQ ID NO: 833244
aucgucagcucuuuaucca

SEQ ID NO: 833246 - RNA, 19 nt, Artificial Sequence
  Description of Artificial Sequence: Synthetic oligonucleotide
  Sense strand starting at position 778 of SEQ ID NO: 587983
ucgacuggcaguggucaua

SEQ ID NO: 833247 - RNA, 19 nt, Artificial Sequence
  Description of Artificial Sequence: Synthetic oligonucleotide
  Antisense strand to SEQ ID NO: 833246
uaugaccacugccagucga

SEQ ID NO: 833248 - RNA, 19 nt, Artificial Sequence
  Description of Artificial Sequence: Synthetic oligonucleotide
  Sense strand starting at position 781 of SEQ ID NO: 587983
acuggcaguggucauagau

SEQ ID NO: 833249 - RNA, 19 nt, Artificial Sequence
  Description of Artificial Sequence: Synthetic oligonucleotide
  Antisense strand to SEQ ID NO: 833248
aucuaugaccacugccagu

SEQ ID NO: 833250 - RNA, 19 nt, Artificial Sequence
  Description of Artificial Sequence: Synthetic oligonucleotide
  Sense strand starting at position 793 of SEQ ID NO: 587983
cauagauguccaggugggu

SEQ ID NO: 833251 - RNA, 19 nt, Artificial Sequence
  Description of Artificial Sequence: Synthetic oligonucleotide
  Antisense strand to SEQ ID NO: 833250
acccaccuggacaucuaug

SEQ ID NO: 833252 - RNA, 19 nt, Artificial Sequence
  Description of Artificial Sequence: Synthetic oligonucleotide
  Sense strand starting at position 967 of SEQ ID NO: 587983
cccuguucuugcuaaggaa

SEQ ID NO: 833253 - RNA, 19 nt, Artificial Sequence
  Description of Artificial Sequence: Synthetic oligonucleotide
  Antisense strand to SEQ ID NO: 833252
uuccuuagcaagaacaggg

SEQ ID NO: 833254 - RNA, 19 nt, Artificial Sequence
  Description of Artificial Sequence: Synthetic oligonucleotide
  Sense strand starting at position 970 of SEQ ID NO: 587983
uguucuugcuaaggaaaga

SEQ ID NO: 833255 - RNA, 19 nt, Artificial Sequence
  Description of Artificial Sequence: Synthetic oligonucleotide
  Antisense strand to SEQ ID NO: 833254
ucuuuccuuagcaagaaca

SEQ ID NO: 833256 - RNA, 19 nt, Artificial Sequence
  Description of Artificial Sequence: Synthetic oligonucleotide
  Sense strand starting at position 1237 of SEQ ID NO: 587983
gguuucuggugccaggaaa

SEQ ID NO: 833257 - RNA, 19 nt, Artificial Sequence
  Description of Artificial Sequence: Synthetic oligonucleotide
  Antisense strand to SEQ ID NO: 833256
uuuccuggcaccagaaacc

SEQ ID NO: 833258 - RNA, 19 nt, Artificial Sequence
  Description of Artificial Sequence: Synthetic oligonucleotide
  Sense strand starting at position 1383 of SEQ ID NO: 587983
aggccucccuccucagaaa

SEQ ID NO: 833259 - RNA, 19 nt, Artificial Sequence
  Description of Artificial Sequence: Synthetic oligonucleotide
  Antisense strand to SEQ ID NO: 833258
uuucugaggagggaggccu

SEQ ID NO: 833260 - RNA, 19 nt, Artificial Sequence
  Description of Artificial Sequence: Synthetic oligonucleotide
  Sense strand starting at position 2555 of SEQ ID NO: 587983
gaacguaguguccagauag

SEQ ID NO: 833261 - RNA, 19 nt, Artificial Sequence
  Description of Artificial Sequence: Synthetic oligonucleotide
  Antisense strand to SEQ ID NO: 833260
cuaucuggacacuacguuc

SEQ ID NO: 833262 - RNA, 19 nt, Artificial Sequence
  Description of Artificial Sequence: Synthetic oligonucleotide
  Sense strand starting at position 2567 of SEQ ID NO: 587983
cagauagacugacgauaaa

SEQ ID NO: 833263 - RNA, 19 nt, Artificial Sequence
  Description of Artificial Sequence: Synthetic oligonucleotide
  Antisense strand to SEQ ID NO: 833262
uuuaucgucagucuaucug

SEQ ID NO: 833264 - RNA, 19 nt, Artificial Sequence
  Description of Artificial Sequence: Synthetic oligonucleotide
  Sense strand starting at position 2698 of SEQ ID NO: 587983
gaaugugcuuuccauagug

SEQ ID NO: 833265 - RNA, 19 nt, Artificial Sequence
  Description of Artificial Sequence: Synthetic oligonucleotide
  Antisense strand to SEQ ID NO: 833264
cacuauggaaagcacauuc

SEQ ID NO: 833266 - RNA, 19 nt, Artificial Sequence
  Description of Artificial Sequence: Synthetic oligonucleotide
  Sense strand starting at position 2700 of SEQ ID NO: 587983
augugcuuuccauagugaa

SEQ ID NO: 833267 - RNA, 19 nt, Artificial Sequence
  Description of Artificial Sequence: Synthetic oligonucleotide
  Antisense strand to SEQ ID NO: 833266
uucacuauggaaagcacau

SEQ ID NO: 833268 - RNA, 19 nt, Artificial Sequence
  Description of Artificial Sequence: Synthetic oligonucleotide
  Sense strand starting at position 2703 of SEQ ID NO: 587983
ugcuuuccauagugaacaa

SEQ ID NO: 833269 - RNA, 19 nt, Artificial Sequence
  Description of Artificial Sequence: Synthetic oligonucleotide
  Antisense strand to SEQ ID NO: 833268
uuguucacuauggaaagca

SEQ ID NO: 833270 - RNA, 19 nt, Artificial Sequence
  Description of Artificial Sequence: Synthetic oligonucleotide
  Sense strand starting at position 2707 of SEQ ID NO: 587983
uuccauagugaacaaguau

SEQ ID NO: 833271 - RNA, 19 nt, Artificial Sequence
  Description of Artificial Sequence: Synthetic oligonucleotide
  Antisense strand to SEQ ID NO: 833270
auacuuguucacuauggaa

SEQ ID NO: 833272 - RNA, 19 nt, Artificial Sequence
  Description of Artificial Sequence: Synthetic oligonucleotide
  Sense strand starting at position 2736 of SEQ ID NO: 587983
auguguaugccagcuguau

SEQ ID NO: 833273 - RNA, 19 nt, Artificial Sequence
  Description of Artificial Sequence: Synthetic oligonucleotide
  Antisense strand to SEQ ID NO: 833272
auacagcuggcauacacau

SEQ ID NO: 833274 - RNA, 19 nt, Artificial Sequence
  Description of Artificial Sequence: Synthetic oligonucleotide
  Sense strand starting at position 2737 of SEQ ID NO: 587983
uguguaugccagcuguauu

SEQ ID NO: 833275 - RNA, 19 nt, Artificial Sequence
  Description of Artificial Sequence: Synthetic oligonucleotide
  Antisense strand to SEQ ID NO: 833274
aauacagcuggcauacaca

SEQ ID NO: 833276 - RNA, 19 nt, Artificial Sequence
  Description of Artificial Sequence: Synthetic oligonucleotide
  Sense strand starting at position 2738 of SEQ ID NO: 587983
guguaugccagcuguauuc

SEQ ID NO: 833277 - RNA, 19 nt, Artificial Sequence
  Description of Artificial Sequence: Synthetic oligonucleotide
  Antisense strand to SEQ ID NO: 833276
gaauacagcuggcauacac

SEQ ID NO: 833278 - RNA, 19 nt, Artificial Sequence
  Description of Artificial Sequence: Synthetic oligonucleotide
  Sense strand starting at position 2747 of SEQ ID NO: 587983
agcuguauucucggaagag

SEQ ID NO: 833279 - RNA, 19 nt, Artificial Sequence
  Description of Artificial Sequence: Synthetic oligonucleotide
  Antisense strand to SEQ ID NO: 833278
cucuuccgagaauacagcu

SEQ ID NO: 833280 - RNA, 19 nt, Artificial Sequence
  Description of Artificial Sequence: Synthetic oligonucleotide
  Sense strand starting at position 2777 of SEQ ID NO: 587983
gugcuucagcugcagaagu

SEQ ID NO: 833281 - RNA, 19 nt, Artificial Sequence
  Description of Artificial Sequence: Synthetic oligonucleotide
  Antisense strand to SEQ ID NO: 833280
acuucugcagcugaagcac

SEQ ID NO: 833282 - RNA, 19 nt, Artificial Sequence
  Description of Artificial Sequence: Synthetic oligonucleotide
  Sense strand starting at position 2817 of SEQ ID NO: 587983
acuguaauccgagcgcuau

SEQ ID NO: 833283 - RNA, 19 nt, Artificial Sequence
  Description of Artificial Sequence: Synthetic oligonucleotide
  Antisense strand to SEQ ID NO: 833282
auagcgcucggauuacagu

SEQ ID NO: 833284 - RNA, 19 nt, Artificial Sequence
  Description of Artificial Sequence: Synthetic oligonucleotide
  Sense strand starting at position 2818 of SEQ ID NO: 587983
cuguaauccgagcgcuaug

SEQ ID NO: 833285 - RNA, 19 nt, Artificial Sequence
  Description of Artificial Sequence: Synthetic oligonucleotide
  Antisense strand to SEQ ID NO: 833284
cauagcgcucggauuacag

SEQ ID NO: 833286 - RNA, 19 nt, Artificial Sequence
  Description of Artificial Sequence: Synthetic oligonucleotide
  Sense strand starting at position 3174 of SEQ ID NO: 587983
gccgguauuacagguguaa

SEQ ID NO: 833287 - RNA, 19 nt, Artificial Sequence
  Description of Artificial Sequence: Synthetic oligonucleotide
  Antisense strand to SEQ ID NO: 833286
uuacaccuguaauaccggc

SEQ ID NO: 833288 - RNA, 19 nt, Artificial Sequence
  Description of Artificial Sequence: Synthetic oligonucleotide
  Sense strand starting at position 3609 of SEQ ID NO: 587983
ugucuagaauccugugaca

SEQ ID NO: 833289 - RNA, 19 nt, Artificial Sequence
  Description of Artificial Sequence: Synthetic oligonucleotide
  Antisense strand to SEQ ID NO: 833288
ugucacaggauucuagaca

SEQ ID NO: 833290 - RNA, 19 nt, Artificial Sequence
  Description of Artificial Sequence: Synthetic oligonucleotide
  Sense strand starting at position 3611 of SEQ ID NO: 587983
ucuagaauccugugacaug

SEQ ID NO: 833291 - RNA, 19 nt, Artificial Sequence
  Description of Artificial Sequence: Synthetic oligonucleotide
  Antisense strand to SEQ ID NO: 833290
caugucacaggauucuaga

SEQ ID NO: 833292 - RNA, 19 nt, Artificial Sequence
  Description of Artificial Sequence: Synthetic oligonucleotide
  Sense strand starting at position 3817 of SEQ ID NO: 587983
guggaagauagaugaguua

SEQ ID NO: 833293 - RNA, 19 nt, Artificial Sequence
  Description of Artificial Sequence: Synthetic oligonucleotide
  Antisense strand to SEQ ID NO: 833292
uaacucaucuaucuuccac

SEQ ID NO: 833294 - RNA, 19 nt, Artificial Sequence
  Description of Artificial Sequence: Synthetic oligonucleotide
  Sense strand starting at position 3828 of SEQ ID NO: 587983
augaguuaauuuccaucgu

SEQ ID NO: 833295 - RNA, 19 nt, Artificial Sequence
  Description of Artificial Sequence: Synthetic oligonucleotide
  Antisense strand to SEQ ID NO: 833294
acgauggaaauuaacucau

SEQ ID NO: 833296 - RNA, 19 nt, Artificial Sequence
  Description of Artificial Sequence: Synthetic oligonucleotide
  Sense strand starting at position 3829 of SEQ ID NO: 587983
ugaguuaauuuccaucgua

SEQ ID NO: 833297 - RNA, 19 nt, Artificial Sequence
  Description of Artificial Sequence: Synthetic oligonucleotide
  Antisense strand to SEQ ID NO: 833296
uacgauggaaauuaacuca

SEQ ID NO: 833298 - RNA, 19 nt, Artificial Sequence
  Description of Artificial Sequence: Synthetic oligonucleotide
  Sense strand starting at position 3832 of SEQ ID NO: 587983
guuaauuuccaucguaauu

SEQ ID NO: 833299 - RNA, 19 nt, Artificial Sequence
  Description of Artificial Sequence: Synthetic oligonucleotide
  Antisense strand to SEQ ID NO: 833298
aauuacgauggaaauuaac

SEQ ID NO: 833300 - RNA, 19 nt, Artificial Sequence
  Description of Artificial Sequence: Synthetic oligonucleotide
  Sense strand starting at position 3852 of SEQ ID NO: 587983
cagcaagucguugggcaaa

SEQ ID NO: 833301 - RNA, 19 nt, Artificial Sequence
  Description of Artificial Sequence: Synthetic oligonucleotide
  Antisense strand to SEQ ID NO: 833300
uuugcccaacgacuugcug

SEQ ID NO: 833302 - RNA, 19 nt, Artificial Sequence
  Description of Artificial Sequence: Synthetic oligonucleotide
  Sense strand starting at position 3895 of SEQ ID NO: 587983
gagagaguggugugaugca

SEQ ID NO: 833303 - RNA, 19 nt, Artificial Sequence
  Description of Artificial Sequence: Synthetic oligonucleotide
  Antisense strand to SEQ ID NO: 833302
ugcaucacaccacucucuc

SEQ ID NO: 833304 - RNA, 19 nt, Artificial Sequence
  Description of Artificial Sequence: Synthetic oligonucleotide
  Sense strand starting at position 3904 of SEQ ID NO: 587983
gugugaugcacugacaggu

SEQ ID NO: 833305 - RNA, 19 nt, Artificial Sequence
  Description of Artificial Sequence: Synthetic oligonucleotide
  Antisense strand to SEQ ID NO: 833304
accugucagugcaucacac

SEQ ID NO: 833306 - RNA, 19 nt, Artificial Sequence
  Description of Artificial Sequence: Synthetic oligonucleotide
  Sense strand starting at position 36 of SEQ ID NO: 587984
aggguuugagguuauagua

SEQ ID NO: 833307 - RNA, 19 nt, Artificial Sequence
  Description of Artificial Sequence: Synthetic oligonucleotide
  Antisense strand to SEQ ID NO: 833306
uacuauaaccucaaacccu

SEQ ID NO: 833308 - RNA, 19 nt, Artificial Sequence
  Description of Artificial Sequence: Synthetic oligonucleotide
  Sense strand starting at position 219 of SEQ ID NO: 587984
cuuugagcuucuuugcauu

SEQ ID NO: 833309 - RNA, 19 nt, Artificial Sequence
  Description of Artificial Sequence: Synthetic oligonucleotide
  Antisense strand to SEQ ID NO: 833308
aaugcaaagaagcucaaag

SEQ ID NO: 833310 - RNA, 19 nt, Artificial Sequence
  Description of Artificial Sequence: Synthetic oligonucleotide
  Sense strand starting at position 243 of SEQ ID NO: 587984
gccuuaucugcccaguacu

SEQ ID NO: 833311 - RNA, 19 nt, Artificial Sequence
  Description of Artificial Sequence: Synthetic oligonucleotide
  Antisense strand to SEQ ID NO: 833310
aguacugggcagauaaggc

SEQ ID NO: 833312 - RNA, 19 nt, Artificial Sequence
  Description of Artificial Sequence: Synthetic oligonucleotide
  Sense strand starting at position 476 of SEQ ID NO: 587984
cauuguagugaugagguua

SEQ ID NO: 833313 - RNA, 19 nt, Artificial Sequence
  Description of Artificial Sequence: Synthetic oligonucleotide
  Antisense strand to SEQ ID NO: 833312
uaaccucaucacuacaaug

SEQ ID NO: 833314 - RNA, 19 nt, Artificial Sequence
  Description of Artificial Sequence: Synthetic oligonucleotide
  Sense strand starting at position 487 of SEQ ID NO: 587984
ugagguuagacccgaaugu

SEQ ID NO: 833315 - RNA, 19 nt, Artificial Sequence
  Description of Artificial Sequence: Synthetic oligonucleotide
  Antisense strand to SEQ ID NO: 833314
acauucgggucuaaccuca

SEQ ID NO: 833316 - RNA, 19 nt, Artificial Sequence
  Description of Artificial Sequence: Synthetic oligonucleotide
  Sense strand starting at position 488 of SEQ ID NO: 587984
gagguuagacccgaauguu

SEQ ID NO: 833317 - RNA, 19 nt, Artificial Sequence
  Description of Artificial Sequence: Synthetic oligonucleotide
  Antisense strand to SEQ ID NO: 833316
aacauucgggucuaaccuc

SEQ ID NO: 833318 - RNA, 19 nt, Artificial Sequence
  Description of Artificial Sequence: Synthetic oligonucleotide
  Sense strand starting at position 491 of SEQ ID NO: 587984
guuagacccgaauguuaca

SEQ ID NO: 833319 - RNA, 19 nt, Artificial Sequence
  Description of Artificial Sequence: Synthetic oligonucleotide
  Antisense strand to SEQ ID NO: 833318
uguaacauucgggucuaac

SEQ ID NO: 833320 - RNA, 19 nt, Artificial Sequence
  Description of Artificial Sequence: Synthetic oligonucleotide
  Sense strand starting at position 588 of SEQ ID NO: 587984
aguauuugcuaccucuuga

SEQ ID NO: 833321 - RNA, 19 nt, Artificial Sequence
  Description of Artificial Sequence: Synthetic oligonucleotide
  Antisense strand to SEQ ID NO: 833320
ucaagagguagcaaauacu

SEQ ID NO: 833322 - RNA, 19 nt, Artificial Sequence
  Description of Artificial Sequence: Synthetic oligonucleotide
  Sense strand starting at position 737 of SEQ ID NO: 587984
gaccguuccacagagguga

SEQ ID NO: 833323 - RNA, 19 nt, Artificial Sequence
  Description of Artificial Sequence: Synthetic oligonucleotide
  Antisense strand to SEQ ID NO: 833322
ucaccucuguggaacgguc

SEQ ID NO: 833324 - RNA, 19 nt, Artificial Sequence
  Description of Artificial Sequence: Synthetic oligonucleotide
  Sense strand starting at position 915 of SEQ ID NO: 587984
ccaggcucacuagaaaguu

SEQ ID NO: 833325 - RNA, 19 nt, Artificial Sequence
  Description of Artificial Sequence: Synthetic oligonucleotide
  Antisense strand to SEQ ID NO: 833324
aacuuucuagugagccugg

SEQ ID NO: 833326 - RNA, 19 nt, Artificial Sequence
  Description of Artificial Sequence: Synthetic oligonucleotide
  Sense strand starting at position 923 of SEQ ID NO: 587984
acuagaaaguuuccauuag

SEQ ID NO: 833327 - RNA, 19 nt, Artificial Sequence
  Description of Artificial Sequence: Synthetic oligonucleotide
  Antisense strand to SEQ ID NO: 833326
cuaauggaaacuuucuagu

SEQ ID NO: 833328 - RNA, 19 nt, Artificial Sequence
  Description of Artificial Sequence: Synthetic oligonucleotide
  Sense strand starting at position 951 of SEQ ID NO: 587984
agcauauuccuggguguga

SEQ ID NO: 833329 - RNA, 19 nt, Artificial Sequence
  Description of Artificial Sequence: Synthetic oligonucleotide
  Antisense strand to SEQ ID NO: 833328
ucacacccaggaauaugcu

SEQ ID NO: 833330 - RNA, 19 nt, Artificial Sequence
  Description of Artificial Sequence: Synthetic oligonucleotide
  Sense strand starting at position 952 of SEQ ID NO: 587984
gcauauuccugggugugau

SEQ ID NO: 833331 - RNA, 19 nt, Artificial Sequence
  Description of Artificial Sequence: Synthetic oligonucleotide
  Antisense strand to SEQ ID NO: 833330
aucacacccaggaauaugc

SEQ ID NO: 833332 - RNA, 19 nt, Artificial Sequence
  Description of Artificial Sequence: Synthetic oligonucleotide
  Sense strand starting at position 953 of SEQ ID NO: 587984
cauauuccugggugugaua

SEQ ID NO: 833333 - RNA, 19 nt, Artificial Sequence
  Description of Artificial Sequence: Synthetic oligonucleotide
  Antisense strand to SEQ ID NO: 833332
uaucacacccaggaauaug

SEQ ID NO: 833334 - RNA, 19 nt, Artificial Sequence
  Description of Artificial Sequence: Synthetic oligonucleotide
  Sense strand starting at position 966 of SEQ ID NO: 587984
gugauaugccaucauguuc

SEQ ID NO: 833335 - RNA, 19 nt, Artificial Sequence
  Description of Artificial Sequence: Synthetic oligonucleotide
  Antisense strand to SEQ ID NO: 833334
gaacaugauggcauaucac

SEQ ID NO: 833336 - RNA, 19 nt, Artificial Sequence
  Description of Artificial Sequence: Synthetic oligonucleotide
  Sense strand starting at position 1160 of SEQ ID NO: 587984
ggcccuuaaguagacuauu

SEQ ID NO: 833337 - RNA, 19 nt, Artificial Sequence
  Description of Artificial Sequence: Synthetic oligonucleotide
  Antisense strand to SEQ ID NO: 833336
aauagucuacuuaagggcc

SEQ ID NO: 833338 - RNA, 19 nt, Artificial Sequence
  Description of Artificial Sequence: Synthetic oligonucleotide
  Sense strand starting at position 1232 of SEQ ID NO: 587984
gggagcuuauggcuuuaga

SEQ ID NO: 833339 - RNA, 19 nt, Artificial Sequence
  Description of Artificial Sequence: Synthetic oligonucleotide
  Antisense strand to SEQ ID NO: 833338
ucuaaagccauaagcuccc

SEQ ID NO: 833340 - RNA, 19 nt, Artificial Sequence
  Description of Artificial Sequence: Synthetic oligonucleotide
  Sense strand starting at position 1281 of SEQ ID NO: 587984
gcaaaccugagguguuaca

SEQ ID NO: 833341 - RNA, 19 nt, Artificial Sequence
  Description of Artificial Sequence: Synthetic oligonucleotide
  Antisense strand to SEQ ID NO: 833340
uguaacaccucagguuugc

SEQ ID NO: 833342 - RNA, 19 nt, Artificial Sequence
  Description of Artificial Sequence: Synthetic oligonucleotide
  Sense strand starting at position 2281 of SEQ ID NO: 587984
gcgcuucugcgacucugaa

SEQ ID NO: 833343 - RNA, 19 nt, Artificial Sequence
  Description of Artificial Sequence: Synthetic oligonucleotide
  Antisense strand to SEQ ID NO: 833342
uucagagucgcagaagcgc

SEQ ID NO: 833344 - RNA, 19 nt, Artificial Sequence
  Description of Artificial Sequence: Synthetic oligonucleotide
  Sense strand starting at position 2602 of SEQ ID NO: 587984
gagggagcucuguguacaa

SEQ ID NO: 833345 - RNA, 19 nt, Artificial Sequence
  Description of Artificial Sequence: Synthetic oligonucleotide
  Antisense strand to SEQ ID NO: 833344
uuguacacagagcucccuc

SEQ ID NO: 833346 - RNA, 19 nt, Artificial Sequence
  Description of Artificial Sequence: Synthetic oligonucleotide
  Sense strand starting at position 3112 of SEQ ID NO: 587984
cuguauguugcagagagau

SEQ ID NO: 833347 - RNA, 19 nt, Artificial Sequence
  Description of Artificial Sequence: Synthetic oligonucleotide
  Antisense strand to SEQ ID NO: 833346
aucucucugcaacauacag

SEQ ID NO: 833348 - RNA, 19 nt, Artificial Sequence
  Description of Artificial Sequence: Synthetic oligonucleotide
  Sense strand starting at position 3114 of SEQ ID NO: 587984
guauguugcagagagauga

SEQ ID NO: 833349 - RNA, 19 nt, Artificial Sequence
  Description of Artificial Sequence: Synthetic oligonucleotide
  Antisense strand to SEQ ID NO: 833348
ucaucucucugcaacauac

SEQ ID NO: 833350 - RNA, 19 nt, Artificial Sequence
  Description of Artificial Sequence: Synthetic oligonucleotide
  Sense strand starting at position 3124 of SEQ ID NO: 587984
gagagaugauggcaccagu

SEQ ID NO: 833351 - RNA, 19 nt, Artificial Sequence
  Description of Artificial Sequence: Synthetic oligonucleotide
  Antisense strand to SEQ ID NO: 833350
acuggugccaucaucucuc

SEQ ID NO: 833352 - RNA, 19 nt, Artificial Sequence
  Description of Artificial Sequence: Synthetic oligonucleotide
  Sense strand starting at position 3238 of SEQ ID NO: 587984
gucugauaauuaguagggu

SEQ ID NO: 833353 - RNA, 19 nt, Artificial Sequence
  Description of Artificial Sequence: Synthetic oligonucleotide
  Antisense strand to SEQ ID NO: 833352
acccuacuaauuaucagac

SEQ ID NO: 833354 - RNA, 19 nt, Artificial Sequence
  Description of Artificial Sequence: Synthetic oligonucleotide
  Sense strand starting at position 3244 of SEQ ID NO: 587984
uaauuaguaggguguggaa

SEQ ID NO: 833355 - RNA, 19 nt, Artificial Sequence
  Description of Artificial Sequence: Synthetic oligonucleotide
  Antisense strand to SEQ ID NO: 833354
uuccacacccuacuaauua

SEQ ID NO: 833356 - RNA, 19 nt, Artificial Sequence
  Description of Artificial Sequence: Synthetic oligonucleotide
  Sense strand starting at position 3246 of SEQ ID NO: 587984
auuaguaggguguggaaau

SEQ ID NO: 833357 - RNA, 19 nt, Artificial Sequence
  Description of Artificial Sequence: Synthetic oligonucleotide
  Antisense strand to SEQ ID NO: 833356
auuuccacacccuacuaau

SEQ ID NO: 833358 - RNA, 19 nt, Artificial Sequence
  Description of Artificial Sequence: Synthetic oligonucleotide
  Sense strand starting at position 3263 of SEQ ID NO: 587984
augagaaugagcgaguuga

SEQ ID NO: 833359 - RNA, 19 nt, Artificial Sequence
  Description of Artificial Sequence: Synthetic oligonucleotide
  Antisense strand to SEQ ID NO: 833358
ucaacucgcucauucucau

SEQ ID NO: 833360 - RNA, 19 nt, Artificial Sequence
  Description of Artificial Sequence: Synthetic oligonucleotide
  Sense strand starting at position 3267 of SEQ ID NO: 587984
gaaugagcgaguugaggau

SEQ ID NO: 833361 - RNA, 19 nt, Artificial Sequence
  Description of Artificial Sequence: Synthetic oligonucleotide
  Antisense strand to SEQ ID NO: 833360
auccucaacucgcucauuc

SEQ ID NO: 833362 - RNA, 19 nt, Artificial Sequence
  Description of Artificial Sequence: Synthetic oligonucleotide
  Sense strand starting at position 3324 of SEQ ID NO: 587984
cgcugucuucuggcccuaa

SEQ ID NO: 833363 - RNA, 19 nt, Artificial Sequence
  Description of Artificial Sequence: Synthetic oligonucleotide
  Antisense strand to SEQ ID NO: 833362
uuagggccagaagacagcg

SEQ ID NO: 833364 - RNA, 19 nt, Artificial Sequence
  Description of Artificial Sequence: Synthetic oligonucleotide
  Sense strand starting at position 3325 of SEQ ID NO: 587984
gcugucuucuggcccuaaa

SEQ ID NO: 833365 - RNA, 19 nt, Artificial Sequence
  Description of Artificial Sequence: Synthetic oligonucleotide
  Antisense strand to SEQ ID NO: 833364
uuuagggccagaagacagc

SEQ ID NO: 833366 - RNA, 19 nt, Artificial Sequence
  Description of Artificial Sequence: Synthetic oligonucleotide
  Sense strand starting at position 3395 of SEQ ID NO: 587984
agaagagguuauuacaaac

SEQ ID NO: 833367 - RNA, 19 nt, Artificial Sequence
  Description of Artificial Sequence: Synthetic oligonucleotide
  Antisense strand to SEQ ID NO: 833366
guuuguaauaaccucuucu

SEQ ID NO: 833368 - RNA, 19 nt, Artificial Sequence
  Description of Artificial Sequence: Synthetic oligonucleotide
  Sense strand starting at position 3531 of SEQ ID NO: 587984
uccuguuguggugaguaau

SEQ ID NO: 833369 - RNA, 19 nt, Artificial Sequence
  Description of Artificial Sequence: Synthetic oligonucleotide
  Antisense strand to SEQ ID NO: 833368
auuacucaccacaacagga

SEQ ID NO: 833370 - RNA, 19 nt, Artificial Sequence
  Description of Artificial Sequence: Synthetic oligonucleotide
  Sense strand starting at position 3532 of SEQ ID NO: 587984
ccuguuguggugaguaaug

SEQ ID NO: 833371 - RNA, 19 nt, Artificial Sequence
  Description of Artificial Sequence: Synthetic oligonucleotide
  Antisense strand to SEQ ID NO: 833370
cauuacucaccacaacagg

SEQ ID NO: 833372 - RNA, 19 nt, Artificial Sequence
  Description of Artificial Sequence: Synthetic oligonucleotide
  Sense strand starting at position 3541 of SEQ ID NO: 587984
gugaguaauggccaggaga

SEQ ID NO: 833373 - RNA, 19 nt, Artificial Sequence
  Description of Artificial Sequence: Synthetic oligonucleotide
  Antisense strand to SEQ ID NO: 833372
ucuccuggccauuacucac

SEQ ID NO: 833374 - RNA, 19 nt, Artificial Sequence
  Description of Artificial Sequence: Synthetic oligonucleotide
  Sense strand starting at position 3702 of SEQ ID NO: 587984
cuaugaaggcagcauagau

SEQ ID NO: 833375 - RNA, 19 nt, Artificial Sequence
  Description of Artificial Sequence: Synthetic oligonucleotide
  Antisense strand to SEQ ID NO: 833374
aucuaugcugccuucauag

SEQ ID NO: 833376 - RNA, 19 nt, Artificial Sequence
  Description of Artificial Sequence: Synthetic oligonucleotide
  Sense strand starting at position 3770 of SEQ ID NO: 587984
ccgcucagucaccgagauu

SEQ ID NO: 833377 - RNA, 19 nt, Artificial Sequence
  Description of Artificial Sequence: Synthetic oligonucleotide
  Antisense strand to SEQ ID NO: 833376
aaucucggugacugagcgg

SEQ ID NO: 833378 - RNA, 19 nt, Artificial Sequence
  Description of Artificial Sequence: Synthetic oligonucleotide
  Sense strand starting at position 3771 of SEQ ID NO: 587984
cgcucagucaccgagauua

SEQ ID NO: 833379 - RNA, 19 nt, Artificial Sequence
  Description of Artificial Sequence: Synthetic oligonucleotide
  Antisense strand to SEQ ID NO: 833378
uaaucucggugacugagcg

SEQ ID NO: 833380 - RNA, 19 nt, Artificial Sequence
  Description of Artificial Sequence: Synthetic oligonucleotide
  Sense strand starting at position 3773 of SEQ ID NO: 587984
cucagucaccgagauuaaa

SEQ ID NO: 833381 - RNA, 19 nt, Artificial Sequence
  Description of Artificial Sequence: Synthetic oligonucleotide
  Antisense strand to SEQ ID NO: 833380
uuuaaucucggugacugag

SEQ ID NO: 833382 - RNA, 19 nt, Artificial Sequence
  Description of Artificial Sequence: Synthetic oligonucleotide
  Sense strand starting at position 3870 of SEQ ID NO: 587984
uugcuugguaaauagauga

SEQ ID NO: 833383 - RNA, 19 nt, Artificial Sequence
  Description of Artificial Sequence: Synthetic oligonucleotide
  Antisense strand to SEQ ID NO: 833382
ucaucuauuuaccaagcaa

SEQ ID NO: 833384 - RNA, 19 nt, Artificial Sequence
  Description of Artificial Sequence: Synthetic oligonucleotide
  Sense strand starting at position 3927 of SEQ ID NO: 587984
augccuagguggucucaga

SEQ ID NO: 833385 - RNA, 19 nt, Artificial Sequence
  Description of Artificial Sequence: Synthetic oligonucleotide
  Antisense strand to SEQ ID NO: 833384
ucugagaccaccuaggcau

SEQ ID NO: 833386 - RNA, 19 nt, Artificial Sequence
  Description of Artificial Sequence: Synthetic oligonucleotide
  Sense strand starting at position 155 of SEQ ID NO: 587985
cacuaagugcccugaagga

SEQ ID NO: 833387 - RNA, 19 nt, Artificial Sequence
  Description of Artificial Sequence: Synthetic oligonucleotide
  Antisense strand to SEQ ID NO: 833386
uccuucagggcacuuagug

SEQ ID NO: 833388 - RNA, 19 nt, Artificial Sequence
  Description of Artificial Sequence: Synthetic oligonucleotide
  Sense strand starting at position 184 of SEQ ID NO: 587985
gacaacgccuucuuagaga

SEQ ID NO: 833389 - RNA, 19 nt, Artificial Sequence
  Description of Artificial Sequence: Synthetic oligonucleotide
  Antisense strand to SEQ ID NO: 833388
ucucuaagaaggcguuguc

SEQ ID NO: 833390 - RNA, 19 nt, Artificial Sequence
  Description of Artificial Sequence: Synthetic oligonucleotide
  Sense strand starting at position 214 of SEQ ID NO: 587985
uggaucaugucggguguga

SEQ ID NO: 833391 - RNA, 19 nt, Artificial Sequence
  Description of Artificial Sequence: Synthetic oligonucleotide
  Antisense strand to SEQ ID NO: 833390
ucacacccgacaugaucca

SEQ ID NO: 833392 - RNA, 19 nt, Artificial Sequence
  Description of Artificial Sequence: Synthetic oligonucleotide
  Sense strand starting at position 216 of SEQ ID NO: 587985
gaucaugucgggugugaga

SEQ ID NO: 833393 - RNA, 19 nt, Artificial Sequence
  Description of Artificial Sequence: Synthetic oligonucleotide
  Antisense strand to SEQ ID NO: 833392
ucucacacccgacaugauc

SEQ ID NO: 833394 - RNA, 19 nt, Artificial Sequence
  Description of Artificial Sequence: Synthetic oligonucleotide
  Sense strand starting at position 218 of SEQ ID NO: 587985
ucaugucgggugugagaaa

SEQ ID NO: 833395 - RNA, 19 nt, Artificial Sequence
  Description of Artificial Sequence: Synthetic oligonucleotide
  Antisense strand to SEQ ID NO: 833394
uuucucacacccgacauga

SEQ ID NO: 833396 - RNA, 19 nt, Artificial Sequence
  Description of Artificial Sequence: Synthetic oligonucleotide
  Sense strand starting at position 238 of SEQ ID NO: 587985
ugggaaaccacguguaucu

SEQ ID NO: 833397 - RNA, 19 nt, Artificial Sequence
  Description of Artificial Sequence: Synthetic oligonucleotide
  Antisense strand to SEQ ID NO: 833396
agauacacgugguuuccca

SEQ ID NO: 833398 - RNA, 19 nt, Artificial Sequence
  Description of Artificial Sequence: Synthetic oligonucleotide
  Sense strand starting at position 245 of SEQ ID NO: 587985
ccacguguaucucggaacu

SEQ ID NO: 833399 - RNA, 19 nt, Artificial Sequence
  Description of Artificial Sequence: Synthetic oligonucleotide
  Antisense strand to SEQ ID NO: 833398
aguuccgagauacacgugg

SEQ ID NO: 833400 - RNA, 19 nt, Artificial Sequence
  Description of Artificial Sequence: Synthetic oligonucleotide
  Sense strand starting at position 247 of SEQ ID NO: 587985
acguguaucucggaacuaa

SEQ ID NO: 833401 - RNA, 19 nt, Artificial Sequence
  Description of Artificial Sequence: Synthetic oligonucleotide
  Antisense strand to SEQ ID NO: 833400
uuaguuccgagauacacgu

SEQ ID NO: 833402 - RNA, 19 nt, Artificial Sequence
  Description of Artificial Sequence: Synthetic oligonucleotide
  Sense strand starting at position 748 of SEQ ID NO: 587985
ugcacauuguagugacauu

SEQ ID NO: 833403 - RNA, 19 nt, Artificial Sequence
  Description of Artificial Sequence: Synthetic oligonucleotide
  Antisense strand to SEQ ID NO: 833402
aaugucacuacaaugugca

SEQ ID NO: 833404 - RNA, 19 nt, Artificial Sequence
  Description of Artificial Sequence: Synthetic oligonucleotide
  Sense strand starting at position 910 of SEQ ID NO: 587985
ugugcacccucggagagau

SEQ ID NO: 833405 - RNA, 19 nt, Artificial Sequence
  Description of Artificial Sequence: Synthetic oligonucleotide
  Antisense strand to SEQ ID NO: 833404
aucucuccgagggugcaca

SEQ ID NO: 833406 - RNA, 19 nt, Artificial Sequence
  Description of Artificial Sequence: Synthetic oligonucleotide
  Sense strand starting at position 923 of SEQ ID NO: 587985
agagaugugccucaaugca

SEQ ID NO: 833407 - RNA, 19 nt, Artificial Sequence
  Description of Artificial Sequence: Synthetic oligonucleotide
  Antisense strand to SEQ ID NO: 833406
ugcauugaggcacaucucu

SEQ ID NO: 833408 - RNA, 19 nt, Artificial Sequence
  Description of Artificial Sequence: Synthetic oligonucleotide
  Sense strand starting at position 1096 of SEQ ID NO: 587985
ugugaauggguaugcugau

SEQ ID NO: 833409 - RNA, 19 nt, Artificial Sequence
  Description of Artificial Sequence: Synthetic oligonucleotide
  Antisense strand to SEQ ID NO: 833408
aucagcauacccauucaca

SEQ ID NO: 833410 - RNA, 19 nt, Artificial Sequence
  Description of Artificial Sequence: Synthetic oligonucleotide
  Sense strand starting at position 1097 of SEQ ID NO: 587985
gugaauggguaugcugaua

SEQ ID NO: 833411 - RNA, 19 nt, Artificial Sequence
  Description of Artificial Sequence: Synthetic oligonucleotide
  Antisense strand to SEQ ID NO: 833410
uaucagcauacccauucac

SEQ ID NO: 833412 - RNA, 19 nt, Artificial Sequence
  Description of Artificial Sequence: Synthetic oligonucleotide
  Sense strand starting at position 1149 of SEQ ID NO: 587985
ggaagcacuaagugaauga

SEQ ID NO: 833413 - RNA, 19 nt, Artificial Sequence
  Description of Artificial Sequence: Synthetic oligonucleotide
  Antisense strand to SEQ ID NO: 833412
ucauucacuuagugcuucc

SEQ ID NO: 833414 - RNA, 19 nt, Artificial Sequence
  Description of Artificial Sequence: Synthetic oligonucleotide
  Sense strand starting at position 1153 of SEQ ID NO: 587985
gcacuaagugaaugaugau

SEQ ID NO: 833415 - RNA, 19 nt, Artificial Sequence
  Description of Artificial Sequence: Synthetic oligonucleotide
  Antisense strand to SEQ ID NO: 833414
aucaucauucacuuagugc

SEQ ID NO: 833416 - RNA, 19 nt, Artificial Sequence
  Description of Artificial Sequence: Synthetic oligonucleotide
  Sense strand starting at position 1156 of SEQ ID NO: 587985
cuaagugaaugaugauaaa

SEQ ID NO: 833417 - RNA, 19 nt, Artificial Sequence
  Description of Artificial Sequence: Synthetic oligonucleotide
  Antisense strand to SEQ ID NO: 833416
uuuaucaucauucacuuag

SEQ ID NO: 833418 - RNA, 19 nt, Artificial Sequence
  Description of Artificial Sequence: Synthetic oligonucleotide
  Sense strand starting at position 1232 of SEQ ID NO: 587985
cucuccagcucuucggaaa

SEQ ID NO: 833419 - RNA, 19 nt, Artificial Sequence
  Description of Artificial Sequence: Synthetic oligonucleotide
  Antisense strand to SEQ ID NO: 833418
uuuccgaagagcuggagag

SEQ ID NO: 833420 - RNA, 19 nt, Artificial Sequence
  Description of Artificial Sequence: Synthetic oligonucleotide
  Sense strand starting at position 1384 of SEQ ID NO: 587985
gcggcuugugccuggugau

SEQ ID NO: 833421 - RNA, 19 nt, Artificial Sequence
  Description of Artificial Sequence: Synthetic oligonucleotide
  Antisense strand to SEQ ID NO: 833420
aucaccaggcacaagccgc

SEQ ID NO: 833422 - RNA, 19 nt, Artificial Sequence
  Description of Artificial Sequence: Synthetic oligonucleotide
  Sense strand starting at position 1387 of SEQ ID NO: 587985
gcuugugccuggugaugua

SEQ ID NO: 833423 - RNA, 19 nt, Artificial Sequence
  Description of Artificial Sequence: Synthetic oligonucleotide
  Antisense strand to SEQ ID NO: 833422
uacaucaccaggcacaagc

SEQ ID NO: 833424 - RNA, 19 nt, Artificial Sequence
  Description of Artificial Sequence: Synthetic oligonucleotide
  Sense strand starting at position 1390 of SEQ ID NO: 587985
ugugccuggugauguagau

SEQ ID NO: 833425 - RNA, 19 nt, Artificial Sequence
  Description of Artificial Sequence: Synthetic oligonucleotide
  Antisense strand to SEQ ID NO: 833424
aucuacaucaccaggcaca

SEQ ID NO: 833426 - RNA, 19 nt, Artificial Sequence
  Description of Artificial Sequence: Synthetic oligonucleotide
  Sense strand starting at position 1394 of SEQ ID NO: 587985
ccuggugauguagauauga

SEQ ID NO: 833427 - RNA, 19 nt, Artificial Sequence
  Description of Artificial Sequence: Synthetic oligonucleotide
  Antisense strand to SEQ ID NO: 833426
ucauaucuacaucaccagg

SEQ ID NO: 833428 - RNA, 19 nt, Artificial Sequence
  Description of Artificial Sequence: Synthetic oligonucleotide
  Sense strand starting at position 1435 of SEQ ID NO: 587985
agaaucgguccuggagaca

SEQ ID NO: 833429 - RNA, 19 nt, Artificial Sequence
  Description of Artificial Sequence: Synthetic oligonucleotide
  Antisense strand to SEQ ID NO: 833428
ugucuccaggaccgauucu

SEQ ID NO: 833430 - RNA, 19 nt, Artificial Sequence
  Description of Artificial Sequence: Synthetic oligonucleotide
  Sense strand starting at position 2507 of SEQ ID NO: 587985
gguggugccucuggacaaa

SEQ ID NO: 833431 - RNA, 19 nt, Artificial Sequence
  Description of Artificial Sequence: Synthetic oligonucleotide
  Antisense strand to SEQ ID NO: 833430
uuuguccagaggcaccacc

SEQ ID NO: 833432 - RNA, 19 nt, Artificial Sequence
  Description of Artificial Sequence: Synthetic oligonucleotide
  Sense strand starting at position 2531 of SEQ ID NO: 587985
caggaaguccugcgaaauc

SEQ ID NO: 833433 - RNA, 19 nt, Artificial Sequence
  Description of Artificial Sequence: Synthetic oligonucleotide
  Antisense strand to SEQ ID NO: 833432
gauuucgcaggacuuccug

SEQ ID NO: 833434 - RNA, 19 nt, Artificial Sequence
  Description of Artificial Sequence: Synthetic oligonucleotide
  Sense strand starting at position 2542 of SEQ ID NO: 587985
gcgaaaucaucccugccaa

SEQ ID NO: 833435 - RNA, 19 nt, Artificial Sequence
  Description of Artificial Sequence: Synthetic oligonucleotide
  Antisense strand to SEQ ID NO: 833434
uuggcagggaugauuucgc

SEQ ID NO: 833436 - RNA, 19 nt, Artificial Sequence
  Description of Artificial Sequence: Synthetic oligonucleotide
  Sense strand starting at position 2543 of SEQ ID NO: 587985
cgaaaucaucccugccaac

SEQ ID NO: 833437 - RNA, 19 nt, Artificial Sequence
  Description of Artificial Sequence: Synthetic oligonucleotide
  Antisense strand to SEQ ID NO: 833436
guuggcagggaugauuucg

SEQ ID NO: 833438 - RNA, 19 nt, Artificial Sequence
  Description of Artificial Sequence: Synthetic oligonucleotide
  Sense strand starting at position 2642 of SEQ ID NO: 587985
gacccugaccaggguuuaa

SEQ ID NO: 833439 - RNA, 19 nt, Artificial Sequence
  Description of Artificial Sequence: Synthetic oligonucleotide
  Antisense strand to SEQ ID NO: 833438
uuaaacccuggucaggguc

SEQ ID NO: 833440 - RNA, 19 nt, Artificial Sequence
  Description of Artificial Sequence: Synthetic oligonucleotide
  Sense strand starting at position 2811 of SEQ ID NO: 587985
gugggaagcagaugaauuc

SEQ ID NO: 833441 - RNA, 19 nt, Artificial Sequence
  Description of Artificial Sequence: Synthetic oligonucleotide
  Antisense strand to SEQ ID NO: 833440
gaauucaucugcuucccac

SEQ ID NO: 833442 - RNA, 19 nt, Artificial Sequence
  Description of Artificial Sequence: Synthetic oligonucleotide
  Sense strand starting at position 2995 of SEQ ID NO: 587985
gcugcaauugcucgcucuu

SEQ ID NO: 833443 - RNA, 19 nt, Artificial Sequence
  Description of Artificial Sequence: Synthetic oligonucleotide
  Antisense strand to SEQ ID NO: 833442
aagagcgagcaauugcagc

SEQ ID NO: 833444 - RNA, 19 nt, Artificial Sequence
  Description of Artificial Sequence: Synthetic oligonucleotide
  Sense strand starting at position 2996 of SEQ ID NO: 587985
cugcaauugcucgcucuua

SEQ ID NO: 833445 - RNA, 19 nt, Artificial Sequence
  Description of Artificial Sequence: Synthetic oligonucleotide
  Antisense strand to SEQ ID NO: 833444
uaagagcgagcaauugcag

SEQ ID NO: 833446 - RNA, 19 nt, Artificial Sequence
  Description of Artificial Sequence: Synthetic oligonucleotide
  Sense strand starting at position 3137 of SEQ ID NO: 587985
gcggaacagugaugcauau

SEQ ID NO: 833447 - RNA, 19 nt, Artificial Sequence
  Description of Artificial Sequence: Synthetic oligonucleotide
  Antisense strand to SEQ ID NO: 833446
auaugcaucacuguuccgc

SEQ ID NO: 833448 - RNA, 19 nt, Artificial Sequence
  Description of Artificial Sequence: Synthetic oligonucleotide
  Sense strand starting at position 3219 of SEQ ID NO: 587985
acggaauccugaggucaau

SEQ ID NO: 833449 - RNA, 19 nt, Artificial Sequence
  Description of Artificial Sequence: Synthetic oligonucleotide
  Antisense strand to SEQ ID NO: 833448
auugaccucaggauuccgu

SEQ ID NO: 833450 - RNA, 19 nt, Artificial Sequence
  Description of Artificial Sequence: Synthetic oligonucleotide
  Sense strand starting at position 3225 of SEQ ID NO: 587985
uccugaggucaauguguuu

SEQ ID NO: 833451 - RNA, 19 nt, Artificial Sequence
  Description of Artificial Sequence: Synthetic oligonucleotide
  Antisense strand to SEQ ID NO: 833450
aaacacauugaccucagga

SEQ ID NO: 833452 - RNA, 19 nt, Artificial Sequence
  Description of Artificial Sequence: Synthetic oligonucleotide
  Sense strand starting at position 3608 of SEQ ID NO: 587985
ggacgcuccugcugaaaug

SEQ ID NO: 833453 - RNA, 19 nt, Artificial Sequence
  Description of Artificial Sequence: Synthetic oligonucleotide
  Antisense strand to SEQ ID NO: 833452
cauuucagcaggagcgucc

SEQ ID NO: 833454 - RNA, 19 nt, Artificial Sequence
  Description of Artificial Sequence: Synthetic oligonucleotide
  Sense strand starting at position 3609 of SEQ ID NO: 587985
gacgcuccugcugaaauga

SEQ ID NO: 833455 - RNA, 19 nt, Artificial Sequence
  Description of Artificial Sequence: Synthetic oligonucleotide
  Antisense strand to SEQ ID NO: 833454
ucauuucagcaggagcguc

SEQ ID NO: 833456 - RNA, 19 nt, Artificial Sequence
  Description of Artificial Sequence: Synthetic oligonucleotide
  Sense strand starting at position 3681 of SEQ ID NO: 587985
ggcucuaacugagcaaaca

SEQ ID NO: 833457 - RNA, 19 nt, Artificial Sequence
  Description of Artificial Sequence: Synthetic oligonucleotide
  Antisense strand to SEQ ID NO: 833456
uguuugcucaguuagagcc

SEQ ID NO: 833458 - RNA, 19 nt, Artificial Sequence
  Description of Artificial Sequence: Synthetic oligonucleotide
  Sense strand starting at position 3752 of SEQ ID NO: 587985
ucuauuugcagguggcaua

SEQ ID NO: 833459 - RNA, 19 nt, Artificial Sequence
  Description of Artificial Sequence: Synthetic oligonucleotide
  Antisense strand to SEQ ID NO: 833458
uaugccaccugcaaauaga

SEQ ID NO: 833460 - RNA, 19 nt, Artificial Sequence
  Description of Artificial Sequence: Synthetic oligonucleotide
  Sense strand starting at position 3763 of SEQ ID NO: 587985
guggcauaaucuuguauau

SEQ ID NO: 833461 - RNA, 19 nt, Artificial Sequence
  Description of Artificial Sequence: Synthetic oligonucleotide
  Antisense strand to SEQ ID NO: 833460
auauacaagauuaugccac

SEQ ID NO: 833462 - RNA, 19 nt, Artificial Sequence
  Description of Artificial Sequence: Synthetic oligonucleotide
  Sense strand starting at position 3765 of SEQ ID NO: 587985
ggcauaaucuuguauauag

SEQ ID NO: 833463 - RNA, 19 nt, Artificial Sequence
  Description of Artificial Sequence: Synthetic oligonucleotide
  Antisense strand to SEQ ID NO: 833462
cuauauacaagauuaugcc

SEQ ID NO: 833464 - RNA, 19 nt, Artificial Sequence
  Description of Artificial Sequence: Synthetic oligonucleotide
  Sense strand starting at position 1 of SEQ ID NO: 587986
gcaauaguauuggugucau

SEQ ID NO: 833465 - RNA, 19 nt, Artificial Sequence
  Description of Artificial Sequence: Synthetic oligonucleotide
  Antisense strand to SEQ ID NO: 833464
augacaccaauacuauugc

SEQ ID NO: 833466 - RNA, 19 nt, Artificial Sequence
  Description of Artificial Sequence: Synthetic oligonucleotide
  Sense strand starting at position 80 of SEQ ID NO: 587986
agaacuaugucaccagcaa

SEQ ID NO: 833467 - RNA, 19 nt, Artificial Sequence
  Description of Artificial Sequence: Synthetic oligonucleotide
  Antisense strand to SEQ ID NO: 833466
uugcuggugacauaguucu

SEQ ID NO: 833468 - RNA, 19 nt, Artificial Sequence
  Description of Artificial Sequence: Synthetic oligonucleotide
  Sense strand starting at position 121 of SEQ ID NO: 587986
acuccuaugcgcuugccaa

SEQ ID NO: 833469 - RNA, 19 nt, Artificial Sequence
  Description of Artificial Sequence: Synthetic oligonucleotide
  Antisense strand to SEQ ID NO: 833468
uuggcaagcgcauaggagu

SEQ ID NO: 833470 - RNA, 19 nt, Artificial Sequence
  Description of Artificial Sequence: Synthetic oligonucleotide
  Sense strand starting at position 197 of SEQ ID NO: 587986
ccuucugccuugcucaaga

SEQ ID NO: 833471 - RNA, 19 nt, Artificial Sequence
  Description of Artificial Sequence: Synthetic oligonucleotide
  Antisense strand to SEQ ID NO: 833470
ucuugagcaaggcagaagg

SEQ ID NO: 833472 - RNA, 19 nt, Artificial Sequence
  Description of Artificial Sequence: Synthetic oligonucleotide
  Sense strand starting at position 259 of SEQ ID NO: 587986
acagcacaguccuuugagu

SEQ ID NO: 833473 - RNA, 19 nt, Artificial Sequence
  Description of Artificial Sequence: Synthetic oligonucleotide
  Antisense strand to SEQ ID NO: 833472
acucaaaggacugugcugu

SEQ ID NO: 833474 - RNA, 19 nt, Artificial Sequence
  Description of Artificial Sequence: Synthetic oligonucleotide
  Sense strand starting at position 345 of SEQ ID NO: 587986
gugugucaacacuguccaa

SEQ ID NO: 833475 - RNA, 19 nt, Artificial Sequence
  Description of Artificial Sequence: Synthetic oligonucleotide
  Antisense strand to SEQ ID NO: 833474
uuggacaguguugacacac

SEQ ID NO: 833476 - RNA, 19 nt, Artificial Sequence
  Description of Artificial Sequence: Synthetic oligonucleotide
  Sense strand starting at position 1120 of SEQ ID NO: 587986
ccggaaccgguuugagaaa

SEQ ID NO: 833477 - RNA, 19 nt, Artificial Sequence
  Description of Artificial Sequence: Synthetic oligonucleotide
  Antisense strand to SEQ ID NO: 833476
uuucucaaaccgguuccgg

SEQ ID NO: 833478 - RNA, 19 nt, Artificial Sequence
  Description of Artificial Sequence: Synthetic oligonucleotide
  Sense strand starting at position 1222 of SEQ ID NO: 587986
uggcaacuaauccggagaa

SEQ ID NO: 833479 - RNA, 19 nt, Artificial Sequence
  Description of Artificial Sequence: Synthetic oligonucleotide
  Antisense strand to SEQ ID NO: 833478
uucuccggauuaguugcca

SEQ ID NO: 833480 - RNA, 19 nt, Artificial Sequence
  Description of Artificial Sequence: Synthetic oligonucleotide
  Sense strand starting at position 1443 of SEQ ID NO: 587986
aggaaagaauccgagcaaa

SEQ ID NO: 833481 - RNA, 19 nt, Artificial Sequence
  Description of Artificial Sequence: Synthetic oligonucleotide
  Antisense strand to SEQ ID NO: 833480
uuugcucggauucuuuccu

SEQ ID NO: 833482 - RNA, 19 nt, Artificial Sequence
  Description of Artificial Sequence: Synthetic oligonucleotide
  Sense strand starting at position 1504 of SEQ ID NO: 587986
ggagcuacuccacaauauu

SEQ ID NO: 833483 - RNA, 19 nt, Artificial Sequence
  Description of Artificial Sequence: Synthetic oligonucleotide
  Antisense strand to SEQ ID NO: 833482
aauauuguggaguagcucc

SEQ ID NO: 833484 - RNA, 19 nt, Artificial Sequence
  Description of Artificial Sequence: Synthetic oligonucleotide
  Sense strand starting at position 1867 of SEQ ID NO: 587986
gugucugggcucaggagua

SEQ ID NO: 833485 - RNA, 19 nt, Artificial Sequence
  Description of Artificial Sequence: Synthetic oligonucleotide
  Antisense strand to SEQ ID NO: 833484
uacuccugagcccagacac

SEQ ID NO: 833486 - RNA, 19 nt, Artificial Sequence
  Description of Artificial Sequence: Synthetic oligonucleotide
  Sense strand starting at position 1911 of SEQ ID NO: 587986
uccguuugugguuuguuua

SEQ ID NO: 833487 - RNA, 19 nt, Artificial Sequence
  Description of Artificial Sequence: Synthetic oligonucleotide
  Antisense strand to SEQ ID NO: 833486
uaaacaaaccacaaacgga

SEQ ID NO: 833488 - RNA, 19 nt, Artificial Sequence
  Description of Artificial Sequence: Synthetic oligonucleotide
  Sense strand starting at position 1914 of SEQ ID NO: 587986
guuugugguuuguuuaaga

SEQ ID NO: 833489 - RNA, 19 nt, Artificial Sequence
  Description of Artificial Sequence: Synthetic oligonucleotide
  Antisense strand to SEQ ID NO: 833488
ucuuaaacaaaccacaaac

SEQ ID NO: 833490 - RNA, 19 nt, Artificial Sequence
  Description of Artificial Sequence: Synthetic oligonucleotide
  Sense strand starting at position 2185 of SEQ ID NO: 587986
uggagauucugaguuguuc

SEQ ID NO: 833491 - RNA, 19 nt, Artificial Sequence
  Description of Artificial Sequence: Synthetic oligonucleotide
  Antisense strand to SEQ ID NO: 833490
gaacaacucagaaucucca

SEQ ID NO: 833492 - RNA, 19 nt, Artificial Sequence
  Description of Artificial Sequence: Synthetic oligonucleotide
  Sense strand starting at position 2187 of SEQ ID NO: 587986
gagauucugaguuguucug

SEQ ID NO: 833493 - RNA, 19 nt, Artificial Sequence
  Description of Artificial Sequence: Synthetic oligonucleotide
  Antisense strand to SEQ ID NO: 833492
cagaacaacucagaaucuc

SEQ ID NO: 833494 - RNA, 19 nt, Artificial Sequence
  Description of Artificial Sequence: Synthetic oligonucleotide
  Sense strand starting at position 2197 of SEQ ID NO: 587986
guuguucugcuuguaguuu

SEQ ID NO: 833495 - RNA, 19 nt, Artificial Sequence
  Description of Artificial Sequence: Synthetic oligonucleotide
  Antisense strand to SEQ ID NO: 833494
aaacuacaagcagaacaac

SEQ ID NO: 833496 - RNA, 19 nt, Artificial Sequence
  Description of Artificial Sequence: Synthetic oligonucleotide
  Sense strand starting at position 2969 of SEQ ID NO: 587986
gacgguuugcgaaggcuga

SEQ ID NO: 833497 - RNA, 19 nt, Artificial Sequence
  Description of Artificial Sequence: Synthetic oligonucleotide
  Antisense strand to SEQ ID NO: 833496
ucagccuucgcaaaccguc

SEQ ID NO: 833498 - RNA, 19 nt, Artificial Sequence
  Description of Artificial Sequence: Synthetic oligonucleotide
  Sense strand starting at position 3020 of SEQ ID NO: 587986
ggugauucgaaguguaaau

SEQ ID NO: 833499 - RNA, 19 nt, Artificial Sequence
  Description of Artificial Sequence: Synthetic oligonucleotide
  Antisense strand to SEQ ID NO: 833498
auuuacacuucgaaucacc

SEQ ID NO: 833500 - RNA, 19 nt, Artificial Sequence
  Description of Artificial Sequence: Synthetic oligonucleotide
  Sense strand starting at position 3078 of SEQ ID NO: 587986
aacauaugaguuugcuugu

SEQ ID NO: 833501 - RNA, 19 nt, Artificial Sequence
  Description of Artificial Sequence: Synthetic oligonucleotide
  Antisense strand to SEQ ID NO: 833500
acaagcaaacucauauguu

SEQ ID NO: 833502 - RNA, 19 nt, Artificial Sequence
  Description of Artificial Sequence: Synthetic oligonucleotide
  Sense strand starting at position 3079 of SEQ ID NO: 587986
acauaugaguuugcuuguu

SEQ ID NO: 833503 - RNA, 19 nt, Artificial Sequence
  Description of Artificial Sequence: Synthetic oligonucleotide
  Antisense strand to SEQ ID NO: 833502
aacaagcaaacucauaugu

SEQ ID NO: 833504 - RNA, 19 nt, Artificial Sequence
  Description of Artificial Sequence: Synthetic oligonucleotide
  Sense strand starting at position 3081 of SEQ ID NO: 587986
auaugaguuugcuuguugu

SEQ ID NO: 833505 - RNA, 19 nt, Artificial Sequence
  Description of Artificial Sequence: Synthetic oligonucleotide
  Antisense strand to SEQ ID NO: 833504
acaacaagcaaacucauau

SEQ ID NO: 833506 - RNA, 19 nt, Artificial Sequence
  Description of Artificial Sequence: Synthetic oligonucleotide
  Sense strand starting at position 3274 of SEQ ID NO: 587986
ccuggagguugagacaauu

SEQ ID NO: 833507 - RNA, 19 nt, Artificial Sequence
  Description of Artificial Sequence: Synthetic oligonucleotide
  Antisense strand to SEQ ID NO: 833506
aauugucucaaccuccagg

SEQ ID NO: 833508 - RNA, 19 nt, Artificial Sequence
  Description of Artificial Sequence: Synthetic oligonucleotide
  Sense strand starting at position 3305 of SEQ ID NO: 587986
gcugccguccaacagauuu

SEQ ID NO: 833509 - RNA, 19 nt, Artificial Sequence
  Description of Artificial Sequence: Synthetic oligonucleotide
  Antisense strand to SEQ ID NO: 833508
aaaucuguuggacggcagc

SEQ ID NO: 833510 - RNA, 19 nt, Artificial Sequence
  Description of Artificial Sequence: Synthetic oligonucleotide
  Sense strand starting at position 3318 of SEQ ID NO: 587986
agauuuaucucugagggca

SEQ ID NO: 833511 - RNA, 19 nt, Artificial Sequence
  Description of Artificial Sequence: Synthetic oligonucleotide
  Antisense strand to SEQ ID NO: 833510
ugcccucagagauaaaucu

SEQ ID NO: 833512 - RNA, 19 nt, Artificial Sequence
  Description of Artificial Sequence: Synthetic oligonucleotide
  Sense strand starting at position 3333 of SEQ ID NO: 587986
ggcaguguccuuggugaga

SEQ ID NO: 833513 - RNA, 19 nt, Artificial Sequence
  Description of Artificial Sequence: Synthetic oligonucleotide
  Antisense strand to SEQ ID NO: 833512
ucucaccaaggacacugcc

SEQ ID NO: 833514 - RNA, 19 nt, Artificial Sequence
  Description of Artificial Sequence: Synthetic oligonucleotide
  Sense strand starting at position 3358 of SEQ ID NO: 587986
aguaggugugggcgacauu

SEQ ID NO: 833515 - RNA, 19 nt, Artificial Sequence
  Description of Artificial Sequence: Synthetic oligonucleotide
  Antisense strand to SEQ ID NO: 833514
aaugucgcccacaccuacu

SEQ ID NO: 833516 - RNA, 19 nt, Artificial Sequence
  Description of Artificial Sequence: Synthetic oligonucleotide
  Sense strand starting at position 3367 of SEQ ID NO: 587986
gggcgacauuguccuccau

SEQ ID NO: 833517 - RNA, 19 nt, Artificial Sequence
  Description of Artificial Sequence: Synthetic oligonucleotide
  Antisense strand to SEQ ID NO: 833516
auggaggacaaugucgccc

SEQ ID NO: 833518 - RNA, 19 nt, Artificial Sequence
  Description of Artificial Sequence: Synthetic oligonucleotide
  Sense strand starting at position 3369 of SEQ ID NO: 587986
gcgacauuguccuccaucu

SEQ ID NO: 833519 - RNA, 19 nt, Artificial Sequence
  Description of Artificial Sequence: Synthetic oligonucleotide
  Antisense strand to SEQ ID NO: 833518
agauggaggacaaugucgc

SEQ ID NO: 833520 - RNA, 19 nt, Artificial Sequence
  Description of Artificial Sequence: Synthetic oligonucleotide
  Sense strand starting at position 3488 of SEQ ID NO: 587986
aggacauguugauugccaa

SEQ ID NO: 833521 - RNA, 19 nt, Artificial Sequence
  Description of Artificial Sequence: Synthetic oligonucleotide
  Antisense strand to SEQ ID NO: 833520
uuggcaaucaacauguccu

SEQ ID NO: 833522 - RNA, 19 nt, Artificial Sequence
  Description of Artificial Sequence: Synthetic oligonucleotide
  Sense strand starting at position 3489 of SEQ ID NO: 587986
ggacauguugauugccaac

SEQ ID NO: 833523 - RNA, 19 nt, Artificial Sequence
  Description of Artificial Sequence: Synthetic oligonucleotide
  Antisense strand to SEQ ID NO: 833522
guuggcaaucaacaugucc

SEQ ID NO: 833524 - RNA, 19 nt, Artificial Sequence
  Description of Artificial Sequence: Synthetic oligonucleotide
  Sense strand starting at position 3516 of SEQ ID NO: 587986
gcagcuuucccauagcugu

SEQ ID NO: 833525 - RNA, 19 nt, Artificial Sequence
  Description of Artificial Sequence: Synthetic oligonucleotide
  Antisense strand to SEQ ID NO: 833524
acagcuaugggaaagcugc

SEQ ID NO: 833526 - RNA, 19 nt, Artificial Sequence
  Description of Artificial Sequence: Synthetic oligonucleotide
  Sense strand starting at position 3531 of SEQ ID NO: 587986
cugucuguucccgugcauu

SEQ ID NO: 833527 - RNA, 19 nt, Artificial Sequence
  Description of Artificial Sequence: Synthetic oligonucleotide
  Antisense strand to SEQ ID NO: 833526
aaugcacgggaacagacag

SEQ ID NO: 833528 - RNA, 19 nt, Artificial Sequence
  Description of Artificial Sequence: Synthetic oligonucleotide
  Sense strand starting at position 3598 of SEQ ID NO: 587986
ugaagacaguauuaaugau

SEQ ID NO: 833529 - RNA, 19 nt, Artificial Sequence
  Description of Artificial Sequence: Synthetic oligonucleotide
  Antisense strand to SEQ ID NO: 833528
aucauuaauacugucuuca

SEQ ID NO: 833530 - RNA, 19 nt, Artificial Sequence
  Description of Artificial Sequence: Synthetic oligonucleotide
  Sense strand starting at position 3619 of SEQ ID NO: 587986
aauuaacauggcugaguga

SEQ ID NO: 833531 - RNA, 19 nt, Artificial Sequence
  Description of Artificial Sequence: Synthetic oligonucleotide
  Antisense strand to SEQ ID NO: 833530
ucacucagccauguuaauu

SEQ ID NO: 833532 - RNA, 19 nt, Artificial Sequence
  Description of Artificial Sequence: Synthetic oligonucleotide
  Sense strand starting at position 3622 of SEQ ID NO: 587986
uaacauggcugagugaauu

SEQ ID NO: 833533 - RNA, 19 nt, Artificial Sequence
  Description of Artificial Sequence: Synthetic oligonucleotide
  Antisense strand to SEQ ID NO: 833532
aauucacucagccauguua

SEQ ID NO: 833534 - RNA, 19 nt, Artificial Sequence
  Description of Artificial Sequence: Synthetic oligonucleotide
  Sense strand starting at position 3628 of SEQ ID NO: 587986
ggcugagugaauugucaau

SEQ ID NO: 833535 - RNA, 19 nt, Artificial Sequence
  Description of Artificial Sequence: Synthetic oligonucleotide
  Antisense strand to SEQ ID NO: 833534
auugacaauucacucagcc

SEQ ID NO: 833536 - RNA, 19 nt, Artificial Sequence
  Description of Artificial Sequence: Synthetic oligonucleotide
  Sense strand starting at position 3634 of SEQ ID NO: 587986
gugaauugucaaugcaagu

SEQ ID NO: 833537 - RNA, 19 nt, Artificial Sequence
  Description of Artificial Sequence: Synthetic oligonucleotide
  Antisense strand to SEQ ID NO: 833536
acuugcauugacaauucac

SEQ ID NO: 833538 - RNA, 19 nt, Artificial Sequence
  Description of Artificial Sequence: Synthetic oligonucleotide
  Sense strand starting at position 3659 of SEQ ID NO: 587986
acuaacucuuuguuaaguu

SEQ ID NO: 833539 - RNA, 19 nt, Artificial Sequence
  Description of Artificial Sequence: Synthetic oligonucleotide
  Antisense strand to SEQ ID NO: 833538
aacuuaacaaagaguuagu

SEQ ID NO: 833540 - RNA, 19 nt, Artificial Sequence
  Description of Artificial Sequence: Synthetic oligonucleotide
  Sense strand starting at position 3779 of SEQ ID NO: 587986
ucacgauugacuuggugga

SEQ ID NO: 833541 - RNA, 19 nt, Artificial Sequence
  Description of Artificial Sequence: Synthetic oligonucleotide
  Antisense strand to SEQ ID NO: 833540
uccaccaagucaaucguga

SEQ ID NO: 833542 - RNA, 19 nt, Artificial Sequence
  Description of Artificial Sequence: Synthetic oligonucleotide
  Sense strand starting at position 3783 of SEQ ID NO: 587986
gauugacuugguggagguu

SEQ ID NO: 833543 - RNA, 19 nt, Artificial Sequence
  Description of Artificial Sequence: Synthetic oligonucleotide
  Antisense strand to SEQ ID NO: 833542
aaccuccaccaagucaauc

SEQ ID NO: 833544 - RNA, 19 nt, Artificial Sequence
  Description of Artificial Sequence: Synthetic oligonucleotide
  Sense strand starting at position 224 of SEQ ID NO: 587987
uguuccacuuaugugaaga

SEQ ID NO: 833545 - RNA, 19 nt, Artificial Sequence
  Description of Artificial Sequence: Synthetic oligonucleotide
  Antisense strand to SEQ ID NO: 833544
ucuucacauaaguggaaca

SEQ ID NO: 833546 - RNA, 19 nt, Artificial Sequence
  Description of Artificial Sequence: Synthetic oligonucleotide
  Sense strand starting at position 229 of SEQ ID NO: 587987
cacuuaugugaagacuguu

SEQ ID NO: 833547 - RNA, 19 nt, Artificial Sequence
  Description of Artificial Sequence: Synthetic oligonucleotide
  Antisense strand to SEQ ID NO: 833546
aacagucuucacauaagug

SEQ ID NO: 833548 - RNA, 19 nt, Artificial Sequence
  Description of Artificial Sequence: Synthetic oligonucleotide
  Sense strand starting at position 324 of SEQ ID NO: 587987
agacaagaguaagugguaa

SEQ ID NO: 833549 - RNA, 19 nt, Artificial Sequence
  Description of Artificial Sequence: Synthetic oligonucleotide
  Antisense strand to SEQ ID NO: 833548
uuaccacuuacucuugucu

SEQ ID NO: 833550 - RNA, 19 nt, Artificial Sequence
  Description of Artificial Sequence: Synthetic oligonucleotide
  Sense strand starting at position 326 of SEQ ID NO: 587987
acaagaguaagugguaauu

SEQ ID NO: 833551 - RNA, 19 nt, Artificial Sequence
  Description of Artificial Sequence: Synthetic oligonucleotide
  Antisense strand to SEQ ID NO: 833550
aauuaccacuuacucuugu

SEQ ID NO: 833552 - RNA, 19 nt, Artificial Sequence
  Description of Artificial Sequence: Synthetic oligonucleotide
  Sense strand starting at position 346 of SEQ ID NO: 587987
auagccugauaaucuugaa

SEQ ID NO: 833553 - RNA, 19 nt, Artificial Sequence
  Description of Artificial Sequence: Synthetic oligonucleotide
  Antisense strand to SEQ ID NO: 833552
uucaagauuaucaggcuau

SEQ ID NO: 833554 - RNA, 19 nt, Artificial Sequence
  Description of Artificial Sequence: Synthetic oligonucleotide
  Sense strand starting at position 425 of SEQ ID NO: 587987
acaagaccuuggucacaga

SEQ ID NO: 833555 - RNA, 19 nt, Artificial Sequence
  Description of Artificial Sequence: Synthetic oligonucleotide
  Antisense strand to SEQ ID NO: 833554
ucugugaccaaggucuugu

SEQ ID NO: 833556 - RNA, 19 nt, Artificial Sequence
  Description of Artificial Sequence: Synthetic oligonucleotide
  Sense strand starting at position 661 of SEQ ID NO: 587987
acuauugugcauugagaaa

SEQ ID NO: 833557 - RNA, 19 nt, Artificial Sequence
  Description of Artificial Sequence: Synthetic oligonucleotide
  Antisense strand to SEQ ID NO: 833556
uuucucaaugcacaauagu

SEQ ID NO: 833558 - RNA, 19 nt, Artificial Sequence
  Description of Artificial Sequence: Synthetic oligonucleotide
  Sense strand starting at position 712 of SEQ ID NO: 587987
gggagucacaguuguaaag

SEQ ID NO: 833559 - RNA, 19 nt, Artificial Sequence
  Description of Artificial Sequence: Synthetic oligonucleotide
  Antisense strand to SEQ ID NO: 833558
cuuuacaacugugacuccc

SEQ ID NO: 833560 - RNA, 19 nt, Artificial Sequence
  Description of Artificial Sequence: Synthetic oligonucleotide
  Sense strand starting at position 762 of SEQ ID NO: 587987
uuaaccuacugagcagaua

SEQ ID NO: 833561 - RNA, 19 nt, Artificial Sequence
  Description of Artificial Sequence: Synthetic oligonucleotide
  Antisense strand to SEQ ID NO: 833560
uaucugcucaguagguuaa

SEQ ID NO: 833562 - RNA, 19 nt, Artificial Sequence
  Description of Artificial Sequence: Synthetic oligonucleotide
  Sense strand starting at position 906 of SEQ ID NO: 587987
ggguuuccuauguguaaga

SEQ ID NO: 833563 - RNA, 19 nt, Artificial Sequence
  Description of Artificial Sequence: Synthetic oligonucleotide
  Antisense strand to SEQ ID NO: 833562
ucuuacacauaggaaaccc

SEQ ID NO: 833564 - RNA, 19 nt, Artificial Sequence
  Description of Artificial Sequence: Synthetic oligonucleotide
  Sense strand starting at position 908 of SEQ ID NO: 587987
guuuccuauguguaagaua

SEQ ID NO: 833565 - RNA, 19 nt, Artificial Sequence
  Description of Artificial Sequence: Synthetic oligonucleotide
  Antisense strand to SEQ ID NO: 833564
uaucuuacacauaggaaac

SEQ ID NO: 833566 - RNA, 19 nt, Artificial Sequence
  Description of Artificial Sequence: Synthetic oligonucleotide
  Sense strand starting at position 1017 of SEQ ID NO: 587987
ucaguaagcgugagcgauc

SEQ ID NO: 833567 - RNA, 19 nt, Artificial Sequence
  Description of Artificial Sequence: Synthetic oligonucleotide
  Antisense strand to SEQ ID NO: 833566
gaucgcucacgcuuacuga

SEQ ID NO: 833568 - RNA, 19 nt, Artificial Sequence
  Description of Artificial Sequence: Synthetic oligonucleotide
  Sense strand starting at position 1024 of SEQ ID NO: 587987
gcgugagcgauccaaagga

SEQ ID NO: 833569 - RNA, 19 nt, Artificial Sequence
  Description of Artificial Sequence: Synthetic oligonucleotide
  Antisense strand to SEQ ID NO: 833568
uccuuuggaucgcucacgc

SEQ ID NO: 833570 - RNA, 19 nt, Artificial Sequence
  Description of Artificial Sequence: Synthetic oligonucleotide
  Sense strand starting at position 1096 of SEQ ID NO: 587987
agcgaagacugaguucaag

SEQ ID NO: 833571 - RNA, 19 nt, Artificial Sequence
  Description of Artificial Sequence: Synthetic oligonucleotide
  Antisense strand to SEQ ID NO: 833570
cuugaacucagucuucgcu

SEQ ID NO: 833572 - RNA, 19 nt, Artificial Sequence
  Description of Artificial Sequence: Synthetic oligonucleotide
  Sense strand starting at position 2099 of SEQ ID NO: 587987
agagguugucaccaacgca

SEQ ID NO: 833573 - RNA, 19 nt, Artificial Sequence
  Description of Artificial Sequence: Synthetic oligonucleotide
  Antisense strand to SEQ ID NO: 833572
ugcguuggugacaaccucu

SEQ ID NO: 833574 - RNA, 19 nt, Artificial Sequence
  Description of Artificial Sequence: Synthetic oligonucleotide
  Sense strand starting at position 2417 of SEQ ID NO: 587987
uuuccugugagaggaacau

SEQ ID NO: 833575 - RNA, 19 nt, Artificial Sequence
  Description of Artificial Sequence: Synthetic oligonucleotide
  Antisense strand to SEQ ID NO: 833574
auguuccucucacaggaaa

SEQ ID NO: 833576 - RNA, 19 nt, Artificial Sequence
  Description of Artificial Sequence: Synthetic oligonucleotide
  Sense strand starting at position 2807 of SEQ ID NO: 587987
cccucuguucuguuugcau

SEQ ID NO: 833577 - RNA, 19 nt, Artificial Sequence
  Description of Artificial Sequence: Synthetic oligonucleotide
  Antisense strand to SEQ ID NO: 833576
augcaaacagaacagaggg

SEQ ID NO: 833578 - RNA, 19 nt, Artificial Sequence
  Description of Artificial Sequence: Synthetic oligonucleotide
  Sense strand starting at position 2858 of SEQ ID NO: 587987
gccaacucaccagguuauu

SEQ ID NO: 833579 - RNA, 19 nt, Artificial Sequence
  Description of Artificial Sequence: Synthetic oligonucleotide
  Antisense strand to SEQ ID NO: 833578
aauaaccuggugaguuggc

SEQ ID NO: 833580 - RNA, 19 nt, Artificial Sequence
  Description of Artificial Sequence: Synthetic oligonucleotide
  Sense strand starting at position 2873 of SEQ ID NO: 587987
uauuuauagugacaagaga

SEQ ID NO: 833581 - RNA, 19 nt, Artificial Sequence
  Description of Artificial Sequence: Synthetic oligonucleotide
  Antisense strand to SEQ ID NO: 833580
ucucuugucacuauaaaua

SEQ ID NO: 833582 - RNA, 19 nt, Artificial Sequence
  Description of Artificial Sequence: Synthetic oligonucleotide
  Sense strand starting at position 2928 of SEQ ID NO: 587987
ggcucugucccacauauag

SEQ ID NO: 833583 - RNA, 19 nt, Artificial Sequence
  Description of Artificial Sequence: Synthetic oligonucleotide
  Antisense strand to SEQ ID NO: 833582
cuauaugugggacagagcc

SEQ ID NO: 833584 - RNA, 19 nt, Artificial Sequence
  Description of Artificial Sequence: Synthetic oligonucleotide
  Sense strand starting at position 2937 of SEQ ID NO: 587987
ccacauauagguggauuaa

SEQ ID NO: 833585 - RNA, 19 nt, Artificial Sequence
  Description of Artificial Sequence: Synthetic oligonucleotide
  Antisense strand to SEQ ID NO: 833584
uuaauccaccuauaugugg

SEQ ID NO: 833586 - RNA, 19 nt, Artificial Sequence
  Description of Artificial Sequence: Synthetic oligonucleotide
  Sense strand starting at position 2948 of SEQ ID NO: 587987
uggauuaacugucuggcaa

SEQ ID NO: 833587 - RNA, 19 nt, Artificial Sequence
  Description of Artificial Sequence: Synthetic oligonucleotide
  Antisense strand to SEQ ID NO: 833586
uugccagacaguuaaucca

SEQ ID NO: 833588 - RNA, 19 nt, Artificial Sequence
  Description of Artificial Sequence: Synthetic oligonucleotide
  Sense strand starting at position 2949 of SEQ ID NO: 587987
ggauuaacugucuggcaaa

SEQ ID NO: 833589 - RNA, 19 nt, Artificial Sequence
  Description of Artificial Sequence: Synthetic oligonucleotide
  Antisense strand to SEQ ID NO: 833588
uuugccagacaguuaaucc

SEQ ID NO: 833590 - RNA, 19 nt, Artificial Sequence
  Description of Artificial Sequence: Synthetic oligonucleotide
  Sense strand starting at position 3003 of SEQ ID NO: 587987
uguggauacuguuuggacu

SEQ ID NO: 833591 - RNA, 19 nt, Artificial Sequence
  Description of Artificial Sequence: Synthetic oligonucleotide
  Antisense strand to SEQ ID NO: 833590
aguccaaacaguauccaca

SEQ ID NO: 833592 - RNA, 19 nt, Artificial Sequence
  Description of Artificial Sequence: Synthetic oligonucleotide
  Sense strand starting at position 3011 of SEQ ID NO: 587987
cuguuuggacugggaugua

SEQ ID NO: 833593 - RNA, 19 nt, Artificial Sequence
  Description of Artificial Sequence: Synthetic oligonucleotide
  Antisense strand to SEQ ID NO: 833592
uacaucccaguccaaacag

SEQ ID NO: 833594 - RNA, 19 nt, Artificial Sequence
  Description of Artificial Sequence: Synthetic oligonucleotide
  Sense strand starting at position 3023 of SEQ ID NO: 587987
ggauguaguucuuugaccu

SEQ ID NO: 833595 - RNA, 19 nt, Artificial Sequence
  Description of Artificial Sequence: Synthetic oligonucleotide
  Antisense strand to SEQ ID NO: 833594
aggucaaagaacuacaucc

SEQ ID NO: 833596 - RNA, 19 nt, Artificial Sequence
  Description of Artificial Sequence: Synthetic oligonucleotide
  Sense strand starting at position 3024 of SEQ ID NO: 587987
gauguaguucuuugaccug

SEQ ID NO: 833597 - RNA, 19 nt, Artificial Sequence
  Description of Artificial Sequence: Synthetic oligonucleotide
  Antisense strand to SEQ ID NO: 833596
caggucaaagaacuacauc

SEQ ID NO: 833598 - RNA, 19 nt, Artificial Sequence
  Description of Artificial Sequence: Synthetic oligonucleotide
  Sense strand starting at position 3255 of SEQ ID NO: 587987
aacuguguucuagauaguc

SEQ ID NO: 833599 - RNA, 19 nt, Artificial Sequence
  Description of Artificial Sequence: Synthetic oligonucleotide
  Antisense strand to SEQ ID NO: 833598
gacuaucuagaacacaguu

SEQ ID NO: 833600 - RNA, 19 nt, Artificial Sequence
  Description of Artificial Sequence: Synthetic oligonucleotide
  Sense strand starting at position 3260 of SEQ ID NO: 587987
uguucuagauagucucaca

SEQ ID NO: 833601 - RNA, 19 nt, Artificial Sequence
  Description of Artificial Sequence: Synthetic oligonucleotide
  Antisense strand to SEQ ID NO: 833600
ugugagacuaucuagaaca

SEQ ID NO: 833602 - RNA, 19 nt, Artificial Sequence
  Description of Artificial Sequence: Synthetic oligonucleotide
  Sense strand starting at position 3280 of SEQ ID NO: 587987
acuugaacaugcuuuggau

SEQ ID NO: 833603 - RNA, 19 nt, Artificial Sequence
  Description of Artificial Sequence: Synthetic oligonucleotide
  Antisense strand to SEQ ID NO: 833602
auccaaagcauguucaagu

SEQ ID NO: 833604 - RNA, 19 nt, Artificial Sequence
  Description of Artificial Sequence: Synthetic oligonucleotide
  Sense strand starting at position 3368 of SEQ ID NO: 587987
ucuuguuucucccuaggaa

SEQ ID NO: 833605 - RNA, 19 nt, Artificial Sequence
  Description of Artificial Sequence: Synthetic oligonucleotide
  Antisense strand to SEQ ID NO: 833604
uuccuagggagaaacaaga

SEQ ID NO: 833606 - RNA, 19 nt, Artificial Sequence
  Description of Artificial Sequence: Synthetic oligonucleotide
  Sense strand starting at position 3369 of SEQ ID NO: 587987
cuuguuucucccuaggaau

SEQ ID NO: 833607 - RNA, 19 nt, Artificial Sequence
  Description of Artificial Sequence: Synthetic oligonucleotide
  Antisense strand to SEQ ID NO: 833606
auuccuagggagaaacaag

SEQ ID NO: 833608 - RNA, 19 nt, Artificial Sequence
  Description of Artificial Sequence: Synthetic oligonucleotide
  Sense strand starting at position 3484 of SEQ ID NO: 587987
ugauaagguuuaucauggu

SEQ ID NO: 833609 - RNA, 19 nt, Artificial Sequence
  Description of Artificial Sequence: Synthetic oligonucleotide
  Antisense strand to SEQ ID NO: 833608
accaugauaaaccuuauca

SEQ ID NO: 833610 - RNA, 19 nt, Artificial Sequence
  Description of Artificial Sequence: Synthetic oligonucleotide
  Sense strand starting at position 3488 of SEQ ID NO: 587987
aagguuuaucaugguuaaa

SEQ ID NO: 833611 - RNA, 19 nt, Artificial Sequence
  Description of Artificial Sequence: Synthetic oligonucleotide
  Antisense strand to SEQ ID NO: 833610
uuuaaccaugauaaaccuu

SEQ ID NO: 833612 - RNA, 19 nt, Artificial Sequence
  Description of Artificial Sequence: Synthetic oligonucleotide
  Sense strand starting at position 3491 of SEQ ID NO: 587987
guuuaucaugguuaaagca

SEQ ID NO: 833613 - RNA, 19 nt, Artificial Sequence
  Description of Artificial Sequence: Synthetic oligonucleotide
  Antisense strand to SEQ ID NO: 833612
ugcuuuaaccaugauaaac

SEQ ID NO: 833614 - RNA, 19 nt, Artificial Sequence
  Description of Artificial Sequence: Synthetic oligonucleotide
  Sense strand starting at position 3499 of SEQ ID NO: 587987
ugguuaaagcaacauguga

SEQ ID NO: 833615 - RNA, 19 nt, Artificial Sequence
  Description of Artificial Sequence: Synthetic oligonucleotide
  Antisense strand to SEQ ID NO: 833614
ucacauguugcuuuaacca

SEQ ID NO: 833616 - RNA, 19 nt, Artificial Sequence
  Description of Artificial Sequence: Synthetic oligonucleotide
  Sense strand starting at position 3514 of SEQ ID NO: 587987
gugaaaucaucaucuuguu

SEQ ID NO: 833617 - RNA, 19 nt, Artificial Sequence
  Description of Artificial Sequence: Synthetic oligonucleotide
  Antisense strand to SEQ ID NO: 833616
aacaagaugaugauuucac

SEQ ID NO: 833618 - RNA, 19 nt, Artificial Sequence
  Description of Artificial Sequence: Synthetic oligonucleotide
  Sense strand starting at position 3519 of SEQ ID NO: 587987
aucaucaucuuguuaugau

SEQ ID NO: 833619 - RNA, 19 nt, Artificial Sequence
  Description of Artificial Sequence: Synthetic oligonucleotide
  Antisense strand to SEQ ID NO: 833618
aucauaacaagaugaugau

SEQ ID NO: 833620 - RNA, 19 nt, Artificial Sequence
  Description of Artificial Sequence: Synthetic oligonucleotide
  Sense strand starting at position 3674 of SEQ ID NO: 587987
aagaauguucuaggacuuc

SEQ ID NO: 833621 - RNA, 19 nt, Artificial Sequence
  Description of Artificial Sequence: Synthetic oligonucleotide
  Antisense strand to SEQ ID NO: 833620
gaaguccuagaacauucuu

SEQ ID NO: 833622 - RNA, 19 nt, Artificial Sequence
  Description of Artificial Sequence: Synthetic oligonucleotide
  Sense strand starting at position 3971 of SEQ ID NO: 587987
cggcauugugaacaaauaa

SEQ ID NO: 833623 - RNA, 19 nt, Artificial Sequence
  Description of Artificial Sequence: Synthetic oligonucleotide
  Antisense strand to SEQ ID NO: 833622
uuauuuguucacaaugccg

SEQ ID NO: 833624 - RNA, 19 nt, Artificial Sequence
  Description of Artificial Sequence: Synthetic oligonucleotide
  Sense strand starting at position 131 of SEQ ID NO: 587988
gugucaaucuuccugggaa

SEQ ID NO: 833625 - RNA, 19 nt, Artificial Sequence
  Description of Artificial Sequence: Synthetic oligonucleotide
  Antisense strand to SEQ ID NO: 833624
uucccaggaagauugacac

SEQ ID NO: 833626 - RNA, 19 nt, Artificial Sequence
  Description of Artificial Sequence: Synthetic oligonucleotide
  Sense strand starting at position 133 of SEQ ID NO: 587988
gucaaucuuccugggaauc

SEQ ID NO: 833627 - RNA, 19 nt, Artificial Sequence
  Description of Artificial Sequence: Synthetic oligonucleotide
  Antisense strand to SEQ ID NO: 833626
gauucccaggaagauugac

SEQ ID NO: 833628 - RNA, 19 nt, Artificial Sequence
  Description of Artificial Sequence: Synthetic oligonucleotide
  Sense strand starting at position 134 of SEQ ID NO: 587988
ucaaucuuccugggaaucu

SEQ ID NO: 833629 - RNA, 19 nt, Artificial Sequence
  Description of Artificial Sequence: Synthetic oligonucleotide
  Antisense strand to SEQ ID NO: 833628
agauucccaggaagauuga

SEQ ID NO: 833630 - RNA, 19 nt, Artificial Sequence
  Description of Artificial Sequence: Synthetic oligonucleotide
  Sense strand starting at position 395 of SEQ ID NO: 587988
caaggucagcacuggagaa

SEQ ID NO: 833631 - RNA, 19 nt, Artificial Sequence
  Description of Artificial Sequence: Synthetic oligonucleotide
  Antisense strand to SEQ ID NO: 833630
uucuccagugcugaccuug

SEQ ID NO: 833632 - RNA, 19 nt, Artificial Sequence
  Description of Artificial Sequence: Synthetic oligonucleotide
  Sense strand starting at position 407 of SEQ ID NO: 587988
uggagaaaguuuccuggca

SEQ ID NO: 833633 - RNA, 19 nt, Artificial Sequence
  Description of Artificial Sequence: Synthetic oligonucleotide
  Antisense strand to SEQ ID NO: 833632
ugccaggaaacuuucucca

SEQ ID NO: 833634 - RNA, 19 nt, Artificial Sequence
  Description of Artificial Sequence: Synthetic oligonucleotide
  Sense strand starting at position 408 of SEQ ID NO: 587988
ggagaaaguuuccuggcaa

SEQ ID NO: 833635 - RNA, 19 nt, Artificial Sequence
  Description of Artificial Sequence: Synthetic oligonucleotide
  Antisense strand to SEQ ID NO: 833634
uugccaggaaacuuucucc

SEQ ID NO: 833636 - RNA, 19 nt, Artificial Sequence
  Description of Artificial Sequence: Synthetic oligonucleotide
  Sense strand starting at position 515 of SEQ ID NO: 587988
uuuccuguuccuggaaauc

SEQ ID NO: 833637 - RNA, 19 nt, Artificial Sequence
  Description of Artificial Sequence: Synthetic oligonucleotide
  Antisense strand to SEQ ID NO: 833636
gauuuccaggaacaggaaa

SEQ ID NO: 833638 - RNA, 19 nt, Artificial Sequence
  Description of Artificial Sequence: Synthetic oligonucleotide
  Sense strand starting at position 759 of SEQ ID NO: 587988
cugauugcuuauuuggcaa

SEQ ID NO: 833639 - RNA, 19 nt, Artificial Sequence
  Description of Artificial Sequence: Synthetic oligonucleotide
  Antisense strand to SEQ ID NO: 833638
uugccaaauaagcaaucag

SEQ ID NO: 833640 - RNA, 19 nt, Artificial Sequence
  Description of Artificial Sequence: Synthetic oligonucleotide
  Sense strand starting at position 805 of SEQ ID NO: 587988
cccagcauuggcuaugaga

SEQ ID NO: 833641 - RNA, 19 nt, Artificial Sequence
  Description of Artificial Sequence: Synthetic oligonucleotide
  Antisense strand to SEQ ID NO: 833640
ucucauagccaaugcuggg

SEQ ID NO: 833642 - RNA, 19 nt, Artificial Sequence
  Description of Artificial Sequence: Synthetic oligonucleotide
  Sense strand starting at position 807 of SEQ ID NO: 587988
cagcauuggcuaugagaug

SEQ ID NO: 833643 - RNA, 19 nt, Artificial Sequence
  Description of Artificial Sequence: Synthetic oligonucleotide
  Antisense strand to SEQ ID NO: 833642
caucucauagccaaugcug

SEQ ID NO: 833644 - RNA, 19 nt, Artificial Sequence
  Description of Artificial Sequence: Synthetic oligonucleotide
  Sense strand starting at position 948 of SEQ ID NO: 587988
aggaauaacugcuucuaaa

SEQ ID NO: 833645 - RNA, 19 nt, Artificial Sequence
  Description of Artificial Sequence: Synthetic oligonucleotide
  Antisense strand to SEQ ID NO: 833644
uuuagaagcaguuauuccu

SEQ ID NO: 833646 - RNA, 19 nt, Artificial Sequence
  Description of Artificial Sequence: Synthetic oligonucleotide
  Sense strand starting at position 1014 of SEQ ID NO: 587988
cuagcaauuucuguaaguu

SEQ ID NO: 833647 - RNA, 19 nt, Artificial Sequence
  Description of Artificial Sequence: Synthetic oligonucleotide
  Antisense strand to SEQ ID NO: 833646
aacuuacagaaauugcuag

SEQ ID NO: 833648 - RNA, 19 nt, Artificial Sequence
  Description of Artificial Sequence: Synthetic oligonucleotide
  Sense strand starting at position 1057 of SEQ ID NO: 587988
ccaggacagucauuagcaa

SEQ ID NO: 833649 - RNA, 19 nt, Artificial Sequence
  Description of Artificial Sequence: Synthetic oligonucleotide
  Antisense strand to SEQ ID NO: 833648
uugcuaaugacuguccugg

SEQ ID NO: 833650 - RNA, 19 nt, Artificial Sequence
  Description of Artificial Sequence: Synthetic oligonucleotide
  Sense strand starting at position 1086 of SEQ ID NO: 587988
ugagucagugcuuaaccau

SEQ ID NO: 833651 - RNA, 19 nt, Artificial Sequence
  Description of Artificial Sequence: Synthetic oligonucleotide
  Antisense strand to SEQ ID NO: 833650
augguuaagcacugacuca

SEQ ID NO: 833652 - RNA, 19 nt, Artificial Sequence
  Description of Artificial Sequence: Synthetic oligonucleotide
  Sense strand starting at position 1213 of SEQ ID NO: 587988
caaagugagcuuggaauau

SEQ ID NO: 833653 - RNA, 19 nt, Artificial Sequence
  Description of Artificial Sequence: Synthetic oligonucleotide
  Antisense strand to SEQ ID NO: 833652
auauuccaagcucacuuug

SEQ ID NO: 833654 - RNA, 19 nt, Artificial Sequence
  Description of Artificial Sequence: Synthetic oligonucleotide
  Sense strand starting at position 1383 of SEQ ID NO: 587988
ccugguacaucuuuacacu

SEQ ID NO: 833655 - RNA, 19 nt, Artificial Sequence
  Description of Artificial Sequence: Synthetic oligonucleotide
  Antisense strand to SEQ ID NO: 833654
aguguaaagauguaccagg

SEQ ID NO: 833656 - RNA, 19 nt, Artificial Sequence
  Description of Artificial Sequence: Synthetic oligonucleotide
  Sense strand starting at position 1384 of SEQ ID NO: 587988
cugguacaucuuuacacua

SEQ ID NO: 833657 - RNA, 19 nt, Artificial Sequence
  Description of Artificial Sequence: Synthetic oligonucleotide
  Antisense strand to SEQ ID NO: 833656
uaguguaaagauguaccag

SEQ ID NO: 833658 - RNA, 19 nt, Artificial Sequence
  Description of Artificial Sequence: Synthetic oligonucleotide
  Sense strand starting at position 1426 of SEQ ID NO: 587988
ccaaguuaugucuagguuu

SEQ ID NO: 833659 - RNA, 19 nt, Artificial Sequence
  Description of Artificial Sequence: Synthetic oligonucleotide
  Antisense strand to SEQ ID NO: 833658
aaaccuagacauaacuugg

SEQ ID NO: 833660 - RNA, 19 nt, Artificial Sequence
  Description of Artificial Sequence: Synthetic oligonucleotide
  Sense strand starting at position 1480 of SEQ ID NO: 587988
uuaccaaauuucugaagag

SEQ ID NO: 833661 - RNA, 19 nt, Artificial Sequence
  Description of Artificial Sequence: Synthetic oligonucleotide
  Antisense strand to SEQ ID NO: 833660
cucuucagaaauuugguaa

SEQ ID NO: 833662 - RNA, 19 nt, Artificial Sequence
  Description of Artificial Sequence: Synthetic oligonucleotide
  Sense strand starting at position 1500 of SEQ ID NO: 587988
aggugauccggguggagau

SEQ ID NO: 833663 - RNA, 19 nt, Artificial Sequence
  Description of Artificial Sequence: Synthetic oligonucleotide
  Antisense strand to SEQ ID NO: 833662
aucuccacccggaucaccu

SEQ ID NO: 833664 - RNA, 19 nt, Artificial Sequence
  Description of Artificial Sequence: Synthetic oligonucleotide
  Sense strand starting at position 1583 of SEQ ID NO: 587988
acugguaguccucauauaa

SEQ ID NO: 833665 - RNA, 19 nt, Artificial Sequence
  Description of Artificial Sequence: Synthetic oligonucleotide
  Antisense strand to SEQ ID NO: 833664
uuauaugaggacuaccagu

SEQ ID NO: 833666 - RNA, 19 nt, Artificial Sequence
  Description of Artificial Sequence: Synthetic oligonucleotide
  Sense strand starting at position 1649 of SEQ ID NO: 587988
gucuaaucgccugauauca

SEQ ID NO: 833667 - RNA, 19 nt, Artificial Sequence
  Description of Artificial Sequence: Synthetic oligonucleotide
  Antisense strand to SEQ ID NO: 833666
ugauaucaggcgauuagac

SEQ ID NO: 833668 - RNA, 19 nt, Artificial Sequence
  Description of Artificial Sequence: Synthetic oligonucleotide
  Sense strand starting at position 1804 of SEQ ID NO: 587988
uccugauaagcagaccuau

SEQ ID NO: 833669 - RNA, 19 nt, Artificial Sequence
  Description of Artificial Sequence: Synthetic oligonucleotide
  Antisense strand to SEQ ID NO: 833668
auaggucugcuuaucagga

SEQ ID NO: 833670 - RNA, 19 nt, Artificial Sequence
  Description of Artificial Sequence: Synthetic oligonucleotide
  Sense strand starting at position 2082 of SEQ ID NO: 587988
cuuaaucuucuaggacaag

SEQ ID NO: 833671 - RNA, 19 nt, Artificial Sequence
  Description of Artificial Sequence: Synthetic oligonucleotide
  Antisense strand to SEQ ID NO: 833670
cuuguccuagaagauuaag

SEQ ID NO: 833672 - RNA, 19 nt, Artificial Sequence
  Description of Artificial Sequence: Synthetic oligonucleotide
  Sense strand starting at position 2130 of SEQ ID NO: 587988
aaugccaucugagugauac

SEQ ID NO: 833673 - RNA, 19 nt, Artificial Sequence
  Description of Artificial Sequence: Synthetic oligonucleotide
  Antisense strand to SEQ ID NO: 833672
guaucacucagauggcauu

SEQ ID NO: 833674 - RNA, 19 nt, Artificial Sequence
  Description of Artificial Sequence: Synthetic oligonucleotide
  Sense strand starting at position 2131 of SEQ ID NO: 587988
augccaucugagugauacu

SEQ ID NO: 833675 - RNA, 19 nt, Artificial Sequence
  Description of Artificial Sequence: Synthetic oligonucleotide
  Antisense strand to SEQ ID NO: 833674
aguaucacucagauggcau

SEQ ID NO: 833676 - RNA, 19 nt, Artificial Sequence
  Description of Artificial Sequence: Synthetic oligonucleotide
  Sense strand starting at position 2242 of SEQ ID NO: 587988
gcuguauuuccaugauuac

SEQ ID NO: 833677 - RNA, 19 nt, Artificial Sequence
  Description of Artificial Sequence: Synthetic oligonucleotide
  Antisense strand to SEQ ID NO: 833676
guaaucauggaaauacagc

SEQ ID NO: 833678 - RNA, 19 nt, Artificial Sequence
  Description of Artificial Sequence: Synthetic oligonucleotide
  Sense strand starting at position 2454 of SEQ ID NO: 587988
ucugcagagcugcaauaaa

SEQ ID NO: 833679 - RNA, 19 nt, Artificial Sequence
  Description of Artificial Sequence: Synthetic oligonucleotide
  Antisense strand to SEQ ID NO: 833678
uuuauugcagcucugcaga

SEQ ID NO: 833680 - RNA, 19 nt, Artificial Sequence
  Description of Artificial Sequence: Synthetic oligonucleotide
  Sense strand starting at position 2670 of SEQ ID NO: 587988
ugggcaaugaucuguuacu

SEQ ID NO: 833681 - RNA, 19 nt, Artificial Sequence
  Description of Artificial Sequence: Synthetic oligonucleotide
  Antisense strand to SEQ ID NO: 833680
aguaacagaucauugccca

SEQ ID NO: 833682 - RNA, 19 nt, Artificial Sequence
  Description of Artificial Sequence: Synthetic oligonucleotide
  Sense strand starting at position 2671 of SEQ ID NO: 587988
gggcaaugaucuguuacug

SEQ ID NO: 833683 - RNA, 19 nt, Artificial Sequence
  Description of Artificial Sequence: Synthetic oligonucleotide
  Antisense strand to SEQ ID NO: 833682
caguaacagaucauugccc

SEQ ID NO: 833684 - RNA, 19 nt, Artificial Sequence
  Description of Artificial Sequence: Synthetic oligonucleotide
  Sense strand starting at position 2903 of SEQ ID NO: 587988
agaauauaugcuggaugau

SEQ ID NO: 833685 - RNA, 19 nt, Artificial Sequence
  Description of Artificial Sequence: Synthetic oligonucleotide
  Antisense strand to SEQ ID NO: 833684
aucauccagcauauauucu

SEQ ID NO: 833686 - RNA, 19 nt, Artificial Sequence
  Description of Artificial Sequence: Synthetic oligonucleotide
  Sense strand starting at position 2949 of SEQ ID NO: 587988
guuguacucuauuuacagu

SEQ ID NO: 833687 - RNA, 19 nt, Artificial Sequence
  Description of Artificial Sequence: Synthetic oligonucleotide
  Antisense strand to SEQ ID NO: 833686
acuguaaauagaguacaac

SEQ ID NO: 833688 - RNA, 19 nt, Artificial Sequence
  Description of Artificial Sequence: Synthetic oligonucleotide
  Sense strand starting at position 3453 of SEQ ID NO: 587988
ugaaauccauggccucuua

SEQ ID NO: 833689 - RNA, 19 nt, Artificial Sequence
  Description of Artificial Sequence: Synthetic oligonucleotide
  Antisense strand to SEQ ID NO: 833688
uaagaggccauggauuuca

SEQ ID NO: 833690 - RNA, 19 nt, Artificial Sequence
  Description of Artificial Sequence: Synthetic oligonucleotide
  Sense strand starting at position 3478 of SEQ ID NO: 587988
caggaaaggcauuggaguu

SEQ ID NO: 833691 - RNA, 19 nt, Artificial Sequence
  Description of Artificial Sequence: Synthetic oligonucleotide
  Antisense strand to SEQ ID NO: 833690
aacuccaaugccuuuccug

SEQ ID NO: 833692 - RNA, 19 nt, Artificial Sequence
  Description of Artificial Sequence: Synthetic oligonucleotide
  Sense strand starting at position 3491 of SEQ ID NO: 587988
ggaguuaugucccuagacu

SEQ ID NO: 833693 - RNA, 19 nt, Artificial Sequence
  Description of Artificial Sequence: Synthetic oligonucleotide
  Antisense strand to SEQ ID NO: 833692
agucuagggacauaacucc

SEQ ID NO: 833694 - RNA, 19 nt, Artificial Sequence
  Description of Artificial Sequence: Synthetic oligonucleotide
  Sense strand starting at position 3492 of SEQ ID NO: 587988
gaguuaugucccuagacua

SEQ ID NO: 833695 - RNA, 19 nt, Artificial Sequence
  Description of Artificial Sequence: Synthetic oligonucleotide
  Antisense strand to SEQ ID NO: 833694
uagucuagggacauaacuc

SEQ ID NO: 833696 - RNA, 19 nt, Artificial Sequence
  Description of Artificial Sequence: Synthetic oligonucleotide
  Sense strand starting at position 3551 of SEQ ID NO: 587988
cucugcauuuggucacuaa

SEQ ID NO: 833697 - RNA, 19 nt, Artificial Sequence
  Description of Artificial Sequence: Synthetic oligonucleotide
  Antisense strand to SEQ ID NO: 833696
uuagugaccaaaugcagag

SEQ ID NO: 833698 - RNA, 19 nt, Artificial Sequence
  Description of Artificial Sequence: Synthetic oligonucleotide
  Sense strand starting at position 3626 of SEQ ID NO: 587988
aaggcauuagaagguaauu

SEQ ID NO: 833699 - RNA, 19 nt, Artificial Sequence
  Description of Artificial Sequence: Synthetic oligonucleotide
  Antisense strand to SEQ ID NO: 833698
aauuaccuucuaaugccuu

SEQ ID NO: 833700 - RNA, 19 nt, Artificial Sequence
  Description of Artificial Sequence: Synthetic oligonucleotide
  Sense strand starting at position 3743 of SEQ ID NO: 587988
cacgcucuaccugaaaugu

SEQ ID NO: 833701 - RNA, 19 nt, Artificial Sequence
  Description of Artificial Sequence: Synthetic oligonucleotide
  Antisense strand to SEQ ID NO: 833700
acauuucagguagagcgug

SEQ ID NO: 833702 - RNA, 19 nt, Artificial Sequence
  Description of Artificial Sequence: Synthetic oligonucleotide
  Sense strand starting at position 3961 of SEQ ID NO: 587988
gcuccuaaucaauguggaa

SEQ ID NO: 833703 - RNA, 19 nt, Artificial Sequence
  Description of Artificial Sequence: Synthetic oligonucleotide
  Antisense strand to SEQ ID NO: 833702
uuccacauugauuaggagc

SEQ ID NO: 833704 - RNA, 19 nt, Artificial Sequence
  Description of Artificial Sequence: Synthetic oligonucleotide
  Sense strand starting at position 1 of SEQ ID NO: 587989
gucaaacgacaguguguaa

SEQ ID NO: 833705 - RNA, 19 nt, Artificial Sequence
  Description of Artificial Sequence: Synthetic oligonucleotide
  Antisense strand to SEQ ID NO: 833704
uuacacacugucguuugac

SEQ ID NO: 833706 - RNA, 19 nt, Artificial Sequence
  Description of Artificial Sequence: Synthetic oligonucleotide
  Sense strand starting at position 13 of SEQ ID NO: 587989
uguguaacagauuaguaua

SEQ ID NO: 833707 - RNA, 19 nt, Artificial Sequence
  Description of Artificial Sequence: Synthetic oligonucleotide
  Antisense strand to SEQ ID NO: 833706
uauacuaaucuguuacaca

SEQ ID NO: 833708 - RNA, 19 nt, Artificial Sequence
  Description of Artificial Sequence: Synthetic oligonucleotide
  Sense strand starting at position 127 of SEQ ID NO: 587989
cccuaagccggcuaacaau

SEQ ID NO: 833709 - RNA, 19 nt, Artificial Sequence
  Description of Artificial Sequence: Synthetic oligonucleotide
  Antisense strand to SEQ ID NO: 833708
auuguuagccggcuuaggg

SEQ ID NO: 833710 - RNA, 19 nt, Artificial Sequence
  Description of Artificial Sequence: Synthetic oligonucleotide
  Sense strand starting at position 159 of SEQ ID NO: 587989
gugacaagcuuucuaacuc

SEQ ID NO: 833711 - RNA, 19 nt, Artificial Sequence
  Description of Artificial Sequence: Synthetic oligonucleotide
  Antisense strand to SEQ ID NO: 833710
gaguuagaaagcuugucac

SEQ ID NO: 833712 - RNA, 19 nt, Artificial Sequence
  Description of Artificial Sequence: Synthetic oligonucleotide
  Sense strand starting at position 186 of SEQ ID NO: 587989
gcaugucuacuauguacaa

SEQ ID NO: 833713 - RNA, 19 nt, Artificial Sequence
  Description of Artificial Sequence: Synthetic oligonucleotide
  Antisense strand to SEQ ID NO: 833712
uuguacauaguagacaugc

SEQ ID NO: 833714 - RNA, 19 nt, Artificial Sequence
  Description of Artificial Sequence: Synthetic oligonucleotide
  Sense strand starting at position 197 of SEQ ID NO: 587989
auguacaagucaucauguu

SEQ ID NO: 833715 - RNA, 19 nt, Artificial Sequence
  Description of Artificial Sequence: Synthetic oligonucleotide
  Antisense strand to SEQ ID NO: 833714
aacaugaugacuuguacau

SEQ ID NO: 833716 - RNA, 19 nt, Artificial Sequence
  Description of Artificial Sequence: Synthetic oligonucleotide
  Sense strand starting at position 198 of SEQ ID NO: 587989
uguacaagucaucauguua

SEQ ID NO: 833717 - RNA, 19 nt, Artificial Sequence
  Description of Artificial Sequence: Synthetic oligonucleotide
  Antisense strand to SEQ ID NO: 833716
uaacaugaugacuuguaca

SEQ ID NO: 833718 - RNA, 19 nt, Artificial Sequence
  Description of Artificial Sequence: Synthetic oligonucleotide
  Sense strand starting at position 297 of SEQ ID NO: 587989
auacguuauacagguaaug

SEQ ID NO: 833719 - RNA, 19 nt, Artificial Sequence
  Description of Artificial Sequence: Synthetic oligonucleotide
  Antisense strand to SEQ ID NO: 833718
cauuaccuguauaacguau

SEQ ID NO: 833720 - RNA, 19 nt, Artificial Sequence
  Description of Artificial Sequence: Synthetic oligonucleotide
  Sense strand starting at position 299 of SEQ ID NO: 587989
acguuauacagguaaugua

SEQ ID NO: 833721 - RNA, 19 nt, Artificial Sequence
  Description of Artificial Sequence: Synthetic oligonucleotide
  Antisense strand to SEQ ID NO: 833720
uacauuaccuguauaacgu

SEQ ID NO: 833722 - RNA, 19 nt, Artificial Sequence
  Description of Artificial Sequence: Synthetic oligonucleotide
  Sense strand starting at position 352 of SEQ ID NO: 587989
gcauauuguauguaauguu

SEQ ID NO: 833723 - RNA, 19 nt, Artificial Sequence
  Description of Artificial Sequence: Synthetic oligonucleotide
  Antisense strand to SEQ ID NO: 833722
aacauuacauacaauaugc

SEQ ID NO: 833724 - RNA, 19 nt, Artificial Sequence
  Description of Artificial Sequence: Synthetic oligonucleotide
  Sense strand starting at position 368 of SEQ ID NO: 587989
guuuguaagcacuuguguu

SEQ ID NO: 833725 - RNA, 19 nt, Artificial Sequence
  Description of Artificial Sequence: Synthetic oligonucleotide
  Antisense strand to SEQ ID NO: 833724
aacacaagugcuuacaaac

SEQ ID NO: 833726 - RNA, 19 nt, Artificial Sequence
  Description of Artificial Sequence: Synthetic oligonucleotide
  Sense strand starting at position 380 of SEQ ID NO: 587989
uuguguuaagucugaaauu

SEQ ID NO: 833727 - RNA, 19 nt, Artificial Sequence
  Description of Artificial Sequence: Synthetic oligonucleotide
  Antisense strand to SEQ ID NO: 833726
aauuucagacuuaacacaa

SEQ ID NO: 833728 - RNA, 19 nt, Artificial Sequence
  Description of Artificial Sequence: Synthetic oligonucleotide
  Sense strand starting at position 389 of SEQ ID NO: 587989
gucugaaauuaaucugaag

SEQ ID NO: 833729 - RNA, 19 nt, Artificial Sequence
  Description of Artificial Sequence: Synthetic oligonucleotide
  Antisense strand to SEQ ID NO: 833728
cuucagauuaauuucagac

SEQ ID NO: 833730 - RNA, 19 nt, Artificial Sequence
  Description of Artificial Sequence: Synthetic oligonucleotide
  Sense strand starting at position 809 of SEQ ID NO: 587989
uuuggaauaugguuugauu

SEQ ID NO: 833731 - RNA, 19 nt, Artificial Sequence
  Description of Artificial Sequence: Synthetic oligonucleotide
  Antisense strand to SEQ ID NO: 833730
aaucaaaccauauuccaaa

SEQ ID NO: 833732 - RNA, 19 nt, Artificial Sequence
  Description of Artificial Sequence: Synthetic oligonucleotide
  Sense strand starting at position 909 of SEQ ID NO: 587989
agugauuccuauccucacu

SEQ ID NO: 833733 - RNA, 19 nt, Artificial Sequence
  Description of Artificial Sequence: Synthetic oligonucleotide
  Antisense strand to SEQ ID NO: 833732
agugaggauaggaaucacu

SEQ ID NO: 833734 - RNA, 19 nt, Artificial Sequence
  Description of Artificial Sequence: Synthetic oligonucleotide
  Sense strand starting at position 1013 of SEQ ID NO: 587989
ggcuuaugaucagcagaga

SEQ ID NO: 833735 - RNA, 19 nt, Artificial Sequence
  Description of Artificial Sequence: Synthetic oligonucleotide
  Antisense strand to SEQ ID NO: 833734
ucucugcugaucauaagcc

SEQ ID NO: 833736 - RNA, 19 nt, Artificial Sequence
  Description of Artificial Sequence: Synthetic oligonucleotide
  Sense strand starting at position 1014 of SEQ ID NO: 587989
gcuuaugaucagcagagau

SEQ ID NO: 833737 - RNA, 19 nt, Artificial Sequence
  Description of Artificial Sequence: Synthetic oligonucleotide
  Antisense strand to SEQ ID NO: 833736
aucucugcugaucauaagc

SEQ ID NO: 833738 - RNA, 19 nt, Artificial Sequence
  Description of Artificial Sequence: Synthetic oligonucleotide
  Sense strand starting at position 1027 of SEQ ID NO: 587989
agagaucucuaggaugaaa

SEQ ID NO: 833739 - RNA, 19 nt, Artificial Sequence
  Description of Artificial Sequence: Synthetic oligonucleotide
  Antisense strand to SEQ ID NO: 833738
uuucauccuagagaucucu

SEQ ID NO: 833740 - RNA, 19 nt, Artificial Sequence
  Description of Artificial Sequence: Synthetic oligonucleotide
  Sense strand starting at position 1125 of SEQ ID NO: 587989
cacccaacgcuaugguaaa

SEQ ID NO: 833741 - RNA, 19 nt, Artificial Sequence
  Description of Artificial Sequence: Synthetic oligonucleotide
  Antisense strand to SEQ ID NO: 833740
uuuaccauagcguugggug

SEQ ID NO: 833742 - RNA, 19 nt, Artificial Sequence
  Description of Artificial Sequence: Synthetic oligonucleotide
  Sense strand starting at position 1138 of SEQ ID NO: 587989
gguaaauuagacugaaggu

SEQ ID NO: 833743 - RNA, 19 nt, Artificial Sequence
  Description of Artificial Sequence: Synthetic oligonucleotide
  Antisense strand to SEQ ID NO: 833742
accuucagucuaauuuacc

SEQ ID NO: 833744 - RNA, 19 nt, Artificial Sequence
  Description of Artificial Sequence: Synthetic oligonucleotide
  Sense strand starting at position 1233 of SEQ ID NO: 587989
ggguuucuaguaugauaaa

SEQ ID NO: 833745 - RNA, 19 nt, Artificial Sequence
  Description of Artificial Sequence: Synthetic oligonucleotide
  Antisense strand to SEQ ID NO: 833744
uuuaucauacuagaaaccc

SEQ ID NO: 833746 - RNA, 19 nt, Artificial Sequence
  Description of Artificial Sequence: Synthetic oligonucleotide
  Sense strand starting at position 1320 of SEQ ID NO: 587989
ggcagaaagucuuaauuua

SEQ ID NO: 833747 - RNA, 19 nt, Artificial Sequence
  Description of Artificial Sequence: Synthetic oligonucleotide
  Antisense strand to SEQ ID NO: 833746
uaaauuaagacuuucugcc

SEQ ID NO: 833748 - RNA, 19 nt, Artificial Sequence
  Description of Artificial Sequence: Synthetic oligonucleotide
  Sense strand starting at position 1328 of SEQ ID NO: 587989
gucuuaauuuaugagggag

SEQ ID NO: 833749 - RNA, 19 nt, Artificial Sequence
  Description of Artificial Sequence: Synthetic oligonucleotide
  Antisense strand to SEQ ID NO: 833748
cucccucauaaauuaagac

SEQ ID NO: 833750 - RNA, 19 nt, Artificial Sequence
  Description of Artificial Sequence: Synthetic oligonucleotide
  Sense strand starting at position 2390 of SEQ ID NO: 587989
ugcaaagaaucucuugaaa

SEQ ID NO: 833751 - RNA, 19 nt, Artificial Sequence
  Description of Artificial Sequence: Synthetic oligonucleotide
  Antisense strand to SEQ ID NO: 833750
uuucaagagauucuuugca

SEQ ID NO: 833752 - RNA, 19 nt, Artificial Sequence
  Description of Artificial Sequence: Synthetic oligonucleotide
  Sense strand starting at position 2538 of SEQ ID NO: 587989
aaauuaaccgaaggucaga

SEQ ID NO: 833753 - RNA, 19 nt, Artificial Sequence
  Description of Artificial Sequence: Synthetic oligonucleotide
  Antisense strand to SEQ ID NO: 833752
ucugaccuucgguuaauuu

SEQ ID NO: 833754 - RNA, 19 nt, Artificial Sequence
  Description of Artificial Sequence: Synthetic oligonucleotide
  Sense strand starting at position 2593 of SEQ ID NO: 587989
gcgucauguccguugauca

SEQ ID NO: 833755 - RNA, 19 nt, Artificial Sequence
  Description of Artificial Sequence: Synthetic oligonucleotide
  Antisense strand to SEQ ID NO: 833754
ugaucaacggacaugacgc

SEQ ID NO: 833756 - RNA, 19 nt, Artificial Sequence
  Description of Artificial Sequence: Synthetic oligonucleotide
  Sense strand starting at position 2603 of SEQ ID NO: 587989
cguugaucaaaggacaguu

SEQ ID NO: 833757 - RNA, 19 nt, Artificial Sequence
  Description of Artificial Sequence: Synthetic oligonucleotide
  Antisense strand to SEQ ID NO: 833756
aacuguccuuugaucaacg

SEQ ID NO: 833758 - RNA, 19 nt, Artificial Sequence
  Description of Artificial Sequence: Synthetic oligonucleotide
  Sense strand starting at position 2690 of SEQ ID NO: 587989
aguuacucgucuuccauga

SEQ ID NO: 833759 - RNA, 19 nt, Artificial Sequence
  Description of Artificial Sequence: Synthetic oligonucleotide
  Antisense strand to SEQ ID NO: 833758
ucauggaagacgaguaacu

SEQ ID NO: 833760 - RNA, 19 nt, Artificial Sequence
  Description of Artificial Sequence: Synthetic oligonucleotide
  Sense strand starting at position 2695 of SEQ ID NO: 587989
cucgucuuccaugaaguca

SEQ ID NO: 833761 - RNA, 19 nt, Artificial Sequence
  Description of Artificial Sequence: Synthetic oligonucleotide
  Antisense strand to SEQ ID NO: 833760
ugacuucauggaagacgag

SEQ ID NO: 833762 - RNA, 19 nt, Artificial Sequence
  Description of Artificial Sequence: Synthetic oligonucleotide
  Sense strand starting at position 2750 of SEQ ID NO: 587989
ucaauuucguaagcuaucu

SEQ ID NO: 833763 - RNA, 19 nt, Artificial Sequence
  Description of Artificial Sequence: Synthetic oligonucleotide
  Antisense strand to SEQ ID NO: 833762
agauagcuuacgaaauuga

SEQ ID NO: 833764 - RNA, 19 nt, Artificial Sequence
  Description of Artificial Sequence: Synthetic oligonucleotide
  Sense strand starting at position 2809 of SEQ ID NO: 587989
gacguuuaggccgaagcau

SEQ ID NO: 833765 - RNA, 19 nt, Artificial Sequence
  Description of Artificial Sequence: Synthetic oligonucleotide
  Antisense strand to SEQ ID NO: 833764
augcuucggccuaaacguc

SEQ ID NO: 833766 - RNA, 19 nt, Artificial Sequence
  Description of Artificial Sequence: Synthetic oligonucleotide
  Sense strand starting at position 2881 of SEQ ID NO: 587989
acuuguaguuaccugaagu

SEQ ID NO: 833767 - RNA, 19 nt, Artificial Sequence
  Description of Artificial Sequence: Synthetic oligonucleotide
  Antisense strand to SEQ ID NO: 833766
acuucagguaacuacaagu

SEQ ID NO: 833768 - RNA, 19 nt, Artificial Sequence
  Description of Artificial Sequence: Synthetic oligonucleotide
  Sense strand starting at position 2882 of SEQ ID NO: 587989
cuuguaguuaccugaagug

SEQ ID NO: 833769 - RNA, 19 nt, Artificial Sequence
  Description of Artificial Sequence: Synthetic oligonucleotide
  Antisense strand to SEQ ID NO: 833768
cacuucagguaacuacaag

SEQ ID NO: 833770 - RNA, 19 nt, Artificial Sequence
  Description of Artificial Sequence: Synthetic oligonucleotide
  Sense strand starting at position 2896 of SEQ ID NO: 587989
aagugacuguaugcuauua

SEQ ID NO: 833771 - RNA, 19 nt, Artificial Sequence
  Description of Artificial Sequence: Synthetic oligonucleotide
  Antisense strand to SEQ ID NO: 833770
uaauagcauacagucacuu

SEQ ID NO: 833772 - RNA, 19 nt, Artificial Sequence
  Description of Artificial Sequence: Synthetic oligonucleotide
  Sense strand starting at position 2924 of SEQ ID NO: 587989
uacugucgugcuguaugua

SEQ ID NO: 833773 - RNA, 19 nt, Artificial Sequence
  Description of Artificial Sequence: Synthetic oligonucleotide
  Antisense strand to SEQ ID NO: 833772
uacauacagcacgacagua

SEQ ID NO: 833774 - RNA, 19 nt, Artificial Sequence
  Description of Artificial Sequence: Synthetic oligonucleotide
  Sense strand starting at position 3012 of SEQ ID NO: 587989
ugugaucucuucuauuuga

SEQ ID NO: 833775 - RNA, 19 nt, Artificial Sequence
  Description of Artificial Sequence: Synthetic oligonucleotide
  Antisense strand to SEQ ID NO: 833774
ucaaauagaagagaucaca

SEQ ID NO: 833776 - RNA, 19 nt, Artificial Sequence
  Description of Artificial Sequence: Synthetic oligonucleotide
  Sense strand starting at position 3131 of SEQ ID NO: 587989
acaagcuccaggugguaaa

SEQ ID NO: 833777 - RNA, 19 nt, Artificial Sequence
  Description of Artificial Sequence: Synthetic oligonucleotide
  Antisense strand to SEQ ID NO: 833776
uuuaccaccuggagcuugu

SEQ ID NO: 833778 - RNA, 19 nt, Artificial Sequence
  Description of Artificial Sequence: Synthetic oligonucleotide
  Sense strand starting at position 3617 of SEQ ID NO: 587989
guuccaggugggcaaagau

SEQ ID NO: 833779 - RNA, 19 nt, Artificial Sequence
  Description of Artificial Sequence: Synthetic oligonucleotide
  Antisense strand to SEQ ID NO: 833778
aucuuugcccaccuggaac
